(19) United States
(12) Patent Application Publication
(10) Pub. No.: US 2020/0216857 A1
(43) Pub. Date: Jul. 9, 2020

(54) MATERIALS AND METHODS FOR TREATMENT OF SPINOCEREBELLAR ATAXIA TYPE 2 (SCA2) AND OTHER SPINOCEREBELLAR ATAXIA TYPE 2 PROTEIN (ATXN2) GENE RELATED CONDITIONS OR DISORDERS

(71) Applicant: CRISPR THERAPEUTICS AG, Zug (CH)

(72) Inventors: Ante Sven LUNDBERG, Cambridge, MA (US); Samarth KULKARNI, Cambridge, MA (US); Lawrence KLEIN, Cambridge, MA (US); Hari Kumar PADMANABHAN, Cambridge, MA (US)

(73) Assignee: CRISPR THERAPEUTICS AG, Zug (CH)

(21) Appl. No.: 16/487,409

(22) PCT Filed: Feb. 21, 2018
(86) PCT No.: PCT/IB2018/051075

§ 371 Date: Aug. 20, 2019

Related U.S. Application Data
(60) Provisional application No. 62/461,853, filed on Feb. 22, 2017.

(51) Int. Cl. C12N 15/85; C12N 9/22; A61K 35/30; A61K 38/17; C12N 15/113

(52) U.S. Cl. CPC C12N 15/85; C12N 9/22; A61K 35/30; A61K 48/00; C12N 15/113; C12N 2800/80; C12N 2320/30; A61K 38/17

(57) ABSTRACT

The present disclosure provides materials and methods for treating a patient with one or more conditions or disorders associated with ATXN2 whether ex vivo or in vivo. For example, the present disclosure provides materials and methods for treating a patient with Spinocerebellar ataxia type 1 (SCA2). Also provided are materials and methods for editing a ATXN2 gene in a cell by genome editing. The present disclosure also provides materials and methods for altering the contiguous genomic sequence of a ATXN2 gene in a cell. In addition, the present disclosure provides one or more gRNAs for editing a ATXN2 gene. Also provided are therapeutics comprising at least one or more gRNAs for editing a ATXN2 gene. In addition, the present disclosure provides therapeutics for treating patients with a ATXN2 related condition or disorder.

### RELATED APPLICATIONS

[0001] This application claims the benefit of U.S. Provisional Application No. 62/461,853 filed Feb. 22, 2017, which is incorporated herein in its entirety by reference.

### FIELD

[0002] The present disclosure provides materials and methods for treating a patient with Spinocerebellar Ataxia Type 2 (SCA2) and other Spinocerebellar Ataxia Type 2 protein (ATXN2) gene related conditions or disorders, both ex vivo and in vivo.

### INCORPORATION BY REFERENCE OF SEQUENCE LISTING

[0003] This application contains a Sequence Listing in computer readable form (filename: 170136PCT Sequence Listing_Original: 44,128,198 bytes—ASCII text file, created Jan. 20, 2018), which is incorporated herein by reference in its entirety and forms part of the disclosure.

### BACKGROUND

[0004] Genome engineering refers to the strategies and techniques for the targeted, specific modification of the genetic information (genome) of living organisms. Genome engineering is a very active field of research because of the wide range of possible applications, particularly in the areas of human health. For example, genome engineering can be used to alter (e.g., correct or knock-out) a gene carrying a harmful mutation, or to explore the function of a gene. Early technologies developed to insert a transgene into a living cell were often limited by the random nature of the insertion of the new sequence into the genome. Random insertions into the genome may result in disrupting normal regulation of neighboring genes leading to severe unwanted effects. Furthermore, random integration technologies offer little reproducibility, as there is no guarantee that the sequence would be inserted at the same place in two different cells. Recent genome engineering strategies, such as zinc finger nucleases (ZFNs), transcription activator like effector nucleases (TALENs), homing endonucleases (HEs) and MegaTALs, enable a specific area of the DNA to be modified, thereby increasing the precision of the alteration compared to early technologies. These newer platforms offer a much larger degree of reproducibility, but still have their limitations.

[0005] Despite efforts from researchers and medical professionals worldwide who have been trying to address genetic disorders, there still remains a critical need for developing safe and effective treatments for ATXN2 related disorders and conditions.

### SUMMARY

[0006] Provided herein are cellular, ex vivo and in vivo methods for creating permanent changes to the genome by deleting and/or correcting the trinucleotide repeat expansion or replacing one or more nucleotide bases, or one or more exons and/or introns within or near the Spinocerebellar Ataxia Type 2 Protein (ATXN2) gene, or otherwise introducing insertions, deletions or mutations of at least one nucleotide within or near the ATXN2 gene or other DNA sequences that encode regulatory elements of the ATXN2 gene, by genome editing. Such methods can reduce or eliminate the expression or function of aberrant ATXN2 gene products and/or restore the wild-type ATXN2 protein activity, which can be used to treat an ATXN2 related condition or disorder such as Spinocerebellar ataxia 2 (SCA2). Also provided herein are components and compositions, and vectors for performing such methods.

[0007] Provided herein is a method for editing an ATXN2 gene in a cell by genome editing. The method can comprise introducing into the cell one or more deoxyribonucleic acid (DNA) endonucleases to effect one or more single-strand breaks (SSBs) or double-strand breaks (DSBs) within or near the ATXN2 gene. The one or more SSBs or DSBs can result in a permanent deletion in the expanded trinucleotide repeat or replacement of one or more nucleotide bases, or one or more exons and/or introns within or near the ATXN2 gene, thereby restoring the ATXN2 gene function.

[0008] Also provided herein is a method for editing an ATXN2 gene in a cell by genome editing. The method can comprise introducing into the cell one or more DNA endonucleases to effect one or more SSBs or DSBs within or near the ATXN2 gene or ATXN2 regulatory elements. The one or more SSBs or DSBs can result in one or more permanent insertion, deletion or mutation of at least one nucleotide within or near the ATXN2 gene and/or a permanent deletion in the expanded trinucleotide repeat, thereby reducing or eliminating the expression or function of aberrant ATXN2 gene products.

[0009] Also provided herein is an ex vivo method for treating a patient having an ATXN2 related condition or disorder. The method can comprise: editing a patient specific induced pluripotent stem cell (iPSC) within or near a ATXN2 gene or other DNA sequences that encode regulatory elements of the ATXN2 gene; differentiating the edited iPSC into a neuron or glial cell of the Central Nervous System (CNS); and implanting the neuron or glial cell of the CNS into the patient.

[0010] The editing step can comprise introducing into the iPSC one or more DNA endonucleases to effect one or more SSBs or DSBs within or near the ATXN2 gene that results in a permanent deletion of the expanded trinucleotide repeat or replacement of one or more nucleotide bases, or one or more exons and/or introns within or near the ATXN2 gene and/or a permanent deletion in the expanded trinucleotide repeat, thereby restoring the ATXN2 gene function.

[0011] Another editing step can comprise introducing into the iPSC one or more DNA endonucleases to effect one or more SSBs or DSBs within or near the ATXN2 gene or ATXN2 regulatory elements that results in one or more permanent insertion, deletion or mutation of at least one nucleotide within or near the ATXN2 gene, thereby reducing or eliminating the expression or function of aberrant ATXN2 gene products.

[0012] The method can further comprise creating the iPSC. The creating step can comprise isolating a somatic cell from the patient; and introducing a set of pluripotency-associated genes into the somatic cell to induce the somatic cell to become the iPSC. The somatic cell can be a fibroblast. The set of pluripotency-associated genes can be one or more of the genes selected from the group consisting of: OCT4, SOX2, KLF4, Lin28, NANOG and cMYC.

[0013] Also provided herein is an ex vivo method for treating a patient having an ATXN2 related condition or disorder. The method can comprise: editing a mesenchymal stem cell within or near an ATXN2 gene or other DNA sequences that encode regulatory elements of the ATXN2 gene; differentiating the edited mesenchymal stem cell into a neuron or glial cell of the CNS; and implanting the neuron or glial cell of the CNS into the patient.

[0014] The editing step can comprise: introducing into the mesenchymal stem cell one or more DNA endonucleases to effect one or more SSBs or DSBs within or near the ATXN2 gene that results in a permanent deletion of the expanded trinucleotide repeat or replacement of one or more nucleotide bases, or one or more exons and/or introns within or near the ATXN2 gene, thereby restoring the ATXN2 gene function.

[0015] Another editing step can comprise: introducing into the mesenchymal stem cell one or more DNA endonucleases to effect one or more SSBs or DSBs within or near the ATXN2 gene or ATXN2 regulatory elements that results in one or more permanent insertion, deletion or mutation of at least one nucleotide within or near the ATXN2 gene and/or a permanent deletion in the expanded trinucleotide repeat, thereby reducing or eliminating the expression or function of aberrant ATXN2 gene products.

[0016] The method can further comprise isolating the mesenchymal stem cell from the patient, wherein the mesenchymal stem cell is isolated from the patient's bone marrow or peripheral blood. The isolating step can comprise aspiration of bone marrow and isolation of mesenchymal stem cells using density gradient centrifugation media.

[0017] Also provided herein is an in vivo method for treating a patient with an ATXN2 related disorder. The method can comprise editing the ATXN2 gene in a cell of the patient.

[0018] The editing step can comprise introducing into the cell one or more DNA endonucleases to effect one or more SSBs or DSBs within or near the ATXN2 gene that results in a permanent deletion of the expanded trinucleotide repeat or replacement of one or more nucleotide bases, or one or more exons and/or introns within or near the ATXN2 gene, thereby restoring the ATXN2 gene function.

[0019] Another editing step can comprise: introducing into the cell one or more DNA endonucleases to effect one or more SSBs or DSBs within or near the ATXN2 gene or ATXN2 regulatory elements that results in one or more permanent insertion, deletion or mutation of at least one nucleotide within or near the ATXN2 gene and/or a permanent deletion in the expanded trinucleotide repeat, thereby reducing or eliminating the expression or function of aberrant ATXN2 gene products.

[0020] The cell can be a cell of the CNS. The cell of the CNS can be a neuron. The cell of the CNS can be a glial cell.

[0021] The one or more DNA endonuclease can be delivered to the cell of the CNS via any administration route selected from the group consisting of intraparenchymal, intravenous, intra-arterial, intracerebroventricular, intracisternal, intrathecal, intracranial or intraperitoneal routes.

[0022] The ATXN2 related condition or disorder can be Spinocerebellar ataxia type 2 (SCA2). The ATXN2 related condition or disorder can be amyotrophic lateral sclerosis (ALS).

[0023] Also provided herein is a method of altering the contiguous genomic sequence of an ATXN2 gene in a cell. The method can comprise: contacting the cell with one or more DNA endonuclease to effect one or more SSBs or DSBs.

[0024] The alteration of the contiguous genomic sequence can occur in one or more exons of the ATXN2 gene. The alteration of the contiguous genomic sequence can occur in exon 1 of the ATXN2 gene.

[0025] The one or more DNA endonuclease can be selected from any of those sequences in SEQ ID NOs: 1-620 and variants having at least 90% homology to any of those sequences disclosed in SEQ ID NOs: 1-620. The one or more DNA endonuclease can be one or more protein or polypeptide. The one or more protein or polypeptide can be flanked at the N-terminus, the C-terminus, or both the N-terminus and C-terminus by one or more nuclear localization signals (NLSs). The one or more protein or polypeptide can be flanked by two NLSs, one NLS located at the N-terminus and the second NLS located at the C-terminus. The one or more NLSs can be a SV40 NLS. The one or more DNA endonuclease can be one or more polynucleotide encoding the one or more DNA endonuclease. The one or more DNA endonuclease can be one or more ribonucleic acid (RNA) encoding the one or more DNA endonuclease. The one or more RNA can be one or more chemically modified RNA. The one or more RNA can be chemically modified in the coding region. The one or more polynucleotide or one or more RNA can be codon optimized.

[0026] The methods can further comprise introducing one or more gRNA or one or more sgRNA.

[0027] The one or more gRNA or one or more sgRNA can comprise a spacer sequence that is complementary to a sequence within or near the expanded trinucleotide repeat in the ATXN2 gene. The one or more gRNA or one or more sgRNA can comprise a spacer sequence that is complementary to a DNA sequence within or near the ATXN2 gene. The one or more gRNA or one or more sgRNA can comprise a spacer sequence that is complementary to a sequence flanking the ATXN2 gene or other sequence that encodes a regulatory element of the ATXN2 gene. The one or more gRNA or one or more sgRNA can comprise a spacer sequence that is complementary to a DNA sequence within or near exon 1 of the ATXN2 gene. The one or more gRNA or one or more sgRNA can be chemically modified. The one or more modified sgRNAs can comprise three 2′-O-methyl-phosphorothioate residues at or near each of its 5′ and 3′ ends.

[0028] The one or more gRNA or one or more sgRNA can comprise a RNA sequence corresponding to a sequence selected from the group consisting of SEQ ID NOs: 34621, 34565, 34606, 54554, 34437, 34563, 54418, 54661, 34632, 34446, 54409, 54671, 54693, 54539, 54408, 54555, 54694, 34505, 54695, 34504, 34542, 54672, 34562, 34435, 54523, 54669, 34544, 54660, 54646, 54648, 34503, 54691, 54407, 54422, 54556, 54411, 54421, 54540, 54541, 34484, 54647, 54673, 54495, 34548, and 34543.

[0029] The one or more gRNA or one or more sgRNA can be pre-complexed with the one or more DNA endonuclease to form one or more ribonucleoproteins (RNPs). The pre-complexing can involve a covalent attachment of the one or more gRNA or one or more sgRNA to the one or more DNA endonuclease. The weight ratio of sgRNA to DNA endonuclease in the RNP can be 1:1. The one or more DNA endonuclease can be formulated in a liposome or lipid nanoparticle. The one or more DNA endonuclease can be formulated in a liposome or a lipid nanoparticle which also comprises the one or more gRNA or one or more sgRNA. The one or more DNA endonuclease can be encoded in an AAV vector particle. The one or more gRNA or one or more sgRNA can be encoded in an AAV vector particle. The one or more DNA endonuclease can be encoded in an AAV vector particle which also encodes the one or more gRNA or one or more sgRNA. The AAV vector particle can be selected from the group consisting of any of those sequences disclosed in SEQ ID NOs: 4734-5302 and Table 2.

[0030] The methods can further comprise introducing into the cell a donor template comprising at least a portion of the wild-type ATXN2 gene. The at least a portion of the wild-type ATXN2 gene can comprise one or more sequences selected from the group consisting of an ATXN2 exon, an ATXN2 intron, and a sequence comprising an exon:intron junction of ATXN2. The donor template can comprise homologous arms to the genomic locus of the ATXN2 gene.

[0031] The donor template can be either a single or double stranded polynucleotide. The donor template can be encoded in an AAV vector particle, where the AAV vector particle is selected from the group consisting of any of those disclosed in SEQ ID NOs: 4734-5302 and Table 2. The one or more polynucleotide encoding one or more DNA endonuclease can be formulated into a lipid nanoparticle, and the one or more gRNA or one or more sgRNA can be delivered to the cell ex vivo by electroporation and the donor template can be delivered to the cell by an AAV vector. The one or more polynucleotide encoding one or more DNA endonuclease can be formulated into a liposome or lipid nanoparticle which also comprises the one or more gRNA or one or more sgRNA and the donor template.

[0032] The ATXN2 gene can be located on Chromosome 12: 111,452,214-111,599,676 (Genome Reference Consortium—GRCh38).

[0033] Also provided herein is a single-molecule guide RNA comprising at least a spacer sequence that is an RNA sequence corresponding to any one of SEQ ID NOs: 5305-108,217.

[0034] The single-molecule guide RNA can further comprise a spacer extension region. The single-molecule guide RNA can further comprise a tracrRNA extension region. The single-molecule guide RNA can be chemically modified. The single-molecule guide RNA can be pre-complexed with a DNA endonuclease. The DNA endonuclease can be a Cas9 or Cpf1 endonuclease. The Cas9 or Cpf1 endonuclease can be selected from the group consisting of: S. pyogenes Cas9, S. aureus Cas9, N. meningitidis Cas9, S. thermophilus CRISPR1 Cas9, S. thermophilus CRISPR 3 Cas9, T. denticola Cas9, L. bacterium ND2006 Cpf1 and Acidaminococcus sp. BV3L6 Cpf1, and variants having at least 90% homology to the endonucleases. The Cas9 or Cpf1 endonuclease can comprise one or more NLSs. At least one NLS can be at or within 50 amino acids of the amino-terminus of the Cas9 or Cpf1 endonuclease and/or at least one NLS can be at or within 50 amino acids of the carboxy-terminus of the Cas9 or Cpf1 endonuclease.

[0035] Also provided herein is a DNA encoding the single-molecule guide RNA.

[0036] Also provided herein is a therapeutic comprising at least one or more gRNAs for editing an ATXN2 gene in a cell from a patient with an ATXN2 related condition or disorder, the one or more gRNAs comprising a spacer sequence selected from the group consisting of nucleic acid sequences in any one of SEQ ID NOs: 5305-108,217 of the Sequence Listing.

[0037] Also provided herein is a therapeutic for treating a patient with an ATXN2 related condition or disorder formed by the method comprising: introducing one or more DNA endonucleases; introducing one or more gRNA or one or more sgRNA for editing a ATXN2 gene; wherein the one or more gRNAs or sgRNAs comprise a spacer sequence selected from the group consisting of nucleic acid sequences in SEQ ID NOs: 5305-108,217 of the Sequence Listing.

[0038] The ATXN2 related condition or disorder can be SCA2. The ATXN2 related condition or disorder can be amyotrophic lateral sclerosis (ALS).

[0039] It is understood that the inventions described in this specification are not limited to the examples summarized in this Summary. Various other aspects are described and exemplified herein.

### BRIEF DESCRIPTION OF THE DRAWINGS

[0040] Various aspects of materials and methods disclosed and described in this specification can be better understood by reference to the accompanying figures, in which:

[0041] FIGS. 1A-B depict the type II CRISPR/Cas system;

[0042] FIG. 1A is a depiction of the type II CRISPR/Cas system including gRNA;

[0043] FIG. 1B is another depiction of the type II CRISPR/Cas system including sgRNA;

[0044] FIGS. 2A-B describe the cutting efficiencies in the range of 3.4-98.2% of S. pyogenes gRNAs selected via an in-vitro transcribed (IVT) gRNA screen in HEK293T cells;

[0045] FIG. 2A describes the cutting efficiencies in the range of 64.1-98.2% of S. pyogenes gRNAs selected via an in-vitro transcribed (IVT) gRNA screen in HEK293T cells;

[0046] FIG. 2B describes the cutting efficiencies in the range of 3.4-63.1% of S. pyogenes gRNAs selected via an in-vitro transcribed (IVT) gRNA screen in HEK293T cells; and

[0047] FIG. 3 is a graph describing the cutting efficiencies in the range of 3.4-98.2% of S. pyogenes gRNAs in HEK293T cells.

### BRIEF DESCRIPTION OF SEQUENCE LISTING

[0048] SEQ ID NOs: 1-620 are Cas endonuclease ortholog sequences.

[0049] SEQ ID NOs: 621-631 do not include sequences.

[0050] SEQ ID NOs: 632-4715 are microRNA sequences.

[0051] SEQ ID NOs: 4716-4733 do not include sequences.

[0052] SEQ ID NOs: 4734-5302 are AAV serotype sequences.

[0053] SEQ ID NO: 5303 is a ATXN2 nucleotide sequence.

[0054] SEQ ID NO: 5304 is a gene sequence including 1-5 kilobase pairs upstream and/or downstream of the ATXN2 gene.

[0055] SEQ ID NOs: 5305-6019 are 20 bp spacer sequences for targeting within or near a ATXN2 gene or other DNA sequence that encodes a regulatory element of the ATXN2 gene with a T. denticola Cas9 endonuclease.

[0056] SEQ ID NOs: 6020-7394 are 20 bp spacer sequences for targeting within or near a

[0057] ATXN2 gene or other DNA sequence that encodes a regulatory element of the ATXN2 gene with a S. thermophilus Cas9 endonuclease.

[0058] SEQ ID NOs: 7395-11,810 are 20 bp spacer sequences for targeting within or near a ATXN2 gene or other DNA sequence that encodes a regulatory element of the ATXN2 gene with a S. aureus Cas9 endonuclease.

[0059] SEQ ID NOs: 11,811-15,945 are 20 bp spacer sequences for targeting within or near a ATXN2 gene or other DNA sequence that encodes a regulatory element of the ATXN2 gene with a N. meningitidis Cas9 endonuclease.

[0060] SEQ ID NOs: 15,946-55,473 are 20 bp spacer sequences for targeting within or near a ATXN2 gene or other DNA sequence that encodes a regulatory element of the ATXN2 gene with a S. pyogenes Cas9 endonuclease.

[0061] SEQ ID NOs: 55,474-108,217 are 20 bp spacer sequences for targeting within or near a ATXN2 gene or other DNA sequence that encodes a regulatory element of the ATXN2 gene with an Acidaminococcus, a Lachnospiraceae, and a Franciscella Novicida Cpf1 endonuclease.

[0062] SEQ ID NOs: 108,218-108,247 do not include sequences.

[0063] SEQ ID NO: 108,248 is a sample spacer sequence, including the PAM, for a guide RNA (gRNA) for a S. pyogenes Cas9 endonuclease.

[0064] SEQ ID NOs: 108,249-108,251 show sample sgRNA sequences.

[0065] SEQ ID NO: 108,252 shows a known family of homing endonuclease, as classified by its structure.

### DETAILED DESCRIPTION

### I. Introduction

### Genome Editing

[0066] The present disclosure provides strategies and techniques for the targeted, specific alteration of the genetic information (genome) of living organisms. As used herein, the term “alteration” or “alteration of genetic information” refers to any change in the genome of a cell. In the context of treating genetic disorders, alterations may include, but are not limited to, insertion, deletion and correction. As used herein, the term “insertion” refers to an addition of one or more nucleotides in a DNA sequence. Insertions can range from small insertions of a few nucleotides to insertions of large segments such as a cDNA or a gene. The term “deletion” refers to a loss or removal of one or more nucleotides in a DNA sequence or a loss or removal of the function of a gene. In some cases, a deletion can include, for example, a loss of a few nucleotides, an exon, an intron, a gene segment, or the entire sequence of a gene. In some cases, deletion of a gene refers to the elimination or reduction of the function or expression of a gene or its gene product. This can result from not only a deletion of sequences within or near the gene, but also other events (e.g., insertion, nonsense mutation) that disrupt the expression of the gene. The term “correction” or “corrected” as used herein, refers to a change of one or more nucleotides of a genome in a cell, whether by insertion, deletion or substitution. Such correction may result in a more favorable genotypic or phenotypic outcome, whether in structure or function, to the genomic site which was corrected. One non-limiting example of a “correction” includes the correction of a mutant or defective sequence to a wild-type sequence which restores structure or function to a gene or its gene product(s). Depending on the nature of the mutation, correction may be achieved via various strategies disclosed herein. In one non-limiting example, a missense mutation may be corrected by replacing the region containing the mutation with its wild-type counterpart. As another example, duplication mutations (e.g., repeat expansions) in a gene may be corrected by removing the extra sequences.

[0067] In some aspects, alterations may also include a gene knock-in, knock-out or knock-down. As used herein, the term “knock-in” refers to an addition of a DNA sequence, or fragment thereof into a genome. Such DNA sequences to be knocked-in may include an entire gene or genes, may include regulatory sequences associated with a gene or any portion or fragment of the foregoing. For example, a cDNA encoding the wild-type protein may be inserted into the genome of a cell carrying a mutant gene. Knock-in strategies need not replace the defective gene, in whole or in part. In some cases, a knock-in strategy may further involve substitution of an existing sequence with the provided sequence, e.g., substitution of a mutant allele with a wild-type copy. On the other hand, the term “knock-out” refers to the elimination of a gene or the expression of a gene. For example, a gene can be knocked out by either a deletion or an addition of a nucleotide sequence that leads to a disruption of the reading frame. As another example, a gene may be knocked out by replacing a part of the gene with an irrelevant sequence. Finally, the term “knock-down” as used herein refers to reduction in the expression of a gene or its gene product(s). As a result of a gene knock-down, the protein activity or function may be attenuated or the protein levels may be reduced or eliminated.

[0068] Genome editing generally refers to the process of modifying the nucleotide sequence of a genome, preferably in a precise or pre-determined manner. Examples of methods of genome editing described herein include methods of using site-directed nucleases to cut deoxyribonucleic acid (DNA) at precise target locations in the genome, thereby creating single-strand or double-strand DNA breaks at particular locations within the genome. Such breaks can be and regularly are repaired by natural, endogenous cellular processes, such as homology-directed repair (HDR) and non-homologous end joining (NHEJ), as reviewed in Cox et al., Nature Medicine 21(2), 121-31 (2015). These two main DNA repair processes consist of a family of alternative pathways. NHEJ directly joins the DNA ends resulting from a double-strand break, sometimes with the loss or addition of nucleotide sequence, which may disrupt or enhance gene expression. HDR utilizes a homologous sequence, or donor sequence, as a template for inserting a defined DNA sequence at the break point. The homologous sequence can be in the endogenous genome, such as a sister chromatid. Alternatively, the donor can be an exogenous nucleic acid, such as a plasmid, a single-strand oligonucleotide, a double-stranded oligonucleotide, a duplex oligonucleotide or a virus, that has regions of high homology with the nuclease-cleaved locus, but which can also contain additional sequence or sequence changes including deletions that can be incorporated into the cleaved target locus. A third repair mechanism can be microhomology-mediated end joining (MMEJ), also referred to as “Alternative NHEJ,” in which the genetic outcome is similar to NHEJ in that small deletions and insertions can occur at the cleavage site. MMEJ can make use of homologous sequences of a few base pairs flanking the DNA break site to drive a more favored DNA end joining repair outcome, and recent reports have further elucidated the molecular mechanism of this process; see, e.g., Cho and Greenberg, Nature 518, 174-76 (2015); Kent et al., Nature Structural and Molecular Biology, Adv. Online doi:10.1038/nsmb.2961(2015); Mateos-Gomez et al., Nature 518, 254-57 (2015); Ceccaldi et al., Nature 528, 258-62 (2015). In some instances, it may be possible to predict likely repair outcomes based on analysis of potential microhomologies at the site of the DNA break.

[0069] Each of these genome editing mechanisms can be used to create desired genomic alterations. A step in the genome editing process can be to create one or two DNA breaks, the latter as double-strand breaks or as two single-stranded breaks, in the target locus as near the site of intended mutation. This can be achieved via the use of site-directed polypeptides, as described and illustrated herein.

### CRISPR Endonuclease System

[0070] A CRISPR (Clustered Regularly Interspaced Short Palindromic Repeats) genomic locus can be found in the genomes of many prokaryotes (e.g., bacteria and archaea). In prokaryotes, the CRISPR locus encodes products that function as a type of immune system to help defend the prokaryotes against foreign invaders, such as virus and phage. There are three stages of CRISPR locus function: integration of new sequences into the CRISPR locus, expression of CRISPR RNA (crRNA), and silencing of foreign invader nucleic acid. Five types of CRISPR systems (e.g., Type I, Type II, Type III, Type U, and Type V) have been identified.

[0071] A CRISPR locus includes a number of short repeating sequences referred to as “repeats.” When expressed, the repeats can form secondary structures (e.g., hairpins) and/or comprise unstructured single-stranded sequences. The repeats usually occur in clusters and frequently diverge between species. The repeats are regularly interspaced with unique intervening sequences referred to as “spacers,” resulting in a repeat-spacer-repeat locus architecture. The spacers are identical to or have high homology with known foreign invader sequences. A spacer-repeat unit encodes a crisprRNA (crRNA), which is processed into a mature form of the spacer-repeat unit. A crRNA comprises a “seed” or spacer sequence that is involved in targeting a target nucleic acid (in the naturally occurring form in prokaryotes, the spacer sequence targets the foreign invader nucleic acid). A spacer sequence is located at the 5′ or 3′ end of the crRNA.

[0072] A CRISPR locus also comprises polynucleotide sequences encoding CRISPR Associated (Cas) genes. Cas genes encode endonucleases involved in the biogenesis and the interference stages of crRNA function in prokaryotes. Some Cas genes comprise homologous secondary and/or tertiary structures.

### Type II CRISPR Systems

[0073] crRNA biogenesis in a Type II CRISPR system in nature requires a trans-activating CRISPR RNA (tracrRNA). Non-limiting examples of Type II CRISPR systems are shown in FIGS. 1A and 1B. The tracrRNA can be modified by endogenous RNaseIII, and then hybridizes to a crRNA repeat in the pre-crRNA array. Endogenous RNaseIII can be recruited to cleave the pre-crRNA. Cleaved crRNAs can be subjected to exoribonuclease trimming to produce the mature crRNA form (e.g., 5′ trimming). The tracrRNA can remain hybridized to the crRNA, and the tracrRNA and the crRNA associate with a site-directed polypeptide (e.g., Cas9). The crRNA of the crRNA-tracrRNA-Cas9 complex can guide the complex to a target nucleic acid to which the crRNA can hybridize. Hybridization of the crRNA to the target nucleic acid can activate Cas9 for targeted nucleic acid cleavage. The target nucleic acid in a Type II CRISPR system is referred to as a protospacer adjacent motif (PAM). In nature, the PAM is essential to facilitate binding of a site-directed polypeptide (e.g., Cas9) to the target nucleic acid. Type II systems (also referred to as Nmeni or CASS4) are further subdivided into Type II-A (CASS4) and II-B (CASS4a). Jinek et al., Science, 337(6096):816-821 (2012) showed that the CRISPR/Cas9 system is useful for RNA-programmable genome editing, and international patent application publication number WO2013/176772 provides numerous examples and applications of the CRISPR/Cas endonuclease system for site-specific gene editing.

### Type V CRISPR Systems

[0074] Type V CRISPR systems have several important differences from Type II systems. For example, Cpf1 is a single RNA-guided endonuclease that, in contrast to Type II systems, lacks tracrRNA. In fact, Cpf1-associated CRISPR arrays can be processed into mature crRNAs without the requirement of an additional trans-activating tracrRNA. The Type V CRISPR array can be processed into short mature crRNAs of 42-44 nucleotides in length, with each mature crRNA beginning with 19 nucleotides of direct repeat followed by 23-25 nucleotides of spacer sequence. In contrast, mature crRNAs in Type II systems can start with 20-24 nucleotides of spacer sequence followed by about 22 nucleotides of direct repeat. Also, Cpf1 can utilize a T-rich protospacer-adjacent motif such that Cpf1-crRNA complexes efficiently cleave target DNA preceded by a short T-rich PAM, which is in contrast to the G-rich PAM following the target DNA for Type II systems. Thus, Type V systems cleave at a point that is distant from the PAM, while Type II systems cleave at a point that is adjacent to the PAM. In addition, in contrast to Type II systems, Cpf1 cleaves DNA via a staggered DNA double-stranded break with a 4 or 5 nucleotide 5′ overhang. Type II systems cleave via a blunt double-stranded break. Similar to Type II systems, Cpf1 contains a predicted RuvC-like endonuclease domain, but lacks a second HNH endonuclease domain, which is in contrast to Type II systems.

### Cas Genes/Polypeptides and Protospacer Adjacent Motifs

[0075] Exemplary CRISPR/Cas polypeptides include the Cas9 polypeptides as published in Fonfara et al., Nucleic Acids Research, 42: 2577-2590 (2014). The CRISPR/Cas gene naming system has undergone extensive rewriting since the Cas genes were discovered. Fonfara et al. also provides PAM sequences for the Cas9 polypeptides from various species (see also Table 1 infra).

### II. Compositions and Methods of the Disclosure

### Editing Strategy

[0076] Provided herein are cellular, ex vivo and in vivo methods for using genome engineering tools to create permanent changes to the genome by: 1) deleting the abnormal repeat expansion within the ATXN2 gene, by inducing two double-stranded DNA breaks at both sides of the expanded region, and replacing with a corrected sequence; 2) deleting the abnormal repeat expansion within the ATXN2 gene, by inducing one double-stranded DNA break proximal to the expanded region, and replacing with a corrected sequence; 3) deleting or mutating the ATXN2 gene by inducing one or more insertions or deletions within or near the ATXN2 gene or other DNA sequences that encode regulatory elements of the ATXN2 gene; or 4) deleting the mutant ATXN2 gene and inserting a wild-type ATXN2 gene, a cDNA or a minigene (comprised of one or more exons and optionally one or more introns, including natural or synthetic introns) into the ATXN2 gene locus or a safe harbor locus. Such methods use endonucleases, such as CRISPR-associated (Cas9, Cpf1 and the like) nucleases, to permanently edit one or more mutations within or near the genomic locus of the ATXN2 gene or other DNA sequences that encode regulatory elements of the ATXN2 gene. In this way, examples set forth in the present disclosure can help to restore the wild-type sequence of, or otherwise reduce or eliminate the expression of, the ATXN2 gene with as few as a single treatment (rather than deliver potential therapies for the lifetime of the patient).

[0077] More specifically, the methods provided above, regardless of whether a cellular or ex vivo or in vivo method, can involve one or a combination of the following: 1) deleting the entire expanded trinucleotide repeat or a portion thereof in or near the ATXN2 gene, by inducing two double-stranded DNA breaks at both sides of the expanded region, and replacing with a corrected sequence; 2) deleting the entire expanded trinucleotide repeat or a portion thereof in or near the ATXN2 gene, by inducing one double-stranded DNA break proximal to the expanded region, and replacing with a corrected sequence; 3) reducing (knock-down) or eliminating (knock-out) the expression of the mutant ATXN2 gene by inducing one or more insertions, deletions or mutations within or near the ATXN2 gene or other DNA sequences that encode regulatory elements of the ATXN2 gene; or 4) deleting the mutant ATXN2 gene and inserting a wild-type ATXN2 gene, a cDNA or a minigene (comprised of one or more exons and introns or natural or synthetic introns) into the ATXN2 gene locus or a safe harbor locus.

[0078] For example, the dual DSB-induced deletion strategy can involve excising the entire abnormal repeat expansion or a portion thereof in the ATXN2 gene by inducing two or more double stranded breaks at both sides of the repeat region with one or more CRISPR endonucleases and two or more sgRNAs. A donor DNA containing the corrected sequence can be provided to restore the wild-type sequence. This approach can require development and optimization of sgRNAs and donor DNA molecule for the ATXN2 gene.

[0079] For example, the single DSB-induced deletion strategy can involve deleting the entire abnormal repeat expansion or a portion thereof in the ATXN2 gene by inducing one double stranded break at a site proximal to the repeat region with one or more CRISPR endonucleases and a gRNA (e.g., crRNA+tracrRNA, or sgRNA). A donor DNA containing the corrected sequence can be provided to restore the wild-type sequence. This approach can require development and optimization of gRNAs and donor DNA molecule for the ATXN2 gene.

[0080] For example, the knock-down or knock-out strategy can involve disrupting the reading frame in the ATXN2 gene by introducing random insertions or deletions (indels) that arise due to the imprecise NHEJ repair pathway. This can be achieved by inducing one single stranded break or double stranded break in the ATXN2 gene with one or more CRISPR endonucleases and a gRNA (e.g., crRNA+tracrRNA, or sgRNA), or two or more single stranded breaks or double stranded breaks in the ATXN2 gene with two or more CRISPR endonucleases and two or more sgRNAs. This approach can require development and optimization of sgRNAs for the ATXN2 gene.

[0081] For example, the whole gene correction strategy can involve disruption/deletion of the endogenous, mutated ATXN2 gene and insertion of a wild-type ATXN2 gene, a cDNA or a minigene (comprised of one or more exons and optionally one or more introns, including natural or synthetic introns) into the locus of the ATXN2 gene. It can be achieved by delivering into the cell one or more CRISPR endonucleases, one or more gRNAs (e.g., crRNA+tracrRNA, or sgRNA) targeting upstream and downstream of or in the first and last exon and/or intron of the ATXN2 gene, and a donor DNA that contains the desired sequence and homology arms to the flanking regions of the target locus. In certain aspects, this can be achieved by delivering into the cell one or more CRISPR endonucleases, one or more gRNAs (e.g., crRNA+tracrRNA, or sgRNA) targeting the 5′ end of the ATXN2 gene, and a donor DNA that contains the desired sequence and homology arms to the flanking regions of the target locus. The cytogenetic location of the ATXN2 gene is 12q24.12. Alternatively, the wild-type ATXN2 gene, a cDNA or a minigene (comprised of one or more exons and optionally one or more introns including natural or synthetic introns) can be inserted into a safe harbor locus. A “safe harbor locus” refers to a region of the genome where the integrated material can be adequately expressed without perturbing endogenous genome structure or function. The safe harbor loci include but are not limited to AAVS1 (intron 1 of PPP1R12C), HPRT, H11, hRosa26 and/or F-A region. The safe harbor loci can be selected from the group consisting of: exon 1, intron 1 or exon 2 of PPP1R12C; exon 1, intron 1 or exon 2 of HPRT; and exon 1, intron 1 or exon 2 of hRosa26. The safe harbor loci may be exons or introns of ubiquitously expressed genes and/or genes with tissue specific expression (e.g.: nervous system). A safe harbor loci may also include regions of the genome devoid of endogeneous genes and with open chromatin that allows expression of the inserted transgene without perturbing the genome structure or function.

[0082] The whole gene correction strategy utilizes a donor DNA template in Homology-Directed Repair (HDR). HDR may be accomplished by making one or more single-stranded breaks (SSBs) or double-stranded breaks (DSBs) at specific sites in the genome by using one or more endonucleases. The donor DNA can be single or double stranded DNA. The donor template can have homologous arms to the 12q24.12 region. The donor template can have homologous arms to a safe harbor locus. For example, the donor template can have homologous arms to an AAVS1 safe harbor locus, such as, intron 1 of the PPP1R12C gene. As another example, the donor template can have homologous arms to a hRosa26 safe harbor locus.

[0083] The advantages for the above strategies are similar, including in principle both short and long term beneficial clinical and laboratory effects.

[0084] In addition to the above genome editing strategies, another strategy involves modulating expression, function, or activity of ATXN2 by editing in the regulatory sequence.

[0085] In addition to the editing options listed above, Cas9 or similar proteins can be used to target effector domains to the same target sites that can be identified for editing, or additional target sites within range of the effector domain. A range of chromatin modifying enzymes, methylases or demethylases can be used to alter expression of the target gene. One possibility is decreasing the expression of the ATXN2 protein if the mutation leads to undesirable activity. These types of epigenetic regulation have some advantages, particularly as they are limited in possible off-target effects.

[0086] A number of types of genomic target sites can be present in addition to the trinucleotide repeat expansion in the coding sequence of the ATXN2 gene.

[0087] The regulation of transcription and translation implicates a number of different classes of sites that interact with cellular proteins or nucleotides. Often the DNA binding sites of transcription factors or other proteins can be targeted for mutation or deletion to study the role of the site, though they can also be targeted to change gene expression. Sites can be added through non-homologous end joining NHEJ or direct genome editing by homology directed repair (HDR). Increased use of genome sequencing, RNA expression and genome-wide studies of transcription factor binding have increased our ability to identify how the sites lead to developmental or temporal gene regulation. These control systems can be direct or can involve extensive cooperative regulation that can require the integration of activities from multiple enhancers. Transcription factors typically bind 6-12 bp-long degenerate DNA sequences. The low level of specificity provided by individual sites suggests that complex interactions and rules are involved in binding and the functional outcome. Binding sites with less degeneracy can provide simpler means of regulation. Artificial transcription factors can be designed to specify longer sequences that have less similar sequences in the genome and have lower potential for off-target cleavage. Any of these types of binding sites can be mutated, deleted or even created to enable changes in gene regulation or expression (Canver, M. C. et al., Nature (2015)).

### Site-Directed Polypeptides (Endonucleases, Enzymes)

[0088] A site-directed polypeptide is a nuclease used in genome editing to cleave DNA. The site-directed polypeptide can be administered to a cell or a patient as either: one or more polypeptides, or one or more mRNAs encoding the polypeptide. Any of the enzymes or orthologs disclosed in SEQ ID NOs: 1-620, or disclosed herein may be utilized in the methods herein. Single-molecule guide RNA can be pre-complexed with a site-directed polypeptide. The site-directed polypeptide can be any of the DNA endonuclease disclosed herein.

[0089] In the context of a CRISPR/Cas9 or CRISPR/Cpf1 system, the site-directed polypeptide can bind to a guide RNA that, in turn, specifies the site in the target DNA to which the polypeptide is directed. In the CRISPR/Cas9 or CRISPR/Cpf1 systems disclosed herein, the site-directed polypeptide can be an endonuclease, such as a DNA endonuclease.

[0090] A site-directed polypeptide can comprise a plurality of nucleic acid-cleaving (i.e., nuclease) domains. Two or more nucleic acid-cleaving domains can be linked together via a linker. For example, the linker can comprise a flexible linker. Linkers can comprise 1, 2, 3, 4, 5, 6, 7, 8, 9, 10, 11, 12, 13, 14, 15, 16, 17, 18, 19, 20, 21, 22, 23, 24, 25, 30, 35, 40 or more amino acids in length.

[0091] Naturally-occurring wild-type Cas9 enzymes comprise two nuclease domains, a HNH nuclease domain and a RuvC domain. Herein, the term “Cas9” refers to both a naturally-occurring and a recombinant Cas9. Cas9 enzymes contemplated herein can comprise a HNH or HNH-like nuclease domain, and/or a RuvC or RuvC-like nuclease domain.

[0092] HNH or HNH-like domains comprise a McrA-like fold. HNH or HNH-like domains comprises two antiparallel β-strands and an α-helix. HNH or HNH-like domains comprises a metal binding site (e.g., a divalent cation binding site). HNH or HNH-like domains can cleave one strand of a target nucleic acid (e.g., the complementary strand of the crRNA targeted strand).

[0093] RuvC or RuvC-like domains comprise an RNaseH or RNaseH-like fold. RuvC/RNaseH domains are involved in a diverse set of nucleic acid-based functions including acting on both RNA and DNA. The RNaseH domain comprises 5 β-strands surrounded by a plurality of α-helices. RuvC/RNaseH or RuvC/RNaseH-like domains comprise a metal binding site (e.g., a divalent cation binding site). RuvC/RNaseH or RuvC/RNaseH-like domains can cleave one strand of a target nucleic acid (e.g., the non-complementary strand of a double-stranded target DNA).

[0094] Site-directed polypeptides can introduce double-strand breaks or single-strand breaks in nucleic acids, e.g., genomic DNA. The double-strand break can stimulate a cell's endogenous DNA-repair pathways (e.g., homology-dependent repair (HDR) or NHEJ or alternative non-homologous end joining (A-NHEJ) or microhomology-mediated end joining (MMEJ)). NHEJ can repair cleaved target nucleic acid without the need for a homologous template. This can sometimes result in small deletions or insertions (indels) in the target nucleic acid at the site of cleavage, and can lead to disruption or alteration of gene expression. HDR can occur when a homologous repair template, or donor, is available. The homologous donor template can comprise sequences that are homologous to sequences flanking the target nucleic acid cleavage site. The sister chromatid can be used by the cell as the repair template. However, for the purposes of genome editing, the repair template can be supplied as an exogenous nucleic acid, such as a plasmid, duplex oligonucleotide, single-strand oligonucleotide or viral nucleic acid. With exogenous donor templates, an additional nucleic acid sequence (such as a transgene) or modification (such as a single or multiple base change or a deletion) can be introduced between the flanking regions of homology so that the additional or altered nucleic acid sequence also becomes incorporated into the target locus. MMEJ can result in a genetic outcome that is similar to NHEJ in that small deletions and insertions can occur at the cleavage site. MMEJ can make use of homologous sequences of a few base pairs flanking the cleavage site to drive a favored end-joining DNA repair outcome. In some instances, it may be possible to predict likely repair outcomes based on analysis of potential microhomologies in the nuclease target regions.

[0095] Thus, in some cases, homologous recombination can be used to insert an exogenous polynucleotide sequence into the target nucleic acid cleavage site. An exogenous polynucleotide sequence is termed a “donor polynucleotide” (or donor or donor sequence) herein. The donor polynucleotide, a portion of the donor polynucleotide, a copy of the donor polynucleotide, or a portion of a copy of the donor polynucleotide can be inserted into the target nucleic acid cleavage site. The donor polynucleotide can be an exogenous polynucleotide sequence, i.e., a sequence that does not naturally occur at the target nucleic acid cleavage site.

[0096] The modifications of the target DNA due to NHEJ and/or HDR can lead to, for example, mutations, deletions, alterations, integrations, gene correction, gene replacement, gene tagging, transgene insertion, nucleotide deletion, gene disruption, translocations and/or gene mutation. The processes of deleting genomic DNA and integrating non-native nucleic acid into genomic DNA are examples of genome editing.

[0097] The site-directed polypeptide can comprise an amino acid sequence having at least 10%, at least 15%, at least 20%, at least 30%, at least 40%, at least 50%, at least 60%, at least 70%, at least 75%, at least 80%, at least 85%, at least 90%, at least 95%, at least 99%, or 100% amino acid sequence identity to a wild-type exemplary site-directed polypeptide [e.g., Cas9 from S. pyogenes, US2014/0068797 Sequence ID No. 8 or Sapranauskas et al., Nucleic Acids Res, 39(21): 9275-9282 (2011)], and various other site-directed polypeptides. The site-directed polypeptide can comprise at least 70, 75, 80, 85, 90, 95, 97, 99, or 100% identity to a wild-type site-directed polypeptide (e.g., Cas9 from S. pyogenes, supra) over 10 contiguous amino acids. The site-directed polypeptide can comprise at most: 70, 75, 80, 85, 90, 95, 97, 99, or 100% identity to a wild-type site-directed polypeptide (e.g., Cas9 from S. pyogenes, supra) over 10 contiguous amino acids. The site-directed polypeptide can comprise at least: 70, 75, 80, 85, 90, 95, 97, 99, or 100% identity to a wild-type site-directed polypeptide (e.g., Cas9 from S. pyogenes, supra) over 10 contiguous amino acids in a HNH nuclease domain of the site-directed polypeptide. The site-directed polypeptide can comprise at most: 70, 75, 80, 85, 90, 95, 97, 99, or 100% identity to a wild-type site-directed polypeptide (e.g., Cas9 from S. pyogenes, supra) over 10 contiguous amino acids in a HNH nuclease domain of the site-directed polypeptide. The site-directed polypeptide can comprise at least: 70, 75, 80, 85, 90, 95, 97, 99, or 100% identity to a wild-type site-directed polypeptide (e.g., Cas9 from S. pyogenes, supra) over 10 contiguous amino acids in a RuvC nuclease domain of the site-directed polypeptide. The site-directed polypeptide can comprise at most: 70, 75, 80, 85, 90, 95, 97, 99, or 100% identity to a wild-type site-directed polypeptide (e.g., Cas9 from S. pyogenes, supra) over 10 contiguous amino acids in a RuvC nuclease domain of the site-directed polypeptide.

[0098] The site-directed polypeptide can comprise a modified form of a wild-type exemplary site-directed polypeptide. The modified form of the wild-type exemplary site-directed polypeptide can comprise a mutation that reduces the nucleic acid-cleaving activity of the site-directed polypeptide. The modified form of the wild-type exemplary site-directed polypeptide can have less than 90%, less than 80%, less than 70%, less than 60%, less than 50%, less than 40%, less than 30%, less than 20%, less than 10%, less than 5%, or less than 1% of the nucleic acid-cleaving activity of the wild-type exemplary site-directed polypeptide (e.g., Cas9 from S. pyogenes, supra). The modified form of the site-directed polypeptide can have no substantial nucleic acid-cleaving activity. When a site-directed polypeptide is a modified form that has no substantial nucleic acid-cleaving activity, it is referred to herein as “enzymatically inactive.”

[0099] The modified form of the site-directed polypeptide can comprise a mutation such that it can induce a single-strand break (SSB) on a target nucleic acid (e.g., by cutting only one of the sugar-phosphate backbones of a double-strand target nucleic acid). In some aspects, the mutation can result in less than 90%, less than 80%, less than 70%, less than 60%, less than 50%, less than 40%, less than 30%, less than 20%, less than 10%, less than 5%, or less than 1% of the nucleic acid-cleaving activity in one or more of the plurality of nucleic acid-cleaving domains of the wild-type site directed polypeptide (e.g., Cas9 from S. pyogenes, supra). In some aspects, the mutation can result in one or more of the plurality of nucleic acid-cleaving domains retaining the ability to cleave the complementary strand of the target nucleic acid, but reducing its ability to cleave the non-complementary strand of the target nucleic acid. The mutation can result in one or more of the plurality of nucleic acid-cleaving domains retaining the ability to cleave the non-complementary strand of the target nucleic acid, but reducing its ability to cleave the complementary strand of the target nucleic acid. For example, residues in the wild-type exemplary S. pyogenes Cas9 polypeptide, such as Asp10, His840, Asn854 and Asn856, are mutated to inactivate one or more of the plurality of nucleic acid-cleaving domains (e.g., nuclease domains). The residues to be mutated can correspond to residues Asp10, His840, Asn854 and Asn856 in the wild-type exemplary S. pyogenes Cas9 polypeptide (e.g., as determined by sequence and/or structural alignment). Non-limiting examples of mutations include D10A, H840A, N854A or N856A. One skilled in the art will recognize that mutations other than alanine substitutions can be suitable.

[0100] In some aspects, a D10A mutation can be combined with one or more of H840A, N854A, or N856A mutations to produce a site-directed polypeptide substantially lacking DNA cleavage activity. A H840A mutation can be combined with one or more of D10A, N854A, or N856A mutations to produce a site-directed polypeptide substantially lacking DNA cleavage activity. A N854A mutation can be combined with one or more of H840A, D10A, or N856A mutations to produce a site-directed polypeptide substantially lacking DNA cleavage activity. A N856A mutation can be combined with one or more of H840A, N854A, or D10A mutations to produce a site-directed polypeptide substantially lacking DNA cleavage activity. Site-directed polypeptides that comprise one substantially inactive nuclease domain are referred to as “mckases.”

[0101] Nickase variants of RNA-guided endonucleases, for example Cas9, can be used to increase the specificity of CRISPR-mediated genome editing. Wild type Cas9 is typically guided by a single guide RNA designed to hybridize with a specified ˜20 nucleotide sequence in the target sequence (such as an endogenous genomic locus). However, several mismatches can be tolerated between the guide RNA and the target locus, effectively reducing the length of required homology in the target site to, for example, as little as 13 nt of homology, and thereby resulting in elevated potential for binding and double-strand nucleic acid cleavage by the CRISPR/Cas9 complex elsewhere in the target genome—also known as off-target cleavage. Because nickase variants of Cas9 each only cut one strand, in order to create a double-strand break it is necessary for a pair of nickases to bind in close proximity and on opposite strands of the target nucleic acid, thereby creating a pair of nicks, which is the equivalent of a double-strand break. This requires that two separate guide RNAs—one for each nickase—must bind in close proximity and on opposite strands of the target nucleic acid. This requirement essentially doubles the minimum length of homology needed for the double-strand break to occur, thereby reducing the likelihood that a double-strand cleavage event will occur elsewhere in the genome, where the two guide RNA sites—if they exist—are unlikely to be sufficiently close to each other to enable the double-strand break to form. As described in the art, nickases can also be used to promote HDR versus NHEJ. HDR can be used to introduce selected changes into target sites in the genome through the use of specific donor sequences that effectively mediate the desired changes.

[0102] Mutations contemplated can include substitutions, additions, and deletions, or any combination thereof. The mutation converts the mutated amino acid to alanine. The mutation converts the mutated amino acid to another amino acid (e.g., glycine, serine, threonine, cysteine, valine, leucine, isoleucine, methionine, proline, phenylalanine, tyrosine, tryptophan, aspartic acid, glutamic acid, asparagine, glutamine, histidine, lysine, or arginine). The mutation converts the mutated amino acid to a non-natural amino acid (e.g., selenomethionine). The mutation converts the mutated amino acid to amino acid mimics (e.g., phosphomimics). The mutation can be a conservative mutation. For example, the mutation converts the mutated amino acid to amino acids that resemble the size, shape, charge, polarity, conformation, and/or rotamers of the mutated amino acids (e.g., cysteine/serine mutation, lysine/asparagine mutation, histidine/phenylalanine mutation). The mutation can cause a shift in reading frame and/or the creation of a premature stop codon. Mutations can cause changes to regulatory regions of genes or loci that affect expression of one or more genes.

[0103] The site-directed polypeptide (e.g., variant, mutated, enzymatically inactive and/or conditionally enzymatically inactive site-directed polypeptide) can target nucleic acid. The site-directed polypeptide (e.g., variant, mutated, enzymatically inactive and/or conditionally enzymatically inactive endoribonuclease) can target DNA. The site-directed polypeptide (e.g., variant, mutated, enzymatically inactive and/or conditionally enzymatically inactive endoribonuclease) can target RNA.

[0104] The site-directed polypeptide can comprise one or more non-native sequences (e.g., the site-directed polypeptide is a fusion protein).

[0105] The site-directed polypeptide can comprise an amino acid sequence comprising at least 15% amino acid identity to a Cas9 from a bacterium (e.g., S. pyogenes), a nucleic acid binding domain, and two nucleic acid cleaving domains (i.e., a HNH domain and a RuvC domain).

[0106] The site-directed polypeptide can comprise an amino acid sequence comprising at least 15% amino acid identity to a Cas9 from a bacterium (e.g., S. pyogenes), and two nucleic acid cleaving domains (i.e., a HNH domain and a RuvC domain).

[0107] The site-directed polypeptide can comprise an amino acid sequence comprising at least 15% amino acid identity to a Cas9 from a bacterium (e.g., S. pyogenes), and two nucleic acid cleaving domains, wherein one or both of the nucleic acid cleaving domains comprise at least 50% amino acid identity to a nuclease domain from Cas9 from a bacterium (e.g., S. pyogenes).

[0108] The site-directed polypeptide can comprise an amino acid sequence comprising at least 15% amino acid identity to a Cas9 from a bacterium (e.g., S. pyogenes), two nucleic acid cleaving domains (i.e., a HNH domain and a RuvC domain), and a non-native sequence (for example, a nuclear localization signal) or a linker linking the site-directed polypeptide to a non-native sequence.

[0109] The site-directed polypeptide can comprise an amino acid sequence comprising at least 15% amino acid identity to a Cas9 from a bacterium (e.g., S. pyogenes), two nucleic acid cleaving domains (i.e., a HNH domain and a RuvC domain), wherein the site-directed polypeptide comprises a mutation in one or both of the nucleic acid cleaving domains that reduces the cleaving activity of the nuclease domains by at least 50%.

[0110] The site-directed polypeptide can comprise an amino acid sequence comprising at least 15% amino acid identity to a Cas9 from a bacterium (e.g., S. pyogenes), and two nucleic acid cleaving domains (i.e., a HNH domain and a RuvC domain), wherein one of the nuclease domains comprises mutation of aspartic acid 10, and/or wherein one of the nuclease domains can comprise a mutation of histidine 840, and wherein the mutation reduces the cleaving activity of the nuclease domain(s) by at least 50%.

[0111] The one or more site-directed polypeptides, e.g. DNA endonucleases, can comprise two nickases that together effect one double-strand break at a specific locus in the genome, or four nickases that together effect or cause two double-strand breaks at specific loci in the genome. Alternatively, one site-directed polypeptide, e.g. DNA endonuclease, can effect or cause one double-strand break at a specific locus in the genome.

[0112] Non-limiting examples of Cas9 orthologs from other bacterial strains include but are not limited to, Cas proteins identified in Acaryochloris marina MBIC11017; Acetohalobium arabaticum DSM 5501; Acidithiobacillus caldus; Acidithiobacillus ferrooxidans ATCC 23270; Alicyclobacillus acidocaldarius LAA1; Alicyclobacillus acidocaldarius subsp. acidocaldarius DSM 446; Allochromatium vinosum DSM 180; Ammonifex degensii KC4; Anabaena variabilis ATCC 29413; Arthrospira maxima CS-328; Arthrospira platensis str. Paraca; Arthrospira sp. PCC 8005; Bacillus pseudomycoides DSM 12442; Bacillus selenitireducens MLS10; Burkholderiales bacterium 1_1_47; Caldicelulosiruptor becscii DSM 6725; Candidatus Desulforudis audaxviator MP104C; Caldicellulosiruptor hydrothermalis 108; Clostridium phage c-st; Clostridium botulinum A3 str. Loch Maree; Clostridium botulinum Ba4 str. 657; Clostridium difficile QCD-63q42; Crocosphaera watsonii WH 8501; Cyanothece sp. ATCC 51142; Cyanothece sp. CCY0110; Cyanothece sp. PCC 7424; Cyanothece sp. PCC 7822; Exiguobacterium sibiricum 255-15; Finegoldia magna ATCC 29328; Ktedonobacter racemifer DSM 44963; Lactobacillus delbrueckii subsp. bulgaricus PB2003/044-T3-4; Lactobacillus salivarius ATCC 11741; Listeria innocua; Lyngbya sp. PCC 8106; Marinobacter sp. ELB17; Methanohalobium evestigatum Z-7303; Microcystis phage Ma-LMM01; Microcystis aeruginosa NIES-843; Microscilla marina ATCC 23134; Microcoleus chthonoplastes PCC 7420; Neisseria meningitidis; Nitrosococcus halophilus Nc4; Nocardiopsis dassonvillei subsp. dassonvillei DSM 43111; Nodularia spumigena CCY9414; Nostoc sp. PCC 7120; Oscillatoria sp. PCC 6506; Pelotomaculum thermopropionicum SI; Petrotoga mobilis SJ95; Polaromonas naphthalenivorans CJ2; Polaromonas sp. JS666; Pseudoalteromonas haloplanktis TAC125; Streptomyces pristinaespiralis ATCC 25486; Streptomyces pristinaespiralis ATCC 25486; Streptococcus thermophilus; Streptomyces viridochromogenes DSM 40736; Streptosporangium roseum DSM 43021; Synechococcus sp. PCC 7335; and Thermosipho africanus TCF52B (Chylinski et al., RNA Biol., 2013; 10(5): 726-737).

[0113] In addition to Cas9 orthologs, other Cas9 variants such as fusion proteins of inactive dCas9 and effector domains with different functions may be served as a platform for genetic modulation. Any of the foregoing enzymes may be useful in the present disclosure.

[0114] Further examples of endonucleases that may be utilized in the present disclosure are provided in SEQ ID NOs: 1-620. These proteins may be modified before use or may be encoded in a nucleic acid sequence such as a DNA, RNA or mRNA or within a vector construct such as the plasmids or AAV vectors taught herein. Further, they may be codon optimized. SEQ ID NOs: 1-620 disclose a non-exhaustive listing of endonuclease sequences.

### Genome-Targeting Nucleic Acid

[0115] The present disclosure provides a genome-targeting nucleic acid that can direct the activities of an associated polypeptide (e.g., a site-directed polypeptide) to a specific target sequence within a target nucleic acid. The genome-targeting nucleic acid can be an RNA. A genome-targeting RNA is referred to as a “guide RNA” or “gRNA” herein. A guide RNA can comprise at least a spacer sequence that hybridizes to a target nucleic acid sequence of interest, and a CRISPR repeat sequence. In Type II systems, the gRNA also comprises a second RNA called the tracrRNA sequence. In the Type II guide RNA (gRNA), the CRISPR repeat sequence and tracrRNA sequence hybridize to each other to form a duplex. In the Type V guide RNA (gRNA), the crRNA forms a duplex. In both systems, the duplex can bind a site-directed polypeptide, such that the guide RNA and site-direct polypeptide form a complex. The genome-targeting nucleic acid can provide target specificity to the complex by virtue of its association with the site-directed polypeptide. The genome-targeting nucleic acid thus can direct the activity of the site-directed polypeptide.

[0116] Exemplary guide RNAs include the spacer sequences in SEQ ID NOs: 5305-108,217 of the Sequence Listing. Each guide RNA can be designed to include a spacer sequence complementary to its genomic target sequence. For example, each of the spacer sequences in SEQ ID NOs: 5305-108,217 of the Sequence Listing can be put into a single RNA chimera or a crRNA (along with a corresponding tracrRNA). See Jinek et al., Science, 337, 816-821 (2012) and Deltcheva et al., Nature, 471, 602-607 (2011).

[0117] The genome-targeting nucleic acid can be a double-molecule guide RNA. The genome-targeting nucleic acid can be a single-molecule guide RNA.

[0118] A double-molecule guide RNA can comprise two strands of RNA. The first strand comprises in the 5′ to 3′ direction, an optional spacer extension sequence, a spacer sequence and a minimum CRISPR repeat sequence. The second strand can comprise a minimum tracrRNA sequence (complementary to the minimum CRISPR repeat sequence), a 3′ tracrRNA sequence and an optional tracrRNA extension sequence.

[0119] A single-molecule guide RNA (sgRNA) in a Type II system can comprise, in the 5′ to 3′ direction, an optional spacer extension sequence, a spacer sequence, a minimum CRISPR repeat sequence, a single-molecule guide linker, a minimum tracrRNA sequence, a 3′ tracrRNA sequence and an optional tracrRNA extension sequence. The optional tracrRNA extension can comprise elements that contribute additional functionality (e.g., stability) to the guide RNA. The single-molecule guide linker can link the minimum CRISPR repeat and the minimum tracrRNA sequence to form a hairpin structure. The optional tracrRNA extension can comprise one or more hairpins.

[0120] The sgRNA can comprise a 20 nucleotide spacer sequence at the 5′ end of the sgRNA sequence. The sgRNA can comprise a less than a 20 nucleotide spacer sequence at the 5′ end of the sgRNA sequence. The sgRNA can comprise a more than 20 nucleotide spacer sequence at the 5′ end of the sgRNA sequence. The sgRNA can comprise a variable length spacer sequence with 17-30 nucleotides at the 5′ end of the sgRNA sequence (see Table 1).

[0121] The sgRNA can comprise no uracil at the 3′end of the sgRNA sequence, such as in SEQ ID NO: 108,250 of Table 1. The sgRNA can comprise one or more uracil at the 3′end of the sgRNA sequence, such as in SEQ ID NO: 108,251 in Table 1. For example, the sgRNA can comprise 1 uracil (U) at the 3′ end of the sgRNA sequence. The sgRNA can comprise 2 uracil (UU) at the 3′ end of the sgRNA sequence. The sgRNA can comprise 3 uracil (UUU) at the 3′ end of the sgRNA sequence. The sgRNA can comprise 4 uracil (UUUU) at the 3′ end of the sgRNA sequence. The sgRNA can comprise 5 uracil (UUUUU) at the 3′ end of the sgRNA sequence. The sgRNA can comprise 6 uracil (UUUUUU) at the 3′ end of the sgRNA sequence. The sgRNA can comprise 7 uracil (UUUUUUU) at the 3′ end of the sgRNA sequence. The sgRNA can comprise 8 uracil (UUUUUUUU) at the 3′ end of the sgRNA sequence.

[0122] The sgRNA can be unmodified or modified. For example, modified sgRNAs can comprise one or more 2′-O-methyl phosphorothioate nucleotides.

TABLE 1

| SEQ ID | |
|---|---|
| NO. | sgRNA sequence |
| 108,249 | nnnnnnnnnnnnnnnnnnnnguuuuagagcuagaaauagca |
| | aguuaaaauaaggcuaguccguuaucaacuugaaaaagugg |
| | caccgagucggugcuuuu |
| 108,250 | nnnnnnnnnnnnnnnnnnnnguuuuagagcuagaaauagca |
| | aguuaaaauaaggcuaguccguuaucaacuugaaaaagugg |
| | caccgagucggugc |
| 108,251 | n₍₁₇₋₃₀₎guuuuagagcuagaaauagcaaguuaaaauaaggc |
| | uaguccguuaucaacuugaaaaaguggcaccgagucggug |
| | cu₍₁₋₈₎ |

[0123] A single-molecule guide RNA (sgRNA) in a Type V system can comprise, in the 5′ to 3′ direction, a minimum CRISPR repeat sequence and a spacer sequence.

[0124] By way of illustration, guide RNAs used in the CRISPR/Cas9 or CRISPR/Cpf1 system, or other smaller RNAs can be readily synthesized by chemical means, as illustrated below and described in the art. While chemical synthetic procedures are continually expanding, purifications of such RNAs by procedures such as high performance liquid chromatography (HPLC, which avoids the use of gels such as PAGE) tends to become more challenging as polynucleotide lengths increase significantly beyond a hundred or so nucleotides. One approach used for generating RNAs of greater length is to produce two or more molecules that are ligated together. Much longer RNAs, such as those encoding a Cas9 or Cpf1 endonuclease, are more readily generated enzymatically. Various types of RNA modifications can be introduced during or after chemical synthesis and/or enzymatic generation of RNAs, e.g., modifications that enhance stability, reduce the likelihood or degree of innate immune response, and/or enhance other attributes, as described in the art.

### Spacer Extension Sequence

[0125] In some examples of genome-targeting nucleic acids, a spacer extension sequence can modify activity, provide stability and/or provide a location for modifications of a genome-targeting nucleic acid. A spacer extension sequence can modify on- or off-target activity or specificity. In some examples, a spacer extension sequence can be provided. The spacer extension sequence can have a length of more than 1, 5, 10, 15, 20, 25, 30, 35, 40, 45, 50, 60, 70, 80, 90, 100, 120, 140, 160, 180, 200, 220, 240, 260, 280, 300, 320, 340, 360, 380, 400, 1000, 2000, 3000, 4000, 5000, 6000, or 7000 or more nucleotides. The spacer extension sequence can have a length of less than 1, 5, 10, 15, 20, 25, 30, 35, 40, 45, 50, 60, 70, 80, 90, 100, 120, 140, 160, 180, 200, 220, 240, 260, 280, 300, 320, 340, 360, 380, 400, 1000, 2000, 3000, 4000, 5000, 6000, 7000 or more nucleotides. The spacer extension sequence can be less than 10 nucleotides in length. The spacer extension sequence can be between 10-30 nucleotides in length. The spacer extension sequence can be between 30-70 nucleotides in length.

[0126] The spacer extension sequence can comprise another moiety (e.g., a stability control sequence, an endoribonuclease binding sequence, a ribozyme). The moiety can decrease or increase the stability of a nucleic acid targeting nucleic acid. The moiety can be a transcriptional terminator segment (i.e., a transcription termination sequence). The moiety can function in a eukaryotic cell. The moiety can function in a prokaryotic cell. The moiety can function in both eukaryotic and prokaryotic cells. Non-limiting examples of suitable moieties include: a 5′ cap (e.g., a 7-methylguanylate cap (m7 G)), a riboswitch sequence (e.g., to allow for regulated stability and/or regulated accessibility by proteins and protein complexes), a sequence that forms a dsRNA duplex (i.e., a hairpin), a sequence that targets the RNA to a subcellular location (e.g., nucleus, mitochondria, chloroplasts, and the like), a modification or sequence that provides for tracking (e.g., direct conjugation to a fluorescent molecule, conjugation to a moiety that facilitates fluorescent detection, a sequence that allows for fluorescent detection, etc.), and/or a modification or sequence that provides a binding site for proteins (e.g., proteins that act on DNA, including transcriptional activators, transcriptional repressors, DNA methyltransferases, DNA demethylases, histone acetyltransferases, histone deacetylases, and the like).

### Spacer Sequence

[0127] The spacer sequence hybridizes to a sequence in a target nucleic acid of interest. The spacer of a genome-targeting nucleic acid can interact with a target nucleic acid in a sequence-specific manner via hybridization (i.e., base pairing). The nucleotide sequence of the spacer can vary depending on the sequence of the target nucleic acid of interest.

[0128] In a CRISPR/Cas system herein, the spacer sequence can be designed to hybridize to a target nucleic acid that is located 5′ of a PAM of the Cas9 enzyme used in the system. The spacer may perfectly match the target sequence or may have mismatches. Each Cas9 enzyme has a particular PAM sequence that it recognizes in a target DNA. For example, S. pyogenes recognizes in a target nucleic acid a PAM that comprises the sequence 5′-NRG-3′, where R comprises either A or G, where N is any nucleotide and N is immediately 3′ of the target nucleic acid sequence targeted by the spacer sequence.

[0129] The target nucleic acid sequence can comprise 20 nucleotides. The target nucleic acid can comprise less than 20 nucleotides. The target nucleic acid can comprise more than 20 nucleotides. The target nucleic acid can comprise at least: 5, 10, 15, 16, 17, 18, 19, 20, 21, 22, 23, 24, 25, 30 or more nucleotides. The target nucleic acid can comprise at most: 5, 10, 15, 16, 17, 18, 19, 20, 21, 22, 23, 24, 25, 30 or more nucleotides. The target nucleic acid sequence can comprise 20 bases immediately 5′ of the first nucleotide of the PAM. For example, in a sequence comprising 5′-G-3′ (SEQ ID NO: 108,248), the target nucleic acid can comprise the sequence that corresponds to the Ns, wherein N is any nucleotide, and the underlined NRG sequence is the S. pyogenes PAM. This target nucleic acid sequence is often referred to as the PAM strand, and the complementary nucleic acid sequence is often referred to the non-PAM strand. One of skill in the art would recognize that the spacer sequence hybridizes to the non-PAM strand of the target nucleic acid (FIGS. 1A and 1B).

[0130] The spacer sequence that hybridizes to the target nucleic acid can have a length of at least about 6 nucleotides (nt). The spacer sequence can be at least about 6 nt, at least about 10 nt, at least about 15 nt, at least about 18 nt, at least about 19 nt, at least about 20 nt, at least about 25 nt, at least about 30 nt, at least about 35 nt or at least about 40 nt, from about 6 nt to about 80 nt, from about 6 nt to about 50 nt, from about 6 nt to about 45 nt, from about 6 nt to about 40 nt, from about 6 nt to about 35 nt, from about 6 nt to about 30 nt, from about 6 nt to about 25 nt, from about 6 nt to about 20 nt, from about 6 nt to about 19 nt, from about 10 nt to about 50 nt, from about 10 nt to about 45 nt, from about 10 nt to about 40 nt, from about 10 nt to about 35 nt, from about 10 nt to about 30 nt, from about 10 nt to about 25 nt, from about 10 nt to about 20 nt, from about 10 nt to about 19 nt, from about 19 nt to about 25 nt, from about 19 nt to about 30 nt, from about 19 nt to about 35 nt, from about 19 nt to about 40 nt, from about 19 nt to about 45 nt, from about 19 nt to about 50 nt, from about 19 nt to about 60 nt, from about 20 nt to about 25 nt, from about 20 nt to about 30 nt, from about 20 nt to about 35 nt, from about 20 nt to about 40 nt, from about 20 nt to about 45 nt, from about 20 nt to about 50 nt, or from about 20 nt to about 60 nt. In some examples, the spacer sequence can comprise 20 nucleotides. In some examples, the spacer sequence can comprise 19 nucleotides. In some examples, the spacer sequence can comprise 18 nucleotides. In some examples, the spacer sequence can comprise 21 nucleotides. In some examples, the spacer sequence can comprise 22 nucleotides.

[0131] In some examples, the percent complementarity between the spacer sequence and the target nucleic acid is at least about 30%, at least about 40%, at least about 50%, at least about 60%, at least about 65%, at least about 70%, at least about 75%, at least about 80%, at least about 85%, at least about 90%, at least about 95%, at least about 97%, at least about 98%, at least about 99%, or 100%. In some examples, the percent complementarity between the spacer sequence and the target nucleic acid is at most about 30%, at most about 40%, at most about 50%, at most about 60%, at most about 65%, at most about 70%, at most about 75%, at most about 80%, at most about 85%, at most about 90%, at most about 95%, at most about 97%, at most about 98%, at most about 99%, or 100%. In some examples, the percent complementarity between the spacer sequence and the target nucleic acid is 100% over the six contiguous 5′-most nucleotides of the target sequence of the complementary strand of the target nucleic acid. The percent complementarity between the spacer sequence and the target nucleic acid can be at least 60% over about 20 contiguous nucleotides. The length of the spacer sequence and the target nucleic acid can differ by 1 to 6 nucleotides, which may be thought of as a bulge or bulges.

[0132] The spacer sequence can be designed or chosen using a computer program. The computer program can use variables, such as predicted melting temperature, secondary structure formation, predicted annealing temperature, sequence identity, genomic context, chromatin accessibility, % GC, frequency of genomic occurrence (e.g., of sequences that are identical or are similar but vary in one or more spots as a result of mismatch, insertion or deletion), methylation status, presence of SNPs, and the like.

### Minimum CRISPR Repeat Sequence

[0133] In some aspects, a minimum CRISPR repeat sequence is a sequence with at least about 30%, about 40%, about 50%, about 60%, about 65%, about 70%, about 75%, about 80%, about 85%, about 90%, about 95%, or 100% sequence identity to a reference CRISPR repeat sequence (e.g., crRNA from S. pyogenes).

[0134] In some aspects, a minimum CRISPR repeat sequence comprises nucleotides that can hybridize to a minimum tracrRNA sequence in a cell. The minimum CRISPR repeat sequence and a minimum tracrRNA sequence can form a duplex, i.e. a base-paired double-stranded structure. Together, the minimum CRISPR repeat sequence and the minimum tracrRNA sequence can bind to the site-directed polypeptide. At least a part of the minimum CRISPR repeat sequence can hybridize to the minimum tracrRNA sequence. At least a part of the minimum CRISPR repeat sequence can comprise at least about 30%, about 40%, about 50%, about 60%, about 65%, about 70%, about 75%, about 80%, about 85%, about 90%, about 95%, or 100% complementary to the minimum tracrRNA sequence. In some aspects, at least a part of the minimum CRISPR repeat sequence comprises at most about 30%, about 40%, about 50%, about 60%, about 65%, about 70%, about 75%, about 80%, about 85%, about 90%, about 95%, or 100% complementary to the minimum tracrRNA sequence.

[0135] The minimum CRISPR repeat sequence can have a length from about 7 nucleotides to about 100 nucleotides. For example, the length of the minimum CRISPR repeat sequence is from about 7 nucleotides (nt) to about 50 nt, from about 7 nt to about 40 nt, from about 7 nt to about 30 nt, from about 7 nt to about 25 nt, from about 7 nt to about 20 nt, from about 7 nt to about 15 nt, from about 8 nt to about 40 nt, from about 8 nt to about 30 nt, from about 8 nt to about 25 nt, from about 8 nt to about 20 nt, from about 8 nt to about 15 nt, from about 15 nt to about 100 nt, from about 15 nt to about 80 nt, from about 15 nt to about 50 nt, from about 15 nt to about 40 nt, from about 15 nt to about 30 nt, or from about 15 nt to about 25 nt. In some aspects, the minimum CRISPR repeat sequence is approximately 9 nucleotides in length. In some aspects, the minimum CRISPR repeat sequence is approximately 12 nucleotides in length.

[0136] The minimum CRISPR repeat sequence can be at least about 60% identical to a reference minimum CRISPR repeat sequence (e.g., wild-type crRNA from S. pyogenes) over a stretch of at least 6, 7, or 8 contiguous nucleotides. For example, the minimum CRISPR repeat sequence can be at least about 65% identical, at least about 70% identical, at least about 75% identical, at least about 80% identical, at least about 85% identical, at least about 90% identical, at least about 95% identical, at least about 98% identical, at least about 99% identical or 100% identical to a reference minimum CRISPR repeat sequence over a stretch of at least 6, 7, or 8 contiguous nucleotides.

Minimum tracrRNA Sequence

[0137] A minimum tracrRNA sequence can be a sequence with at least about 30%, about 40%, about 50%, about 60%, about 65%, about 70%, about 75%, about 80%, about 85%, about 90%, about 95%, or 100% sequence identity to a reference tracrRNA sequence (e.g., wild type tracrRNA from S. pyogenes).

[0138] A minimum tracrRNA sequence can comprise nucleotides that hybridize to a minimum CRISPR repeat sequence in a cell. A minimum tracrRNA sequence and a minimum CRISPR repeat sequence form a duplex, i.e. a base-paired double-stranded structure. Together, the minimum tracrRNA sequence and the minimum CRISPR repeat can bind to a site-directed polypeptide. At least a part of the minimum tracrRNA sequence can hybridize to the minimum CRISPR repeat sequence. The minimum tracrRNA sequence can be at least about 30%, about 40%, about 50%, about 60%, about 65%, about 70%, about 75%, about 80%, about 85%, about 90%, about 95%, or 100% complementary to the minimum CRISPR repeat sequence.

[0139] The minimum tracrRNA sequence can have a length from about 7 nucleotides to about 100 nucleotides. For example, the minimum tracrRNA sequence can be from about 7 nucleotides (nt) to about 50 nt, from about 7 nt to about 40 nt, from about 7 nt to about 30 nt, from about 7 nt to about 25 nt, from about 7 nt to about 20 nt, from about 7 nt to about 15 nt, from about 8 nt to about 40 nt, from about 8 nt to about 30 nt, from about 8 nt to about 25 nt, from about 8 nt to about 20 nt, from about 8 nt to about 15 nt, from about 15 nt to about 100 nt, from about 15 nt to about 80 nt, from about 15 nt to about 50 nt, from about 15 nt to about 40 nt, from about 15 nt to about 30 nt or from about 15 nt to about 25 nt long. The minimum tracrRNA sequence can be approximately 9 nucleotides in length. The minimum tracrRNA sequence can be approximately 12 nucleotides. The minimum tracrRNA can consist of tracrRNA nt 23-48 described in Jinek et al., supra.

[0140] The minimum tracrRNA sequence can be at least about 60% identical to a reference minimum tracrRNA (e.g., wild type, tracrRNA from S. pyogenes) sequence over a stretch of at least 6, 7, or 8 contiguous nucleotides. For example, the minimum tracrRNA sequence can be at least about 65% identical, about 70% identical, about 75% identical, about 80% identical, about 85% identical, about 90% identical, about 95% identical, about 98% identical, about 99% identical or 100% identical to a reference minimum tracrRNA sequence over a stretch of at least 6, 7, or 8 contiguous nucleotides.

[0141] The duplex between the minimum CRISPR RNA and the minimum tracrRNA can comprise a double helix. The duplex between the minimum CRISPR RNA and the minimum tracrRNA can comprise at least about 1, 2, 3, 4, 5, 6, 7, 8, 9, or 10 or more nucleotides. The duplex between the minimum CRISPR RNA and the minimum tracrRNA can comprise at most about 1, 2, 3, 4, 5, 6, 7, 8, 9, or 10 or more nucleotides.

[0142] The duplex can comprise a mismatch (i.e., the two strands of the duplex are not 100% complementary). The duplex can comprise at least about 1, 2, 3, 4, or 5 or mismatches. The duplex can comprise at most about 1, 2, 3, 4, or 5 or mismatches. The duplex can comprise no more than 2 mismatches.

### Bulges

[0143] In some cases, there can be a “bulge” in the duplex between the minimum CRISPR RNA and the minimum tracrRNA. A bulge is an unpaired region of nucleotides within the duplex. A bulge can contribute to the binding of the duplex to the site-directed polypeptide. The bulge can comprise, on one side of the duplex, an unpaired 5′-XXXY-3′ where X is any purine and Y comprises a nucleotide that can form a wobble pair with a nucleotide on the opposite strand, and an unpaired nucleotide region on the other side of the duplex. The number of unpaired nucleotides on the two sides of the duplex can be different.

[0144] In one example, the bulge can comprise an unpaired purine (e.g., adenine) on the minimum CRISPR repeat strand of the bulge. In some examples, the bulge can comprise an unpaired 5′-AAGY-3′ of the minimum tracrRNA sequence strand of the bulge, where Y comprises a nucleotide that can form a wobble pairing with a nucleotide on the minimum CRISPR repeat strand.

[0145] A bulge on the minimum CRISPR repeat side of the duplex can comprise at least 1, 2, 3, 4, or 5 or more unpaired nucleotides. A bulge on the minimum CRISPR repeat side of the duplex can comprise at most 1, 2, 3, 4, or 5 or more unpaired nucleotides. A bulge on the minimum CRISPR repeat side of the duplex can comprise 1 unpaired nucleotide.

[0146] A bulge on the minimum tracrRNA sequence side of the duplex can comprise at least 1, 2, 3, 4, 5, 6, 7, 8, 9, or 10 or more unpaired nucleotides. A bulge on the minimum tracrRNA sequence side of the duplex can comprise at most 1, 2, 3, 4, 5, 6, 7, 8, 9, or 10 or more unpaired nucleotides. A bulge on a second side of the duplex (e.g., the minimum tracrRNA sequence side of the duplex) can comprise 4 unpaired nucleotides.

[0147] A bulge can comprise at least one wobble pairing. In some examples, a bulge can comprise at most one wobble pairing. A bulge can comprise at least one purine nucleotide. A bulge can comprise at least 3 purine nucleotides. A bulge sequence can comprise at least 5 purine nucleotides. A bulge sequence can comprise at least one guanine nucleotide. In some examples, a bulge sequence can comprise at least one adenine nucleotide.

### Hairpins

[0148] In various examples, one or more hairpins can be located 3′ to the minimum tracrRNA in the 3′ tracrRNA sequence.

[0149] The hairpin can start at least about 1, 2, 3, 4, 5, 6, 7, 8, 9, 10, 15, or 20 or more nucleotides 3′ from the last paired nucleotide in the minimum CRISPR repeat and minimum tracrRNA sequence duplex. The hairpin can start at most about 1, 2, 3, 4, 5, 6, 7, 8, 9 or 10 or more nucleotides 3′ of the last paired nucleotide in the minimum CRISPR repeat and minimum tracrRNA sequence duplex.

[0150] The hairpin can comprise at least about 1, 2, 3, 4, 5, 6, 7, 8, 9, 10, 15, or 20 or more consecutive nucleotides. The hairpin can comprise at most about 1, 2, 3, 4, 5, 6, 7, 8, 9, 10, 15, or more consecutive nucleotides.

[0151] The hairpin can comprise a CC dinucleotide (i.e., two consecutive cytosine nucleotides).

[0152] The hairpin can comprise duplexed nucleotides (e.g., nucleotides in a hairpin, hybridized together). For example, a hairpin can comprise a CC dinucleotide that is hybridized to a GG dinucleotide in a hairpin duplex of the 3′ tracrRNA sequence.

[0153] One or more of the hairpins can interact with guide RNA-interacting regions of a site-directed polypeptide.

[0154] In some examples, there are two or more hairpins, and in other examples there are three or more hairpins. 3′ tracrRNA sequence

[0155] A 3′ tracrRNA sequence can comprise a sequence with at least about 30%, about 40%, about 50%, about 60%, about 65%, about 70%, about 75%, about 80%, about 85%, about 90%, about 95%, or 100% sequence identity to a reference tracrRNA sequence (e.g., a tracrRNA from S. pyogenes).

[0156] The 3′ tracrRNA sequence can have a length from about 6 nucleotides to about 100 nucleotides. For example, the 3′ tracrRNA sequence can have a length from about 6 nucleotides (nt) to about 50 nt, from about 6 nt to about 40 nt, from about 6 nt to about 30 nt, from about 6 nt to about 25 nt, from about 6 nt to about 20 nt, from about 6 nt to about 15 nt, from about 8 nt to about 40 nt, from about 8 nt to about 30 nt, from about 8 nt to about 25 nt, from about 8 nt to about 20 nt, from about 8 nt to about 15 nt, from about 15 nt to about 100 nt, from about 15 nt to about 80 nt, from about 15 nt to about 50 nt, from about 15 nt to about 40 nt, from about 15 nt to about 30 nt, or from about 15 nt to about 25 nt. The 3′ tracrRNA sequence can have a length of approximately 14 nucleotides.

[0157] The 3′ tracrRNA sequence can be at least about 60% identical to a reference 3′ tracrRNA sequence (e.g., wild type 3′ tracrRNA sequence from S. pyogenes) over a stretch of at least 6, 7, or 8 contiguous nucleotides. For example, the 3′ tracrRNA sequence can be at least about 60% identical, about 65% identical, about 70% identical, about 75% identical, about 80% identical, about 85% identical, about 90% identical, about 95% identical, about 98% identical, about 99% identical, or 100% identical, to a reference 3′ tracrRNA sequence (e.g., wild type 3′ tracrRNA sequence from S. pyogenes) over a stretch of at least 6, 7, or 8 contiguous nucleotides.

[0158] The 3′ tracrRNA sequence can comprise more than one duplexed region (e.g., hairpin, hybridized region). The 3′ tracrRNA sequence can comprise two duplexed regions.

[0159] The 3′ tracrRNA sequence can comprise a stem loop structure. The stem loop structure in the 3′ tracrRNA can comprise at least 1, 2, 3, 4, 5, 6, 7, 8, 9, 10, 15 or 20 or more nucleotides. The stem loop structure in the 3′ tracrRNA can comprise at most 1, 2, 3, 4, 5, 6, 7, 8, 9 or 10 or more nucleotides. The stem loop structure can comprise a functional moiety. For example, the stem loop structure can comprise an aptamer, a ribozyme, a protein-interacting hairpin, a CRISPR array, an intron, or an exon. The stem loop structure can comprise at least about 1, 2, 3, 4, or 5 or more functional moieties. The stem loop structure can comprise at most about 1, 2, 3, 4, or 5 or more functional moieties.

[0160] The hairpin in the 3′ tracrRNA sequence can comprise a P-domain. In some examples, the P-domain can comprise a double-stranded region in the hairpin.

tracrRNA Extension Sequence

[0161] A tracrRNA extension sequence may be provided whether the tracrRNA is in the context of single-molecule guides or double-molecule guides. The tracrRNA extension sequence can have a length from about 1 nucleotide to about 400 nucleotides. The tracrRNA extension sequence can have a length of more than 1, 5, 10, 15, 20, 25, 30, 35, 40, 45, 50, 60, 70, 80, 90, 100, 120, 140, 160, 180, 200, 220, 240, 260, 280, 300, 320, 340, 360, 380, or 400 nucleotides. The tracrRNA extension sequence can have a length from about 20 to about 5000 or more nucleotides. The tracrRNA extension sequence can have a length of more than 1000 nucleotides. The tracrRNA extension sequence can have a length of less than 1, 5, 10, 15, 20, 25, 30, 35, 40, 45, 50, 60, 70, 80, 90, 100, 120, 140, 160, 180, 200, 220, 240, 260, 280, 300, 320, 340, 360, 380, 400 or more nucleotides. The tracrRNA extension sequence can have a length of less than 1000 nucleotides. The tracrRNA extension sequence can comprise less than 10 nucleotides in length. The tracrRNA extension sequence can be 10-30 nucleotides in length. The tracrRNA extension sequence can be 30-70 nucleotides in length.

[0162] The tracrRNA extension sequence can comprise a functional moiety (e.g., a stability control sequence, ribozyme, endoribonuclease binding sequence). The functional moiety can comprise a transcriptional terminator segment (i.e., a transcription termination sequence). The functional moiety can have a total length from about 10 nucleotides (nt) to about 100 nucleotides, from about 10 nt to about 20 nt, from about 20 nt to about 30 nt, from about 30 nt to about 40 nt, from about 40 nt to about 50 nt, from about 50 nt to about 60 nt, from about 60 nt to about 70 nt, from about 70 nt to about 80 nt, from about 80 nt to about 90 nt, or from about 90 nt to about 100 nt, from about 15 nt to about 80 nt, from about 15 nt to about 50 nt, from about 15 nt to about 40 nt, from about 15 nt to about 30 nt, or from about 15 nt to about 25 nt. The functional moiety can function in a eukaryotic cell. The functional moiety can function in a prokaryotic cell. The functional moiety can function in both eukaryotic and prokaryotic cells.

[0163] Non-limiting examples of suitable tracrRNA extension functional moieties include a 3′ poly-adenylated tail, a riboswitch sequence (e.g., to allow for regulated stability and/or regulated accessibility by proteins and protein complexes), a sequence that forms a dsRNA duplex (i.e., a hairpin), a sequence that targets the RNA to a subcellular location (e.g., nucleus, mitochondria, chloroplasts, and the like), a modification or sequence that provides for tracking (e.g., direct conjugation to a fluorescent molecule, conjugation to a moiety that facilitates fluorescent detection, a sequence that allows for fluorescent detection, etc.), and/or a modification or sequence that provides a binding site for proteins (e.g., proteins that act on DNA, including transcriptional activators, transcriptional repressors, DNA methyltransferases, DNA demethylases, histone acetyltransferases, histone deacetylases, and the like). The tracrRNA extension sequence can comprise a primer binding site or a molecular index (e.g., barcode sequence). The tracrRNA extension sequence can comprise one or more affinity tags.

### Single-Molecule Guide Linker Sequence

[0164] The linker sequence of a single-molecule guide nucleic acid can have a length from about 3 nucleotides to about 100 nucleotides. In Jinek et al., supra, for example, a simple 4 nucleotide “tetraloop” (-GAAA-) was used, Science, 337(6096):816-821 (2012). An illustrative linker has a length from about 3 nucleotides (nt) to about 90 nt, from about 3 nt to about 80 nt, from about 3 nt to about 70 nt, from about 3 nt to about 60 nt, from about 3 nt to about 50 nt, from about 3 nt to about 40 nt, from about 3 nt to about 30 nt, from about 3 nt to about 20 nt, from about 3 nt to about 10 nt. For example, the linker can have a length from about 3 nt to about 5 nt, from about 5 nt to about 10 nt, from about 10 nt to about 15 nt, from about 15 nt to about 20 nt, from about 20 nt to about 25 nt, from about 25 nt to about 30 nt, from about 30 nt to about 35 nt, from about 35 nt to about 40 nt, from about 40 nt to about 50 nt, from about 50 nt to about 60 nt, from about 60 nt to about 70 nt, from about 70 nt to about 80 nt, from about 80 nt to about 90 nt, or from about 90 nt to about 100 nt. The linker of a single-molecule guide nucleic acid can be between 4 and 40 nucleotides. The linker can be at least about 100, 500, 1000, 1500, 2000, 2500, 3000, 3500, 4000, 4500, 5000, 5500, 6000, 6500, or 7000 or more nucleotides. The linker can be at most about 100, 500, 1000, 1500, 2000, 2500, 3000, 3500, 4000, 4500, 5000, 5500, 6000, 6500, or 7000 or more nucleotides.

[0165] Linkers can comprise any of a variety of sequences, although in some examples the linker will not comprise sequences that have extensive regions of homology with other portions of the guide RNA, which might cause intramolecular binding that could interfere with other functional regions of the guide. In Jinek et al., supra, a simple 4 nucleotide sequence -GAAA- was used, Science, 337(6096):816-821 (2012), but numerous other sequences, including longer sequences can likewise be used.

[0166] The linker sequence can comprise a functional moiety. For example, the linker sequence can comprise one or more features, including an aptamer, a ribozyme, a protein-interacting hairpin, a protein binding site, a CRISPR array, an intron, or an exon. The linker sequence can comprise at least about 1, 2, 3, 4, or 5 or more functional moieties. In some examples, the linker sequence can comprise at most about 1, 2, 3, 4, or 5 or more functional moieties.

### Nucleic Acid Modifications (Chemical and Structural Modifications)

[0167] In some aspects, polynucleotides introduced into cells can comprise one or more modifications that can be used individually or in combination, for example, to enhance activity, stability or specificity, alter delivery, reduce innate immune responses in host cells, or for other enhancements, as further described herein and known in the art.

[0168] In certain examples, modified polynucleotides can be used in the CRISPR/Cas9 or CRISPR/Cpf1 system, in which case the guide RNAs (either single-molecule guides or double-molecule guides) and/or a DNA or an RNA encoding a Cas9 or Cpf1 endonuclease introduced into a cell can be modified, as described and illustrated below. Such modified polynucleotides can be used in the CRISPR/Cas9 or CRISPR/Cpf1 system to edit any one or more genomic loci.

[0169] Using the CRISPR/Cas9 or CRISPR/Cpf1 system for purposes of non-limiting illustrations of such uses, modifications of guide RNAs can be used to enhance the formation or stability of the CRISPR/Cas9 or CRISPR/Cpf1 genome editing complex comprising guide RNAs, which can be single-molecule guides or double-molecule, and a Cas9 or Cpf1 endonuclease. Modifications of guide RNAs can also or alternatively be used to enhance the initiation, stability or kinetics of interactions between the genome editing complex with the target sequence in the genome, which can be used, for example, to enhance on-target activity. Modifications of guide RNAs can also or alternatively be used to enhance specificity, e.g., the relative rates of genome editing at the on-target site as compared to effects at other (off-target) sites.

[0170] Modifications can also or alternatively be used to increase the stability of a guide RNA, e.g., by increasing its resistance to degradation by ribonucleases (RNases) present in a cell, thereby causing its half-life in the cell to be increased. Modifications enhancing guide RNA half-life can be particularly useful in aspects in which a Cas9 or Cpf1 endonuclease is introduced into the cell to be edited via an RNA that needs to be translated in order to generate endonuclease, because increasing the half-life of guide RNAs introduced at the same time as the RNA encoding the endonuclease can be used to increase the time that the guide RNAs and the encoded Cas9 or Cpf1 endonuclease co-exist in the cell.

[0171] Modifications can also or alternatively be used to decrease the likelihood or degree to which RNAs introduced into cells elicit innate immune responses. Such responses, which have been well characterized in the context of RNA interference (RNAi), including small-interfering RNAs (siRNAs), as described below and in the art, tend to be associated with reduced half-life of the RNA and/or the elicitation of cytokines or other factors associated with immune responses.

[0172] One or more types of modifications can also be made to RNAs encoding an endonuclease that are introduced into a cell, including, without limitation, modifications that enhance the stability of the RNA (such as by increasing its degradation by RNases present in the cell), modifications that enhance translation of the resulting product (i.e. the endonuclease), and/or modifications that decrease the likelihood or degree to which the RNAs introduced into cells elicit innate immune responses.

[0173] Combinations of modifications, such as the foregoing and others, can likewise be used. In the case of CRISPR/Cas9 or CRISPR/Cpf1, for example, one or more types of modifications can be made to guide RNAs (including those exemplified above), and/or one or more types of modifications can be made to RNAs encoding Cas endonuclease (including those exemplified above).

[0174] By way of illustration, guide RNAs used in the CRISPR/Cas9 or CRISPR/Cpf1 system, or other smaller RNAs can be readily synthesized by chemical means, enabling a number of modifications to be readily incorporated, as illustrated below and described in the art. While chemical synthetic procedures are continually expanding, purifications of such RNAs by procedures such as high-performance liquid chromatography (HPLC, which avoids the use of gels such as PAGE) tends to become more challenging as polynucleotide lengths increase significantly beyond a hundred or so nucleotides. One approach that can be used for generating chemically-modified RNAs of greater length is to produce two or more molecules that are ligated together. Much longer RNAs, such as those encoding a Cas9 endonuclease, are more readily generated enzymatically. While fewer types of modifications are available for use in enzymatically produced RNAs, there are still modifications that can be used to, e.g., enhance stability, reduce the likelihood or degree of innate immune response, and/or enhance other attributes, as described further below and in the art; and new types of modifications are regularly being developed.

[0175] By way of illustration of various types of modifications, especially those used frequently with smaller chemically synthesized RNAs, modifications can comprise one or more nucleotides modified at the 2′ position of the sugar, in some aspects a 2′-O-alkyl, 2′-O-alkyl-O-alkyl, or 2′-fluoro-modified nucleotide. In some examples, RNA modifications include 2′-fluoro, 2′-amino or 2′-O-methyl modifications on the ribose of pyrimidines, abasic residues, or an inverted base at the 3′ end of the RNA. Such modifications are routinely incorporated into oligonucleotides and these oligonucleotides have been shown to have a higher Tm (i.e., higher target binding affinity) than 2′-deoxyoligonucleotides against a given target.

[0176] A number of nucleotide and nucleoside modifications have been shown to make the oligonucleotide into which they are incorporated more resistant to nuclease digestion than the native oligonucleotide; these modified oligos survive intact for a longer time than unmodified oligonucleotides. Specific examples of modified oligonucleotides include those comprising modified backbones, for example, phosphorothioates, phosphotriesters, methyl phosphonates, short chain alkyl or cycloalkyl intersugar linkages or short chain heteroatomic or heterocyclic intersugar linkages. Some oligonucleotides are oligonucleotides with phosphorothioate backbones and those with heteroatom backbones, particularly CH₂—NH—O—CH₂, CH, ˜N(CH₃)˜O˜CH₂ (known as a methylene(methylimino) or MMI backbone), CH₂—O—N (CH₃)—CH₂, CH₂—N(CH₃)—N(CH₃)—CH₂ and O—N(CH₃)— CH₂—CH₂ backbones, wherein the native phosphodiester backbone is represented as O— P— O— CH); amide backbones [see De Mesmaeker et al., Ace. Chem. Res., 28:366-374 (1995)]; morpholino backbone structures (see Summerton and Weller, U.S. Pat. No. 5,034,506); peptide nucleic acid (PNA) backbone (wherein the phosphodiester backbone of the oligonucleotide is replaced with a polyamide backbone, the nucleotides being bound directly or indirectly to the aza nitrogen atoms of the polyamide backbone, see Nielsen et al., Science 1991, 254, 1497). Phosphorus-containing linkages include, but are not limited to, phosphorothioates, chiral phosphorothioates, phosphorodithioates, phosphotriesters, aminoalkylphosphotriesters, methyl and other alkyl phosphonates comprising 3′alkylene phosphonates and chiral phosphonates, phosphinates, phosphoramidates comprising 3′-amino phosphoramidate and aminoalkylphosphoramidates, thionophosphoramidates, thionoalkylphosphonates, thionoalkylphosphotriesters, and boranophosphates having normal 3′-5′ linkages, 2′-5′ linked analogs of these, and those having inverted polarity wherein the adjacent pairs of nucleoside units are linked 3′-5′ to 5′-3′ or 2′-5′ to 5′-2′; see U.S. Pat. Nos. 3,687,808; 4,469,863; 4,476,301; 5,023,243; 5,177,196; 5,188,897; 5,264,423; 5,276,019; 5,278,302; 5,286,717; 5,321,131; 5,399,676; 5,405,939; 5,453,496; 5,455,233; 5,466,677; 5,476,925; 5,519,126; 5,536,821; 5,541,306; 5,550,111; 5,563,253; 5,571,799; 5,587,361; and 5,625,050.

[0177] Morpholino-based oligomeric compounds are described in Braasch and David Corey, Biochemistry, 41(14): 4503-4510 (2002); Genesis, Volume 30, Issue 3, (2001); Heasman, Dev. Biol., 243: 209-214 (2002); Nasevicius et al., Nat. Genet., 26:216-220 (2000); Lacerra et al., Proc. Natl. Acad. Sci., 97: 9591-9596 (2000); and U.S. Pat. No. 5,034,506, issued Jul. 23, 1991.

[0178] Cyclohexenyl nucleic acid oligonucleotide mimetics are described in Wang et al., J. Am. Chem. Soc., 122: 8595-8602 (2000).

[0179] Modified oligonucleotide backbones that do not include a phosphorus atom therein have backbones that are formed by short chain alkyl or cycloalkyl internucleoside linkages, mixed heteroatom and alkyl or cycloalkyl internucleoside linkages, or one or more short chain heteroatomic or heterocyclic internucleoside linkages. These comprise those having morpholino linkages (formed in part from the sugar portion of a nucleoside); siloxane backbones; sulfide, sulfoxide and sulfone backbones; formacetyl and thioformacetyl backbones; methylene formacetyl and thioformacetyl backbones; alkene containing backbones; sulfamate backbones; methyleneimino and methylenehydrazino backbones; sulfonate and sulfonamide backbones; amide backbones; and others having mixed N, O, S, and CH₂ component parts; see U.S. Pat. Nos. 5,034,506; 5,166,315; 5,185,444; 5,214,134; 5,216,141; 5,235,033; 5,264,562; 5,264,564; 5,405,938; 5,434,257; 5,466,677; 5,470,967; 5,489,677; 5,541,307; 5,561,225; 5,596,086; 5,602,240; 5,610,289; 5,602,240; 5,608,046; 5,610,289; 5,618,704; 5,623,070; 5,663,312; 5,633,360; 5,677,437; and 5,677,439.

[0180] One or more substituted sugar moieties can also be included, e.g., one of the following at the 2′ position: OH, SH, SCH₃, F, OCN, OCH₃OCH₃, OCH₃O(CH₂)n CH₃, O(CH₂)n NH₂, or O(CH₂)n CH₃, where n is from 1 to about 10; C1 to C10 lower alkyl, alkoxyalkoxy, substituted lower alkyl, alkaryl or aralkyl; Cl; Br; CN; CF₃; OCF₃; O-, S-, or N-alkyl; O-, S-, or N-alkenyl; SOCH₃; SO₂CH₃; ONO₂; NO₂; N₃; NH₂; heterocycloalkyl; heterocycloalkaryl; aminoalkylamino; polyalkylamino; substituted silyl; an RNA cleaving group; a reporter group; an intercalator; a group for improving the pharmacokinetic properties of an oligonucleotide; or a group for improving the pharmacodynamic properties of an oligonucleotide and other substituents having similar properties. In some aspects, a modification includes 2′-methoxyethoxy (2′-O—CH₂CH₂OCH₃, also known as 2′-O-(2-methoxyethyl)) (Martin et al, Helv. Chim. Acta, 1995, 78, 486). Other modifications include 2′-methoxy (2′-O—CH₃), 2′-propoxy (2′-OCH₂CH₂CH₃) and 2′-fluoro (2′-F). Similar modifications may also be made at other positions on the oligonucleotide, particularly the 3′ position of the sugar on the 3′ terminal nucleotide and the 5′ position of 5′ terminal nucleotide. Oligonucleotides may also have sugar mimetics, such as cyclobutyls in place of the pentofuranosyl group.

[0181] In some examples, both a sugar and an internucleoside linkage, i.e., the backbone, of the nucleotide units can be replaced with novel groups. The base units can be maintained for hybridization with an appropriate nucleic acid target compound. One such oligomeric compound, an oligonucleotide mimetic that has been shown to have excellent hybridization properties, is referred to as a peptide nucleic acid (PNA). In PNA compounds, the sugar-backbone of an oligonucleotide can be replaced with an amide containing backbone, for example, an aminoethylglycine backbone. The nucleobases can be retained and bound directly or indirectly to aza nitrogen atoms of the amide portion of the backbone. Representative U.S. patents that teach the preparation of PNA compounds comprise, but are not limited to, U.S. Pat. Nos. 5,539,082; 5,714,331; and 5,719,262. Further teaching of PNA compounds can be found in Nielsen et al, Science, 254: 1497-1500 (1991).

[0182] Guide RNAs can also include, additionally or alternatively, nucleobase (often referred to in the art simply as “base”) modifications or substitutions. As used herein, “unmodified” or “natural” nucleobases include adenine (A), guanine (G), thymine (T), cytosine (C), and uracil (U). Modified nucleobases include nucleobases found only infrequently or transiently in natural nucleic acids, e.g., hypoxanthine, 6-methyladenine, 5-Me pyrimidines, particularly 5-methylcytosine (also referred to as 5-methyl-2′ deoxycytosine and often referred to in the art as 5-Me-C), 5-hydroxymethylcytosine (HMC), glycosyl HMC and gentobiosyl HMC, as well as synthetic nucleobases, e.g., 2-aminoadenine, 2-(methylamino) adenine, 2-(imidazolylalkyl)adenine, 2-(aminoalklyamino) adenine or other heterosubstituted alkyladenines, 2-thiouracil, 2-thiothymine, 5-bromouracil, 5-hydroxymethyluracil, 8-azaguanine, 7-deazaguanine, N6 (6-aminohexyl) adenine, and 2,6-diaminopurine. Kornberg, A., DNA Replication, W. H. Freeman & Co., San Francisco, pp. 75-77 (1980); Gebeyehu et al., Nucl. Acids Res. 15:4513 (1997). A “universal” base known in the art, e.g., inosine, can also be included. 5-Me-C substitutions have been shown to increase nucleic acid duplex stability by 0.6-1.2° C. (Sanghvi, Y. S., in Crooke, S. T. and Lebleu, B., eds., Antisense Research and Applications, CRC Press, Boca Raton, 1993, pp. 276-278) and are aspects of base substitutions.

[0183] Modified nucleobases can comprise other synthetic and natural nucleobases, such as 5-methylcytosine (5-me-C), 5-hydroxymethyl cytosine, xanthine, hypoxanthine, 2-aminoadenine, 6-methyl and other alkyl derivatives of adenine and guanine, 2-propyl and other alkyl derivatives of adenine and guanine, 2-thiouracil, 2-thiothymine and 2-thiocytosine, 5-halouracil and cytosine, 5-propynyl uracil and cytosine, 6-azo uracil, cytosine and thymine, 5-uracil (pseudo-uracil), 4-thiouracil, 8-halo, 8-amino, 8-thiol, 8-thioalkyl, 8-hydroxyl and other 8-substituted adenines and guanines, 5-halo particularly 5-bromo, 5-trifluoromethyl and other 5-substituted uracils and cytosines, 7-methylquanine and 7-methyladenine, 8-azaguanine and 8-azaadenine, 7-deazaguanine and 7-deazaadenine, and 3-deazaguanine and 3-deazaadenine. Further, nucleobases can comprise those disclosed in U.S. Pat. No. 3,687,808, those disclosed in ‘The Concise Encyclopedia of Polymer Science And Engineering’, pages 858-859, Kroschwitz, J. I., ed. John Wiley & Sons, 1990, those disclosed by Englisch et al., Angewandle Chemie, International Edition’, 1991, 30, page 613, and those disclosed by Sanghvi, Y. S., Chapter 15, Antisense Research and Applications', pages 289-302, Crooke, S. T. and Lebleu, B. ea., CRC Press, 1993. Certain of these nucleobases are particularly useful for increasing the binding affinity of the oligomeric compounds of the present disclosure. These include 5-substituted pyrimidines, 6-azapyrimidines and N-2, N-6 and 0-6 substituted purines, comprising 2-aminopropyladenine, 5-propynyluracil and 5-propynylcytosine. 5-methylcytosine substitutions have been shown to increase nucleic acid duplex stability by 0.6-1.2° C. (Sanghvi, Y. S., Crooke, S. T. and Lebleu, B., eds, ‘Antisense Research and Applications’, CRC Press, Boca Raton, 1993, pp. 276-278) and are aspects of base substitutions, even more particularly when combined with 2′-O-methoxyethyl sugar modifications. Modified nucleobases are described in U.S. Pat. No. 3,687,808, as well as U.S. Pat. Nos. 4,845,205; 5,130,302; 5,134,066; 5,175,273; 5,367,066; 5,432,272; 5,457,187; 5,459,255; 5,484,908; 5,502,177; 5,525,711; 5,552,540; 5,587,469; 5,596,091; 5,614,617; 5,681,941; 5,750,692; 5,763,588; 5,830,653; 6,005,096; and U.S. Patent Application Publication 2003/0158403.

[0184] Thus, the term “modified” refers to a non-natural sugar, phosphate, or base that is incorporated into a guide RNA, an endonuclease, or both a guide RNA and an endonuclease. It is not necessary for all positions in a given oligonucleotide to be uniformly modified, and in fact more than one of the aforementioned modifications can be incorporated in a single oligonucleotide, or even in a single nucleoside within an oligonucleotide.

[0185] The guide RNAs and/or mRNA (or DNA) encoding an endonuclease can be chemically linked to one or more moieties or conjugates that enhance the activity, cellular distribution, or cellular uptake of the oligonucleotide. Such moieties comprise, but are not limited to, lipid moieties such as a cholesterol moiety [Letsinger et al., Proc. Natl. Acad. Sci. USA, 86: 6553-6556 (1989)]; cholic acid [Manoharan et al., Bioorg. Med. Chem. Let., 4: 1053-1060 (1994)]; a thioether, e.g., hexyl-S-tritylthiol [Manoharan et al, Ann. N. Y. Acad. Sci., 660: 306-309 (1992) and Manoharan et al., Bioorg. Med. Chem. Let., 3: 2765-2770 (1993)]; a thiocholesterol [Oberhauser et al., Nucl. Acids Res., 20: 533-538 (1992)]; an aliphatic chain, e.g., dodecandiol or undecyl residues [Kabanov et al., FEBS Lett., 259: 327-330 (1990) and Svinarchuk et al., Biochimie, 75: 49-54 (1993)]; a phospholipid, e.g., di-hexadecyl-rac-glycerol or triethylammonium 1,2-di-O-hexadecyl-rac-glycero-3-H-phosphonate [Manoharan et al., Tetrahedron Lett., 36: 3651-3654 (1995) and Shea et al., Nucl. Acids Res., 18: 3777-3783 (1990)]; a polyamine or a polyethylene glycol chain [Mancharan et al., Nucleosides & Nucleotides, 14: 969-973 (1995)]; adamantane acetic acid [Manoharan et al., Tetrahedron Lett., 36: 3651-3654 (1995)]; a palmityl moiety [(Mishra et al., Biochim. Biophys. Acta, 1264: 229-237 (1995)]; or an octadecylamine or hexylamino-carbonyl-t oxycholesterol moiety [Crooke et al., J. Pharmacol. Exp. Ther., 277: 923-937 (1996)]. See also U.S. Pat. Nos. 4,828,979; 4,948,882; 5,218,105; 5,525,465; 5,541,313; 5,545,730; 5,552,538; 5,578,717; 5,580,731; 5,591,584; 5,109,124; 5,118,802; 5,138,045; 5,414,077; 5,486,603; 5,512,439; 5,578,718; 5,608,046; 4,587,044; 4,605,735; 4,667,025; 4,762,779; 4,789,737; 4,824,941; 4,835,263; 4,876,335; 4,904,582; 4,958,013; 5,082,830; 5,112,963; 5,214,136; 5,082,830; 5,112,963; 5,214,136; 5,245,022; 5,254,469; 5,258,506; 5,262,536; 5,272,250; 5,292,873; 5,317,098; 5,371,241; 5,391,723; 5,416,203; 5,451,463; 5,510,475; 5,512,667; 5,514,785; 5,565,552; 5,567,810; 5,574,142; 5,585,481; 5,587,371; 5,595,726; 5,597,696; 5,599,923; 5,599, 928 and 5,688,941.

[0186] Sugars and other moieties can be used to target proteins and complexes comprising nucleotides, such as cationic polysomes and liposomes, to particular sites. For example, hepatic cell directed transfer can be mediated via asialoglycoprotein receptors (ASGPRs); see, e.g., Hu, et al., Protein Pept Lett. 21(10):1025-30 (2014). Other systems known in the art and regularly developed can be used to target biomolecules of use in the present case and/or complexes thereof to particular target cells of interest.

[0187] These targeting moieties or conjugates can include conjugate groups covalently bound to functional groups, such as primary or secondary hydroxyl groups. Conjugate groups of the present disclosure include intercalators, reporter molecules, polyamines, polyamides, polyethylene glycols, polyethers, groups that enhance the pharmacodynamic properties of oligomers, and groups that enhance the pharmacokinetic properties of oligomers. Typical conjugate groups include cholesterols, lipids, phospholipids, biotin, phenazine, folate, phenanthridine, anthraquinone, acridine, fluoresceins, rhodamines, coumarins, and dyes. Groups that enhance the pharmacodynamic properties, in the context of this present disclosure, include groups that improve uptake, enhance resistance to degradation, and/or strengthen sequence-specific hybridization with the target nucleic acid. Groups that enhance the pharmacokinetic properties, in the context of this present disclosure, include groups that improve uptake, distribution, metabolism or excretion of the compounds of the present disclosure. Representative conjugate groups are disclosed in International Patent Application No. PCT/US92/09196, filed Oct. 23, 1992 (published as WO1993007883), and U.S. Pat. No. 6,287,860. Conjugate moieties include, but are not limited to, lipid moieties such as a cholesterol moiety, cholic acid, a thioether, e.g., hexyl-5-tritylthiol, a thiocholesterol, an aliphatic chain, e.g., dodecandiol or undecyl residues, a phospholipid, e.g., di-hexadecyl-rac-glycerol or triethylammonium 1,2-di-O-hexadecyl-rac-glycero-3-H-phosphonate, a polyamine or a polyethylene glycol chain, or adamantane acetic acid, a palmityl moiety, or an octadecylamine or hexylamino-carbonyl-oxy cholesterol moiety. See, e.g., U.S. Pat. Nos. 4,828,979; 4,948,882; 5,218,105; 5,525,465; 5,541,313; 5,545,730; 5,552,538; 5,578,717, 5,580,731; 5,580,731; 5,591,584; 5,109,124; 5,118,802; 5,138,045; 5,414,077; 5,486,603; 5,512,439; 5,578,718; 5,608,046; 4,587,044; 4,605,735; 4,667,025; 4,762,779; 4,789,737; 4,824,941; 4,835,263; 4,876,335; 4,904,582; 4,958,013; 5,082,830; 5,112,963; 5,214,136; 5,082,830; 5,112,963; 5,214,136; 5,245,022; 5,254,469; 5,258,506; 5,262,536; 5,272,250; 5,292,873; 5,317,098; 5,371,241; 5,391,723; 5,416,203, 5,451,463; 5,510,475; 5,512,667; 5,514,785; 5,565,552; 5,567,810; 5,574,142; 5,585,481; 5,587,371; 5,595,726; 5,597,696; 5,599,923; 5,599,928 and 5,688,941.

[0188] Longer polynucleotides that are less amenable to chemical synthesis and are typically produced by enzymatic synthesis can also be modified by various means. Such modifications can include, for example, the introduction of certain nucleotide analogs, the incorporation of particular sequences or other moieties at the 5′ or 3′ ends of molecules, and other modifications. By way of illustration, the mRNA encoding Cas9 is approximately 4 kb in length and can be synthesized by in vitro transcription. Modifications to the mRNA can be applied to, e.g., increase its translation or stability (such as by increasing its resistance to degradation with a cell), or to reduce the tendency of the RNA to elicit an innate immune response that is often observed in cells following introduction of exogenous RNAs, particularly longer RNAs such as that encoding Cas9.

[0189] Numerous such modifications have been described in the art, such as polyA tails, 5′ cap analogs (e.g., Anti Reverse Cap Analog (ARCA) or m7G(5′)ppp(5′)G (mCAP)), modified 5′ or 3′ untranslated regions (UTRs), use of modified bases (such as Pseudo-UTP, 2-Thio-UTP, 5-Methylcytidine-5′-Triphosphate (5-Methyl-CTP) or N6-Methyl-ATP), or treatment with phosphatase to remove 5′ terminal phosphates. These and other modifications are known in the art, and new modifications of RNAs are regularly being developed.

[0190] There are numerous commercial suppliers of modified RNAs, including for example, TriLink Biotech, AxoLabs, Bio-Synthesis Inc., Dharmacon and many others. As described by TriLink, for example, 5-Methyl-CTP can be used to impart desirable characteristics, such as increased nuclease stability, increased translation or reduced interaction of innate immune receptors with in vitro transcribed RNA. 5-Methylcytidine-5′-Triphosphate (5-Methyl-CTP), N6-Methyl-ATP, as well as Pseudo-UTP and 2-Thio-UTP, have also been shown to reduce innate immune stimulation in culture and in vivo while enhancing translation, as illustrated in publications by Kormann et al. and Warren et al. referred to below.

[0191] It has been shown that chemically modified mRNA delivered in vivo can be used to achieve improved therapeutic effects; see, e.g., Kormann et al., Nature Biotechnology 29, 154-157 (2011). Such modifications can be used, for example, to increase the stability of the RNA molecule and/or reduce its immunogenicity. Using chemical modifications such as Pseudo-U, N6-Methyl-A, 2-Thio-U and 5-Methyl-C, it was found that substituting just one quarter of the uridine and cytidine residues with 2-Thio-U and 5-Methyl-C respectively resulted in a significant decrease in toll-like receptor (TLR) mediated recognition of the mRNA in mice. By reducing the activation of the innate immune system, these modifications can be used to effectively increase the stability and longevity of the mRNA in vivo; see, e.g., Kormann et al., supra.

[0192] It has also been shown that repeated administration of synthetic messenger RNAs incorporating modifications designed to bypass innate anti-viral responses can reprogram differentiated human cells to pluripotency. See, e.g., Warren, et al., Cell Stem Cell, 7(5):618-30 (2010). Such modified mRNAs that act as primary reprogramming proteins can be an efficient means of reprogramming multiple human cell types. Such cells are referred to as induced pluripotency stem cells (iPSCs), and it was found that enzymatically synthesized RNA incorporating 5-Methyl-CTP, Pseudo-UTP and an Anti Reverse Cap Analog (ARCA) could be used to effectively evade the cell's antiviral response; see, e.g., Warren et al., supra.

[0193] Other modifications of polynucleotides described in the art include, for example, the use of polyA tails, the addition of 5′ cap analogs (such as m7G(5′)ppp(5′)G (mCAP)), modifications of 5′ or 3′ untranslated regions (UTRs), or treatment with phosphatase to remove 5′ terminal phosphates—and new approaches are regularly being developed.

[0194] A number of compositions and techniques applicable to the generation of modified RNAs for use herein have been developed in connection with the modification of RNA interference (RNAi), including small-interfering RNAs (siRNAs). siRNAs present particular challenges in vivo because their effects on gene silencing via mRNA interference are generally transient, which can require repeat administration. In addition, siRNAs are double-stranded RNAs (dsRNA) and mammalian cells have immune responses that have evolved to detect and neutralize dsRNA, which is often a by-product of viral infection. Thus, there are mammalian enzymes such as PKR (dsRNA-responsive kinase), and potentially retinoic acid-inducible gene I (RIG-I), that can mediate cellular responses to dsRNA, as well as Toll-like receptors (such as TLR3, TLR7 and TLR8) that can trigger the induction of cytokines in response to such molecules; see, e.g., the reviews by Angart et al., Pharmaceuticals (Basel) 6(4): 440-468 (2013); Kanasty et al., Molecular Therapy 20(3): 513-524 (2012); Burnett et al., Biotechnol J. 6(9):1130-46 (2011); Judge and MacLachlan, Hum Gene Ther 19(2):111-24 (2008); and references cited therein.

[0195] A large variety of modifications have been developed and applied to enhance RNA stability, reduce innate immune responses, and/or achieve other benefits that can be useful in connection with the introduction of polynucleotides into human cells, as described herein; see, e.g., the reviews by Whitehead K A et al., Annual Review of Chemical and Biomolecular Engineering, 2: 77-96 (2011); Gaglione and Messere, Mini Rev Med Chem, 10(7):578-95 (2010); Chernolovskaya et al, Curr Opin Mol Ther., 12(2):158-67 (2010); Deleavey et al., Curr Protoc Nucleic Acid Chem Chapter 16:Unit 16.3 (2009); Behlke, Oligonucleotides 18(4):305-19 (2008); Fucini et al., Nucleic Acid Ther 22(3): 205-210 (2012); Bremsen et al., Front Genet 3:154 (2012).

[0196] As noted above, there are a number of commercial suppliers of modified RNAs, many of which have specialized in modifications designed to improve the effectiveness of siRNAs. A variety of approaches are offered based on various findings reported in the literature. For example, Dharmacon notes that replacement of a non-bridging oxygen with sulfur (phosphorothioate, PS) has been extensively used to improve nuclease resistance of siRNAs, as reported by Kole, Nature Reviews Drug Discovery 11:125-140 (2012). Modifications of the 2′-position of the ribose have been reported to improve nuclease resistance of the internucleotide phosphate bond while increasing duplex stability (Tm), which has also been shown to provide protection from immune activation. A combination of moderate PS backbone modifications with small, well-tolerated 2′-substitutions (2′-O-Methyl, 2′-Fluoro, 2′-Hydro) have been associated with highly stable siRNAs for applications in vivo, as reported by Soutschek et al. Nature 432:173-178 (2004); and 2′-O-Methyl modifications have been reported to be effective in improving stability as reported by Volkov, Oligonucleotides 19:191-202 (2009). With respect to decreasing the induction of innate immune responses, modifying specific sequences with 2′-O-Methyl, 2′-Fluoro, 2′-Hydro have been reported to reduce TLR7/TLR8 interaction while generally preserving silencing activity; see, e.g., Judge et al., Mol. Ther. 13:494-505 (2006); and Cekaite et al., J. Mol. Biol. 365:90-108 (2007). Additional modifications, such as 2-thiouracil, pseudouracil, 5-methylcytosine, 5-methyluracil, and N6-methyladenosine have also been shown to minimize the immune effects mediated by TLR3, TLR7, and TLR8; see, e.g., Kariko, K. et al., Immunity 23:165-175 (2005).

[0197] As is also known in the art, and commercially available, a number of conjugates can be applied to polynucleotides, such as RNAs, for use herein that can enhance their delivery and/or uptake by cells, including for example, cholesterol, tocopherol and folic acid, lipids, peptides, polymers, linkers and aptamers; see, e.g., the review by Winkler, Ther. Deliv. 4:791-809 (2013), and references cited therein.

### Codon-Optimization

[0198] A polynucleotide encoding a site-directed polypeptide can be codon-optimized according to methods standard in the art for expression in the cell containing the target DNA of interest. For example, if the intended target nucleic acid is in a human cell, a human codon-optimized polynucleotide encoding Cas9 is contemplated for use for producing the Cas9 polypeptide.

### Complexes of a Genome-Targeting Nucleic Acid and a Site-Directed Polypeptide

[0199] A genome-targeting nucleic acid interacts with a site-directed polypeptide (e.g., a nucleic acid-guided nuclease such as Cas9), thereby forming a complex. The genome-targeting nucleic acid guides the site-directed polypeptide to a target nucleic acid.

### Ribonucleoprotein Complexes (RNPs)

[0200] The site-directed polypeptide and genome-targeting nucleic acid can each be administered separately to a cell or a patient. On the other hand, the site-directed polypeptide can be pre-complexed with one or more guide RNAs, or one or more crRNA together with a tracrRNA. The pre-complexed material can then be administered to a cell or a patient. Such pre-complexed material is known as a ribonucleoprotein particle (RNP). The site-directed polypeptide in the RNP can be, for example, a Cas9 endonuclease or a Cpf1 endonuclease. The site-directed polypeptide can be flanked at the N-terminus, the C-terminus, or both the N-terminus and C-terminus by one or more nuclear localization signals (NLSs). For example, a Cas9 endonuclease can be flanked by two NLSs, one NLS located at the N-terminus and the second NLS located at the C-terminus. The NLS can be any NLS known in the art, such as a SV40 NLS. The weight ratio of genome-targeting nucleic acid to site-directed polypeptide in the RNP can be 1:1. For example, the weight ratio of sgRNA to Cas9 endonuclease in the RNP can be 1:1.

### Nucleic Acids Encoding System Components

[0201] The present disclosure provides a nucleic acid comprising a nucleotide sequence encoding a genome-targeting nucleic acid of the disclosure, a site-directed polypeptide of the disclosure, and/or any nucleic acid or proteinaceous molecule necessary to carry out the aspects of the methods of the disclosure.

[0202] The nucleic acid encoding a genome-targeting nucleic acid of the disclosure, a site-directed polypeptide of the disclosure, and/or any nucleic acid or proteinaceous molecule necessary to carry out the aspects of the methods of the disclosure can comprise a vector (e.g., a recombinant expression vector).

[0203] The term “vector” refers to a nucleic acid molecule capable of transporting another nucleic acid to which it has been linked. One type of vector is a “plasmid”, which refers to a circular double-stranded DNA loop into which additional nucleic acid segments can be ligated. Another type of vector is a viral vector, wherein additional nucleic acid segments can be ligated into the viral genome. Certain vectors are capable of autonomous replication in a host cell into which they are introduced (e.g., bacterial vectors having a bacterial origin of replication and episomal mammalian vectors). Other vectors (e.g., non-episomal mammalian vectors) are integrated into the genome of a host cell upon introduction into the host cell, and thereby are replicated along with the host genome.

[0204] In some examples, vectors can be capable of directing the expression of nucleic acids to which they are operatively linked. Such vectors are referred to herein as “recombinant expression vectors”, or more simply “expression vectors”, which serve equivalent functions.

[0205] The term “operably linked” means that the nucleotide sequence of interest is linked to regulatory sequence(s) in a manner that allows for expression of the nucleotide sequence. The term “regulatory sequence” is intended to include, for example, promoters, enhancers and other expression control elements (e.g., polyadenylation signals). Such regulatory sequences are well known in the art and are described, for example, in Goeddel; Gene Expression Technology: Methods in Enzymology 185, Academic Press, San Diego, Calif. (1990). Regulatory sequences include those that direct constitutive expression of a nucleotide sequence in many types of host cells, and those that direct expression of the nucleotide sequence only in certain host cells (e.g., tissue-specific regulatory sequences). It will be appreciated by those skilled in the art that the design of the expression vector can depend on such factors as the choice of the target cell, the level of expression desired, and the like.

[0206] Expression vectors contemplated include, but are not limited to, viral vectors based on vaccinia virus, poliovirus, adenovirus, adeno-associated virus, SV40, herpes simplex virus, human immunodeficiency virus, retrovirus (e.g., Murine Leukemia Virus, spleen necrosis virus, and vectors derived from retroviruses such as Rous Sarcoma Virus, Harvey Sarcoma Virus, avian leukosis virus, a lentivirus, human immunodeficiency virus, myeloproliferative sarcoma virus, and mammary tumor virus) and other recombinant vectors. Other vectors contemplated for eukaryotic target cells include, but are not limited to, the vectors pXT1, pSG5, pSVK3, pBPV, pMSG, and pSVLSV40 (Pharmacia). Other vectors can be used so long as they are compatible with the host cell.

[0207] In some examples, a vector can comprise one or more transcription and/or translation control elements. Depending on the host/vector system utilized, any of a number of suitable transcription and translation control elements, including constitutive and inducible promoters, transcription enhancer elements, transcription terminators, etc. can be used in the expression vector. The vector can be a self-inactivating vector that either inactivates the viral sequences or the components of the CRISPR machinery or other elements.

[0208] Non-limiting examples of suitable eukaryotic promoters (i.e., promoters functional in a eukaryotic cell) include those from cytomegalovirus (CMV) immediate early, herpes simplex virus (HSV) thymidine kinase, early and late SV40, long terminal repeats (LTRs) from retrovirus, human elongation factor-1 promoter (EF1), a hybrid construct comprising the cytomegalovirus (CMV) enhancer fused to the chicken beta-actin promoter (CAG), murine stem cell virus promoter (MSCV), phosphoglycerate kinase-1 locus promoter (PGK), and mouse metallothionein-I.

[0209] For expressing small RNAs, including guide RNAs used in connection with Cas endonuclease, various promoters such as RNA polymerase III promoters, including for example U6 and H1, can be advantageous. Descriptions of and parameters for enhancing the use of such promoters are known in art, and additional information and approaches are regularly being described; see, e.g., Ma, H. et al., Molecular Therapy—Nucleic Acids 3, e161 (2014) doi:10.1038/mtna.2014.12.

[0210] The expression vector can also contain a ribosome binding site for translation initiation and a transcription terminator. The expression vector can also comprise appropriate sequences for amplifying expression. The expression vector can also include nucleotide sequences encoding non-native tags (e.g., histidine tag, hemagglutinin tag, green fluorescent protein, etc.) that are fused to the site-directed polypeptide, thus resulting in a fusion protein.

[0211] A promoter can be an inducible promoter (e.g., a heat shock promoter, tetracycline-regulated promoter, steroid-regulated promoter, metal-regulated promoter, estrogen receptor-regulated promoter, etc.). The promoter can be a constitutive promoter (e.g., CMV promoter, UBC promoter). In some cases, the promoter can be a spatially restricted and/or temporally restricted promoter (e.g., a tissue specific promoter, a cell type specific promoter, etc.).

[0212] The nucleic acid encoding a genome-targeting nucleic acid of the disclosure and/or a site-directed polypeptide can be packaged into or on the surface of delivery vehicles for delivery to cells. Delivery vehicles contemplated include, but are not limited to, nanospheres, liposomes, quantum dots, nanoparticles, polyethylene glycol particles, hydrogels, and micelles. As described in the art, a variety of targeting moieties can be used to enhance the preferential interaction of such vehicles with desired cell types or locations.

[0213] Introduction of the complexes, polypeptides, and nucleic acids of the disclosure into cells can occur by viral or bacteriophage infection, transfection, conjugation, protoplast fusion, lipofection, electroporation, nucleofection, calcium phosphate precipitation, polyethyleneimine (PEI)-mediated transfection, DEAE-dextran mediated transfection, liposome-mediated transfection, particle gun technology, calcium phosphate precipitation, direct micro-injection, nanoparticle-mediated nucleic acid delivery, and the like.

### Ex Vivo and In Vivo Based Therapies

[0214] Provided herein are methods for treating a patient with Spinocerebellar ataxia 2 (SCA2). Spinocerebellar ataxia 2 (SCA2) is caused by abnormal expansion of a trinucleotide CAG repeat in exon 1 of the ATXN2 gene. In most people, the CAG segment is repeated 22 to 23 times, but it can be repeated up to 31 times without causing any symptoms. In patients with Spinocerebellar ataxia 2 (SCA2), the number of CAG repeats can range from 32 to more than 100 repeats. This number can be different from one SCA2 patient to another.

[0215] Provided herein are methods for treating patients with ALS. CAG repeats occurring greater than 24 times has been associated with the risk of developing ALS. More specifically, CAG repeats occurring in the range 29 to 33 have been associated with ALS. This number can be different from one ALS patient to another.

[0216] The term “trinucleotide repeat expansion” means a series of three bases (for example, CAG) repeated at least twice. In certain examples, the trinucleotide repeat expansion may be located in exon 1 of an ATXN2 nucleic acid. In certain examples, a pathogenic trinucleotide repeat expansion includes at least 32 repeats of CAG in an ATXN2 nucleic acid and is associated with disease. In other examples, a pathogenic trinucleotide repeat expansion includes at least 33, 34, 35, 36, 37, 38, 39, 40, 45, 50, 55, 60, 65, 70, 75, 80, 90, 100 or more repeats. In certain examples, the repeats are consecutive. In certain examples, the repeats are interrupted by 1 or more nucleobases. In certain examples, a wild-type trinucleotide repeat expansion includes 31 or fewer repeats of CAG in an ATXN2 nucleic acid. In other examples, a wild-type trinucleotide repeat expansion includes at most 30, 29, 28, 27, 26, 25, 24, 23, 22, 21, 20, 15, or 10 repeats. In certain examples, the entire trinucleotide repeat expansion is deleted. In other examples, a portion of the trinucleotide repeat expansion is deleted.

[0217] An aspect of such method is an ex vivo cell-based therapy. For example, a biopsy of the patient's brain is performed. Then, cells of the central nervous system (e.g., neurons or glial cells) are isolated from the biopsied material. Then, the chromosomal DNA of the cells of the central nervous system (e.g., neurons or glial cells) can be edited using the materials and methods described herein. Finally, the edited cells of the central nervous system (e.g., neurons or glial cells) are implanted into the patient. Any source or type of cell may be used as the progenitor cell.

[0218] Another aspect of such method is an ex vivo cell-based therapy. For example, a patient specific induced pluripotent stem cell (iPSC) can be created. Then, the chromosomal DNA of these iPSC cells can be edited using the materials and methods described herein. Next, the genome-edited iPSCs can be differentiated into cells of the central nervous system (e.g., neurons or glial cells). Finally, the differentiated cells are implanted into the patient.

[0219] Yet another aspect of such method is an ex vivo cell-based therapy. For example, a mesenchymal stem cell can be isolated from the patient, which can be isolated from the patient's bone marrow or peripheral blood. Next, the chromosomal DNA of these mesenchymal stem cells can be edited using the materials and methods described herein. Next, the genome-edited mesenchymal stem cells can be differentiated into cells of the central nervous system (e.g., neurons or glial cells). Finally, the differentiated cells, e.g., cells of the central nervous system (e.g., neurons or glial cells) are implanted into the patient.

[0220] One advantage of an ex vivo cell therapy approach is the ability to conduct a comprehensive analysis of the therapeutic prior to administration. Nuclease-based therapeutics can have some level of off-target effects. Performing gene editing ex vivo allows one to characterize the edited cell population prior to implantation. The present disclosure includes sequencing the entire genome of the edited cells to ensure that the off-target effects, if any, can be in genomic locations associated with minimal risk to the patient. Furthermore, populations of specific cells, including clonal populations, can be isolated prior to implantation.

[0221] Another advantage of ex vivo cell therapy relates to genetic modification in iPSCs compared to other primary cell sources. iPSCs are prolific, making it easy to obtain the large number of cells that will be required for a cell-based therapy. Furthermore, iPSCs are an ideal cell type for performing clonal isolations. This allows screening for the correct genomic modification, without risking a decrease in viability. In contrast, other primary cells, such as glial cells, are viable for only a few passages and difficult to clonally expand. Thus, manipulation of iPSCs for the treatment of Spinocerebellar ataxia 2 (SCA2) can be much easier, and can shorten the amount of time needed to make the desired genetic modification.

[0222] Methods can also include an in vivo based therapy. Chromosomal DNA of the cells in the patient is edited using the materials and methods described herein. In some aspects, the target cell in an in vivo based therapy is a cell of the central nervous system (e.g., a neuron or a glial cell).

[0223] Although certain cells present an attractive target for ex vivo treatment and therapy, increased efficacy in delivery may permit direct in vivo delivery to such cells. Ideally the targeting and editing would be directed to the relevant cells. Cleavage in other cells can also be prevented by the use of promoters only active in certain cells and or developmental stages. Additional promoters are inducible, and therefore can be temporally controlled if the nuclease is delivered as a plasmid. The amount of time that delivered RNA and protein remain in the cell can also be adjusted using treatments or domains added to change the half-life. In vivo treatment would eliminate a number of treatment steps, but a lower rate of delivery can require higher rates of editing. In vivo treatment can eliminate problems and losses from ex vivo treatment and engraftment and post-engraftment integration of neurons and glial cells appropriately into existing brain circuits.

[0224] An advantage of in vivo gene therapy can be the ease of therapeutic production and administration. The same therapeutic approach and therapy will have the potential to be used to treat more than one patient, for example a number of patients who share the same or similar genotype or allele. In contrast, ex vivo cell therapy typically requires using a patient's own cells, which are isolated, manipulated and returned to the same patient.

[0225] Also provided herein is a cellular method for editing the ATXN2 gene in a cell by genome editing. For example, a cell can be isolated from a patient or animal. Then, the chromosomal DNA of the cell can be edited using the materials and methods described herein.

microRNAs (miRNAs)

[0226] Another class of gene regulatory regions having these features is microRNA (miRNA) binding sites. miRNAs are non-coding RNAs that play key roles in posttranscriptional gene regulation. miRNA can regulate the expression of 30% of all mammalian protein-encoding genes. Specific and potent gene silencing by double stranded RNA (RNAi) was discovered, plus additional small non-coding RNA (Canver, M. C. et al., Nature (2015)). The largest class of non-coding RNAs important for gene silencing is miRNAs. In mammals, miRNAs are first transcribed as a long RNA transcript, which can be separate transcriptional units, part of protein introns, or other transcripts. The long transcripts are called primary miRNA (pri-miRNA) that include imperfectly base-paired hairpin structures. These pri-miRNA can be cleaved into one or more shorter precursor miRNAs (pre-miRNAs) by Microprocessor, a protein complex in the nucleus, involving Drosha.

[0227] Pre-miRNAs are short stem loops ˜70 nucleotides in length with a 2-nucleotide 3′-overhang that are exported, into the mature 19-25 nucleotide miRNA:miRNA* duplexes. The miRNA strand with lower base pairing stability (the guide strand) can be loaded onto the RNA-induced silencing complex (RISC). The passenger strand (marked with *), can be functional, but is usually degraded. The mature miRNA tethers RISC to partly complementary sequence motifs in target mRNAs predominantly found within the 3′ untranslated regions (UTRs) and induces posttranscriptional gene silencing (Bartel, D. P. Cell 136, 215-233 (2009); Saj, A. & Lai, E. C. Curr Opin Genet Dev 21, 504-510 (2011)).

[0228] miRNAs can be important in development, differentiation, cell cycle and growth control, and in virtually all biological pathways in mammals and other multicellular organisms. miRNAs can also be involved in cell cycle control, apoptosis and stem cell differentiation, hematopoiesis, hypoxia, muscle development, neurogenesis, insulin secretion, cholesterol metabolism, aging, viral replication and immune responses.

[0229] A single miRNA can target hundreds of different mRNA transcripts, while an individual miRNA transcript can be targeted by many different miRNAs. More than 28645 microRNAs have been annotated in the latest release of miRBase (v.21). Some miRNAs can be encoded by multiple loci, some of which can be expressed from tandemly co-transcribed clusters. The features allow for complex regulatory networks with multiple pathways and feedback controls. miRNAs can be integral parts of these feedback and regulatory circuits and can help regulate gene expression by keeping protein production within limits (Herranz, H. & Cohen, S. M. Genes Dev 24, 1339-1344 (2010); Posadas, D. M. & Carthew, R. W. Curr Opin Genet Dev 27, 1-6 (2014)).

[0230] miRNA can also be important in a large number of human diseases that are associated with abnormal miRNA expression. This association underscores the importance of the miRNA regulatory pathway. Recent miRNA deletion studies have linked miRNA with regulation of the immune responses (Stern-Ginossar, N. et al., Science 317, 376-381 (2007)).

[0231] miRNA also has a strong link to cancer and can play a role in different types of cancer. miRNAs have been found to be downregulated in a number of tumors. miRNA can be important in the regulation of key cancer-related pathways, such as cell cycle control and the DNA damage response, and can therefore be used in diagnosis and can be targeted clinically. MicroRNAs can delicately regulate the balance of angiogenesis, such that experiments depleting all microRNAs suppresses tumor angiogenesis (Chen, S. et al., Genes Dev 28, 1054-1067 (2014)).

[0232] As has been shown for protein coding genes, miRNA genes can also be subject to epigenetic changes occurring with cancer. Many miRNA loci can be associated with CpG islands increasing their opportunity for regulation by DNA methylation (Weber, B., Stresemann, C., Brueckner, B. & Lyko, F. Cell Cycle 6, 1001-1005 (2007)). The majority of studies have used treatment with chromatin remodeling drugs to reveal epigenetically silenced miRNAs.

[0233] In addition to their role in RNA silencing, miRNA can also activate translation (Posadas, D. M. & Carthew, R. W. Curr Opin Genet Dev 27, 1-6 (2014)). Knocking out miRNA sites may lead to decreased expression of the targeted gene, while introducing these sites may increase expression.

[0234] Individual miRNA can be knocked out most effectively by mutating the seed sequence (bases 2-8 of the microRNA), which can be important for binding specificity. Cleavage in this region, followed by mis-repair by NHEJ can effectively abolish miRNA function by blocking binding to target sites. miRNA could also be inhibited by specific targeting of the special loop region adjacent to the palindromic sequence. Catalytically inactive Cas9 can also be used to inhibit shRNA expression (Zhao, Y. et al., Sci Rep 4, 3943 (2014)). In addition to targeting the miRNA, the binding sites can also be targeted and mutated to prevent the silencing by miRNA.

[0235] According to the present disclosure, any of the microRNA (miRNA) or their binding sites may be incorporated into the compositions of the present disclosure.

[0236] The compositions may have a region such as, but not limited to, a region comprising the sequence of any of the microRNAs disclosed in SEQ ID NOs: 632-4715, the reverse complement of the microRNAs disclosed in SEQ ID NOs: 632-4715, or the microRNA anti-seed region of any of the microRNAs disclosed in SEQ ID NOs: 632-4715.

[0237] The compositions of the present disclosure may comprise one or more microRNA target sequences, microRNA sequences, or microRNA seeds. Such sequences may correspond to any known microRNA such as those taught in U.S. Publication 2005/0261218 and U.S. Publication 2005/0059005. As a non-limiting example, known microRNAs, their sequences and their binding site sequences in the human genome are disclosed in SEQ ID NOs: 632-4715.

[0238] A microRNA sequence comprises a “seed” sequence, i.e., a sequence in the region of positions 2-8 of the mature microRNA, which sequence has perfect Watson-Crick complementarity to the miRNA target sequence. A microRNA seed may comprise positions 2-8 or 2-7 of the mature microRNA. In some aspects, a microRNA seed may comprise 7 nucleotides (e.g., nucleotides 2-8 of the mature microRNA), wherein the seed-complementary site in the corresponding miRNA target is flanked by an adenine (A) opposed to microRNA position 1. In some aspects, a microRNA seed may comprise 6 nucleotides (e.g., nucleotides 2-7 of the mature microRNA), wherein the seed-complementary site in the corresponding miRNA target is flanked by an adenine (A) opposed to microRNA position 1. See for example, Grimson A, Farh K K, Johnston W K, Garrett-Engele P, Lim L P, Bartel D P; Mol Cell. 2007 Jul. 6; 27(1):91-105. The bases of the microRNA seed have complete complementarity with the target sequence.

[0239] Identification of microRNA, microRNA target regions, and their expression patterns and role in biology have been reported (Bonauer et al., Curr Drug Targets 2010 11:943-949; Anand and Cheresh Curr Opin Hematol 2011 18:171-176; Contreras and Rao Leukemia 2012 26:404-413 (2011 Dec. 20. doi: 10.1038/1eu.2011.356); Bartel Cell 2009 136:215-233; Landgraf et al, Cell, 2007 129:1401-1414; Gentner and Naldini, Tissue Antigens. 2012 80:393-403).

[0240] For example, if the composition is not intended to be delivered to the liver but ends up there, then miR-122, a microRNA abundant in liver, can inhibit the expression of the sequence delivered if one or multiple target sites of miR-122 are engineered into the polynucleotide encoding that target sequence. Introduction of one or multiple binding sites for different microRNA can be engineered to further decrease the longevity, stability, and protein translation hence providing an additional layer of tenability.

[0241] As used herein, the term “microRNA site” refers to a microRNA target site or a microRNA recognition site, or any nucleotide sequence to which a microRNA binds or associates. It should be understood that “binding” may follow traditional Watson-Crick hybridization rules or may reflect any stable association of the microRNA with the target sequence at or adjacent to the microRNA site.

[0242] Conversely, for the purposes of the compositions of the present disclosure, microRNA binding sites can be engineered out of (i.e. removed from) sequences in which they naturally occur in order to increase protein expression in specific tissues. For example, miR-137 binding sites may be removed to improve protein expression in the brain.

[0243] Specifically, microRNAs are known to be differentially expressed in immune cells (also called hematopoietic cells), such as antigen presenting cells (APCs) (e.g. dendritic cells and macrophages), macrophages, monocytes, B lymphocytes, T lymphocytes, granulocytes, natural killer cells, etc. Immune cell specific microRNAs are involved in immunogenicity, autoimmunity, the immune-response to infection, inflammation, as well as unwanted immune response after gene therapy and tissue/organ transplantation. Immune cells specific microRNAs also regulate many aspects of development, proliferation, differentiation and apoptosis of hematopoietic cells (immune cells). For example, miR-142 and miR-146 are exclusively expressed in the immune cells, particularly abundant in myeloid dendritic cells. Introducing the miR-142 binding site into the 3′-UTR of a polypeptide of the present disclosure can selectively suppress the gene expression in the antigen presenting cells through miR-142 mediated mRNA degradation, limiting antigen presentation in professional APCs (e.g. dendritic cells) and thereby preventing antigen-mediated immune response after gene delivery (see, Annoni A et al., blood, 2009, 114, 5152-5161).

[0244] In one example, microRNAs binding sites that are known to be expressed in immune cells, in particular, the antigen presenting cells, can be engineered into the polynucleotides to suppress the expression of the polynucleotide in APCs through microRNA mediated RNA degradation, subduing the antigen-mediated immune response, while the expression of the polynucleotide is maintained in non-immune cells where the immune cell specific microRNAs are not expressed.

[0245] Many microRNA expression studies have been conducted, and are described in the art, to profile the differential expression of microRNAs in various cancer cells/tissues and other diseases. Some microRNAs are abnormally over-expressed in certain cancer cells and others are under-expressed. For example, microRNAs are differentially expressed in cancer cells (WO2008/154098, US2013/0059015, US2013/0042333, WO2011/157294); cancer stem cells (US2012/0053224); pancreatic cancers and diseases (US2009/0131348, US2011/0171646, US2010/0286232, U.S. Pat. No. 8,389,210); asthma and inflammation (U.S. Pat. No. 8,415,096); prostate cancer (US2013/0053264); hepatocellular carcinoma (WO2012/151212, US2012/0329672, WO2008/054828, U.S. Pat. No. 8,252,538); lung cancer cells (WO2011/076143, WO2013/033640, WO2009/070653, US2010/0323357); cutaneous T-cell lymphoma (WO2013/011378); colorectal cancer cells (WO2011/0281756, WO2011/076142); cancer positive lymph nodes (WO2009/100430, US2009/0263803); nasopharyngeal carcinoma (EP2112235); chronic obstructive pulmonary disease (US2012/0264626, US2013/0053263); thyroid cancer (WO2013/066678); ovarian cancer cells (US2012/0309645, WO2011/095623); breast cancer cells (WO2008/154098, WO2007/081740, US2012/0214699), leukemia and lymphoma (WO2008/073915, US2009/0092974, US2012/0316081, US2012/0283310, WO2010/018563).

[0246] Non-limiting examples of microRNA sequences and the targeted tissues and/or cells are disclosed in SEQ ID NOs: 632-4715.

### Genome Engineering Strategies

[0247] The methods of the present disclosure can involve editing of one or both of the mutant alleles. Gene editing to modify or correct the ATXN2 gene has the advantage of restoration of correct expression levels or elimination of aberrant gene products and temporal control. Sequencing the patient's ATXN2 alleles allows for design of the gene editing strategy to best correct the identified mutation(s).

[0248] A step of the ex vivo methods of the present disclosure can comprise editing/correcting cells of the central nervous system (e.g., neurons or glial cells) isolated from a Spinocerebellar ataxia 2 (SCA2) patient using genome engineering. Alternatively, a step of the ex vivo methods of the present disclosure can comprise editing/correcting the patient specific iPSCs or mesenchymal stem cells. Likewise, a step of the in vivo methods of the present disclosure involves editing/correcting the cells in a Spinocerebellar ataxia 2 (SCA2) patient using genome engineering. Similarly, a step in the cellular methods of the present disclosure can comprise editing/correcting the ATXN2 gene in a human cell by genome engineering.

[0249] Spinocerebellar ataxia 2 (SCA2) patients exhibit expanded trinucleotide repeats in the ATXN2 gene. Therefore, different patients may use similar editing strategies. Any CRISPR endonuclease may be used in the methods of the present disclosure, each CRISPR endonuclease having its own associated PAM, which may or may not be disease specific.

[0250] In one aspect, the trinucleotide repeat expansion may be excised by inducing two double stranded breaks (DSBs) upstream and downstream of the repeat region. Pairs of gRNAs have been used for this type of deletions. The CRISPR endonucleases, configured with the two gRNAs, induce two DSBs at the desired locations. After cleavage, the two ends, regardless of whether blunt or with overhangs, can be joined by NHEJ, leading to the deletion of the intervening segment. In certain aspects, the wild-type sequence can be restored by inserting a correct repeat sequence via HDR.

[0251] In another aspect, the trinucleotide repeat expansion may be deleted after inducing a single DSB near or within the repeat region. Single DSB-induced repeat loss has been reported in several studies including TALEN-cleaved short CAG/CTG repeats engineered in yeast, ZFN-cleaved CAG repeats engineered in human cells, and CRISPR/Cas9-cleaved CTG/CAG repeats engineered in human cells (Richard et al., PLoS ONE (2014), 9(4): e95611; Mittelman et al., Proc Natl Acad Sci USA (2009), 106(24):9607-12; van Agtmaal et al., Mol Ther (2016), http://dx.doi.org/10.1016/j.ymthe.2016.10.014). A DSB near the repeat region destabilizes the repeat tracts, triggering a contraction (e.g. partial deletion) or, in some cases, a complete deletion of the repeats. Additionally, work by Mittelman et al. suggested that single DSB-induced repeat loss is more effective in longer repeats. In certain aspects, the wild-type sequence can be restored by inserting a correct repeat sequence via HDR.

[0252] Alternatively, expression of the mutant ATXN2 gene may be disrupted or eliminated by introducing random insertions or deletions (indels) that arise due to the imprecise NHEJ repair pathway. The target regions may be the coding sequence of the ATXN2 gene (i.e., exons). Inserting or deleting nucleotides into the coding sequence of a gene may cause a “frame shift” where the normal 3-letter codon pattern is disturbed. In this way, gene expression and therefore mutant protein production can be reduced or eliminated. This approach may also be used to target any intron, intron:exon junction, or regulatory DNA element of the ATXN2 gene where sequence alteration may interfere with the expression of the ATXN2 gene. This approach can require development and optimization of sgRNAs for the ATXN2 gene.

[0253] As a further alternative, the entire mutant gene can be deleted and a wild-type gene, a cDNA or a minigene (comprised of one or more exons and introns or natural or synthetic introns) can be knocked into the gene locus or a heterologous location in the genome such as a safe harbor locus. Pairs of nucleases can be used to delete mutated gene regions, and a donor is provided to restore function. In this case two gRNA and one donor sequence would be supplied. A full length cDNA can be knocked into any safe harbor locus, but must use a supplied or an endogenous promoter. If this construct is knocked into the correct location or locus, it will have physiological control, similar to the normal gene.

[0254] Some genome engineering strategies involve correcting the repeat expansion, or inserting a wild-type ATXN2 gene or cDNA or a minigene (comprised of one or more exons and introns or natural or synthetic introns) into the locus of the corresponding gene or a safe harbor locus by homology directed repair (HDR), which is also known as homologous recombination (HR). Homology directed repair can be one strategy for treating patients that have expanded trinucleotides in the ATXN2 gene. These strategies can restore the ATXN2 gene and reverse, treat, and/or mitigate the diseased state.

[0255] Homology directed repair is a cellular mechanism for repairing double-stranded breaks (DSBs). The most common form is homologous recombination. There are additional pathways for HDR, including single-strand annealing and alternative-HDR. Genome engineering tools allow researchers to manipulate the cellular homologous recombination pathways to create site-specific modifications to the genome. It has been found that cells can repair a double-stranded break using a synthetic donor molecule provided in trans. Therefore, by introducing a double-stranded break near a specific mutation and providing a suitable donor, targeted changes can be made in the genome. Specific cleavage increases the rate of HDR more than 1,000 fold above the rate of 1 in 10⁶ cells receiving a homologous donor alone. The rate of homology directed repair (HDR) at a particular nucleotide is a function of the distance to the cut site, so choosing overlapping or nearest target sites is important. Gene editing offers the advantage over gene addition, as correcting in situ leaves the rest of the genome unperturbed.

[0256] Supplied donors for editing by HDR vary markedly but can contain the intended sequence with small or large flanking homology arms to allow annealing to the genomic DNA. The homology regions flanking the introduced genetic changes can be 30 bp or smaller, or as large as a multi-kilobase cassette that can contain promoters, cDNAs, etc. Both single-stranded and double-stranded oligonucleotide donors have been used. These oligonucleotides range in size from less than 100 nt to over many kb, though longer ssDNA can also be generated and used. Double-stranded donors can be used, including PCR amplicons, plasmids, and mini-circles. In general, it has been found that an AAV vector can be a very effective means of delivery of a donor template, though the packaging limits for individual donors is <5kb. Active transcription of the donor increased HDR three-fold, indicating the inclusion of promoter may increase conversion. Conversely, CpG methylation of the donor decreased gene expression and HDR.

[0257] In addition to wild-type endonucleases, such as Cas9, nickase variants exist that have one or the other nuclease domain inactivated resulting in cutting of only one DNA strand. HDR can be directed from individual Cas nickases or using pairs of nickases that flank the target area. Donors can be single-stranded, nicked, or dsDNA.

[0258] The donor DNA can be supplied with the nuclease or independently by a variety of different methods, for example by transfection, nano-particle, micro-injection, or viral transduction. A range of tethering options has been proposed to increase the availability of the donors for HDR. Examples include attaching the donor to the nuclease, attaching to DNA binding proteins that bind nearby, or attaching to proteins that are involved in DNA end binding or repair.

[0259] The repair pathway choice can be guided by a number of culture conditions, such as those that influence cell cycling, or by targeting of DNA repair and associated proteins. For example, to increase HDR, key NHEJ molecules can be suppressed, such as KU70, KU80 or DNA ligase IV.

[0260] Without a donor present, the ends from a DNA break or ends from different breaks can be joined using the several non-homologous repair pathways in which the DNA ends are joined with little or no base-pairing at the junction. In addition to canonical NHEJ, there are similar repair mechanisms, such as alt-NHEJ. If there are two breaks, the intervening segment can be deleted or inverted. NHEJ repair pathways can lead to insertions, deletions or mutations at the joints.

[0261] NHEJ was used to insert a 15-kb inducible gene expression cassette into a defined locus in human cell lines after nuclease cleavage. (See e.g., Maresca, M., Lin, V. G., Guo, N. & Yang, Y., Genome Res 23, 539-546 (2013); Cristea et al. Biotechnology and Bioengineering, 110 (3):871-80 (2013); Suzuki et al. Nature, 540, 144-149 (2016)).

[0262] In addition to genome editing by NHEJ or HDR, site-specific gene insertions have been conducted that use both the NHEJ pathway and HDR. A combination approach may be applicable in certain settings, possibly including intron/exon borders. NHEJ may prove effective for ligation in the intron, while the error-free HDR may be better suited in the coding region.

[0263] The mutation of the ATXN2 gene that causes Spinocerebellar ataxia 2 (SCA2) is a trinucleotide repeat expansion of the three letter string of nucleotides CAG. In healthy individuals, there are few repeats of this trinucleotide, typically about or fewer than 31. In people with the diseases phenotype, the repeat can occur more than 100 times. One or more trinucleotide repeats may be deleted or corrected in order to restore the gene to a wild-type or similar number of trinucleotide repeats. In some aspects, all of the trinucleotide repeats may be deleted. Alternatively, the mutant gene may be knocked out to eliminate toxic gene products. Any one or more of the mutations can be repaired in order to restore the inactive ATXN2. As a further alternative, an ATXN2 gene or cDNA can be inserted to the locus of the corresponding gene to replace the mutant gene or knocked-in to a safe harbor site, such as AAVS1. In some examples, the methods can provide one gRNA or a pair of gRNAs that can be used to facilitate incorporation of a new sequence from a polynucleotide donor template to knock-in a part of or the entire ATXN2 gene or cDNA.

[0264] Some genome engineering strategies involves repeat deletion. Targeted deletion of trinucleotide repeats is an attractive strategy for treating a large subset of patients with a single therapeutic cocktail. Deletions can either be single trinucleotide repeat deletions or multi-trinucleotide repeat deletions. While multi-repeat deletions, including complete deletion of the expanded trinucleotide repeat, can reach a larger number of patients, for larger deletions the efficiency of deletion greatly decreases with increased size. In some aspects, the deletions range from 40 to 1,000 base pairs (bp) in size. For example, deletions may range from 40-100; 100-200; 200-300; 300-400; 400-500; or 500-1,000 base pairs in size.

[0265] The methods can provide gRNA pairs that make a deletion by cutting the gene twice, one gRNA cutting at the 5′ end of the trinucleotide repeats and the other gRNA cutting at the 3′ end of the trinucleotide repeats. The cutting can be accomplished by a pair of DNA endonucleases that each makes a DSB in the genome, or by multiple nickases that together make a DSB in the genome.

[0266] Alternatively, the methods can provide one gRNA to make one double-strand cut around the trinucleotide repeats. The double-strand cut can be made by a single DNA endonuclease or multiple nickases that together make a DSB in the genome.

[0267] Illustrative modifications within the ATXN2 gene include deletions within or near (proximal) to the trinucleotide repeats referred to above, such as within the region of less than 3 kb, less than 2kb, less than 1 kb, less than 0.5 kb upstream or downstream of the specific mutation. Given the relatively wide variations of trinucleotide repeats in the ATXN2 gene, it will be appreciated that numerous variations of the deletions referenced above (including without limitation larger as well as smaller deletions), would be expected to result in restoration of the ATXN2 gene expression.

[0268] Such variants can include deletions that are larger in the 5′ and/or 3′ direction than the specific repeat expansion in question, or smaller in either direction. Accordingly, by “near” or “proximal” with respect to specific repeat expansion, it is intended that the SSB or DSB locus associated with a desired deletion boundary (also referred to herein as an endpoint) can be within a region that is less than about 3 kb from the reference locus noted. The SSB or DSB locus can be more proximal and within 2 kb, within 1 kb, within 0.5 kb, or within 0.1 kb. In the case of small deletion, the desired endpoint can be at or “adjacent to” the reference locus, by which it is intended that the endpoint can be within 100 bp, within 50 bp, within 25 bp, or less than about 10 bp to 5 bp from the reference locus.

[0269] In order to ensure that the pre-mRNA is properly processed following deletion, the surrounding splicing signals can be deleted. Splicing donor and acceptors are generally within 100 base pairs of the neighboring intron. Therefore, in some examples, methods can provide all gRNAs that cut approximately +/−100-3100 bp with respect to each exon/intron junction of interest.

[0270] For any of the genome editing strategies, gene editing can be confirmed by sequencing or PCR analysis.

### Target Sequence Selection

[0271] Shifts in the location of the 5′ boundary and/or the 3′ boundary relative to particular reference loci can be used to facilitate or enhance particular applications of gene editing, which depend in part on the endonuclease system selected for the editing, as further described and illustrated herein.

[0272] In a first non-limiting example of such target sequence selection, many endonuclease systems have rules or criteria that can guide the initial selection of potential target sites for cleavage, such as the requirement of a PAM sequence motif in a particular position adjacent to the DNA cleavage sites in the case of CRISPR Type II or Type V endonucleases.

[0273] In another non-limiting example of target sequence selection or optimization, the frequency of off-target activity for a particular combination of target sequence and gene editing endonuclease (i.e. the frequency of DSBs occurring at sites other than the selected target sequence) can be assessed relative to the frequency of on-target activity. In some cases, cells that have been correctly edited at the desired locus can have a selective advantage relative to other cells. Illustrative, but non-limiting, examples of a selective advantage include the acquisition of attributes such as enhanced rates of replication, persistence, resistance to certain conditions, enhanced rates of successful engraftment or persistence in vivo following introduction into a patient, and other attributes associated with the maintenance or increased numbers or viability of such cells. In other cases, cells that have been correctly edited at the desired locus can be positively selected for by one or more screening methods used to identify, sort or otherwise select for cells that have been correctly edited. Both selective advantage and directed selection methods can take advantage of the phenotype associated with the correction. In some cases, cells can be edited two or more times in order to create a second modification that creates a new phenotype that is used to select or purify the intended population of cells. Such a second modification could be created by adding a second gRNA enabling expression of a selectable or screenable marker. In some cases, cells can be correctly edited at the desired locus using a DNA fragment that contains the cDNA and also a selectable marker.

[0274] Whether any selective advantage is applicable or any directed selection is to be applied in a particular case, target sequence selection can also be guided by consideration of off-target frequencies in order to enhance the effectiveness of the application and/or reduce the potential for undesired alterations at sites other than the desired target. As described further and illustrated herein and in the art, the occurrence of off-target activity can be influenced by a number of factors including similarities and dissimilarities between the target site and various off-target sites, as well as the particular endonuclease used. Bioinformatics tools are available that assist in the prediction of off-target activity, and frequently such tools can also be used to identify the most likely sites of off-target activity, which can then be assessed in experimental settings to evaluate relative frequencies of off-target to on-target activity, thereby allowing the selection of sequences that have higher relative on-target activities. Illustrative examples of such techniques are provided herein, and others are known in the art.

[0275] Another aspect of target sequence selection relates to homologous recombination events. Sequences sharing regions of homology can serve as focal points for homologous recombination events that result in deletion of intervening sequences. Such recombination events occur during the normal course of replication of chromosomes and other DNA sequences, and also at other times when DNA sequences are being synthesized, such as in the case of repairs of double-strand breaks (DSBs), which occur on a regular basis during the normal cell replication cycle but can also be enhanced by the occurrence of various events (such as UV light and other inducers of DNA breakage) or the presence of certain agents (such as various chemical inducers). Many such inducers cause DSBs to occur indiscriminately in the genome, and DSBs can be regularly induced and repaired in normal cells. During repair, the original sequence can be reconstructed with complete fidelity, however, in some cases, small insertions or deletions (referred to as “indels”) are introduced at the DSB site.

[0276] DSBs can also be specifically induced at particular locations, as in the case of the endonucleases systems described herein, which can be used to cause directed or preferential gene modification events at selected chromosomal locations. The tendency for homologous sequences to be subject to recombination in the context of DNA repair (as well as replication) can be taken advantage of in a number of circumstances, and is the basis for one application of gene editing systems, such as CRISPR, in which homology directed repair is used to insert a sequence of interest, provided through use of a “donor” polynucleotide, into a desired chromosomal location.

[0277] Regions of homology between particular sequences, which can be small regions of “microhomology” that can comprise as few as ten base pairs or less, can also be used to bring about desired deletions. For example, a single DSB can be introduced at a site that exhibits microhomology with a nearby sequence. During the normal course of repair of such DSB, a result that occurs with high frequency is the deletion of the intervening sequence as a result of recombination being facilitated by the DSB and concomitant cellular repair process.

[0278] In some circumstances, however, selecting target sequences within regions of homology can also give rise to much larger deletions, including gene fusions (when the deletions are in coding regions), which may or may not be desired given the particular circumstances.

[0279] The examples provided herein further illustrate the selection of various target regions for the creation of DSBs designed to induce deletions or replacements that result in restoration of wild-type or similar levels of trinucleotide repeats in the ATXN2 gene, as well as the selection of specific target sequences within such regions that are designed to minimize off-target events relative to on-target events.

### Human Cells

[0280] For ameliorating Spinocerebellar ataxia 2 (SCA2) or any disorder associated with ATXN2, as described and illustrated herein, the principal targets for gene editing are human cells. For example, in the ex vivo methods, the human cells can be somatic cells, which after being modified using the techniques as described, can give rise to differentiated cells, e.g., neurons or progenitor cells. For example, in the in vivo methods, the human cells may be cells from the central nervous system or cells from other affected organs.

[0281] By performing gene editing in autologous cells that are derived from and therefore already completely matched with the patient in need, it is possible to generate cells that can be safely re-introduced into the patient, and effectively give rise to a population of cells that will be effective in ameliorating one or more clinical conditions associated with the patient's disease.

[0282] Stem cells are capable of both proliferation and giving rise to more progenitor cells, these in turn having the ability to generate a large number of mother cells that can in turn give rise to differentiated or differentiable daughter cells. The daughter cells themselves can be induced to proliferate and produce progeny that subsequently differentiate into one or more mature cell types, while also retaining one or more cells with parental developmental potential. The term “stem cell” refers then, to a cell with the capacity or potential, under particular circumstances, to differentiate to a more specialized or differentiated phenotype, and which retains the capacity, under certain circumstances, to proliferate without substantially differentiating. In one aspect, the term progenitor or stem cell refers to a generalized mother cell whose descendants (progeny) specialize, often in different directions, by differentiation, e.g., by acquiring completely individual characters, as occurs in progressive diversification of embryonic cells and tissues. Cellular differentiation is a complex process typically occurring through many cell divisions. A differentiated cell may derive from a multipotent cell that itself is derived from a multipotent cell, and so on. While each of these multipotent cells may be considered stem cells, the range of cell types that each can give rise to may vary considerably. Some differentiated cells also have the capacity to give rise to cells of greater developmental potential. Such capacity may be natural or may be induced artificially upon treatment with various factors. In many biological instances, stem cells can also be “multipotent” because they can produce progeny of more than one distinct cell type, but this is not required for “stem-ness.”

[0283] Self-renewal can be another important aspect of the stem cell. In theory, self-renewal can occur by either of two major mechanisms. Stem cells can divide asymmetrically, with one daughter retaining the stem state and the other daughter expressing some distinct other specific function and phenotype. Alternatively, some of the stem cells in a population can divide symmetrically into two stems, thus maintaining some stem cells in the population as a whole, while other cells in the population give rise to differentiated progeny only. Generally, “progenitor cells” have a cellular phenotype that is more primitive (i.e., is at an earlier step along a developmental pathway or progression than is a fully differentiated cell). Often, progenitor cells also have significant or very high-proliferative potential. Progenitor cells can give rise to multiple distinct differentiated cell types or to a single differentiated cell type, depending on the developmental pathway and on the environment in which the cells develop and differentiate.

[0284] In the context of cell ontogeny, the adjective “differentiated,” or “differentiating” is a relative term. A “differentiated cell” is a cell that has progressed further down the developmental pathway than the cell to which it is being compared. Thus, stem cells can differentiate into lineage-restricted precursor cells (such as a neural progenitor cell), which in turn can differentiate into other types of precursor cells further down the pathway (such as a neural precursor), and then to an end-stage differentiated cell, such as a neural, which plays a characteristic role in a certain tissue type, and may or may not retain the capacity to proliferate further.

### Induced Pluripotent Stem Cells

[0285] The genetically engineered human cells described herein can be induced pluripotent stem cells (iPSCs). An advantage of using iPSCs is that the cells can be derived from the same subject to which the progenitor cells are to be administered. That is, a somatic cell can be obtained from a subject, reprogrammed to an induced pluripotent stem cell, and then re-differentiated into a progenitor cell to be administered to the subject (e.g., autologous cells).

[0286] Because the progenitors are essentially derived from an autologous source, the risk of engraftment rejection or allergic response can be reduced compared to the use of cells from another subject or group of subjects. In addition, the use of iPSCs negates the need for cells obtained from an embryonic source. Thus, in one aspect, the stem cells used in the disclosed methods are not embryonic stem cells.

[0287] Although differentiation is generally irreversible under physiological contexts, several methods have been recently developed to reprogram somatic cells to iPSCs. Exemplary methods are known to those of skill in the art and are described briefly herein below.

[0288] The term “reprogramming” refers to a process that alters or reverses the differentiation state of a differentiated cell (e.g., a somatic cell). Stated another way, reprogramming refers to a process of driving the differentiation of a cell backwards to a more undifferentiated or more primitive type of cell. It should be noted that placing many primary cells in culture can lead to some loss of fully differentiated characteristics. Thus, simply culturing such cells included in the term differentiated cells does not render these cells non-differentiated cells (e.g., undifferentiated cells) or pluripotent cells. The transition of a differentiated cell to pluripotency requires a reprogramming stimulus beyond the stimuli that lead to partial loss of differentiated character in culture. Reprogrammed cells also have the characteristic of the capacity of extended passaging without loss of growth potential, relative to primary cell parents, which generally have capacity for only a limited number of divisions in culture.

[0289] The cell to be reprogrammed can be either partially or terminally differentiated prior to reprogramming. Reprogramming can encompass complete reversion of the differentiation state of a differentiated cell (e.g., a somatic cell) to a pluripotent state or a multipotent state. Reprogramming can encompass complete or partial reversion of the differentiation state of a differentiated cell (e.g., a somatic cell) to an undifferentiated cell (e.g., an embryonic-like cell). Reprogramming can result in expression of particular genes by the cells, the expression of which further contributes to reprogramming. In certain examples described herein, reprogramming of a differentiated cell (e.g., a somatic cell) can cause the differentiated cell to assume an undifferentiated state (e.g., is an undifferentiated cell). The resulting cells are referred to as “reprogrammed cells,” or “induced pluripotent stem cells (iPSCs or iPS cells).”

[0290] Reprogramming can involve alteration, e.g., reversal, of at least some of the heritable patterns of nucleic acid modification (e.g., methylation), chromatin condensation, epigenetic changes, genomic imprinting, etc., that occur during cellular differentiation. Reprogramming is distinct from simply maintaining the existing undifferentiated state of a cell that is already pluripotent or maintaining the existing less than fully differentiated state of a cell that is already a multipotent cell (e.g., a myogenic stem cell). Reprogramming is also distinct from promoting the self-renewal or proliferation of cells that are already pluripotent or multipotent, although the compositions and methods described herein can also be of use for such purposes, in some examples.

[0291] Many methods are known in the art that can be used to generate pluripotent stem cells from somatic cells. Any such method that reprograms a somatic cell to the pluripotent phenotype would be appropriate for use in the methods described herein.

[0292] Reprogramming methodologies for generating pluripotent cells using defined combinations of transcription factors have been described. Mouse somatic cells can be converted to ES cell-like cells with expanded developmental potential by the direct transduction of Oct4, Sox2, Klf4, and c-Myc; see, e.g., Takahashi and Yamanaka, Cell 126(4): 663-76 (2006). iPSCs resemble ES cells, as they restore the pluripotency-associated transcriptional circuitry and much of the epigenetic landscape. In addition, mouse iPSCs satisfy all the standard assays for pluripotency: specifically, in vitro differentiation into cell types of the three germ layers, teratoma formation, contribution to chimeras, germline transmission [see, e.g., Maherali and Hochedlinger, Cell Stem Cell. 3(6):595-605 (2008)], and tetraploid complementation.

[0293] Human iPSCs can be obtained using similar transduction methods, and the transcription factor trio, OCT4, SOX2, and NANOG, has been established as the core set of transcription factors that govern pluripotency; see, e.g., Budniatzky and Gepstein, Stem Cells Transl Med. 3(4):448-57 (2014); Barrett et al., Stem Cells Trans Med 3:1-6 sctm.2014-0121 (2014); Focosi et al., Blood Cancer Journal 4: e211 (2014); and references cited therein. The production of iPSCs can be achieved by the introduction of nucleic acid sequences encoding stem cell-associated genes into an adult, somatic cell, historically using viral vectors.

[0294] iPSCs can be generated or derived from terminally differentiated somatic cells, as well as from adult stem cells, or somatic stem cells. That is, a non-pluripotent progenitor cell can be rendered pluripotent or multipotent by reprogramming. In such instances, it may not be necessary to include as many reprogramming factors as required to reprogram a terminally differentiated cell. Further, reprogramming can be induced by the non-viral introduction of reprogramming factors, e.g., by introducing the proteins themselves, or by introducing nucleic acids that encode the reprogramming factors, or by introducing messenger RNAs that upon translation produce the reprogramming factors (see e.g., Warren et al., Cell Stem Cell, 7(5):618-30 (2010). Reprogramming can be achieved by introducing a combination of nucleic acids encoding stem cell-associated genes, including, for example, Oct-4 (also known as Oct-3/4 or Pouf51), Sox1, Sox2, Sox3, Sox 15, Sox 18, NANOG, Klf1, Klf2, Klf4, Klf5, NR5A2, c-Myc, 1-Myc, n-Myc, Rem2, Tert, and LIN28. Reprogramming using the methods and compositions described herein can further comprise introducing one or more of Oct-3/4, a member of the Sox family, a member of the Klf family, and a member of the Myc family to a somatic cell. The methods and compositions described herein can further comprise introducing one or more of each of Oct-4, Sox2, Nanog, c-MYC and Klf4 for reprogramming. As noted above, the exact method used for reprogramming is not necessarily critical to the methods and compositions described herein. However, where cells differentiated from the reprogrammed cells are to be used in, e.g., human therapy, in one aspect the reprogramming is not effected by a method that alters the genome. Thus, in such examples, reprogramming can be achieved, e.g., without the use of viral or plasmid vectors.

[0295] The efficiency of reprogramming (i.e., the number of reprogrammed cells) derived from a population of starting cells can be enhanced by the addition of various agents, e.g., small molecules, as shown by Shi et al., Cell-Stem Cell 2:525-528 (2008); Huangfu et al., Nature Biotechnology 26(7):795-797 (2008) and Marson et al., Cell-Stem Cell 3: 132-135 (2008). Thus, an agent or combination of agents that enhance the efficiency or rate of induced pluripotent stem cell production can be used in the production of patient-specific or disease-specific iPSCs. Some non-limiting examples of agents that enhance reprogramming efficiency include soluble Wnt, Wnt conditioned media, BIX-01294 (a G9a histone methyltransferase), PD0325901 (a MEK inhibitor), DNA methyltransferase inhibitors, histone deacetylase (HDAC) inhibitors, valproic acid, 5′-azacytidine, dexamethasone, suberoylanilide, hydroxamic acid (SAHA), vitamin C, and trichostatin (TSA), among others.

[0296] Other non-limiting examples of reprogramming enhancing agents include: Suberoylanilide Hydroxamic Acid (SAHA (e.g., MK0683, vorinostat) and other hydroxamic acids), BML-210, Depudecin (e.g., (−)-Depudecin), HC Toxin, Nullscript (4-(1,3-Dioxo-1H,3H-benzo[de]isoquinolin-2-yl)-N-hydroxybutanamide), Phenylbutyrate (e.g., sodium phenylbutyrate) and Valproic Acid ((VP A) and other short chain fatty acids), Scriptaid, Suramin Sodium, Trichostatin A (TSA), APHA Compound 8, Apicidin, Sodium Butyrate, pivaloyloxymethyl butyrate (Pivanex, AN-9), Trapoxin B, Chlamydocin, Depsipeptide (also known as FR901228 or FK228), benzamides (e.g., CI-994 (e.g., N-acetyl dinaline) and MS-27-275), MGCD0103, NVP-LAQ-824, CBHA (m-carboxycinnaminic acid bishydroxamic acid), JNJ16241199, Tubacin, A-161906, proxamide, oxamflatin, 3-C1-UCHA (e.g., 6-(3-chlorophenylureido) caproic hydroxamic acid), AOE (2-amino-8-oxo-9, 10-epoxydecanoic acid), CHAP31 and CHAP 50. Other reprogramming enhancing agents include, for example, dominant negative forms of the HDACs (e.g., catalytically inactive forms), siRNA inhibitors of the HDACs, and antibodies that specifically bind to the HDACs. Such inhibitors are available, e.g., from BIOMOL International, Fukasawa, Merck Biosciences, Novartis, Gloucester Pharmaceuticals, Titan Pharmaceuticals, MethylGene, and Sigma Aldrich.

[0297] To confirm the induction of pluripotent stem cells for use with the methods described herein, isolated clones can be tested for the expression of a stem cell marker. Such expression in a cell derived from a somatic cell identifies the cells as induced pluripotent stem cells. Stem cell markers can be selected from the non-limiting group including SSEA3, SSEA4, CD9, Nanog, Fbx15, Ecatl, Esgl, Eras, Gdf3, Fgf4, Cripto, Daxl, Zpf296, Slc2a3, Rexl, Utfl, and Natl. In one case, for example, a cell that expresses Oct4 or Nanog is identified as pluripotent. Methods for detecting the expression of such markers can include, for example, RT-PCR and immunological methods that detect the presence of the encoded polypeptides, such as Western blots or flow cytometric analyses. Detection can involve not only RT-PCR, but can also include detection of protein markers. Intracellular markers may be best identified via RT-PCR, or protein detection methods such as immunocytochemistry, while cell surface markers are readily identified, e.g., by immunocytochemistry.

[0298] The pluripotent stem cell character of isolated cells can be confirmed by tests evaluating the ability of the iPSCs to differentiate into cells of each of the three germ layers. As one example, teratoma formation in nude mice can be used to evaluate the pluripotent character of the isolated clones. The cells can be introduced into nude mice and histology and/or immunohistochemistry can be performed on a tumor arising from the cells. The growth of a tumor comprising cells from all three germ layers, for example, further indicates that the cells are pluripotent stem cells.

### Cells of the Central Nervous System

[0299] In some aspects, the genetically engineered human cells described herein are cells of the central nervous system. Neurons, which process information, and glial cells (or neuroglia), which provide mechanical and metabolic support to the nervous system and modulate information processed by neurons, are the two main classes of cells of the central nervous system. Non-limiting examples of neurons include sensory neurons (also referred to as afferent neurons) transfer information from the external environment to the central nervous system, motor neurons (also referred to as efferent neurons) transfer information from the central nervous system to the external environment, and interneurons (also referred to as association neurons) process information in the central nervous system and transfers the information from one neuron to the other within the central nervous system. Non-limiting examples of glial cells include astrocytes, oligodendrocytes, microglia and Schwann cells. CNS progenitor cells can be neural progenitor cells or glial progenitor cells.

[0300] The typical neuron transmits electrical signals from one cell to another. Neurons contain a cell body, dendrite, axon hillock, axon, nerve endings, neuronal synapses and neuromuscular junctions. Neurons may be named according to shape or the nature of the dendritic tree.

[0301] The most numerous cellular constituents of the central nervous system are the non-neuronal, neuroglial (“nerve glue”) cells that occupy the space between neurons. It has been estimated that there are roughly 360 billion glial cells, which comprise 80-90% of the cells in the CNS. Neuroglia differ from neurons in several general ways in that they: do not form synapses, have essentially only one type of process, retain the ability to divide, and are less electrically excitable than neurons. Neuroglia are classified based on size and shape of their nucleus and distinguished from neurons, at the light microscopic level. Neuroglia are divided into two major categories based on size, the macroglia and the microglia. The macroglia are of ectodermal origin and consist of astrocytes, oligodendrocytes and ependymal cells. Microglia cells are probably of mesodermal origin.

Creating Patient Specific iPSCs

[0302] One step of the ex vivo methods of the present disclosure can involve creating a patient specific iPS cell, patient specific iPS cells, or a patient specific iPS cell line. There are many established methods in the art for creating patient specific iPS cells, as described in Takahashi and Yamanaka 2006; Takahashi, Tanabe et al. 2007. For example, the creating step can comprise: a) isolating a somatic cell, such as a skin cell or fibroblast, from the patient; and b) introducing a set of pluripotency-associated genes into the somatic cell in order to induce the cell to become a pluripotent stem cell. The set of pluripotency-associated genes can be one or more of the genes selected from the group consisting of OCT4, SOX1, SOX2, SOX3, SOX15, SOX18, NANOG, KLF1, KLF2, KLF4, KLF5, c-MYC, n-MYC, REM2, TERT and LIN28.

### Performing a Biopsy or Aspirate of the Patient's Brain or Bone Marrow

[0303] A biopsy or aspirate is a sample of tissue or fluid taken from the body. There are many different kinds of biopsies or aspirates. Nearly all of them involve using a sharp tool to remove a small amount of tissue. If the biopsy will be on the skin or other sensitive area, numbing medicine can be applied first. A biopsy or aspirate may be performed according to any of the known methods in the art. For example, in the case of brain, a needle biopsy is performed to isolate a piece of the brain. A small hole is drilled into the skull and a narrow, hollow needle is placed into the hole to extract a tiny portion of the tissue. For example, in a bone marrow aspirate, a large needle is used to enter the pelvis bone to collect bone marrow.

### Isolating a Neuron

[0304] Neurons may be isolated according to any known method in the art. For example, the biopsied tissue from the brain is disassociated by trituration and trypsinization (0.25% trypsin in PBS at 37° C. for 15 min). The trypsin is inactivated with 10% heat-inactivated FBS (fetal bovine serum). The disassociated cells are filtered through 380 and 140 μm meshes and pelleted by centrifugation. The cell pellet is then washed once with PBS and once with Neurobasal media. The neurons are enriched and cultured on poly-D-lysine-coated plates. The adherent cells receive Neurobasal media used previously and are further treated with 10 μM cytosine arabonoside (AraC) for 10 days to prevent proliferation of dividing cells. Cells are cultured and characterized for neuron-specific markers such as MAP-2 (Zhang et al., Journal of Cell Biology, 2002, 156(3):519-29).

### Isolating a Mesenchymal Stem Cell

[0305] Mesenchymal stem cells can be isolated according to any method known in the art, such as from a patient's bone marrow or peripheral blood. For example, marrow aspirate can be collected into a syringe with heparin. Cells can be washed and centrifuged on a Percoll. The cells can be cultured in Dulbecco's modified Eagle's medium (DMEM) (low glucose) containing 10% fetal bovine serum (FBS) (Pittinger M F, Mackay A M, Beck S C et al., Science 1999; 284:143-147).

### Genetically Modified Cells

[0306] The term “genetically modified cell” refers to a cell that comprises at least one genetic modification introduced by genome editing (e.g., using the CRISPR/Cas9 or CRISPR/Cpf1 system). In some ex vivo examples herein, the genetically modified cell can be genetically modified neural progenitor cell. In some in vivo examples herein, the genetically modified cell can be a genetically modified cell of the central nervous system (e.g., a neuron or a glial cell). A genetically modified cell comprising an exogenous genome-targeting nucleic acid and/or an exogenous nucleic acid encoding a genome-targeting nucleic acid is contemplated herein.

[0307] The term “control treated population” describes a population of cells that has been treated with identical media, viral induction, nucleic acid sequences, temperature, confluency, flask size, pH, etc., with the exception of the addition of the genome editing components. Any method known in the art can be used to measure restoration of ATXN2 gene or protein expression or activity, for example Western Blot analysis of the ATXN2 protein or real time PCR for quantifying ATXN2 mRNA.

[0308] The term “isolated cell” refers to a cell that has been removed from an organism in which it was originally found, or a descendant of such a cell. Optionally, the cell can be cultured in vitro, e.g., under defined conditions or in the presence of other cells. Optionally, the cell can be later introduced into a second organism or re-introduced into the organism from which it (or the cell from which it is descended) was isolated.

[0309] The term “isolated population” with respect to an isolated population of cells refers to a population of cells that has been removed and separated from a mixed or heterogeneous population of cells. In some cases, the isolated population can be a substantially pure population of cells, as compared to the heterogeneous population from which the cells were isolated or enriched. In some cases, the isolated population can be an isolated population of human progenitor cells, e.g., a substantially pure population of human progenitor cells, as compared to a heterogeneous population of cells comprising human progenitor cells and cells from which the human progenitor cells were derived.

[0310] The term “substantially enhanced,” with respect to a particular cell population, refers to a population of cells in which the occurrence of a particular type of cell is increased relative to pre-existing or reference levels, by at least 2-fold, at least 3-, at least 4-, at least 5-, at least 6-, at least 7-, at least 8-, at least 9, at least 10-, at least 20-, at least 50-, at least 100-, at least 400-, at least 1000-, at least 5000-, at least 20000-, at least 100000- or more fold depending, e.g., on the desired levels of such cells for ameliorating Spinocerebellar ataxia 2 (SCA2).

[0311] The term “substantially enriched” with respect to a particular cell population, refers to a population of cells that is at least about 10%, about 20%, about 30%, about 40%, about 50%, about 60%, about 70% or more with respect to the cells making up a total cell population.

[0312] The term “substantially pure” with respect to a particular cell population, refers to a population of cells that is at least about 75%, at least about 85%, at least about 90%, or at least about 95% pure, with respect to the cells making up a total cell population. That is, the terms “substantially pure” or “essentially purified,” with regard to a population of progenitor cells, refers to a population of cells that contain fewer than about 20%, about 15%, about 10%, about 9%, about 8%, about 7%, about 6%, about 5%, about 4%, about 3%, about 2%, about 1%, or less than 1%, of cells that are not progenitor cells as defined by the terms herein.

Differentiation of Genome-Edited iPSCs into Cells of the Central Nervous System (CNS)

[0313] Another step of the ex vivo methods of the present disclosure can comprise differentiating the genome-edited iPSCs into cells of the central nervous system (CNS) (e.g., neurons or glial cells). The differentiating step may be performed according to any method known in the art.

Differentiation of Genome-Edited Mesenchymal Stem Cells into Cells of the Central Nervous System (CNS)

[0314] Another step of the ex vivo methods of the present disclosure can comprise differentiating the genome-edited mesenchymal stem cells into cells of the central nervous system (CNS). The differentiating step may be performed according to any method known in the art.

Implanting Cells into Patients

[0315] Another step of the ex vivo methods of the present disclosure involves implanting the cells of the central nervous system (e.g., neurons or glial cells) into patients. This implanting step may be accomplished using any method of implantation known in the art. For example, the genetically modified neurons may be administered to the patient via intraparenchymal, vascular (e.g., intravenous, intra-arterial), or ventricular (e.g., intracerebroventricular, intracisternal, intrathecal) routes or other routes such as intracranial or intraperitoneal injection.

### III. Formulations and Delivery

### Pharmaceutically Acceptable Carriers

[0316] The ex vivo methods of administering progenitor cells to a subject contemplated herein involve the use of therapeutic compositions comprising progenitor cells.

[0317] Therapeutic compositions can contain a physiologically tolerable carrier together with the cell composition, and optionally at least one additional bioactive agent as described herein, dissolved or dispersed therein as an active ingredient. In some cases, the therapeutic composition is not substantially immunogenic when administered to a mammal or human patient for therapeutic purposes, unless so desired.

[0318] In general, the progenitor cells described herein can be administered as a suspension with a pharmaceutically acceptable carrier. One of skill in the art will recognize that a pharmaceutically acceptable carrier to be used in a cell composition will not include buffers, compounds, cryopreservation agents, preservatives, or other agents in amounts that substantially interfere with the viability of the cells to be delivered to the subject. A formulation comprising cells can include e.g., osmotic buffers that permit cell membrane integrity to be maintained, and optionally, nutrients to maintain cell viability or enhance engraftment upon administration. Such formulations and suspensions are known to those of skill in the art and/or can be adapted for use with the progenitor cells, as described herein, using routine experimentation.

[0319] A cell composition can also be emulsified or presented as a liposome composition, provided that the emulsification procedure does not adversely affect cell viability. The cells and any other active ingredient can be mixed with excipients that are pharmaceutically acceptable and compatible with the active ingredient, and in amounts suitable for use in the therapeutic methods described herein.

[0320] Additional agents included in a cell composition can include pharmaceutically acceptable salts of the components therein. Pharmaceutically acceptable salts include the acid addition salts (formed with the free amino groups of the polypeptide) that are formed with inorganic acids, such as, for example, hydrochloric or phosphoric acids, or such organic acids as acetic, tartaric, mandelic and the like. Salts formed with the free carboxyl groups can also be derived from inorganic bases, such as, for example, sodium, potassium, ammonium, calcium or ferric hydroxides, and such organic bases as isopropylamine, trimethylamine, 2-ethylamino ethanol, histidine, procaine and the like.

[0321] Physiologically tolerable carriers are well known in the art. Exemplary liquid carriers are sterile aqueous solutions that contain no materials in addition to the active ingredients and water, or contain a buffer such as sodium phosphate at physiological pH value, physiological saline or both, such as phosphate-buffered saline. Still further, aqueous carriers can contain more than one buffer salt, as well as salts such as sodium and potassium chlorides, dextrose, polyethylene glycol and other solutes. Liquid compositions can also contain liquid phases in addition to and to the exclusion of water. Exemplary of such additional liquid phases are glycerin, vegetable oils such as cottonseed oil, and water-oil emulsions. The amount of an active compound used in the cell compositions that is effective in the treatment of a particular disorder or condition can depend on the nature of the disorder or condition, and can be determined by standard clinical techniques.

### Guide RNA Formulation

[0322] Guide RNAs of the present disclosure can be formulated with pharmaceutically acceptable excipients such as carriers, solvents, stabilizers, adjuvants, diluents, etc., depending upon the particular mode of administration and dosage form. Guide RNA compositions can be formulated to achieve a physiologically compatible pH, and range from a pH of about 3 to a pH of about 11, about pH 3 to about pH 7, depending on the formulation and route of administration. In some cases, the pH can be adjusted to a range from about pH 5.0 to about pH 8. In some cases, the compositions can comprise a therapeutically effective amount of at least one compound as described herein, together with one or more pharmaceutically acceptable excipients. Optionally, the compositions can comprise a combination of the compounds described herein, or can include a second active ingredient useful in the treatment or prevention of bacterial growth (for example and without limitation, anti-bacterial or anti-microbial agents), or can include a combination of reagents of the present disclosure.

[0323] Suitable excipients include, for example, carrier molecules that include large, slowly metabolized macromolecules such as proteins, polysaccharides, polylactic acids, polyglycolic acids, polymeric amino acids, amino acid copolymers, and inactive virus particles. Other exemplary excipients can include antioxidants (for example and without limitation, ascorbic acid), chelating agents (for example and without limitation, EDTA), carbohydrates (for example and without limitation, dextrin, hydroxyalkylcellulose, and hydroxyalkylmethylcellulose), stearic acid, liquids (for example and without limitation, oils, water, saline, glycerol and ethanol), wetting or emulsifying agents, pH buffering substances, and the like.

### Delivery

[0324] Guide RNA polynucleotides (RNA or DNA) and/or endonuclease polynucleotide(s) (RNA or DNA) can be delivered by viral or non-viral delivery vehicles known in the art. Alternatively, endonuclease polypeptide(s) can be delivered by viral or non-viral delivery vehicles known in the art, such as electroporation or lipid nanoparticles. In further alternative aspects, the DNA endonuclease can be delivered as one or more polypeptides, either alone or pre-complexed with one or more guide RNAs, or one or more crRNA together with a tracrRNA.

[0325] Polynucleotides can be delivered by non-viral delivery vehicles including, but not limited to, nanoparticles, liposomes, ribonucleoproteins, positively charged peptides, small molecule RNA-conjugates, aptamer-RNA chimeras, and RNA-fusion protein complexes. Some exemplary non-viral delivery vehicles are described in Peer and Lieberman, Gene Therapy, 18: 1127-1133 (2011) (which focuses on non-viral delivery vehicles for siRNA that are also useful for delivery of other polynucleotides).

[0326] For polynucleotides of the present disclosure, the formulation may be selected from any of those taught, for example, in International Application PCT/US2012/069610.

[0327] Polynucleotides, such as guide RNA, sgRNA, and mRNA encoding an endonuclease, may be delivered to a cell or a patient by a lipid nanoparticle (LNP).

[0328] A LNP refers to any particle having a diameter of less than 1000 nm, 500 nm, 250 nm, 200 nm, 150 nm, 100 nm, 75 nm, 50 nm, or 25 nm. Alternatively, a nanoparticle may range in size from 1-1000 nm, 1-500 nm, 1-250 nm, 25-200 nm, 25-100 nm, 35-75 nm, or 25-60 nm.

[0329] LNPs may be made from cationic, anionic, or neutral lipids. Neutral lipids, such as the fusogenic phospholipid DOPE or the membrane component cholesterol, may be included in LNPs as ‘helper lipids’ to enhance transfection activity and nanoparticle stability. Limitations of cationic lipids include low efficacy owing to poor stability and rapid clearance, as well as the generation of inflammatory or anti-inflammatory responses.

[0330] LNPs may also be comprised of hydrophobic lipids, hydrophilic lipids, or both hydrophobic and hydrophilic lipids.

[0331] Any lipid or combination of lipids that are known in the art can be used to produce a LNP. Examples of lipids used to produce LNPs are: DOTMA, DOSPA, DOTAP, DMRIE, DC-cholesterol, DOTAP-cholesterol, GAP-DMORIE-DPyPE, and GL67A-DOPE-DMPE-polyethylene glycol (PEG). Examples of cationic lipids are: 98N12-5, C12-200, DLin-KC2-DMA (KC2), DLin-MC3-DMA (MC3), XTC, MD1, and 7C1. Examples of neutral lipids are: DPSC, DPPC, POPC, DOPE, and SM. Examples of PEG-modified lipids are: PEG-DMG, PEG-CerC14, and PEG-CerC20.

[0332] The lipids can be combined in any number of molar ratios to produce a LNP. In addition, the polynucleotide(s) can be combined with lipid(s) in a wide range of molar ratios to produce a LNP.

[0333] As stated previously, the site-directed polypeptide and genome-targeting nucleic acid can each be administered separately to a cell or a patient. On the other hand, the site-directed polypeptide can be pre-complexed with one or more guide RNAs, or one or more crRNA together with a tracrRNA. The pre-complexed material can then be administered to a cell or a patient. Such pre-complexed material is known as a ribonucleoprotein particle (RNP).

[0334] RNA is capable of forming specific interactions with RNA or DNA. While this property is exploited in many biological processes, it also comes with the risk of promiscuous interactions in a nucleic acid-rich cellular environment. One solution to this problem is the formation of ribonucleoprotein particles (RNPs), in which the RNA is pre-complexed with an endonuclease. Another benefit of the RNP is protection of the RNA from degradation.

[0335] The endonuclease in the RNP can be modified or unmodified. Likewise, the gRNA, crRNA, tracrRNA, or sgRNA can be modified or unmodified. Numerous modifications are known in the art and can be used.

[0336] The endonuclease and sgRNA can be generally combined in a 1:1 molar ratio. Alternatively, the endonuclease, crRNA and tracrRNA can be generally combined in a 1:1:1 molar ratio. However, a wide range of molar ratios can be used to produce a RNP.

### AAV (Adeno Associated Virus)

[0337] A recombinant adeno-associated virus (AAV) vector can be used for delivery. Techniques to produce rAAV particles, in which an AAV genome to be packaged that includes the polynucleotide to be delivered, rep and cap genes, and helper virus functions are provided to a cell are standard in the art. Production of rAAV typically requires that the following components are present within a single cell (denoted herein as a packaging cell): a rAAV genome, AAV rep and cap genes separate from (i.e., not in) the rAAV genome, and helper virus functions. The AAV rep and cap genes may be from any AAV serotype for which recombinant virus can be derived, and may be from a different AAV serotype than the rAAV genome ITRs, including, but not limited to, AAV serotypes described herein. Production of pseudotyped rAAV is disclosed in, for example, international patent application publication number WO 01/83692.

### AAV Serotypes

[0338] AAV particles packaging polynucleotides encoding compositions of the present disclosure, e.g., endonucleases, donor sequences, or RNA guide molecules, of the present disclosure may comprise or be derived from any natural or recombinant AAV serotype. According to the present disclosure, the AAV particles may utilize or be based on a serotype selected from any of the following serotypes, and variants thereof including but not limited to AAV1, AAV10, AAV106.1/hu.37, AAV11, AAV114.3/hu.40, AAV12, AAV127.2/hu.41, AAV127.5/hu.42, AAV128.1/hu.43, AAV128.3/hu.44, AAV130.4/hu.48, AAV145.1/hu.53, AAV145.5/hu.54, AAV145.6/hu.55, AAV16.12/hu.11, AAV16.3, AAV16.8/hu.10, AAV161.10/hu.60, AAV161.6/hu.61, AAV1-7/rh.48, AAV1-8/rh.49, AAV2, AAV2.5T, AAV2-15/rh.62, AAV223.1, AAV223.2, AAV223.4, AAV223.5, AAV223.6, AAV223.7, AAV2-3/rh.61, AAV24.1, AAV2-4/rh.50, AAV2-5/rh.51, AAV27.3, AAV29.3/bb.1, AAV29.5/bb.2, AAV2G9, AAV-2-pre-miRNA-101, AAV3, AAV3.1/hu.6, AAV3.1/hu.9, AAV3-11/rh.53, AAV3-3, AAV33.12/hu.17, AAV33.4/hu.15, AAV33.8/hu.16, AAV3-9/rh.52, AAV3a, AAV3b, AAV4, AAV4-19/rh.55, AAV42.12, AAV42-10, AAV42-11, AAV42-12, AAV42-13, AAV42-15, AAV42-1b, AAV42-2, AAV42-3a, AAV42-3b, AAV42-4, AAV42-5a, AAV42-5b, AAV42-6b, AAV42-8, AAV42-aa, AAV43-1, AAV43-12, AAV43-20, AAV43-21, AAV43-23, AAV43-25, AAV43-5, AAV4-4, AAV44.1, AAV44.2, AAV44.5, AAV46.2/hu.28, AAV46.6/hu.29, AAV4-8/r11.64, AAV4-8/rh.64, AAV4-9/rh.54, AAV5, AAV52.1/hu.20, AAV52/hu.19, AAV5-22/rh.58, AAV5-3/rh.57, AAV54.1/hu.21, AAV54.2/hu.22, AAV54.4R/hu.27, AAV54.5/hu.23, AAV54.7/hu.24, AAV58.2/hu.25, AAV6, AAV6.1, AAV6.1.2, AAV6.2, AAV7, AAV7.2, AAV7.3/hu.7, AAV8, AAV-8b, AAV-8h, AAV9, AAV9.11, AAV9.13, AAV9.16, AAV9.24, AAV9.45, AAV9.47, AAV9.61, AAV9.68, AAV9.84, AAV9.9, AAVA3.3, AAVA3.4, AAVA3.5, AAVA3.7, AAV-b, AAVC1, AAVC2, AAVC5, AAVCh.5, AAVCh.5R1, AAVcy.2, AAVcy.3, AAVcy.4, AAVcy.5, AAVCy.5R1, AAVCy.5R2, AAVCy.5R3, AAVCy.5R4, AAVcy.6, AAV-DJ, AAV-DJ8, AAVF3, AAVF5, AAV-h, AAVH-1/hu.1, AAVH2, AAVH-5/hu.3, AAVH6, AAVhE1.1, AAVhER1.14, AAVhEr1.16, AAVhEr1.18, AAVhER1.23, AAVhEr1.35, AAVhEr1.36, AAVhEr1.5, AAVhEr1.7, AAVhEr1.8, AAVhEr2.16, AAVhEr2.29, AAVhEr2.30, AAVhEr2.31, AAVhEr2.36, AAVhEr2.4, AAVhEr3.1, AAVhu.1, AAVhu.10, AAVhu.11, AAVhu.11, AAVhu.12, AAVhu.13, AAVhu.14/9, AAVhu.15, AAVhu.16, AAVhu.17, AAVhu.18, AAVhu.19, AAVhu.2, AAVhu.20, AAVhu.21, AAVhu.22, AAVhu.23.2, AAVhu.24, AAVhu.25, AAVhu.27, AAVhu.28, AAVhu.29, AAVhu.29R, AAVhu.3, AAVhu.31, AAVhu.32, AAVhu.34, AAVhu.35, AAVhu.37, AAVhu.39, AAVhu.4, AAVhu.40, AAVhu.41, AAVhu.42, AAVhu.43, AAVhu.44, AAVhu.44R1, AAVhu.44R2, AAVhu.44R3, AAVhu.45, AAVhu.46, AAVhu.47, AAVhu.48, AAVhu.48R1, AAVhu.48R2, AAVhu.48R3, AAVhu.49, AAVhu.5, AAVhu.51, AAVhu.52, AAVhu.53, AAVhu.54, AAVhu.55, AAVhu.56, AAVhu.57, AAVhu.58, AAVhu.6, AAVhu.60, AAVhu.61, AAVhu.63, AAVhu.64, AAVhu.66, AAVhu.67, AAVhu.7, AAVhu.8, AAVhu.9, AAVhu.t 19, AAVLG-10/rh.40, AAVLG-4/rh.38, AAVLG-9/hu.39, AAVLG-9/hu.39, AAV-LK01, AAV-LK02, AAVLK03, AAV-LK03, AAV-LK04, AAV-LK05, AAV-LK06, AAV-LK07, AAV-LK08, AAV-LK09, AAV-LK10, AAV-LK11, AAV-LK12, AAV-LK13, AAV-LK14, AAV-LK15, AAV-LK17, AAV-LK18, AAV-LK19, AAVN721-8/rh.43, AAV-PAEC, AAV-PAEC11, AAV-PAEC12, AAV-PAEC2, AAV-PAEC4, AAV-PAEC6, AAV-PAEC7, AAV-PAEC8, AAVpi.1, AAVpi.2, AAVpi.3, AAVrh.10, AAVrh.12, AAVrh.13, AAVrh.13R, AAVrh.14, AAVrh.17, AAVrh.18, AAVrh.19, AAVrh.2, AAVrh.20, AAVrh.21, AAVrh.22, AAVrh.23, AAVrh.24, AAVrh.25, AAVrh.2R, AAVrh.31, AAVrh.32, AAVrh.33, AAVrh.34, AAVrh.35, AAVrh.36, AAVrh.37, AAVrh.37R2, AAVrh.38, AAVrh.39, AAVrh.40, AAVrh.43, AAVrh.44, AAVrh.45, AAVrh.46, AAVrh.47, AAVrh.48, AAVrh.48, AAVrh.48.1, AAVrh.48.1.2, AAVrh.48.2, AAVrh.49, AAVrh.50, AAVrh.51, AAVrh.52, AAVrh.53, AAVrh.54, AAVrh.55, AAVrh.56, AAVrh.57, AAVrh.58, AAVrh.59, AAVrh.60, AAVrh.61, AAVrh.62, AAVrh.64, AAVrh.64R1, AAVrh.64R2, AAVrh.65, AAVrh.67, AAVrh.68, AAVrh.69, AAVrh.70, AAVrh.72, AAVrh.73, AAVrh.74, AAVrh.8, AAVrh.8R, AAVrh8R, AAVrh8R A586R mutant, AAVrh8R R533A mutant, BAAV, BNP61 AAV, BNP62 AAV, BNP63 AAV, bovine AAV, caprine AAV, Japanese AAV 10, true type AAV (ttAAV), UPENN AAV 10, AAV-LK16, AAAV, AAV Shuffle 100-1, AAV Shuffle 100-2, AAV Shuffle 100-3, AAV Shuffle 100-7, AAV Shuffle 10-2, AAV Shuffle 10-6, AAV Shuffle 10-8, AAV SM 100-10, AAV SM 100-3, AAV SM 10-1, AAV SM 10-2, and/or AAV SM 10-8.

[0339] In some aspects, the AAV serotype may be, or have, a mutation in the AAV9 sequence as described by N Pulicherla et al. (Molecular Therapy 19(6):1070-1078 (2011)), such as but not limited to, AAV9.9, AAV9.11, AAV9.13, AAV9.16, AAV9.24, AAV9.45, AAV9.47, AAV9.61, AAV9.68, AAV9.84.

[0340] In some aspects, the AAV serotype may be, or have, a sequence as described in U.S. Pat. No. 6,156,303, such as, but not limited to, AAV3B (SEQ ID NO: 1 and 10 of U.S. Pat. No. 6,156,303), AAV6 (SEQ ID NO: 2, 7 and 11 of U.S. Pat. No. 6,156,303), AAV2 (SEQ ID NO: 3 and 8 of U.S. Pat. No. 6,156,303), AAV3A (SEQ ID NO: 4 and 9, of U.S. Pat. No. 6,156,303), or derivatives thereof.

[0341] In some aspects, the serotype may be AAVDJ or a variant thereof, such as AAVDJ8 (or AAV-DJ8), as described by Grimm et al. (Journal of Virology 82(12): 5887-5911 (2008)). The amino acid sequence of AAVDJ8 may comprise two or more mutations in order to remove the heparin binding domain (HBD). As a non-limiting example, the AAV-DJ sequence described as SEQ ID NO: 1 in U.S. Pat. No. 7,588,772, may comprise two mutations: (1) R587Q where arginine (R; Arg) at amino acid 587 is changed to glutamine (Q; Gln) and (2) R590T where arginine (R; Arg) at amino acid 590 is changed to threonine (T; Thr). As another non-limiting example, may comprise three mutations: (1) K406R where lysine (K; Lys) at amino acid 406 is changed to arginine (R; Arg), (2) R587Q where arginine (R; Arg) at amino acid 587 is changed to glutamine (Q; Gln) and (3) R590T where arginine (R; Arg) at amino acid 590 is changed to threonine (T; Thr).

[0342] In some aspects, the AAV serotype may be, or have, a sequence as described in International Publication No. WO2015121501, such as, but not limited to, true type AAV (ttAAV) (SEQ ID NO: 2 of WO2015121501), “UPenn AAV10” (SEQ ID NO: 8 of WO2015121501), “Japanese AAV10” (SEQ ID NO: 9 of WO2015121501), or variants thereof.

[0343] According to the present disclosure, AAV capsid serotype selection or use may be from a variety of species. In one example, the AAV may be an avian AAV (AAAV). The AAAV serotype may be, or have, a sequence as described in U.S. Pat. No. 9,238,800, such as, but not limited to, AAAV (SEQ ID NO: 1, 2, 4, 6, 8, 10, 12, and 14 of U.S. Pat. No. 9,238,800), or variants thereof.

[0344] In one example, the AAV may be a bovine AAV (BAAV). The BAAV serotype may be, or have, a sequence as described in U.S. Pat. No. 9,193,769, such as, but not limited to, BAAV (SEQ ID NO: 1 and 6 of U.S. Pat. No. 9,193,769), or variants thereof. The BAAV serotype may be or have a sequence as described in U.S. Pat. No. 7,427,396, such as, but not limited to, BAAV (SEQ ID NO: 5 and 6 of U.S. Pat. No. 7,427,396), or variants thereof.

[0345] In one example, the AAV may be a caprine AAV. The caprine AAV serotype may be, or have, a sequence as described in U.S. Pat. No. 7,427,396, such as, but not limited to, caprine AAV (SEQ ID NO: 3 of U.S. Pat. No. 7,427,396), or variants thereof.

[0346] In other examples, the AAV may be engineered as a hybrid AAV from two or more parental serotypes. In one example, the AAV may be AAV2G9 which comprises sequences from AAV2 and AAV9. The AAV2G9 AAV serotype may be, or have, a sequence as described in U.S. Patent Publication No. 20160017005.

[0347] In one example, the AAV may be a serotype generated by the AAV9 capsid library with mutations in amino acids 390-627 (VP1 numbering) as described by Pulicherla et al. (Molecular Therapy 19(6):1070-1078 (2011). The serotype and corresponding nucleotide and amino acid substitutions may be, but is not limited to, AAV9.1 (G1594C; D532H), AAV6.2 (T1418A and T1436X; V473D and I479K), AAV9.3 (T1238A; F413Y), AAV9.4 (T1250C and A1617T; F417S), AAV9.5 (A1235G, A1314T, A1642G, C1760T; Q412R, T548A, A587V), AAV9.6 (T1231A; F411I), AAV9.9 (G1203A, G1785T; W595C), AAV9.10 (A1500G, T1676C; M559T), AAV9.11 (A1425T, A1702C, A1769T; T568P, Q590L), AAV9.13 (A1369C, A1720T; N457H, T574S), AAV9.14 (T1340A, T1362C, T1560C, G1713A; L447H), AAV9.16 (A1775T; Q592L), AAV9.24 (T1507C, T1521G; W503R), AAV9.26 (A1337G, A1769C; Y446C, Q590P), AAV9.33 (A1667C; D556A), AAV9.34 (A1534G, C1794T; N512D), AAV9.35 (A1289T, T1450A, C1494T, A1515T, C1794A, G1816A; Q430L, Y484N, N98K, V6061), AAV9.40 (A1694T, E565V), AAV9.41 (A1348T, T1362C; T450S), AAV9.44 (A1684C, A1701T, A1737G; N562H, K567N), AAV9.45 (A1492T, C1804T; N498Y, L602F), AAV9.46 (G1441C, T1525C, T1549G; G481R, W509R, L517V), 9.47 (G1241A, G1358A, A1669G, C1745T; S414N, G453D, K557E, T582I), AAV9.48 (C1445T, A1736T; P482L, Q579L), AAV9.50 (A1638T, C1683T, T1805A; Q546H, L602H), AAV9.53 (G1301A, A1405C, C1664T, G1811T; R134Q, 5469R, A555V, G604V), AAV9.54 (C1531A, T1609A; L511I, L537M), AAV9.55 (T1605A; F535L), AAV9.58 (C1475T, C1579A; T492I, H527N), AAV.59 (T1336C; Y446H), AAV9.61 (A1493T; N498I), AAV9.64 (C1531A, A1617T; L511I), AAV9.65 (C1335T, T1530C, C1568A; A523D), AAV9.68 (C1510A; P504T), AAV9.80 (G1441A, G481R), AAV9.83 (C1402A, A1500T; P468T, E500D), AAV9.87 (T1464C, T1468C; S490P), AAV9.90 (A1196T; Y399F), AAV9.91 (T1316G, A1583T, C1782G, T1806C; L439R, K528I), AAV9.93 (A1273G, A1421G, A1638C, C1712T, G1732A, A1744T, A1832T; S425G, Q474R, Q546H, P571L, G578R, T582S, D611V), AAV9.94 (A1675T; M559L) and AAV9.95 (T1605A; F535L).

[0348] In one example, the AAV may be a serotype comprising at least one AAV capsid CD8+ T-cell epitope. As a non-limiting example, the serotype may be AAV1, AAV2 or AAV8.

[0349] In one example, the AAV may be a variant, such as PHP.A or PHP.B as described in Deverman. 2016. Nature Biotechnology. 34(2): 204-209.

[0350] In one example, the AAV may be a serotype selected from any of those found in SEQ ID NOs: 4734-5302 and Table 2.

[0351] In one example, the AAV may be encoded by a sequence, fragment or variant as disclosed in SEQ ID NOs: 4734-5302 and Table 2.

[0352] General principles of rAAV production are reviewed in, for example, Carter, 1992, Current Opinions in Biotechnology, 1533-539; and Muzyczka, 1992, Curr. Topics in Microbial. and Immunol., 158:97-129). Various approaches are described in Ratschin et al., Mol. Cell. Biol. 4:2072 (1984); Hermonat et al., Proc. Natl. Acad. Sci. USA, 81:6466 (1984); Tratschin et al., Mol. Cell. Biol. 5:3251 (1985); McLaughlin et al., J. Virol., 62:1963 (1988); and Lebkowski et al., 1988 Mol. Cell. Biol., 7:349 (1988). Samulski et al. (1989, J. Virol., 63:3822-3828); U.S. Pat. No. 5,173,414; WO 95/13365 and corresponding U.S. Pat. No. 5,658,776; WO 95/13392; WO 96/17947; PCT/US98/18600; WO 97/09441 (PCT/US96/14423); WO 97/08298 (PCT/US96/13872); WO 97/21825 (PCT/US96/20777); WO 97/06243 (PCT/FR96/01064); WO 99/11764; Perrin et al. (1995) Vaccine 13:1244-1250; Paul et al. (1993) Human Gene Therapy 4:609-615; Clark et al. (1996) Gene Therapy 3:1124-1132; U.S. Pat. Nos. 5,786,211; 5,871,982; and 6,258,595.

[0353] AAV vector serotypes can be matched to target cell types. For example, the following exemplary cell types can be transduced by the indicated AAV serotypes among others.

TABLE 2
Tissue/Cell Types and Serotypes

| Tissue/Cell Type | Serotype |
|---|---|
| Liver | AAV3, AAV5, AAV8, AAV9 |
| Skeletal muscle | AAV1, AAV7, AAV6, AAV8, AAV9 |
| Central nervous system | AAV1, AAV4, AAV5, AAV8, AAV9 |
| RPE | AAV5, AAV4, AAV2, AAV8, AAV9, |
| | AAVrh8R |
| Photoreceptor cells | AAV5, AAV8, AAV9, AAVrh8R |
| Lung | AAV9, AAV5 |
| Heart | AAV8 |
| Pancreas | AAV8 |
| Kidney | AAV2, AAV8 |
| Hematopoietic stem cells | AAV6 |

[0354] In addition to adeno-associated viral vectors, other viral vectors can be used. Such viral vectors include, but are not limited to, lentivirus, alphavirus, enterovirus, pestivirus, baculovirus, herpesvirus, Epstein Barr virus, papovavirus, poxvirus, vaccinia virus, and herpes simplex virus.

[0355] In some aspects, Cas9 mRNA, sgRNA targeting one or two sites in ATXN2 gene, and donor DNA can each be separately formulated into lipid nanoparticles, or are all co-formulated into one lipid nanoparticle.

[0356] In some aspects, Cas9 mRNA can be formulated in a lipid nanoparticle, while sgRNA and donor DNA can be delivered in an AAV vector.

[0357] Options are available to deliver the Cas9 nuclease as a DNA plasmid, as mRNA or as a protein. The guide RNA can be expressed from the same DNA, or can also be delivered as an RNA. The RNA can be chemically modified to alter or improve its half-life, or decrease the likelihood or degree of immune response. The endonuclease protein can be complexed with the gRNA prior to delivery. Viral vectors allow efficient delivery; split versions of Cas9 and smaller orthologs of Cas9 can be packaged in AAV, as can donors for HDR. A range of non-viral delivery methods also exist that can deliver each of these components, or non-viral and viral methods can be employed in tandem. For example, nano-particles can be used to deliver the protein and guide RNA, while AAV can be used to deliver a donor DNA.

### IV. Dosing and Administration

[0358] The terms “administering,” “introducing” and “transplanting” are used interchangeably in the context of the placement of cells, e.g., progenitor cells, into a subject, by a method or route that results in at least partial localization of the introduced cells at a desired site, such as a site of injury or repair, such that a desired effect(s) is produced. The cells e.g., progenitor cells, or their differentiated progeny can be administered by any appropriate route that results in delivery to a desired location in the subject where at least a portion of the implanted cells or components of the cells remain viable. The period of viability of the cells after administration to a subject can be as short as a few hours, e.g., twenty-four hours, to a few days, to as long as several years, or even the life time of the patient, i.e., long-term engraftment. For example, in some aspects described herein, an effective amount of neural progenitor cells is administered via a systemic route of administration, such as an intraperitoneal or intravenous route.

[0359] The terms “individual,” “subject,” “host” and “patient” are used interchangeably herein and refer to any subject for whom diagnosis, treatment or therapy is desired. In some aspects, the subject is a mammal. In some aspects, the subject is a human being.

[0360] When provided prophylactically, progenitor cells described herein can be administered to a subject in advance of any symptom of Spinocerebellar ataxia 2 (SCA2). Accordingly, the prophylactic administration of a progenitor cell population serves to prevent Spinocerebellar ataxia 2 (SCA2).

[0361] A progenitor cell population being administered according to the methods described herein can comprise allogeneic progenitor cells obtained from one or more donors. Such progenitors may be of any cellular or tissue origin, e.g., liver, muscle, cardiac, brain, etc. “Allogeneic” refers to a progenitor cell or biological samples comprising progenitor cells obtained from one or more different donors of the same species, where the genes at one or more loci are not identical. For example, a liver progenitor cell population being administered to a subject can be derived from one more unrelated donor subjects, or from one or more non-identical siblings. In some cases, syngeneic progenitor cell populations can be used, such as those obtained from genetically identical animals, or from identical twins. The progenitor cells can be autologous cells; that is, the progenitor cells are obtained or isolated from a subject and administered to the same subject, i.e., the donor and recipient are the same.

[0362] The term “effective amount” refers to the amount of a population of progenitor cells or their progeny needed to prevent or alleviate at least one or more signs or symptoms of Spinocerebellar ataxia 2 (SCA2), and relates to a sufficient amount of a composition to provide the desired effect, e.g., to treat a subject having Spinocerebellar ataxia 2 (SCA2). The term “therapeutically effective amount” therefore refers to an amount of progenitor cells or a composition comprising progenitor cells that is sufficient to promote a particular effect when administered to a typical subject, such as one who has or is at risk for Spinocerebellar ataxia 2 (SCA2). An effective amount would also include an amount sufficient to prevent or delay the development of a symptom of the disease, alter the course of a symptom of the disease (for example but not limited to, slow the progression of a symptom of the disease), or reverse a symptom of the disease. It is understood that for any given case, an appropriate “effective amount” can be determined by one of ordinary skill in the art using routine experimentation.

[0363] For use in the various aspects described herein, an effective amount of progenitor cells comprises at least 10² progenitor cells, at least 5×10² progenitor cells, at least 10³ progenitor cells, at least 5×10³ progenitor cells, at least 10⁴ progenitor cells, at least 5×10⁴ progenitor cells, at least 10⁵ progenitor cells, at least 2×10⁵ progenitor cells, at least 3×10⁵ progenitor cells, at least 4×10⁵ progenitor cells, at least 5×10⁵ progenitor cells, at least 6×10⁵ progenitor cells, at least 7×10⁵ progenitor cells, at least 8×10⁵ progenitor cells, at least 9×10⁵ progenitor cells, at least 1×10⁶ progenitor cells, at least 2×10⁶ progenitor cells, at least 3×10⁶ progenitor cells, at least 4×10⁶ progenitor cells, at least 5×10⁶ progenitor cells, at least 6×10⁶ progenitor cells, at least 7×10⁶ progenitor cells, at least 8×10⁶ progenitor cells, at least 9×10⁶ progenitor cells, or multiples thereof. The progenitor cells can be derived from one or more donors, or can be obtained from an autologous source. In some examples described herein, the progenitor cells can be expanded in culture prior to administration to a subject in need thereof.

[0364] In some aspects, reduction of the expanded trinucleotide repeats in the ATXN2 gene in cells of patients having Spinocerebellar ataxia 2 (SCA2) can be beneficial for ameliorating one or more symptoms of the disease, for increasing long-term survival, and/or for reducing side effects associated with other treatments. Upon administration of such cells to human patients, the presence of progenitors that have wild-type or similar levels of the trinucleotide repeat in the ATXN2 gene is beneficial. In some cases, effective treatment of a subject gives rise to at least about 3%, 5% or 7% transcripts having wild-type or similar levels of trinucleotide repeat relative to total ATXN2 transcripts in the treated subject. In some examples, transcripts having wild-type or similar levels of trinucleotide repeat will be at least about 10% of total ATXN2 transcripts. In some examples, transcripts having wild-type or similar levels of trinucleotide repeat will be at least about 20% to 30% of total ATXN2 transcripts. Similarly, the introduction of even relatively limited subpopulations of cells having wild-type levels of trinucleotide repeat in the ATXN2 gene can be beneficial in various patients because in some situations normalized cells will have a selective advantage relative to diseased cells. However, even modest levels of progenitors with wild-type or similar levels of trinucleotide repeat in the ATXN2 gene can be beneficial for ameliorating one or more aspects of Spinocerebellar ataxia 2 (SCA2) in patients. In some examples, about 10%, about 20%, about 30%, about 40%, about 50%, about 60%, about 70%, about 80%, about 90% or more of the neural progenitors in patients to whom such cells are administered have wild-type or similar levels of trinucleotide repeat in the ATXN2 gene.

[0365] “Administered” refers to the delivery of a progenitor cell composition into a subject by a method or route that results in at least partial localization of the cell composition at a desired site. A cell composition can be administered by any appropriate route that results in effective treatment in the subject, i.e. administration results in delivery to a desired location in the subject where at least a portion of the composition delivered, i.e. at least 1×10⁴ cells are delivered to the desired site for a period of time.

[0366] In one aspect of the method, the pharmaceutical composition may be administered via a route such as, but not limited to, enteral (into the intestine), gastroenteral, epidural (into the dura matter), oral (by way of the mouth), transdermal, peridural, intracerebral (into the cerebrum), intracerebroventricular (into the cerebral ventricles), epicutaneous (application onto the skin), intradermal, (into the skin itself), subcutaneous (under the skin), nasal administration (through the nose), intravenous (into a vein), intravenous bolus, intravenous drip, intraarterial (into an artery), intramuscular (into a muscle), intracardiac (into the heart), intraosseous infusion (into the bone marrow), intrathecal (into the spinal canal), intraperitoneal, (infusion or injection into the peritoneum), intravesical infusion, intravitreal, (through the eye), intracavernous injection (into a pathologic cavity) intracavitary (into the base of the penis), intravaginal administration, intrauterine, extra-amniotic administration, transdermal (diffusion through the intact skin for systemic distribution), transmucosal (diffusion through a mucous membrane), transvaginal, insufflation (snorting), sublingual, sublabial, enema, eye drops (onto the conjunctiva), in ear drops, auricular (in or by way of the ear), buccal (directed toward the cheek), conjunctival, cutaneous, dental (to a tooth or teeth), electro-osmosis, endocervical, endosinusial, endotracheal, extracorporeal, hemodialysis, infiltration, interstitial, intra-abdominal, intra-amniotic, intra-articular, intrabiliary, intrabronchial, intrabursal, intracartilaginous (within a cartilage), intracaudal (within the cauda equine), intracisternal (within the cisterna magna cerebellomedularis), intracorneal (within the cornea), dental intracornal, intracoronary (within the coronary arteries), intracorporus cavernosum (within the dilatable spaces of the corporus cavernosa of the penis), intradiscal (within a disc), intraductal (within a duct of a gland), intraduodenal (within the duodenum), intradural (within or beneath the dura), intraepidermal (to the epidermis), intraesophageal (to the esophagus), intragastric (within the stomach), intragingival (within the gingivae), intraileal (within the distal portion of the small intestine), intralesional (within or introduced directly to a localized lesion), intraluminal (within a lumen of a tube), intralymphatic (within the lymph), intramedullary (within the marrow cavity of a bone), intrameningeal (within the meninges), intramyocardial (within the myocardium), intraocular (within the eye), intraovarian (within the ovary), intrapericardial (within the pericardium), intrapleural (within the pleura), intraprostatic (within the prostate gland), intrapulmonary (within the lungs or its bronchi), intrasinal (within the nasal or periorbital sinuses), intraspinal (within the vertebral column), intrasynovial (within the synovial cavity of a joint), intratendinous (within a tendon), intratesticular (within the testicle), intrathecal (within the cerebrospinal fluid at any level of the cerebrospinal axis), intrathoracic (within the thorax), intratubular (within the tubules of an organ), intratumor (within a tumor), intratympanic (within the aurus media), intravascular (within a vessel or vessels), intraventricular (within a ventricle), iontophoresis (by means of electric current where ions of soluble salts migrate into the tissues of the body), irrigation (to bathe or flush open wounds or body cavities), laryngeal (directly upon the larynx), nasogastric (through the nose and into the stomach), occlusive dressing technique (topical route administration, which is then covered by a dressing that occludes the area), ophthalmic (to the external eye), oropharyngeal (directly to the mouth and pharynx), parenteral, percutaneous, periarticular, peridural, perineural, periodontal, rectal, respiratory (within the respiratory tract by inhaling orally or nasally for local or systemic effect), retrobulbar (behind the pons or behind the eyeball), intramyocardial (entering the myocardium), soft tissue, subarachnoid, subconjunctival, submucosal, topical, transplacental (through or across the placenta), transtracheal (through the wall of the trachea), transtympanic (across or through the tympanic cavity), ureteral (to the ureter), urethral (to the urethra), vaginal, caudal block, diagnostic, nerve block, biliary perfusion, cardiac perfusion, photopheresis and spinal.

[0367] Modes of administration include injection, infusion, instillation, and/or ingestion. “Injection” includes, without limitation, intravenous, intramuscular, intra-arterial, intrathecal, intraventricular, intracapsular, intraorbital, intracardiac, intradermal, intraperitoneal, transtracheal, subcutaneous, subcuticular, intraarticular, sub capsular, subarachnoid, intraspinal, intracerebro spinal, and intrasternal injection and infusion. In some examples, the route is intravenous. For the delivery of cells, administration by injection or infusion can be made.

[0368] The cells can be administered systemically. The phrases “systemic administration,” “administered systemically”, “peripheral administration” and “administered peripherally” refer to the administration of a population of progenitor cells other than directly into a target site, tissue, or organ, such that it enters, instead, the subject's circulatory system and, thus, is subject to metabolism and other like processes.

[0369] The efficacy of a treatment comprising a composition for the treatment of Spinocerebellar ataxia 2 (SCA2) can be determined by the skilled clinician. However, a treatment is considered “effective treatment,” if any one or all of the signs or symptoms of, as but one example, levels of trinucleotide repeat in the ATXN2 gene are altered in a beneficial manner (e.g., decreased by at least 10%), or other clinically accepted symptoms or markers of disease are improved or ameliorated. Efficacy can also be measured by failure of an individual to worsen as assessed by hospitalization or need for medical interventions (e.g., progression of the disease is halted or at least slowed). Methods of measuring these indicators are known to those of skill in the art and/or described herein. Treatment includes any treatment of a disease in an individual or an animal (some non-limiting examples include a human, or a mammal) and includes: (1) inhibiting the disease, e.g., arresting, or slowing the progression of symptoms; or (2) relieving the disease, e.g., causing regression of symptoms; and (3) preventing or reducing the likelihood of the development of symptoms.

[0370] The treatment according to the present disclosure can ameliorate one or more symptoms associated with Spinocerebellar ataxia 2 (SCA2) by reducing the number of trinucleotide repeat in the ATXN2 gene in the individual.

### V. Features and Properties of the Spinocerebellar Ataxia Type 2 Protein (ATXN2) Gene

[0371] ATXN2 has been associated with diseases and disorders such as, but not limited to, Alzheimer's Disease, Amyotrophic Lateral Sclerosis, Ataxia, Hereditary Ataxias, Autoimmune Diseases, Cardiovascular Diseases, Celiac Disease, Cerebellar Ataxia, Cerebellar Diseases, Chorea, Colonic Neoplasms, Deglutition Disorders, Presenile dementia, Insulin-Dependent Diabetes Mellitus, Dyskinetic syndrome, Dystonia, Cardiac Arrest, Hyperphagia, Hypertensive disease, Chronic Kidney Failure, Systemic Lupus Erythematosus, Machado-Joseph Disease, Multiple Sclerosis, Spinal Muscular Atrophy, Myoclonus, Neuroblastoma, Nystagmus, Obesity, Olivopontocerebellar Atrophies, Ovarian Carcinoma, Parkinson Disease, Peripheral Neuropathy, Restless Legs Syndrome, Retinal Degeneration, Retinitis Pigmentosa, Seizures, Shy-Drager Syndrome, Sleep disturbances, West Syndrome, Hereditary Spastic Paraplegia, Progressive supranuclear palsy, Vitiligo, Motor Neuron Disease, Antiphospholipid Syndrome, Spinocerebellar Ataxia, Extrapyramidal sign, Ataxic, Action Tremor, Peripheral motor neuropathy, Pick Disease of the Brain, Parkinsonian Disorders, Cerebellar degeneration, Calcaneal apophysitis, Autosomal dominant hereditary disorder, Essential Tremor, End-Position Nystagmus, Abdominal Obesity, Frontotemporal dementia, Ventricular tachycardia polymorphic, Multiple System Atrophy, Pallidoluysian degeneration, Dystonia Disorders, Dementia, Hematocrit level, Neurodegenerative Disorders, Equilibration disorder, Central neuroblastoma, Cerebellar atrophy, Frontotemporal Lobar Degeneration, Ophthalmoparesis, Dentatorubral-Pallidoluysian Atrophy, Autosomal Dominant Parkinsonism, Spinocerebellar Ataxia Type 1, Spinocerebellar Ataxia Type 2, Spinocerebellar Ataxia Type 6 (disorder), Spinocerebellar Ataxia Type 7, Muscular Spinobulbar Atrophy, Sleep Disorders, Genomic Instability, Malignant neoplasm of ovary, Sarcoma, Blood pressure finding, Systemic arterial pressure, Nervous system—Degeneration, Chronic Kidney Diseases, Peripheral Arterial Diseases, X-Linked Bulbo-Spinal Atrophy, Coronary Artery Disease, Spinocerebellar Ataxia 10, TDP-43 Proteinopathies, Late-Onset Parkinson Disease, Juvenile arthritis, Juvenile rheumatoid arthritis, and GRN-related frontotemporal dementia. Editing the ATXN2 gene using any of the methods described herein may be used to treat, prevent and/or mitigate the symptoms of the diseases and disorders described herein.

[0372] The activity of ATXN2 is largely confined to the central nervous system and ATXN2 is associated with Spinocerebellar ataxia 2 (SCA2) (also known as Amyotrophic lateral sclerosis type 13). Spinocerebellar ataxia 2 (SCA2) is caused by expansion of a trinucleotide CAG repeat in the ATXN2 gene. This CAG repeat region is located in exon 1 of the ATXN2 gene and encodes a polyglutamine tract. Normally, the CAG trinucleotide is repeated 22 to 23 times, but it can be repeated up to 31 times without causing any symptoms. The pathogenic ATXN2 allele usually contains 32 or more CAG repeats. Individuals with intermediate numbers of the CAG repeat (about 27-33) are at increased risk for developing amyotrophic lateral sclerosis. The number of repeats in the gene correlates with the age of onset and severity of the disease. It is currently unclear how the abnormal CAG expansion affects the function of the ATXN2 protein.

[0373] Spinocerebellar ataxia 2 (SCA2) is an inherited (autosomal dominant), neurodegenerative disorder that affects upper motor neurons in the brain and lower motor neurons in the brain stem and spinal cord, eventually resulting in fatal paralysis. Spinocerebellar ataxia 2 (SCA2) affects between 1-9 in 100,000 people worldwide and is most commonly present in the third or fourth decade. Spinocerebellar ataxia 2 (SCA2) is most prevalent in the population of Cuba. Common symptoms of Spinocerebellar ataxia 2 (SCA2) include progressive incoordination of gait and often poor coordination of hands, speech and eye movements, due to cerebellum degeneration with variable involvement of the brainstem and spinal cord. Current treatments of Spinocerebellar ataxia 2 (SCA2) include physical therapy and exercise regimes to delay deterioration.

[0374] It has also been demonstrated that ATXN2 alleles containing intermediate repeat expansion (˜29-33 CAG repeats) significantly increase the risk of developing ALS (Sproviero et al., Neurobiology of Aging. 51: 178.e1 (2017)). Recently it has been demonstrated that reduction of Atxn2 in a TDP43 mouse model of ALS reduces aggregation of TDP43 protein (a hallmark of ALS) and also substantially extends lifespan in this model (Becker et al., Nature. 544:367 (2017)). The gRNAs that target the ATXN2 gene or near its regulatory regions can be used to reduce the levels of ATXN2. The gRNAs can be used to eliminate or modify the expanded repeats in the ATXN2 gene in patients with ALS, potentially leading to therapeutic benefits.

[0375] In one example, the target tissue for the compositions and methods described herein is central nervous system tissue.

[0376] In one example, the gene is Spinocerebellar Ataxia Type 2 Protein (ATXN2) which may also be referred to as Ataxin 2, Trinucleotide Repeat-Containing Gene 13 Protein, Spinocerebellar Ataxia Type 2 Protein, TNRC13, SCA2, ATX2, Spinocerebellar Ataxia 2 (Olivopontocerebellar Ataxia 2, Autosomal Dominant, Ataxin 2), Trinucleotide Repeat Containing, and ASL13. ATXN2 has a cytogenetic location of 12q24.12 and the genomic coordinate are on Chromosome 12 on the forward strand at position 111,452,214-111,599,676. The nucleotide sequence of ATXN2 is shown as SEQ ID NO: 5303. BRAP is the gene upstream of ATXN2 on the reverse strand and FAM109A is the gene downstream of ATXN2 on the reverse strand. RP11-686G8.1 and RP11-686G8.2 are the genes located on the forward strand opposite of ATXN2. U7, AC137055.1, and AC002395.1 are completely contained within ATXN2 on the same strain. ATXN2 has a NCBI gene ID of 6311, Uniprot ID of Q99700 and Ensembl Gene ID of ENSG00000204842. ATXN2 has 7303 SNPs, 95 introns and 93 exons. The exon identifier from Ensembl and the start/stop sites of the introns and exons are shown in Table 3.

TABLE 3
Exons and Introns for ATXN2

| Exon No. | Exon ID | Start/Stop | Intron No. | Intron based on Exon ID | Start/Stop |
|---|---|---|---|---|---|
| EX1 | ENSE00001898806 | 111,599,676-111,598,784 | INT1 | Intron ENSE00001898806- | 111,598,783-111,555,920 |
| | | | | ENSE00003667178 | |
| EX2 | ENSE00003667178 | 111,555,919-111,555,883 | INT2 | Intron ENSE00003667178- | 111,555,882-111,554,218 |
| | | | | ENSE00003506188 | |
| EX3 | ENSE00003506188 | 111,554,217-111,554,158 | INT3 | Intron ENSE00003506188- | 111,554,157-111,552,978 |
| | | | | ENSE00003465995 | |
| EX4 | ENSE00003465995 | 111,552,977-111,552,906 | INT4 | Intron ENSE00003465995- | 111,552,905-111,552,431 |
| | | | | ENSE00003572230 | |
| EX5 | ENSE00003572230 | 111,552,430-111,552,280 | INT5 | Intron ENSE00003572230- | 111,552,279-111,525,317 |
| | | | | ENSE00003686278 | |
| EX6 | ENSE00003686278 | 111,525,316-111,525,192 | INT6 | Intron ENSE00003686278- | 111,525,191-111,520,974 |
| | | | | ENSE00003641899 | |
| EX7 | ENSE00003641899 | 111,520,973-111,520,882 | INT7 | Intron ENSE00003641899- | 111,520,881-111,520,077 |
| | | | | ENSE00003471940 | |
| EX8 | ENSE00003471940 | 111,520,076-111,519,879 | INT8 | Intron ENSE00003471940- | 111,519,878-111,518,428 |
| | | | | ENSE00003565905 | |
| EX9 | ENSE00003565905 | 111,518,427-111,518,249 | INT9 | Intron ENSE00003565905- | 111,518,248-111,516,364 |
| | | | | ENSE00003523834 | |
| EX10 | ENSE00003523834 | 111,516,363-111,516,154 | INT10 | Intron ENSE00003523834- | 111,516,153-111,513,540 |
| | | | | ENSE00002387366 | |
| EX11 | ENSE00002387366 | 111,513,539-111,513,357 | INT11 | Intron ENSE00002387366- | 111,513,356-111,510,583 |
| | | | | ENSE00002401831 | |
| EX12 | ENSE00002401831 | 111,510,582-111,510,385 | INT12 | Intron ENSE00002401831- | 111,510,384-111,509,999 |
| | | | | ENSE00003467778 | |
| EX13 | ENSE00003467778 | 111,509,998-111,509,891 | INT13 | Intron ENSE00003467778- | 111,509,890-111,509,620 |
| | | | | ENSE00003635668 | |
| EX14 | ENSE00003635668 | 111,509,619-111,509,549 | INT14 | Intron ENSE00003635668- | 111,509,548-111,488,781 |
| | | | | ENSE00002380895 | |
| EX15 | ENSE00002380895 | 111,488,780-111,488,476 | INT15 | Intron ENSE00002380895- | 111,488,475-111,486,825 |
| | | | | ENSE00003594823 | |
| EX16 | ENSE00003594823 | 111,486,824-111,486,761 | INT16 | Intron ENSE00003594823- | 111,486,760-111,485,866 |
| | | | | ENSE00003623717 | |
| EX17 | ENSE00003623717 | 111,485,865-111,485,713 | INT17 | Intron ENSE00003623717- | 111,485,712-111,485,332 |
| | | | | ENSE00003645814 | |
| EX18 | ENSE00003645814 | 111,485,331-111,485,271 | INT18 | Intron ENSE00003645814- | 111,485,270-111,470,743 |
| | | | | ENSE00003551992 | |
| EX19 | ENSE00003551992 | 111,470,742-111,470,558 | INT19 | Intron ENSE00003551992- | 111,470,557-111,470,241 |
| | | | | ENSE00003627297 | |
| EX20 | ENSE00003627297 | 111,470,240-111,470,108 | INT20 | Intron ENSE00003627297- | 111,470,107-111,464,716 |
| | | | | ENSE00003609750 | |
| EX21 | ENSE00003609750 | 111,464,715-111,464,662 | INT21 | Intron ENSE00003609750- | 111,464,661-111,457,360 |
| | | | | ENSE00003541896 | |
| EX22 | ENSE00003552925 | 111,452,840-111,452,214 | INT22 | Intron ENSE00003493266- | 111,453,676-111,452,841 |
| | | | | ENSE00003552925 | |
| EX23 | ENSE00002203873 | 111,452,840-111,452,268 | INT23 | Intron ENSE00003493266- | 111,453,676-111,452,841 |
| | | | | ENSE00002203873 | |
| EX24 | ENSE00003739678 | 111,599,676-111,598,784 | INT24 | Intron ENSE00003739678- | 111,598,783-111,555,920 |
| | | | | ENSE00003465270 | |
| EX25 | ENSE00003465270 | 111,555,919-111,555,883 | INT25 | Intron ENSE00003465270- | 111,555,882-111,554,218 |
| | | | | ENSE00003526579 | |
| EX26 | ENSE00003526579 | 111,554,217-111,554,158 | INT26 | Intron ENSE00003526579- | 111,554,157-111,552,431 |
| | | | | ENSE00003572230 | |
| EX27 | ENSE00003541896 | 111,457,359-111,457,214 | INT27 | Intron ENSE00003627297- | 111,470,107-111,457,360 |
| | | | | ENSE00003541896 | |
| EX28 | ENSE00003526504 | 111,456,256-111,456,029 | INT28 | Intron ENSE00003541896- | 111,457,213-111,456,257 |
| | | | | ENSE00003526504 | |
| EX29 | ENSE00003493266 | 111,453,845-111,453,677 | INT29 | Intron ENSE00003526504- | 111,456,028-111,453,846 |
| | | | | ENSE00003493266 | |
| EX30 | ENSE00003719058 | 111,452,840-111,452,215 | INT30 | Intron ENSE00003493266- | 111,453,676-111,452,841 |
| | | | | ENSE00003719058 | |
| EX31 | ENSE00001917895 | 111,598,822-111,598,784 | INT31 | Intron ENSE00001917895- | 111,598,783-111,555,920 |
| | | | | ENSE00003465270 | |
| EX32 | ENSE00002228421 | 111,599,673-111,599,575 | INT32 | Intron ENSE00003526579- | 111,554,157-111,552,978 |
| | | | | ENSE00003465995 | |
| EX33 | ENSE00002335360 | 111,455,119-111,455,045 | INT33 | Intron ENSE00002228421- | 111,599,574-111,555,920 |
| | | | | ENSE00003465270 | |
| EX34 | ENSE00002261721 | 111,452,840-111,452,754 | INT34 | Intron ENSE00003526504- | 111,456,028-111,455,120 |
| | | | | ENSE00002335360 | |
| EX35 | ENSE00002387237 | 111,456,256-111,453,486 | INT35 | Intron ENSE00002335360- | 111,455,044-111,453,846 |
| | | | | ENSE00003493266 | |
| EX36 | ENSE00001685898 | 111,488,612-111,488,476 | INT36 | Intron ENSE00003493266- | 111,453,676-111,452,841 |
| | | | | ENSE00002261721 | |
| EX37 | ENSE00003642411 | 111,485,331-111,485,265 | INT37 | Intron ENSE00002228421- | 111,599,574-111,554,218 |
| | | | | ENSE00003526579 | |
| EX38 | ENSE00001939621 | 111,516,339-111,516,154 | INT38 | Intron ENSE00003541896- | 111,457,213-111,456,257 |
| | | | | ENSE00002387237 | |
| EX39 | ENSE00003748566 | 111,486,824-111,486,791 | INT39 | Intron ENSE00001685898- | 111,488,475-111,486,825 |
| | | | | ENSE00003594823 | |
| EX40 | ENSE00002389548 | 111,520,945-111,520,882 | INT40 | Intron ENSE00003623717- | 111,485,712-111,485,332 |
| | | | | ENSE00003642411 | |
| EX41 | ENSE00002372394 | 111,509,998-111,509,919 | INT41 | Intron ENSE00003642411- | 111,485,264-111,470,743 |
| | | | | ENSE00003551992 | |
| EX42 | ENSE00001840067 | 111,456,112-111,456,029 | INT42 | Intron ENSE00001939621- | 111,516,153-111,513,540 |
| | | | | ENSE00002387366 | |
| EX43 | ENSE00001929663 | 111,453,845-111,453,320 | INT43 | Intron ENSE00002387366- | 111,513,356-111,509,999 |
| | | | | ENSE00003467778 | |
| EX44 | ENSE00002325861 | 111,597,807-111,597,749 | INT44 | Intron ENSE00002380895- | 111,488,475-111,486,825 |
| | | | | ENSE00003748566 | |
| EX45 | ENSE00002405811 | 111,520,076-111,520,020 | INT45 | Intron ENSE00002389548- | 111,520,881-111,520,077 |
| | | | | ENSE00003471940 | |
| EX46 | ENSE00001841789 | 111,599,276-111,598,784 | INT46 | Intron ENSE00003565905- | 111,518,248-111,513,540 |
| | | | | ENSE00002387366 | |
| EX47 | ENSE00003537463 | 111,470,742-111,470,558 | INT47 | Intron ENSE00002387366- | 111,513,356-111,509,999 |
| | | | | ENSE00002372394 | |
| EX48 | ENSE00003636862 | 111,470,240-111,470,108 | INT48 | Intron ENSE00001840067- | 111,456,028-111,453,846 |
| | | | | ENSE00001929663 | |
| EX49 | ENSE00003647194 | 111,464,715-111,464,662 | INT49 | Intron ENSE00002325861- | 111,597,748-111,552,978 |
| | | | | ENSE00003465995 | |
| EX50 | ENSE00003684141 | 111,457,359-111,457,214 | INT50 | Intron ENSE00003641899- | 111,520,881-111,520,077 |
| | | | | ENSE00002405811 | |
| EX51 | ENSE00003610592 | 111,456,256-111,456,029 | INT51 | Intron ENSE00001841789- | 111,598,783-111,555,920 |
| | | | | ENSE00003667178 | |
| EX52 | ENSE00003549354 | 111,453,845-111,453,677 | INT52 | Intron ENSE00003623717- | 111,485,712-111,470,743 |
| | | | | ENSE00003537463 | |
| EX53 | ENSE00001719184 | 111,452,840-111,452,296 | INT53 | Intron ENSE00003537463- | 111,470,557-111,470,241 |
| | | | | ENSE00003636862 | |
| EX54 | ENSE00002378682 | 111,482,831-111,482,787 | INT54 | Intron ENSE00003636862- | 111,470,107-111,464,716 |
| | | | | ENSE00003647194 | |
| EX55 | ENSE00003584981 | 111,470,742-111,470,558 | INT55 | Intron ENSE00003647194- | 111,464,661-111,457,360 |
| | | | | ENSE00003684141 | |
| EX56 | ENSE00002326705 | 111,599,062-111,598,784 | INT56 | Intron ENSE00003684141- | 111,457,213-111,456,257 |
| | | | | ENSE00003610592 | |
| EX57 | ENSE00002379866 | 111,520,076-111,520,005 | INT57 | Intron ENSE00003610592- | 111,456,028-111,453,846 |
| | | | | ENSE00003549354 | |
| EX58 | ENSE00001814984 | 111,519,967-111,519,832 | INT58 | Intron ENSE00003549354- | 111,453,676-111,452,841 |
| | | | | ENSE00001719184 | |
| EX59 | ENSE00001908173 | 111,513,539-111,513,474 | INT59 | Intron ENSE00003645814- | 111,485,270-111,482,832 |
| | | | | ENSE00002378682 | |
| EX60 | ENSE00002031228 | 111,470,841-111,470,558 | INT60 | Intron ENSE00002378682- | 111,482,786-111,470,743 |
| | | | | ENSE00003584981 | |
| EX61 | ENSE00001934991 | 111,456,256-111,452,451 | INT61 | Intron ENSE00003584981- | 111,470,557-111,470,241 |
| | | | | ENSE00003636862 | |
| EX62 | ENSE00001512629 | 111,598,566-111,597,916 | INT62 | Intron ENSE00002326705- | 111,598,783-111,525,317 |
| | | | | ENSE00003651233 | |
| EX63 | ENSE00003673839 | 111,552,977-111,552,906 | INT63 | Intron ENSE00001814984- | 111,519,831-111,518,428 |
| | | | | ENSE00003611619 | |
| EX64 | ENSE00003647280 | 111,552,430-111,552,280 | INT64 | Intron ENSE00002031228- | 111,470,557-111,470,241 |
| | | | | ENSE00003636862 | |
| EX65 | ENSE00003651233 | 111,525,316-111,525,192 | INT65 | Intron ENSE00003636862- | 111,470,107-111,457,360 |
| | | | | ENSE00003684141 | |
| EX66 | ENSE00003626049 | 111,520,973-111,520,882 | INT66 | Intron ENSE00001512629- | 111,597,915-111,555,920 |
| | | | | ENSE00003465270 | |
| EX67 | ENSE00003465069 | 111,520,076-111,519,879 | INT67 | Intron ENSE00003465270- | 111,555,882-111,554,218 |
| | | | | ENSE00003517430 | |
| EX68 | ENSE00003611619 | 111,518,427-111,518,249 | INT68 | Intron ENSE00003517430- | 111,554,157-111,552,978 |
| | | | | ENSE00003673839 | |
| EX69 | ENSE00003675633 | 111,516,363-111,516,154 | INT69 | Intron ENSE00003673839- | 111,552,905-111,552,431 |
| | | | | ENSE00003647280 | |
| EX70 | ENSE00001512628 | 111,513,539-111,512,473 | INT70 | Intron ENSE00003647280- | 111,552,279-111,525,317 |
| | | | | ENSE00003651233 | |
| EX71 | ENSE00002373896 | 111,512,107-111,510,385 | INT71 | Intron ENSE00003651233- | 111,525,191-111,520,974 |
| | | | | ENSE00003626049 | |
| EX72 | ENSE00002380039 | 111,488,780-111,488,585 | INT72 | Intron ENSE00003626049- | 111,520,881-111,520,077 |
| | | | | ENSE00003465069 | |
| EX73 | ENSE00002336975 | 111,471,945-111,470,558 | INT73 | Intron ENSE00003465069- | 111,519,878-111,518,428 |
| | | | | ENSE00003611619 | |
| EX74 | ENSE00002344687 | 111,456,256-111,456,221 | INT74 | Intron ENSE00003611619- | 111,518,248-111,516,364 |
| | | | | ENSE00003675633 | |
| EX75 | ENSE00002388118 | 111,458,401-111,457,214 | INT75 | Intron ENSE00003675633- | 111,516,153-111,513,540 |
| | | | | ENSE00001512628 | |
| EX76 | ENSE00002351313 | 111,456,256-111,456,189 | INT76 | Intron ENSE00002336975- | 111,470,557-111,470,241 |
| | | | | ENSE00003636862 | |
| EX77 | ENSE00001849069 | 111,552,734-111,552,280 | INT77 | Intron ENSE00003684141- | 111,457,213-111,456,257 |
| | | | | ENSE00002344687 | |
| EX78 | ENSE00001907909 | 111,520,076-111,519,913 | INT78 | Intron ENSE00002388118- | 111,457,213-111,456,257 |
| | | | | ENSE00002351313 | |
| EX79 | ENSE00001865163 | 111,485,850-111,485,713 | INT79 | Intron ENSE00001849069- | 111,552,279-111,525,317 |
| | | | | ENSE00003651233 | |
| EX80 | ENSE00003523595 | 111,485,331-111,485,265 | INT80 | Intron ENSE00003626049- | 111,520,881-111,520,077 |
| | | | | ENSE00001907909 | |
| EX81 | ENSE00001909969 | 111,470,240-111,469,818 | INT81 | IntronENSE00001865163- | 111,485,712-111,485,332 |
| | | | | ENSE00003523595 | |
| EX82 | ENSE00001809344 | 111,454,059-111,453,677 | INT82 | Intron ENSE00003523595- | 111,485,264-111,470,743 |
| | | | | ENSE00003584981 | |
| EX83 | ENSE00001895908 | 111,452,840-111,452,431 | INT83 | Intron ENSE00003584981- | 111,470,557-111,470,241 |
| | | | | ENSE00001909969 | |
| EX84 | ENSE00002404634 | 111,457,439-111,457,214 | INT84 | Intron ENSE00001809344- | 111,453,676-111,452,841 |
| | | | | ENSE00001895908 | |
| EX85 | ENSE00002413086 | 111,456,256-111,455,915 | INT85 | Intron ENSE00002404634- | 111,457,213-111,456,257 |
| | | | | ENSE00002413086 | |
| EX86 | ENSE00002350689 | 111,486,814-111,486,761 | INT86 | Intron ENSE00002350689- | 111,486,760-111,485,866 |
| | | | | ENSE00003523112 | |
| EX87 | ENSE00003523112 | 111,485,865-111,485,713 | INT87 | Intron ENSE00003523112- | 111,485,712-111,485,332 |
| | | | | ENSE00002412483 | |
| EX88 | ENSE00002412483 | 111,485,331-111,485,109 | INT88 | Intron ENSE00003526504- | 111,456,028-111,452,841 |
| | | | | ENSE00003602264 | |
| EX89 | ENSE00003517430 | 111,554,217-111,554,158 | INT89 | Intron ENSE00003684141- | 111,457,213-111,456,257 |
| | | | | ENSE00001934991 | |
| EX90 | ENSE00003602264 | 111,452,840-111,452,214 | INT90 | Intron ENSE00003611619- | 111,518,248-111,513,540 |
| | | | | ENSE00001908173 | |
| EX91 | ENSE00003684350 | 111,509,998-111,509,891 | INT91 | Intron ENSE00003626049- | 111,520,881-111,520,077 |
| | | | | ENSE00002379866 | |
| EX92 | ENSE00003572669 | 111,509,619-111,509,549 | INT92 | Intron ENSE00002373896- | 111,510,384-111,509,999 |
| | | | | ENSE00003684350 | |
| EX93 | ENSE00003703385 | 111,599,350-111,598,784 | INT93 | Intron ENSE00003684350- | 111,509,890-111,509,620 |
| | | | | ENSE00003572669 | |
| | | | INT94 | Intron ENSE00003572669- | 111,509,548-111,488,781 |
| | | | | ENSE00002380039 | |
| | | | INT95 | Intron ENSE00003703385- | 111,598,783-111,555,920 |
| | | | | ENSE00003667178 | |

[0377] Table 4 provides information on all of the transcripts for the ATXN2 gene based on the Ensembl database. Provided in Table 4 are the transcript ID from Ensembl and corresponding NCBI RefSeq ID for the transcript, the translation ID from Ensembl and the corresponding NCBI RefSeq ID for the protein, the biotype of the transcript sequence as classified by Ensembl and the exons and introns in the transcript based on the information in Table 3.

TABLE 4
Transcript Information for ATXN2

| | Transcript | | Protein | | | |
|---|---|---|---|---|---|---|
| | NCBI | | NCBI | Sequence | Exon ID from | Intron ID from |
| Transcript ID | RefSeq ID | Translation ID | RefSeq ID | Biotype | Table 3 | Table 3 |
| ENST00000377617.7 | NM_002973 | ENSP00000366843 | NP_002964 | Protein | EX1, EX2, EX3, | INT1, INT2, INT3, |
| | | | | coding | EX4, EX5, EX6, | INT4, INT5, INT6, |
| | | | | | EX7, EX8, EX9, | INT7, INT8, INT9, |
| | | | | | EX10, EX11, | INT10, INT11, |
| | | | | | EX12, EX13, | INT12, INT13, |
| | | | | | EX14, EX15, | INT14, INT15, |
| | | | | | EX16, EX17, | INT16, INT17, |
| | | | | | EX18, EX19, | INT18, INT19, |
| | | | | | EX20, EX21, | INT20, INT21, |
| | | | | | EX22, EX27, | INT22, INT28, |
| | | | | | EX28, EX29 | INT29 |
| ENST00000389153.8 | — | ENSP00000373805 | — | Protein | EX4, EX5, EX6, | INT4, INT5, INT6, |
| | | | | coding | EX7, EX8, EX9, | INT7, INT8, INT9, |
| | | | | | EX10, EX11, | INT10, INT11, |
| | | | | | EX12, EX13, | INT12, INT13, |
| | | | | | EX14, EX15, | INT14, INT15, |
| | | | | | EX16, EX17, | INT16, INT19, |
| | | | | | EX19, EX20, | INT20, INT21, |
| | | | | | EX21, EX22, | INT22, INT25, |
| | | | | | EX25, EX26, | INT28, INT29, |
| | | | | | EX27, EX28, | INT31, INT32, |
| | | | | | EX29, EX31, | INT40, INT41 |
| | | | | | EX37 | |
| ENST00000392645.6 | — | — | — | Retained | EX25, EX62, | INT66, INT67, |
| | | | | intron | EX63, EX64, | INT68, INT69, |
| | | | | | EX65, EX66, | INT70, INT71, |
| | | | | | EX67, EX68, | INT72, INT73, |
| | | | | | EX69, EX70, | INT74, INT75 |
| | | | | | EX89 | |
| ENST00000389154.7 | — | ENSP00000373806 | — | Protein | EX16, EX17, | INT16, INT19, |
| | | | | coding | EX19, EX20, | INT20, INT21, |
| | | | | | EX21, EX27, | INT28, INT39, |
| | | | | | EX28, EX36, | INT40, INT41, |
| | | | | | EX37, EX90 | INT88 |
| ENST00000483311.5 | — | ENSP00000446512 | — | Nonsense | EX2, EX3, EX4, | INT2, INT3, INT4, |
| | | | | mediated | EX5, EX6, EX7, | INT5, INT6, INT7, |
| | | | | decay | EX8, EX9, EX10, | INT8, INT9, INT10, |
| | | | | | EX11, EX12, | INT11, INT12, |
| | | | | | EX13, EX14, | INT13, INT14, |
| | | | | | EX15, EX16, | INT15, INT16, |
| | | | | | EX17, EX46, | INT51, INT52, |
| | | | | | EX47, EX48, | INT53, INT54, |
| | | | | | EX49, EX50, | INT55, INT56, |
| | | | | | EX51, EX52, | INT57, INT58 |
| | | | | | EX53 | |
| ENST00000482777.5 | — | — | — | Retained | EX48, EX50, | INT64, INT65, |
| | | | | intron | EX60, EX61 | INT89 |
| ENST00000471866.5 | — | — | — | Retained | EX65, EX66, | INT71, INT79, |
| | | | | intron | EX77, EX78 | INT80 |
| ENST00000481331.1 | — | — | — | Processed | EX58, EX59, | INT63, INT90 |
| | | | | transcript | EX68 | |
| ENST00000492467.5 | — | ENSP00000447225 | — | Protein | EX11, EX13, | INT13, INT14, |
| | | | | coding | EX14, EX15, | INT42, INT43, |
| | | | | | EX38, EX39 | INT44 |
| ENST00000495342.1 | — | — | — | Retained | EX55, EX79, | INT81, INT82, |
| | | | | intron | EX80, EX81 | INT83 |
| ENST00000542287.6 | NM_001310121 | ENSP00000445583 | NP_001297050 | Protein | EX4, EX5, EX6, | INT4, INT5, INT6, |
| | | | | coding | EX7, EX8, EX9, | INT7, INT8, INT9, |
| | | | | | EX10, EX11, | INT10, INT11, |
| | | | | | EX12, EX13, | INT12, INT13, |
| | | | | | EX14, EX15, | INT14, INT15, |
| | | | | | EX16, EX17, | INT16, INT17, |
| | | | | | EX18, EX19, | INT18, INT19, |
| | | | | | EX20, EX21, | INT20, INT21, |
| | | | | | EX25, EX26, | INT25, INT28, |
| | | | | | EX27, EX28, | INT32, INT33, |
| | | | | | EX29, EX32, | INT34, INT35, |
| | | | | | EX33, EX34 | INT36 |
| ENST00000550844.2 | — | ENSP00000447741 | — | Protein | EX20, EX21, | INT20, INT21, |
| | | | | coding | EX27, EX35 | INT38 |
| ENST00000475132.1 | — | ENSP00000474645 | — | Protein | EX42, EX43 | INT48 |
| | | | | coding | | |
| ENST00000484991.1 | — | — | — | Retained | EX82, EX83 | INT84 |
| | | | | intron | | |
| ENST00000468920.2 | — | — | — | Retained | EX84, EX85 | INT85 |
| | | | | intron | | |
| ENST00000535949.5 | NM_001310123 | ENSP00000439338 | NP_001297052 | Protein | EX5, EX6, EX7, | INT5, INT6, INT7, |
| | | | | coding | EX8, EX9, EX10, | INT8, INT9, INT10, |
| | | | | | EX11, EX12, | INT11, INT12, |
| | | | | | EX13, EX14, | INT13, INT14, |
| | | | | | EX15, EX16, | INT15, INT16, |
| | | | | | EX17, EX18, | INT17, INT18, |
| | | | | | EX19, EX20, | INT19, INT26, |
| | | | | | EX26, EX27, | INT27, INT28, |
| | | | | | EX28, EX29, | INT29, INT36, |
| | | | | | EX32, EX34 | INT37 |
| ENST00000549455.1 | — | — | — | Processed | EX56, EX57, | INT62, INT71, |
| | | | | transcript | EX65, EX66 | INT91 |
| ENST00000548492.1 | — | ENSP00000449566 | — | Protein | EX4, EX5, EX6, | INT4, INT5, INT6, |
| | | | | coding | EX7, EX44, | INT49, INT50 |
| | | | | | EX45 | |
| ENST00000550236.1 | — | ENSP00000448640 | — | Protein | EX8, EX9, EX11, | INT8, INT45, |
| | | | | coding | EX40, EX41 | INT46, INT47 |
| ENST00000546483.1 | — | — | — | Retained | EX71, EX72, | INT92, INT93, |
| | | | | intron | EX91, EX92 | INT94 |
| ENST00000551755.6 | — | ENSP00000474442 | — | Nonsense | EX16, EX17, | INT16, INT17, |
| | | | | mediated | EX18, EX48, | INT54, INT59, |
| | | | | decay | EX49, EX54, | INT60, INT61 |
| | | | | | EX55 | |
| ENST00000552323.1 | — | — | — | Retained | EX86, EX87, | INT86, INT87 |
| | | | | intron | EX88 | |
| ENST00000550889.5 | — | — | — | Retained | EX48, EX50, | INT65, INT76, |
| | | | | intron | EX73, EX74 | INT77 |
| ENST00000551551.1 | — | — | — | Retained | EX75, EX76 | INT78 |
| | | | | intron | | |
| ENST00000608853.5 | — | ENSP00000476504 | — | Protein | EX2, EX3, EX4, | INT2, INT3, INT4, |
| | | | | coding | EX5, EX6, EX7, | INT5, INT6, INT7, |
| | | | | | EX8, EX9, EX10, | INT8, INT9, INT10, |
| | | | | | EX11, EX12, | INT11, INT12, |
| | | | | | EX13, EX14, | INT13, INT14, |
| | | | | | EX15, EX16, | INT15, INT16, |
| | | | | | EX17, EX18, | INT17, INT18, |
| | | | | | EX19, EX20, | INT19, INT20, |
| | | | | | EX21, EX22, | INT21, INT22, |
| | | | | | EX27, EX28, | INT28, INT29, |
| | | | | | EX29, EX93 | INT95 |
| ENST00000550104.5 | — | ENSP00000446576 | — | Protein | EX1, EX2, EX3, | INT1, INT2, INT3, |
| | | | | coding | EX4, EX5, EX6, | INT4, INT5, INT6, |
| | | | | | EX7, EX8, EX9, | INT7, INT8, INT9, |
| | | | | | EX10, EX11, | INT10, INT11, |
| | | | | | EX12, EX13, | INT12, INT13, |
| | | | | | EX14, EX15, | INT14, INT15, |
| | | | | | EX16, EX17, | INT16, INT17, |
| | | | | | EX18, EX19, | INT18, INT19, |
| | | | | | EX20, EX21, | INT20, INT21, |
| | | | | | EX23, EX27, | INT23, INT28, |
| | | | | | EX28, EX29 | INT29 |
| ENST00000616825.4 | — | ENSP00000481448 | — | Protein | EX5, EX6, EX7, | INT5, INT6, INT7, |
| | | | | coding | EX8, EX9, EX10, | INT8, INT9, INT10, |
| | | | | | EX11, EX12, | INT11, INT12, |
| | | | | | EX13, EX14, | INT13, INT14, |
| | | | | | EX15, EX16, | INT15, INT16, |
| | | | | | EX17, EX18, | INT17, INT18, |
| | | | | | EX19, EX20, | INT19, INT24, |
| | | | | | EX24, EX25, | INT25, INT26, |
| | | | | | EX26, EX27, | INT27, INT28, |
| | | | | | EX28, EX29, | INT29, INT30 |
| | | | | | EX30 | |

[0378] ATXN2 has 7303 SNPs and the NCBI rs number and/or UniProt VAR number for this ATXN2 gene are rs10661, rs583140, rs587914, rs587949, rs593226, rs595529, rs596831, rs596853, rs597808, rs598710, rs598711, rs607316, rs610769, rs614591, rs615134, rs616513, rs616559, rs616668, rs617678, rs619010, rs621899, rs621900, rs625093, rs628825, rs629404, rs630512, rs638791, rs641084, rs642536, rs648997, rs650887, rs653178, rs655107, rs657197, rs660254, rs666727, rs676767, rs678436, rs688812, rs848129, rs848130, rs848132, rs863691, rs1029388, rs1104098, rs1104229, rs1138651, rs1268499, rs1557685, rs2010856, rs2023851, rs2073950, rs2106453, rs2238153, rs2239197, rs2283355, rs2283356, rs2283357, rs2285518, rs2301621, rs2301622, rs2339816, rs2339817, rs2879597, rs3087042, rs3815021, rs3858705, rs4041274, rs4264205, rs4353328, rs4354748, rs4456327, rs4766464, rs4766577, rs4766578, rs5800929, rs6490140, rs6490144, rs6490162, rs6490172, rs6490182, rs6490187, rs6490216, rs7133577, rs7134740, rs7134907, rs7136431, rs7136567, rs7136679, rs7137077, rs7137348, rs7137828, rs7138498, rs7139444, rs7295678, rs7295780, rs7295788, rs7298107, rs7298960, rs7301040, rs7301158, rs7301355, rs7301374, rs7302641, rs7302805, rs7305546, rs7305662, rs7307870, rs7308857, rs7309138, rs7309993, rs7311293, rs7312583, rs7314202, rs7314228, rs7315907, rs7398196, rs7398705, rs7399348, rs7484559, rs7484712, rs7486734, rs7953144, rs7953301, rs7953810, rs7956220, rs7956977, rs7958055, rs7961200, rs7961399, rs7962830, rs7963919, rs7964109, rs7964354, rs7965040, rs7965226, rs7965720, rs7967067, rs7967698, rs7967882, rs7969300 4, rs7969770, rs7969891, rs7970626, rs7970627, rs7971276, rs7972340, rs7973327, rs7975413, rs7976102, rs7976462, rs7977725, rs7978231, rs7978331, rs7978975, rs7978978, rs7979403, rs9804704, rs9805034, rs9805053, rs9971826, rs9971887, rs9988928, rs10160956, rs10161383, rs10219563, rs10400458, rs10400460, rs10400469, rs10400565, rs10400583, rs10632091, rs10632970, rs10645847, rs10680513, rs10686219, rs10693535, rs10708872, rs10710242, rs10774625, rs10774626, rs10774627, rs10774629, rs10774630, rs10774631, rs10849949, rs10849950, rs10849951, rs10849952, rs10849953, rs10849954, rs10849955, rs10849956, rs10849957, rs10849958, rs10849959, rs10849960, rs10849961, rs11065908, rs11065909, rs11065910, rs11065911, rs11065912, rs11065913, rs11065914, rs11065915, rs11065916, rs11065917, rs11065918, rs11065919, rs11065920, rs11065921, rs11065922, rs11065923, rs11065924, rs11065925, rs11065926, rs11065929, rs11065930, rs11065932, rs11065933, rs11065934, rs11065935, rs11065936, rs11065937, rs11065938, rs11065939, rs11065941, rs11065942, rs11065943, rs11065944, rs11065945, rs11065946, rs11065947, rs11065949, rs11065950, rs11065951, rs11065952, rs11065953, rs11065954, rs11065955, rs11065956, rs11065957, rs11065958, rs11065959, rs11065960, rs11065961, rs11065962, rs11065963, rs11065964, rs11065965, rs11065966, rs11065967, rs11065968, rs11065969, rs11326711, rs11330026, rs11345860, rs11346498, rs11348701, rs11356478, rs11360314, rs11399004, rs11421677, rs11439568, rs11449224, rs11458752, rs11462759, rs11608565, rs11610849, rs11612433, rs11615619, rs11830520, rs11831090, rs11831184, rs11832327, rs11832412, rs11833973, rs11834632, rs11835972, rs11836810, rs11837744, rs11837800, rs12230659, rs12230853, rs12299245, rs12299425, rs12299482, rs12299770, rs12300465, rs12300759, rs12300764, rs12301021, rs12301101, rs12301585, rs12302978, rs12303441, rs12304152, rs12305660, rs12306151, rs12306319, rs12307616, rs12308744, rs12309980, rs12310120, rs12310522, rs12310623, rs12313759, rs12314374, rs12314647, rs12315171, rs12315889, rs12317695, rs12319031, rs12321797, rs12369009, rs12370409, rs12370795, rs12422990, rs12427029, rs12427118, rs12427216, rs12579895, rs12580416, rs12580497, rs12810540, rs12810542, rs12810881, rs12813350, rs12813541, rs12816310, rs12817044, rs12817142, rs12817682, rs12817707, rs12819065, rs12819935, rs12825244, rs12827071, rs12828078, rs13377932, rs16934165, rs16934167, rs16941540, rs16941541, rs16941545, rs16941551, rs16941578, rs16941580, rs17805591, rs28364723, rs28406598, rs28409688, rs28452544, rs28482240, rs28488295, rs28521474, rs28679341, rs28823331, rs33967202, rs33992543, rs34024430, rs34031367, rs34034056, rs34130859, rs34167379, rs34184585, rs34244984, rs34277352, rs34292191, rs34321565, rs34356595, rs34403978, rs34416486, rs34497244, rs34507890, rs34518872, rs34604730, rs34616460, rs34618076, rs34625134, rs34628064, rs34632518, rs34646187, rs34646940, rs34672172, rs34753152, rs34791080, rs34835988, rs34888013, rs34893216, rs34967963, rs34988312, rs34994640, rs35011099, rs35035921, rs35055121, rs35075526, rs35083070, rs35151312, rs35156843, rs35300968, rs35316415, rs35337209, rs35350651, rs35393174, rs35423577, rs35451530, rs35454059, rs35478812, rs35497563, rs35558176, rs35562762, rs35778637, rs35807597, rs35819172, rs35834451, rs35861967, rs35912941, rs35926625, rs35959897, rs36043026, rs36064499, rs36075882, rs41500449, rs55851737, rs55913981, rs56142475, rs56313374, rs56334884, rs56390488, rs56667086, rs56887401, rs56945768, rs57014198, rs57018072, rs57081594, rs57267901, rs57447861, rs57717176, rs57796163, rs57940846, rs58098153, rs58116265, rs58159636, rs58350765, rs58447922, rs58658912, rs58659313, rs58678794, rs58740648, rs58788675, rs58937998, rs58942894, rs59022491, rs59132195, rs59185968, rs59188958, rs59234078, rs59353361, rs59366504, rs59454350, rs59554232, rs59651378, rs59709526, rs59710594, rs59826774, rs59829184, rs59840296, rs59974413, rs60249537, rs60280041, rs60443842, rs60456524, rs60473879, rs60506035, rs60673204, rs60742641, rs60746537, rs60763632, rs60813520, rs60945194, rs61046746, rs61295581, rs61451099, rs61456193, rs61507608, rs61532454, rs61542413, rs61569878, rs61941261, rs61941262, rs61941263, rs61944378, rs61944379, rs61944380, rs61944381, rs61944382, rs61944383, rs61944384, rs61944385, rs61944387, rs61944388, rs61944389, rs61944390, rs61944391, rs62932861, rs62998261, rs63265360, rs66643315, rs67013265, rs68107770, rs71083180, rs71083182, rs71083183, rs71445545, rs71445546, rs71445547, rs71445548, rs71445549, rs71458398, rs71458399, rs71458401, rs71463997, rs71463998, rs71463999, rs71464000, rs71464001, rs71464002, rs71465803, rs71465804, rs71811402, rs72378882, rs72520324, rs73201767, rs73201772, rs73201776, rs73410570, rs73412444, rs73412464, rs73412478, rs73414453, rs73414496, rs73414502, rs73416404, rs74330250, rs74350796, rs74354135, rs74414937, rs74451561, rs74516243, rs74578282, rs74599202, rs74653363, rs74656100, rs74660286, rs74723267, rs74728808, rs74783653, rs74783709, rs74803009, rs74882580, rs74882643, rs74882661, rs75025083, rs75118403, rs75153104, rs75202985, rs75208015, rs75225239, rs75377306, rs75556415, rs75636084, rs75639973, rs75656375, rs75735170, rs75803830, rs75895099, rs75922992, rs76004210, rs76017990, rs76031015, rs76065700, rs76201927, rs76219455, rs76269504, rs76335050, rs76339564, rs76375301, rs76417622, rs76508509, rs76535171, rs76583509, rs76604970, rs76709544, rs76731877, rs76783271, rs76821272, rs76840892, rs76877566, rs76926750, rs76978305, rs77001757, rs77015939, rs77016096, rs77070824, rs77096515, rs77097777, rs77110671, rs77111075, rs77218438, rs77228326, rs77242783, rs77255409, rs77260868, rs77282847, rs77292442, rs77449552, rs77465633, rs77506758, rs77519297, rs77544525, rs77611986, rs77613739, rs77640557, rs77643966, rs77727861, rs77750554, rs77751189, rs77758158, rs77838113, rs77957786, rs77965675, rs77971016, rs77975664, rs78092315, rs78144501, rs78178511, rs78190964, rs78209549, rs78259673, rs78288621, rs78308472, rs78385478, rs78445070, rs78461439, rs78503944, rs78532633, rs78571927, rs78589015, rs78969161, rs79000204, rs79035668, rs79082972, rs79109141, rs79122454, rs79142672, rs79167458, rs79185818, rs79209359, rs79219936, rs79289346, rs79297362, rs79332518, rs79429830, rs79493398, rs79508922, rs79540444, rs79540524, rs79583230, rs79628266, rs79681962, rs79705398, rs79755872, rs79833380, rs79842457, rs79936974, rs79996696, rs80017124, rs80029398, rs80091843, rs80138456, rs80197202, rs80207230, rs80248671, rs80298150, rs111278009, rs111279477, rs111281565, rs111285713, rs111313479, rs111318374, rs111334573, rs111339224, rs111343430, rs111352896, rs111370294, rs111385452, rs111407200, rs111431266, rs111439205, rs111484972, rs111489825, rs111489870, rs111530545, rs111604842, rs111606127, rs111632353, rs111645304, rs111645832, rs111652015, rs111673663, rs111681924, rs111687409, rs111688508, rs111694168, rs111711387, rs111717860, rs111719030, rs111808386, rs111818253, rs111848149, rs111900113, rs111905259, rs111927194, rs111954050, rs111958545, rs111962129, rs111981578, rs111986425, rs111994197, rs111994525, rs111994988, rs112002450, rs112003001, rs112009822, rs112009841, rs112010089, rs112055135, rs112058157, rs112065630, rs112165664, rs112171564, rs112193357, rs112203997, rs112249060, rs112261434, rs112320110, rs112336421, rs112391015, rs112397182, rs112398974, rs112432585, rs112459361, rs112486090, rs112508420, rs112510388, rs112563059, rs112564992, rs112572869, rs112573662, rs112609183, rs112642968, rs112665889, rs112723536, rs112727113, rs112740035, rs112744854, rs112790894, rs112796017, rs112802979, rs112816054, rs112829556, rs112833628, rs112835833, rs112839900, rs112846017, rs112867136, rs112897190, rs112897889, rs112906667, rs112954365, rs112998070, rs113003210, rs113018939, rs113031934, rs113038620, rs113043543, rs113075607, rs113108451, rs113123549, rs113152900, rs113153530, rs113164591, rs113243718, rs113250221, rs113335784, rs113354478, rs113354978, rs113355368, rs113431162, rs113443825, rs113447422, rs113461008, rs113485398, rs113491100, rs113541773, rs113559840, rs113568301, rs113621672, rs113633255, rs113634993, rs113637882, rs113641073, rs113656703, rs113658477, rs113660335, rs113710104, rs113715032, rs113726605, rs113728680, rs113730273, rs113761435, rs113763543, rs113811888, rs113838838, rs113870619, rs113871259, rs113943205, rs113946531, rs113947533, rs113950073, rs113953934, rs114135116, rs114149136, rs114158718, rs114195483, rs114203502, rs114232348, rs114285692, rs114303122, rs114311995, rs114313107, rs114320862, rs114333547, rs114467790, rs114500054, rs114515830, rs114591838, rs114609162, rs114688069, rs114811621, rs114849079, rs114882085, rs114907747, rs114909404, rs114980296, rs115056781, rs115119478, rs115185033, rs115277476, rs115357525, rs115366589, rs115390716, rs115464901, rs115512671, rs115567704, rs115572048, rs115639850, rs115677682, rs115686169, rs115756818, rs115855490, rs115863887, rs115875695, rs115928592, rs116037008, rs116185946, rs116284513, rs116288676, rs116368304, rs116393872, rs116396265, rs116476716, rs116512134, rs116680934, rs116713310, rs116825122, rs116870920, rs116911064, rs117066377, rs117122737, rs117129118, rs117168073, rs117203508, rs117264757, rs117285519, rs117328505, rs117401050, rs117448579, rs117476126, rs117509393, rs117520885, rs117536250, rs117596429, rs117647254, rs117650566, rs117666960, rs117700897, rs117751254, rs117773495, rs117800259, rs117808303, rs117851901, rs117864178, rs118001907, rs118002600, rs118031840, rs118138208, rs118151981, rs137861730, rs137880699, rs137892048, rs137959413, rs137965236, rs137986935, rs138023485, rs138023593, rs138038221, rs138108649, rs138130953, rs138139402, rs138147841, rs138152068, rs138160752, rs138281696, rs138351104, rs138368142, rs138369935, rs138377485, rs138424667, rs138430275, rs138462645, rs138483905, rs138498768, rs138525463, rs138559256, rs138577114, rs138579291, rs138742290, rs138765823, rs138804537, rs138850891, rs138912353, rs138927733, rs138949847, rs138954505, rs138981247, rs139001224, rs139018333, rs139021777, rs139062368, rs139110312, rs139118293, rs139154012, rs139174967, rs139198998, rs139200470, rs139215385, rs139216981, rs139227377, rs139239159, rs139243033, rs139279479, rs139291456, rs139319688, rs139365888, rs139378800, rs139440093, rs139441643, rs139532671, rs139537266, rs139576524, rs139597857, rs139641691, rs139644162, rs139649002, rs139676938, rs139709342, rs139710740, rs139711414, rs139731025, rs139812814, rs139845202, rs139856842, rs139863718, rs139891589, rs139904070, rs139909110, rs139986574, rs140095950, rs140102631, rs140109303, rs140122897, rs140150887, rs140168426, rs140184937, rs140242159, rs140242317, rs140262591, rs140277173, rs140301528, rs140514691, rs140532945, rs140533062, rs140535192, rs140564354, rs140571351, rs140584208, rs140598278, rs140615992, rs140654212, rs140664708, rs140699264, rs140712529, rs140724168, rs140735430, rs140751564, rs140760733, rs140772455, rs140789185, rs140820516, rs140929975, rs140980941, rs141008682, rs141015813, rs141091651, rs141108620, rs141135002, rs141156220, rs141240685, rs141258927, rs141267110, rs141277765, rs141346661, rs141379792, rs141393500, rs141415130, rs141460196, rs141467933, rs141485897, rs141600110, rs141647274, rs141678194, rs141683900, rs141695152, rs141753020, rs141765625, rs141776827, rs141837485, rs141843855, rs141879541, rs141890790, rs141999032, rs142065293, rs142084617, rs142096264, rs142109684, rs142121535, rs142148542, rs142151980, rs142170016, rs142172378, rs142236693, rs142325871, rs142355910, rs142367919, rs142420643, rs142425269, rs142445320, rs142449822, rs142462470, rs142468716, rs142496500, rs142515731, rs142530403, rs142553699, rs142570403, rs142601059, rs142659694, rs142668694, rs142680833, rs142695947, rs142701771, rs142747289, rs142749080, rs142926227, rs142926913, rs142965624, rs142968380, rs142971909, rs143005755, rs143066671, rs143103166, rs143107241, rs143112148, rs143156466, rs143166155, rs143177843, rs143183760, rs143212248, rs143250817, rs143319182, rs143337059, rs143386787, rs143423998, rs143488539, rs143512298, rs143575397, rs143595332, rs143599937, rs143602215, rs143633645, rs143682641, rs143749511, rs143749699, rs143776451, rs143785685, rs143799370, rs143804395, rs143842683, rs143848792, rs143894346, rs143894991, rs143912109, rs143935583, rs143988123, rs144032673, rs144040636, rs144066383, rs144086685, rs144170054, rs144229217, rs144235483, rs144244990, rs144268083, rs144298686, rs144398473, rs144420886, rs144455417, rs144458056, rs144460578, rs144527724, rs144543727, rs144561664, rs144580469, rs144585975, rs144773163, rs144805250, rs144813155, rs144850729, rs144865529, rs144897036, rs144897320, rs144904635, rs144924229, rs144939442, rs145004641, rs145011675, rs145095888, rs145124104, rs145153510, rs145171208, rs145191702, rs145199176, rs145210778, rs145226641, rs145250035, rs145251550, rs145265954, rs145283224, rs145331668, rs145337671, rs145457844, rs145467529, rs145517432, rs145568802, rs145572361, rs145580348, rs145583087, rs145598451, rs145598979, rs145613347, rs145618127, rs145629893, rs145636401, rs145639312, rs145639486, rs145705674, rs145765175, rs145810958, rs145816890, rs145825807, rs145884066, rs145903862, rs145912265, rs145992746, rs145995899, rs145996331, rs146002668, rs146007520, rs146132147, rs146180830, rs146191693, rs146203165, rs146220663, rs146252656, rs146256091, rs146333812, rs146350923, rs146378570, rs146415388, rs146420321, rs146443278, rs146453917, rs146545454, rs146557024, rs146579278, rs146664803, rs146675377, rs146752713, rs146780345, rs146806034, rs146806355, rs146844116, rs146854733, rs146900572, rs146961925, rs146971830, rs147058930, rs147066756, rs147099275, rs147129993, rs147152664, rs147196975, rs147220906, rs147252581, rs147253120, rs147349476, rs147360292, rs147447283, rs147454930, rs147464759, rs147470290, rs147474684, rs147591308, rs147610472, rs147624849, rs147640454, rs147718924, rs147751122, rs147817635, rs147841085, rs147850370, rs147874453, rs147923790, rs147939695, rs147948116, rs147958412, rs147963174, rs148016282, rs148051839, rs148105067, rs148171861, rs148188003, rs148238801, rs148265979, rs148283877, rs148294246, rs148313524, rs148325045, rs148344693, rs148407577, rs148416922, rs148464957, rs148536543, rs148545525, rs148573064, rs148598154, rs148615712, rs148625412, rs148642022, rs148669254, rs148760379, rs148786180, rs148857547, rs148887323, rs148901316, rs148911859, rs148929456, rs148987383, rs149062199, rs149067188, rs149109195, rs149109789, rs149119323, rs149141810, rs149154361, rs149191749, rs149218864, rs149235605, rs149265593, rs149269851, rs149340843, rs149386691, rs149405676, rs149459161, rs149463988, rs149467889, rs149496582, rs149515707, rs149561165, rs149597799, rs149637511, rs149648815, rs149654844, rs149659514, rs149723979, rs149725086, rs149744863, rs149774930, rs149802427, rs149802960, rs149812317, rs149933271, rs149972379, rs149993257, rs150001697, rs150027678, rs150038981, rs150097925, rs150128365, rs150151268, rs150256904, rs150266233, rs150309216, rs150319790, rs150348716, rs150362837, rs150383897, rs150391332, rs150425821, rs150466029, rs150487055, rs150488279, rs150494096, rs150506549, rs150538953, rs150541685, rs150595356, rs150603227, rs150608734, rs150623499, rs150656210, rs150657994, rs150676294, rs150750159, rs150797377, rs150803783, rs150832331, rs150876324, rs150886605, rs150930342, rs150983594, rs151038991, rs151064055, rs151096690, rs151118388, rs151125827, rs151135940, rs151140090, rs151153851, rs151161811, rs151193410, rs151223079, rs151327570, rs180701504, rs180720778, rs180725555, rs180750791, rs180769488, rs180846082, rs180846473, rs180850688, rs180851137, rs180851261, rs180853294, rs180855184, rs180894045, rs180966462, rs180981834, rs180983162, rs180983331, rs180994432, rs181009520, rs181032690, rs181034202, rs181037036, rs181079699, rs181086710, rs181208898, rs181213494, rs181216996, rs181220650, rs181220881, rs181266665, rs181272129, rs181323589, rs181385444, rs181393783, rs181408116, rs181477361, rs181481726, rs181499124, rs181513729, rs181515241, rs181525273, rs181528077, rs181694208, rs181706491, rs181718931, rs181788121, rs181810719, rs181816859, rs181820551, rs181824407, rs181825175, rs181863893, rs181865704, rs181867737, rs181926057, rs181934852, rs181937930, rs181948858, rs181968585, rs181979700, rs181988691, rs182086395, rs182093219, rs182112624, rs182167704, rs182185901, rs182240255, rs182252328, rs182258814, rs182283833, rs182333624, rs182357642, rs182384830, rs182396844, rs182401216, rs182403584, rs182406835, rs182439106, rs182477088, rs182533128, rs182609349, rs182626919, rs182641373, rs182647313, rs182722764, rs182723994, rs182725761, rs182730840, rs182738837, rs182753127, rs182847495, rs182863628, rs182863731, rs182873227, rs182888756, rs182917851, rs182921346, rs182929588, rs182974733, rs182986657, rs182992048, rs182994883, rs183004070, rs183007779, rs183046752, rs183048355, rs183051128, rs183057983, rs183094635, rs183102873, rs183182606, rs183195947, rs183252482, rs183256854, rs183289224, rs183329640, rs183335371, rs183340400, rs183345631, rs183348495, rs183363221, rs183465345, rs183468414, rs183468970, rs183486369, rs183491078, rs183494038, rs183501877, rs183517741, rs183563696, rs183620698, rs183632683, rs183645642, rs183697731, rs183706909, rs183720202, rs183753374, rs183761528, rs183770663, rs183780620, rs183799772, rs183819667, rs183898489, rs183964851, rs183973479, rs184057767, rs184064558, rs184129024, rs184153370, rs184198548, rs184200660, rs184210433, rs184223314, rs184244071, rs184269309, rs184281396, rs184297887, rs184331977, rs184351190, rs184368822, rs184375805, rs184510411, rs184536837, rs184539119, rs184584448, rs184590119, rs184654538, rs184659972, rs184677089, rs184687954, rs184698167, rs184699919, rs184708948, rs184714364, rs184722901, rs184746139, rs184820575, rs184827910, rs184829337, rs184836244, rs184837947, rs184856693, rs184947125, rs185049393, rs185066537, rs185098577, rs185127108, rs185153380, rs185168060, rs185172273, rs185173598, rs185176325, rs185193266, rs185211479, rs185212675, rs185313169, rs185320617, rs185330683, rs185335169, rs185338676, rs185343844, rs185354750, rs185363145, rs185370635, rs185385451, rs185391513, rs185391951, rs185395313, rs185409243, rs185418837, rs185458838, rs185470864, rs185478048, rs185497502, rs185504021, rs185611661, rs185620612, rs185620930, rs185628659, rs185631418, rs185684203, rs185694575, rs185725431, rs185737930, rs185738401, rs185759349, rs185767612, rs185825173, rs185876987, rs185883291, rs185904202, rs185906443, rs185938244, rs185942760, rs185960303, rs185981076, rs186123437, rs186132739, rs186150036, rs186217127, rs186217251, rs186238459, rs186248591, rs186254599, rs186254871, rs186271057, rs186344483, rs186367678, rs186433607, rs186526215, rs186530674, rs186544385, rs186544782, rs186548434, rs186551510, rs186603286, rs186620842, rs186632862, rs186697136, rs186698110, rs186724833, rs186734010, rs186737969, rs186782368, rs186792209, rs186845567, rs186853869, rs186982245, rs187090584, rs187122948, rs187129436, rs187129618, rs187138123, rs187140485, rs187168514, rs187170971, rs187175304, rs187182061, rs187246373, rs187261296, rs187264483, rs187266056, rs187282804, rs187291025, rs187304063, rs187304282, rs187305620, rs187333868, rs187345143, rs187348401, rs187368010, rs187370371, rs187372835, rs187375014, rs187418229, rs187420948, rs187467888, rs187481331, rs187556020, rs187599716, rs187601438, rs187608781, rs187609455, rs187613191, rs187614163, rs187671685, rs187729701, rs187749422, rs187752520, rs187755129, rs187818039, rs187865673, rs187884067, rs187889252, rs187896933, rs187899957, rs187903253, rs187934625, rs187942780, rs187952028, rs187962590, rs188033482, rs188106308, rs188116400, rs188223149, rs188227086, rs188227340, rs188236251, rs188250227, rs188356411, rs188358555, rs188379375, rs188387231, rs188388297, rs188389478, rs188392748, rs188398142, rs188426758, rs188455983, rs188514776, rs188528101, rs188532691, rs188569251, rs188656857, rs188664164, rs188664866, rs188677047, rs188681102, rs188700384, rs188702040, rs188722776, rs188739231, rs188744258, rs188751073, rs188881015, rs188887834, rs188892533, rs188938554, rs188956462, rs189005505, rs189082830, rs189098730, rs189124318, rs189130586, rs189150177, rs189165020, rs189176340, rs189225633, rs189246219, rs189265422, rs189274723, rs189301594, rs189310848, rs189315056, rs189318803, rs189350870, rs189382080, rs189385859, rs189425473, rs189460091, rs189469891, rs189513499, rs189521851, rs189636262, rs189645043, rs189646865, rs189704004, rs189725031, rs189774195, rs189776676, rs189778289, rs189778615, rs189784432, rs189849432, rs189914601, rs189945666, rs189956109, rs189973565, rs190027495, rs190051444, rs190055234, rs190064793, rs190075177, rs190099769, rs190122393, rs190130287, rs190145307, rs190170154, rs190189042, rs190288583, rs190290408, rs190312857, rs190327148, rs190351046, rs190355163, rs190386891, rs190409609, rs190432649, rs190443101, rs190445154, rs190450307, rs190494463, rs190510434, rs190548958, rs190561988, rs190600030, rs190609759, rs190688199, rs190705783, rs190715489, rs190721539, rs190753144, rs190753573, rs190773380, rs190777418, rs190781668, rs190783687, rs190785617, rs190844268, rs190922229, rs190922977, rs190926440, rs190976825, rs190981878, rs191013046, rs191080906, rs191140434, rs191197267, rs191203753, rs191203797, rs191206673, rs191213700, rs191214561, rs191217743, rs191226454, rs191261704, rs191263137, rs191263713, rs191265771, rs191269509, rs191335859, rs191379964, rs191400641, rs191416750, rs191498557, rs191522736, rs191537937, rs191545165, rs191546915, rs191566223, rs191596910, rs191614509, rs191618224, rs191620091, rs191624437, rs191627513, rs191677287, rs191746278, rs191752991, rs191788575, rs191808783, rs191826629, rs191907458, rs191909804, rs191916763, rs191927179, rs191991740, rs192056938, rs192074945, rs192076517, rs192095798, rs192097089, rs192101280, rs192104750, rs192106271, rs192137647, rs192143485, rs192150352, rs192246168, rs192276759, rs192288285, rs192289682, rs192305684, rs192342040, rs192457632, rs192469808, rs192483235, rs192492879, rs192528193, rs192532762, rs192536857, rs192551478, rs192571758, rs192580107, rs192618028, rs192666605, rs192671968, rs192672056, rs192683323, rs192716216, rs192728112, rs192730483, rs192843270, rs192851573, rs192859776, rs192873800, rs192918868, rs192936661, rs193033382, rs193034415, rs193040723, rs193097290, rs193110512, rs193217381, rs193256002, rs193264702, rs193276363, rs199544194, rs199546037, rs199555440, rs199570078, rs199575248, rs199590969, rs199639024, rs199728345, rs199755294, rs199761312, rs199797015, rs199919546, rs199939893, rs199973471, rs200018584, rs200048987, rs200056865, rs200064581, rs200071981, rs200095621, rs200098960, rs200257508, rs200292536, rs200306299, rs200306315, rs200388976, rs200419364, rs200451216, rs200458351, rs200459308, rs200550963, rs200554694, rs200574928, rs200594088, rs200604622, rs200620381, rs200629572, rs200655762, rs200663979, rs200666090, rs200749328, rs200884970, rs200984660, rs201011834, rs201023351, rs201087811, rs201122350, rs201154741, rs201221247, rs201245920, rs201249513, rs201291209, rs201381602, rs201418271, rs201459505, rs201486288, rs201513990, rs201587601, rs201649018, rs201658919, rs201661707, rs201666767, rs201675110, rs201729355, rs201750608, rs201755263, rs201780034, rs201793672, rs201793760, rs201795384, rs201804895, rs201805628, rs201873124, rs201886670, rs201933177, rs201941274, rs201965169, rs201972457, rs202014945, rs202022194, rs202059044, rs202116535, rs202127828, rs202198998, rs202232114, rs207473369, rs207473370, rs267603309, rs367545702, rs367549019, rs367549956, rs367552344, rs367572456, rs367609177, rs367613449, rs367665460, rs367703028, rs367709775, rs367714796, rs367730494, rs367732206, rs367732782, rs367736419, rs367753599, rs367753814, rs367765144, rs367790881, rs367799103, rs367802795, rs367808588, rs367808628, rs367821906, rs367906987, rs367936746, rs367947855, rs367953342, rs367964159, rs367994098, rs368051137, rs368109870, rs368112621, rs368115908, rs368123532, rs368167361, rs368177697, rs368191681, rs368192335, rs368253682, rs368255813, rs368266260, rs368271189, rs368276717, rs368290791, rs368335925, rs368358202, rs368364384, rs368373398, rs368389422, rs368402166, rs368433615, rs368512903, rs368519207, rs368527672, rs368595972, rs368598556, rs368608853, rs368619533, rs368623156, rs368630987, rs368640934, rs368654637, rs368679711, rs368749858, rs368791412, rs368816012, rs368825694, rs368867361, rs368872044, rs368877662, rs368899952, rs368903848, rs369017579, rs369040822, rs369070909, rs369072335, rs369074214, rs369075611, rs369075649, rs369076581, rs369080146, rs369132051, rs369141898, rs369149108, rs369157041, rs369166764, rs369220616, rs369228757, rs369229333, rs369235083, rs369235418, rs369252931, rs369261348, rs369299808, rs369339113, rs369425059, rs369440499, rs369447804, rs369467628, rs369482814, rs369512638, rs369517973, rs369546466, rs369576865, rs369589545, rs369621593, rs369668009, rs369681500, rs369694941, rs369730568, rs369810435, rs369848889, rs369871397, rs369874622, rs369909840, rs369927759, rs370012452, rs370016748, rs370020267, rs370061543, rs370074832, rs370103586, rs370107318, rs370120397, rs370123294, rs370172412, rs370209942, rs370263255, rs370270319, rs370303034, rs370317158, rs370328558, rs370342659, rs370407071, rs370439512, rs370452790, rs370472175, rs370521238, rs370550874, rs370562994, rs370573206, rs370592683, rs370639529, rs370677812, rs370699467, rs370736040, rs370748150, rs370749173, rs370755844, rs370780213, rs370833232, rs370840378, rs370853412, rs370858064, rs370859631, rs370859750, rs370874212, rs370896525, rs370910854, rs370911970, rs370932700, rs370950251, rs370969744, rs370973288, rs371008673, rs371043795, rs371044363, rs371049898, rs371053689, rs371208961, rs371213254, rs371275612, rs371335254, rs371335809, rs371342679, rs371348716, rs371355589, rs371399749, rs371423352, rs371473726, rs371481020, rs371490664, rs371508391, rs371523949, rs371550351, rs371574953, rs371583246, rs371596627, rs371597390, rs371599745, rs371615335, rs371638876, rs371639103, rs371646430, rs371678517, rs371696183, rs371700784, rs371713721, rs371750072, rs371756221, rs371762486, rs371765267, rs371771109, rs371773535, rs371812472, rs371854568, rs371855103, rs371856547, rs371863677, rs371868586, rs371893019, rs371913273, rs371939902, rs371969883, rs371992269, rs371997595, rs372038431, rs372045916, rs372051690, rs372052353, rs372071388, rs372079713, rs372107777, rs372111340, rs372118351, rs372160721, rs372164557, rs372170295, rs372176756, rs372264714, rs372267174, rs372275819, rs372279786, rs372317736, rs372319951, rs372364208, rs372373396, rs372412953, rs372424972, rs372430286, rs372445481, rs372472028, rs372496239, rs372499619, rs372554379, rs372556773, rs372576321, rs372587770, rs372595198, rs372599385, rs372607430, rs372607731, rs372634376, rs372652422, rs372677166, rs372684107, rs372688497, rs372702457, rs372706374, rs372741717, rs372762830, rs372764808, rs372812169, rs372817196, rs372847066, rs372851352, rs372958377, rs372986285, rs372994174, rs373051326, rs373054618, rs373058908, rs373067856, rs373143800, rs373171732, rs373233037, rs373273141, rs373284416, rs373289077, rs373298195, rs373299309, rs373328203, rs373343233, rs373348323, rs373351464, rs373354661, rs373391687, rs373430252, rs373432110, rs373436951, rs373448485, rs373462283, rs373463275, rs373465577, rs373481067, rs373485459, rs373488213, rs373498467, rs373524112, rs373533079, rs373629185, rs373668466, rs373705980, rs373708839, rs373718245, rs373734602, rs373752082, rs373792891, rs373804902, rs373814777, rs373821998, rs373825412, rs373831110, rs373835967, rs373889583, rs373890477, rs373896308, rs373902894, rs373902915, rs373910266, rs373922649, rs373930102, rs373932829, rs374007476, rs374036959, rs374058811, rs374071812, rs374118239, rs374121799, rs374124205, rs374203441, rs374211214, rs374214698, rs374226660, rs374293754, rs374295303, rs374300190, rs374319477, rs374369577, rs374385876, rs374395668, rs374471595, rs374496855, rs374526381, rs374538305, rs374573473, rs374587661, rs374588406, rs374596062, rs374615465, rs374625694, rs374631048, rs374727874, rs374753131, rs374759046, rs374761519, rs374805277, rs374826514, rs374845735, rs374845848, rs374863526, rs374871688, rs374875483, rs374878347, rs374903849, rs374965682, rs374983638, rs374985543, rs375000366, rs375022770, rs375166704, rs375178222, rs375180789, rs375213290, rs375221048, rs375260939, rs375263649, rs375333992, rs375359382, rs375372640, rs375379963, rs375430831, rs375448477, rs375488128, rs375508505, rs375543917, rs375552550, rs375560039, rs375561926, rs375605870, rs375609458, rs375611081, rs375641693, rs375687566, rs375693618, rs375738060, rs375750061, rs375752179, rs375752343, rs375763505, rs375824943, rs375825914, rs375836214, rs375856295, rs375859580, rs375914740, rs375924633, rs375940273, rs375948086, rs375958151, rs375960009, rs375966904, rs375969609, rs375979715, rs375980166, rs375996926, rs376000781, rs376008535, rs376010475, rs376022852, rs376072990, rs376113353, rs376135647, rs376161462, rs376197182, rs376208652, rs376210560, rs376211205, rs376216026, rs376218332, rs376240523, rs376249613, rs376251025, rs376252031, rs376320483, rs376352386, rs376364112, rs376385965, rs376394275, rs376400619, rs376418024, rs376446808, rs376492019, rs376502247, rs376508232, rs376585617, rs376600989, rs376650954, rs376658853, rs376678226, rs376755881, rs376771354, rs376786465, rs376789852, rs376792108, rs376802964, rs376824492, rs376877108, rs376886174, rs376909050, rs377013612, rs377040071, rs377049079, rs377085256, rs377135065, rs377169185, rs377174595, rs377295559, rs377318119, rs377345784, rs377361480, rs377363486, rs377369884, rs377389882, rs377393255, rs377420142, rs377461604, rs377515019, rs377546252, rs377606826, rs377608872, rs377611832, rs377613465, rs377618093, rs377639182, rs377659274, rs377662583, rs377664577, rs377666051, rs377725660, rs377736558, rs386377763, rs386766375, rs397731518, rs397767257, rs397795275, rs397829654, rs397943218, rs397956543, rs397963140, rs397972966, rs397975935, rs398021078, rs398021079, rs398076955, rs398076956, rs527245811, rs527262219, rs527295388, rs527321505, rs527332721, rs527344021, rs527376743, rs527377926, rs527378067, rs527390548, rs527415724, rs527435105, rs527453898, rs527456405, rs527472496, rs527517765, rs527519998, rs527521868, rs527540798, rs527588183, rs527642293, rs527655198, rs527660429, rs527691006, rs527694974, rs527720443, rs527721073, rs527743312, rs527748996, rs527752653, rs527757773, rs527782684, rs527821100, rs527870975, rs527884879, rs527887473, rs527910279, rs527954175, rs527972245, rs528000047, rs528036447, rs528053863, rs528083499, rs528085959, rs528116300, rs528138980, rs528139287, rs528149285, rs528152047, rs528167096, rs528188632, rs528211738, rs528261624, rs528290093, rs528320033, rs528324784, rs528332732, rs528340653, rs528354581, rs528356872, rs528414992, rs528432710, rs528447107, rs528452179, rs528454900, rs528482008, rs528505341, rs528509864, rs528560862, rs528583891, rs528621096, rs528677949, rs528682292, rs528768294, rs528785955, rs528816022, rs528839414, rs528858979, rs528896039, rs528899232, rs528948853, rs528950331, rs528953767, rs528964146, rs528982706, rs528986685, rs529008696, rs529010811, rs529017146, rs529020015, rs529065881, rs529082527, rs529093136, rs529143214, rs529159452, rs529169834, rs529196570, rs529243965, rs529247453, rs529248348, rs529277842, rs529279113, rs529279772, rs529289615, rs529313184, rs529323026, rs529352995, rs529359940, rs529374601, rs529378311, rs529402368, rs529426826, rs529461910, rs529480297, rs529493581, rs529501100, rs529517612, rs529525526, rs529550553, rs529551939, rs529601019, rs529620449, rs529625345, rs529638364, rs529648493, rs529658829, rs529660114, rs529660262, rs529661029, rs529696437, rs529700435, rs529750506, rs529838560, rs529875307, rs529885664, rs529887082, rs529893001, rs529913532, rs529918325, rs529946696, rs529948392, rs529950348, rs529954391, rs530017509, rs530062154, rs530088304, rs530124301, rs530154808, rs530167918, rs530189748, rs530200980, rs530211883, rs530227019, rs530237759, rs530239848, rs530264549, rs530287754, rs530305427, rs530311294, rs530360313, rs530362029, rs530384465, rs530414296, rs530421413, rs530424298, rs530424582, rs530429565, rs530457610, rs530470743, rs530477118, rs530501874, rs530504231, rs530537018, rs530538668, rs530581291, rs530595608, rs530606722, rs530659405, rs530682769, rs530684512, rs530685231, rs530709469, rs530722193, rs530808822, rs530810210, rs530815386, rs530827272, rs530875898, rs530886374, rs530961550, rs530967984, rs530991552, rs530995157, rs530995749, rs531037953, rs531080138, rs531097090, rs531111905, rs531116850, rs531123090, rs531185931, rs531227518, rs531242183, rs531250905, rs531262809, rs531313548, rs531352168, rs531352357, rs531377227, rs531380867, rs531386532, rs531392211, rs531413194, rs531447848, rs531469078, rs531478675, rs531508523, rs531509423, rs531515312, rs531516762, rs531540426, rs531544362, rs531620019, rs531635756, rs531636997, rs531648651, rs531664288, rs531679660, rs531683491, rs531703559, rs531709639, rs531712646, rs531713737, rs531748539, rs531750068, rs531770878, rs531773015, rs531800717, rs531802435, rs531808519, rs531838628, rs531856407, rs531861713, rs531869468, rs531904202, rs531904530, rs531925127, rs531936202, rs531948650, rs531957203, rs531967154, rs531972970, rs531986556, rs531997416, rs532003273, rs532034015, rs532036193, rs532050230, rs532080462, rs532194794, rs532209472, rs532214820, rs532247167, rs532248136, rs532249038, rs532278682, rs532297271, rs532298109, rs532331014, rs532335360, rs532353305, rs532382837, rs532419687, rs532436518, rs532463941, rs532474427, rs532504234, rs532523869, rs532532829, rs532542023, rs532548270, rs532584125, rs532590000, rs532624228, rs532624414, rs532661762, rs532731020, rs532731147, rs532738162, rs532791994, rs532794524, rs532803112, rs532816127, rs532819064, rs532831918, rs532853001, rs532860407, rs532891641, rs532908135, rs532942348, rs532958332, rs532970402, rs532972864, rs532990515, rs533011932, rs533023304, rs533025777, rs533025801, rs533064937, rs533065385, rs533093215, rs533153180, rs533158471, rs533160377, rs533161632, rs533164117, rs533165362, rs533165642, rs533173442, rs533178237, rs533190099, rs533300193, rs533301385, rs533321758, rs533338856, rs533360187, rs533365768, rs533397916, rs533411131, rs533412711, rs533417274, rs533439627, rs533445584, rs533447313, rs533483155, rs533501010, rs533566625, rs533592108, rs533617791, rs533657529, rs533666242, rs533676692, rs533693929, rs533709672, rs533726560, rs533750391, rs533754348, rs533754611, rs533815996, rs533820092, rs533858394, rs533867075, rs533912106, rs533919132, rs533920922, rs533970606, rs533975624, rs533975738, rs533998027, rs534051843, rs534115424, rs534119132, rs534152295, rs534201847, rs534214027, rs534240278, rs534244869, rs534254060, rs534259224, rs534296504, rs534348313, rs534359917, rs534375584, rs534383304, rs534390121, rs534425570, rs534491611, rs534494084, rs534502419, rs534506079, rs534535059, rs534544201, rs534552539, rs534555598, rs534573516, rs534584144, rs534588893, rs534618397, rs534685440, rs534691072, rs534728398, rs534752108, rs534769486, rs534793199, rs534798814, rs534836193, rs534837160, rs534859884, rs534882805, rs534896461, rs534903613, rs534922975, rs534941076, rs534948210, rs534950457, rs534955585, rs534962784, rs534979839, rs534999195, rs535021161, rs535037471, rs535063702, rs535104237, rs535119645, rs535130844, rs535135906, rs535167119, rs535197549, rs535252342, rs535257527, rs535266561, rs535275191, rs535314485, rs535345758, rs535347989, rs535359868, rs535374664, rs535381561, rs535451644, rs535452368, rs535464157, rs535472404, rs535477316, rs535512508, rs535519001, rs535555013, rs535596978, rs535598136, rs535607324, rs535614637, rs535629939, rs535631183, rs535632369, rs535650037, rs535665042, rs535672351, rs535678049, rs535703735, rs535717121, rs535742167, rs535764860, rs535773198, rs535813902, rs535837005, rs535850137, rs535859243, rs535874550, rs535899446, rs535921576, rs535921949, rs535937220, rs536019261, rs536062609, rs536067677, rs536075834, rs536077887, rs536096853, rs536160180, rs536221493, rs536231652, rs536240738, rs536273296, rs536319015, rs536354782, rs536380455, rs536381883, rs536391668, rs536451525, rs536457395, rs536496881, rs536546099, rs536560720, rs536592137, rs536627626, rs536635168, rs536646053, rs536658040, rs536661749, rs536669750, rs536673347, rs536692416, rs536692760, rs536720306, rs536723721, rs536723990, rs536737791, rs536822790, rs536831433, rs536842699, rs536872449, rs536882271, rs536882390, rs536906362, rs536914307, rs536915778, rs536916096, rs536960345, rs537002737, rs537013852, rs537037749, rs537049765, rs537055368, rs537075153, rs537085435, rs537117002, rs537137157, rs537149201, rs537185016, rs537198233, rs537259448, rs537285019, rs537314273, rs537349735, rs537351595, rs537357164, rs537374710, rs537379385, rs537389852, rs537443924, rs537467166, rs537490511, rs537496039, rs537506732, rs537512294, rs537516671, rs537517180, rs537540390, rs537623684, rs537646462, rs537672534, rs537693471, rs537713421, rs537718988, rs537739595, rs537747341, rs537785971, rs537799221, rs537807326, rs537825078, rs537832244, rs537852879, rs537865990, rs537877108, rs537891893, rs537915207, rs537920134, rs538030835, rs538038973, rs538045844, rs538048177, rs538076176, rs538092117, rs538107471, rs538108605, rs538126057, rs538126712, rs538163794, rs538192908, rs538216009, rs538281188, rs538287682, rs538305183, rs538309997, rs538338911, rs538372435, rs538388918, rs538394357, rs538403541, rs538419890, rs538428635, rs538431677, rs538457330, rs538464003, rs538482808, rs538493044, rs538534522, rs538545985, rs538548281, rs538551426, rs538615024, rs538623339, rs538626831, rs538638999, rs538651689, rs538709716, rs538744669, rs538758591, rs538760352, rs538765988, rs538804068, rs538825306, rs538885854, rs538896429, rs538915989, rs538920496, rs538924741, rs538926883, rs538940804, rs538952713, rs538979768, rs539019131, rs539034113, rs539079129, rs539081082, rs539090785, rs539093753, rs539096943, rs539128728, rs539149029, rs539198562, rs539246664, rs539269167, rs539269779, rs539285087, rs539296553, rs539360709, rs539368004, rs539404962, rs539405174, rs539425639, rs539444298, rs539446808, rs539481764, rs539482868, rs539483548, rs539507828, rs539511412, rs539547974, rs539619246, rs539629267, rs539629657, rs539634414, rs539648967, rs539667224, rs539670843, rs539671917, rs539685628, rs539703572, rs539716009, rs539734127, rs539734790, rs539757459, rs539771224, rs539792205, rs539833717, rs539859775, rs539862154, rs539865141, rs539891341, rs539910768, rs539914177, rs539921011, rs539959821, rs540023777, rs540033300, rs540045871, rs540064081, rs540081800, rs540090736, rs540126439, rs540192115, rs540236897, rs540244401, rs540267050, rs540290187, rs540290244, rs540366422, rs540373600, rs540379612, rs540393535, rs540400368, rs540418316, rs540421379, rs540432296, rs540457482, rs540464411, rs540488951, rs540492786, rs540518962, rs540542805, rs540554298, rs540588163, rs540638575, rs540663732, rs540678954, rs540688301, rs540735478, rs540789924, rs540832072, rs540850609, rs540865841, rs540908821, rs540915551, rs540951343, rs540957063, rs540975290, rs540983389, rs541024563, rs541059775, rs541083587, rs541086056, rs541115973, rs541121532, rs541123068, rs541179121, rs541186249, rs541203156, rs541209261, rs541211137, rs541266970, rs541315860, rs541366666, rs541367642, rs541398892, rs541402971, rs541409178, rs541427093, rs541430545, rs541459305, rs541459340, rs541486448, rs541567341, rs541567689, rs541592935, rs541647894, rs541692196, rs541707256, rs541713807, rs541716874, rs541742460, rs541755056, rs541757854, rs541769827, rs541770455, rs541863728, rs541874831, rs541908658, rs541934692, rs541944926, rs541946027, rs541962485, rs541982808, rs541994265, rs542007547, rs542018417, rs542028103, rs542058118, rs542059695, rs542081380, rs542097948, rs542104344, rs542131893, rs542168681, rs542177383, rs542177770, rs542234790, rs542240142, rs542243412, rs542248840, rs542253630, rs542260282, rs542275357, rs542289092, rs542302835, rs542350451, rs542376944, rs542380660, rs542406107, rs542507595, rs542507812, rs542508455, rs542512613, rs542542891, rs542549766, rs542554989, rs542557040, rs542559647, rs542567187, rs542598592, rs542601588, rs542615446, rs542633304, rs542634986, rs542658576, rs542664720, rs542678508, rs542684762, rs542693025, rs542776001, rs542778044, rs542796889, rs542812402, rs542825899, rs542826315, rs542842093, rs542842120, rs542846833, rs542854904, rs542861970, rs542898342, rs542912800, rs542913131, rs542951773, rs542956819, rs542965239, rs542966765, rs542973961, rs543014493, rs543023462, rs543026364, rs543041319, rs543057223, rs543061889, rs543116418, rs543136662, rs543170526, rs543183524, rs543190410, rs543191218, rs543197545, rs543244890, rs543266369, rs543277980, rs543297141, rs543306481, rs543340697, rs543357820, rs543360415, rs543365386, rs543378643, rs543398438, rs543418213, rs543440883, rs543453950, rs543456923, rs543478848, rs543486531, rs543492036, rs543504278, rs543515460, rs543548208, rs543580630, rs543626289, rs543645107, rs543652217, rs543667490, rs543680171, rs543709860, rs543710641, rs543746758, rs543748547, rs543761733, rs543786932, rs543820764, rs543824879, rs543828337, rs543842732, rs543844404, rs543856483, rs543861137, rs543891119, rs543903877, rs543921654, rs543924500, rs543981361, rs543986127, rs544019562, rs544032979, rs544040658, rs544042331, rs544044503, rs544082771, rs544100165, rs544150024, rs544151393, rs544154096, rs544214957, rs544240367, rs544304020, rs544310366, rs544330829, rs544344694, rs544358084, rs544395535, rs544411422, rs544416230, rs544421095, rs544425595, rs544456480, rs544494450, rs544504671, rs544519350, rs544533054, rs544539089, rs544542526, rs544568468, rs544584721, rs544605211, rs544644499, rs544657705, rs544665998, rs544670121, rs544688145, rs544700737, rs544705969, rs544706718, rs544707144, rs544716376, rs544722759, rs544754959, rs544757006, rs544769087, rs544785664, rs544849655, rs544937294, rs544947403, rs544985238, rs544991591, rs545008890, rs545009215, rs545017224, rs545046009, rs545071050, rs545081348, rs545139677, rs545149552, rs545179860, rs545193684, rs545195262, rs545227365, rs545232338, rs545232439, rs545235482, rs545242887, rs545299061, rs545303109, rs545345097, rs545409467, rs545409539, rs545414964, rs545444224, rs545455599, rs545492155, rs545495670, rs545523992, rs545550222, rs545592666, rs545606741, rs545648788, rs545675880, rs545732023, rs545732271, rs545739136, rs545741532, rs545759731, rs545761021, rs545776878, rs545793792, rs545796364, rs545857083, rs545911342, rs545948110, rs545956291, rs545962159, rs545969588, rs545973938, rs545998966, rs546008140, rs546008345, rs546014374, rs546029241, rs546036916, rs546083126, rs546137288, rs546137883, rs546143136, rs546145820, rs546203235, rs546217072, rs546228291, rs546242610, rs546280486, rs546293866, rs546300741, rs546352380, rs546358544, rs546386225, rs546420121, rs546429140, rs546447647, rs546481553, rs546483485, rs546511683, rs546511696, rs546520320, rs546523667, rs546541593, rs546556057, rs546599790, rs546627527, rs546657705, rs546669145, rs546716663, rs546728081, rs546782904, rs546818698, rs546830702, rs546832214, rs546843461, rs546856988, rs546869097, rs546907514, rs546921076, rs546943754, rs546956028, rs546985009, rs546994791, rs547050840, rs547060457, rs547070690, rs547073481, rs547081531, rs547116992, rs547120533, rs547122199, rs547145844, rs547169964, rs547175437, rs547197538, rs547267939, rs547296655, rs547334191, rs547337091, rs547339888, rs547341159, rs547347487, rs547363341, rs547373501, rs547405273, rs547412827, rs547417697, rs547457123, rs547468537, rs547475432, rs547481050, rs547502608, rs547524589, rs547595815, rs547597226, rs547633241, rs547634403, rs547634906, rs547658975, rs547666248, rs547691598, rs547700457, rs547733544, rs547743314, rs547746564, rs547748412, rs547757550, rs547773779, rs547842300, rs547849221, rs547855680, rs547903745, rs547968911, rs547969614, rs547978560, rs547988852, rs548036093, rs548042991, rs548059808, rs548094796, rs548142064, rs548155267, rs548171415, rs548179322, rs548190624, rs548193928, rs548201458, rs548253505, rs548266722, rs548276838, rs548289228, rs548327130, rs548343140, rs548473807, rs548477236, rs548480656, rs548505100, rs548585447, rs548586303, rs548599725, rs548601686, rs548641119, rs548658461, rs548658766, rs548691976, rs548720104, rs548724978, rs548761233, rs548761712, rs548781444, rs548791933, rs548803985, rs548872275, rs548872310, rs548908572, rs548926116, rs548949637, rs548967792, rs548987312, rs548996079, rs549000092, rs549082185, rs549089692, rs549102861, rs549113765, rs549126681, rs549137174, rs549156861, rs549158415, rs549213480, rs549220328, rs549221531, rs549222057, rs549228298, rs549259617, rs549282379, rs549302767, rs549330830, rs549344196, rs549372223, rs549380336, rs549443992, rs549444458, rs549448784, rs549478583, rs549487369, rs549498893, rs549524800, rs549537319, rs549569550, rs549587061, rs549600706, rs549612470, rs549670858, rs549694743, rs549709545, rs549748633, rs549752036, rs549754992, rs549759981, rs549783331, rs549785648, rs549786357, rs549788613, rs549817733, rs549829467, rs549863687, rs549880325, rs549892079, rs549924919, rs549925956, rs549932430, rs549936280, rs549943676, rs549950423, rs549989692, rs549990666, rs550017526, rs550024457, rs550051435, rs550053938, rs550067549, rs550074526, rs550075113, rs550118071, rs550120434, rs550123121, rs550159447, rs550204386, rs550215468, rs550223478, rs550236931, rs550243414, rs550254559, rs550289701, rs550300431, rs550312534, rs550346510, rs550349867, rs550403854, rs550413171, rs550445339, rs550449243, rs550451820, rs550455289, rs550471925, rs550499052, rs550513858, rs550533379, rs550534708, rs550539219, rs550566820, rs550573085, rs550620255, rs550635790, rs550636870, rs550653683, rs550699657, rs550700433, rs550728041, rs550735655, rs550805188, rs550856718, rs550870443, rs550871489, rs550913584, rs550929356, rs550933817, rs550968620, rs550982284, rs550982706, rs550992298, rs551014092, rs551025448, rs551028855, rs551047810, rs551050746, rs551079044, rs551105271, rs551130164, rs551201002, rs551206702, rs551207711, rs551231923, rs551241144, rs551265872, rs551273445, rs551295452, rs551297874, rs551302747, rs551310327, rs551340020, rs551387078, rs551458005, rs551472869, rs551483155, rs551502248, rs551550670, rs551557201, rs551614043, rs551617094, rs551618372, rs551648268, rs551676659, rs551688296, rs551710825, rs551712900, rs551732975, rs551762014, rs551795817, rs551821617, rs551870538, rs551896138, rs551896445, rs551903283, rs551912969, rs551962123, rs552014706, rs552018168, rs552024012, rs552031926, rs552067672, rs552096972, rs552106593, rs552132050, rs552133953, rs552206037, rs552245001, rs552275005, rs552287947, rs552311070, rs552311202, rs552324771, rs552346500, rs552396801, rs552437952, rs552504439, rs552516583, rs552572217, rs552578080, rs552578402, rs552600855, rs552622819, rs552634476, rs552649324, rs552659893, rs552664351, rs552692070, rs552692877, rs552722671, rs552728228, rs552743426, rs552754829, rs552757412, rs552779754, rs552827699, rs552839456, rs552854170, rs552859234, rs552938583, rs552945795, rs552977915, rs552991106, rs553006369, rs553016571, rs553073682, rs553076132, rs553077181, rs553100155, rs553115927, rs553167434, rs553183028, rs553191197, rs553195492, rs553321032, rs553326234, rs553336363, rs553342212, rs553367397, rs553386469, rs553386861, rs553431330, rs553445420, rs553453240, rs553484075, rs553493099, rs553505465, rs553514026, rs553592537, rs553628623, rs553641512, rs553665272, rs553667217, rs553684629, rs553684637, rs553699474, rs553746034, rs553746177, rs553766948, rs553770579, rs553772540, rs553797570, rs553803595, rs553819143, rs553825078, rs553863925, rs553884758, rs553891646, rs553898839, rs553911768, rs553914331, rs553916232, rs553954971, rs553969634, rs553993343, rs554016433, rs554043336, rs554055458, rs554077291, rs554085338, rs554148246, rs554174244, rs554174726, rs554232846, rs554238766, rs554241215, rs554250096, rs554264062, rs554279980, rs554284888, rs554321394, rs554343188, rs554375674, rs554384636, rs554406483, rs554430801, rs554488994, rs554521113, rs554543006, rs554553697, rs554557882, rs554575729, rs554579459, rs554592373, rs554624107, rs554626205, rs554644338, rs554660958, rs554683012, rs554683283, rs554715772, rs554807412, rs554828902, rs554836385, rs554856686, rs554865558, rs554886441, rs554892805, rs554911817, rs554942949, rs554960975, rs554965313, rs555040319, rs555085786, rs555101900, rs555179650, rs555182804, rs555192707, rs555204764, rs555206754, rs555207656, rs555243472, rs555269037, rs555285018, rs555289623, rs555296009, rs555303002, rs555311311, rs555344896, rs555353249, rs555353393, rs555358153, rs555375156, rs555402666, rs555413209, rs555418996, rs555427878, rs555428270, rs555435203, rs555473109, rs555483485, rs555512296, rs555513880, rs555514205, rs555514868, rs555538066, rs555540259, rs555558228, rs555574967, rs555577833, rs555581612, rs555592929, rs555642561, rs555646013, rs555651836, rs555664087, rs555670623, rs555685421, rs555685461, rs555686513, rs555698065, rs555708863, rs555737792, rs555746571, rs555796577, rs555801676, rs555824173, rs555832059, rs555836700, rs555848696, rs555878380, rs555895039, rs555898102, rs555945716, rs555976799, rs555985389, rs556007633, rs556023710, rs556024490, rs556044392, rs556123991, rs556149902, rs556166603, rs556184486, rs556207999, rs556229165, rs556231643, rs556243317, rs556296471, rs556310748, rs556330243, rs556352918, rs556354645, rs556366627, rs556389498, rs556427902, rs556433491, rs556442195, rs556454812, rs556495676, rs556508828, rs556544090, rs556546737, rs556566226, rs556621148, rs556669556, rs556688262, rs556691088, rs556704543, rs556747560, rs556763263, rs556797139, rs556840575, rs556871777, rs556889865, rs556917820, rs556931276, rs556932895, rs556933569, rs556953659, rs557011160, rs557034144, rs557035767, rs557036535, rs557067244, rs557068809, rs557070024, rs557095949, rs557097021, rs557206524, rs557222343, rs557237190, rs557239096, rs557266846, rs557290099, rs557293088, rs557297084, rs557314184, rs557328722, rs557344968, rs557354380, rs557355854, rs557365326, rs557401895, rs557453730, rs557464266, rs557468828, rs557474098, rs557488835, rs557492438, rs557537398, rs557556421, rs557566859, rs557576131, rs557617597, rs557629939, rs557643801, rs557658322, rs557683128, rs557708324, rs557714851, rs557740452, rs557753928, rs557756238, rs557774977, rs557808398, rs557821332, rs557867964, rs557871708, rs557871732, rs557885297, rs557888932, rs557900508, rs557919569, rs557931761, rs557942448, rs557943477, rs557953708, rs557979030, rs558033064, rs558075776, rs558080410, rs558083987, rs558124987, rs558143436, rs558161049, rs558178919, rs558188743, rs558211730, rs558222295, rs558226127, rs558228232, rs558241075, rs558242851, rs558243262, rs558263013, rs558275992, rs558279845, rs558295789, rs558298509, rs558377547, rs558387213, rs558410153, rs558423765, rs558426895, rs558433532, rs558458524, rs558469884, rs558482289, rs558500871, rs558539046, rs558555533, rs558560081, rs558560767, rs558562520, rs558568700, rs558579453, rs558593683, rs558614857, rs558632951, rs558653827, rs558681927, rs558737810, rs558822571, rs558835066, rs558840385, rs558842380, rs558874552, rs558876256, rs558938500, rs558956496, rs558958304, rs558958448, rs558961119, rs558970729, rs558972912, rs559004289, rs559025806, rs559031202, rs559061815, rs559068103, rs559080592, rs559090662, rs559091089, rs559095370, rs559097304, rs559103202, rs559126100, rs559147347, rs559179879, rs559188234, rs559221897, rs559222356, rs559232826, rs559250311, rs559253225, rs559253951, rs559254924, rs559270258, rs559312086, rs559338929, rs559351282, rs559354961, rs559358883, rs559395466, rs559411985, rs559439690, rs559603654, rs559624801, rs559628779, rs559639859, rs559639917, rs559643541, rs559667070, rs559750311, rs559753767, rs559755647, rs559776047, rs559787276, rs559790278, rs559797575, rs559838776, rs559851019, rs559877661, rs559885388, rs559887613, rs559929442, rs559930839, rs559940546, rs559977565, rs559977917, rs559984460, rs560003900, rs560004590, rs560037759, rs560047807, rs560056734, rs560069060, rs560111889, rs560130050, rs560152340, rs560187379, rs560190724, rs560202509, rs560225827, rs560238571, rs560266955, rs560279436, rs560314936, rs560320132, rs560342098, rs560367098, rs560371411, rs560381088, rs560410134, rs560421259, rs560423646, rs560425159, rs560438506, rs560471507, rs560494063, rs560546798, rs560546839, rs560578789, rs560582039, rs560594283, rs560594298, rs560607205, rs560649412, rs560704616, rs560705020, rs560710003, rs560733991, rs560743335, rs560783702, rs560815894, rs560816930, rs560854001, rs560872215, rs560874670, rs560874976, rs560910196, rs560940567, rs560944117, rs560971858, rs561004024, rs561070608, rs561084679, rs561087831, rs561104165, rs561115340, rs561131254, rs561147685, rs561167952, rs561190092, rs561200635, rs561205677, rs561211779, rs561225057, rs561226646, rs561235588, rs561257138, rs561278176, rs561311140, rs561351024, rs561354276, rs561376500, rs561381089, rs561397483, rs561437281, rs561474892, rs561496884, rs561508201, rs561543266, rs561546456, rs561564379, rs561618693, rs561636191, rs561641784, rs561658362, rs561674488, rs561696791, rs561698735, rs561734272, rs561742558, rs561751771, rs561760787, rs561763899, rs561776187, rs561783333, rs561788860, rs561807563, rs561822728, rs561848597, rs561913733, rs561940336, rs561966041, rs561981459, rs561992984, rs562005406, rs562027505, rs562042325, rs562052754, rs562055646, rs562073899, rs562077814, rs562184290, rs562190639, rs562195817, rs562200715, rs562201386, rs562222921, rs562259095, rs562296029, rs562301102, rs562330859, rs562361637, rs562398660, rs562411383, rs562428378, rs562429039, rs562472875, rs562474083, rs562499390, rs562502981, rs562518296, rs562537500, rs562576682, rs562586010, rs562592135, rs562604240, rs562646943, rs562694686, rs562701990, rs562702008, rs562735318, rs562761748, rs562766209, rs562786908, rs562850505, rs562859383, rs562887241, rs562951391, rs562963945, rs562985718, rs562989945, rs563009989, rs563015794, rs563020204, rs563041954, rs563046032, rs563076393, rs563111918, rs563117557, rs563144685, rs563154190, rs563207634, rs563219283, rs563220275, rs563220904, rs563252422, rs563258778, rs563284613, rs563294903, rs563313396, rs563346959, rs563404659, rs563411548, rs563422661, rs563429575, rs563441006, rs563448896, rs563466707, rs563505576, rs563526939, rs563530065, rs563550272, rs563551412, rs563598277, rs563613320, rs563622309, rs563623740, rs563645814, rs563658609, rs563712177, rs563727062, rs563751768, rs563794992, rs563805900, rs563821829, rs563830373, rs563841485, rs563863560, rs563869873, rs563873528, rs563876362, rs563891991, rs563946766, rs563994934, rs564005434, rs564014160, rs564033115, rs564056909, rs564065411, rs564070076, rs564073000, rs564076873, rs564090026, rs564092296, rs564093101, rs564134748, rs564148225, rs564153776, rs564180188, rs564202543, rs564252757, rs564279828, rs564289853, rs564335267, rs564367189, rs564381902, rs564433339, rs564433931, rs564449838, rs564453588, rs564581136, rs564583098, rs564597229, rs564621190, rs564633379, rs564648051, rs564657327, rs564657630, rs564666850, rs564675952, rs564690192, rs564729926, rs564730232, rs564732761, rs564771314, rs564799063, rs564825469, rs564826837, rs564828126, rs564829583, rs564829676, rs564857751, rs564857865, rs564866736, rs564867382, rs564872677, rs564898211, rs564964306, rs565006345, rs565014848, rs565037666, rs565050722, rs565081910, rs565084895, rs565120011, rs565134598, rs565138930, rs565170976, rs565173395, rs565177723, rs565217457, rs565232426, rs565242883, rs565245977, rs565252277, rs565290157, rs565317513, rs565409569, rs565449172, rs565458639, rs565484650, rs565496426, rs565527045, rs565544613, rs565574170, rs565593185, rs565597963, rs565652113, rs565665650, rs565715165, rs565755698, rs565770991, rs565773768, rs565788008, rs565843502, rs565848828, rs565866101, rs565873488, rs565915424, rs565950600, rs565992728, rs566064429, rs566074218, rs566083645, rs566096105, rs566100866, rs566104082, rs566173296, rs566176964, rs566183538, rs566207739, rs566225431, rs566235985, rs566275396, rs566293360, rs566343585, rs566343677, rs566377142, rs566385541, rs566396718, rs566428995, rs566441893, rs566467923, rs566474467, rs566510633, rs566513005, rs566564426, rs566565286, rs566587432, rs566603145, rs566613145, rs566625105, rs566629531, rs566640218, rs566667289, rs566694408, rs566789430, rs566795434, rs566813304, rs566838066, rs566854224, rs566887544, rs566894713, rs566920272, rs566936368, rs566977993, rs566993570, rs567035382, rs567095039, rs567100760, rs567106750, rs567141174, rs567143000, rs567144017, rs567146576, rs567164050, rs567173438, rs567265146, rs567266096, rs567285000, rs567348644, rs567367425, rs567425067, rs567425184, rs567432987, rs567438012, rs567472438, rs567557856, rs567567865, rs567630298, rs567640454, rs567646750, rs567657899, rs567658214, rs567666203, rs567668029, rs567677214, rs567681587, rs567685260, rs567710801, rs567741774, rs567785643, rs567805427, rs567815611, rs567817320, rs567883001, rs567907738, rs567908722, rs567920360, rs567922566, rs567924889, rs567966932, rs567967626, rs567995268, rs568003211, rs568043896, rs568066275, rs568085426, rs568114704, rs568130054, rs568165033, rs568186755, rs568211775, rs568213469, rs568227170, rs568270993, rs568277326, rs568291598, rs568307918, rs568310813, rs568318553, rs568335516, rs568357670, rs568366371, rs568411640, rs568442665, rs568445754, rs568490697, rs568493223, rs568500863, rs568534632, rs568543993, rs568595232, rs568604210, rs568606634, rs568615768, rs568618069, rs568630537, rs568642514, rs568659326, rs568679333, rs568681116, rs568689020, rs568691857, rs568719476, rs568757148, rs568773474, rs568853166, rs568862371, rs568862503, rs568864213, rs568864605, rs568866422, rs568867915, rs568876382, rs568882035, rs568891911, rs568919181, rs568957863, rs568966319, rs568969712, rs569009135, rs569026294, rs569031292, rs569052356, rs569064135, rs569091911, rs569127086, rs569150154, rs569181044, rs569190732, rs569191052, rs569243823, rs569255577, rs569257316, rs569346076, rs569353039, rs569357658, rs569393990, rs569445471, rs569477989, rs569480049, rs569484273, rs569491273, rs569527467, rs569530395, rs569534859, rs569568135, rs569570726, rs569581081, rs569587845, rs569589906, rs569610949, rs569663922, rs569721996, rs569806098, rs569814810, rs569841512, rs569866803, rs569878777, rs569886780, rs569929335, rs569948713, rs569948771, rs569961711, rs569998236, rs570000584, rs570021743, rs570048709, rs570069716, rs570074821, rs570109071, rs570110576, rs570140087, rs570151752, rs570159928, rs570173925, rs570193403, rs570221409, rs570224967, rs570229661, rs570252378, rs570321193, rs570352373, rs570363198, rs570368440, rs570387018, rs570422510, rs570433998, rs570460375, rs570465981, rs570475979, rs570487266, rs570503387, rs570513276, rs570513549, rs570521516, rs570546799, rs570574586, rs570576208, rs570601355, rs570629186, rs570637483, rs570672634, rs570682809, rs570702509, rs570724387, rs570736371, rs570761646, rs570793492, rs570797390, rs570864628, rs570920593, rs570948880, rs570969817, rs571086051, rs571109914, rs571121532, rs571126482, rs571136886, rs571142835, rs571167517, rs571198275, rs571252871, rs571256839, rs571263070, rs571269068, rs571285328, rs571287574, rs571307720, rs571358940, rs571373536, rs571391973, rs571424673, rs571436740, rs571441555, rs571446170, rs571452875, rs571453738, rs571478608, rs571509086, rs571572710, rs571582165, rs571613563, rs571645961, rs571653220, rs571675499, rs571677082, rs571705056, rs571709615, rs571714282, rs571781493, rs571840532, rs571906597, rs571926664, rs571947327, rs571969957, rs571983509, rs572020006, rs572021498, rs572038316, rs572052273, rs572054545, rs572060030, rs572096653, rs572097275, rs572115248, rs572120864, rs572123922, rs572136171, rs572150598, rs572171035, rs572186321, rs572211788, rs572229361, rs572265203, rs572267769, rs572330298, rs572346722, rs572348353, rs572368533, rs572415436, rs572438673, rs572441645, rs572467913, rs572483391, rs572502792, rs572518966, rs572531194, rs572545330, rs572579609, rs572580730, rs572615995, rs572616833, rs572635985, rs572639180, rs572674403, rs572691272, rs572700146, rs572749618, rs572795323, rs572925316, rs572935927, rs572966826, rs572970137, rs573027397, rs573079591, rs573098514, rs573131983, rs573147745, rs573154733, rs573180293, rs573214694, rs573219124, rs573312551, rs573314963, rs573328063, rs573334202, rs573368276, rs573400742, rs573404035, rs573431020, rs573459802, rs573467770, rs573474636, rs573474957, rs573475161, rs573481860, rs573489484, rs573506565, rs573515465, rs573538317, rs573563623, rs573588964, rs573596022, rs573598762, rs573600683, rs573612411, rs573617550, rs573620358, rs573624891, rs573656283, rs573674807, rs573713401, rs573713539, rs573714209, rs573786969, rs573787669, rs573809259, rs573874572, rs573910282, rs573924986, rs573937713, rs573941367, rs573944302, rs573944366, rs573973404, rs573982558, rs574009404, rs574034672, rs574062214, rs574066523, rs574070380, rs574109062, rs574140178, rs574185078, rs574198435, rs574199963, rs574208174, rs574212184, rs574222467, rs574223087, rs574262757, rs574268542, rs574296226, rs574303233, rs574305237, rs574319929, rs574336277, rs574354215, rs574354692, rs574358519, rs574377325, rs574406502, rs574482034, rs574491973, rs574498055, rs574513079, rs574598867, rs574614724, rs574626654, rs574628330, rs574652598, rs574666154, rs574687613, rs574688438, rs574689017, rs574689498, rs574694946, rs574704860, rs574744097, rs574747776, rs574748322, rs574789682, rs574843366, rs574882099, rs574887258, rs574905277, rs574922221, rs574936600, rs574956216, rs574966207, rs574985000, rs574992301, rs575000035, rs575003532, rs575023891, rs575059088, rs575125951, rs575128726, rs575169271, rs575185898, rs575199990, rs575208285, rs575208824, rs575259798, rs575295591, rs575301784, rs575315146, rs575332636, rs575348578, rs575372434, rs575490448, rs575499890, rs575537077, rs575589715, rs575617513, rs575667479, rs575696682, rs575703572, rs575705515, rs575728271, rs575730251, rs575742331, rs575750344, rs575756035, rs575806309, rs575810563, rs575844664, rs575861846, rs575868362, rs575874733, rs575880396, rs575975011, rs576034791, rs576041684, rs576041999, rs576060619, rs576096154, rs576104938, rs576105747, rs576121793, rs576148709, rs576162918, rs576169338, rs576189398, rs576192176, rs576203855, rs576213823, rs576225381, rs576250181, rs576257223, rs576274670, rs576288731, rs576331663, rs576340044, rs576417527, rs576429830, rs576437244, rs576448273, rs576488382, rs576510807, rs576530716, rs576575989, rs576582253, rs576605698, rs576615970, rs576643572, rs576648311, rs576677016, rs576686115, rs576699703, rs576727961, rs576748500, rs576789811, rs576789881, rs576796157, rs576828470, rs576868903, rs576881477, rs576894335, rs576910153, rs576938811, rs576949692, rs576954576, rs576973742, rs576986079, rs577027849, rs577030171, rs577045990, rs577051367, rs577052761, rs577060512, rs577085059, rs577113716, rs577124138, rs577161588, rs577181749, rs577183634, rs577203387, rs577208030, rs577221385, rs577239264, rs577246816, rs577268088, rs577296126, rs577298394, rs577323521, rs577327969, rs577352558, rs577365101, rs577378792, rs577384657, rs577390212, rs577404889, rs577414646, rs577435677, rs577450989, rs577475998, rs577551568, rs577565093, rs577589539, rs577591202, rs577611795, rs577614445, rs577626631, rs577627488, rs577628237, rs577634321, rs577638833, rs577668226, rs577696180, rs577699229, rs577720785, rs577749628, rs577750883, rs577787748, rs577788075, rs577812539, rs577812820, rs577915421, rs577919089, rs577921291, rs577938875, rs577984312, rs578013360, rs578041466, rs578045667, rs578060396, rs578089411, rs578107858, rs578113204, rs578132050, rs578149762, rs578158766, rs578173928, rs578212105, rs578215671, rs578225489, rs578245319, rs745315296, rs745318650, rs745319959, rs745334947, rs745395008, rs745407244, rs745432430, rs745461512, rs745471860, rs745478656, rs745480625, rs745485822, rs745516127, rs745523699, rs745531379, rs745560171, rs745569890, rs745585941, rs745592410, rs745611412, rs745611459, rs745619089, rs745633737, rs745635732, rs745663603, rs745676172, rs745679367, rs745714743, rs745744959, rs745757029, rs745770238, rs745785781, rs745787312, rs745794711, rs745800568, rs745807204, rs745873740, rs745882036, rs745883311, rs745887124, rs745907084, rs745924988, rs745953839, rs745977490, rs745978810, rs745979771, rs745994468, rs746057067, rs746068853, rs746077387, rs746080251, rs746081808, rs746086394, rs746092663, rs746117999, rs746132552, rs746155300, rs746167532, rs746172264, rs746179240, rs746186324, rs746199801, rs746213199, rs746253375, rs746267206, rs746280628, rs746295460, rs746306878, rs746327534, rs746329179, rs746341210, rs746342948, rs746354582, rs746356050, rs746356785, rs746365532, rs746421519, rs746430922, rs746432975, rs746434226, rs746447811, rs746460149, rs746474164, rs746517655, rs746533827, rs746541541, rs746543177, rs746562037, rs746603188, rs746625332, rs746631845, rs746644721, rs746645618, rs746674227, rs746693085, rs746735357, rs746806437, rs746813741, rs746835040, rs746836925, rs746951692, rs746975918, rs746997882, rs747014873, rs747020921, rs747033346, rs747068079, rs747071017, rs747088267, rs747110768, rs747127669, rs747133665, rs747144005, rs747154405, rs747191029, rs747191078, rs747202561, rs747206431, rs747220233, rs747221382, rs747244551, rs747246620, rs747265126, rs747266271, rs747321677, rs747328621, rs747340723, rs747421149, rs747436434, rs747440908, rs747486060, rs747500261, rs747514590, rs747515000, rs747566971, rs747587084, rs747596637, rs747601892, rs747606241, rs747634376, rs747639610, rs747683735, rs747692058, rs747697115, rs747727939, rs747729571, rs747732656, rs747732868, rs747741477, rs747759447, rs747774420, rs747775853, rs747778406, rs747789456, rs747800103, rs747830933, rs747834645, rs747867430, rs747868672, rs747874389, rs747930970, rs747940081, rs747942142, rs747947121, rs747956002, rs748009011, rs748042770, rs748055187, rs748065032, rs748084078, rs748084160, rs748090240, rs748125790, rs748136150, rs748137838, rs748150807, rs748178218, rs748193069, rs748207433, rs748234658, rs748264499, rs748270038, rs748345963, rs748348009, rs748356261, rs748365841, rs748376205, rs748381703, rs748381785, rs748384145, rs748384691, rs748391337, rs748434793, rs748456748, rs748465586, rs748474040, rs748478249, rs748500530, rs748528409, rs748547974, rs748551882, rs748561832, rs748574513, rs748639800, rs748646041, rs748666992, rs748724419, rs748724603, rs748729491, rs748759806, rs748787570, rs748838859, rs748840991, rs748864120, rs748877870, rs748880307, rs748896099, rs749009443, rs749052489, rs749065083, rs749091684, rs749093172, rs749097505, rs749139269, rs749145676, rs749149544, rs749185627, rs749192827, rs749210025, rs749218069, rs749224938, rs749243716, rs749253929, rs749257119, rs749258391, rs749304471, rs749310357, rs749314869, rs749322476, rs749324964, rs749327672, rs749348202, rs749357531, rs749371189, rs749408057, rs749411157, rs749411596, rs749485564, rs749508202, rs749524871, rs749563243, rs749585499, rs749587415, rs749589172, rs749620549, rs749624885, rs749627416, rs749674779, rs749706608, rs749710676, rs749715177, rs749729461, rs749733886, rs749741899, rs749773190, rs749774627, rs749778825, rs749796720, rs749834680, rs749850385, rs749851404, rs749881643, rs749897321, rs749906803, rs749988903, rs750036029, rs750042656, rs750054336, rs750084655, rs750089137, rs750093108, rs750131745, rs750146717, rs750153252, rs750181263, rs750183882, rs750196852, rs750242182, rs750275282, rs750277375, rs750287080, rs750302340, rs750309209, rs750318745, rs750326314, rs750328702, rs750330971, rs750351701, rs750351743, rs750356826, rs750371516, rs750392281, rs750437017, rs750448145, rs750455181, rs750465555, rs750492260, rs750508574, rs750535541, rs750559004, rs750560400, rs750607964, rs750614081, rs750632035, rs750632989, rs750640961, rs750674856, rs750687107, rs750716930, rs750729591, rs750771065, rs750776802, rs750803688, rs750804737, rs750805713, rs750847349, rs750848136, rs750850386, rs750854573, rs750883662, rs750899367, rs750909590, rs750927516, rs750937215, rs750960186, rs750983508, rs751000311, rs751034729, rs751079107, rs751089123, rs751100395, rs751126697, rs751138290, rs751162196, rs751173648, rs751204004, rs751218623, rs751231031, rs751240211, rs751248249, rs751252006, rs751258496, rs751265332, rs751266952, rs751287386, rs751306355, rs751316708, rs751377525, rs751383554, rs751406584, rs751423558, rs751438588, rs751449669, rs751478590, rs751478789, rs751481895, rs751488866, rs751492438, rs751518197, rs751550613, rs751584166, rs751613022, rs751620169, rs751636022, rs751691786, rs751699460, rs751702956, rs751704251, rs751737186, rs751743550, rs751751852, rs751807691, rs751839965, rs751849869, rs751878815, rs751880403, rs751902364, rs751946722, rs751949848, rs751959872, rs751964540, rs751968737, rs751971554, rs752008452, rs752056918, rs752057056, rs752090962, rs752091020, rs752149983, rs752156384, rs752164011, rs752206234, rs752211493, rs752226264, rs752227315, rs752234992, rs752269625, rs752278300, rs752278514, rs752288722, rs752302084, rs752317090, rs752324663, rs752331233, rs752356805, rs752358768, rs752365040, rs752371036, rs752373530, rs752377658, rs752384372, rs752406937, rs752426528, rs752451755, rs752463475, rs752469542, rs752472450, rs752500419, rs752513630, rs752529114, rs752539748, rs752561295, rs752575525, rs752603299, rs752629316, rs752638310, rs752638552, rs752645699, rs752650519, rs752700193, rs752721284, rs752755397, rs752804500, rs752816895, rs752824842, rs752905800, rs752934445, rs752955449, rs752955614, rs752966966, rs752973165, rs752983643, rs753005775, rs753033228, rs753035324, rs753096093, rs753100804, rs753102456, rs753108195, rs753122988, rs753128499, rs753139005, rs753148931, rs753156905, rs753168683, rs753208089, rs753221943, rs753240896, rs753241753, rs753295523, rs753344740, rs753353470, rs753355397, rs753361323, rs753392622, rs753428298, rs753461923, rs753484009, rs753517879, rs753524429, rs753550708, rs753567543, rs753571028, rs753580704, rs753584720, rs753584807, rs753599720, rs753600270, rs753603546, rs753620739, rs753682663, rs753689981, rs753692407, rs753699935, rs753701036, rs753718119, rs753736290, rs753754767, rs753780233, rs753800860, rs753822608, rs753832640, rs753838439, rs753847716, rs753875885, rs753896411, rs753901183, rs753912919, rs753915762, rs753916339, rs753922664, rs753923921, rs753931384, rs753959561, rs753965460, rs753996858, rs754013172, rs754020005, rs754078781, rs754106474, rs754107825, rs754172338, rs754185139, rs754195402, rs754220628, rs754244922, rs754272313, rs754272339, rs754276115, rs754331062, rs754354287, rs754364857, rs754376925, rs754383875, rs754399225, rs754411325, rs754413855, rs754416694, rs754429968, rs754458527, rs754476000, rs754476298, rs754490723, rs754501927, rs754522190, rs754553496, rs754564637, rs754574255, rs754577716, rs754581855, rs754593844, rs754615696, rs754615908, rs754652621, rs754669072, rs754688774, rs754702595, rs754703283, rs754708794, rs754712199, rs754713577, rs754715363, rs754733184, rs754757300, rs754757826, rs754765622, rs754785710, rs754802007, rs754830890, rs754836609, rs754837758, rs754840419, rs754886121, rs754927658, rs754960379, rs754963469, rs754980802, rs754992156, rs755028794, rs755054172, rs755068618, rs755070858, rs755078114, rs755083385, rs755104103, rs755142051, rs755156095, rs755196476, rs755212797, rs755244748, rs755256587, rs755266027, rs755298380, rs755313528, rs755324604, rs755343630, rs755386197, rs755387331, rs755401792, rs755422874, rs755429979, rs755438445, rs755444437, rs755483753, rs755496772, rs755511574, rs755534226, rs755536163, rs755544484, rs755560614, rs755564321, rs755567145, rs755634576, rs755650404, rs755650835, rs755657496, rs755664266, rs755677483, rs755685818, rs755698564, rs755729528, rs755740653, rs755771909, rs755796746, rs755814504, rs755830181, rs755852761, rs755897131, rs755905177, rs755956232, rs755961634, rs755967486, rs755969276, rs755971028, rs755991771, rs756005827, rs756016863, rs756035781, rs756062409, rs756089561, rs756104883, rs756127051, rs756152319, rs756174809, rs756195908, rs756203673, rs756214658, rs756228372, rs756249878, rs756271997, rs756303961, rs756305895, rs756313466, rs756316577, rs756330409, rs756330822, rs756333572, rs756337091, rs756388395, rs756420905, rs756452432, rs756452535, rs756503018, rs756504569, rs756513418, rs756515149, rs756529360, rs756548758, rs756552464, rs756602752, rs756617340, rs756643575, rs756663367, rs756665591, rs756680854, rs756693966, rs756695851, rs756702684, rs756708841, rs756774592, rs756793105, rs756800364, rs756823400, rs756837605, rs756845642, rs756874433, rs756883267, rs756974817, rs756983711, rs757001970, rs757003479, rs757018929, rs757022978, rs757060336, rs757062312, rs757091598, rs757095827, rs757111669, rs757122815, rs757132242, rs757140627, rs757214513, rs757216300, rs757220179, rs757227369, rs757231719, rs757235949, rs757254794, rs757288645, rs757291156, rs757292995, rs757328631, rs757331915, rs757341708, rs757345746, rs757387622, rs757411956, rs757438118, rs757449541, rs757456987, rs757459453, rs757471892, rs757472882, rs757482228, rs757509494, rs757533882, rs757570197, rs757615332, rs757626697, rs757636425, rs757639937, rs757658305, rs757658990, rs757659499, rs757659783, rs757694908, rs757713328, rs757714565, rs757726372, rs757727938, rs757743174, rs757755018, rs757772989, rs757782242, rs757791729, rs757837884, rs757859007, rs757875369, rs757902958, rs757907466, rs757932506, rs757935641, rs757935844, rs757964420, rs758036318, rs758037630, rs758040015, rs758045117, rs758079288, rs758094016, rs758130813, rs758159022, rs758164134, rs758171035, rs758192191, rs758201006, rs758216753, rs758222122, rs758236592, rs758238267, rs758264910, rs758308632, rs758317442, rs758358655, rs758400494, rs758407556, rs758418998, rs758426214, rs758446070, rs758467561, rs758481896, rs758488032, rs758496252, rs758574780, rs758579815, rs758590609, rs758591903, rs758593840, rs758599582, rs758649877, rs758669886, rs758682249, rs758683525, rs758696583, rs758751124, rs758763139, rs758772203, rs758777978, rs758788292, rs758801498, rs758813321, rs758820660, rs758838263, rs758865376, rs758867630, rs758873477, rs758887103, rs758907138, rs758913603, rs758922929, rs758941184, rs758963066, rs758966889, rs758978429, rs759021734, rs759022959, rs759032100, rs759054642, rs759073476, rs759132872, rs759161089, rs759164027, rs759166813, rs759176239, rs759192827, rs759197248, rs759208702, rs759217614, rs759229661, rs759230162, rs759291392, rs759291961, rs759309157, rs759309320, rs759325047, rs759328970, rs759339215, rs759351270, rs759352583, rs759414772, rs759416039, rs759429230, rs759431953, rs759432904, rs759447758, rs759465471, rs759483123, rs759503348, rs759523306, rs759535974, rs759536006, rs759570005, rs759576140, rs759576261, rs759576461, rs759604270, rs759625189, rs759657914, rs759657946, rs759668834, rs759674075, rs759681082, rs759694846, rs759701828, rs759733056, rs759758242, rs759759879, rs759772492, rs759777495, rs759800790, rs759819617, rs759825988, rs759837652, rs759843743, rs759862548, rs759868059, rs759876364, rs759911211, rs759913866, rs759948068, rs759950550, rs759973374, rs760001648, rs760030771, rs760078042, rs760094342, rs760095881, rs760120940, rs760127250, rs760146525, rs760176974, rs760184983, rs760237321, rs760255266, rs760259723, rs760260086, rs760308919, rs760311941, rs760312199, rs760329887, rs760330268, rs760333198, rs760335096, rs760353735, rs760396293, rs760396822, rs760438858, rs760454063, rs760456390, rs760456526, rs760457584, rs760480925, rs760490040, rs760507780, rs760514242, rs760569537, rs760575817, rs760575873, rs760582280, rs760582488, rs760598147, rs760639923, rs760642920, rs760653482, rs760664133, rs760686060, rs760702436, rs760703003, rs760741175, rs760760621, rs760797197, rs760829633, rs760853012, rs760866567, rs760899064, rs760904155, rs760905935, rs760950734, rs760988112, rs760989697, rs761004468, rs761013433, rs761023846, rs761027270, rs761031955, rs761039517, rs761071947, rs761074078, rs761110533, rs761142785, rs761189023, rs761193792, rs761219892, rs761225405, rs761242693, rs761247187, rs761254864, rs761261676, rs761267820, rs761269448, rs761306561, rs761348729, rs761385371, rs761388865, rs761402379, rs761404071, rs761422453, rs761424488, rs761433806, rs761439574, rs761482569, rs761502580, rs761508456, rs761520179, rs761526630, rs761528639, rs761535438, rs761566068, rs761569200, rs761594954, rs761595406, rs761609064, rs761628193, rs761635755, rs761659153, rs761670383, rs761688518, rs761716912, rs761725865, rs761800270, rs761823722, rs761836780, rs761853186, rs761883129, rs761899255, rs761905519, rs761913897, rs761918345, rs761924050, rs761933816, rs761942605, rs761958156, rs762027899, rs762044760, rs762096343, rs762113977, rs762115985, rs762150244, rs762162470, rs762174146, rs762181273, rs762182617, rs762184183, rs762205415, rs762208259, rs762230052, rs762247080, rs762269142, rs762298494, rs762302215, rs762311341, rs762341438, rs762362247, rs762390121, rs762402758, rs762407710, rs762407787, rs762431451, rs762454272, rs762458416, rs762464635, rs762525267, rs762538193, rs762538544, rs762566243, rs762567928, rs762603295, rs762651527, rs762660066, rs762663504, rs762704520, rs762722369, rs762747915, rs762775732, rs762794461, rs762806899, rs762816857, rs762833319, rs762862123, rs762892445, rs762904090, rs762908870, rs762926547, rs762930876, rs762932132, rs762974195, rs762992992, rs763029096, rs763047401, rs763050707, rs763058339, rs763094692, rs763110451, rs763123890, rs763125819, rs763140516, rs763146472, rs763172445, rs763179426, rs763233471, rs763246513, rs763277041, rs763306317, rs763319845, rs763333395, rs763372607, rs763490692, rs763538565, rs763565219, rs763569497, rs763572133, rs763579875, rs763583124, rs763591135, rs763596225, rs763604078, rs763604387, rs763614297, rs763641464, rs763687300, rs763699129, rs763709033, rs763727389, rs763794406, rs763808537, rs763827191, rs763841414, rs763849172, rs763849405, rs763862027, rs763872476, rs763874911, rs763891363, rs763901605, rs763951587, rs763962941, rs763976197, rs763993981, rs764006437, rs764037693, rs764047092, rs764053104, rs764076208, rs764084503, rs764127035, rs764127862, rs764150335, rs764168415, rs764183354, rs764214915, rs764264233, rs764276684, rs764282735, rs764313940, rs764324737, rs764349950, rs764391776, rs764402862, rs764411450, rs764431247, rs764435955, rs764443778, rs764449329, rs764499820, rs764504332, rs764508262, rs764511015, rs764521658, rs764524722, rs764536288, rs764543300, rs764587698, rs764597240, rs764605947, rs764606264, rs764629608, rs764641545, rs764659026, rs764730445, rs764732830, rs764733235, rs764773927, rs764775183, rs764779216, rs764817390, rs764820810, rs764826228, rs764837082, rs764844031, rs764851419, rs764855146, rs764904088, rs764921127, rs764951514, rs764954702, rs764968426, rs765008415, rs765010982, rs765011609, rs765031358, rs765042484, rs765042931, rs765042989, rs765050183, rs765065073, rs765073173, rs765075073, rs765083150, rs765100816, rs765139263, rs765150761, rs765158048, rs765169321, rs765176279, rs765179691, rs765184415, rs765193216, rs765213972, rs765216800, rs765229754, rs765232732, rs765236691, rs765272423, rs765289795, rs765330874, rs765354172, rs765404902, rs765412655, rs765443790, rs765497646, rs765510780, rs765522251, rs765533412, rs765539201, rs765542338, rs765566902, rs765582074, rs765588329, rs765589277, rs765613883, rs765614178, rs765616379, rs765619606, rs765666570, rs765669860, rs765674103, rs765681507, rs765695405, rs765711500, rs765735723, rs765746248, rs765755614, rs765757636, rs765791566, rs765794434, rs765827224, rs765841237, rs765871208, rs765928032, rs765958943, rs765964430, rs765970147, rs765975656, rs765980422, rs765985507, rs765992791, rs765996925, rs766035705, rs766039451, rs766061261, rs766061712, rs766073856, rs766090180, rs766103493, rs766180555, rs766182624, rs766183026, rs766191781, rs766226591, rs766285599, rs766287782, rs766295755, rs766312283, rs766335446, rs766350794, rs766392992, rs766412650, rs766421092, rs766431790, rs766448187, rs766453258, rs766465623, rs766484782, rs766502725, rs766546264, rs766551973, rs766553361, rs766577884, rs766579916, rs766582583, rs766610032, rs766642883, rs766655295, rs766660380, rs766747628, rs766768316, rs766770190, rs766803619, rs766822471, rs766822723, rs766824679, rs766846184, rs766866878, rs766891604, rs766900801, rs766914480, rs766947123, rs766959738, rs766963588, rs766981349, rs766987750, rs767003514, rs767017316, rs767023594, rs767037910, rs767050502, rs767054210, rs767060205, rs767061327, rs767093383, rs767114204, rs767142167, rs767199743, rs767225064, rs767225222, rs767244489, rs767250118, rs767257232, rs767261811, rs767267515, rs767287280, rs767289789, rs767294648, rs767312980, rs767355557, rs767372823, rs767373933, rs767415840, rs767423747, rs767433114, rs767440099, rs767458030, rs767463811, rs767463925, rs767471284, rs767511981, rs767522633, rs767555656, rs767573192, rs767583834, rs767585328, rs767607973, rs767629128, rs767638442, rs767657279, rs767667906, rs767680492, rs767699593, rs767701986, rs767758634, rs767773533, rs767812024, rs767824384, rs767827202, rs767830456, rs767837166, rs767855993, rs767863427, rs767877040, rs767919233, rs767925638, rs767937872, rs767954393, rs767974621, rs767986205, rs768001251, rs768004265, rs768011872, rs768040755, rs768043024, rs768046184, rs768068169, rs768080301, rs768101668, rs768117419, rs768120322, rs768136703, rs768167348, rs768167950, rs768233376, rs768245025, rs768270925, rs768295034, rs768309008, rs768311848, rs768341098, rs768344266, rs768364419, rs768366011, rs768379715, rs768408178, rs768435389, rs768452279, rs768463890, rs768495609, rs768506933, rs768508999, rs768542979, rs768587753, rs768599482, rs768605505, rs768610463, rs768616339, rs768637677, rs768641797, rs768700432, rs768708432, rs768715563, rs768726009, rs768726559, rs768759882, rs768778321, rs768813341, rs768816420, rs768817679, rs768829267, rs768878426, rs768880510, rs768947066, rs768948129, rs769010099, rs769015936, rs769052516, rs769116866, rs769125660, rs769132082, rs769148504, rs769155199, rs769179651, rs769196287, rs769206958, rs769211581, rs769225495, rs769235241, rs769240482, rs769257618, rs769267794, rs769294209, rs769326602, rs769328663, rs769330531, rs769346043, rs769348514, rs769361405, rs769363403, rs769472105, rs769488375, rs769500350, rs769502709, rs769508250, rs769509714, rs769535269, rs769537795, rs769554299, rs769559576, rs769588501, rs769597017, rs769607386, rs769615714, rs769625973, rs769630716, rs769647139, rs769664746, rs769733962, rs769753900, rs769777839, rs769793724, rs769796175, rs769820670, rs769834798, rs769837684, rs769842268, rs769859916, rs769865430, rs769881652, rs769890980, rs769909261, rs769922724, rs769936420, rs769944737, rs769949537, rs769962473, rs769970000, rs770002198, rs770044744, rs770045780, rs770047656, rs770055839, rs770065156, rs770088954, rs770113010, rs770117015, rs770132766, rs770133894, rs770134792, rs770164669, rs770169780, rs770174258, rs770203058, rs770222518, rs770230051, rs770250685, rs770260967, rs770269263, rs770275325, rs770276401, rs770285250, rs770289860, rs770304568, rs770310728, rs770336781, rs770353836, rs770356331, rs770368083, rs770375482, rs770397256, rs770400281, rs770409077, rs770461103, rs770461544, rs770462779, rs770508163, rs770509571, rs770531981, rs770533594, rs770535258, rs770535571, rs770548944, rs770569370, rs770596069, rs770623367, rs770625093, rs770641602, rs770683131, rs770688909, rs770716960, rs770718988, rs770787622, rs770809641, rs770810081, rs770822922, rs770831498, rs770886135, rs770908165, rs770908727, rs770938457, rs770945681, rs770977155, rs770996353, rs770999982, rs771033723, rs771037091, rs771067030, rs771067224, rs771080369, rs771085660, rs771097419, rs771166644, rs771181530, rs771196226, rs771211524, rs771257865, rs771261599, rs771273897, rs771284575, rs771301346, rs771301631, rs771322983, rs771331354, rs771398981, rs771403149, rs771421558, rs771422606, rs771440276, rs771440679, rs771473443, rs771488471, rs771488949, rs771510504, rs771510753, rs771521399, rs771537864, rs771539297, rs771550017, rs771611981, rs771616321, rs771655814, rs771669148, rs771671274, rs771688315, rs771697578, rs771699299, rs771708173, rs771717166, rs771745467, rs771750819, rs771778166, rs771789577, rs771795797, rs771843383, rs771860535, rs771865605, rs771931304, rs771931422, rs771934121, rs771950831, rs771952619, rs771957122, rs771959737, rs772003233, rs772027290, rs772030079, rs772036693, rs772048264, rs772049296, rs772052534, rs772057182, rs772063608, rs772111458, rs772117785, rs772132139, rs772132948, rs772135728, rs772163708, rs772174100, rs772188460, rs772192008, rs772256024, rs772305999, rs772319101, rs772321893, rs772322376, rs772328240, rs772334754, rs772343910, rs772354252, rs772355035, rs772386789, rs772425521, rs772447077, rs772516940, rs772575741, rs772584723, rs772594161, rs772622545, rs772631134, rs772634501, rs772639620, rs772651378, rs772663915, rs772670906, rs772675451, rs772707550, rs772710626, rs772727744, rs772728471, rs772734115, rs772739311, rs772754688, rs772824442, rs772831432, rs772843791, rs772885925, rs772886068, rs772907995, rs772928717, rs772934063, rs772937747, rs772939278, rs772959666, rs772962328, rs772982450, rs773012384, rs773016976, rs773045370, rs773051256, rs773079127, rs773080361, rs773085642, rs773104033, rs773116244, rs773167085, rs773204516, rs773208574, rs773219040, rs773221335, rs773273345, rs773309296, rs773325271, rs773390238, rs773407627, rs773423194, rs773469361, rs773471397, rs773481692, rs773483288, rs773514110, rs773515175, rs773560221, rs773587227, rs773587355, rs773615468, rs773618365, rs773647098, rs773647204, rs773651781, rs773656743, rs773662523, rs773667298, rs773697718, rs773708368, rs773726978, rs773743169, rs773764944, rs773777965, rs773789836, rs773813442, rs773826481, rs773866011, rs773867661, rs773868096, rs773912893, rs773927795, rs773940772, rs773966388, rs773967004, rs773967274, rs774020424, rs774048357, rs774051723, rs774083612, rs774141387, rs774164745, rs774168458, rs774169669, rs774184986, rs774226413, rs774236348, rs774298607, rs774310462, rs774316243, rs774349482, rs774351561, rs774352745, rs774362407, rs774407652, rs774416142, rs774417715, rs774430372, rs774436819, rs774485521, rs774497542, rs774517238, rs774538361, rs774545496, rs774578656, rs774590706, rs774608312, rs774613038, rs774614892, rs774627481, rs774635823, rs774652158, rs774655437, rs774655644, rs774675664, rs774735686, rs774767884, rs774770183, rs774793268, rs774797626, rs774800871, rs774827848, rs774860596, rs774867832, rs774871558, rs774897738, rs774920525, rs774957199, rs774966545, rs774995489, rs775007815, rs775013701, rs775014161, rs775025080, rs775035472, rs775051377, rs775052809, rs775065412, rs775096907, rs775097390, rs775109247, rs775110794, rs775198687, rs775200760, rs775216416, rs775225941, rs775229968, rs775235063, rs775253933, rs775300838, rs775314223, rs775324118, rs775338622, rs775343231, rs775361783, rs775362716, rs775409954, rs775411387, rs775445321, rs775448716, rs775482932, rs775490773, rs775494424, rs775514898, rs775529592, rs775531312, rs775545160, rs775561484, rs775608048, rs775647894, rs775663513, rs775678460, rs775689947, rs775706689, rs775712094, rs775723473, rs775781088, rs775799232, rs775802700, rs775817726, rs775833833, rs775867242, rs775869112, rs775885331, rs775888118, rs775890815, rs775908200, rs775922234, rs775927529, rs775958638, rs775985135, rs775991922, rs776012725, rs776027350, rs776048858, rs776058229, rs776115224, rs776120982, rs776127372, rs776146373, rs776162826, rs776175107, rs776205237, rs776233562, rs776234619, rs776261489, rs776265600, rs776268051, rs776328331, rs776331166, rs776337610, rs776360703, rs776368642, rs776377211, rs776378926, rs776391179, rs776416932, rs776455694, rs776460033, rs776468531, rs776469401, rs776502128, rs776512134, rs776512796, rs776528354, rs776557696, rs776583185, rs776588601, rs776610468, rs776641917, rs776655782, rs776684668, rs776685450, rs776701893, rs776715604, rs776717393, rs776765704, rs776766081, rs776813125, rs776819253, rs776845421, rs776851542, rs776861148, rs776884354, rs776895918, rs776901705, rs776908385, rs776935081, rs776936397, rs776946478, rs776989525, rs776990916, rs777019587, rs777021189, rs777032616, rs777035639, rs777040077, rs777055034, rs777081623, rs777088492, rs777092215, rs777107444, rs777138820, rs777142569, rs777178256, rs777184999, rs777248953, rs777270995, rs777293872, rs777327738, rs777333585, rs777335942, rs777336112, rs777340689, rs777398096, rs777402602, rs777402798, rs777413912, rs777435285, rs777446612, rs777489905, rs777493854, rs777501693, rs777511226, rs777541848, rs777546950, rs777589889, rs777634986, rs777678322, rs777714487, rs777714896, rs777733386, rs777737941, rs777757693, rs777760977, rs777766613, rs777776873, rs777790441, rs777855214, rs777856275, rs777856585, rs777879897, rs777880402, rs777883498, rs777912884, rs777914223, rs777915421, rs777915834, rs777947528, rs777959951, rs777961278, rs778024036, rs778035022, rs778084602, rs778088695, rs778132052, rs778138011, rs778156916, rs778188052, rs778247703, rs778248312, rs778257661, rs778299667, rs778304121, rs778335582, rs778354585, rs778357234, rs778382731, rs778423575, rs778425518, rs778442045, rs778453027, rs778535178, rs778542568, rs778544049, rs778560616, rs778564263, rs778579995, rs778621566, rs778634822, rs778676428, rs778692635, rs778729006, rs778730178, rs778759836, rs778780942, rs778784682, rs778796586, rs778799053, rs778829858, rs778830959, rs778832050, rs778861369, rs778897919, rs778919087, rs778956610, rs778997799, rs779018896, rs779022704, rs779035815, rs779037628, rs779041704, rs779053034, rs779056318, rs779072456, rs779074234, rs779090634, rs779112609, rs779122197, rs779141637, rs779193515, rs779225786, rs779248626, rs779260664, rs779305397, rs779310382, rs779315144, rs779317524, rs779370572, rs779376910, rs779384151, rs779403621, rs779403782, rs779443167, rs779449738, rs779460602, rs779469224, rs779492128, rs779492673, rs779497387, rs779500115, rs779534880, rs779585454, rs779587536, rs779594470, rs779601138, rs779608407, rs779667225, rs779674548, rs779676004, rs779676065, rs779688576, rs779689400, rs779704296, rs779704494, rs779722839, rs779751830, rs779762742, rs779855825, rs779862167, rs779874085, rs779884884, rs779893135, rs779898624, rs779902875, rs779951311, rs779972223, rs779981125, rs780065055, rs780071098, rs780071979, rs780096616, rs780116576, rs780167807, rs780175287, rs780177372, rs780181737, rs780195773, rs780221096, rs780223738, rs780240287, rs780251157, rs780262695, rs780272362, rs780274728, rs780336887, rs780339849, rs780352627, rs780357421, rs780378039, rs780391214, rs780395718, rs780429904, rs780456605, rs780462133, rs780504180, rs780518136, rs780520256, rs780531048, rs780557918, rs780569962, rs780583248, rs780591005, rs780624563, rs780643844, rs780646328, rs780674788, rs780711982, rs780712436, rs780718499, rs780736733, rs780738323, rs780762979, rs780766698, rs780781266, rs780822553, rs780850907, rs780851378, rs780884166, rs780895654, rs780926313, rs780940372, rs780954310, rs780972646, rs780997702, rs781003108, rs781011377, rs781031253, rs781057478, rs781061062, rs781063515, rs781099161, rs781100121, rs781103724, rs781115949, rs781152078, rs781156959, rs781164921, rs781165429, rs781170746, rs781178866, rs781195867, rs781203246, rs781209529, rs781218506, rs781220310, rs781225495, rs781252119, rs781261620, rs781295754, rs781297051, rs781297835, rs781333141, rs781378386, rs781387416, rs781402430, rs781415717, rs781419850, rs781436273, rs781465336, rs781479024, rs781486913, rs781503917, rs781532128, rs781550107, rs781637658, rs781692356, rs781704602, rs781726537, rs781740809, rs781743420, rs781747028, rs781751809, rs781780005, and VAR 047629.

[0379] In one example, the guide RNA used in the present disclosure may comprise at least one 20 nucleotide (nt) target nucleic acid sequence listed in Table 5. Provided in Table 5 are the gene symbol and the sequence identifier of the gene (Gene SEQ ID NO), the gene sequence including 1-5 kilobase pairs upstream and/or downstream of the target gene (Extended Gene SEQ ID NO), and the 20 nt target nucleic acid sequence (20 nt Target Sequence SEQ ID NO). In the sequence listing the respective target gene, the strand for targeting the gene (noted by a (+) strand or (−) strand in the sequence listing), the associated PAM type and the PAM sequence are described for each of the 20 nt target nucleic acid sequences (SEQ ID NO: 5305-108,217). It is understood in the art that the spacer sequence, where “T” is “U,” may be an RNA sequence corresponding to the 20 nt sequences listed in Table 5.

TABLE 5
Nucleic Acid Sequences

| | Gene | Extended Gene | 20 nt Target Sequence |
|---|---|---|---|
| Gene Symbol | SEQ ID NO | SEQ ID NO | SEQ ID NO |
| ATXN2 | 5303 | 5304 | 5305-108,217 |

[0380] In one example, the guide RNA used in the present disclosure may comprise at least one spacer sequence that, where “T” is “U”, may be an RNA sequence corresponding to a 20 nucleotide (nt) target sequence such as, but not limited to, any of SEQ ID NO: 5305-108,217.

[0381] In one example, the guide RNA used in the present disclosure may comprise at least one spacer sequence which, where “T” is “U,” is an RNA sequence corresponding to the 20 nt sequences such as, but not limited to, any of SEQ ID NO: 5305-108,217.

[0382] In one example, a guide RNA may comprise a 20 nucleotide (nt) target nucleic acid sequence associated with the PAM type such as, but not limited to, NAAAAC, NNAGAAW, NNGRRT, NNNNGHTT, NRG, or YTN. As a non-limiting example, the 20 nt target nucleic acid sequence for a specific target gene and a specific PAM type may be, where “T” is “U,” the RNA sequence corresponding to any one of the 20 nt nucleic acid sequences in Table 6.

TABLE 6
Nucleic Acid Sequences by PAM Type

| | PAM: | PAM: | PAM: | PAM: | | |
|---|---|---|---|---|---|---|
| | NAAAAC | NNAGAAW | NNGRRT | NNNNGHTT | PAM: NRG | PAM: YTN |
| | 20 nt Target | 20 nt Target | 20 nt Target | 20 nt Target | 20 nt Target | 20 nt Target |
| Gene | Nucleic Acid | Nucleic Acid | Nucleic Acid | Nucleic Acid | Nucleic Acid | Nucleic Acid |
| Symbol | SEQ ID NO | SEQ ID NO | SEQ ID NO | SEQ ID NO | SEQ ID NO | SEQ ID NO |
| ATXN2 | 5305-6019 | 6020-7394 | 7395-11,810 | 11,811-15,945 | 15,946-55,473 | 55,474-108,217 |

[0383] In one example, a guide RNA may comprise a 20 nucleotide (nt) target nucleic acid sequence associated with the YTN PAM type. As a non-limiting example, the 20 nt target nucleic acid sequence for a specific target gene may comprise a 20 nt core sequence where the 20 nt core sequence, where “T” is “U,” may be the RNA sequence corresponding to SEQ ID NO: 55,474-108,217. As another non-limiting example, the 20 nt target nucleic acid sequence for a specific target gene may comprise a core sequence where the core sequence, where “T” is “U,” may be a fragment, segment or region of the RNA sequence corresponding to any of SEQ ID NO: 55,474-108,217.

### VI. Other Therapeutic Approaches

[0384] Gene editing can be conducted using nucleases engineered to target specific sequences. To date there are four major types of nucleases: meganucleases and their derivatives, zinc finger nucleases (ZFNs), transcription activator like effector nucleases (TALENs), and CRISPR-Cas9 nuclease systems. The nuclease platforms vary in difficulty of design, targeting density and mode of action, particularly as the specificity of ZFNs and TALENs is through protein-DNA interactions, while RNA-DNA interactions primarily guide Cas9.

[0385] CRISPR endonucleases, such as Cas9, can be used in the methods of the present disclosure. However, the teachings described herein, such as therapeutic target sites, could be applied to other forms of endonucleases, such as ZFNs, TALENs, HEs, or MegaTALs, or using combinations of nucleases. However, in order to apply the teachings of the present disclosure to such endonucleases, one would need to, among other things, engineer proteins directed to the specific target sites.

[0386] Additional binding domains can be fused to the Cas9 protein to increase specificity. The target sites of these constructs would map to the identified gRNA specified site, but would require additional binding motifs, such as for a zinc finger domain. In the case of Mega-TAL, a meganuclease can be fused to a TALE DNA-binding domain. The meganuclease domain can increase specificity and provide the cleavage. Similarly, inactivated or dead Cas9 (dCas9) can be fused to a cleavage domain and require the sgRNA/Cas9 target site and adjacent binding site for the fused DNA-binding domain. This likely would require some protein engineering of the dCas9, in addition to the catalytic inactivation, to decrease binding without the additional binding site.

### Zinc Finger Nucleases

[0387] Zinc finger nucleases (ZFNs) are modular proteins comprised of an engineered zinc finger DNA binding domain linked to the catalytic domain of the type II endonuclease FokI. Because FokI functions only as a dimer, a pair of ZFNs must be engineered to bind to cognate target “half-site” sequences on opposite DNA strands and with precise spacing between them to enable the catalytically active FokI dimer to form. Upon dimerization of the FokI domain, which itself has no sequence specificity per se, a DNA double-strand break is generated between the ZFN half-sites as the initiating step in genome editing.

[0388] The DNA binding domain of each ZFN is typically comprised of 3-6 zinc fingers of the abundant Cys2-His2 architecture, with each finger primarily recognizing a triplet of nucleotides on one strand of the target DNA sequence, although cross-strand interaction with a fourth nucleotide also can be important. Alteration of the amino acids of a finger in positions that make key contacts with the DNA alters the sequence specificity of a given finger. Thus, a four-finger zinc finger protein will selectively recognize a 12 bp target sequence, where the target sequence is a composite of the triplet preferences contributed by each finger, although triplet preference can be influenced to varying degrees by neighboring fingers. An important aspect of ZFNs is that they can be readily re-targeted to almost any genomic address simply by modifying individual fingers, although considerable expertise is required to do this well. In most applications of ZFNs, proteins of 4-6 fingers are used, recognizing 12-18 bp respectively. Hence, a pair of ZFNs will typically recognize a combined target sequence of 24-36 bp, not including the typical 5-7 bp spacer between half-sites. The binding sites can be separated further with larger spacers, including 15-17 bp. A target sequence of this length is likely to be unique in the human genome, assuming repetitive sequences or gene homologs are excluded during the design process. Nevertheless, the ZFN protein-DNA interactions are not absolute in their specificity so off-target binding and cleavage events do occur, either as a heterodimer between the two ZFNs, or as a homodimer of one or the other of the ZFNs. The latter possibility has been effectively eliminated by engineering the dimerization interface of the FokI domain to create “plus” and “minus” variants, also known as obligate heterodimer variants, which can only dimerize with each other, and not with themselves. Forcing the obligate heterodimer prevents formation of the homodimer. This has greatly enhanced specificity of ZFNs, as well as any other nuclease that adopts these FokI variants.

[0389] A variety of ZFN-based systems have been described in the art, modifications thereof are regularly reported, and numerous references describe rules and parameters that are used to guide the design of ZFNs; see, e.g., Segal et al., Proc Natl Acad Sci USA 96(6):2758-63 (1999); Dreier B et al., J Mol Biol. 303(4):489-502 (2000); Liu Q et al., J Biol Chem. 277(6):3850-6 (2002); Dreier et al., J Biol Chem 280(42):35588-97 (2005); and Dreier et al., J Biol Chem. 276(31):29466-78 (2001).

### Transcription Activator-Like Effector Nucleases (TALENs)

[0390] TALENs represent another format of modular nucleases whereby, as with ZFNs, an engineered DNA binding domain is linked to the FokI nuclease domain, and a pair of TALENs operate in tandem to achieve targeted DNA cleavage. The major difference from ZFNs is the nature of the DNA binding domain and the associated target DNA sequence recognition properties. The TALEN DNA binding domain derives from TALE proteins, which were originally described in the plant bacterial pathogen Xanthomonas sp. TALEs are comprised of tandem arrays of 33-35 amino acid repeats, with each repeat recognizing a single base pair in the target DNA sequence that is typically up to 20 bp in length, giving a total target sequence length of up to 40 bp. Nucleotide specificity of each repeat is determined by the repeat variable diresidue (RVD), which includes just two amino acids at positions 12 and 13. The bases guanine, adenine, cytosine and thymine are predominantly recognized by the four RVDs: Asn-Asn, Asn-Ile, His-Asp and Asn-Gly, respectively. This constitutes a much simpler recognition code than for zinc fingers, and thus represents an advantage over the latter for nuclease design. Nevertheless, as with ZFNs, the protein-DNA interactions of TALENs are not absolute in their specificity, and TALENs have also benefited from the use of obligate heterodimer variants of the FokI domain to reduce off-target activity.

[0391] Additional variants of the FokI domain have been created that are deactivated in their catalytic function. If one half of either a TALEN or a ZFN pair contains an inactive FokI domain, then only single-strand DNA cleavage (nicking) will occur at the target site, rather than a DSB. The outcome is comparable to the use of CRISPR/Cas9 or CRISPR/Cpf1 “nickase” mutants in which one of the Cas9 cleavage domains has been deactivated. DNA nicks can be used to drive genome editing by HDR, but at lower efficiency than with a DSB. The main benefit is that off-target nicks are quickly and accurately repaired, unlike the DSB, which is prone to NHEJ-mediated mis-repair.

[0392] A variety of TALEN-based systems have been described in the art, and modifications thereof are regularly reported; see, e.g., Boch, Science 326(5959):1509-12 (2009); Mak et al., Science 335(6069):716-9 (2012); and Moscou et al., Science 326(5959):1501 (2009). The use of TALENs based on the “Golden Gate” platform, or cloning scheme, has been described by multiple groups; see, e.g., Cermak et al., Nucleic Acids Res. 39(12):e82 (2011); Li et al., Nucleic Acids Res. 39(14):6315-25(2011); Weber et al., PLoS One. 6(2):e16765 (2011); Wang et al., J Genet Genomics 41(6):339-47, Epub 2014 May 17 (2014); and Cermak T et al., Methods Mol Biol. 1239:133-59 (2015).

### Homing Endonucleases

[0393] Homing endonucleases (HEs) are sequence-specific endonucleases that have long recognition sequences (14-44 base pairs) and cleave DNA with high specificity—often at sites unique in the genome. There are at least six known families of HEs as classified by their structure, including LAGLIDADG (SEQ ID NO. 108,252), GIY-YIG, His-Cis box, H—N—H, PD-(D/E)xK, and Vsr-like that are derived from a broad range of hosts, including eukarya, protists, bacteria, archaea, cyanobacteria and phage. As with ZFNs and TALENs, HEs can be used to create a DSB at a target locus as the initial step in genome editing. In addition, some natural and engineered HEs cut only a single strand of DNA, thereby functioning as site-specific nickases. The large target sequence of HEs and the specificity that they offer have made them attractive candidates to create site-specific DSBs.

[0394] A variety of HE-based systems have been described in the art, and modifications thereof are regularly reported; see, e.g., the reviews by Steentoft et al., Glycobiology 24(8):663-80 (2014); Belfort and Bonocora, Methods Mol Biol. 1123:1-26 (2014); Hafez and Hausner, Genome 55(8):553-69 (2012); and references cited therein.

### MegaTAL/Tev-mTALEN/MegaTev

[0395] As further examples of hybrid nucleases, the MegaTAL platform and Tev-mTALEN platform use a fusion of TALE DNA binding domains and catalytically active HEs, taking advantage of both the tunable DNA binding and specificity of the TALE, as well as the cleavage sequence specificity of the HE; see, e.g., Boissel et al., NAR 42: 2591-2601 (2014); Kleinstiver et al., G3 4:1155-65 (2014); and Boissel and Scharenberg, Methods Mol. Biol. 1239: 171-96 (2015).

[0396] In a further variation, the MegaTev architecture is the fusion of a meganuclease (Mega) with the nuclease domain derived from the GIY-YIG homing endonuclease I-TevI (Tev). The two active sites are positioned ˜30 bp apart on a DNA substrate and generate two DSBs with non-compatible cohesive ends; see, e.g., Wolfs et al., NAR 42, 8816-29 (2014). It is anticipated that other combinations of existing nuclease-based approaches will evolve and be useful in achieving the targeted genome modifications described herein.

dCas9-FokI or dCpf1-FokI and Other Nucleases

[0397] Combining the structural and functional properties of the nuclease platforms described above offers a further approach to genome editing that can potentially overcome some of the inherent deficiencies. As an example, the CRISPR genome editing system typically uses a single Cas9 endonuclease to create a DSB. The specificity of targeting is driven by a 20 or 24 nucleotide sequence in the guide RNA that undergoes Watson-Crick base-pairing with the target DNA (plus an additional 2 bases in the adjacent NAG or NGG PAM sequence in the case of Cas9 from S. pyogenes). Such a sequence is long enough to be unique in the human genome, however, the specificity of the RNA/DNA interaction is not absolute, with significant promiscuity sometimes tolerated, particularly in the 5′ half of the target sequence, effectively reducing the number of bases that drive specificity. One solution to this has been to completely deactivate the Cas9 or Cpf1 catalytic function—retaining only the RNA-guided DNA binding function—and instead fusing a FokI domain to the deactivated Cas9; see, e.g., Tsai et al., Nature Biotech 32: 569-76 (2014); and Guilinger et al., Nature Biotech. 32: 577-82 (2014). Because FokI must dimerize to become catalytically active, two guide RNAs are required to tether two FokI fusions in close proximity to form the dimer and cleave DNA. This essentially doubles the number of bases in the combined target sites, thereby increasing the stringency of targeting by CRISPR-based systems.

[0398] As further example, fusion of the TALE DNA binding domain to a catalytically active HE, such as I-TevI, takes advantage of both the tunable DNA binding and specificity of the TALE, as well as the cleavage sequence specificity of I-TevI, with the expectation that off-target cleavage can be further reduced.

### VII. Kits

[0399] The present disclosure provides kits for carrying out the methods described herein. A kit can include one or more of a genome-targeting nucleic acid, a polynucleotide encoding a genome-targeting nucleic acid, a site-directed polypeptide, a polynucleotide encoding a site-directed polypeptide, and/or any nucleic acid or proteinaceous molecule necessary to carry out the aspects of the methods described herein, or any combination thereof.

[0400] A kit can comprise: (1) a vector comprising a nucleotide sequence encoding a genome-targeting nucleic acid, (2) the site-directed polypeptide or a vector comprising a nucleotide sequence encoding the site-directed polypeptide, and (3) a reagent for reconstitution and/or dilution of the vector(s) and or polypeptide.

[0401] A kit can comprise: (1) a vector comprising (i) a nucleotide sequence encoding a genome-targeting nucleic acid, and (ii) a nucleotide sequence encoding the site-directed polypeptide; and (2) a reagent for reconstitution and/or dilution of the vector.

[0402] In any of the above kits, the kit can comprise a single-molecule guide genome-targeting nucleic acid. In any of the above kits, the kit can comprise a double-molecule genome-targeting nucleic acid. In any of the above kits, the kit can comprise two or more double-molecule guides or single-molecule guides. The kits can comprise a vector that encodes the nucleic acid targeting nucleic acid.

[0403] In any of the above kits, the kit can further comprise a polynucleotide to be inserted to effect the desired genetic modification.

[0404] Components of a kit can be in separate containers, or combined in a single container.

[0405] Any kit described above can further comprise one or more additional reagents, where such additional reagents are selected from a buffer, a buffer for introducing a polypeptide or polynucleotide into a cell, a wash buffer, a control reagent, a control vector, a control RNA polynucleotide, a reagent for in vitro production of the polypeptide from DNA, adaptors for sequencing and the like. A buffer can be a stabilization buffer, a reconstituting buffer, a diluting buffer, or the like. A kit can also comprise one or more components that can be used to facilitate or enhance the on-target binding or the cleavage of DNA by the endonuclease, or improve the specificity of targeting.

[0406] In addition to the above-mentioned components, a kit can further comprise instructions for using the components of the kit to practice the methods. The instructions for practicing the methods can be recorded on a suitable recording medium. For example, the instructions can be printed on a substrate, such as paper or plastic, etc. The instructions can be present in the kits as a package insert, in the labeling of the container of the kit or components thereof (i.e., associated with the packaging or subpackaging), etc. The instructions can be present as an electronic storage data file present on a suitable computer readable storage medium, e.g. CD-ROM, diskette, flash drive, etc. In some instances, the actual instructions are not present in the kit, but means for obtaining the instructions from a remote source (e.g. via the Internet), can be provided. An example of this case is a kit that comprises a web address where the instructions can be viewed and/or from which the instructions can be downloaded. As with the instructions, this means for obtaining the instructions can be recorded on a suitable substrate.

### VIII. Methods, Compositions, and Therapeutics of the Invention

[0407] Accordingly, the present disclosure relates in particular to the following non-limiting methods according to the present disclosure:

[0408] In a first method, Method 1, the present disclosure provides a method for editing ATXN2 gene in a cell by genome editing comprising: introducing into the cell one or more DNA endonucleases to effect one or more SSBs or DSBs within or near the ATXN2 gene that results in a permanent deletion in the expanded trinucleotide repeat or replacement of one or more nucleotide bases, or one or more exons and/or introns within or near the ATXN2 gene, thereby restoring the ATXN2 gene function.

[0409] In another method, Method 2, the present disclosure provides a method for editing a ATXN2 gene in a cell by genome editing comprising: introducing into the cell one or more DNA endonucleases to effect one or more SSBs or DSBs within or near the ATXN2 gene or ATXN2 regulatory elements that results in one or more permanent insertion, deletion or mutation of at least one nucleotide within or near the ATXN2 gene and/or a permanent deletion in the expanded trinucleotide repeat, thereby reducing or eliminating the expression or function of aberrant ATXN2 gene products.

[0410] In another method, Method 3, the present disclosure provides an ex vivo method for treating a patient having an ATXN2 related condition or disorder comprising: editing a patient specific iPSC within or near a ATXN2 gene or other DNA sequences that encode regulatory elements of the ATXN2 gene; differentiating the edited iPSC into a neuron or glial cell of the CNS; and implanting the neuron or glial cell of the CNS into the patient.

[0411] In another method, Method 4, the present disclosure provides an ex vivo method for treating a patient having an ATXN2 related condition or disorder, as provided in Method 3, wherein the editing step comprises introducing into the iPSC one or more DNA endonucleases to effect one or more SSBs or DSBs within or near the ATXN2 gene that results in permanent deletion of the expanded trinucleotide repeat or replacement of one or more nucleotide bases, or one or more exons and/or introns within or near the ATXN2 gene and/or a permanent deletion in the expanded trinucleotide repeat, thereby restoring the ATXN2 gene function.

[0412] In another method, Method 5, the present disclosure provides an ex vivo method for treating a patient having an ATXN2 related condition or disorder, as provided in Method 3, wherein the editing step comprises introducing into the iPSC one or more DNA endonucleases to effect one or more SSBs or DSBs within or near the ATXN2 gene or ATXN2 regulatory elements that results in one or more permanent insertion, deletion or mutation of at least one nucleotide within or near the ATXN2 gene, thereby reducing or eliminating the expression or function of aberrant ATXN2 gene products.

[0413] In another method, Method 6, the present disclosure provides an ex vivo method for treating a patient having an ATXN2 related condition or disorder, as provided in any one of Methods 3-5, further comprising: creating the iPSC, wherein the creating step comprises: isolating a somatic cell from the patient; and introducing a set of pluripotency-associated genes into the somatic cell to induce the somatic cell to become the iPSC.

[0414] In another method, Method 7, the present disclosure provides an ex vivo method for treating a patient having an ATXN2 related condition or disorder, as provided in Method 6, wherein the somatic cell is a fibroblast.

[0415] In another method, Method 8, the present disclosure provides an ex vivo method for treating a patient having an ATXN2 related condition or disorder, as provided in Method 6, wherein the set of pluripotency-associated genes is one or more of the genes selected from the group consisting of: OCT4, SOX2, KLF4, Lin28, NANOG and cMYC.

[0416] In another method, Method 9, the present disclosure provides an ex vivo method for treating a patient having an ATXN2 related condition or disorder comprising: editing a mesenchymal stem cell within or near a ATXN2 gene or other DNA sequences that encode regulatory elements of the ATXN2 gene; differentiating the edited mesenchymal stem cell into a neuron or glial cell of the CNS; and implanting the neuron or glial cell of the CNS into the patient.

[0417] In another method, Method 10, the present disclosure provides an ex vivo method for treating a patient having an ATXN2 related condition or disorder, as provided in Method 9, wherein the editing step comprises: introducing into the mesenchymal stem cell one or more DNA endonucleases to effect one or more SSBs or DSBs within or near the ATXN2 gene that results in a permanent deletion of the expanded trinucleotide repeat or replacement of one or more nucleotide bases, or one or more exons and/or introns within or near the ATXN2 gene, thereby restoring the ATXN2 gene function.

[0418] In another method, Method 11, the present disclosure provides an ex vivo method for treating a patient having an ATXN2 related condition or disorder, as provided in Method 9, wherein the editing step comprises: introducing into the mesenchymal stem cell one or more DNA endonucleases to effect one or more SSBs or DSBs within or near the ATXN2 gene or ATXN2 regulatory elements that results in one or more permanent insertion, deletion or mutation of at least one nucleotide within or near the ATXN2 gene and/or a permanent deletion in the expanded trinucleotide repeat, thereby reducing or eliminating the expression or function of aberrant ATXN2 gene products.

[0419] In another method, Method 12, the present disclosure provides an ex vivo method for treating a patient having an ATXN2 related condition or disorder, as provided in any one of Methods 9-11, further comprising: isolating the mesenchymal stem cell from the patient, wherein the mesenchymal stem cell is isolated from the patient's bone marrow or peripheral blood.

[0420] In another method, Method 13, the present disclosure provides an ex vivo method for treating a patient having an ATXN2 related condition or disorder, as provided in Method 12, wherein the isolating step comprises: aspiration of bone marrow and isolation of mesenchymal stem cells using density gradient centrifugation media.

[0421] In another method, Method 14, the present disclosure provides an in vivo method for treating a patient with an ATXN2 related condition or disorder comprising: editing the ATXN2 gene in a cell of the patient.

[0422] In another method, Method 15, the present disclosure provides an in vivo method for treating a patient with an ATXN2 related condition or disorder, as provided in Method 14, wherein the editing step comprises: introducing into the cell one or more DNA endonucleases to effect one or more SSBs or DSBs within or near the ATXN2 gene that results in a permanent deletion of the expanded trinucleotide repeat or replacement of one or more nucleotide bases, or one or more exons and/or introns within or near the ATXN2 gene, thereby restoring the ATXN2 gene function.

[0423] In another method, Method 16, the present disclosure provides an in vivo method for treating a patient with an ATXN2 related condition or disorder, as provided in Method 14, wherein the editing step comprises: introducing into the cell one or more DNA endonucleases to effect one or more SSBs or DSBs within or near the ATXN2 gene or ATXN2 regulatory elements that results in one or more permanent insertion, deletion or mutation of at least one nucleotide within or near the ATXN2 gene and/or a permanent deletion in the expanded trinucleotide repeat, thereby reducing or eliminating the expression or function of aberrant ATXN2 gene products.

[0424] In another method, Method 17, the present disclosure provides an in vivo method for treating a patient with an ATXN2 related condition or disorder, as provided in any one of Methods 14-16, wherein the cell is a cell of the CNS.

[0425] In another method, Method 18, the present disclosure provides an in vivo method for treating a patient with an ATXN2 related condition or disorder, as provided in Method 17, wherein the cell of the CNS is a neuron.

[0426] In another method, Method 19, the present disclosure provides an in vivo method for treating a patient with an ATXN2 related condition or disorder, as provided in Method 17, wherein the cell of the CNS is a glial cell.

[0427] In another method, Method 20, the present disclosure provides an in vivo method for treating a patient with an ATXN2 related condition or disorder, as provided in any one of Methods 17-19, wherein the one or more DNA endonuclease is delivered to the cell of the CNS via any administration route selected from the group consisting of intraparenchymal, intravenous, intra-arterial, intracerebroventricular, intracisternal, intrathecal, intracranial or intraperitoneal routes.

[0428] In another method, Method 21, the present disclosure provides a method for treating a patient having an ATXN2 related condition or disorder, as provided in any one of Methods 3, 9, or 14, wherein the ATXN2 related condition or disorder is SCA2.

[0429] In another method, Method 22, the present disclosure provides a method of altering the contiguous genomic sequence of an ATXN2 gene in a cell comprising: contacting the cell with one or more DNA endonuclease to effect one or more SSBs or DSBs.

[0430] In another method, Method 23, the present disclosure provides a method of altering the contiguous genomic sequence of an ATXN2 gene in a cell, as provided in Method 22, wherein the alteration of the contiguous genomic sequence occurs in one or more exons of the ATXN2 gene.

[0431] In another method, Method 24, the present disclosure provides a method of altering the contiguous genomic sequence of an ATXN2 gene in a cell, as provided in Method 23, wherein the alteration of the contiguous genomic sequence occurs in exon 1 of the ATXN2 gene.

[0432] In another method, Method 25, the present disclosure provides a method, as provided in any one of Methods 1-24, wherein the one or more DNA endonuclease is selected from any of those sequences in SEQ ID NOs: 1-620 and variants having at least 90% homology to any of those sequences disclosed in SEQ ID NOs: 1-620.

[0433] In another method, Method 26, the present disclosure provides a method, as provided in Method 25, wherein the one or more DNA endonuclease is one or more protein or polypeptide.

[0434] In another method, Method 27, the present disclosure provides a method, as provided in Method 26, wherein the one or more protein or polypeptide is flanked at the N-terminus, the C-terminus, or both the N-terminus and C-terminus by one or more NLSs.

[0435] In another method, Method 28, the present disclosure provides a method, as provided in Method 27, wherein the one or more protein or polypeptide is flanked by two NLSs, one NLS located at the N-terminus and the second NLS located at the C-terminus.

[0436] In another method, Method 29, the present disclosure provides a method, as provided in any one of Methods 27 or 28, wherein the one or more NLSs is a SV40 NLS.

[0437] In another method, Method 30, the present disclosure provides a method, as provided in Method 25, wherein the one or more DNA endonuclease is one or more polynucleotide encoding the one or more DNA endonuclease.

[0438] In another method, Method 31, the present disclosure provides a method, as provided in Method 30, wherein the one or more DNA endonuclease is one or more RNA encoding the one or more DNA endonuclease.

[0439] In another method, Method 32, the present disclosure provides a method, as provided in Method 31, wherein the one or more RNA is one or more chemically modified RNA.

[0440] In another method, Method 33, the present disclosure provides a method, as provided in Method 32, wherein the one or more RNA is chemically modified in the coding region.

[0441] In another method, Method 34, the present disclosure provides a method, as provided in any one of Methods 30-33, wherein the one or more polynucleotide or one or more RNA is codon optimized.

[0442] In another method, Method 35, the present disclosure provides a method, as provided in any one of Methods 1-34, wherein the method further comprises introducing one or more gRNA or one or more sgRNA.

[0443] In another method, Method 36, the present disclosure provides a method, as provided in Method 35, wherein the one or more gRNA or one or more sgRNA comprises a spacer sequence that is complementary to a sequence within or near the expanded trinucleotide repeat in the ATXN2 gene.

[0444] In another method, Method 37, the present disclosure provides a method, as provided in Method 35, wherein the one or more gRNA or one or more sgRNA comprises a spacer sequence that is complementary to a DNA sequence within or near the ATXN2 gene.

[0445] In another method, Method 38, the present disclosure provides a method, as provided in Method 35, wherein the one or more gRNA or one or more sgRNA comprises a spacer sequence that is complementary to a sequence flanking the ATXN2 gene or other sequence that encodes a regulatory element of the ATXN2 gene.

[0446] In another method, Method 39, the present disclosure provides a method, as provided in Method 35, wherein the one or more gRNA or one or more sgRNA comprises a spacer sequence that is complementary to a DNA sequence within or near exon 1 of the ATXN2 gene.

[0447] In another method, Method 40, the present disclosure provides a method, as provided in any one of Methods 35-39, wherein the one or more gRNA or one or more sgRNA is chemically modified.

[0448] In another method, Method 41, the present disclosure provides a method, as provided in Method 40, wherein the one or more modified sgRNAs comprises three 2′-O-methyl-phosphorothioate residues at or near each of its 5′ and 3′ ends.

[0449] In another method, Method 42, the present disclosure provides a method, as provided in any one of Methods 39-41, wherein the one or more gRNA or one or more sgRNA comprises a RNA sequence corresponding to a sequence selected from the group consisting of SEQ ID NOs: 34621, 34565, 34606, 54554, 34437, 34563, 54418, 54661, 34632, 34446, 54409, 54671, 54693, 54539, 54408, 54555, 54694, 34505, 54695, 34504, 34542, 54672, 34562, 34435, 54523, 54669, 34544, 54660, 54646, 54648, 34503, 54691, 54407, 54422, 54556, 54411, 54421, 54540, 54541, 34484, 54647, 54673, 54495, 34548, and 34543.

[0450] In another method, Method 43, the present disclosure provides a method, as provided in any one of Methods 35-40, wherein the one or more gRNA or one or more sgRNA is pre-complexed with the one or more DNA endonuclease to form one or more RNPs.

[0451] In another method, Method 44, the present disclosure provides a method, as provided in Method 43, wherein the pre-complexing involves a covalent attachment of the one or more gRNA or one or more sgRNA to the one or more DNA endonuclease.

[0452] In another method, Method 45, the present disclosure provides a method, as provided in any one of Methods 43-44, wherein the weight ratio of sgRNA to DNA endonuclease in the RNP is 1:1.

[0453] In another method, Method 46, the present disclosure provides a method, as provided in any one of Methods 25-45, wherein the one or more DNA endonuclease is formulated in a liposome or lipid nanoparticle.

[0454] In another method, Method 47, the present disclosure provides a method, as provided in any one of Methods 35-45, wherein the one or more DNA endonuclease is formulated in a liposome or a lipid nanoparticle which also comprises the one or more gRNA or one or more sgRNA.

[0455] In another method, Method 48, the present disclosure provides a method, as provided in any one of Methods 25, or 35-42, wherein the one or more DNA endonuclease is encoded in an AAV vector particle.

[0456] In another method, Method 49, the present disclosure provides a method, as provided in any one of Methods 35-42, wherein the one or more gRNA or one or more sgRNA is encoded in an AAV vector particle.

[0457] In another method, Method 50, the present disclosure provides a method, as provided in any one of Methods 35-42, wherein the one or more DNA endonuclease is encoded in an AAV vector particle which also encodes the one or more gRNA or one or more sgRNA.

[0458] In another method, Method 51, the present disclosure provides a method, as provided in any one of Methods 48-50, wherein the AAV vector particle is selected from the group consisting of any of those sequences disclosed in SEQ ID NOs: 4734-5302 and Table 2.

[0459] In another method, Method 52, the present disclosure provides a method, as provided in any one of Methods 1-51, wherein the method further comprises introducing into the cell a donor template comprising at least a portion of the wild-type ATXN2 gene.

[0460] In another method, Method 53, the present disclosure provides a method, as provided in Method 52, wherein the at least a portion of the wild-type ATXN2 gene comprises one or more sequences selected from the group consisting of an ATXN2 exon, an ATXN2 intron, and a sequence comprising an exon:intron junction of ATXN2.

[0461] In another method, Method 54, the present disclosure provides a method, as provided in any one of Methods 52 or 53, wherein the donor template comprises homologous arms to the genomic locus of the ATXN2 gene.

[0462] In another method, Method 55, the present disclosure provides a method, as provided in any one of Methods 52-54, wherein the donor template is either a single or double stranded polynucleotide.

[0463] In another method, Method 56, the present disclosure provides a method, as provided in any one of Methods 52-55, wherein the donor template is encoded in an AAV vector particle, where the AAV vector particle is selected from the group consisting of any of those disclosed in SEQ ID NOs: 4734-5302 and Table 2.

[0464] In another method, Method 57, the present disclosure provides a method, as provided in any one of Methods 52-55, wherein the one or more polynucleotide encoding one or more DNA endonuclease is formulated into a lipid nanoparticle, and the one or more gRNA or one or more sgRNA is delivered to the cell ex vivo by electroporation and the donor template is delivered to the cell by an AAV vector.

[0465] In another method, Method 58, the present disclosure provides a method, as provided in any one of Methods 52-55, wherein the one or more polynucleotide encoding one or more DNA endonuclease is formulated into a liposome or lipid nanoparticle which also comprises the one or more gRNA or one or more sgRNA and the donor template.

[0466] In another method, Method 59, the present disclosure provides a method, as provided in any one of Methods 1-58, wherein the ATXN2 gene is located on Chromosome 12: 111,452,214-111,599,676 (Genome Reference Consortium—GRCh38).

[0467] In another method, Method 60, the present disclosure provides a method for treating a patient having an ATXN2 related condition or disorder, as provided in any one of Methods 3, 9, or 14, wherein the ATXN2 related condition or disorder is amyotrophic lateral sclerosis (ALS).

[0468] The present disclosure also provides a composition, Composition 1, comprising a single-molecule guide RNA comprising at least a spacer sequence that is an RNA sequence corresponding to any one of SEQ ID NOs: 5305-108,217.

[0469] In another composition, Composition 2, the present disclosure provides the single-molecule guide RNA of Composition 1, wherein the single-molecule guide RNA further comprises a spacer extension region.

[0470] In another composition, Composition 3, the present disclosure provides the single-molecule guide RNA of Composition 1, wherein the single-molecule guide RNA further comprises a tracrRNA extension region.

[0471] In another composition, Composition 4, the present disclosure provides the single-molecule guide RNA of any one of Compositions 1-3, wherein the single-molecule guide RNA is chemically modified.

[0472] In another composition, Composition 5, the present disclosure provides the single-molecule guide RNA of any one of Compositions 1-4, wherein the single-molecule guide RNA is pre-complexed with a DNA endonuclease.

[0473] In another composition, Composition 6, the present disclosure provides the single-molecule guide RNA of Composition 5, wherein the DNA endonuclease is a Cas9 or Cpf1 endonuclease.

[0474] In another composition, Composition 7, the present disclosure provides the single-molecule guide RNA of Composition 6, wherein the Cas9 or Cpf1 endonuclease is selected from the group consisting of: S. pyogenes Cas9, S. aureus Cas9, N. meningitidis Cas9, S. thermophilus CRISPR1 Cas9, S. thermophilus CRISPR 3 Cas9, T. denticola Cas9, L. bacterium ND2006 Cpf1 and Acidaminococcus sp. BV3L6 Cpf1, and variants having at least 90% homology to the endonucleases.

[0475] In another composition, Composition 8, the present disclosure provides the single-molecule guide RNA of Composition 7, wherein the Cas9 or Cpf1 endonuclease comprises one or more NLSs.

[0476] In another composition, Composition 9, the present disclosure provides the single-molecule guide RNA of Composition 8, wherein at least one NLS is at or within 50 amino acids of the amino-terminus of the Cas9 or Cpf1 endonuclease and/or at least one NLS is at or within 50 amino acids of the carboxy-terminus of the Cas9 or Cpf1 endonuclease.

[0477] In another composition, Composition 10, the present disclosure provides a DNA encoding the single-molecule guide RNA of any one of Compositions 1-4.

[0478] In a first therapeutic, Therapeutic 1, the present disclosure provides a therapeutic comprising at least one or more gRNAs for editing an ATXN2 gene in a cell from a patient with an ATXN2 related condition or disorder, the one or more gRNAs comprising a spacer sequence selected from the group consisting of nucleic acid sequences in any one of SEQ ID NOs: 5305-108,217 of the Sequence Listing.

[0479] In another therapeutic, Therapeutic 2, the present disclosure provides a therapeutic for treating a patient with an ATXN2 related condition or disorder formed by the method comprising: introducing one or more DNA endonucleases; introducing one or more gRNA or one or more sgRNA for editing a ATXN2 gene; wherein the one or more gRNAs or sgRNAs comprise a spacer sequence selected from the group consisting of nucleic acid sequences in SEQ ID NOs: 5305-108,217 of the Sequence Listing.

[0480] In another therapeutic, Therapeutic 3, the present disclosure provides the therapeutic of any one of Therapeutics 1 or 2, wherein the ATXN2 related condition or disorder is SCA2.

[0481] In another therapeutic, Therapeutic 4, the present disclosure provides the therapeutic of any one of Therapeutics 1 or 2, wherein the ATXN2 related condition or disorder is amyotrophic lateral sclerosis (ALS).

### IX. Definitions

[0482] In addition to the definitions previously set forth herein, the following definitions are relevant to the present disclosure:

[0483] The term “comprising” or “comprises” is used in reference to compositions, methods, therapeutics and respective component(s) thereof, that are essential to the present disclosure, yet open to the inclusion of unspecified elements, whether essential or not.

[0484] The term “consisting essentially of” refers to those elements required for a given aspect. The term permits the presence of additional elements that do not materially affect the basic and novel or functional characteristic(s) of that aspect of the present disclosure.

[0485] The term “consisting of” refers to compositions, methods, therapeutics and respective components thereof as described herein, which are exclusive of any element not recited in that description of the aspect.

[0486] The singular forms “a,” “an,” and “the” include plural references, unless the context clearly dictates otherwise.

[0487] Any numerical range recited in this specification describes all sub-ranges of the same numerical precision (i.e., having the same number of specified digits) subsumed within the recited range. For example, a recited range of “1.0 to 10.0” describes all sub-ranges between (and including) the recited minimum value of 1.0 and the recited maximum value of 10.0, such as, for example, “2.4 to 7.6,” even if the range of “2.4 to 7.6” is not expressly recited in the text of the specification. Accordingly, the Applicant reserves the right to amend this specification, including the claims, to expressly recite any sub-range of the same numerical precision subsumed within the ranges expressly recited in this specification. All such ranges are inherently described in this specification such that amending to expressly recite any such sub-ranges will comply with written description, sufficiency of description, and added matter requirements, including the requirements under 35 U.S.C. § 112(a) and Article 123(2) EPC. Also, unless expressly specified or otherwise required by context, all numerical parameters described in this specification (such as those expressing values, ranges, amounts, percentages, and the like) may be read as if prefaced by the word “about,” even if the word “about” does not expressly appear before a number. Additionally, numerical parameters described in this specification should be construed in light of the number of reported significant digits, numerical precision, and by applying ordinary rounding techniques. It is also understood that numerical parameters described in this specification will necessarily possess the inherent variability characteristic of the underlying measurement techniques used to determine the numerical value of the parameter.

[0488] The details of one or more aspects of the present disclosure are set forth in the accompanying description below. Although any materials and methods similar or equivalent to those described herein can be used in the practice or testing of the present disclosure, the preferred materials and methods are now described. Other features, objects and advantages of the present disclosure will be apparent from the description. In the description, the singular forms also include the plural unless the context clearly dictates otherwise. Unless defined otherwise, all technical and scientific terms used herein have the same meaning as commonly understood by one of ordinary skill in the art to which this present disclosure belongs. In the case of conflict, the present description will control.

[0489] The present disclosure is further illustrated by the following non-limiting examples.

### X. Examples

[0490] The present disclosure will be more fully understood by reference to the following examples, which provide illustrative non-limiting aspects of the present disclosure.

[0491] The examples describe the use of the CRISPR system as an illustrative genome editing technique to create defined therapeutic genomic deletions, insertions, or replacements, termed “genomic modifications” herein, in the ATXN2 gene that lead to permanent deletion or correction of expanded trinucleotide repeats in the ATXN2 gene, knock-out of the ATXN2 gene, or correction of the entire gene, that restore the wild-type or similar levels of trinucleotide repeats in the ATXN2 gene and/or eliminate aberrant ATXN2 gene products. Introduction of the defined therapeutic modifications represents a novel therapeutic strategy for the potential amelioration of Spinocerebellar ataxia 2 (SCA2), as described and illustrated herein.

### Example 1—CRISPR/S. pyogenes (Sp)Cas9 Target Sites for the ATXN2 Gene

[0492] Regions of the ATXN2 gene were scanned for target sites. Each area was scanned for a protospacer adjacent motif (PAM) having the sequence NRG. gRNA 20 bp spacer sequences corresponding to the PAM were then identified, as shown in SEQ ID NOs: 15,946-55,473 of the sequence listing.

### Example 2—CRISPR/S. aureus(Sa)Cas9 Target Sites for the ATXN2 Gene

[0493] Regions of the ATXN2 gene were scanned for target sites. Each area was scanned for a protospacer adjacent motif (PAM) having the sequence NNGRRT. gRNA 20 bp spacer sequences corresponding to the PAM were then identified, as shown in SEQ ID NOs: 7395-11,810 of the Sequence Listing.

### Example 3—CRISPR/S. thermophilus(St)Cas9 Target Sites for the ATXN2 Gene

[0494] Regions of the ATXN2 gene were scanned for target sites. Each area was scanned for a protospacer adjacent motif (PAM) having the sequence NNAGAAW. gRNA 20 bp spacer sequences corresponding to the PAM were then identified, as shown in SEQ ID NOs: 6020-7394 of the Sequence Listing.

### Example 4—CRISPR/T. denticola(Td)Cas9 Target Sites for the ATXN2 Gene

[0495] Regions of the ATXN2 gene were scanned for target sites. Each area was scanned for a protospacer adjacent motif (PAM) having the sequence NAAAAC. gRNA 20 bp spacer sequences corresponding to the PAM were then identified, as shown in SEQ ID NOs: 5305-6019 of the Sequence Listing.

### Example 5—CRISPR/N. meningitidis(Nm)Cas9 Target Sites for the ATXN2 Gene

[0496] Regions of the ATXN2 gene were scanned for target sites. Each area was scanned for a protospacer adjacent motif (PAM) having the sequence NNNNGHTT. gRNA 20 bp spacer sequences corresponding to the PAM were then identified, as shown in SEQ ID NOs: 11,811-15,945 of the Sequence Listing.

### Example 6—CRISPR/Cpf1 Target Sites for the ATXN2 Gene

[0497] Regions of the ATXN2 gene were scanned for target sites. Each area was scanned for a protospacer adjacent motif (PAM) having the sequence TTN or YTN. gRNA 20 bp spacer sequences corresponding to the PAM were then identified, as shown in SEQ ID NOs: 55,474-108,217 of the Sequence Listing.

### Example 7—Bioinformatics Analysis of the Guide Strands

[0498] Candidate guides were then screened and selected in a single process or multi-step process that involves both theoretical binding and experimentally assessed activity at both on-target and off-target sites. By way of illustration, candidate guides having sequences that match a particular on-target site, such as a site within the ATXN2 gene, with adjacent PAM can be assessed for their potential to cleave at off-target sites having similar sequences, using one or more of a variety of bioinformatics tools available for assessing off-target binding, as described and illustrated in more detail below, in order to assess the likelihood of effects at chromosomal positions other than those intended.

[0499] Candidates predicted to have relatively lower potential for off-target activity can then be assessed experimentally to measure their on-target activity, and then off-target activities at various sites. Preferred guides have sufficiently high on-target activity to achieve desired levels of gene editing at the selected locus, and relatively lower off-target activity to reduce the likelihood of alterations at other chromosomal loci. The ratio of on-target to off-target activity is often referred to as the “specificity” of a guide.

[0500] For initial screening of predicted off-target activities, there are a number of bioinformatics tools known and publicly available that can be used to predict the most likely off-target sites; and since binding to target sites in the CRISPR/Cas9 or CRISPR/Cpf1 nuclease system is driven by Watson-Crick base pairing between complementary sequences, the degree of dissimilarity (and therefore reduced potential for off-target binding) is essentially related to primary sequence differences: mismatches and bulges, i.e. bases that are changed to a non-complementary base, and insertions or deletions of bases in the potential off-target site relative to the target site. An exemplary bioinformatics tool called COSMID (CRISPR Off-target Sites with Mismatches, Insertions and Deletions) (available on the web at crispr.bme.gatech.edu) compiles such similarities. Other bioinformatics tools include, but are not limited to autoCOSMID and CCtop.

[0501] Bioinformatics were used to minimize off-target cleavage in order to reduce the detrimental effects of mutations and chromosomal rearrangements. Studies on CRISPR/Cas9 systems suggested the possibility of off-target activity due to non-specific hybridization of the guide strand to DNA sequences with base pair mismatches and/or bulges, particularly at positions distal from the PAM region. Therefore, it is important to have a bioinformatics tool that can identify potential off-target sites that have insertions and/or deletions between the RNA guide strand and genomic sequences, in addition to base-pair mismatches. Bioinformatics tools based upon the off-target algorithm CCTop were used to search genomes for potential CRISPR off-target sites (CCTop is available on the web at crispr.cos.uni-heidelberg.de/). The output ranked lists of the potential off-target sites based on the number and location of mismatches, allowing more informed choice of target sites, and avoiding the use of sites with more likely off-target cleavage.

[0502] Additional bioinformatics pipelines were employed that weigh the estimated on- and/or off-target activity of gRNA targeting sites in a region. Other features that may be used to predict activity include information about the cell type in question, DNA accessibility, chromatin state, transcription factor binding sites, transcription factor binding data, and other CHIP-seq data. Additional factors are weighed that predict editing efficiency, such as relative positions and directions of pairs of gRNAs, local sequence features and micro-homologies.

[0503] Initial evaluation and screening of CRISPR/Cas9 target sites focused within exon 1, the region upstream of exon 1, and the region downstream of exon 1. gRNAs targeting exon 1 can be used to insert full length cDNA of ATXN2 for replacing the mutated endogenous ATXN2 gene and restoring protein expression. Guide RNAs targeting exon 1 can be used to target the expanded repeats. Pairs of gRNAs on either side of the expanded repeat sequence can be used to excise the expanded repeats. gRNAs overlapping with expanded repeat sequence can be used to induce partial or full contraction of the repeats. In addition, carefully chosen gRNAs together with dCas9 fused to chromatin modifier proteins can be used to alleviate the epigenetic changes that occur at the ATXN2 allele with expanded repeats and restore ATXN2 expression. These gRNAs can also be used to edit one or more nucleotides, exonic sequences and/or intronic sequences.

[0504] Initial bioinformatics analysis identified 39,528 gRNAs targeting the ATXN2 gene. From the initial set of SpCas9 gRNAs, further analysis identified 532 gRNAs targeting within exon 1, the region upstream of exon 1, and the region downstream of exon 1. This targeted subset of gRNAs was further analyzed for predicted off-target sites (having <3 base mismatches) or overlap with an SNP (>0.01 frequency) and these were eliminated. The evaluation resulted in a pool of 48 gRNAs selected for screening. The prioritized list of 48 single gRNAs targeting the ATXN2 gene were tested for cutting efficiencies using SpCas9 (Table 7).

TABLE 7

| SEQ ID | | |
|---|---|---|
| NO. | Name | Sequence |
| 34621 | SCA2_T16 | GAGGAAGGCGGATCCGGGTA |
| 34565 | SCA2_T14 | TTTGGTAGCAACGGCAACGG |
| 34606 | SCA2_T21 | CCGCCCTCCGATGCGCTCAG |
| 54554 | SCA2_T8 | GCCAAGGAGACGCCGGAACG |
| 34437 | SCA2_T36 | CTCCCCTCCCCACGCGTGTT |
| 34563 | SCA2_T5 | GCAACGGCGGCGGCGCGTTT |
| 54418 | SCA2_T15 | TCCCTCCATCTTGACCGCCG |
| 54661 | SCA2_T53 | GGCGAAGCGGCGAGACTCGG |
| 34632 | SCA2_T45 | ACCGACACGCCCTCCCCGAA |
| 34446 | SCA2_T12 | CCCTCCCCCGGCGGTCAAGA |
| 54409 | SCA2_T43 | AACCCCTCCCAACACGCGTG |
| 54671 | SCA2_T27 | GCGGCCGCTGAGCGCATCGG |
| 54693 | SCA2_T13 | GACTCTTTACCGGAAGTCGG |
| 54539 | SCA2_T1 | CCATACACCGGCTCGCACGC |
| 54408 | SCA2_T30 | GAACCCCTCCCAACACGCGT |
| 54555 | SCA2_T17 | AAGGAGACGCCGGAACGCGG |
| 54694 | SCA2_T9 | ACTCTTTACCGGAAGTCGGA |
| 34505 | SCA2_T18 | TCGGTGGTCGCGGCGACCTC |
| 54695 | SCA2_T25 | CTCTTTACCGGAAGTCGGAG |
| 34504 | SCA2_T44 | GTGGTCGCGGCGACCTCCGG |
| 34542 | SCA2_T7 | CGGCGTGCGAGCCGGTGTAT |
| 54672 | SCA2_T10 | CGGCCGCTGAGCGCATCGGA |
| 34562 | SCA2_T4 | GGCGGCGGCGCGTTTCGGCC |
| 34435 | SCA2_T48 | CCCTCCCCACGCGTGTTGGG |
| 54523 | SCA2_T47 | GCCGCCGGGCTTGCGGACAT |
| 54669 | SCA2_T32 | GCTGCGGCCGCTGAGCGCAT |
| 34544 | SCA2_T19 | TCCCCGCCCGGCGTGCGAGC |
| 54660 | SCA2_T46 | TGCGGCGAAGCGGCGAGACT |
| 54646 | SCA2_T39 | GCGGCGGAGGGATACGGTCC |
| 54648 | SCA2_T6 | GGCGGAGGGATACGGTCCCG |
| 34503 | SCA2_T52 | GTCGCGGCGACCTCCGGCGG |
| 54691 | SCA2_T37 | AGGGACTCTTTACCGGAAGT |
| 54407 | SCA2_T38 | AGAACCCCTCCCAACACGCG |
| 54422 | SCA2_T34 | CCATCTTGACCGCCGGGGGA |
| 54556 | SCA2_T28 | AGGAGACGCCGGAACGCGGC |
| 54411 | SCA2_T29 | CCCTCCCAACACGCGTGGGG |
| 54421 | SCA2_T23 | TCCATCTTGACCGCCGGGGG |
| 54540 | SCA2_T22 | CATACACCGGCTCGCACGCC |
| 54541 | SCA2_T11 | ACACCGGCTCGCACGCCGGG |
| 34484 | SCA2_T50 | CCGTGACCCGCCGGGCTACC |
| 54647 | SCA2_T20 | CGGCGGAGGGATACGGTCCC |
| 54673 | SCA2_T49 | CCGCTGAGCGCATCGGAGGG |
| 54495 | SCA2_T33 | GGAGGTCGCCGCGACCACCG |
| 34548 | SCA2_T51 | CGGCGTCTCCTTGGCGCGCC |
| 34543 | SCA2_T2 | CCGGCGTGCGAGCCGGTGTA |

[0505] Note that the SEQ ID NOs represent the DNA sequence of the genomic target, while the gRNA or sgRNA spacer sequence will be the RNA version of the DNA sequence.

### Example 8—Testing of Preferred Guides in In Vitro Transcribed (IVT) gRNA Screen

[0506] To identify a large spectrum of pairs of gRNAs able to edit the cognate DNA target region, an in vitro transcribed (IVT) gRNA screen was conducted. The relevant genomic sequence was submitted for analysis using a gRNA design software. The resulting list of gRNAs was narrowed to a select list of gRNAs as described above based on uniqueness of sequence (only gRNAs without a perfect match somewhere else in the genome were screened) and minimal predicted off targets. This set of gRNAs was in vitro transcribed, and transfected using Lipofectamine MessengerMAX into HEK293T cells that constitutively express Cas9. Cells were harvested 48 hours post transfection, the genomic DNA was isolated, and cutting efficiency was evaluated using TIDE analysis. (FIGS. 2-3).

[0507] The gRNA or pairs of gRNA with significant activity can then be followed up in cultured cells to measure correction of the ATXN2 mutation. Off-target events can be followed again. A variety of cells can be transfected and the level of gene correction and possible off-target events measured. These experiments allow optimization of nuclease and donor design and delivery.

### Example 9—Testing of Preferred Guides in Cells for Off-Target Activity

[0508] The gRNAs having the best on-target activity from the IVT screen in the above example are tested for off-target activity using Hybrid capture assays, GUIDE Seq. and whole genome sequencing in addition to other methods.

### Example 10—Testing Different Approaches for HDR Gene Editing

[0509] After testing the gRNAs for both on-target activity and off-target activity, repeat expansion correction and whole gene correction strategies will be tested for HDR gene editing.

[0510] For the repeat expansion correction approach, donor DNA template will be provided as a short single-stranded oligonucleotide, a short double-stranded oligonucleotide (PAM sequence intact/PAM sequence mutated), a long single-stranded DNA molecule (PAM sequence intact/PAM sequence mutated) or a long double-stranded DNA molecule (PAM sequence intact/PAM sequence mutated). In addition, the donor DNA template will be delivered by AAV.

[0511] For the whole gene correction approach, a single-stranded or double-stranded DNA having homologous arms to the ATXN2 chromosomal region may include more than 40 nt of the first exon (the first coding exon) of the ATXN2 gene, the complete CDS of the ATXN2 gene and 3′ UTR of the ATXN2 gene, and at least 40 nt of the following intron. The single-stranded or double-stranded DNA having homologous arms to the ATXN2 chromosomal region may include more than 80 nt of the first exon of the ATXN2 gene, the complete CDS of the ATXN2 gene and 3′ UTR of the ATXN2 gene, and at least 80 nt of the following intron. The single-stranded or double-stranded DNA having homologous arms to the ATXN2 chromosomal region may include more than 100 nt of the first exon of the ATXN2 gene, the complete CDS of the ATXN2 gene and 3′ UTR of the ATXN2 gene, and at least 100 nt of the following intron. The single-stranded or double-stranded DNA having homologous arms to the ATXN2 chromosomal region may include more than 150 nt of the first exon of the ATXN2 gene, the complete CDS of the ATXN2 gene and 3′ UTR of the ATXN2 gene, and at least 150 nt of the following intron. The single-stranded or double-stranded DNA having homologous arms to the ATXN2 chromosomal region may include more than 300 nt of the first exon of the ATXN2 gene, the complete CDS of the ATXN2 gene and 3′ UTR of the ATXN2 gene, and at least 300 nt of the following intron. The single-stranded or double-stranded DNA having homologous arms to the ATXN2 chromosomal region may include more than 400 nt of the first exon of the ATXN2 gene, the complete CDS of the ATXN2 gene and 3′ UTR of the ATXN2 gene, and at least 400 nt of the following intron.

[0512] Alternatively, the DNA template will be delivered by a recombinant AAV particle, or other delivery vectors, such as those taught herein.

[0513] A knock-in of ATXN2 cDNA can be performed into any selected chromosomal location or in one of the safe harbor locus, i.e., AAVS1 (intron 1 of PPP1R12C), HPRT, H11, hRosa26 and/or F-A region. Assessment of efficiency of HDR mediated knock-in of cDNA into the first exon can utilize cDNA knock-in into safe harbor loci such as: single-stranded or double-stranded DNA having homologous arms to one of the following regions, for example: exon 1, intron 1 or exon 2 of PPP1R12C; exon 1, intron 1 or exon 2 of HPRT; and/or exon 1, intron 1 or exon 2 of hRosa26; 5′UTR correspondent to ATXN2 or alternative 5′ UTR, complete CDS of ATXN2 and 3′ UTR of ATXN2 or modified 3′ UTR and at least 80 nt of the first intron, alternatively same DNA template sequence will be delivered by AAV or other viral (or non-viral) delivery vector.

### Example 11—Re-Assessment of Lead CRISPR-Cas9/DNA Donor Combinations

[0514] After testing the different strategies for gene editing, the lead CRISPR-Cas9/DNA donor combinations will be re-assessed in cells for efficiency of deletion, recombination, and off-target specificity. Cas9 mRNA or RNP will be formulated into lipid nanoparticles for delivery, sgRNAs will be formulated into nanoparticles or delivered as a recombinant AAV particle, and donor DNA will be formulated into nanoparticles or delivered as recombinant AAV particle.

### Example 12—In Vivo Testing in Relevant Animal Model

[0515] After the CRISPR-Cas9/DNA donor combinations have been re-assessed, the lead formulations will be tested in vivo in an animal model.

[0516] Culture in human cells allows direct testing on the human target and the background human genome, as described above.

[0517] Preclinical efficacy and safety evaluations can be observed through engraftment of modified mouse or human neurons in a mouse model. The modified cells can be observed in the months after engraftment.

### XI. Equivalents and Scope

[0518] Those skilled in the art will recognize, or be able to ascertain using no more than routine experimentation, many equivalents to the specific examples in accordance with the invention described herein. The scope of the present disclosure is not intended to be limited to the above Description, but rather is as set forth in the appended claims.

[0519] Claims or descriptions that include “or” between one or more members of a group are considered satisfied if one, more than one, or all of the group members are present in, employed in, or otherwise relevant to a given product or process unless indicated to the contrary or otherwise evident from the context. The present disclosure includes examples in which exactly one member of the group is present in, employed in, or otherwise relevant to a given product or process. The present disclosure includes examples in which more than one, or the entire group members are present in, employed in, or otherwise relevant to a given product or process.

[0520] In addition, it is to be understood that any particular example of the present disclosure that falls within the prior art may be explicitly excluded from any one or more of the claims. Since such examples are deemed to be known to one of ordinary skill in the art, they may be excluded even if the exclusion is not set forth explicitly herein. Any particular example of the compositions of the present disclosure (e.g., any antibiotic, therapeutic or active ingredient; any method of production; any method of use; etc.) can be excluded from any one or more claims, for any reason, whether or not related to the existence of prior art.

[0521] It is to be understood that the words which have been used are words of description rather than limitation, and that changes may be made within the purview of the appended claims without departing from the true scope and spirit of the present disclosure in its broader aspects.

[0522] While the present invention has been described at some length and with some particularity with respect to the several described examples, it is not intended that it should be limited to any such particulars or examples or any particular example, but it is to be construed with references to the appended claims so as to provide the broadest possible interpretation of such claims in view of the prior art and, therefore, to effectively encompass the intended scope of the invention.

### Note Regarding Illustrative Examples

[0523] While the present disclosure provides descriptions of various specific aspects for the purpose of illustrating various aspects of the present disclosure and/or its potential applications, it is understood that variations and modifications will occur to those skilled in the art. Accordingly, the invention or inventions described herein should be understood to be at least as broad as they are claimed, and not as more narrowly defined by particular illustrative aspects provided herein.

[0524] Any patent, publication, or other disclosure material identified herein is incorporated by reference into this specification in its entirety unless otherwise indicated, but only to the extent that the incorporated material does not conflict with existing descriptions, definitions, statements, or other disclosure material expressly set forth in this specification. As such, and to the extent necessary, the express disclosure as set forth in this specification supersedes any conflicting material incorporated by reference. Any material, or portion thereof, that is said to be incorporated by reference into this specification, but which conflicts with existing definitions, statements, or other disclosure material set forth herein, is only incorporated to the extent that no conflict arises between that incorporated material and the existing disclosure material. Applicants reserve the right to amend this specification to expressly recite any subject matter, or portion thereof, incorporated by reference herein.

1. A method for editing a Spinocerebellar Ataxia Type 2 Protein (ATXN2) gene in a cell by genome editing comprising: introducing into the cell one or more deoxyribonucleic acid (DNA) endonucleases to effect one or more single-strand breaks (SSBs) or double-strand breaks (DSBs) within or near the ATXN2 gene that results in a permanent deletion in the expanded trinucleotide repeat or replacement of one or more nucleotide bases, or one or more exons and/or introns within or near the ATXN2 gene, thereby restoring the ATXN2 gene function.

2. A method for editing a Spinocerebellar Ataxia Type 2 Protein (ATXN2) gene in a cell by genome editing comprising: introducing into the cell one or more deoxyribonucleic acid (DNA) endonucleases to effect one or more single-strand breaks (SSBs) or double-strand breaks (DSBs) within or near the ATXN2 gene or ATXN2 regulatory elements that results in one or more permanent insertion, deletion or mutation of at least one nucleotide within or near the ATXN2 gene and/or a permanent deletion in the expanded trinucleotide repeat, thereby reducing or eliminating the expression or function of aberrant ATXN2 gene products.

3. An ex vivo method for treating a patient having an ATXN2 related condition or disorder comprising:
editing a patient specific induced pluripotent stem cell (iPSC) within or near a Spinocerebellar Ataxia Type 2 Protein (ATXN2) gene or other DNA sequences that encode regulatory elements of the ATXN2 gene;
differentiating the edited iPSC into a neuron or glial cell of the Central Nervous System (CNS); and
implanting the neuron or glial cell of the Central Nervous System (CNS) into the patient.

4. The method of claim 3, wherein the editing step comprises: introducing into the iPSC one or more deoxyribonucleic acid (DNA) endonucleases to effect one or more single-strand breaks (SSBs) or double-strand breaks (DSBs) within or near the ATXN2 gene that results in a permanent deletion of the expanded trinucleotide repeat or replacement of one or more nucleotide bases, or one or more exons and/or introns within or near the ATXN2 gene and/or a permanent deletion in the expanded trinucleotide repeat, thereby restoring the ATXN2 gene function.

5. The method of claim 3, wherein the editing step comprises introducing into the iPSC one or more deoxyribonucleic acid (DNA) endonucleases to effect one or more single-strand breaks (SSBs) or double-strand breaks (DSBs) within or near the ATXN2 gene or ATXN2 regulatory elements that results in one or more permanent insertion, deletion or mutation of at least one nucleotide within or near the ATXN2 gene, thereby reducing or eliminating the expression or function of aberrant ATXN2 gene products.

6. The method of claims 3-5, further comprising:
creating the iPSC, wherein the creating step comprises:
isolating a somatic cell from the patient; and
introducing a set of pluripotency-associated genes into the somatic cell to induce the somatic cell to become the iPSC.

7. The method of claim 6, wherein the somatic cell is a fibroblast.

8. The method of claim 6, wherein the set of pluripotency-associated genes is one or more of the genes selected from the group consisting of: OCT4, SOX2, KLF4, Lin28, NANOG and cMYC.

9. An ex vivo method for treating a patient having an ATXN2 related condition or disorder comprising:
editing a mesenchymal stem cell within or near a Spinocerebellar Ataxia Type 2 Protein (ATXN2) gene or other DNA sequences that encode regulatory elements of the ATXN2 gene;
differentiating the edited mesenchymal stem cell into a neuron or glial cell of the Central Nervous System (CNS); and
implanting the neuron or glial cell of the Central Nervous System (CNS) into the patient.

10. The method of claim 9, wherein the editing step comprises: introducing into the mesenchymal stem cell one or more deoxyribonucleic acid (DNA) endonucleases to effect one or more single-strand breaks (SSBs) or double-strand breaks (DSBs) within or near the ATXN2 gene that results in a permanent deletion of the expanded trinucleotide repeat or replacement of one or more nucleotide bases, or one or more exons and/or introns within or near the ATXN2 gene, thereby restoring the ATXN2 gene function.

11. The method of claim 9, wherein the editing step comprises: introducing into the mesenchymal stem cell one or more deoxyribonucleic acid (DNA) endonucleases to effect one or more single-strand breaks (SSBs) or double-strand breaks (DSBs) within or near the ATXN2 gene or ATXN2 regulatory elements that results in one or more permanent insertion, deletion or mutation of at least one nucleotide within or near the ATXN2 gene and/or a permanent deletion in the expanded trinucleotide repeat, thereby reducing or eliminating the expression or function of aberrant ATXN2 gene products.

12. The method of claims 9-11, further comprising: isolating the mesenchymal stem cell from the patient, wherein the mesenchymal stem cell is isolated from the patient's bone marrow or peripheral blood.

13. The method of claim 12, wherein the isolating step comprises: aspiration of bone marrow and isolation of mesenchymal stem cells using density gradient centrifugation media.

14. An in vivo method for treating a patient with an ATXN2 related condition or disorder comprising: editing the Spinocerebellar Ataxia Type 2 Protein (ATXN2) gene in a cell of the patient.

15. The method of claim 14, wherein the editing step comprises: introducing into the cell one or more deoxyribonucleic acid (DNA) endonucleases to effect one or more single-strand breaks (SSBs) or double-strand breaks (DSBs) within or near the ATXN2 gene that results in a permanent deletion of the expanded trinucleotide repeat or replacement of one or more nucleotide bases, or one or more exons and/or introns within or near the ATXN2 gene, thereby restoring the ATXN2 gene function.

16. The method of claim 14, wherein the editing step comprises: introducing into the cell one or more deoxyribonucleic acid (DNA) endonucleases to effect one or more single-strand breaks (SSBs) or double-strand breaks (DSBs) within or near the ATXN2 gene or ATXN2 regulatory elements that results in one or more permanent insertion, deletion or mutation of at least one nucleotide within or near the ATXN2 gene and/or a permanent deletion in the expanded trinucleotide repeat, thereby reducing or eliminating the expression or function of aberrant ATXN2 gene products.

17. The method of any one of claims 14-16, wherein the cell is a cell of the Central Nervous System (CNS).

18. The method of claim 17, wherein the cell of the Central Nervous System (CNS) is a neuron.

19. The method of claim 17, wherein the cell of the Central Nervous System (CNS) is a glial cell.

20. The method of any one of claims 17-19, wherein the one or more deoxyribonucleic acid (DNA) endonuclease is delivered to the cell of the Central Nervous System (CNS) via any administration route selected from the group consisting of intraparenchymal, intravenous, intra-arterial, intracerebroventricular, intracisternal, intrathecal, intracranial or intraperitoneal routes.

21. The method of any one of claim 3, 9, or 14, wherein the ATXN2 related condition or disorder is Spinocerebellar ataxia type 2 (SCA2).

22. A method of altering the contiguous genomic sequence of an ATXN2 gene in a cell comprising: contacting the cell with one or more deoxyribonucleic acid (DNA) endonuclease to effect one or more single-strand breaks (SSBs) or double-strand breaks (DSBs).

23. The method of claim 22, wherein the alteration of the contiguous genomic sequence occurs in one or more exons of the ATXN2 gene.

24. The method of claim 23, wherein the alteration of the contiguous genomic sequence occurs in exon 1 of the ATXN2 gene.

25. The method of any one of claims 1-24, wherein the one or more deoxyribonucleic acid (DNA) endonuclease is selected from any of those sequences in SEQ ID NOs: 1-620, and variants having at least 90% homology to any of those sequences disclosed in SEQ ID NOs: 1-620.

26. The method of claim 25, wherein the one or more deoxyribonucleic acid (DNA) endonuclease is one or more protein or polypeptide.

27. The method of claim 26, wherein the one or more protein or polypeptide is flanked at the N-terminus, the C-terminus, or both the N-terminus and C-terminus by one or more nuclear localization signals (NLSs).

28. The method of claim 27, wherein the one or more protein or polypeptide is flanked by two NLSs, one NLS located at the N-terminus and the second NLS located at the C-terminus.

29. The method of any one of claims 27-28, wherein the one or more NLSs is a SV40 NLS.

30. The method of claim 25, wherein the one or more deoxyribonucleic acid (DNA) endonuclease is one or more polynucleotide encoding the one or more DNA endonuclease.

31. The method of claim 30, wherein the one or more deoxyribonucleic acid (DNA) endonuclease is one or more ribonucleic acid (RNA) encoding the one or more DNA endonuclease.

32. The method of claim 31, wherein the one or more ribonucleic acid (RNA) is one or more chemically modified RNA.

33. The method of claim 32, wherein the one or more ribonucleic acid (RNA) is chemically modified in the coding region.

34. The method of any one of claims 30-33, wherein the one or more polynucleotide or one or more ribonucleic acid (RNA) is codon optimized.

35. The method of any one of claims 1-34, wherein the method further comprises introducing one or more gRNA or one or more sgRNA.

36. The method of claim 35, wherein the one or more gRNA or one or more sgRNA comprises a spacer sequence that is complementary to a sequence within or near the expanded trinucleotide repeat in the ATXN2 gene.

37. The method of claim 35, wherein the one or more gRNA or one or more sgRNA comprises a spacer sequence that is complementary to a DNA sequence within or near the ATXN2 gene.

38. The method of claim 35, wherein the one or more gRNA or one or more sgRNA comprises a spacer sequence that is complementary to a sequence flanking the ATXN2 gene or other sequence that encodes a regulatory element of the ATXN2 gene.

39. The method of claim 35, wherein the one or more gRNA or one or more sgRNA comprises a spacer sequence that is complementary to a DNA sequence within or near exon 1 of the ATXN2 gene.

40. The method of any one of claims 35-39, wherein the one or more gRNA or one or more sgRNA is chemically modified.

41. The method of claim 40, wherein the one or more modified sgRNAs comprises three 2′-O-methyl-phosphorothioate residues at or near each of its 5′ and 3′ ends.

42. The method of any one of claims 39-41, wherein the one or more gRNA or one or more sgRNA comprises a RNA sequence corresponding to a sequence selected from the group consisting of SEQ ID NOs: 34621, 34565, 34606, 54554, 34437, 34563, 54418, 54661, 34632, 34446, 54409, 54671, 54693, 54539, 54408, 54555, 54694, 34505, 54695, 34504, 34542, 54672, 34562, 34435, 54523, 54669, 34544, 54660, 54646, 54648, 34503, 54691, 54407, 54422, 54556, 54411, 54421, 54540, 54541, 34484, 54647, 54673, 54495, 34548, and 34543.

43. The method of any one of claims 35-40, wherein the one or more gRNA or one or more sgRNA is pre-complexed with the one or more deoxyribonucleic acid (DNA) endonuclease to form one or more ribonucleoproteins (RNPs).

44. The method of claim 43, wherein the pre-complexing involves a covalent attachment of the one or more gRNA or one or more sgRNA to the one or more deoxyribonucleic acid (DNA) endonuclease.

45. The method of claims 43-44, wherein the weight ratio of sgRNA to DNA endonuclease in the RNP is 1:1.

46. The method of any one of claims 25-45, wherein the one or more deoxyribonucleic acid (DNA) endonuclease is formulated in a liposome or lipid nanoparticle.

47. The method of any one of claims 35-45, wherein the one or more deoxyribonucleic acid (DNA) endonuclease is formulated in a liposome or a lipid nanoparticle which also comprises the one or more gRNA or one or more sgRNA.

48. The method of any one of claim 25, or 35-42, wherein the one or more deoxyribonucleic acid (DNA) endonuclease is encoded in an AAV vector particle.

49. The method of any of the claims 35-42, wherein the one or more gRNA or one or more sgRNA is encoded in an AAV vector particle.

50. The method of any of the claims 35-42, wherein the one or more deoxyribonucleic acid (DNA) endonuclease is encoded in an AAV vector particle which also encodes the one or more gRNA or one or more sgRNA.

51. The method of any one of claims 48-50, wherein the AAV vector particle is selected from the group consisting of any of those sequences disclosed in SEQ ID NOs: 4734-5302 and Table 2.

52. The method of any of claims 1-51, wherein the method further comprises introducing into the cell a donor template comprising at least a portion of the wild-type ATXN2 gene.

53. The method of claim 52, wherein the at least a portion of the wild-type ATXN2 gene comprises one or more sequences selected from the group consisting of an ATXN2 exon, an ATXN2 intron, and a sequence comprising an exon:intron junction of ATXN2.

54. The method of any one of claims 52-53, wherein the donor template comprises homologous arms to the genomic locus of the ATXN2 gene.

55. The method of any one of claims 52-54, wherein the donor template is either a single or double stranded polynucleotide.

56. The method of any one of claims 52-55, wherein the donor template is encoded in an AAV vector particle, where the AAV vector particle is selected from the group consisting of any of those disclosed in SEQ ID NOs: 4734-5302 and Table 2.

57. The method of any one of claims 52-55, wherein the one or more polynucleotide encoding one or more deoxyribonucleic acid (DNA) endonuclease is formulated into a lipid nanoparticle, and the one or more gRNA or one or more sgRNA is delivered to the cell ex vivo by electroporation and the donor template is delivered to the cell by an adeno-associated virus (AAV) vector.

58. The method of any one of claims 52-55, wherein the one or more polynucleotide encoding one or more deoxyribonucleic acid (DNA) endonuclease is formulated into a liposome or lipid nanoparticle which also comprises the one or more gRNA or one or more sgRNA and the donor template.

59. The method of any one of the preceding claims, wherein the ATXN2 gene is located on Chromosome 12: 111,452,214-111,599,676 (Genome Reference Consortium—GRCh38).

60. A single-molecule guide RNA comprising at least a spacer sequence that is an RNA sequence corresponding to any one of SEQ ID NOs: 5305-108,217.

61. The single-molecule guide RNA of claim 60, wherein the single-molecule guide RNA further comprises a spacer extension region.

62. The single-molecule guide RNA of claim 60, wherein the single-molecule guide RNA further comprises a tracrRNA extension region.

63. The single-molecule guide RNA of any one of claim 60-62, wherein the single-molecule guide RNA is chemically modified.

64. The single-molecule guide RNA of any of claims 60-63 pre-complexed with a DNA endonuclease.

65. The single-molecule guide RNA of claim 64, wherein the DNA endonuclease is a Cas9 or Cpf1 endonuclease.

66. The single-molecule guide RNA of claim 65, wherein the Cas9 or Cpf1 endonuclease is selected from the group consisting of S. pyogenes Cas9, S. aureus Cas9, N. meningitidis Cas9, S. thermophilus CRISPR1 Cas9, S. thermophilus CRISPR 3 Cas9, T. denticola Cas9, L. bacterium ND2006 Cpf1 and Acidaminococcus sp. BV3L6 Cpf1, and variants having at least 90% homology to the endonucleases.

67. The single-molecule guide RNA of claim 66, wherein the Cas9 or Cpf1 endonuclease comprises one or more nuclear localization signals (NLSs).

68. The single-molecule guide RNA of claim 67, wherein at least one NLS is at or within 50 amino acids of the amino-terminus of the Cas9 or Cpf1 endonuclease and/or at least one NLS is at or within 50 amino acids of the carboxy-terminus of the Cas9 or Cpf1 endonuclease.

69. A DNA encoding the single-molecule guide RNA of any one of claims 60-63.

70. A therapeutic comprising at least one or more gRNAs for editing an ATXN2 gene in a cell from a patient with an ATXN2 related condition or disorder, the one or more gRNAs comprising a spacer sequence selected from the group consisting of nucleic acid sequences in any one of SEQ ID NOs: 5305-108,217 of the Sequence Listing.

71. A therapeutic for treating a patient with an ATXN2 related condition or disorder formed by the method comprising:
introducing one or more DNA endonucleases;
introducing one or more gRNA or one or more sgRNA for editing a ATXN2 gene;
wherein the one or more gRNAs or sgRNAs comprise a spacer sequence selected from the group consisting of nucleic acid sequences in SEQ ID NOs: 5305-108,217 of the Sequence Listing.

72. The method of any one of claim 70 or 71, wherein the ATXN2 related condition or disorder is Spinocerebellar ataxia type 2 (SCA2).

73. The method of any one of claim 70 or 71, wherein the ATXN2 related condition or disorder is amyotrophic lateral sclerosis (ALS).

74. The method of any one of claim 3, 9, or 14, wherein the ATXN2 related condition or disorder is amyotrophic lateral sclerosis (ALS).

The application's sequence listing, which the Patent Office published only in electronic form, follows.

SEQUENCE LISTING (108252 sequences)

SEQ ID NO: 1 - protein, 1368 aa, Streptococcus pyogenes [sequence omitted]

SEQ ID NO: 2 - DNA, 4107 bp, Streptococcus pyogenes
atggataagaaatactcaataggcttagatatcggcacaaatagcgtcggatgggcggtgatcactgatgaatataaggttccgtctaaaaagttcaaggttctgggaaatacagaccgccacagtatcaaaaaaaatcttataggggctcttttatttgacagtggagagacagcggaagcgactcgtctcaaacggacagctcgtagaaggtatacacgtcggaagaatcgtatttgttatctacaggagattttttcaaatgagatggcgaaagtagatgatagtttctttcatcgacttgaagagtcttttttggtggaagaagacaagaagcatgaacgtcatcctatttttggaaatatagtagatgaagttgcttatcatgagaaatatccaactatctatcatctgcgaaaaaaattggtagattctactgataaagcggatttgcgcttaatctatttggccttagcgcatatgattaagtttcgtggtcattttttgattgagggagatttaaatcctgataatagtgatgtggacaaactatttatccagttggtacaaacctacaatcaattatttgaagaaaaccctattaacgcaagtggagtagatgctaaagcgattctttctgcacgattgagtaaatcaagacgattagaaaatctcattgctcagctccccggtgagaagaaaaatggcttatttgggaatctcattgctttgtcattgggtttgacccctaattttaaatcaaattttgatttggcagaagatgctaaattacagctttcaaaagatacttacgatgatgatttagataatttattggcgcaaattggagatcaatatgctgatttgtttttggcagctaagaatttatcagatgctattttactttcagatatcctaagagtaaatactgaaataactaaggctcccctatcagcttcaatgattaaacgctacgatgaacatcatcaagacttgactcttttaaaagctttagttcgacaacaacttccagaaaagtataaagaaatcttttttgatcaatcaaaaaacggatatgcaggttatattgatgggggagctagccaagaagaattttataaatttatcaaaccaattttagaaaaaatggatggtactgaggaattattggtgaaactaaatcgtgaagatttgctgcgcaagcaacggacctttgacaacggctctattccccatcaaattcacttgggtgagctgcatgctattttgagaagacaagaagacttttatccatttttaaaagacaatcgtgagaagattgaaaaaatcttgacttttcgaattccttattatgttggtccattggcgcgtggcaatagtcgttttgcatggatgactcggaagtctgaagaaacaattaccccatggaattttgaagaagttgtcgataaaggtgcttcagctcaatcatttattgaacgcatgacaaactttgataaaaatcttccaaatgaaaaagtactaccaaaacatagtttgctttatgagtattttacggtttataacgaattgacaaaggtcaaatatgttactgaaggaatgcgaaaaccagcatttctttcaggtgaacagaagaaagccattgttgatttactcttcaaaacaaatcgaaaagtaaccgttaagcaattaaaagaagattatttcaaaaaaatagaatgttttgatagtgttgaaatttcaggagttgaagatagatttaatgcttcattaggtacctaccatgatttgctaaaaattattaaagataaagattttttggataatgaagaaaatgaagatatcttagaggatattgttttaacattgaccttatttgaagatagggagatgattgaggaaagacttaaaacatatgctcacctctttgatgataaggtgatgaaacagcttaaacgtcgccgttatactggttggggacgtttgtctcgaaaattgattaatggtattagggataagcaatctggcaaaacaatattagattttttgaaatcagatggttttgccaatcgcaattttatgcagctgatccatgatgatagtttgacatttaaagaagacattcaaaaagcacaagtgtctggacaaggcgatagtttacatgaacatattgcaaatttagctggtagccctgctattaaaaaaggtattttacagactgtaaaagttgttgatgaattggtcaaagtaatggggcggcataagccagaaaatatcgttattgaaatggcacgtgaaaatcagacaactcaaaagggccagaaaaattcgcgagagcgtatgaaacgaatcgaagaaggtatcaaagaattaggaagtcagattcttaaagagcatcctgttgaaaatactcaattgcaaaatgaaaagctctatctctattatctccaaaatggaagagacatgtatgtggaccaagaattagatattaatcgtttaagtgattatgatgtcgatcacattgttccacaaagtttccttaaagacgattcaatagacaataaggtcttaacgcgttctgataaaaatcgtggtaaatcggataacgttccaagtgaagaagtagtcaaaaagatgaaaaactattggagacaacttctaaacgccaagttaatcactcaacgtaagtttgataatttaacgaaagctgaacgtggaggtttgagtgaacttgataaagctggttttatcaaacgccaattggttgaaactcgccaaatcactaagcatgtggcacaaattttggatagtcgcatgaatactaaatacgatgaaaatgataaacttattcgagaggttaaagtgattaccttaaaatctaaattagtttctgacttccgaaaagatttccaattctataaagtacgtgagattaacaattaccatcatgcccatgatgcgtatctaaatgccgtcgttggaactgctttgattaagaaatatccaaaacttgaatcggagtttgtctatggtgattataaagtttatgatgttcgtaaaatgattgctaagtctgagcaagaaataggcaaagcaaccgcaaaatatttcttttactctaatatcatgaacttcttcaaaacagaaattacacttgcaaatggagagattcgcaaacgccctctaatcgaaactaatggggaaactggagaaattgtctgggataaagggcgagattttgccacagtgcgcaaagtattgtccatgccccaagtcaatattgtcaagaaaacagaagtacagacaggcggattctccaaggagtcaattttaccaaaaagaaattcggacaagcttattgctcgtaaaaaagactgggatccaaaaaaatatggtggttttgatagtccaacggtagcttattcagtcctagtggttgctaaggtggaaaaagggaaatcgaagaagttaaaatccgttaaagagttactagggatcacaattatggaaagaagttcctttgaaaaaaatccgattgactttttagaagctaaaggatataaggaagttaaaaaagacttaatcattaaactacctaaatatagtctttttgagttagaaaacggtcgtaaacggatgctggctagtgccggagaattacaaaaaggaaatgagctggctctgccaagcaaatatgtgaattttttatatttagctagtcattatgaaaagttgaagggtagtccagaagataacgaacaaaaacaattgtttgtggagcagcataagcattatttagatgagattattgagcaaatcagtgaattttctaagcgtgttattttagcagatgccaatttagataaagttcttagtgcatataacaaacatagagacaaaccaatacgtgaacaagcagaaaatattattcatttatttacgttgacgaatcttggagctcccgctgcttttaaatattttgatacaacaattgatcgtaaacgatatacgtctacaaaagaagttttagatgccactcttatccatcaatccatcactggtctttatgaaacacgcattgatttgagtcagctaggaggtgactga

SEQ ID NO: 3 - DNA, 4107 bp, Streptococcus pyogenes
atggacaagaagtactccattgggctcgctatcggcacaaacagcgtcggctgggccgtcattacggacgagtacaaggtgccgagcaaaaaattcaaagttctgggcaataccgatcgccacagcataaagaagaacctcattggcgccctcctgttcgactccggggagacggccgaagccacgcggctcaaaagaacagcacggcgcagatatacccgcagaaagaatcggatctgctacctgcaggagatctttagtaatgagatggctaaggtggatgactctttcttccataggctggaggagtcctttttggtggaggaggataaaaagcacgagcgccacccaatctttggcaatatcgtggacgaggtggcgtaccatgaaaagtacccaaccatatatcatctgaggaagaagcttgtagacagtactgataaggctgacttgcggttgatctatctcgcgctggcgcatatgatcaaatttcggggacacttcctcatcgagggggacctgaacccagacaacagcgatgtcgacaaactctttatccaactggttcagacttacaatcagcttttcgaagagaacccgatcaacgcatccggagttgacgccaaagcaatcctgagcgctaggctgtccaaatcccggcggctcgaaaacctcatcgcacagctccctggggagaagaagaacggcctgtttggtaatcttatcgccctgtcactcgggctgacccccaactttaaatctaacttcgacctggccgaagatgccaagcttcaactgagcaaagacacctacgatgatgatctcgacaatctgctggcccagatcggcgaccagtacgcagacctttttttggcggcaaagaacctgtcagacgccattctgctgagtgatattctgcgagtgaacacggagatcaccaaagctccgctgagcgctagtatgatcaagcgctatgatgagcaccaccaagacttgactttgctgaaggcccttgtcagacagcaactgcctgagaagtacaaggaaattttcttcgatcagtctaaaaatggctacgccggatacattgacggcggagcaagccaggaggaattttacaaatttattaagcccatcttggaaaaaatggacggcaccgaggagctgctggtaaagcttaacagagaagatctgttgcgcaaacagcgcactttcgacaatggaagcatcccccaccagattcacctgggcgaactgcacgctatcctcaggcggcaagaggatttctacccctttttgaaagataacagggaaaagattgagaaaatcctcacatttcggataccctactatgtaggccccctcgcccggggaaattccagattcgcgtggatgactcgcaaatcagaagagaccatcactccctggaacttcgaggaagtcgtggataagggggcctctgcccagtccttcatcgaaaggatgactaactttgataaaaatctgcctaacgaaaaggtgcttcctaaacactctctgctgtacgagtacttcacagtttataacgagctcaccaaggtcaaatacgtcacagaagggatgagaaagccagcattcctgtctggagagcagaagaaagctatcgtggacctcctcttcaagacgaaccggaaagttaccgtgaaacagctcaaagaagactatttcaaaaagattgaatgtttcgactctgttgaaatcagcggagtggaggatcgcttcaacgcatccctgggaacgtatcacgatctcctgaaaatcattaaagacaaggacttcctggacaatgaggagaacgaggacattcttgaggacattgtcctcacccttacgttgtttgaagatagggagatgattgaagaacgcttgaaaacttacgctcatctcttcgacgacaaagtcatgaaacagctcaagaggcgccgatatacaggatgggggcggctgtcaagaaaactgatcaatgggatccgagacaagcagagtggaaagacaatcctggattttcttaagtccgatggatttgccaaccggaacttcatgcagttgatccatgatgactctctcacctttaaggaggacatccagaaagcacaagtttctggccagggggacagtcttcacgagcacatcgctaatcttgcaggtagcccagctatcaaaaagggaatactgcagaccgttaaggtcgtggatgaactcgtcaaagtaatgggaaggcataagcccgagaatatcgttatcgagatggcccgagagaaccaaactacccagaagggacagaagaacagtagggaaaggatgaagaggattgaagagggtataaaagaactggggtcccaaatccttaaggaacacccagttgaaaacacccagcttcagaatgagaagctctacctgtactacctgcagaacggcagggacatgtacgtggatcaggaactggacatcaatcggctctccgactacgacgtggctgctatcgtgccccagtcttttctcaaagatgattctattgataataaagtgttgacaagatccgataaagctagagggaagagtgataacgtcccctcagaagaagttgtcaagaaaatgaaaaattattggcggcagctgctgaacgccaaactgatcacacaacggaagttcgataatctgactaaggctgaacgaggtggcctgtctgagttggataaagccggcttcatcaaaaggcagcttgttgagacacgccagatcaccaagcacgtggcccaaattctcgattcacgcatgaacaccaagtacgatgaaaatgacaaactgattcgagaggtgaaagttattactctgaagtctaagctggtctcagatttcagaaaggactttcagttttataaggtgagagagatcaacaattaccaccatgcgcatgatgcctacctgaatgcagtggtaggcactgcacttatcaaaaaatatcccaagcttgaatctgaatttgtttacggagactataaagtgtacgatgttaggaaaatgatcgcaaagtctgagcaggaaataggcaaggccaccgctaagtacttcttttacagcaatattatgaattttttcaagaccgagattacactggccaatggagagattcggaagcgaccacttatcgaaacaaacggagaaacaggagaaatcgtgtgggacaagggtagggatttcgcgacagtccggaaggtcctgtccatgccgcaggtgaacatcgttaaaaagaccgaagtacagaccggaggcttctccaaggaaagtatcctcccgaaaaggaacagcgacaagctgatcgcacgcaaaaaagattgggaccccaagaaatacggcggattcgattctcctacagtcgcttacagtgtactggttgtggccaaagtggagaaagggaagtctaaaaaactcaaaagcgtcaaggaactgctgggcatcacaatcatggagcgatcaagcttcgaaaaaaaccccatcgactttctcgaggcgaaaggatataaagaggtcaaaaaagacctcatcattaagcttcccaagtactctctctttgagcttgaaaacggccggaaacgaatgctcgctagtgcgggcgagctgcagaaaggtaacgagctggcactgccctctaaatacgttaatttcttgtatctggccagccactatgaaaagctcaaagggtctcccgaagataatgagcagaagcagctgttcgtggaacaacacaaacactaccttgatgagatcatcgagcaaataagcgaattctccaaaagagtgatcctcgccgacgctaacctcgataaggtgctttctgcttacaataagcacagggataagcccatcagggagcaggcagaaaacattatccacttgtttactctgaccaacttgggcgcgcctgcagccttcaagtacttcgacaccaccatagacagaaagcggtacacctctacaaaggaggtcctggacgccacactgattcatcagtcaattacggggctctatgaaacaagaatcgacctctctcagctcggtggagactaa

SEQ ID NO: 4 - DNA, 4140 bp, Streptococcus pyogenes
atggacaagaagtactccattgggctcgatatcggcacaaacagcgtcggctgggccgtcattacggacgagtacaaggtgccgagcaaaaaattcaaagttctgggcaataccgatcgccacagcataaagaagaacctcattggcgccctcctgttcgactccggggagacggccgaagccacgcggctcaaaagaacagcacggcgcagatatacccgcagaaagaatcggatctgctacctgcaggagatctttagtaatgagatggctaaggtggatgactctttcttccataggctggaggagtcctttttggtggaggaggataaaaagcacgagcgccacccaatctttggcaatatcgtggacgaggtggcgtaccatgaaaagtacccaaccatatatcatctgaggaagaagcttgtagacagtactgataaggctgacttgcggttgatctatctcgcgctggcgcatatgatcaaatttcggggacacttcctcatcgagggggacctgaacccagacaacagcgatgtcgacaaactctttatccaactggttcagacttacaatcagcttttcgaagagaacccgatcaacgcatccggagttgacgccaaagcaatcctgagcgctaggctgtccaaatcccggcggctcgaaaacctcatcgcacagctccctggggagaagaagaacggcctgtttggtaatcttatcgccctgtcactcgggctgacccccaactttaaatctaacttcgacctggccgaagatgccaagcttcaactgagcaaagacacctacgatgatgatctcgacaatctgctggcccagatcggcgaccagtacgcagacctttttttggcggcaaagaacctgtcagacgccattctgctgagtgatattctgcgagtgaacacggagatcaccaaagctccgctgagcgctagtatgatcaagcgctatgatgagcaccaccaagacttgactttgctgaaggcccttgtcagacagcaactgcctgagaagtacaaggaaattttcttcgatcagtctaaaaatggctacgccggatacattgacggcggagcaagccaggaggaattttacaaatttattaagcccatcttggaaaaaatggacggcaccgaggagctgctggtaaagcttaacagagaagatctgttgcgcaaacagcgcactttcgacaatggaagcatcccccaccagattcacctgggcgaactgcacgctatcctcaggcggcaagaggatttctacccctttttgaaagataacagggaaaagattgagaaaatcctcacatttcggataccctactatgtaggccccctcgcccggggaaattccagattcgcgtggatgactcgcaaatcagaagagaccatcactccctggaacttcgaggaagtcgtggataagggggcctctgcccagtccttcatcgaaaggatgactaactttgataaaaatctgcctaacgaaaaggtgcttcctaaacactctctgctgtacgagtacttcacagtttataacgagctcaccaaggtcaaatacgtcacagaagggatgagaaagccagcattcctgtctggagagcagaagaaagctatcgtggacctcctcttcaagacgaaccggaaagttaccgtgaaacagctcaaagaagactatttcaaaaagattgaatgtttcgactctgttgaaatcagcggagtggaggatcgcttcaacgcatccctgggaacgtatcacgatctcctgaaaatcattaaagacaaggacttcctggacaatgaggagaacgaggacattcttgaggacattgtcctcacccttacgttgtttgaagatagggagatgattgaagaacgcttgaaaacttacgctcatctcttcgacgacaaagtcatgaaacagctcaagaggcgccgatatacaggatgggggcggctgtcaagaaaactgatcaatgggatccgagacaagcagagtggaaagacaatcctggattttcttaagtccgatggatttgccaaccggaacttcatgcagttgatccatgatgactctctcacctttaaggaggacatccagaaagcacaagtttctggccagggggacagtcttcacgagcacatcgctaatcttgcaggtagcccagctatcaaaaagggaatactgcagaccgttaaggtcgtggatgaactcgtcaaagtaatgggaaggcataagcccgagaatatcgttatcgagatggcccgagagaaccaaactacccagaagggacagaagaacagtagggaaaggatgaagaggattgaagagggtataaaagaactggggtcccaaatccttaaggaacacccagttgaaaacacccagcttcagaatgagaagctctacctgtactacctgcagaacggcagggacatgtacgtggatcaggaactggacatcaatcggctctccgactacgacgtggatcatatcgtgccccagtcttttctcaaagatgattctattgataataaagtgttgacaagatccgataaaaatagagggaagagtgataacgtcccctcagaagaagttgtcaagaaaatgaaaaattattggcggcagctgctgaacgccaaactgatcacacaacggaagttcgataatctgactaaggctgaacgaggtggcctgtctgagttggataaagccggcttcatcaaaaggcagcttgttgagacacgccagatcaccaagcacgtggcccaaattctcgattcacgcatgaacaccaagtacgatgaaaatgacaaactgattcgagaggtgaaagttattactctgaagtctaagctggtctcagatttcagaaaggactttcagttttataaggtgagagagatcaacaattaccaccatgcgcatgatgcctacctgaatgcagtggtaggcactgcacttatcaaaaaatatcccaagcttgaatctgaatttgtttacggagactataaagtgtacgatgttaggaaaatgatcgcaaagtctgagcaggaaataggcaaggccaccgctaagtacttcttttacagcaatattatgaattttttcaagaccgagattacactggccaatggagagattcggaagcgaccacttatcgaaacaaacggagaaacaggagaaatcgtgtgggacaagggtagggatttcgcgacagtccggaaggtcctgtccatgccgcaggtgaacatcgttaaaaagaccgaagtacagaccggaggcttctccaaggaaagtatcctcccgaaaaggaacagcgacaagctgatcgcacgcaaaaaagattgggaccccaagaaatacggcggattcgattctcctacagtcgcttacagtgtactggttgtggccaaagtggagaaagggaagtctaaaaaactcaaaagcgtcaaggaactgctgggcatcacaatcatggagcgatcaagcttcgaaaaaaaccccatcgactttctcgaggcgaaaggatataaagaggtcaaaaaagacctcatcattaagcttcccaagtactctctctttgagcttgaaaacggccggaaacgaatgctcgctagtgcgggcgagctgcagaaaggtaacgagctggcactgccctctaaatacgttaatttcttgtatctggccagccactatgaaaagctcaaagggtctcccgaagataatgagcagaagcagctgttcgtggaacaacacaaacactaccttgatgagatcatcgagcaaataagcgaattctccaaaagagtgatcctcgccgacgctaacctcgataaggtgctttctgcttacaataagcacagggataagcccatcagggagcaggcagaaaacattatccacttgtttactctgaccaacttgggcgcgcctgcagccttcaagtacttcgacaccaccatagacagaaagcggtacacctctacaaaggaggtcctggacgccacactgattcatcagtcaattacggggctctatgaaacaagaatcgacctctctcagctcggtggagacagcagggctgaccccaagaagaagaggaaggtgtga

SEQ ID NO: 5 - DNA, 4200 bp, Streptococcus pyogenes
atggacaagaagtactccattgggctcgatatcggcacaaacagcgtcggctgggccgtcattacggacgagtacaaggtgccgagcaaaaaattcaaagttctgggcaataccgatcgccacagcataaagaagaacctcattggcgccctcctgttcgactccggggagacggccgaagccacgcggctcaaaagaacagcacggcgcagatatacccgcagaaagaatcggatctgctacctgcaggagatctttagtaatgagatggctaaggtggatgactctttcttccataggctggaggagtcctttttggtggaggaggataaaaagcacgagcgccacccaatctttggcaatatcgtggacgaggtggcgtaccatgaaaagtacccaaccatatatcatctgaggaagaagcttgtagacagtactgataaggctgacttgcggttgatctatctcgcgctggcgcatatgatcaaatttcggggacacttcctcatcgagggggacctgaacccagacaacagcgatgtcgacaaactctttatccaactggttcagacttacaatcagcttttcgaagagaacccgatcaacgcatccggagttgacgccaaagcaatcctgagcgctaggctgtccaaatcccggcggctcgaaaacctcatcgcacagctccctggggagaagaagaacggcctgtttggtaatcttatcgccctgtcactcgggctgacccccaactttaaatctaacttcgacctggccgaagatgccaagcttcaactgagcaaagacacctacgatgatgatctcgacaatctgctggcccagatcggcgaccagtacgcagacctttttttggcggcaaagaacctgtcagacgccattctgctgagtgatattctgcgagtgaacacggagatcaccaaagctccgctgagcgctagtatgatcaagcgctatgatgagcaccaccaagacttgactttgctgaaggcccttgtcagacagcaactgcctgagaagtacaaggaaattttcttcgatcagtctaaaaatggctacgccggatacattgacggcggagcaagccaggaggaattttacaaatttattaagcccatcttggaaaaaatggacggcaccgaggagctgctggtaaagcttaacagagaagatctgttgcgcaaacagcgcactttcgacaatggaagcatcccccaccagattcacctgggcgaactgcacgctatcctcaggcggcaagaggatttctacccctttttgaaagataacagggaaaagattgagaaaatcctcacatttcggataccctactatgtaggccccctcgcccggggaaattccagattcgcgtggatgactcgcaaatcagaagagaccatcactccctggaacttcgaggaagtcgtggataagggggcctctgcccagtccttcatcgaaaggatgactaactttgataaaaatctgcctaacgaaaaggtgcttcctaaacactctctgctgtacgagtacttcacagtttataacgagctcaccaaggtcaaatacgtcacagaagggatgagaaagccagcattcctgtctggagagcagaagaaagctatcgtggacctcctcttcaagacgaaccggaaagttaccgtgaaacagctcaaagaagactatttcaaaaagattgaatgtttcgactctgttgaaatcagcggagtggaggatcgcttcaacgcatccctgggaacgtatcacgatctcctgaaaatcattaaagacaaggacttcctggacaatgaggagaacgaggacattcttgaggacattgtcctcacccttacgttgtttgaagatagggagatgattgaagaacgcttgaaaacttacgctcatctcttcgacgacaaagtcatgaaacagctcaagaggcgccgatatacaggatgggggcggctgtcaagaaaactgatcaatgggatccgagacaagcagagtggaaagacaatcctggattttcttaagtccgatggatttgccaaccggaacttcatgcagttgatccatgatgactctctcacctttaaggaggacatccagaaagcacaagtttctggccagggggacagtcttcacgagcacatcgctaatcttgcaggtagcccagctatcaaaaagggaatactgcagaccgttaaggtcgtggatgaactcgtcaaagtaatgggaaggcataagcccgagaatatcgttatcgagatggcccgagagaaccaaactacccagaagggacagaagaacagtagggaaaggatgaagaggattgaagagggtataaaagaactggggtcccaaatccttaaggaacacccagttgaaaacacccagcttcagaatgagaagctctacctgtactacctgcagaacggcagggacatgtacgtggatcaggaactggacatcaatcggctctccgactacgacgtggatcatatcgtgccccagtcttttctcaaagatgattctattgataataaagtgttgacaagatccgataaaaatagagggaagagtgataacgtcccctcagaagaagttgtcaagaaaatgaaaaattattggcggcagctgctgaacgccaaactgatcacacaacggaagttcgataatctgactaaggctgaacgaggtggcctgtctgagttggataaagccggcttcatcaaaaggcagcttgttgagacacgccagatcaccaagcacgtggcccaaattctcgattcacgcatgaacaccaagtacgatgaaaatgacaaactgattcgagaggtgaaagttattactctgaagtctaagctggtctcagatttcagaaaggactttcagttttataaggtgagagagatcaacaattaccaccatgcgcatgatgcctacctgaatgcagtggtaggcactgcacttatcaaaaaatatcccaagcttgaatctgaatttgtttacggagactataaagtgtacgatgttaggaaaatgatcgcaaagtctgagcaggaaataggcaaggccaccgctaagtacttcttttacagcaatattatgaattttttcaagaccgagattacactggccaatggagagattcggaagcgaccacttatcgaaacaaacggagaaacaggagaaatcgtgtgggacaagggtagggatttcgcgacagtccggaaggtcctgtccatgccgcaggtgaacatcgttaaaaagaccgaagtacagaccggaggcttctccaaggaaagtatcctcccgaaaaggaacagcgacaagctgatcgcacgcaaaaaagattgggaccccaagaaatacggcggattcgattctcctacagtcgcttacagtgtactggttgtggccaaagtggagaaagggaagtctaaaaaactcaaaagcgtcaaggaactgctgggcatcacaatcatggagcgatcaagcttcgaaaaaaaccccatcgactttctcgaggcgaaaggatataaagaggtcaaaaaagacctcatcattaagcttcccaagtactctctctttgagcttgaaaacggccggaaacgaatgctcgctagtgcgggcgagctgcagaaaggtaacgagctggcactgccctctaaatacgttaatttcttgtatctggccagccactatgaaaagctcaaagggtctcccgaagataatgagcagaagcagctgttcgtggaacaacacaaacactaccttgatgagatcatcgagcaaataagcgaattctccaaaagagtgatcctcgccgacgctaacctcgataaggtgctttctgcttacaataagcacagggataagcccatcagggagcaggcagaaaacattatccacttgtttactctgaccaacttgggcgcgcctgcagccttcaagtacttcgacaccaccatagacagaaagcggtacacctctacaaaggaggtcctggacgccacactgattcatcagtcaattacggggctctatgaaacaagaatcgacctctctcagctcggtggagacgcggccgcagatccaaaaaagaagagaaaggtagatccaaaaaagaagagaaaggtagatccaaaaaagaagagaaaggtagatacggccgcatag

SEQ ID NO: 6 - DNA, 4326 bp, Streptococcus pyogenes
atggacaagaagtactccattgggctcgctatcggcacaaacagcgtcggctgggccgtcattacggacgagtacaaggtgccgagcaaaaaattcaaagttctgggcaataccgatcgccacagcataaagaagaacctcattggcgccctcctgttcgactccggggagacggccgaagccacgcggctcaaaagaacagcacggcgcagatatacccgcagaaagaatcggatctgctacctgcaggagatctttagtaatgagatggctaaggtggatgactctttcttccataggctggaggagtcctttttggtggaggaggataaaaagcacgagcgccacccaatctttggcaatatcgtggacgaggtggcgtaccatgaaaagtacccaaccatatatcatctgaggaagaagcttgtagacagtactgataaggctgacttgcggttgatctatctcgcgctggcgcatatgatcaaatttcggggacacttcctcatcgagggggacctgaacccagacaacagcgatgtcgacaaactctttatccaactggttcagacttacaatcagcttttcgaagagaacccgatcaacgcatccggagttgacgccaaagcaatcctgagcgctaggctgtccaaatcccggcggctcgaaaacctcatcgcacagctccctggggagaagaagaacggcctgtttggtaatcttatcgccctgtcactcgggctgacccccaactttaaatctaacttcgacctggccgaagatgccaagcttcaactgagcaaagacacctacgatgatgatctcgacaatctgctggcccagatcggcgaccagtacgcagacctttttttggcggcaaagaacctgtcagacgccattctgctgagtgatattctgcgagtgaacacggagatcaccaaagctccgctgagcgctagtatgatcaagcgctatgatgagcaccaccaagacttgactttgctgaaggcccttgtcagacagcaactgcctgagaagtacaaggaaattttcttcgatcagtctaaaaatggctacgccggatacattgacggcggagcaagccaggaggaattttacaaatttattaagcccatcttggaaaaaatggacggcaccgaggagctgctggtaaagcttaacagagaagatctgttgcgcaaacagcgcactttcgacaatggaagcatcccccaccagattcacctgggcgaactgcacgctatcctcaggcggcaagaggatttctacccctttttgaaagataacagggaaaagattgagaaaatcctcacatttcggataccctactatgtaggccccctcgcccggggaaattccagattcgcgtggatgactcgcaaatcagaagagaccatcactccctggaacttcgaggaagtcgtggataagggggcctctgcccagtccttcatcgaaaggatgactaactttgataaaaatctgcctaacgaaaaggtgcttcctaaacactctctgctgtacgagtacttcacagtttataacgagctcaccaaggtcaaatacgtcacagaagggatgagaaagccagcattcctgtctggagagcagaagaaagctatcgtggacctcctcttcaagacgaaccggaaagttaccgtgaaacagctcaaagaagactatttcaaaaagattgaatgtttcgactctgttgaaatcagcggagtggaggatcgcttcaacgcatccctgggaacgtatcacgatctcctgaaaatcattaaagacaaggacttcctggacaatgaggagaacgaggacattcttgaggacattgtcctcacccttacgttgtttgaagatagggagatgattgaagaacgcttgaaaacttacgctcatctcttcgacgacaaagtcatgaaacagctcaagaggcgccgatatacaggatgggggcggctgtcaagaaaactgatcaatgggatccgagacaagcagagtggaaagacaatcctggattttcttaagtccgatggatttgccaaccggaacttcatgcagttgatccatgatgactctctcacctttaaggaggacatccagaaagcacaagtttctggccagggggacagtcttcacgagcacatcgctaatcttgcaggtagcccagctatcaaaaagggaatactgcagaccgttaaggtcgtggatgaactcgtcaaagtaatgggaaggcataagcccgagaatatcgttatcgagatggcccgagagaaccaaactacccagaagggacagaagaacagtagggaaaggatgaagaggattgaagagggtataaaagaactggggtcccaaatccttaaggaacacccagttgaaaacacccagcttcagaatgagaagctctacctgtactacctgcagaacggcagggacatgtacgtggatcaggaactggacatcaatcggctctccgactacgacgtggctgctatcgtgccccagtcttttctcaaagatgattctattgataataaagtgttgacaagatccgataaagctagagggaagagtgataacgtcccctcagaagaagttgtcaagaaaatgaaaaattattggcggcagctgctgaacgccaaactgatcacacaacggaagttcgataatctgactaaggctgaacgaggtggcctgtctgagttggataaagccggcttcatcaaaaggcagcttgttgagacacgccagatcaccaagcacgtggcccaaattctcgattcacgcatgaacaccaagtacgatgaaaatgacaaactgattcgagaggtgaaagttattactctgaagtctaagctggtctcagatttcagaaaggactttcagttttataaggtgagagagatcaacaattaccaccatgcgcatgatgcctacctgaatgcagtggtaggcactgcacttatcaaaaaatatcccaagcttgaatctgaatttgtttacggagactataaagtgtacgatgttaggaaaatgatcgcaaagtctgagcaggaaataggcaaggccaccgctaagtacttcttttacagcaatattatgaattttttcaagaccgagattacactggccaatggagagattcggaagcgaccacttatcgaaacaaacggagaaacaggagaaatcgtgtgggacaagggtagggatttcgcgacagtccggaaggtcctgtccatgccgcaggtgaacatcgttaaaaagaccgaagtacagaccggaggcttctccaaggaaagtatcctcccgaaaaggaacagcgacaagctgatcgcacgcaaaaaagattgggaccccaagaaatacggcggattcgattctcctacagtcgcttacagtgtactggttgtggccaaagtggagaaagggaagtctaaaaaactcaaaagcgtcaaggaactgctgggcatcacaatcatggagcgatcaagcttcgaaaaaaaccccatcgactttctcgaggcgaaaggatataaagaggtcaaaaaagacctcatcattaagcttcccaagtactctctctttgagcttgaaaacggccggaaacgaatgctcgctagtgcgggcgagctgcagaaaggtaacgagctggcactgccctctaaatacgttaatttcttgtatctggccagccactatgaaaagctcaaagggtctcccgaagataatgagcagaagcagctgttcgtggaacaacacaaacactaccttgatgagatcatcgagcaaataagcgaattctccaaaagagtgatcctcgccgacgctaacctcgataaggtgctttctgcttacaataagcacagggataagcccatcagggagcaggcagaaaacattatccacttgtttactctgaccaacttgggcgcgcctgcagccttcaagtacttcgacaccaccatagacagaaagcggtacacctctacaaaggaggtcctggacgccacactgattcatcagtcaattacggggctctatgaaacaagaatcgacctctctcagctcggtggagacagcagggctgaccccaagaagaagaggaaggtggaggccagcggttccggacgggctgacgcattggacgattttgatctggatatgctgggaagtgacgccctcgatgattttgaccttgacatgcttggttcggatgcccttgatgactttgacctcgacatgctcggcagtgacgcccttgatgatttcgacctggacatgctgattaactctagatga

SEQ ID NO: 7 - DNA, 4359 bp, Streptococcus pyogenes
atgcccaagaagaagaggaaggtgggaagggggatggacaagaagtactccattgggctcgctatcggcacaaacagcgtcggctgggccgtcattacggacgagtacaaggtgccgagcaaaaaattcaaagttctgggcaataccgatcgccacagcataaagaagaacctcattggcgccctcctgttcgactccggggagacggccgaagccacgcggctcaaaagaacagcacggcgcagatatacccgcagaaagaatcggatctgctacctgcaggagatctttagtaatgagatggctaaggtggatgactctttcttccataggctggaggagtcctttttggtggaggaggataaaaagcacgagcgccacccaatctttggcaatatcgtggacgaggtggcgtaccatgaaaagtacccaaccatatatcatctgaggaagaagcttgtagacagtactgataaggctgacttgcggttgatctatctcgcgctggcgcatatgatcaaatttcggggacacttcctcatcgagggggacctgaacccagacaacagcgatgtcgacaaactctttatccaactggttcagacttacaatcagcttttcgaagagaacccgatcaacgcatccggagttgacgccaaagcaatcctgagcgctaggctgtccaaatcccggcggctcgaaaacctcatcgcacagctccctggggagaagaagaacggcctgtttggtaatcttatcgccctgtcactcgggctgacccccaactttaaatctaacttcgacctggccgaagatgccaagcttcaactgagcaaagacacctacgatgatgatctcgacaatctgctggcccagatcggcgaccagtacgcagacctttttttggcggcaaagaacctgtcagacgccattctgctgagtgatattctgcgagtgaacacggagatcaccaaagctccgctgagcgctagtatgatcaagcgctatgatgagcaccaccaagacttgactttgctgaaggcccttgtcagacagcaactgcctgagaagtacaaggaaattttcttcgatcagtctaaaaatggctacgccggatacattgacggcggagcaagccaggaggaattttacaaatttattaagcccatcttggaaaaaatggacggcaccgaggagctgctggtaaagcttaacagagaagatctgttgcgcaaacagcgcactttcgacaatggaagcatcccccaccagattcacctgggcgaactgcacgctatcctcaggcggcaagaggatttctacccctttttgaaagataacagggaaaagattgagaaaatcctcacatttcggataccctactatgtaggccccctcgcccggggaaattccagattcgcgtggatgactcgcaaatcagaagagaccatcactccctggaacttcgaggaagtcgtggataagggggcctctgcccagtccttcatcgaaaggatgactaactttgataaaaatctgcctaacgaaaaggtgcttcctaaacactctctgctgtacgagtacttcacagtttataacgagctcaccaaggtcaaatacgtcacagaagggatgagaaagccagcattcctgtctggagagcagaagaaagctatcgtggacctcctcttcaagacgaaccggaaagttaccgtgaaacagctcaaagaagactatttcaaaaagattgaatgtttcgactctgttgaaatcagcggagtggaggatcgcttcaacgcatccctgggaacgtatcacgatctcctgaaaatcattaaagacaaggacttcctggacaatgaggagaacgaggacattcttgaggacattgtcctcacccttacgttgtttgaagatagggagatgattgaagaacgcttgaaaacttacgctcatctcttcgacgacaaagtcatgaaacagctcaagaggcgccgatatacaggatgggggcggctgtcaagaaaactgatcaatgggatccgagacaagcagagtggaaagacaatcctggattttcttaagtccgatggatttgccaaccggaacttcatgcagttgatccatgatgactctctcacctttaaggaggacatccagaaagcacaagtttctggccagggggacagtcttcacgagcacatcgctaatcttgcaggtagcccagctatcaaaaagggaatactgcagaccgttaaggtcgtggatgaactcgtcaaagtaatgggaaggcataagcccgagaatatcgttatcgagatggcccgagagaaccaaactacccagaagggacagaagaacagtagggaaaggatgaagaggattgaagagggtataaaagaactggggtcccaaatccttaaggaacacccagttgaaaacacccagcttcagaatgagaagctctacctgtactacctgcagaacggcagggacatgtacgtggatcaggaactggacatcaatcggctctccgactacgacgtggctgctatcgtgccccagtcttttctcaaagatgattctattgataataaagtgttgacaagatccgataaagctagagggaagagtgataacgtcccctcagaagaagttgtcaagaaaatgaaaaattattggcggcagctgctgaacgccaaactgatcacacaacggaagttcgataatctgactaaggctgaacgaggtggcctgtctgagttggataaagccggcttcatcaaaaggcagcttgttgagacacgccagatcaccaagcacgtggcccaaattctcgattcacgcatgaacaccaagtacgatgaaaatgacaaactgattcgagaggtgaaagttattactctgaagtctaagctggtctcagatttcagaaaggactttcagttttataaggtgagagagatcaacaattaccaccatgcgcatgatgcctacctgaatgcagtggtaggcactgcacttatcaaaaaatatcccaagcttgaatctgaatttgtttacggagactataaagtgtacgatgttaggaaaatgatcgcaaagtctgagcaggaaataggcaaggccaccgctaagtacttcttttacagcaatattatgaattttttcaagaccgagattacactggccaatggagagattcggaagcgaccacttatcgaaacaaacggagaaacaggagaaatcgtgtgggacaagggtagggatttcgcgacagtccggaaggtcctgtccatgccgcaggtgaacatcgttaaaaagaccgaagtacagaccggaggcttctccaaggaaagtatcctcccgaaaaggaacagcgacaagctgatcgcacgcaaaaaagattgggaccccaagaaatacggcggattcgattctcctacagtcgcttacagtgtactggttgtggccaaagtggagaaagggaagtctaaaaaactcaaaagcgtcaaggaactgctgggcatcacaatcatggagcgatcaagcttcgaaaaaaaccccatcgactttctcgaggcgaaaggatataaagaggtcaaaaaagacctcatcattaagcttcccaagtactctctctttgagcttgaaaacggccggaaacgaatgctcgctagtgcgggcgagctgcagaaaggtaacgagctggcactgccctctaaatacgttaatttcttgtatctggccagccactatgaaaagctcaaagggtctcccgaagataatgagcagaagcagctgttcgtggaacaacacaaacactaccttgatgagatcatcgagcaaataagcgaattctccaaaagagtgatcctcgccgacgctaacctcgataaggtgctttctgcttacaataagcacagggataagcccatcagggagcaggcagaaaacattatccacttgtttactctgaccaacttgggcgcgcctgcagccttcaagtacttcgacaccaccatagacagaaagcggtacacctctacaaaggaggtcctggacgccacactgattcatcagtcaattacggggctctatgaaacaagaatcgacctctctcagctcggtggagacagcagggctgaccccaagaagaagaggaaggtggaggccagcggttccggacgggctgacgcattggacgattttgatctggatatgctgggaagtgacgccctcgatgattttgaccttgacatgcttggttcggatgcccttgatgactttgacctcgacatgctcggcagtgacgcccttgatgatttcgacctggacatgctgattaactctagatga

SEQ ID NO: 8 - protein, 1409 aa, Streptococcus thermophiles
MLFNKCIIISINLDFSNKEKCMTKPYSIGLDIGTNSVGWAVITDNYKVPSKKMKVLGNTSKKYIKKNLLGVLLFDSGITAEGRRLKRTARRRYTRRRNRILYLQEIFSTEMATLDDAFFQRLDDSFLVPDDKRDSKYPIFGNLVEEKVYHDEFPTIYHLRKYLADSTKKADLRLVYLALAHMIKYRGHFLIEGEFNSKNNDIQKNFQDFLDTYNAIFESDLSLENSKQLEEIVKDKISKLEKKDRILKLFPGEKNSGIFSEFLKLIVGNQADFRKCFNLDEKASLHFSKESYDEDLETLLGYIGDDYSDVFLKAKKLYDAILLSGFLTVTDNETEAPLSSAMIKRYNEHKEDLALLKEYIRNISLKTYNEVFKDDTKNGYAGYIDGKTNQEDFYVYLKNLLAEFEGADYFLEKIDREDFLRKQRTFDNGSIPYQIHLQEMRAILDKQAKFYPFLAKNKERIEKILTFRIPYYVGPLARGNSDFAWSIRKRNEKITPWNFEDVIDKESSAEAFINRMTSFDLYLPEEKVLPKHSLLYETFNVYNELTKVRFIAESMRDYQFLDSKQKKDIVRLYFKDKRKVTDKDIIEYLHAIYGYDGIELKGIEKQFNSSLSTYHDLLNIINDKEFLDDSSNEAIIEEIIHTLTIFEDREMIKQRLSKFENIFDKSVLKKLSRRHYTGWGKLSAKLINGIRDEKSGNTILDYLIDDGISNRNFMQLIHDDALSFKKKIQKAQIIGDEDKGNIKEVVKSLPGSPAIKKGILQSIKIVDELVKVMGGRKPESIVVEMARENQYTNQGKSNSQQRLKRLEKSLKELGSKILKENIPAKLSKIDNNALQNDRLYLYYLQNGKDMYTGDDLDIDRLSNYDIDHIIPQAFLKDNSIDNKVLVSSASNRGKSDDFPSLEVVKKRKTFWYQLLKSKLISQRKFDNLTKAERGGLLPEDKAGFIQRQLVETRQITKHVARLLDEKFNNKKDENNRAVRTVKIITLKSTLVSQFRKDFELYKVREINDFHHAHDAYLNAVIASALLKKYPKLEPEFVYGDYPKYNSFRERKSATEKVYFYSNIMNIFKKSISLADGRVIERPLIEVNEETGESVWNKESDLATVRRVLSYPQVNVVKKVEEQNHGLDRGKPKGLFNANLSSKPKPNSNENLVGAKEYLDPKKYGGYAGISNSFAVLVKGTIEKGAKKKITNVLEFQGISILDRINYRKDKLNFLLEKGYKDIELIIELPKYSLFELSDGSRRMLASILSTNNKRGEIHKGNQIFLSQKFVKLLYHAKRISNTINENHRKYVENHKKEFEELFYYILEFNENYVGAKKNGKLLNSAFQSWQNHSIDELCSSFIGPTGSERKGLFELTSRGSAADFEFLGVKIPRYRDYTPSSLLKDATLIHQSVTGLYETRIDLAKLGEG

SEQ ID NO: 9 - DNA, 4167 bp, Streptococcus thermophiles
atgactaagccatactcaattggacttgatattggaacgaatagtgttggatgggctgtaataactgataattacaaggttccgtctaaaaaaatgaaagtcttaggaaatacgagtaaaaagtatatcaaaaagaacctgttaggtgtattactctttgactctggaatcacagcagaaggaagaagattgaagcgtactgcaagaagacgttatactagacgccgtaatcgtatcctttatttgcaggaaatttttagcacggagatggctacattagatgatgctttctttcaaagacttgacgattcgtttttagttcctgatgataaacgtgatagtaagtatccgatatttggaaacttagtagaagaaaaagtctatcatgatgaatttccaactatctatcatttaaggaaatatttagcagatagtactaaaaaagcagatttgcgtctagtttatcttgcattggctcatatgattaaatatagaggtcacttcttaattgaaggagagtttaattcaaaaaataatgatattcagaagaattttcaagactttttggacacttataatgctatttttgaatcggatttatcacttgagaatagtaaacaacttgaggaaattgttaaagataagattagtaaattagaaaagaaagatcgtattttaaaactcttccctggggagaagaattcggggattttttcagagtttctaaagttgattgtaggaaatcaagctgattttaggaaatgttttaatttagacgaaaaagcctccttacatttttccaaagaaagctatgatgaagatttagagactttgttaggttatattggagatgattacagtgatgtctttctcaaagcaaagaaactttatgatgctattcttttatcgggttttctgactgtaactgataatgagacagaagcacctctctcttctgctatgataaagcgatataatgaacacaaagaagatttagcgttactaaaggaatatataagaaatatttcactaaaaacgtataatgaagtatttaaagatgacaccaaaaatggttatgctggttatattgatggaaaaacaaatcaggaagatttctacgtatatctaaaaaacctattggctgaatttgaaggtgcggattattttcttgaaaaaattgatcgagaagattttttgagaaagcaacgtacatttgacaatggttcgataccatatcagattcatcttcaagaaatgagagcaattcttgataagcaagctaaattttatcctttcttggctaaaaataaagaaagaatcgagaagattttaaccttccgaattccttattatgtaggtccacttgcgagagggaatagtgattttgcctggtcaataagaaaacgaaatgaaaaaattacaccttggaattttgaggacgttattgacaaagaatcttcggcagaggctttcattaatcgaatgactagttttgatttgtatttgccagaagagaaggtacttccaaagcatagtctcttatacgaaacttttaatgtatataatgaattaacaaaagttagatttattgccgaaagtatgagagattatcaatttttagatagtaagcagaagaaagatattgttagactttattttaaagataaaaggaaagttactgataaggatattattgaatatttacatgcaatttatgggtatgatggaattgaattaaaaggcatagagaaacagtttaattctagtttatctacttatcacgatcttttaaatattattaatgataaagagtttttggatgatagttcaaatgaagcgattatcgaagaaattatccatactttgacaatttttgaagatagagagatgataaaacaacgtctttcaaaatttgagaatatattcgataaatccgttttgaaaaagttatctcgtagacattacactggctggggtaagttatctgctaagcttattaatggtattcgagatgaaaaatctggtaatactattcttgattacttaattgatgatggtatttctaaccgtaatttcatgcaacttattcacgatgatgctctttcttttaaaaagaagatacagaaagcacaaattattggtgacgaagataaaggtaatattaaagaggtcgttaagtctttgccaggtagtcctgcgattaaaaaaggtattttacaaagcataaaaattgtagatgaattggtcaaagtaatgggaggaagaaaacccgagtcaattgttgttgagatggctcgtgaaaatcaatataccaatcaaggtaagtctaattcccaacaacgcttgaaacgtttagaaaaatctctcaaagagttaggtagtaagatacttaaggaaaatattcctgcaaaactttctaaaatagacaataacgcacttcaaaatgatcgactttacttatactatcttcaaaatggaaaagatatgtataccggagatgatttagatattgatagattaagtaattatgatattgatcatattattcctcaagcttttttgaaagataattctattgacaataaagtacttgtttcatctgctagtaaccgtggtaaatcagatgattttccaagtttagaggttgtcaaaaaaagaaagacattttggtatcaattattgaaatcaaaattaatttctcaacgaaaatttgataatctgacaaaagctgaacggggaggattgttacctgaggacaaagctggttttattcaacgccagttggttgaaacacgtcaaataacaaaacatgtagctcgtttacttgatgagaaatttaataataaaaaagatgaaaataatagagcggtacgaacagtaaaaattattaccttgaaatctaccttagtttctcaatttcgtaaggattttgaactttataaagttcgtgaaatcaatgattttcatcatgctcatgatgcttacttgaatgccgttatagcaagtgctttacttaagaaataccctaaactagagccagaatttgtgtacggtgattatccaaaatacaatagttttagagaaagaaagtccgctacagaaaaggtatatttctattcaaatatcatgaatatctttaaaaaatctatttctttagctgatggtagagttattgaaagaccacttattgaggtaaatgaggagaccggcgaatccgtttggaataaagaatctgatttagcaactgtaaggagagtactctcttatccgcaagtaaatgttgtgaaaaaagttgaggaacagaatcacggattggatagaggaaaaccaaagggattgtttaatgcaaatctttcctcaaagccaaaaccaaatagtaatgaaaatttagtaggtgctaaagagtatcttgaccccaaaaagtatggggggtatgctggaatttctaattcttttgctgttcttgttaaagggacaattgaaaaaggtgctaagaaaaaaataacaaatgtactagaatttcaaggtatttctattttagataggattaattatagaaaagataaacttaattttttacttgaaaaaggttataaagatattgagttaattattgaactacctaaatatagtttatttgaactttcagatggttcacgtcgtatgttggctagtattttgtcaacgaataataagaggggagagattcacaaaggaaatcagatttttctttcacagaagtttgtgaaattactttatcatgctaagagaataagtaacacaattaatgagaatcatagaaaatatgttgagaaccataaaaaagagtttgaagaattattttactacattcttgagtttaatgagaattatgttggagctaaaaagaatggtaaacttttaaactctgcctttcaatcttggcaaaatcatagtatagatgaactctgtagtagttttataggacctaccggaagtgaaagaaaggggctatttgaattaacctctcgtggaagtgctgctgattttgaatttttaggtgttaaaattccaaggtatagagactataccccatcatccctattaaaagatgccacacttattcatcaatctgttacaggcctctatgaaacacgaatagaccttgccaaactaggagagggttaa

SEQ ID NO: 10 - DNA, 3366 bp, Streptococcus thermophilus
atgagcgacctggtgctgggcctggacatcggcatcggcagcgtgggcgtgggcatcctgaacaaggtgaccggcgagatcatccacaagaacagtcgcatcttccctgctgctcaggctgagaacaacctggtgcgccgcaccaaccgccagggtcgccggcttgctcgccgcaagaagcaccggcgcgtgcgcctgaaccgcctgttcgaggagagcggcctgatcaccgacttcaccaagatcagcatcaacctgaacccctaccagctgcgcgtgaagggcctgaccgacgagctgagcaacgaggagctgttcatcgccctgaagaacatggtgaagcaccgcggcatcagctacctggacgacgccagcgacgacggcaacagcagcgtgggcgactacgcccagatcgtgaaggagaacagcaagcagctggagaccaagacccccggccagatccagctggagcgctaccagacctacggccagctgcgcggcgacttcaccgtggagaaggacggcaagaagcaccgcctgatcaacgtgttccccaccagcgcctaccgcagcgaggccctgcgcatcctgcagacccagcaggagttcaacccccagatcaccgacgagttcatcaaccgctacctggagatcctgaccggcaagcgcaagtactaccacggccccggcaacgagaagagccgcaccgactacggccgctaccgcaccagcggcgagaccctggacaacatcttcggcatcctgatcggcaagtgcaccttctaccccgacgagttccgcgccgccaaggccagctacaccgcccaggagttcaacctgctgaacgacctgaacaacctgaccgtgcccaccgagaccaagaagctgagcaaggagcagaagaaccagatcatcaactacgtgaagaacgagaaggccatgggccccgccaagctgttcaagtacatcgccaagctgctgagctgcgacgtggccgacatcaagggctaccgcatcgacaagagcggcaaggccgagatccacaccttcgaggcctaccgcaagatgaagaccctggagaccctggacatcgagcagatggaccgcgagaccctggacaagctggcctacgtgctgaccctgaacaccgagcgcgagggcatccaggaggccctggagcacgagttcgccgacggcagcttcagccagaagcaggtggacgagctggtgcagttccgcaaggccaacagcagcatcttcggcaagggctggcacaacttcagcgtgaagctgatgatggagctgatccccgagctgtacgagaccagcgaggagcagatgaccatcctgacccgcctgggcaagcagaagaccaccagcagcagcaacaagaccaagtacatcgacgagaagctgctgaccgaggagatctacaaccccgtggtggccaagagcgtgcgccaggccatcaagatcgtgaacgccgccatcaaggagtacggcgacttcgacaacatcgtgatcgagatggcccgcgagaccaacgaggacgacgagaagaaggccatccagaagatccagaaggccaacaaggacgagaaggacgccgccatgctgaaggccgccaaccagtacaacggcaaggccgagctgccccacagcgtgttccacggccacaagcagctggccaccaagatccgcctgtggcaccagcagggcgagcgctgcctgtacaccggcaagaccatcagcatccacgacctgatcaacaacagcaaccagttcgaggtggaccacatcctgcccctgagcatcaccttcgacgacagcctggccaacaaggtgctggtgtacgccaccgccaaccaggagaagggccagcgcaccccctaccaggccctggacagcatggacgacgcctggagcttccgcgagctgaaggccttcgtgcgcgagagcaagaccctgagcaacaagaagaaggagtacctgctgaccgaggaggacatcagcaagttcgacgtgcgcaagaagttcatcgagcgcaacctggtggacacccgctacgccagccgcgtggtgctgaacgccctgcaggagcacttccgcgcccacaagatcgacaccaaggtgagcgtggtgcgcggccagttcaccagccagctgcgccgccactggggcatcgagaagacccgcgacacctaccaccaccacgccgtggacgccctgatcattgcggcttctagccagctgaacctgtggaagaagcagaagaacaccctggtgagctacagcgaggaccagctgctggacatcgagaccggcgagctgatcagcgacgacgagtacaaggagagcgtgttcaaggccccctaccagcacttcgtggacaccctgaagagcaaggagttcgaggacagcatcctgttcagctaccaggtggacagcaagttcaaccgcaagatcagcgacgccaccatctacgccacccgccaggccaaggtgggcaaggacaaggccgacgagacctacgtgctgggcaagatcaaggacatctacacccaggacggctacgacgccttcatgaagatctacaagaaggacaagagcaagttcctgatgtaccgccacgacccccagaccttcgagaaggtgatcgagcccatcctggagaactaccccaacaagcagatcaacgataaaggcaaggaggtgccctgcaaccccttcctgaagtacaaggaggagcacggctacatccgcaagtacagcaagaagggcaacggccccgagatcaagagcctgaagtactacgacagcaagctgggcaaccacatcgacatcacccccaaggacagcaacaacaaggtggtgctgcagagcgtgagcccctggcgcgccgacgtgtacttcaacaagaccaccggcaagtacgagatcctgggcctgaagtacgccgacctgcagtttgataagggcaccggcacctacaagatcagccaggagaagtacaacgacatcaagaagaaggagggcgtggacagcgacagcgagttcaagttcaccctgtacaagaacgaccttctgctggtgaaggacaccgagaccaaggagcaacagctgttccgcttcctgagccgcaccatgcccaagcagaagcactacgtggagctgaagccctacgacaagcagaagttcgagggcggcgaggccctgatcaaggtgctgggcaacgtggccaacagcggccagtgcaagaagggcctgggcaagagcaacatcagcatctacaaggtgcgcaccgacgtgctgggcaaccagcacatcatcaagaacgagggcgacaagcccaagctggacttctaa

SEQ ID NO: 11 - DNA, 3366 bp, Streptococcus thermophilus
atgagcgacctggtgctgggcctggccatcggcatcggcagcgtgggcgtgggcatcctgaacaaggtgaccggcgagatcatccacaagaacagtcgcatcttccctgctgctcaggctgagaacaacctggtgcgccgcaccaaccgccagggtcgccggcttgctcgccgcaagaagcaccggcgcgtgcgcctgaaccgcctgttcgaggagagcggcctgatcaccgacttcaccaagatcagcatcaacctgaacccctaccagctgcgcgtgaagggcctgaccgacgagctgagcaacgaggagctgttcatcgccctgaagaacatggtgaagcaccgcggcatcagctacctggacgacgccagcgacgacggcaacagcagcgtgggcgactacgcccagatcgtgaaggagaacagcaagcagctggagaccaagacccccggccagatccagctggagcgctaccagacctacggccagctgcgcggcgacttcaccgtggagaaggacggcaagaagcaccgcctgatcaacgtgttccccaccagcgcctaccgcagcgaggccctgcgcatcctgcagacccagcaggagttcaacccccagatcaccgacgagttcatcaaccgctacctggagatcctgaccggcaagcgcaagtactaccacggccccggcaacgagaagagccgcaccgactacggccgctaccgcaccagcggcgagaccctggacaacatcttcggcatcctgatcggcaagtgcaccttctaccccgacgagttccgcgccgccaaggccagctacaccgcccaggagttcaacctgctgaacgacctgaacaacctgaccgtgcccaccgagaccaagaagctgagcaaggagcagaagaaccagatcatcaactacgtgaagaacgagaaggccatgggccccgccaagctgttcaagtacatcgccaagctgctgagctgcgacgtggccgacatcaagggctaccgcatcgacaagagcggcaaggccgagatccacaccttcgaggcctaccgcaagatgaagaccctggagaccctggacatcgagcagatggaccgcgagaccctggacaagctggcctacgtgctgaccctgaacaccgagcgcgagggcatccaggaggccctggagcacgagttcgccgacggcagcttcagccagaagcaggtggacgagctggtgcagttccgcaaggccaacagcagcatcttcggcaagggctggcacaacttcagcgtgaagctgatgatggagctgatccccgagctgtacgagaccagcgaggagcagatgaccatcctgacccgcctgggcaagcagaagaccaccagcagcagcaacaagaccaagtacatcgacgagaagctgctgaccgaggagatctacaaccccgtggtggccaagagcgtgcgccaggccatcaagatcgtgaacgccgccatcaaggagtacggcgacttcgacaacatcgtgatcgagatggcccgcgagaccaacgaggacgacgagaagaaggccatccagaagatccagaaggccaacaaggacgagaaggacgccgccatgctgaaggccgccaaccagtacaacggcaaggccgagctgccccacagcgtgttccacggccacaagcagctggccaccaagatccgcctgtggcaccagcagggcgagcgctgcctgtacaccggcaagaccatcagcatccacgacctgatcaacaacagcaaccagttcgaggtggctgccatcctgcccctgagcatcaccttcgacgacagcctggccaacaaggtgctggtgtacgccaccgccgctcaggagaagggccagcgcaccccctaccaggccctggacagcatggacgacgcctggagcttccgcgagctgaaggccttcgtgcgcgagagcaagaccctgagcaacaagaagaaggagtacctgctgaccgaggaggacatcagcaagttcgacgtgcgcaagaagttcatcgagcgcaacctggtggacacccgctacgccagccgcgtggtgctgaacgccctgcaggagcacttccgcgcccacaagatcgacaccaaggtgagcgtggtgcgcggccagttcaccagccagctgcgccgccactggggcatcgagaagacccgcgacacctaccaccaccacgccgtggacgccctgatcattgcggcttctagccagctgaacctgtggaagaagcagaagaacaccctggtgagctacagcgaggaccagctgctggacatcgagaccggcgagctgatcagcgacgacgagtacaaggagagcgtgttcaaggccccctaccagcacttcgtggacaccctgaagagcaaggagttcgaggacagcatcctgttcagctaccaggtggacagcaagttcaaccgcaagatcagcgacgccaccatctacgccacccgccaggccaaggtgggcaaggacaaggccgacgagacctacgtgctgggcaagatcaaggacatctacacccaggacggctacgacgccttcatgaagatctacaagaaggacaagagcaagttcctgatgtaccgccacgacccccagaccttcgagaaggtgatcgagcccatcctggagaactaccccaacaagcagatcaacgataaaggcaaggaggtgccctgcaaccccttcctgaagtacaaggaggagcacggctacatccgcaagtacagcaagaagggcaacggccccgagatcaagagcctgaagtactacgacagcaagctgggcaaccacatcgacatcacccccaaggacagcaacaacaaggtggtgctgcagagcgtgagcccctggcgcgccgacgtgtacttcaacaagaccaccggcaagtacgagatcctgggcctgaagtacgccgacctgcagtttgataagggcaccggcacctacaagatcagccaggagaagtacaacgacatcaagaagaaggagggcgtggacagcgacagcgagttcaagttcaccctgtacaagaacgaccttctgctggtgaaggacaccgagaccaaggagcaacagctgttccgcttcctgagccgcaccatgcccaagcagaagcactacgtggagctgaagccctacgacaagcagaagttcgagggcggcgaggccctgatcaaggtgctgggcaacgtggccaacagcggccagtgcaagaagggcctgggcaagagcaacatcagcatctacaaggtgcgcaccgacgtgctgggcaaccagcacatcatcaagaacgagggcgacaagcccaagctggacttctaa

SEQ ID NO: 12 - DNA, 3399 bp, Streptococcus thermophilus
atgagcgacctggtgctgggcctggacatcggcatcggcagcgtgggcgtgggcatcctgaacaaggtgaccggcgagatcatccacaagaacagtcgcatcttccctgctgctcaggctgagaacaacctggtgcgccgcaccaaccgccagggtcgccggcttgctcgccgcaagaagcaccggcgcgtgcgcctgaaccgcctgttcgaggagagcggcctgatcaccgacttcaccaagatcagcatcaacctgaacccctaccagctgcgcgtgaagggcctgaccgacgagctgagcaacgaggagctgttcatcgccctgaagaacatggtgaagcaccgcggcatcagctacctggacgacgccagcgacgacggcaacagcagcgtgggcgactacgcccagatcgtgaaggagaacagcaagcagctggagaccaagacccccggccagatccagctggagcgctaccagacctacggccagctgcgcggcgacttcaccgtggagaaggacggcaagaagcaccgcctgatcaacgtgttccccaccagcgcctaccgcagcgaggccctgcgcatcctgcagacccagcaggagttcaacccccagatcaccgacgagttcatcaaccgctacctggagatcctgaccggcaagcgcaagtactaccacggccccggcaacgagaagagccgcaccgactacggccgctaccgcaccagcggcgagaccctggacaacatcttcggcatcctgatcggcaagtgcaccttctaccccgacgagttccgcgccgccaaggccagctacaccgcccaggagttcaacctgctgaacgacctgaacaacctgaccgtgcccaccgagaccaagaagctgagcaaggagcagaagaaccagatcatcaactacgtgaagaacgagaaggccatgggccccgccaagctgttcaagtacatcgccaagctgctgagctgcgacgtggccgacatcaagggctaccgcatcgacaagagcggcaaggccgagatccacaccttcgaggcctaccgcaagatgaagaccctggagaccctggacatcgagcagatggaccgcgagaccctggacaagctggcctacgtgctgaccctgaacaccgagcgcgagggcatccaggaggccctggagcacgagttcgccgacggcagcttcagccagaagcaggtggacgagctggtgcagttccgcaaggccaacagcagcatcttcggcaagggctggcacaacttcagcgtgaagctgatgatggagctgatccccgagctgtacgagaccagcgaggagcagatgaccatcctgacccgcctgggcaagcagaagaccaccagcagcagcaacaagaccaagtacatcgacgagaagctgctgaccgaggagatctacaaccccgtggtggccaagagcgtgcgccaggccatcaagatcgtgaacgccgccatcaaggagtacggcgacttcgacaacatcgtgatcgagatggcccgcgagaccaacgaggacgacgagaagaaggccatccagaagatccagaaggccaacaaggacgagaaggacgccgccatgctgaaggccgccaaccagtacaacggcaaggccgagctgccccacagcgtgttccacggccacaagcagctggccaccaagatccgcctgtggcaccagcagggcgagcgctgcctgtacaccggcaagaccatcagcatccacgacctgatcaacaacagcaaccagttcgaggtggaccacatcctgcccctgagcatcaccttcgacgacagcctggccaacaaggtgctggtgtacgccaccgccaaccaggagaagggccagcgcaccccctaccaggccctggacagcatggacgacgcctggagcttccgcgagctgaaggccttcgtgcgcgagagcaagaccctgagcaacaagaagaaggagtacctgctgaccgaggaggacatcagcaagttcgacgtgcgcaagaagttcatcgagcgcaacctggtggacacccgctacgccagccgcgtggtgctgaacgccctgcaggagcacttccgcgcccacaagatcgacaccaaggtgagcgtggtgcgcggccagttcaccagccagctgcgccgccactggggcatcgagaagacccgcgacacctaccaccaccacgccgtggacgccctgatcattgcggcttctagccagctgaacctgtggaagaagcagaagaacaccctggtgagctacagcgaggaccagctgctggacatcgagaccggcgagctgatcagcgacgacgagtacaaggagagcgtgttcaaggccccctaccagcacttcgtggacaccctgaagagcaaggagttcgaggacagcatcctgttcagctaccaggtggacagcaagttcaaccgcaagatcagcgacgccaccatctacgccacccgccaggccaaggtgggcaaggacaaggccgacgagacctacgtgctgggcaagatcaaggacatctacacccaggacggctacgacgccttcatgaagatctacaagaaggacaagagcaagttcctgatgtaccgccacgacccccagaccttcgagaaggtgatcgagcccatcctggagaactaccccaacaagcagatcaacgataaaggcaaggaggtgccctgcaaccccttcctgaagtacaaggaggagcacggctacatccgcaagtacagcaagaagggcaacggccccgagatcaagagcctgaagtactacgacagcaagctgggcaaccacatcgacatcacccccaaggacagcaacaacaaggtggtgctgcagagcgtgagcccctggcgcgccgacgtgtacttcaacaagaccaccggcaagtacgagatcctgggcctgaagtacgccgacctgcagtttgataagggcaccggcacctacaagatcagccaggagaagtacaacgacatcaagaagaaggagggcgtggacagcgacagcgagttcaagttcaccctgtacaagaacgaccttctgctggtgaaggacaccgagaccaaggagcaacagctgttccgcttcctgagccgcaccatgcccaagcagaagcactacgtggagctgaagccctacgacaagcagaagttcgagggcggcgaggccctgatcaaggtgctgggcaacgtggccaacagcggccagtgcaagaagggcctgggcaagagcaacatcagcatctacaaggtgcgcaccgacgtgctgggcaaccagcacatcatcaagaacgagggcgacaagcccaagctggacttcagcagggctgaccccaagaagaagaggaaggtgtga

SEQ ID NO: 13 - DNA, 3459 bp, Streptococcus thermophilus
atgagcgacctggtgctgggcctggacatcggcatcggcagcgtgggcgtgggcatcctgaacaaggtgaccggcgagatcatccacaagaacagtcgcatcttccctgctgctcaggctgagaacaacctggtgcgccgcaccaaccgccagggtcgccggcttgctcgccgcaagaagcaccggcgcgtgcgcctgaaccgcctgttcgaggagagcggcctgatcaccgacttcaccaagatcagcatcaacctgaacccctaccagctgcgcgtgaagggcctgaccgacgagctgagcaacgaggagctgttcatcgccctgaagaacatggtgaagcaccgcggcatcagctacctggacgacgccagcgacgacggcaacagcagcgtgggcgactacgcccagatcgtgaaggagaacagcaagcagctggagaccaagacccccggccagatccagctggagcgctaccagacctacggccagctgcgcggcgacttcaccgtggagaaggacggcaagaagcaccgcctgatcaacgtgttccccaccagcgcctaccgcagcgaggccctgcgcatcctgcagacccagcaggagttcaacccccagatcaccgacgagttcatcaaccgctacctggagatcctgaccggcaagcgcaagtactaccacggccccggcaacgagaagagccgcaccgactacggccgctaccgcaccagcggcgagaccctggacaacatcttcggcatcctgatcggcaagtgcaccttctaccccgacgagttccgcgccgccaaggccagctacaccgcccaggagttcaacctgctgaacgacctgaacaacctgaccgtgcccaccgagaccaagaagctgagcaaggagcagaagaaccagatcatcaactacgtgaagaacgagaaggccatgggccccgccaagctgttcaagtacatcgccaagctgctgagctgcgacgtggccgacatcaagggctaccgcatcgacaagagcggcaaggccgagatccacaccttcgaggcctaccgcaagatgaagaccctggagaccctggacatcgagcagatggaccgcgagaccctggacaagctggcctacgtgctgaccctgaacaccgagcgcgagggcatccaggaggccctggagcacgagttcgccgacggcagcttcagccagaagcaggtggacgagctggtgcagttccgcaaggccaacagcagcatcttcggcaagggctggcacaacttcagcgtgaagctgatgatggagctgatccccgagctgtacgagaccagcgaggagcagatgaccatcctgacccgcctgggcaagcagaagaccaccagcagcagcaacaagaccaagtacatcgacgagaagctgctgaccgaggagatctacaaccccgtggtggccaagagcgtgcgccaggccatcaagatcgtgaacgccgccatcaaggagtacggcgacttcgacaacatcgtgatcgagatggcccgcgagaccaacgaggacgacgagaagaaggccatccagaagatccagaaggccaacaaggacgagaaggacgccgccatgctgaaggccgccaaccagtacaacggcaaggccgagctgccccacagcgtgttccacggccacaagcagctggccaccaagatccgcctgtggcaccagcagggcgagcgctgcctgtacaccggcaagaccatcagcatccacgacctgatcaacaacagcaaccagttcgaggtggaccacatcctgcccctgagcatcaccttcgacgacagcctggccaacaaggtgctggtgtacgccaccgccaaccaggagaagggccagcgcaccccctaccaggccctggacagcatggacgacgcctggagcttccgcgagctgaaggccttcgtgcgcgagagcaagaccctgagcaacaagaagaaggagtacctgctgaccgaggaggacatcagcaagttcgacgtgcgcaagaagttcatcgagcgcaacctggtggacacccgctacgccagccgcgtggtgctgaacgccctgcaggagcacttccgcgcccacaagatcgacaccaaggtgagcgtggtgcgcggccagttcaccagccagctgcgccgccactggggcatcgagaagacccgcgacacctaccaccaccacgccgtggacgccctgatcattgcggcttctagccagctgaacctgtggaagaagcagaagaacaccctggtgagctacagcgaggaccagctgctggacatcgagaccggcgagctgatcagcgacgacgagtacaaggagagcgtgttcaaggccccctaccagcacttcgtggacaccctgaagagcaaggagttcgaggacagcatcctgttcagctaccaggtggacagcaagttcaaccgcaagatcagcgacgccaccatctacgccacccgccaggccaaggtgggcaaggacaaggccgacgagacctacgtgctgggcaagatcaaggacatctacacccaggacggctacgacgccttcatgaagatctacaagaaggacaagagcaagttcctgatgtaccgccacgacccccagaccttcgagaaggtgatcgagcccatcctggagaactaccccaacaagcagatcaacgataaaggcaaggaggtgccctgcaaccccttcctgaagtacaaggaggagcacggctacatccgcaagtacagcaagaagggcaacggccccgagatcaagagcctgaagtactacgacagcaagctgggcaaccacatcgacatcacccccaaggacagcaacaacaaggtggtgctgcagagcgtgagcccctggcgcgccgacgtgtacttcaacaagaccaccggcaagtacgagatcctgggcctgaagtacgccgacctgcagtttgataagggcaccggcacctacaagatcagccaggagaagtacaacgacatcaagaagaaggagggcgtggacagcgacagcgagttcaagttcaccctgtacaagaacgaccttctgctggtgaaggacaccgagaccaaggagcaacagctgttccgcttcctgagccgcaccatgcccaagcagaagcactacgtggagctgaagccctacgacaagcagaagttcgagggcggcgaggccctgatcaaggtgctgggcaacgtggccaacagcggccagtgcaagaagggcctgggcaagagcaacatcagcatctacaaggtgcgcaccgacgtgctgggcaaccagcacatcatcaagaacgagggcgacaagcccaagctggacttcgcggccgcagatccaaaaaagaagagaaaggtagatccaaaaaagaagagaaaggtagatccaaaaaagaagagaaaggtagatacggccgcatag

SEQ ID NO: 14 - DNA, 3585 bp, Streptococcus thermophilus
atgagcgacctggtgctgggcctggccatcggcatcggcagcgtgggcgtgggcatcctgaacaaggtgaccggcgagatcatccacaagaacagtcgcatcttccctgctgctcaggctgagaacaacctggtgcgccgcaccaaccgccagggtcgccggcttgctcgccgcaagaagcaccggcgcgtgcgcctgaaccgcctgttcgaggagagcggcctgatcaccgacttcaccaagatcagcatcaacctgaacccctaccagctgcgcgtgaagggcctgaccgacgagctgagcaacgaggagctgttcatcgccctgaagaacatggtgaagcaccgcggcatcagctacctggacgacgccagcgacgacggcaacagcagcgtgggcgactacgcccagatcgtgaaggagaacagcaagcagctggagaccaagacccccggccagatccagctggagcgctaccagacctacggccagctgcgcggcgacttcaccgtggagaaggacggcaagaagcaccgcctgatcaacgtgttccccaccagcgcctaccgcagcgaggccctgcgcatcctgcagacccagcaggagttcaacccccagatcaccgacgagttcatcaaccgctacctggagatcctgaccggcaagcgcaagtactaccacggccccggcaacgagaagagccgcaccgactacggccgctaccgcaccagcggcgagaccctggacaacatcttcggcatcctgatcggcaagtgcaccttctaccccgacgagttccgcgccgccaaggccagctacaccgcccaggagttcaacctgctgaacgacctgaacaacctgaccgtgcccaccgagaccaagaagctgagcaaggagcagaagaaccagatcatcaactacgtgaagaacgagaaggccatgggccccgccaagctgttcaagtacatcgccaagctgctgagctgcgacgtggccgacatcaagggctaccgcatcgacaagagcggcaaggccgagatccacaccttcgaggcctaccgcaagatgaagaccctggagaccctggacatcgagcagatggaccgcgagaccctggacaagctggcctacgtgctgaccctgaacaccgagcgcgagggcatccaggaggccctggagcacgagttcgccgacggcagcttcagccagaagcaggtggacgagctggtgcagttccgcaaggccaacagcagcatcttcggcaagggctggcacaacttcagcgtgaagctgatgatggagctgatccccgagctgtacgagaccagcgaggagcagatgaccatcctgacccgcctgggcaagcagaagaccaccagcagcagcaacaagaccaagtacatcgacgagaagctgctgaccgaggagatctacaaccccgtggtggccaagagcgtgcgccaggccatcaagatcgtgaacgccgccatcaaggagtacggcgacttcgacaacatcgtgatcgagatggcccgcgagaccaacgaggacgacgagaagaaggccatccagaagatccagaaggccaacaaggacgagaaggacgccgccatgctgaaggccgccaaccagtacaacggcaaggccgagctgccccacagcgtgttccacggccacaagcagctggccaccaagatccgcctgtggcaccagcagggcgagcgctgcctgtacaccggcaagaccatcagcatccacgacctgatcaacaacagcaaccagttcgaggtggctgccatcctgcccctgagcatcaccttcgacgacagcctggccaacaaggtgctggtgtacgccaccgccgctcaggagaagggccagcgcaccccctaccaggccctggacagcatggacgacgcctggagcttccgcgagctgaaggccttcgtgcgcgagagcaagaccctgagcaacaagaagaaggagtacctgctgaccgaggaggacatcagcaagttcgacgtgcgcaagaagttcatcgagcgcaacctggtggacacccgctacgccagccgcgtggtgctgaacgccctgcaggagcacttccgcgcccacaagatcgacaccaaggtgagcgtggtgcgcggccagttcaccagccagctgcgccgccactggggcatcgagaagacccgcgacacctaccaccaccacgccgtggacgccctgatcattgcggcttctagccagctgaacctgtggaagaagcagaagaacaccctggtgagctacagcgaggaccagctgctggacatcgagaccggcgagctgatcagcgacgacgagtacaaggagagcgtgttcaaggccccctaccagcacttcgtggacaccctgaagagcaaggagttcgaggacagcatcctgttcagctaccaggtggacagcaagttcaaccgcaagatcagcgacgccaccatctacgccacccgccaggccaaggtgggcaaggacaaggccgacgagacctacgtgctgggcaagatcaaggacatctacacccaggacggctacgacgccttcatgaagatctacaagaaggacaagagcaagttcctgatgtaccgccacgacccccagaccttcgagaaggtgatcgagcccatcctggagaactaccccaacaagcagatcaacgataaaggcaaggaggtgccctgcaaccccttcctgaagtacaaggaggagcacggctacatccgcaagtacagcaagaagggcaacggccccgagatcaagagcctgaagtactacgacagcaagctgggcaaccacatcgacatcacccccaaggacagcaacaacaaggtggtgctgcagagcgtgagcccctggcgcgccgacgtgtacttcaacaagaccaccggcaagtacgagatcctgggcctgaagtacgccgacctgcagtttgataagggcaccggcacctacaagatcagccaggagaagtacaacgacatcaagaagaaggagggcgtggacagcgacagcgagttcaagttcaccctgtacaagaacgaccttctgctggtgaaggacaccgagaccaaggagcaacagctgttccgcttcctgagccgcaccatgcccaagcagaagcactacgtggagctgaagccctacgacaagcagaagttcgagggcggcgaggccctgatcaaggtgctgggcaacgtggccaacagcggccagtgcaagaagggcctgggcaagagcaacatcagcatctacaaggtgcgcaccgacgtgctgggcaaccagcacatcatcaagaacgagggcgacaagcccaagctggacttcagcagggctgaccccaagaagaagaggaaggtggaggccagcggttccggacgggctgacgcattggacgattttgatctggatatgctgggaagtgacgccctcgatgattttgaccttgacatgcttggttcggatgcccttgatgactttgacctcgacatgctcggcagtgacgcccttgatgatttcgacctggacatgctgattaactctagatga

SEQ ID NO: 15 - DNA, 3606 bp, Streptococcus thermophilus
atgcccaagaagaagaggaaggtgagcgacctggtgctgggcctggccatcggcatcggcagcgtgggcgtgggcatcctgaacaaggtgaccggcgagatcatccacaagaacagtcgcatcttccctgctgctcaggctgagaacaacctggtgcgccgcaccaaccgccagggtcgccggcttgctcgccgcaagaagcaccggcgcgtgcgcctgaaccgcctgttcgaggagagcggcctgatcaccgacttcaccaagatcagcatcaacctgaacccctaccagctgcgcgtgaagggcctgaccgacgagctgagcaacgaggagctgttcatcgccctgaagaacatggtgaagcaccgcggcatcagctacctggacgacgccagcgacgacggcaacagcagcgtgggcgactacgcccagatcgtgaaggagaacagcaagcagctggagaccaagacccccggccagatccagctggagcgctaccagacctacggccagctgcgcggcgacttcaccgtggagaaggacggcaagaagcaccgcctgatcaacgtgttccccaccagcgcctaccgcagcgaggccctgcgcatcctgcagacccagcaggagttcaacccccagatcaccgacgagttcatcaaccgctacctggagatcctgaccggcaagcgcaagtactaccacggccccggcaacgagaagagccgcaccgactacggccgctaccgcaccagcggcgagaccctggacaacatcttcggcatcctgatcggcaagtgcaccttctaccccgacgagttccgcgccgccaaggccagctacaccgcccaggagttcaacctgctgaacgacctgaacaacctgaccgtgcccaccgagaccaagaagctgagcaaggagcagaagaaccagatcatcaactacgtgaagaacgagaaggccatgggccccgccaagctgttcaagtacatcgccaagctgctgagctgcgacgtggccgacatcaagggctaccgcatcgacaagagcggcaaggccgagatccacaccttcgaggcctaccgcaagatgaagaccctggagaccctggacatcgagcagatggaccgcgagaccctggacaagctggcctacgtgctgaccctgaacaccgagcgcgagggcatccaggaggccctggagcacgagttcgccgacggcagcttcagccagaagcaggtggacgagctggtgcagttccgcaaggccaacagcagcatcttcggcaagggctggcacaacttcagcgtgaagctgatgatggagctgatccccgagctgtacgagaccagcgaggagcagatgaccatcctgacccgcctgggcaagcagaagaccaccagcagcagcaacaagaccaagtacatcgacgagaagctgctgaccgaggagatctacaaccccgtggtggccaagagcgtgcgccaggccatcaagatcgtgaacgccgccatcaaggagtacggcgacttcgacaacatcgtgatcgagatggcccgcgagaccaacgaggacgacgagaagaaggccatccagaagatccagaaggccaacaaggacgagaaggacgccgccatgctgaaggccgccaaccagtacaacggcaaggccgagctgccccacagcgtgttccacggccacaagcagctggccaccaagatccgcctgtggcaccagcagggcgagcgctgcctgtacaccggcaagaccatcagcatccacgacctgatcaacaacagcaaccagttcgaggtggctgccatcctgcccctgagcatcaccttcgacgacagcctggccaacaaggtgctggtgtacgccaccgccgctcaggagaagggccagcgcaccccctaccaggccctggacagcatggacgacgcctggagcttccgcgagctgaaggccttcgtgcgcgagagcaagaccctgagcaacaagaagaaggagtacctgctgaccgaggaggacatcagcaagttcgacgtgcgcaagaagttcatcgagcgcaacctggtggacacccgctacgccagccgcgtggtgctgaacgccctgcaggagcacttccgcgcccacaagatcgacaccaaggtgagcgtggtgcgcggccagttcaccagccagctgcgccgccactggggcatcgagaagacccgcgacacctaccaccaccacgccgtggacgccctgatcattgcggcttctagccagctgaacctgtggaagaagcagaagaacaccctggtgagctacagcgaggaccagctgctggacatcgagaccggcgagctgatcagcgacgacgagtacaaggagagcgtgttcaaggccccctaccagcacttcgtggacaccctgaagagcaaggagttcgaggacagcatcctgttcagctaccaggtggacagcaagttcaaccgcaagatcagcgacgccaccatctacgccacccgccaggccaaggtgggcaaggacaaggccgacgagacctacgtgctgggcaagatcaaggacatctacacccaggacggctacgacgccttcatgaagatctacaagaaggacaagagcaagttcctgatgtaccgccacgacccccagaccttcgagaaggtgatcgagcccatcctggagaactaccccaacaagcagatcaacgataaaggcaaggaggtgccctgcaaccccttcctgaagtacaaggaggagcacggctacatccgcaagtacagcaagaagggcaacggccccgagatcaagagcctgaagtactacgacagcaagctgggcaaccacatcgacatcacccccaaggacagcaacaacaaggtggtgctgcagagcgtgagcccctggcgcgccgacgtgtacttcaacaagaccaccggcaagtacgagatcctgggcctgaagtacgccgacctgcagtttgataagggcaccggcacctacaagatcagccaggagaagtacaacgacatcaagaagaaggagggcgtggacagcgacagcgagttcaagttcaccctgtacaagaacgaccttctgctggtgaaggacaccgagaccaaggagcaacagctgttccgcttcctgagccgcaccatgcccaagcagaagcactacgtggagctgaagccctacgacaagcagaagttcgagggcggcgaggccctgatcaaggtgctgggcaacgtggccaacagcggccagtgcaagaagggcctgggcaagagcaacatcagcatctacaaggtgcgcaccgacgtgctgggcaaccagcacatcatcaagaacgagggcgacaagcccaagctggacttcagcagggctgaccccaagaagaagaggaaggtggaggccagcggttccggacgggctgacgcattggacgattttgatctggatatgctgggaagtgacgccctcgatgattttgaccttgacatgcttggttcggatgcccttgatgactttgacctcgacatgctcggcagtgacgcccttgatgatttcgacctggacatgctgattaactctagatga

SEQ ID NO: 16 - DNA, 3366 bp, Streptococcus thermophilus
atgagtgacttagttttaggacttgatatcggtataggttctgttggtgtaggtatccttaacaaagtgacaggagaaattatccataaaaactcacgcatcttcccagcagctcaagcggaaaataacctagtacgtagaacgaatcgtcaaggaagacgcttgacacgacgtaaaaaacatcgtagagttcgtttaaatcgtctatttgaggaaagtggattaatcaccgattttacgaagatttcaattaatcttaacccatatcaattacgagttaagggcttgaccgatgaattgtctaatgaagaactgtttatcgctcttaaaaatatggtgaaacaccgtgggattagttacctcgatgatgctagtgatgacggaaattcatcaataggagactatgcacaaattgttaaggaaaatagtaaacaattagaaactaagacaccgggacagatacagttggaacgctaccaaacatatggtcaattacgtggtgattttactgttgagaaagatggcaaaaaacatcgcttgattaatgtctttccaacatcagcttatcgttcagaagccttaaggatactgcaaactcaacaagaatttaatccacagattacagatgaatttattaatcgttatctcgaaattttaactggaaaacggaaatattatcatggacccggaaatgaaaagtcacggactgattatggtcgttacagaacgagtggagaaactttagacaatatttttggaattctaattgggaaatgtacattttatccagacgagtttagagcagcaaaagcttcctacacggctcaagaattcaatttgctaaatgatttgaacaatctaacagttcctactgaaaccaaaaagttgagcaaagaacagaagaatcaaatcattaattatgtcaaaaatgaaaaggcaatggggccagcgaaactttttaaatatatcgctaagttactttcttgtgatgttgcagatatcaagggataccgtatcgacaaatcaggtaaggctgagattcatactttcgaagcctatcgaaaaatgaaaacgcttgaaaccttagatattgagcaaatggatagagaaacgcttgataaattagcctatgtcttaacattaaacactgagagggaaggtattcaagaagccttagaacatgaatttgctgatggtagctttagccagaagcaagttgacgaattggttcaattccgcaaagcaaatagttccatttttggaaaaggatggcataatttttctgtcaaactgatgatggagttaattccagaattgtatgagacgtcagaagagcaaatgactatcctaacacgacttggaaaacaaaaaacgacttcgtcttcaaataaaacaaaatatatagatgaaaaactattaactgaagaaatctataatcctgttgttgctaagtctgttcgccaggctataaaaatcgtaaatgcggcgattaaagaatacggagactttgacaatattgtcatcgaaatggctcgtgaaacaaatgaagatgatgaaaagaaagctattcaaaagattcaaaaagccaacaaagatgaaaaagatgcagcaatgcttaaggctgctaaccaatataatggaaaggctgaattaccacatagtgttttccacggtcataagcaattagcgactaaaatccgcctttggcatcagcaaggagaacgttgcctttatactggtaagacaatctcaatccatgatttgataaataattctaatcagtttgaagtagatcatattttacctctttctatcacattcgatgatagccttgcaaataaggttttggtttatgcaactgctaaccaagaaaaaggacaacgaacaccttatcaggctttagatagtatggatgatgcgtggtctttccgtgaattaaaagcttttgtacgtgagtcaaaaacactttcgaacaagaaaaaagaatacctccttacagaagaagatatttcaaagtttgatgttcgaaagaaatttattgaacgaaatcttgtagatacaagatacgcttcaagagttgtcctcaatgcccttcaagaacactttagagctcacaagattgatacaaaagtttccgtggttcgtggccaatttacatctcaattgagacgccattggggaattgagaagactcgtgatacttatcatcaccatgctgtcgatgcattgattattgccgcctcaagtcagttgaatttgtggaaaaaacaaaagaatacccttgtaagttattcagaagaccaactccttgatattgaaacaggtgaacttattagtgatgatgagtacaaggaatctgtgttcaaagccccttatcaacattttgttgatacattgaagagtaaagaatttgaagacagtatcttattctcttatcaagtggattctaagtttaatcgtaaaatatcagatgccactatttatgcgacaagacaggctaaagtaggaaaagataaggcggatgaaacttatgtcttagggaaaatcaaagatatttatactcaggatggttatgatgcctttatgaagatttataagaaggataagtcaaaattcctcatgtatcgtcacgacccacaaacctttgagaaagttatcgagccaattttagagaactatcctaataagcaaataaatgaaaaagggaaagaggtaccatgtaatcctttcctaaaatataaagaagaacatggctatattcgtaaatatagtaaaaaaggcaatggtcctgaaatcaagagtcttaaatactatgatagtaagctaggcaatcatattgatattactccgaaggatagtaacaataaagttgtcttacagtcagtttctccatggagagcggatgtctatttcaataagactactggaaaatacgaaatcctcggattgaaatatgctgatttacaatttgaaaaagggacaggaacatataagatttcccaggaaaaatacaatgacattaagaaaaaagagggtgtagattctgattcagaattcaagtttacactttataaaaatgatttgttactcgttaaagatacagaaacaaaagaacaacagcttttccgttttctttctcgaactatgcctaaacaaaagcattatgttgaattaaaaccttatgataaacagaaatttgaaggaggtgaggcgttaattaaagtgttgggtaacgttgctaatagtggtcaatgcaaaaaagggctaggaaaatcaaatatttctatttataaggtaagaacagatgtcctaggaaatcagcatatcatcaaaaatgagggtgataagcctaagctagatttttaa

SEQ ID NO: 17 - DNA, 4167 bp, Streptococcus thermophilus; identical to SEQ ID NO: 9

SEQ ID NO: 18 - DNA, 3249 bp, Neisseria meningitidis
atggccgccttcaagcccaaccccatcaactacatcctgggcctggacatcggcatcgccagcgtgggctgggccatggtggagatcgacgaggacgagaaccccatctgcctgatcgacctgggtgtgcgcgtgttcgagcgcgctgaggtgcccaagactggtgacagtctggctatggctcgccggcttgctcgctctgttcggcgccttactcgccggcgcgctcaccgccttctgcgcgctcgccgcctgctgaagcgcgagggtgtgctgcaggctgccgacttcgacgagaacggcctgatcaagagcctgcccaacactccttggcagctgcgcgctgccgctctggaccgcaagctgactcctctggagtggagcgccgtgctgctgcacctgatcaagcaccgcggctacctgagccagcgcaagaacgagggcgagaccgccgacaaggagctgggtgctctgctgaagggcgtggccgacaacgcccacgccctgcagactggtgacttccgcactcctgctgagctggccctgaacaagttcgagaaggagagcggccacatccgcaaccagcgcggcgactacagccacaccttcagccgcaaggacctgcaggccgagctgatcctgctgttcgagaagcagaaggagttcggcaacccccacgtgagcggcggcctgaaggagggcatcgagaccctgctgatgacccagcgccccgccctgagcggcgacgccgtgcagaagatgctgggccactgcaccttcgagccagccgagcccaaggccgccaagaacacctacaccgccgagcgcttcatctggctgaccaagctgaacaacctgcgcatcctggagcagggcagcgagcgccccctgaccgacaccgagcgcgccaccctgatggacgagccctaccgcaagagcaagctgacctacgcccaggcccgcaagctgctgggtctggaggacaccgccttcttcaagggcctgcgctacggcaaggacaacgccgaggccagcaccctgatggagatgaaggcctaccacgccatcagccgcgccctggagaaggagggcctgaaggacaagaagagtcctctgaacctgagccccgagctgcaggacgagatcggcaccgccttcagcctgttcaagaccgacgaggacatcaccggccgcctgaaggaccgcatccagcccgagatcctggaggccctgctgaagcacatcagcttcgacaagttcgtgcagatcagcctgaaggccctgcgccgcatcgtgcccctgatggagcagggcaagcgctacgacgaggcctgcgccgagatctacggcgaccactacggcaagaagaacaccgaggagaagatctacctgcctcctatccccgccgacgagatccgcaaccccgtggtgctgcgcgccctgagccaggcccgcaaggtgatcaacggcgtggtgcgccgctacggcagccccgcccgcatccacatcgagaccgcccgcgaggtgggcaagagcttcaaggaccgcaaggagatcgagaagcgccaggaggagaaccgcaaggaccgcgagaaggccgccgccaagttccgcgagtacttccccaacttcgtgggcgagcccaagagcaaggacatcctgaagctgcgcctgtacgagcagcagcacggcaagtgcctgtacagcggcaaggagatcaacctgggccgcctgaacgagaagggctacgtggagatcgaccacgccctgcccttcagccgcacctgggacgacagcttcaacaacaaggtgctggtgctgggcagcgagaaccagaacaagggcaaccagaccccctacgagtacttcaacggcaaggacaacagccgcgagtggcaggagttcaaggcccgcgtggagaccagccgcttcccccgcagcaagaagcagcgcatcctgctgcagaagttcgacgaggacggcttcaaggagcgcaacctgaacgacacccgctacgtgaaccgcttcctgtgccagttcgtggccgaccgcatgcgcctgaccggcaagggcaagaagcgcgtgttcgccagcaacggccagatcaccaacctgctgcgcggcttctggggcctgcgcaaggtgcgcgccgagaacgaccgccaccacgccctggacgccgtggtggtggcctgcagcaccgtggccatgcagcagaagatcacccgcttcgtgcgctacaaggagatgaacgccttcgacggtaaaaccatcgacaaggagaccggcgaggtgctgcaccagaagacccacttcccccagccctgggagttcttcgcccaggaggtgatgatccgcgtgttcggcaagcccgacggcaagcccgagttcgaggaggccgacacccccgagaagctgcgcaccctgctggccgagaagctgagcagccgccctgaggccgtgcacgagtacgtgactcctctgttcgtgagccgcgcccccaaccgcaagatgagcggtcagggtcacatggagaccgtgaagagcgccaagcgcctggacgagggcgtgagcgtgctgcgcgtgcccctgacccagctgaagctgaaggacctggagaagatggtgaaccgcgagcgcgagcccaagctgtacgaggccctgaaggcccgcctggaggcccacaaggacgaccccgccaaggccttcgccgagcccttctacaagtacgacaaggccggcaaccgcacccagcaggtgaaggccgtgcgcgtggagcaggtgcagaagaccggcgtgtgggtgcgcaaccacaacggcatcgccgacaacgccaccatggtgcgcgtggacgtgttcgagaagggcgacaagtactacctggtgcccatctacagctggcaggtggccaagggcatcctgcccgaccgcgccgtggtgcagggcaaggacgaggaggactggcagctgatcgacgacagcttcaacttcaagttcagcctgcaccccaacgacctggtggaggtgatcaccaagaaggcccgcatgttcggctacttcgccagctgccaccgcggcaccggcaacatcaacatccgcatccacgacctggaccacaagatcggcaagaacggcatcctggagggcatcggcgtgaagaccgccctgagcttccagaagtaccagatcgacgagctgggcaaggagatccgcccctgccgcctgaagaagcgccctcctgtgcgctaa

SEQ ID NO: 19 - DNA, 3249 bp, Neisseria meningitidis
atggccgccttcaagcccaaccccatcaactacatcctgggcctggccatcggcatcgccagcgtgggctgggccatggtggagatcgacgaggacgagaaccccatctgcctgatcgacctgggtgtgcgcgtgttcgagcgcgctgaggtgcccaagactggtgacagtctggctatggctcgccggcttgctcgctctgttcggcgccttactcgccggcgcgctcaccgccttctgcgcgctcgccgcctgctgaagcgcgagggtgtgctgcaggctgccgacttcgacgagaacggcctgatcaagagcctgcccaacactccttggcagctgcgcgctgccgctctggaccgcaagctgactcctctggagtggagcgccgtgctgctgcacctgatcaagcaccgcggctacctgagccagcgcaagaacgagggcgagaccgccgacaaggagctgggtgctctgctgaagggcgtggccgacaacgcccacgccctgcagactggtgacttccgcactcctgctgagctggccctgaacaagttcgagaaggagagcggccacatccgcaaccagcgcggcgactacagccacaccttcagccgcaaggacctgcaggccgagctgatcctgctgttcgagaagcagaaggagttcggcaacccccacgtgagcggcggcctgaaggagggcatcgagaccctgctgatgacccagcgccccgccctgagcggcgacgccgtgcagaagatgctgggccactgcaccttcgagccagccgagcccaaggccgccaagaacacctacaccgccgagcgcttcatctggctgaccaagctgaacaacctgcgcatcctggagcagggcagcgagcgccccctgaccgacaccgagcgcgccaccctgatggacgagccctaccgcaagagcaagctgacctacgcccaggcccgcaagctgctgggtctggaggacaccgccttcttcaagggcctgcgctacggcaaggacaacgccgaggccagcaccctgatggagatgaaggcctaccacgccatcagccgcgccctggagaaggagggcctgaaggacaagaagagtcctctgaacctgagccccgagctgcaggacgagatcggcaccgccttcagcctgttcaagaccgacgaggacatcaccggccgcctgaaggaccgcatccagcccgagatcctggaggccctgctgaagcacatcagcttcgacaagttcgtgcagatcagcctgaaggccctgcgccgcatcgtgcccctgatggagcagggcaagcgctacgacgaggcctgcgccgagatctacggcgaccactacggcaagaagaacaccgaggagaagatctacctgcctcctatccccgccgacgagatccgcaaccccgtggtgctgcgcgccctgagccaggcccgcaaggtgatcaacggcgtggtgcgccgctacggcagccccgcccgcatccacatcgagaccgcccgcgaggtgggcaagagcttcaaggaccgcaaggagatcgagaagcgccaggaggagaaccgcaaggaccgcgagaaggccgccgccaagttccgcgagtacttccccaacttcgtgggcgagcccaagagcaaggacatcctgaagctgcgcctgtacgagcagcagcacggcaagtgcctgtacagcggcaaggagatcaacctgggccgcctgaacgagaagggctacgtggagatcgccgctgccctgcccttcagccgcacctgggacgacagcttcaacaacaaggtgctggtgctgggcagcgaggctcagaacaagggcaaccagaccccctacgagtacttcaacggcaaggacaacagccgcgagtggcaggagttcaaggcccgcgtggagaccagccgcttcccccgcagcaagaagcagcgcatcctgctgcagaagttcgacgaggacggcttcaaggagcgcaacctgaacgacacccgctacgtgaaccgcttcctgtgccagttcgtggccgaccgcatgcgcctgaccggcaagggcaagaagcgcgtgttcgccagcaacggccagatcaccaacctgctgcgcggcttctggggcctgcgcaaggtgcgcgccgagaacgaccgccaccacgccctggacgccgtggtggtggcctgcagcaccgtggccatgcagcagaagatcacccgcttcgtgcgctacaaggagatgaacgccttcgacggtaaaaccatcgacaaggagaccggcgaggtgctgcaccagaagacccacttcccccagccctgggagttcttcgcccaggaggtgatgatccgcgtgttcggcaagcccgacggcaagcccgagttcgaggaggccgacacccccgagaagctgcgcaccctgctggccgagaagctgagcagccgccctgaggccgtgcacgagtacgtgactcctctgttcgtgagccgcgcccccaaccgcaagatgagcggtcagggtcacatggagaccgtgaagagcgccaagcgcctggacgagggcgtgagcgtgctgcgcgtgcccctgacccagctgaagctgaaggacctggagaagatggtgaaccgcgagcgcgagcccaagctgtacgaggccctgaaggcccgcctggaggcccacaaggacgaccccgccaaggccttcgccgagcccttctacaagtacgacaaggccggcaaccgcacccagcaggtgaaggccgtgcgcgtggagcaggtgcagaagaccggcgtgtgggtgcgcaaccacaacggcatcgccgacaacgccaccatggtgcgcgtggacgtgttcgagaagggcgacaagtactacctggtgcccatctacagctggcaggtggccaagggcatcctgcccgaccgcgccgtggtgcagggcaaggacgaggaggactggcagctgatcgacgacagcttcaacttcaagttcagcctgcaccccaacgacctggtggaggtgatcaccaagaaggcccgcatgttcggctacttcgccagctgccaccgcggcaccggcaacatcaacatccgcatccacgacctggaccacaagatcggcaagaacggcatcctggagggcatcggcgtgaagaccgccctgagcttccagaagtaccagatcgacgagctgggcaaggagatccgcccctgccgcctgaagaagcgccctcctgtgcgctaa

SEQ ID NO: 20 - DNA, 3282 bp, Neisseria meningitidis
atggccgccttcaagcccaaccccatcaactacatcctgggcctggacatcggcatcgccagcgtgggctgggccatggtggagatcgacgaggacgagaaccccatctgcctgatcgacctgggtgtgcgcgtgttcgagcgcgctgaggtgcccaagactggtgacagtctggctatggctcgccggcttgctcgctctgttcggcgccttactcgccggcgcgctcaccgccttctgcgcgctcgccgcctgctgaagcgcgagggtgtgctgcaggctgccgacttcgacgagaacggcctgatcaagagcctgcccaacactccttggcagctgcgcgctgccgctctggaccgcaagctgactcctctggagtggagcgccgtgctgctgcacctgatcaagcaccgcggctacctgagccagcgcaagaacgagggcgagaccgccgacaaggagctgggtgctctgctgaagggcgtggccgacaacgcccacgccctgcagactggtgacttccgcactcctgctgagctggccctgaacaagttcgagaaggagagcggccacatccgcaaccagcgcggcgactacagccacaccttcagccgcaaggacctgcaggccgagctgatcctgctgttcgagaagcagaaggagttcggcaacccccacgtgagcggcggcctgaaggagggcatcgagaccctgctgatgacccagcgccccgccctgagcggcgacgccgtgcagaagatgctgggccactgcaccttcgagccagccgagcccaaggccgccaagaacacctacaccgccgagcgcttcatctggctgaccaagctgaacaacctgcgcatcctggagcagggcagcgagcgccccctgaccgacaccgagcgcgccaccctgatggacgagccctaccgcaagagcaagctgacctacgcccaggcccgcaagctgctgggtctggaggacaccgccttcttcaagggcctgcgctacggcaaggacaacgccgaggccagcaccctgatggagatgaaggcctaccacgccatcagccgcgccctggagaaggagggcctgaaggacaagaagagtcctctgaacctgagccccgagctgcaggacgagatcggcaccgccttcagcctgttcaagaccgacgaggacatcaccggccgcctgaaggaccgcatccagcccgagatcctggaggccctgctgaagcacatcagcttcgacaagttcgtgcagatcagcctgaaggccctgcgccgcatcgtgcccctgatggagcagggcaagcgctacgacgaggcctgcgccgagatctacggcgaccactacggcaagaagaacaccgaggagaagatctacctgcctcctatccccgccgacgagatccgcaaccccgtggtgctgcgcgccctgagccaggcccgcaaggtgatcaacggcgtggtgcgccgctacggcagccccgcccgcatccacatcgagaccgcccgcgaggtgggcaagagcttcaaggaccgcaaggagatcgagaagcgccaggaggagaaccgcaaggaccgcgagaaggccgccgccaagttccgcgagtacttccccaacttcgtgggcgagcccaagagcaaggacatcctgaagctgcgcctgtacgagcagcagcacggcaagtgcctgtacagcggcaaggagatcaacctgggccgcctgaacgagaagggctacgtggagatcgaccacgccctgcccttcagccgcacctgggacgacagcttcaacaacaaggtgctggtgctgggcagcgagaaccagaacaagggcaaccagaccccctacgagtacttcaacggcaaggacaacagccgcgagtggcaggagttcaaggcccgcgtggagaccagccgcttcccccgcagcaagaagcagcgcatcctgctgcagaagttcgacgaggacggcttcaaggagcgcaacctgaacgacacccgctacgtgaaccgcttcctgtgccagttcgtggccgaccgcatgcgcctgaccggcaagggcaagaagcgcgtgttcgccagcaacggccagatcaccaacctgctgcgcggcttctggggcctgcgcaaggtgcgcgccgagaacgaccgccaccacgccctggacgccgtggtggtggcctgcagcaccgtggccatgcagcagaagatcacccgcttcgtgcgctacaaggagatgaacgccttcgacggtaaaaccatcgacaaggagaccggcgaggtgctgcaccagaagacccacttcccccagccctgggagttcttcgcccaggaggtgatgatccgcgtgttcggcaagcccgacggcaagcccgagttcgaggaggccgacacccccgagaagctgcgcaccctgctggccgagaagctgagcagccgccctgaggccgtgcacgagtacgtgactcctctgttcgtgagccgcgcccccaaccgcaagatgagcggtcagggtcacatggagaccgtgaagagcgccaagcgcctggacgagggcgtgagcgtgctgcgcgtgcccctgacccagctgaagctgaaggacctggagaagatggtgaaccgcgagcgcgagcccaagctgtacgaggccctgaaggcccgcctggaggcccacaaggacgaccccgccaaggccttcgccgagcccttctacaagtacgacaaggccggcaaccgcacccagcaggtgaaggccgtgcgcgtggagcaggtgcagaagaccggcgtgtgggtgcgcaaccacaacggcatcgccgacaacgccaccatggtgcgcgtggacgtgttcgagaagggcgacaagtactacctggtgcccatctacagctggcaggtggccaagggcatcctgcccgaccgcgccgtggtgcagggcaaggacgaggaggactggcagctgatcgacgacagcttcaacttcaagttcagcctgcaccccaacgacctggtggaggtgatcaccaagaaggcccgcatgttcggctacttcgccagctgccaccgcggcaccggcaacatcaacatccgcatccacgacctggaccacaagatcggcaagaacggcatcctggagggcatcggcgtgaagaccgccctgagcttccagaagtaccagatcgacgagctgggcaaggagatccgcccctgccgcctgaagaagcgccctcctgtgcgcagcagggctgaccccaagaagaagaggaaggtgtga

SEQ ID NO: 21 - DNA, 3342 bp, Neisseria meningitidis
atggccgccttcaagcccaaccccatcaactacatcctgggcctggacatcggcatcgccagcgtgggctgggccatggtggagatcgacgaggacgagaaccccatctgcctgatcgacctgggtgtgcgcgtgttcgagcgcgctgaggtgcccaagactggtgacagtctggctatggctcgccggcttgctcgctctgttcggcgccttactcgccggcgcgctcaccgccttctgcgcgctcgccgcctgctgaagcgcgagggtgtgctgcaggctgccgacttcgacgagaacggcctgatcaagagcctgcccaacactccttggcagctgcgcgctgccgctctggaccgcaagctgactcctctggagtggagcgccgtgctgctgcacctgatcaagcaccgcggctacctgagccagcgcaagaacgagggcgagaccgccgacaaggagctgggtgctctgctgaagggcgtggccgacaacgcccacgccctgcagactggtgacttccgcactcctgctgagctggccctgaacaagttcgagaaggagagcggccacatccgcaaccagcgcggcgactacagccacaccttcagccgcaaggacctgcaggccgagctgatcctgctgttcgagaagcagaaggagttcggcaacccccacgtgagcggcggcctgaaggagggcatcgagaccctgctgatgacccagcgccccgccctgagcggcgacgccgtgcagaagatgctgggccactgcaccttcgagccagccgagcccaaggccgccaagaacacctacaccgccgagcgcttcatctggctgaccaagctgaacaacctgcgcatcctggagcagggcagcgagcgccccctgaccgacaccgagcgcgccaccctgatggacgagccctaccgcaagagcaagctgacctacgcccaggcccgcaagctgctgggtctggaggacaccgccttcttcaagggcctgcgctacggcaaggacaacgccgaggccagcaccctgatggagatgaaggcctaccacgccatcagccgcgccctggagaaggagggcctgaaggacaagaagagtcctctgaacctgagccccgagctgcaggacgagatcggcaccgccttcagcctgttcaagaccgacgaggacatcaccggccgcctgaaggaccgcatccagcccgagatcctggaggccctgctgaagcacatcagcttcgacaagttcgtgcagatcagcctgaaggccctgcgccgcatcgtgcccctgatggagcagggcaagcgctacgacgaggcctgcgccgagatctacggcgaccactacggcaagaagaacaccgaggagaagatctacctgcctcctatccccgccgacgagatccgcaaccccgtggtgctgcgcgccctgagccaggcccgcaaggtgatcaacggcgtggtgcgccgctacggcagccccgcccgcatccacatcgagaccgcccgcgaggtgggcaagagcttcaaggaccgcaaggagatcgagaagcgccaggaggagaaccgcaaggaccgcgagaaggccgccgccaagttccgcgagtacttccccaacttcgtgggcgagcccaagagcaaggacatcctgaagctgcgcctgtacgagcagcagcacggcaagtgcctgtacagcggcaaggagatcaacctgggccgcctgaacgagaagggctacgtggagatcgaccacgccctgcccttcagccgcacctgggacgacagcttcaacaacaaggtgctggtgctgggcagcgagaaccagaacaagggcaaccagaccccctacgagtacttcaacggcaaggacaacagccgcgagtggcaggagttcaaggcccgcgtggagaccagccgcttcccccgcagcaagaagcagcgcatcctgctgcagaagttcgacgaggacggcttcaaggagcgcaacctgaacgacacccgctacgtgaaccgcttcctgtgccagttcgtggccgaccgcatgcgcctgaccggcaagggcaagaagcgcgtgttcgccagcaacggccagatcaccaacctgctgcgcggcttctggggcctgcgcaaggtgcgcgccgagaacgaccgccaccacgccctggacgccgtggtggtggcctgcagcaccgtggccatgcagcagaagatcacccgcttcgtgcgctacaaggagatgaacgccttcgacggtaaaaccatcgacaaggagaccggcgaggtgctgcaccagaagacccacttcccccagccctgggagttcttcgcccaggaggtgatgatccgcgtgttcggcaagcccgacggcaagcccgagttcgaggaggccgacacccccgagaagctgcgcaccctgctggccgagaagctgagcagccgccctgaggccgtgcacgagtacgtgactcctctgttcgtgagccgcgcccccaaccgcaagatgagcggtcagggtcacatggagaccgtgaagagcgccaagcgcctggacgagggcgtgagcgtgctgcgcgtgcccctgacccagctgaagctgaaggacctggagaagatggtgaaccgcgagcgcgagcccaagctgtacgaggccctgaaggcccgcctggaggcccacaaggacgaccccgccaaggccttcgccgagcccttctacaagtacgacaaggccggcaaccgcacccagcaggtgaaggccgtgcgcgtggagcaggtgcagaagaccggcgtgtgggtgcgcaaccacaacggcatcgccgacaacgccaccatggtgcgcgtggacgtgttcgagaagggcgacaagtactacctggtgcccatctacagctggcaggtggccaagggcatcctgcccgaccgcgccgtggtgcagggcaaggacgaggaggactggcagctgatcgacgacagcttcaacttcaagttcagcctgcaccccaacgacctggtggaggtgatcaccaagaaggcccgcatgttcggctacttcgccagctgccaccgcggcaccggcaacatcaacatccgcatccacgacctggaccacaagatcggcaagaacggcatcctggagggcatcggcgtgaagaccgccctgagcttccagaagtaccagatcgacgagctgggcaaggagatccgcccctgccgcctgaagaagcgccctcctgtgcgcgcggccgcagatccaaaaaagaagagaaaggtagatccaaaaaagaagagaaaggtagatccaaaaaagaagagaaaggtagatacggccgcatag

SEQ ID NO: 22 - DNA, 3468 bp, Neisseria meningitidis
atggccgccttcaagcccaaccccatcaactacatcctgggcctggccatcggcatcgccagcgtgggctgggccatggtggagatcgacgaggacgagaaccccatctgcctgatcgacctgggtgtgcgcgtgttcgagcgcgctgaggtgcccaagactggtgacagtctggctatggctcgccggcttgctcgctctgttcggcgccttactcgccggcgcgctcaccgccttctgcgcgctcgccgcctgctgaagcgcgagggtgtgctgcaggctgccgacttcgacgagaacggcctgatcaagagcctgcccaacactccttggcagctgcgcgctgccgctctggaccgcaagctgactcctctggagtggagcgccgtgctgctgcacctgatcaagcaccgcggctacctgagccagcgcaagaacgagggcgagaccgccgacaaggagctgggtgctctgctgaagggcgtggccgacaacgcccacgccctgcagactggtgacttccgcactcctgctgagctggccctgaacaagttcgagaaggagagcggccacatccgcaaccagcgcggcgactacagccacaccttcagccgcaaggacctgcaggccgagctgatcctgctgttcgagaagcagaaggagttcggcaacccccacgtgagcggcggcctgaaggagggcatcgagaccctgctgatgacccagcgccccgccctgagcggcgacgccgtgcagaagatgctgggccactgcaccttcgagccagccgagcccaaggccgccaagaacacctacaccgccgagcgcttcatctggctgaccaagctgaacaacctgcgcatcctggagcagggcagcgagcgccccctgaccgacaccgagcgcgccaccctgatggacgagccctaccgcaagagcaagctgacctacgcccaggcccgcaagctgctgggtctggaggacaccgccttcttcaagggcctgcgctacggcaaggacaacgccgaggccagcaccctgatggagatgaaggcctaccacgccatcagccgcgccctggagaaggagggcctgaaggacaagaagagtcctctgaacctgagccccgagctgcaggacgagatcggcaccgccttcagcctgttcaagaccgacgaggacatcaccggccgcctgaaggaccgcatccagcccgagatcctggaggccctgctgaagcacatcagcttcgacaagttcgtgcagatcagcctgaaggccctgcgccgcatcgtgcccctgatggagcagggcaagcgctacgacgaggcctgcgccgagatctacggcgaccactacggcaagaagaacaccgaggagaagatctacctgcctcctatccccgccgacgagatccgcaaccccgtggtgctgcgcgccctgagccaggcccgcaaggtgatcaacggcgtggtgcgccgctacggcagccccgcccgcatccacatcgagaccgcccgcgaggtgggcaagagcttcaaggaccgcaaggagatcgagaagcgccaggaggagaaccgcaaggaccgcgagaaggccgccgccaagttccgcgagtacttccccaacttcgtgggcgagcccaagagcaaggacatcctgaagctgcgcctgtacgagcagcagcacggcaagtgcctgtacagcggcaaggagatcaacctgggccgcctgaacgagaagggctacgtggagatcgccgctgccctgcccttcagccgcacctgggacgacagcttcaacaacaaggtgctggtgctgggcagcgaggctcagaacaagggcaaccagaccccctacgagtacttcaacggcaaggacaacagccgcgagtggcaggagttcaaggcccgcgtggagaccagccgcttcccccgcagcaagaagcagcgcatcctgctgcagaagttcgacgaggacggcttcaaggagcgcaacctgaacgacacccgctacgtgaaccgcttcctgtgccagttcgtggccgaccgcatgcgcctgaccggcaagggcaagaagcgcgtgttcgccagcaacggccagatcaccaacctgctgcgcggcttctggggcctgcgcaaggtgcgcgccgagaacgaccgccaccacgccctggacgccgtggtggtggcctgcagcaccgtggccatgcagcagaagatcacccgcttcgtgcgctacaaggagatgaacgccttcgacggtaaaaccatcgacaaggagaccggcgaggtgctgcaccagaagacccacttcccccagccctgggagttcttcgcccaggaggtgatgatccgcgtgttcggcaagcccgacggcaagcccgagttcgaggaggccgacacccccgagaagctgcgcaccctgctggccgagaagctgagcagccgccctgaggccgtgcacgagtacgtgactcctctgttcgtgagccgcgcccccaaccgcaagatgagcggtcagggtcacatggagaccgtgaagagcgccaagcgcctggacgagggcgtgagcgtgctgcgcgtgcccctgacccagctgaagctgaaggacctggagaagatggtgaaccgcgagcgcgagcccaagctgtacgaggccctgaaggcccgcctggaggcccacaaggacgaccccgccaaggccttcgccgagcccttctacaagtacgacaaggccggcaaccgcacccagcaggtgaaggccgtgcgcgtggagcaggtgcagaagaccggcgtgtgggtgcgcaaccacaacggcatcgccgacaacgccaccatggtgcgcgtggacgtgttcgagaagggcgacaagtactacctggtgcccatctacagctggcaggtggccaagggcatcctgcccgaccgcgccgtggtgcagggcaaggacgaggaggactggcagctgatcgacgacagcttcaacttcaagttcagcctgcaccccaacgacctggtggaggtgatcaccaagaaggcccgcatgttcggctacttcgccagctgccaccgcggcaccggcaacatcaacatccgcatccacgacctggaccacaagatcggcaagaacggcatcctggagggcatcggcgtgaagaccgccctgagcttccagaagtaccagatcgacgagctgggcaaggagatccgcccctgccgcctgaagaagcgccctcctgtgcgcagcagggctgaccccaagaagaagaggaaggtggaggccagcggttccggacgggctgacgcattggacgattttgatctggatatgctgggaagtgacgccctcgatgattttgaccttgacatgcttggttcggatgcccttgatgactttgacctcgacatgctcggcagtgacgcccttgatgatttcgacctggacatgctgattaactctagatga

SEQ ID NO: 23 - DNA, 3489 bp, Neisseria meningitidis
atgcccaagaagaagaggaaggtggccgccttcaagcccaaccccatcaactacatcctgggcctggccatcggcatcgccagcgtgggctgggccatggtggagatcgacgaggacgagaaccccatctgcctgatcgacctgggtgtgcgcgtgttcgagcgcgctgaggtgcccaagactggtgacagtctggctatggctcgccggcttgctcgctctgttcggcgccttactcgccggcgcgctcaccgccttctgcgcgctcgccgcctgctgaagcgcgagggtgtgctgcaggctgccgacttcgacgagaacggcctgatcaagagcctgcccaacactccttggcagctgcgcgctgccgctctggaccgcaagctgactcctctggagtggagcgccgtgctgctgcacctgatcaagcaccgcggctacctgagccagcgcaagaacgagggcgagaccgccgacaaggagctgggtgctctgctgaagggcgtggccgacaacgcccacgccctgcagactggtgacttccgcactcctgctgagctggccctgaacaagttcgagaaggagagcggccacatccgcaaccagcgcggcgactacagccacaccttcagccgcaaggacctgcaggccgagctgatcctgctgttcgagaagcagaaggagttcggcaacccccacgtgagcggcggcctgaaggagggcatcgagaccctgctgatgacccagcgccccgccctgagcggcgacgccgtgcagaagatgctgggccactgcaccttcgagccagccgagcccaaggccgccaagaacacctacaccgccgagcgcttcatctggctgaccaagctgaacaacctgcgcatcctggagcagggcagcgagcgccccctgaccgacaccgagcgcgccaccctgatggacgagccctaccgcaagagcaagctgacctacgcccaggcccgcaagctgctgggtctggaggacaccgccttcttcaagggcctgcgctacggcaaggacaacgccgaggccagcaccctgatggagatgaaggcctaccacgccatcagccgcgccctggagaaggagggcctgaaggacaagaagagtcctctgaacctgagccccgagctgcaggacgagatcggcaccgccttcagcctgttcaagaccgacgaggacatcaccggccgcctgaaggaccgcatccagcccgagatcctggaggccctgctgaagcacatcagcttcgacaagttcgtgcagatcagcctgaaggccctgcgccgcatcgtgcccctgatggagcagggcaagcgctacgacgaggcctgcgccgagatctacggcgaccactacggcaagaagaacaccgaggagaagatctacctgcctcctatccccgccgacgagatccgcaaccccgtggtgctgcgcgccctgagccaggcccgcaaggtgatcaacggcgtggtgcgccgctacggcagccccgcccgcatccacatcgagaccgcccgcgaggtgggcaagagcttcaaggaccgcaaggagatcgagaagcgccaggaggagaaccgcaaggaccgcgagaaggccgccgccaagttccgcgagtacttccccaacttcgtgggcgagcccaagagcaaggacatcctgaagctgcgcctgtacgagcagcagcacggcaagtgcctgtacagcggcaaggagatcaacctgggccgcctgaacgagaagggctacgtggagatcgccgctgccctgcccttcagccgcacctgggacgacagcttcaacaacaaggtgctggtgctgggcagcgaggctcagaacaagggcaaccagaccccctacgagtacttcaacggcaaggacaacagccgcgagtggcaggagttcaaggcccgcgtggagaccagccgcttcccccgcagcaagaagcagcgcatcctgctgcagaagttcgacgaggacggcttcaaggagcgcaacctgaacgacacccgctacgtgaaccgcttcctgtgccagttcgtggccgaccgcatgcgcctgaccggcaagggcaagaagcgcgtgttcgccagcaacggccagatcaccaacctgctgcgcggcttctggggcctgcgcaaggtgcgcgccgagaacgaccgccaccacgccctggacgccgtggtggtggcctgcagcaccgtggccatgcagcagaagatcacccgcttcgtgcgctacaaggagatgaacgccttcgacggtaaaaccatcgacaaggagaccggcgaggtgctgcaccagaagacccacttcccccagccctgggagttcttcgcccaggaggtgatgatccgcgtgttcggcaagcccgacggcaagcccgagttcgaggaggccgacacccccgagaagctgcgcaccctgctggccgagaagctgagcagccgccctgaggccgtgcacgagtacgtgactcctctgttcgtgagccgcgcccccaaccgcaagatgagcggtcagggtcacatggagaccgtgaagagcgccaagcgcctggacgagggcgtgagcgtgctgcgcgtgcccctgacccagctgaagctgaaggacctggagaagatggtgaaccgcgagcgcgagcccaagctgtacgaggccctgaaggcccgcctggaggcccacaaggacgaccccgccaaggccttcgccgagcccttctacaagtacgacaaggccggcaaccgcacccagcaggtgaaggccgtgcgcgtggagcaggtgcagaagaccggcgtgtgggtgcgcaaccacaacggcatcgccgacaacgccaccatggtgcgcgtggacgtgttcgagaagggcgacaagtactacctggtgcccatctacagctggcaggtggccaagggcatcctgcccgaccgcgccgtggtgcagggcaaggacgaggaggactggcagctgatcgacgacagcttcaacttcaagttcagcctgcaccccaacgacctggtggaggtgatcaccaagaaggcccgcatgttcggctacttcgccagctgccaccgcggcaccggcaacatcaacatccgcatccacgacctggaccacaagatcggcaagaacggcatcctggagggcatcggcgtgaagaccgccctgagcttccagaagtaccagatcgacgagctgggcaaggagatccgcccctgccgcctgaagaagcgccctcctgtgcgcagcagggctgaccccaagaagaagaggaaggtggaggccagcggttccggacgggctgacgcattggacgattttgatctggatatgctgggaagtgacgccctcgatgattttgaccttgacatgcttggttcggatgcccttgatgactttgacctcgacatgctcggcagtgacgcccttgatgatttcgacctggacatgctgattaactctagatga

SEQ ID NO: 24 - DNA, 3249 bp, Neisseria meningitidis
atggctgccttcaaacctaattcaatcaactacatcctcggcctcgatatcggcatcgcatccgtcggctgggcgatggtagaaattgacgaagaagaaaaccccatccgcctgattgatttgggcgtgcgcgtatttgagcgtgccgaagtaccgaaaacaggcgactcccttgccatggcaaggcgtttggcgcgcagtgttcgccgcctgacccgccgtcgcgcccaccgcctgcttcggacccgccgcctattgaaacgcgaaggcgtattacaagccgccaattttgacgaaaacggcttgattaaatccttaccgaatacaccatggcaacttcgcgcagccgcattagaccgcaaactgacgcctttagagtggtcggcagtcttgttgcatttaatcaaacatcgcggctatttatcgcaacggaaaaacgagggcgaaactgccgataaggagcttggcgctttgcttaaaggcgtagccggcaatgcccatgccttacagacaggcgatttccgcacaccggccgaattggctttaaataaatttgagaaagaaagcggccatatccgcaatcagcgcagcgattattcgcatacgttcagccgcaaagatttacaggcggagctgattttgctgtttgaaaaacaaaaagaatttggcaatccgcatgtttcaggcggccttaaagaaggtattgaaaccctactgatgacgcaacgccctgccctgtccggcgatgccgttcaaaaaatgttggggcattgcaccttcgaaccggcagagccgaaagccgctaaaaacacctacacagccgaacgtttcatctggctgaccaagctgaacaacctgcgtattttagagcaaggcagcgagcggccattgaccgataccgaacgcgccacgcttatggacgagccatacagaaaatccaaactgacttacgcacaagcccgtaagctgctgggtttagaagataccgcctttttcaaaggcttgcgctatggtaaagacaatgccgaagcctcaacattgatggaaatgaaggcctaccatgccatcagccgtgcactggaaaaagaaggattgaaagacaaaaaatccccattaaacctttctcccgaattacaagacgaaatcggcacggcattctccctgttcaaaaccgatgaagacattacaggccgtctgaaagaccgtatacagcccgaaatcttagaagcgctgttgaaacacatcagcttcgataagttcgtccaaatttccttgaaagcattgcgccgaattgtgcctctaatggaacaaggcaaacgttacgatgaagcctgcgccgaaatctacggagaccattacggcaagaagaatacggaagaaaagatttatctgccgccgattcccgccgacgaaatccgcaaccccgtcgtcttgcgcgccttatctcaagcacgtaaggtcattaacggcgtggtacgccgttacggctccccagctcgtatccatattgaaactgcaagggaagtaggtaaatcgtttaaagaccgcaaagaaattgagaaacgccaagaagaaaaccgcaaagaccgggaaaaagccgccgccaaattccgagagtatttccccaattttgtcggagaacccaaatccaaagatattctgaaactgcgcctgtacgagcaacaacacggcaaatgcctgtattcgggcaaagaaatcaacttaggccgtctgaacgaaaaaggctatgtcgaaatcgaccatgccctgccgttctcgcgcacatgggacgacagtttcaacaataaagtactggtattgggcagcgaaaaccaaaacaaaggcaatcaaaccccttacgaatacttcaacggcaaagacaacagccgcgaatggcaggaatttaaagcgcgtgtcgaaaccagccgtttcccgcgcagtaaaaaacaacggattctgctgcaaaaattcgatgaagacggctttaaagaacgcaatctgaacgacacgcgctacgtcaaccgtttcctgtgtcaatttgttgccgaccgtatgcggctgacaggtaaaggcaagaaacgtgtctttgcatccaacggacaaattaccaatctgttgcgcggcttttggggattgcgcaaagtgcgtgcggaaaacgaccgccatcacgccttggacgccgtcgtcgttgcctgctcgaccgttgccatgcagcagaaaattacccgttttgtacgctataaagagatgaacgcgtttgacggtaaaaccatagacaaagaaacaggagaagtgctgcatcaaaaaacacacttcccacaaccttgggaatttttcgcacaagaagtcatgattcgcgtcttcggcaaaccggacggcaaacccgaattcgaagaagccgataccctagaaaaactgcgcacgttgcttgccgaaaaattatcatctcgccccgaagccgtacacgaatacgttacgccactgtttgtttcacgcgcgcccaatcggaagatgagcgggcaagggcatatggagaccgtcaaatccgccaaacgactggacgaaggcgtcagcgtgttgcgcgtaccgctgacacagttaaaactgaaagacttggaaaaaatggtcaatcgggagcgcgaacctaagctatacgaagcactgaaagcacggctggaagcacataaagacgatcctgccaaagcctttgccgagccgttttacaaatacgataaagcaggcaaccgcacccaacaggtaaaagccgtacgcgtagagcaagtacagaaaaccggcgtatgggtgcgcaaccataacggtattgccgacaacgcaaccatggtgcgcgtagatgtgtttgagaaaggcgacaagtattatctggtaccgatttacagttggcaggtagcgaaagggattttgccggatagggctgttgtacaaggaaaagatgaagaagattggcaacttattgatgatagtttcaactttaaattctcattacaccctaatgatttagtcgaggttataacaaaaaaagctagaatgtttggttactttgccagctgccatcgaggcacaggtaatatcaatatacgcattcatgatcttgatcataaaattggcaaaaatggaatactggaaggtatcggcgtcaaaaccgccctttcattccaaaaataccaaattgacgaactgggcaaagaaatcagaccatgccgtctgaaaaaacgcccgcctgtccgttaa

SEQ ID NO: 25 - DNA, 4188 bp, Treponema denticola
atgaaaaaggaaattaaggattattttctcggattggatgtaggaaccggatcggttggttgggcagttactgatactgactataaactcttaaaggctaatcgtaaagacctttggggaatgaggtgttttgagacggcggaaactgcggaagtgagaaggcttcacaggggggctaggcgccgtattgagagaagaaaaaaaagaataaagctgcttcaagagcttttttcccaagaaattgcaaaaacagatgagggatttttccaaagaatgaaggaaagccctttctatgcagaagacaagactatattacaggaaaacactctttttaatgataaagattttgccgataagacctaccataaagcctatcctaccataaaccatctgataaaggcttggattgaaaacaaggtaaagccggatccaaggttattatacttagcctgtcataatattataaaaaaaagaggtcattttttattcgagggcgatttcgattcagaaaatcagtttgatacttctatacaagccctttttgaatatctgcgtgaagatatggaagtcgatattgatgccgatagccaaaaagtaaaagagattttaaaggatagctctttaaaaaattccgaaaaacaaagccgcctaaataagattttaggactgaaaccctccgacaaacaaaaaaaagctattactaatttaatatcaggcaacaaaataaactttgccgatctttatgataatccggatttaaaggatgcggagaaaaatagtatatctttttcgaaagatgattttgatgctttgagtgatgatcttgcttccattctaggagattcttttgagcttttattaaaagcaaaggctgtatataactgctcggttctttccaaggtaataggcgatgaacagtatctttcttttgcaaaggtaaaaatatatgaaaagcataaaaccgatttgactaaattaaaaaatgttataaaaaagcatttcccaaaagattataaaaaagtattcggatacaataaaaacgaaaaaaataacaacaattactccggatatgtaggcgtatgtaaaaccaagagtaaaaaactaattataaacaattctgtaaatcaagaagatttttacaaatttttaaaaactatcctttcagcaaaatccgagataaaggaagtaaatgatatattgaccgaaattgaaacagggacttttttacctaaacagatatctaaaagcaatgcggagattccttatcaattacgcaagatggagctggaaaaaatattatcaaacgcagaaaaacatttttcctttttaaaacaaaaagatgaaaaaggtttatctcacagtgaaaagattataatgcttttaacatttaagattccttattatattggacctataaacgataaccataaaaaattttttcccgatagatgctgggtagtaaaaaaagaaaaatcgccttccggtaaaactactccatggaacttttttgatcatatcgataaagaaaaaacagctgaagcatttattacaagcagaaccaatttttgcacatatttagtaggggaatccgttttaccaaaaagttctcttttatattccgagtataccgttttaaatgaaatcaacaatttacagattatcattgacggaaaaaatatctgcgatattaaactaaaacaaaaaatatacgaagatttatttaaaaaatataaaaagattacacaaaaacaaatttcaacttttatcaaacacgaaggtatttgcaataaaactgatgaagtaattattctaggtatcgataaagaatgtacatcttcgttaaaatcatatatagaacttaaaaacatattcggaaagcaagtagatgaaatttctacaaagaatatgcttgaagaaattatacgatgggctactatctatgatgaaggagaaggcaaaacaatacttaaaacaaaaataaaagccgaatatggaaaatattgttctgatgaacagatcaaaaaaattctaaatcttaaattttcaggttggggccgcttgtcacgcaaattccttgaaaccgtcacatcagaaatgccgggttttagcgaaccggtaaatataataactgcaatgcgggaaactcaaaataatttaatggagttgcttagcagtgaatttacatttactgaaaatattaaaaagataaattcgggatttgaagatgctgaaaagcaattttcatatgacggtttggttaagcctctgtttttatcaccatcggtaaaaaaaatgttgtggcagactctaaagcttgtaaaagaaatatcgcatattacccaagcccctcctaaaaaaatatttatagaaatggcaaagggtgcagagcttgaacctgcgaggactaagacaagattaaaaattttacaagacttatacaataactgtaaaaatgatgcggatgcttttagttccgagataaaagacctttcaggtaaaatagaaaatgaagataatttaaggcttcgaagcgacaaactttatctttattacacgcagcttggaaagtgcatgtattgcggtaaaccgattgaaataggccatgtatttgatacaagcaactatgatatagatcatatttatccccaatccaagattaaagatgacagtataagtaatcgggttttagtatgcagcagctgcaataaaaataaggaagataaatatcctttgaagtctgaaattcaatcaaagcaaaggggcttttggaattttttacaacgaaataactttataagccttgaaaaattgaataggttaacaagggccactccaatctcggatgacgaaacggcaaaattcattgccagacagcttgtagaaacaagacaggcgacaaaagtagctgcaaaagtattagaaaaaatgtttcccgaaactaagattgtttattctaaagctgaaaccgtatcaatgtttagaaataaattcgatattgtaaaatgcagagaaataaacgattttcatcatgctcatgatgcatatttaaatattgttgtcggaaatgtatataatacaaaatttacaaataatccttggaactttataaaggagaaacgggataatccaaagattgccgatacttacaattattataaagtttttgattatgatgtaaaaagaaataatattacggcatgggaaaaaggaaaaacaattatcactgtgaaggatatgcttaaaagaaatacccctatttatacacgccaagccgcctgcaaaaaaggagaactctttaaccaaaccattatgaaaaaaggattgggccagcatcctctaaaaaaagaaggtcctttttctaatatttcaaaatatgggggctataataaagtctctgctgcatattatactcttatagaatacgaagaaaaagggaataaaatacgaagcttagaaaccatccctctatatttggtaaaagacattcaaaaagatcaagatgtattaaagagttacttaacagatctgctagggaaaaaagaatttaagattttggttcctaaaataaaaatcaactccctcttaaaaattaacggtttcccttgtcatataacagggaaaaccaatgattctttcttactgcgtccggctgttcagttttgctgttcaaataatgaagttctttattttaaaaaaattataagattcagtgaaataagaagtcaaagagaaaagataggaaaaacaatttctccttatgaagacttatcctttagatcttatatcaaagaaaatttatggaaaaagacaaaaaatgatgaaataggagaaaaggagttttatgaccttcttcaaaagaagaatttggaaatctatgatatgcttttaacaaaacataaggatactatttataaaaaaagacctaactctgcaactattgatatcttagtcaaaggaaaagaaaagtttaaatctttaataatcgaaaatcagtttgaagttattttagagattttaaaactgttttctgccactagaaatgtatcagacttacaacatataggcggaagcaaatattcaggagttgcaaagataggaaataaaatatctagtcttgataactgtattttaatttaccaatcaataacaggtatttttgaaaaaaggattgatttgttaaaggtatga

SEQ ID NO: 26 - DNA, 4188 bp, Treponema denticola
atgaagaaggagatcaaggactacttcctgggcctggacgtgggcaccggcagcgtgggctgggccgtgaccgacaccgactacaagctgctgaaggccaaccgcaaggacctgtggggcatgcgctgcttcgagactgctgagaccgccgaggtgcgccggctgcaccgcggtgctcgccggcgcatcgagcgccgcaagaagcgcatcaagctgctgcaggagctgttcagccaggagatcgccaagaccgacgagggcttcttccagcgcatgaaggagagccccttctacgccgaggacaagaccatcctgcaggagaacaccctgttcaacgacaaggacttcgccgacaagacctaccacaaggcctaccccaccatcaaccacctgatcaaggcctggatcgagaacaaggtgaagcccgaccctcgcctgctgtacctggcctgccacaacatcatcaagaagcgcggccacttcctgttcgagggcgacttcgacagcgagaaccagttcgacaccagcatccaggccctgttcgagtacctgcgcgaggacatggaggtggacatcgacgccgacagccagaaggtgaaggagatcctgaaggacagcagcctgaagaacagcgagaagcagagccgcctgaacaagatcctgggcctgaagcccagcgacaagcagaagaaggccatcaccaacctgatcagcggcaacaagatcaacttcgccgacctgtacgacaaccccgacctgaaggacgccgagaagaacagcatcagcttcagcaaggacgacttcgacgccctgagcgacgacctggccagcatcctgggcgacagcttcgagctgctgctgaaggccaaggccgtgtacaactgcagcgtgctgagcaaggtgatcggcgacgagcagtacctgagcttcgccaaggtgaagatctacgagaagcacaagaccgaccttaccaagctgaagaacgtgatcaagaagcacttccccaaggactacaagaaggtgttcggctacaacaagaacgagaagaacaacaacaactacagcggctacgtgggcgtgtgcaagaccaagagcaagaagctgatcatcaacaacagcgtgaaccaggaggacttctacaagttcctgaagaccatcctgagcgccaagagcgagatcaaggaggtgaacgacatcctgaccgagatcgagaccggcaccttcctgcccaagcagatcagcaagagcaacgccgagatcccctaccagctgcgcaagatggagctggagaagatcctgagcaacgccgagaagcacttcagcttcctgaagcagaaggacgagaagggcctgagccacagcgagaagatcatcatgctgctgaccttcaagatcccctactacatcggccccatcaacgacaaccacaagaagttcttccccgaccgctgctgggtggtgaagaaggagaagagccccagcggcaagaccaccccctggaacttcttcgaccacatcgacaaggagaagaccgccgaggccttcatcaccagccgcaccaacttctgcacatacctggtgggcgagagcgtgctgcccaagagcagcctgctgtacagcgagtacaccgtgctgaacgagatcaacaacctgcagatcatcatcgacggcaagaacatctgcgacatcaagctgaagcagaagatctacgaggacctgttcaagaagtacaagaagatcacccagaagcagatcagcaccttcatcaagcacgagggcatctgcaacaagaccgacgaggtgatcatcctgggcatcgacaaggagtgcaccagcagcctgaagagctacatcgagctgaagaacatcttcggcaagcaggtggacgagatcagcaccaagaacatgctggaggagatcatccgctgggccaccatctacgacgagggcgagggcaagaccatcctgaagaccaagatcaaggccgagtacggcaagtactgcagcgacgagcagatcaagaagatcctgaacctgaagttcagcggctggggccgcctgagccgcaagttcctggagaccgtgaccagcgagatgcccggcttcagcgagcccgtgaacatcatcaccgccatgcgcgagacccagaacaacctgatggagctgctgagcagcgagttcaccttcaccgagaacatcaagaagatcaacagcggcttcgaggacgccgagaagcagttcagctacgacggcctggtgaagcccctgttcctgagccccagcgtgaagaagatgctgtggcagaccctgaagctggtgaaggagatcagccacatcacccaggctcctcctaagaagatcttcatcgagatggccaagggcgccgagctggagcctgctcgcaccaagacccgcctgaagatcctgcaggacctgtacaacaactgcaagaacgacgccgacgcattcagcagcgagatcaaggacctgagcggcaagatcgagaacgaggacaacctgcgcctgcgcagcgacaagctgtacctgtactacacccagctgggcaagtgcatgtactgcggcaagcccatcgagatcggccacgtgttcgacaccagcaactacgacatcgaccacatctacccccagagcaagatcaaggacgacagcatcagcaaccgcgtgctggtgtgcagcagctgcaacaagaacaaggaggacaagtaccctctgaagagcgagatccagagcaagcagcgcggcttctggaacttcctgcagcgcaacaacttcatcagcctggagaagctgaaccgcctgacccgcgccacccccatcagcgacgacgagaccgccaagttcatcgcccgccagctggtggagactcgccaagctaccaaggtggccgccaaggtgctggagaagatgttccccgagaccaagatcgtgtacagcaaggccgagaccgtgagcatgttccgcaacaagttcgacatcgtgaagtgccgcgagatcaacgacttccaccacgcccacgacgcctacctgaacatcgtggtgggcaacgtgtacaacaccaagttcaccaacaacccctggaatttcattaaggagaagcgcgacaaccccaagatcgccgacacctacaactactacaaggtgttcgactacgacgtgaagcgcaacaacatcaccgcctgggagaagggcaagaccatcatcaccgtgaaggacatgctgaagcgcaacacccccatctacacccgccaggccgcctgcaagaagggcgagctgttcaaccagaccatcatgaagaagggcctgggccagcaccccctgaagaaggagggccccttcagcaacatcagcaagtacggcggctacaacaaggtgagcgccgcctactacaccctgatcgagtacgaggagaagggcaacaagatccgcagcctggagaccatccccctgtacctggtgaaggacatccagaaggaccaggacgtgctgaagagctacctgaccgacctgctgggcaagaaggagttcaagatcctggtgcccaagatcaagatcaacagcctgctgaagatcaacggcttcccctgccacatcaccggcaagaccaacgacagcttcctgctgcgccccgccgtgcagttctgctgcagcaacaacgaggtgctgtacttcaagaagatcatccgcttcagcgagatccgcagccagcgcgagaagatcggcaagaccatcagcccctacgaggacctgagcttccgcagctacatcaaggagaacctgtggaagaagaccaagaacgacgagatcggcgagaaggagttctacgacctgctgcagaagaagaacctggagatctacgacatgctgctgaccaagcacaaggacaccatctacaagaagcgccccaacagcgccaccatcgacatcctggtgaagggcaaggagaagttcaagagcctgatcatcgagaaccagttcgaggtgatcctggagatcctgaagctgttcagcgccacccgcaacgtgagcgacctgcagcacatcggcggcagcaagtacagcggcgtggccaagatcggcaacaagatcagcagcctggacaactgcatcctgatctaccagagcatcaccggcatcttcgagaagcgcatcgacctgctgaaggtgtaa

SEQ ID NO: 27 - DNA, 4188 bp, Treponema denticola
atgaagaaggagatcaaggactacttcctgggcctggccgtgggcaccggcagcgtgggctgggccgtgaccgacaccgactacaagctgctgaaggccaaccgcaaggacctgtggggcatgcgctgcttcgagactgctgagaccgccgaggtgcgccggctgcaccgcggtgctcgccggcgcatcgagcgccgcaagaagcgcatcaagctgctgcaggagctgttcagccaggagatcgccaagaccgacgagggcttcttccagcgcatgaaggagagccccttctacgccgaggacaagaccatcctgcaggagaacaccctgttcaacgacaaggacttcgccgacaagacctaccacaaggcctaccccaccatcaaccacctgatcaaggcctggatcgagaacaaggtgaagcccgaccctcgcctgctgtacctggcctgccacaacatcatcaagaagcgcggccacttcctgttcgagggcgacttcgacagcgagaaccagttcgacaccagcatccaggccctgttcgagtacctgcgcgaggacatggaggtggacatcgacgccgacagccagaaggtgaaggagatcctgaaggacagcagcctgaagaacagcgagaagcagagccgcctgaacaagatcctgggcctgaagcccagcgacaagcagaagaaggccatcaccaacctgatcagcggcaacaagatcaacttcgccgacctgtacgacaaccccgacctgaaggacgccgagaagaacagcatcagcttcagcaaggacgacttcgacgccctgagcgacgacctggccagcatcctgggcgacagcttcgagctgctgctgaaggccaaggccgtgtacaactgcagcgtgctgagcaaggtgatcggcgacgagcagtacctgagcttcgccaaggtgaagatctacgagaagcacaagaccgaccttaccaagctgaagaacgtgatcaagaagcacttccccaaggactacaagaaggtgttcggctacaacaagaacgagaagaacaacaacaactacagcggctacgtgggcgtgtgcaagaccaagagcaagaagctgatcatcaacaacagcgtgaaccaggaggacttctacaagttcctgaagaccatcctgagcgccaagagcgagatcaaggaggtgaacgacatcctgaccgagatcgagaccggcaccttcctgcccaagcagatcagcaagagcaacgccgagatcccctaccagctgcgcaagatggagctggagaagatcctgagcaacgccgagaagcacttcagcttcctgaagcagaaggacgagaagggcctgagccacagcgagaagatcatcatgctgctgaccttcaagatcccctactacatcggccccatcaacgacaaccacaagaagttcttccccgaccgctgctgggtggtgaagaaggagaagagccccagcggcaagaccaccccctggaacttcttcgaccacatcgacaaggagaagaccgccgaggccttcatcaccagccgcaccaacttctgcacatacctggtgggcgagagcgtgctgcccaagagcagcctgctgtacagcgagtacaccgtgctgaacgagatcaacaacctgcagatcatcatcgacggcaagaacatctgcgacatcaagctgaagcagaagatctacgaggacctgttcaagaagtacaagaagatcacccagaagcagatcagcaccttcatcaagcacgagggcatctgcaacaagaccgacgaggtgatcatcctgggcatcgacaaggagtgcaccagcagcctgaagagctacatcgagctgaagaacatcttcggcaagcaggtggacgagatcagcaccaagaacatgctggaggagatcatccgctgggccaccatctacgacgagggcgagggcaagaccatcctgaagaccaagatcaaggccgagtacggcaagtactgcagcgacgagcagatcaagaagatcctgaacctgaagttcagcggctggggccgcctgagccgcaagttcctggagaccgtgaccagcgagatgcccggcttcagcgagcccgtgaacatcatcaccgccatgcgcgagacccagaacaacctgatggagctgctgagcagcgagttcaccttcaccgagaacatcaagaagatcaacagcggcttcgaggacgccgagaagcagttcagctacgacggcctggtgaagcccctgttcctgagccccagcgtgaagaagatgctgtggcagaccctgaagctggtgaaggagatcagccacatcacccaggctcctcctaagaagatcttcatcgagatggccaagggcgccgagctggagcctgctcgcaccaagacccgcctgaagatcctgcaggacctgtacaacaactgcaagaacgacgccgacgcattcagcagcgagatcaaggacctgagcggcaagatcgagaacgaggacaacctgcgcctgcgcagcgacaagctgtacctgtactacacccagctgggcaagtgcatgtactgcggcaagcccatcgagatcggccacgtgttcgacaccagcaactacgacatcgctgctatctacccccagagcaagatcaaggacgacagcatcagcaaccgcgtgctggtgtgcagcagctgcgccaagaacaaggaggacaagtaccctctgaagagcgagatccagagcaagcagcgcggcttctggaacttcctgcagcgcaacaacttcatcagcctggagaagctgaaccgcctgacccgcgccacccccatcagcgacgacgagaccgccaagttcatcgcccgccagctggtggagactcgccaagctaccaaggtggccgccaaggtgctggagaagatgttccccgagaccaagatcgtgtacagcaaggccgagaccgtgagcatgttccgcaacaagttcgacatcgtgaagtgccgcgagatcaacgacttccaccacgcccacgacgcctacctgaacatcgtggtgggcaacgtgtacaacaccaagttcaccaacaacccctggaatttcattaaggagaagcgcgacaaccccaagatcgccgacacctacaactactacaaggtgttcgactacgacgtgaagcgcaacaacatcaccgcctgggagaagggcaagaccatcatcaccgtgaaggacatgctgaagcgcaacacccccatctacacccgccaggccgcctgcaagaagggcgagctgttcaaccagaccatcatgaagaagggcctgggccagcaccccctgaagaaggagggccccttcagcaacatcagcaagtacggcggctacaacaaggtgagcgccgcctactacaccctgatcgagtacgaggagaagggcaacaagatccgcagcctggagaccatccccctgtacctggtgaaggacatccagaaggaccaggacgtgctgaagagctacctgaccgacctgctgggcaagaaggagttcaagatcctggtgcccaagatcaagatcaacagcctgctgaagatcaacggcttcccctgccacatcaccggcaagaccaacgacagcttcctgctgcgccccgccgtgcagttctgctgcagcaacaacgaggtgctgtacttcaagaagatcatccgcttcagcgagatccgcagccagcgcgagaagatcggcaagaccatcagcccctacgaggacctgagcttccgcagctacatcaaggagaacctgtggaagaagaccaagaacgacgagatcggcgagaaggagttctacgacctgctgcagaagaagaacctggagatctacgacatgctgctgaccaagcacaaggacaccatctacaagaagcgccccaacagcgccaccatcgacatcctggtgaagggcaaggagaagttcaagagcctgatcatcgagaaccagttcgaggtgatcctggagatcctgaagctgttcagcgccacccgcaacgtgagcgacctgcagcacatcggcggcagcaagtacagcggcgtggccaagatcggcaacaagatcagcagcctggacaactgcatcctgatctaccagagcatcaccggcatcttcgagaagcgcatcgacctgctgaaggtgtaa

SEQ ID NO: 28 - protein, 1053 aa, Streptococcus aureas
MKRNYILGLDIGITSVGYGIIDYETRDVIDAGVRLFKEANVENNEGRRSKRGARRLKRRRRHRIQRVKKLLFDYNLLTDHSELSGINPYEARVKGLSQKLSEEEFSAALLHLAKRRGVHNVNEVEEDTGNELSTKEQISRNSKALEEKYVAELQLERLKKDGEVRGSINRFKTSDYVKEAKQLLKVQKAYHQLDQSFIDTYIDLLETRRTYYEGPGEGSPFGWKDIKEWYEMLMGHCTYFPEELRSVKYAYNADLYNALNDLNNLVITRDENEKLEYYEKFQIIENVFKQKKKPTLKQIAKEILVNEEDIKGYRVTSTGKPEFTNLKVYHDIKDITARKEIIENAELLDQIAKILTIYQSSEDIQEELTNLNSELTQEEIEQISNLKGYTGTHNLSLKAINLILDELWHTNDNQIAIFNRLKLVPKKVDLSQQKEIPTTLVDDFILSPVVKRSFIQSIKVINAIIKKYGLPNDIIIELAREKNSKDAQKMINEMQKRNRQTNERIEEIIRTTGKENAKYLIEKIKLHDMQEGKCLYSLEAIPLEDLLNNPFNYEVDHIIPRSVSFDNSFNNKVLVKQEENSKKGNRTPFQYLSSSDSKISYETFKKHILNLAKGKGRISKTKKEYLLEERDINRFSVQKDFINRNLVDTRYATRGLMNLLRSYFRVNNLDVKVKSINGGFTSFLRRKWKFKKERNKGYKHHAEDALIIANADFIFKEWKKLDKAKKVMENQMFEEKQAESMPEIETEQEYKEIFITPHQIKHIKDFKDYKYSHRVDKKPNRELINDTLYSTRKDDKGNTLIVNNLNGLYDKDNDKLKKLINKSPEKLLMYHHDPQTYQKLKLIMEQYGDEKNPLYKYYEETGNYLTKYSKKDNGPVIKKIKYYGNKLNAHLDITDDYPNSRNKVVKLSLKPYRFDVYLDNGVYKFVTVKNLDVIKKENYYEVNSKCYEEAKKLKKISNQAEFIASFYNNDLIKINGELYRVIGVNNDLLNRIEVNMIDITYREYLENMNDKRPPRIIKTIASKTQSIKKYSTDILGNLYEVKSKKHPQIIKKG

SEQ ID NO: 29 - DNA, 3162 bp, Streptococcus aureas
atgaaaaggaattatatcttaggattagatatcggaattacatcagtgggttatggaattattgattatgaaactagagatgtcatagatgcgggcgtacgtttatttaaagaggctaatgttgaaaataatgaaggacgacgatcaaaaagaggtgccagaaggcttaagaggcgtcgtagacatagaatacaaagagtaaagaaacttttatttgattacaatttgttgacagatcatagtgagctaagtggaatcaatccttacgaggcgcgcgtaaagggattaagtcaaaaattaagtgaagaggaattttctgcggcattgctacatttagcaaagcgtagaggtgtacataatgttaatgaagtggaagaagatacaggtaatgaattatccactaaagaacaaatttcaagaaatagtaaagcgttagaagagaagtatgttgcagaattacagttggaacgtttgaaaaaagacggtgaagtgagaggttcgattaaccgtttcaaaacatctgactatgtaaaagaagcaaagcagttattaaaagtacaaaaagcatatcatcaacttgatcaatcatttatagacacttatattgatttattggaaacaagaagaacatattatgagggaccaggtgaaggtagcccatttggatggaaagatattaaagaatggtatgaaatgttaatgggacattgtacgtatttcccagaagaattacgtagtgtgaaatatgcctataatgctgatttatataatgcgctgaatgatttgaacaacttggttattacacgagatgagaatgagaagctagagtattatgaaaaattccaaattatcgagaatgtctttaaacaaaagaaaaagccgacgcttaaacaaattgcgaaggaaatcttggtgaatgaagaagacatcaaaggctatcgtgtcacaagtacaggtaaaccagaatttacaaacttgaaagtttatcacgatatcaaagatattacagcaagaaaagaaattatcgagaatgcagagctactcgatcaaatagctaaaatattaactatttaccagtcatcagaagatatacaagaagaattaacaaacctaaattcagaattgacacaagaagagattgaacaaatttcaaacttgaaaggttatacaggaactcataacctttcactaaaggcaataaatttaatattagacgaattgtggcatacgaacgataatcaaatagctattttcaatcgtttgaaacttgtacctaaaaaggtagatttaagccaacaaaaagaaattcctactactttagttgatgattttatactgtctccagtagtgaaacgttcatttatacaatctattaaagttattaacgctattattaaaaaatacggtttgccaaatgatattattattgaacttgcgagagaaaagaattctaaagatgcacaaaaaatgattaatgaaatgcagaagagaaatcgtcaaacgaatgaacgtattgaggaaattataagaacgacaggtaaagaaaatgctaaatatttaattgaaaaaattaagctgcacgatatgcaagaagggaaatgtttatactcgttagaagcaatccctctagaagatttacttaataatccattcaattacgaagtagaccatatcattccacgttctgtttctttcgataactctttcaataataaagtgttggtgaaacaagaagaaaatagtaaaaaaggtaatagaacgccatttcaatatttaagttcttcagattctaaaataagttatgagacattcaaaaagcatattttaaatcttgctaaaggcaaaggtagaatctctaagacgaaaaaagaatatttgttagaagaacgagatatcaatcgcttcagtgtccaaaaagattttattaaccgtaacttagtagatacacgctatgcgacaagagggttaatgaacttattaagatcttattttagagtgaataacttagatgtcaaagtgaaatcgattaatggcggattcacaagtttcttaagaaggaaatggaagttcaaaaaagaaagaaataagggctacaaacaccatgctgaagatgcactgattattgcgaacgctgattttattttcaaagaatggaaaaaactagataaagctaaaaaagtgatggaaaatcaaatgtttgaagaaaagcaagctgaaagtatgcctgaaattgagactgagcaagagtataaagaaatttttataacgcctcatcaaattaaacatattaaggattttaaagattataaatattcacatagagttgataaaaagccgaatagagagttaataaatgatacattatattctacgagaaaagatgacaagggtaatacattaatcgttaataacttaaatggtttatacgataaagataatgataaattgaaaaaattaattaataaatcacctgaaaaattattgatgtatcatcatgatccacaaacatatcaaaaattaaaattgatcatggaacaatatggcgatgagaaaaatccgctttataaatattatgaagaaacaggcaattacttaacaaaatatagtaaaaaagataacggaccagtcatcaaaaaaattaaatattatggtaacaagctaaatgcgcatttagatattacggatgattatccaaatagcagaaataaagtagtaaaactttcattaaaaccatatcgctttgatgtttatttagataatggggtatataaatttgtgacagttaaaaatttagatgttatcaaaaaagaaaactactatgaagttaattcaaagtgttatgaagaagcaaaaaaactgaagaaaattagtaatcaagcagaatttatcgcaagtttttacaataatgacttgattaagattaacggagaattatatagagtcataggtgtaaataatgatctacttaacagaattgaagtaaatatgatagacatcacatatagagaatatttagagaacatgaatgataaaagaccacctagaataattaaaacaatagcaagcaaaacacaatctattaaaaagtattctacagatattctaggcaatctttatgaagtgaagagtaaaaagcatcctcaaatcataaagaaaggatga

SEQ ID NO: 30 - protein, 1629 aa, Francisella tularensis
MNFKILPIAIDLGVKNTGVFSAFYQKGTSLERLDNKNGKVYELSKDSYTLLMNNRTARRHQRRGIDRKQLVKRLFKLIWTEQLNLEWDKDTQQAISFLFNRRGFSFITDGYSPEYLNIVPEQVKAILMDIFDDYNGEDDLDSYLKLATEQESKISEIYNKLMQKILEFKLMKLCTDIKDDKVSTKTLKEITSYEFELLADYLANYSESLKTQKFSYTDKQGNLKELSYYHHDKYNIQEFLKRHATINDRILDTLLTDDLDIWNFNFEKFDFDKNEEKLQNQEDKDHIQAHLHHFVFAVNKIKSEMASGGRHRSQYFQEITNVLDENNHQEGYLKNFCENLHNKKYSNLSVKNLVNLIGNLSNLELKPLRKYFNDKIHAKADHWDEQKFTETYCHWILGEWRVGVKDQDKKDGAKYSYKDLCNELKQKVTKAGLVDFLLELDPCRTIPPYLDNNNRKPPKCQSLILNPKFLDNQYPNWQQYLQELKKLQSIQNYLDSFETDLKVLKSSKDQPYFVEYKSSNQQIASGQRDYKDLDARILQFIFDRVKASDELLLNEIYFQAKKLKQKASSELEKLESSKKLDEVIANSQLSQILKSQHTNGIFEQGTFLHLVCKYYKQRQRARDSRLYIMPEYRYDKKLHKYNNTGRFDDDNQLLTYCNHKPRQKRYQLLNDLAGVLQVSPNFLKDKIGSDDDLFISKWLVEHIRGFKKACEDSLKIQKDNRGLLNHKINIARNTKGKCEKEIFNLICKIEGSEDKKGNYKHGLAYELGVLLFGEPNEASKPEFDRKIKKFNSIYSFAQIQQIAFAERKGNANTCAVCSADNAHRMQQIKITEPVEDNKDKIILSAKAQRLPAIPTRIVDGAVKKMATILAKNIVDDNWQNIKQVLSAKHQLHIPIITESNAFEFEPALADVKGKSLKDRRKKALERISPENIFKDKNNRIKEFAKGISAYSGANLTDGDFDGAKEELDHIIPRSHKKYGTLNDEANLICVTRGDNKNKGNRIFCLRDLADNYKLKQFETTDDLEIEKKIADTIWDANKKDFKFGNYRSFINLTPQEQKAFRHALFLADENPIKQAVIRAINNRNRTFVNGTQRYFAEVLANNIYLRAKKENLNTDKISFDYFGIPTIGNGRGIAEIRQLYEKVDSDIQAYAKGDKPQASYSHLIDAMLAFCIAADEHRNDGSIGLEIDKNYSLYPLDKNTGEVFTKDIFSQIKITDNEFSDKKLVRKKAIEGFNTHRQMTRDGIYAENYLPILIHKELNEVRKGYTWKNSEEIKIFKGKKYDIQQLNNLVYCLKFVDKPISIDIQISTLEELRNILTTNNIAATAEYYYINLKTQKLHEYYIENYNTALGYKKYSKEMEFLRSLAYRSERVKIKSIDDVKQVLDKDSNFIIGKITLPFKKEWQRLYREWQNTTIKDDYEFLKSFFNVKSITKLHKKVRKDFSLPISTNEGKFLVKRKTWDNNFIYQILNDSDSRADGTKPFIPAFDISKNEIVEAIIDSFTSKNIFWLPKNIELQKVDNKNIFAIDTSKWFEVETPSDLRDIGIATIQYKIDNNSRPKVRVKLDYVIDDDSKINYFMNHSLLKSRYPDKVLEILKQSTIIEFESSGFNKTIKEMLGMKLAGIYNETSNN

SEQ ID NO: 31 - DNA, 4890 bp, Francisella tularensis
atgaatttcaaaatattgccaatagcaatagatttaggtgttaaaaatactggtgtctttagcgcattttatcaaaaaggaacttctcttgagagattggataataaaaatggcaaagtatatgaactatcaaaagattcttatactttattgatgaataatagaacagcaagaagacatcaaagaagagggatagatagaaagcagctagtcaaaaggctctttaagcttatttggacagagcagctaaatttagagtgggataaagacactcaacaagcaattagctttttatttaatcgtagaggttttagttttattactgatggttattcgcctgaatatttaaatattgttccagagcaagtaaaagcgatacttatggatatatttgatgattacaacggtgaagatgatttagacagttatttaaaattagctactgagcaagaaagcaaaatttctgaaatttataacaagctaatgcaaaaaatattagagtttaaattaatgaaattatgtactgatattaaggatgataaagtaagtactaaaacgcttaaagaaatcacaagctatgaatttgagttattagctgattatttagcaaactatagcgagagtttaaaaacacaaaaatttagttatacagataaacaaggtaatttaaaagagctaagctactatcatcatgataaatataatattcaagaatttctaaagcgacatgctactataaatgatcgaattttagatactcttttaactgatgatttagatatttggaattttaattttgagaaatttgattttgataagaatgaagaaaagcttcagaatcaggaagataaagatcatatacaagcgcatttacatcattttgtttttgcagtaaataaaataaaaagtgaaatggcaagtggtggtcgtcatcgtagccaatattttcaagagataacaaatgtgctagatgaaaataatcatcaagagggatatctcaagaatttctgtgaaaatttgcataataaaaaatattcaaatttaagtgttaaaaatttagttaatctaattggtaacctaagtaatttagagctaaaaccgctaagaaaatattttaatgacaaaattcacgcaaaagctgatcattgggatgagcaaaagtttacagaaacttattgccactggatattaggagagtggcgagtaggtgtcaaagatcaagataagaaagatggcgctaaatatagttataaagatctgtgtaatgaattaaaacaaaaagttactaaggctggtttggtagattttttattagagttagatccatgtagaactataccaccatatctggataacaataaccgtaaaccaccaaaatgtcaaagtttgattttaaatccgaagtttttagataatcaatatccaaactggcaacaatatttacaagaattaaagaaactacaaagtattcaaaattatttagacagttttgaaactgatttaaaagtcttaaagtcaagtaaagatcaaccatattttgttgaatacaagagttcaaatcagcaaatagcaagtggtcaaagagattataaagatttagatgctcgaatattacagtttatatttgatagggtaaaagctagtgatgagttgcttttgaatgagatttattttcaggctaaaaaacttaaacaaaaagctagctctgagttagaaaaactcgagtcgagcaaaaagctagatgaagttatagcaaatagtcaactatcacagatactaaagtctcaacatacaaatggtatttttgaacagggtacttttttgcatttggtttgtaaatattataaacaaagacaaagagcgagagactctaggctatatattatgcctgaatatcgttatgataaaaaactacataaatataacaatacaggcaggtttgatgatgataatcagctgctaacatattgtaatcataagccaagacaaaaaagataccaattgttaaatgatttagctggggtgttgcaggtatcacctaattttttgaaagataaaattggttctgatgatgatctatttattagcaaatggttggtagagcatattagaggatttaaaaaagcttgtgaagatagtttaaaaatacaaaaagacaatagaggattattaaatcataaaataaatatagctaggaatacaaaaggcaaatgtgaaaaagaaatatttaatttaatatgtaaaatagaaggttcagaagataaaaaaggtaattacaagcatggtttagcttacgaattaggagtacttttatttggtgaacctaatgaagctagtaaacctgagttcgatagaaaaattaaaaaatttaactcaatatacagttttgcacagattcaacaaattgcttttgcagagcgtaaaggcaatgctaacacttgtgcagtttgtagtgctgataatgctcatagaatgcaacaaattaagatcactgagcctgtagaggacaataaagataagataatcttaagtgccaaagctcagagactaccagcgattccaactagaatagttgacggtgcggttaagaaaatggcaactatattagctaaaaatatagttgatgataattggcagaatatcaaacaagttttatcagcaaaacatcagttacatatacctattatcacagaatcaaatgcttttgagtttgaaccagcattagctgatgtaaaaggtaagagcctaaaagataggagaaaaaaagcattagagagaataagtcctgaaaatatattcaaggataaaaacaatagaataaaagaatttgctaaaggtatatcagcatatagtggtgctaatttaactgatggcgattttgatggtgcaaaagaagaattagatcatataatacctcgttcacataaaaaatacggtactctaaatgatgaagcaaatctaatttgtgtaactcgtggtgataataaaaataaaggtaatagaattttctgcctacgtgatcttgcagataactataaactaaaacagtttgagacaactgatgatttagaaattgaaaagaagatagctgatacaatctgggatgctaacaagaaagattttaaatttggtaattatcgtagttttattaacctaacaccacaagagcagaaagcatttcgtcacgcgctatttctggctgatgaaaatcctatcaaacaagcagtcataagagcgataaataatcgtaatcgtacatttgtaaatggcactcaacgctattttgcagaagtactggcaaacaatatctatctaagggctaaaaaagaaaatctaaatacagataaaatttcatttgattattttggtattccaactataggtaatggtagaggtattgctgaaatccgtcaactttatgaaaaagttgatagtgatatacaagcttatgcaaaaggtgataaacctcaagctagctactctcacctaatagatgcgatgctggctttttgtattgctgctgatgaacacagaaatgatggaagtataggtctagaaatcgataaaaattatagtttatatccattagataaaaatacaggagaagtctttaccaaagatatttttagtcaaattaaaattactgataatgagtttagcgataaaaaattagtaagaaaaaaagctatagagggctttaacacgcatagacaaatgactagagatggcatttatgcagaaaattacctaccaatactaatccataaagaactaaatgaagttagaaaaggctatacttggaaaaatagtgaagaaataaaaatattcaaaggtaaaaagtacgatatacaacaattgaataaccttgtgtattgtctaaaatttgtagataaacctatatctatagatatacaaattagtaccttagaagagttaagaaatatattaacaacaaataatatagctgctacagcagaatactattatataaatctaaaaacccaaaaattacatgagtattatatcgaaaactataatactgccttaggttataaaaaatacagtaaagaaatggagtttttgagaagcttagcttatcgtagcgaaagggtaaaaattaaatcaatagatgatgtaaagcaggttttggataaggatagtaactttatcatcggtaagattactttaccatttaaaaaagagtggcaaagactatatcgtgagtggcaaaatacaactatcaaagatgattatgagtttttaaaatcattctttaatgttaaaagtattactaagttgcataaaaaagttagaaaagatttctctttacctatttctacaaatgaaggtaaattcctggtcaaaagaaaaacatgggataacaattttatctatcagatattaaatgattctgattctagagcagacggaacaaagccatttattccagcttttgacatttctaaaaatgaaatagtcgaagccataattgattcatttacatcaaaaaatattttttggctgcctaaaaatatagaattacaaaaggtggataataaaaacatttttgctatagatactagtaaatggttcgaagtagaaacacctagtgatcttagagacattggaatagcaacaattcaatacaagatagataataattctcgccctaaagtcagagttaaacttgattatgttatcgatgatgatagtaagataaattattttatgaatcattctttattaaaatcaagatatcctgacaaagttttagaaattttaaaacaatcaactattatagaatttgaaagttcaggttttaataaaactatcaaagaaatgcttggtatgaaattagcaggtatttataatgaaacatctaataattag

SEQ ID NO: 32 - DNA, 3903 bp, Francisella tularensis
  Francisella tularensis subsp. novicida (strain U112)
atgtcaatttatcaagaatttgttaataaatatagtttaagtaaaactctaagatttgagttaatcccacagggtaaaacacttgaaaacataaaagcaagaggtttgattttagatgatgagaaaagagctaaagactacaaaaaggctaaacaaataattgataaatatcatcagttttttatagaggagatattaagttcggtttgtattagcgaagatttattacaaaactattctgatgtttattttaaacttaaaaagagtgatgatgataatctacaaaaagattttaaaagtgcaaaagatacgataaagaaacaaatatctgaatatataaaggactcagagaaatttaagaatttgtttaatcaaaaccttatcgatgctaaaaaagggcaagagtcagatttaattctatggctaaagcaatctaaggataatggtatagaactatttaaagccaatagtgatatcacagatatagatgaggcgttagaaataatcaaatcttttaaaggttggacaacttattttaagggttttcatgaaaatagaaaaaatgtttatagtagcaatgatattcctacatctattatttataggatagtagatgataatttgcctaaatttctagaaaataaagctaagtatgagagtttaaaagacaaagctccagaagctataaactatgaacaaattaaaaaagatttggcagaagagctaacctttgatattgactacaaaacatctgaagttaatcaaagagttttttcacttgatgaagtttttgagatagcaaactttaataattatctaaatcaaagtggtattactaaatttaatactattattggtggtaaatttgtaaatggtgaaaatacaaagagaaaaggtataaatgaatatataaatctatactcacagcaaataaatgataaaacactcaaaaaatataaaatgagtgttttatttaagcaaattttaagtgatacagaatctaaatcttttgtaattgataagttagaagatgatagtgatgtagttacaacgatgcaaagtttttatgagcaaatagcagcttttaaaacagtagaagaaaaatctattaaagaaacactatctttattatttgatgatttaaaagctcaaaaacttgatttgagtaaaatttattttaaaaatgataaatctcttactgatctatcacaacaagtttttgatgattatagtgttattggtacagcggtactagaatatataactcaacaaatagcacctaaaaatcttgataaccctagtaagaaagagcaagaattaatagccaaaaaaactgaaaaagcaaaatacttatctctagaaactataaagcttgccttagaagaatttaataagcatagagatatagataaacagtgtaggtttgaagaaatacttgcaaactttgcggctattccgatgatatttgatgaaatagctcaaaacaaagacaatttggcacagatatctatcaaatatcaaaatcaaggtaaaaaagacctacttcaagctagtgcggaagatgatgttaaagctatcaaggatcttttagatcaaactaataatctcttacataaactaaaaatatttcatattagtcagtcagaagataaggcaaatattttagacaaggatgagcatttttatctagtatttgaggagtgctactttgagctagcgaatatagtgcctctttataacaaaattagaaactatataactcaaaagccatatagtgatgagaaatttaagctcaattttgagaactcgactttggctaatggttgggataaaaataaagagcctgacaatacggcaattttatttatcaaagatgataaatattatctgggtgtgatgaataagaaaaataacaaaatatttgatgataaagctatcaaagaaaataaaggcgagggttataaaaaaattgtttataaacttttacctggcgcaaataaaatgttacctaaggttttcttttctgctaaatctataaaattttataatcctagtgaagatatacttagaataagaaatcattccacacatacaaaaaatggtagtcctcaaaaaggatatgaaaaatttgagtttaatattgaagattgccgaaaatttatagatttttataaacagtctataagtaagcatccggagtggaaagattttggatttagattttctgatactcaaagatataattctatagatgaattttatagagaagttgaaaatcaaggctacaaactaacttttgaaaatatatcagagagctatattgatagcgtagttaatcagggtaaattgtacctattccaaatctataataaagatttttcagcttatagcaaagggcgaccaaatctacatactttatattggaaagcgctgtttgatgagagaaatcttcaagatgtggtttataagctaaatggtgaggcagagcttttttatcgtaaacaatcaatacctaaaaaaatcactcacccagctaaagaggcaatagctaataaaaacaaagataatcctaaaaaagagagtgtttttgaatatgatttaatcaaagataaacgctttactgaagataagtttttctttcactgtcctattacaatcaattttaaatctagtggagctaataagtttaatgatgaaatcaatttattgctaaaagaaaaagcaaatgatgttcatatattaagtatagatagaggtgaaagacatttagcttactatactttggtagatggtaaaggcaatatcatcaaacaagatactttcaacatcattggtaatgatagaatgaaaacaaactaccatgataagcttgctgcaatagagaaagatagggattcagctaggaaagactggaaaaagataaataacatcaaagagatgaaagagggctatctatctcaggtagttcatgaaatagctaagctagttatagagtataatgctattgtggtttttgaggatttaaattttggatttaaaagagggcgtttcaaggtagagaagcaggtctatcaaaagttagaaaaaatgctaattgagaaactaaactatctagttttcaaagataatgagtttgataaaactgggggagtgcttagagcttatcagctaacagcaccttttgagacttttaaaaagatgggtaaacaaacaggtattatctactatgtaccagctggttttacttcaaaaatttgtcctgtaactggttttgtaaatcagttatatcctaagtatgaaagtgtcagcaaatctcaagagttctttagtaagtttgacaagatttgttataaccttgataagggctattttgagtttagttttgattataaaaactttggtgacaaggctgccaaaggcaagtggactatagctagctttgggagtagattgattaactttagaaattcagataaaaatcataattgggatactcgagaagtttatccaactaaagagttggagaaattgctaaaagattattctatcgaatatgggcatggcgaatgtatcaaagcagctatttgcggtgagagcgacaaaaagttttttgctaagctaactagtgtcctaaatactatcttacaaatgcgtaactcaaaaacaggtactgagttagattatctaatttcaccagtagcagatgtaaatggcaatttctttgattcgcgacaggcgccaaaaaatatgcctcaagatgctgatgccaatggtgcttatcatattgggctaaaaggtctgatgctactaggtaggatcaaaaataatcaagagggcaaaaaactcaatttggttatcaaaaatgaagagtattttgagttcgtgcagaataggaataactaa

SEQ ID NO: 33 - protein, 1300 aa, Francisella tularensis
  Francisella tularensis subsp. novicida (strain U112)
MSIYQEFVNKYSLSKTLRFELIPQGKTLENIKARGLILDDEKRAKDYKKAKQIIDKYHQFFIEEILSSVCISEDLLQNYSDVYFKLKKSDDDNLQKDFKSAKDTIKKQISEYIKDSEKFKNLFNQNLIDAKKGQESDLILWLKQSKDNGIELFKANSDITDIDEALEIIKSFKGWTTYFKGFHENRKNVYSSNDIPTSIIYRIVDDNLPKFLENKAKYESLKDKAPEAINYEQIKKDLAEELTFDIDYKTSEVNQRVFSLDEVFEIANFNNYLNQSGITKFNTIIGGKFVNGENTKRKGINEYINLYSQQINDKTLKKYKMSVLFKQILSDTESKSFVIDKLEDDSDVVTTMQSFYEQIAAFKTVEEKSIKETLSLLFDDLKAQKLDLSKIYFKNDKSLTDLSQQVFDDYSVIGTAVLEYITQQIAPKNLDNPSKKEQELIAKKTEKAKYLSLETIKLALEEFNKHRDIDKQCRFEEILANFAAIPMIFDEIAQNKDNLAQISIKYQNQGKKDLLQASAEDDVKAIKDLLDQTNNLLHKLKIFHISQSEDKANILDKDEHFYLVFEECYFELANIVPLYNKIRNYITQKPYSDEKFKLNFENSTLANGWDKNKEPDNTAILFIKDDKYYLGVMNKKNNKIFDDKAIKENKGEGYKKIVYKLLPGANKMLPKVFFSAKSIKFYNPSEDILRIRNHSTHTKNGSPQKGYEKFEFNIEDCRKFIDFYKQSISKHPEWKDFGFRFSDTQRYNSIDEFYREVENQGYKLTFENISESYIDSVVNQGKLYLFQIYNKDFSAYSKGRPNLHTLYWKALFDERNLQDVVYKLNGEAELFYRKQSIPKKITHPAKEAIANKNKDNPKKESVFEYDLIKDKRFTEDKFFFHCPITINFKSSGANKFNDEINLLLKEKANDVHILSIDRGERHLAYYTLVDGKGNIIKQDTFNIIGNDRMKTNYHDKLAAIEKDRDSARKDWKKINNIKEMKEGYLSQVVHEIAKLVIEYNAIVVFEDLNFGFKRGRFKVEKQVYQKLEKMLIEKLNYLVFKDNEFDKTGGVLRAYQLTAPFETFKKMGKQTGIIYYVPAGFTSKICPVTGFVNQLYPKYESVSKSQEFFSKFDKICYNLDKGYFEFSFDYKNFGDKAAKGKWTIASFGSRLINFRNSDKNHNWDTREVYPTKELEKLLKDYSIEYGHGECIKAAICGESDKKFFAKLTSVLNTILQMRNSKTGTELDYLISPVADVNGNFFDSRQAPKNMPQDADANGAYHIGLKGLMLLGRIKNNQEGKKLNLVIKNEEYFEFVQNRNN

SEQ ID NO: 34 - DNA, 3924 bp, Acidaminococcus sp.
  Acidaminococcus sp. (strain BV3L6)
atgacccaatttgaaggttttaccaatttataccaagtttcgaagacccttcgttttgaactgattccccaaggaaaaacactcaaacatatccaggagcaagggttcattgaggaggataaagctcgcaatgaccattacaaagagttaaaaccaatcattgaccgcatctataagacttatgctgatcaatgtctccaactggtacagcttgactgggagaatctatctgcagccatagactcctatcgtaaggaaaaaaccgaagaaacacgaaatgcgctgattgaggagcaagcaacatatagaaatgcgattcatgactactttataggtcggacggataatctgacagatgccataaataagcgccatgctgaaatctataaaggactttttaaagctgaacttttcaatggaaaagttttaaagcaattagggaccgtaaccacgacagaacatgaaaatgctctactccgttcgtttgacaaatttacgacctatttttccggcttttatgaaaaccgaaaaaatgtctttagcgctgaagatatcagcacggcaattccccatcgaatcgtccaggacaatttccctaaatttaaggaaaactgccatatttttacaagattgataaccgcagttccttctttgcgggagcattttgaaaatgtcaaaaaggccattggaatctttgttagtacgtctattgaagaagtcttttcctttcccttttataatcaacttctaacccaaacgcaaattgatctttataatcaacttctcggcggcatatctagggaagcaggcacagaaaaaatcaagggacttaatgaagttctcaatctggctatccaaaaaaatgatgaaacagcccatataatcgcgtccctgccgcatcgttttattcctctttttaaacaaattctttccgatcgaaatacgttatcctttattttggaagaattcaaaagcgatgaggaagtcatccaatccttctgcaaatataaaaccctcttgagaaacgaaaatgtactggagactgcagaagcccttttcaatgaattaaattccattgatttgactcatatctttatttcccataaaaagttagaaaccatctcttcagcgctttgtgaccattgggataccttgcgcaatgcactttacgaaagacggatttctgaactcactggcaaaataacaaaaagtgccaaagaaaaagttcaaaggtcattaaaacatgaggatataaatctccaagaaattatttctgctgcaggaaaagaactatcagaagcattcaaacaaaaaacaagtgaaattctttcccatgcccatgctgcacttgaccagcctcttcccacaacattaaaaaaacaggaagaaaaagaaatcctcaaatcacagctcgattcgcttttaggcctttatcatcttcttgattggtttgctgtcgatgaaagcaatgaagtcgacccagaattctcagcacggctgacaggcattaaactagaaatggaaccaagcctttcgttttataataaagcaagaaattatgcgacaaaaaagccctattcggtggaaaaatttaaattgaattttcaaatgccaacccttgcctctggttgggatgtcaataaagaaaaaaataatggagctattttattcgtaaaaaatggtctctattaccttggtatcatgcctaaacagaaggggcgctataaagccctgtcttttgagccgacagaaaaaacatcagaaggattcgataagatgtactatgactacttcccagatgccgcaaaaatgattcctaagtgttccactcagctaaaggctgtaaccgctcattttcaaactcataccacccccattcttctctcaaataatttcattgaacctcttgaaatcacaaaagaaatttatgacctgaacaatcctgaaaaggagcctaaaaagtttcaaacggcttatgcaaagaagacaggcgatcaaaaaggctatagagaagcgctttgcaaatggattgactttacgcgggattttctctctaaatatacgaaaacaacttcaatcgatttatcttcactccgcccttcttcgcaatataaagatttaggggaatattacgccgaactgaatccgcttctctatcatatctccttccaacgaattgctgaaaaggaaatcatggatgctgtagaaacgggaaaattgtatctgttccaaatctacaataaggattttgcgaagggccatcacgggaaaccaaatctccacaccctgtattggacaggtctcttcagtcctgaaaaccttgcgaaaaccagcatcaaacttaatggtcaagcagaattgttctatcgacctaaaagccgcatgaagcggatggcccatcgtcttggggaaaaaatgctgaacaaaaaactaaaggaccagaagacaccgattccagataccctctaccaagaactgtacgattatgtcaaccaccggctaagccatgatctttccgatgaagcaagggccctgcttccaaatgttatcaccaaagaagtctcccatgaaattataaaggatcggcggtttacttccgataaatttttcttccatgttcccattacactgaattatcaagcagccaatagtcccagtaaattcaaccagcgtgtcaatgcctaccttaaggagcatccggaaacgcccatcattggtatcgatcgtggagaacgcaatctaatctatattaccgtcattgacagtactgggaaaattttggagcagcgttccctgaataccatccagcaatttgactaccaaaaaaaattggacaacagggaaaaagagcgtgttgccgcccgtcaagcctggtccgtcgtcggaacgatcaaagaccttaaacaaggctacttgtcacaggtcatccatgaaattgtagacctgatgattcattaccaagctgttgtcgtccttgaaaacctcaacttcggatttaaatcaaaacggacaggcattgccgaaaaagcagtctaccaacaatttgaaaagatgctaatagataaactcaactgtttggttctcaaagattatcctgctgagaaagtgggaggcgtcttaaacccgtatcaacttacagatcagttcacgagctttgcaaaaatgggcacgcaaagcggcttccttttctatgtaccggccccttatacctcaaagattgatcccctgactggttttgtcgatccctttgtatggaagaccattaaaaatcatgaaagtcggaagcatttcctagaaggatttgatttcctgcattatgatgtcaaaacaggtgattttatcctccattttaaaatgaatcggaatctctctttccagagagggcttcctggcttcatgccagcttgggatattgttttcgaaaagaatgaaacccaatttgatgcaaaagggacgcccttcattgcaggaaaacgaattgttcctgtaatcgaaaatcatcgttttacgggtcgttacagagacctctatcccgctaatgaactcattgcccttctggaagaaaaaggcattgtctttagagacggaagtaatatattacccaaacttttagaaaatgatgattctcatgcaattgatacgatggtcgccttgattcgcagtgtactccaaatgagaaacagcaatgccgcaacgggggaagactacatcaactctcccgttagggatctgaacggggtgtgtttcgacagtcgattccaaaatccagaatggccaatggatgcggatgccaacggagcttatcatattgccttaaaagggcagcttcttctgaaccacctcaaagaaagcaaagatctgaaattacaaaacggcatcagcaaccaagattggctggcctacattcaggaactgagaaactga

SEQ ID NO: 35 - protein, 1307 aa, Acidaminococcus sp.
  Acidaminococcus sp. (strain BV3L6)
MTQFEGFTNLYQVSKTLRFELIPQGKTLKHIQEQGFIEEDKARNDHYKELKPIIDRIYKTYADQCLQLVQLDWENLSAAIDSYRKEKTEETRNALIEEQATYRNAIHDYFIGRTDNLTDAINKRHAEIYKGLFKAELFNGKVLKQLGTVTTTEHENALLRSFDKFTTYFSGFYENRKNVFSAEDISTAIPHRIVQDNFPKFKENCHIFTRLITAVPSLREHFENVKKAIGIFVSTSIEEVFSFPFYNQLLTQTQIDLYNQLLGGISREAGTEKIKGLNEVLNLAIQKNDETAHIIASLPHRFIPLFKQILSDRNTLSFILEEFKSDEEVIQSFCKYKTLLRNENVLETAEALFNELNSIDLTHIFISHKKLETISSALCDHWDTLRNALYERRISELTGKITKSAKEKVQRSLKHEDINLQEIISAAGKELSEAFKQKTSEILSHAHAALDQPLPTTLKKQEEKEILKSQLDSLLGLYHLLDWFAVDESNEVDPEFSARLTGIKLEMEPSLSFYNKARNYATKKPYSVEKFKLNFQMPTLASGWDVNKEKNNGAILFVKNGLYYLGIMPKQKGRYKALSFEPTEKTSEGFDKMYYDYFPDAAKMIPKCSTQLKAVTAHFQTHTTPILLSNNFIEPLEITKEIYDLNNPEKEPKKFQTAYAKKTGDQKGYREALCKWIDFTRDFLSKYTKTTSIDLSSLRPSSQYKDLGEYYAELNPLLYHISFQRIAEKEIMDAVETGKLYLFQIYNKDFAKGHHGKPNLHTLYWTGLFSPENLAKTSIKLNGQAELFYRPKSRMKRMAHRLGEKMLNKKLKDQKTPIPDTLYQELYDYVNHRLSHDLSDEARALLPNVITKEVSHEIIKDRRFTSDKFFFHVPITLNYQAANSPSKFNQRVNAYLKEHPETPIIGIDRGERNLIYITVIDSTGKILEQRSLNTIQQFDYQKKLDNREKERVAARQAWSVVGTIKDLKQGYLSQVIHEIVDLMIHYQAVVVLENLNFGFKSKRTGIAEKAVYQQFEKMLIDKLNCLVLKDYPAEKVGGVLNPYQLTDQFTSFAKMGTQSGFLFYVPAPYTSKIDPLTGFVDPFVWKTIKNHESRKHFLEGFDFLHYDVKTGDFILHFKMNRNLSFQRGLPGFMPAWDIVFEKNETQFDAKGTPFIAGKRIVPVIENHRFTGRYRDLYPANELIALLEEKGIVFRDGSNILPKLLENDDSHAIDTMVALIRSVLQMRNSNAATGEDYINSPVRDLNGVCFDSRFQNPEWPMDADANGAYHIALKGQLLLNHLKESKDLKLQNGISNQDWLAYIQELRN

SEQ ID NO: 36 - DNA, 3741 bp, Lachnospiraceae bacterium
  Lachnospiraceae bacterium (strain ND2006)
atgcttaagaatgttggaattgataggttagatgttgaaaaagggagaaaaaatatgtctaaattagagaagtttacaaattgttactctttgtcaaaaacacttcgttttaaggcgattcctgttggaaaaacccaagaaaatattgataataaaagattgcttgtcgaggatgaaaaacgtgcagaagattataagggggttaaaaaattacttgataggtattatttatcatttattaatgatgttcttcattccattaaactaaagaatttaaataattatatttcgttgtttagaaagaaaactcggacggaaaaagaaaacaaagaattagaaaatttagagataaatttacgtaaagaaatcgctaaggcttttaagggtaatgaaggttataaatctttatttaagaaggatattatcgagacgatattgcctgaatttcttgatgataaagatgaaattgctttggttaattcatttaatggatttacaacggcatttaccggtttttttgataatagggaaaatatgttttcggaagaagctaaatcaacctcaattgcttttcgttgtattaatgagaatttaacaagatatatatcaaatatggatatatttgaaaaagttgatgcaattttcgataagcatgaagtacaggaaataaaagaaaaaattctaaacagtgattatgatgttgaagatttcttcgaaggagaattttttaattttgttcttacgcaagaaggtatcgatgtttataacgctataattggtggctttgtgacagaatccggagaaaaaataaaaggattaaatgaatatattaatttatataatcagaaaactaagcaaaaattaccgaagtttaagcctttatataaacaggttttatcagatagagagtcactttctttttatggcgaaggttatacatctgatgaggaagttttagaagtatttagaaatactcttaataagaattcagaaatattttcttcaattaagaaattggaaaagttatttaaaaacttcgatgaatattcaagtgcaggaattttcgtaaaaaatggaccggctatttctacaatttctaaggatatatttggagagtggaatgtaattagagacaaatggaatgcggagtacgatgatatacatttaaaaaagaaggctgtagtaacagaaaaatatgaagatgacaggcgtaaatcattcaaaaaaataggaagtttttcattggagcagttgcaagaatacgctgatgctgatctatctgtggtagagaagttaaaagaaatcattatccaaaaagtggatgagatatataaagtttatggctcgtcagaaaaattgttcgatgctgattttgtactagaaaaatcgttaaaaaagaatgatgcagttgtagcaataatgaaagatttactagattctgtgaagtcttttgaaaattatataaaagccttttttggagagggaaaagaaacaaatcgagatgaatcattttatggtgattttgttttggcatatgacattcttttgaaagtggatcatatttatgatgcaatacgaaattatgtgacacaaaaaccgtattcgaaagataagtttaaattatattttcaaaacccgcaatttatggggggctgggataaggataaagagacagactatagggcaactatacttagatatggctcaaagtattacttggcgattatggataaaaaatatgctaagtgcttgcaaaaaatagataaggatgatgtaaatggaaactatgaaaaaataaattataagttgcttccaggacctaataagatgcttccaaaggtgttttttagtaagaagtggatggcttattataatccgtcggaagatattcaaaaaatatataaaaatggaacatttaaaaaaggagatatgtttaatttaaatgattgtcataaattaattgatttctttaaggattcaatcagtcggtatccgaaatggagtaacgcatatgattttaacttttctgagaccgagaaatataaggatatagcaggtttttacagagaggttgaagaacaaggatataaagtatcatttgaaagtgcgtctaaaaaagaagttgataaattggtagaagaaggaaaattatacatgttccaaatttataataaagacttttcggataaaagtcatggaacgccaaatcttcatacaatgtattttaagttgctgtttgatgaaaataatcatggtcaaattaggctttctggtggtgctgagctattcatgcgacgtgcaagtttgaaaaaggaagaattagttgtgcatcctgccaatagcccgatagcgaataaaaacccggataatccaaagaaaacgactacgttgtcatatgatgtatacaaggacaaaagattttcggaagatcagtatgagttgcatatacctattgcaataaataaatgccctaaaaatatatttaagataaatacagaggttagagtgctgctgaagcatgatgataatccttatgttataggaattgataggggggagagaaatttactttacattgtggtggttgatggtaagggtaatattgtggagcaatattcgctgaatgaaataattaataattttaatggaattagaattaagacggattaccattcacttttggataaaaaggagaaggaaagatttgaagctcgtcaaaattggacgtctatagaaaacattaaagaactaaaagccggatatattagtcaggttgttcataagatatgtgagttggtagaaaaatatgatgcggtaattgcacttgaagatttgaattctggttttaagaatagtcgagttaaagttgaaaagcaagtatatcagaaatttgaaaaaatgctgattgataaacttaactatatggtagataagaaatctaatccttgcgctacgggtggtgctctgaaaggctatcaaattactaacaagtttgagagttttaagtcgatgagtacacaaaatggttttattttttatattccggcgtggttgactagcaaaattgatccgtcaacaggatttgtaaatttgttgaaaacaaagtatacgagcattgcagattcaaagaaatttataagttcttttgacagaattatgtatgtacctgaagaagatttattcgagtttgcattagattataagaatttttctcggacagacgcggattatataaaaaaatggaaactctatagctatggtaacaggattagaatatttagaaatcctaaaaaaaataatgtatttgattgggaagaggtatgtcttacatcagcctataaggaactttttaataaatatgggattaattatcagcaaggagatatacgagctctcttatgtgaacagagtgataaggcattctatagctcttttatggcattaatgtcactcatgctgcaaatgagaaatagtataacaggtaggacggatgtagattttttgatttcaccagtaaaaaattctgacggtattttttatgattccagaaattatgaagctcaggaaaatgcaatattaccgaaaaatgcagatgctaatggggcttataatatcgcaagaaaagttttgtgggctataggtcagtttaaaaaggctgaagatgaaaaacttgataaggttaaaattgcaatatcaaataaggaatggctcgaatatgcgcaaacaagtgttaagcattga

SEQ ID NO: 37 - protein, 1228 aa, Lachnospiraceae bacterium
  Lachnospiraceae bacterium (strain ND2006)
MSKLEKFTNCYSLSKTLRFKAIPVGKTQENIDNKRLLVEDEKRAEDYKGVKKLLDRYYLSFINDVLHSIKLKNLNNYISLFRKKTRTEKENKELENLEINLRKEIAKAFKGNEGYKSLFKKDIIETILPEFLDDKDEIALVNSFNGFTTAFTGFFDNRENMFSEEAKSTSIAFRCINENLTRYISNMDIFEKVDAIFDKHEVQEIKEKILNSDYDVEDFFEGEFFNFVLTQEGIDVYNAIIGGFVTESGEKIKGLNEYINLYNQKTKQKLPKFKPLYKQVLSDRESLSFYGEGYTSDEEVLEVFRNTLNKNSEIFSSIKKLEKLFKNFDEYSSAGIFVKNGPAISTISKDIFGEWNVIRDKWNAEYDDIHLKKKAVVTEKYEDDRRKSFKKIGSFSLEQLQEYADADLSVVEKLKEIIIQKVDEIYKVYGSSEKLFDADFVLEKSLKKNDAVVAIMKDLLDSVKSFENYIKAFFGEGKETNRDESFYGDFVLAYDILLKVDHIYDAIRNYVTQKPYSKDKFKLYFQNPQFMGGWDKDKETDYRATILRYGSKYYLAIMDKKYAKCLQKIDKDDVNGNYEKINYKLLPGPNKMLPKVFFSKKWMAYYNPSEDIQKIYKNGTFKKGDMFNLNDCHKLIDFFKDSISRYPKWSNAYDFNFSETEKYKDIAGFYREVEEQGYKVSFESASKKEVDKLVEEGKLYMFQIYNKDFSDKSHGTPNLHTMYFKLLFDENNHGQIRLSGGAELFMRRASLKKEELVVHPANSPIANKNPDNPKKTTTLSYDVYKDKRFSEDQYELHIPIAINKCPKNIFKINTEVRVLLKHDDNPYVIGIDRGERNLLYIVVVDGKGNIVEQYSLNEIINNFNGIRIKTDYHSLLDKKEKERFEARQNWTSIENIKELKAGYISQVVHKICELVEKYDAVIALEDLNSGFKNSRVKVEKQVYQKFEKMLIDKLNYMVDKKSNPCATGGALKGYQITNKFESFKSMSTQNGFIFYIPAWLTSKIDPSTGFVNLLKTKYTSIADSKKFISSFDRIMYVPEEDLFEFALDYKNFSRTDADYIKKWKLYSYGNRIRIFRNPKKNNVFDWEEVCLTSAYKELFNKYGINYQQGDIRALLCEQSDKAFYSSFMALMSLMLQMRNSITGRTDVDFLISPVKNSDGIFYDSRNYEAQENAILPKNADANGAYNIARKVLWAIGQFKKAEDEKLDKVKIAISNKEWLEYAQTSVKH

SEQ ID NO: 38 - protein, 1064 aa, Bradyrhizobium sp.
  Bradyrhizobium sp. BTAi1
MKRTSLRAYRLGVDLGANSLGWFVVWLDDHGQPEGLGPGGVRIFPDGRNPQSKQSNAAGRRLARSARRRRDRYLQRRGKLMGLLVKHGLMPADEPARKRLECLDPYGLRAKALDEVLPLHHVGRALFHLNQRRGLFANRAIEQGDKDASAIKAAAGRLQTSMQACGARTLGEFLNRRHQLRATVRARSPVGGDVQARYEFYPTRAMVDAEFEAIWAAQAPHHPTMTAEAHDTIREAIFSQRAMKRPSIGKCSLDPATSQDDVDGFRCAWSHPLAQRFRIWQDVRNLAVVETGPTSSRLGKEDQDKVARALLQTDQLSFDEIRGLLGLPSDARFNLESDRRDHLKGDATGAILSARRHFGPAWHDRSLDRQIDIVALLESALDEAAIIASLGTTHSLDEAAAQRALSALLPDGYCRLGLRAIKRVLPLMEAGRTYAEAASAAGYDHALLPGGKLSPTGYLPYYGQWLQNDVVGSDDERDTNERRWGRLPNPTVHIGIGQLRRVVNELIRWHGPPAEITVELTRDLKLSPRRLAELEREQAENQRKNDKRTSLLRKLGLPASTHNLLKLRLWDEQGDVASECPYTGEAIGLERLVSDDVDIDHLIPFSISWDDSAANKVVCMRYANREKGNRTPFEAFGHRQGRPYDWADIAERAARLPRGKRWRFGPGARAQFEELGDFQARLLNETSWLARVAKQYLAAVTHPHRIHVLPGRLTALLRATWELNDLLPGSDDRAAKSRKDHRHHAIDALVAALTDQALLRRMANAHDDTRRKIEVLLPWPTFRIDLETRLKAMLVSHKPDHGLQARLHEDTAYGTVEHPETEDGANLVYRKTFVDISEKEIDRIRDRRLRDLVRAHVAGERQQGKTLKAAVLSFAQRRDIAGHPNGIRHVRLTKSIKPDYLVPIRDKAGRIYKSYNAGENAFVDILQAESGRWIARATTVFQANQANESHDAPAAQPIMRVFKGDMLRIDHAGAEKFVKIVRLSPSNNLLYLVEHHQAGVFQTRHDDPEDSFRWLFASFDKLREWNAELVRIDTLGQPWRRKRGLETGSEDATRIGWTRPKKWP

SEQ ID NO: 39 - protein, 1035 aa, Candidatus Puniceispirillum marinum
MRRLGLDLGTNSIGWCLLDLGDDGEPVSIFRTGARIFSDGRDPKSLGSLKATRREARLTRRRRDRFIQRQKNLINALVKYGLMPADEIQRQALAYKDPYPIRKKALDEAIDPYEMGRAIFHINQRRGFKSNRKSADNEAGVVKQSIADLEMKLGEAGARTIGEFLADRQATNDTVRARRLSGTNALYEFYPDRYMLEQEFDTLWAKQAAFNPSLYIEAARERLKEIVFFQRKLKPQEVGRCIFLSDEDRISKALPSFQRFRIYQELSNLAWIDHDGVAHRITASLALRDHLFDELEHKKKLTFKAMRAILRKQGVVDYPVGFNLESDNRDHLIGNLTSCIMRDAKKMIGSAWDRLDEEEQDSFILMLQDDQKGDDEVRSILTQQYGLSDDVAEDCLDVRLPDGHGSLSKKAIDRILPVLRDQGLIYYDAVKEAGLGEANLYDPYAALSDKLDYYGKALAGHVMGASGKFEDSDEKRYGTISNPTVHIALNQVRAVVNELIRLHGKPDEVVIEIGRDLPMGADGKRELERFQKEGRAKNERARDELKKLGHIDSRESRQKFQLWEQLAKEPVDRCCPFTGKMMSISDLFSDKVEIEHLLPFSLTLDDSMANKTVCFRQANRDKGNRAPFDAFGNSPAGYDWQEILGRSQNLPYAKRWRFLPDAMKRFEADGGFLERQLNDTRYISRYTTEYISTIIPKNKIWVVTGRLTSLLRGFWGLNSILRGHNTDDGTPAKKSRDDHRHHAIDAIVVGMTSRGLLQKVSKAARRSEDLDLTRLFEGRIDPWDGFRDEVKKHIDAIIVSHRPRKKSQGALHNDTAYGIVEHAENGASTVVHRVPITSLGKQSDIEKVRDPLIKSALLNETAGLSGKSFENAVQKWCADNSIKSLRIVETVSIIPITDKEGVAYKGYKGDGNAYMDIYQDPTSSKWKGEIVSRFDANQKGFIPSWQSQFPTARLIMRLRINDLLKLQDGEIEEIYRVQRLSGSKILMAPHTEANVDARDRDKNDTFKLTSKSPGKLQSASARKVHISPTGLIREG

SEQ ID NO: 40 - protein, 1358 aa, Acidaminococcus sp.
MGKMYYLGLDIGTNSVGYAVTDPSYHLLKFKGEPMWGAHVFAAGNQSAERRSFRTSRRRLDRRQQRVKLVQEIFAPVISPIDPRFFIRLHESALWRDDVAETDKHIFFNDPTYTDKEYYSDYPTIHHLIVDLMESSEKHDPRLVYLAVAWLVAHRGHFLNEVDKDNIGDVLSFDAFYPEFLAFLSDNGVSPWVCESKALQATLLSRNSVNDKYKALKSLIFGSQKPEDNFDANISEDGLIQLLAGKKVKVNKLFPQESNDASFTLNDKEDAIEEILGTLTPDECEWIAHIRRLFDWAIMKHALKDGRTISESKVKLYEQHHHDLTQLKYFVKTYLAKEYDDIFRNVDSETTKNYVAYSYHVKEVKGTLPKNKATQEEFCKYVLGKVKNIECSEADKVDFDEMIQRLTDNSFMPKQVSGENRVIPYQLYYYELKTILNKAASYLPFLTQCGKDAISNQDKLLSIMTFRIPYFVGPLRKDNSEHAWLERKAGKIYPWNFNDKVDLDKSEEAFIRRMTNTCTYYPGEDVLPLDSLIYEKFMILNEINNIRIDGYPISVDVKQQVFGLFEKKRRVTVKDIQNLLLSLGALDKHGKLTGIDTTIHSNYNTYHHFKSLMERGVLTRDDVERIVERMTYSDDTKRVRLWLNNNYGTLTADDVKHISRLRKHDFGRLSKMFLTGLKGVHKETGERASILDFMWNTNDNLMQLLSECYTFSDEITKLQEAYYAKAQLSLNDFLDSMYISNAVKRPIYRTLAVVNDIRKACGTAPKRIFIEMARDGESKKKRSVTRREQIKNLYRSIRKDFQQEVDFLEKILENKSDGQLQSDALYLYFAQLGRDMYTGDPIKLEHIKDQSFYNIDHIYPQSMVKDDSLDNKVLVQSEINGEKSSRYPLDAAIRNKMKPLWDAYYNHGLISLKKYQRLTRSTPFTDDEKWDFINRQLVETRQSTKALAILLKRKFPDTEIVYSKAGLSSDFRHEFGLVKSRNINDLHHAKDAFLAIVTGNVYHERFNRRWFMVNQPYSVKTKTLFTHSIKNGNFVAWNGEEDLGRIVKMLKQNKNTIHFTRFSFDRKEGLFDIQPLKASTGLVPRKAGLDVVKYGGYDKSTAAYYLLVRFTLEDKKTQHKLMMIPVEGLYKARIDHDKEFLTDYAQTTISEILQKDKQKVINIMFPMGTRHIKLNSMISIDGFYLSIGGKSSKGKSVLCHAMVPLIVPHKIECYIKAMESFARKFKENNKLRIVEKFDKITVEDNLNLYELFLQKLQHNPYNKFFSTQFDVLTNGRSTFTKLSPEEQVQTLLNILSIFKTCRSSGCDLKSINGSAQAARIMISADLTGLSKKYSDIRLVEQSASGLFVSKSQNLLEYL

SEQ ID NO: 41 - protein, 1358 aa, Acidaminococcus sp.; identical to SEQ ID NO: 40
  Acidaminococcus sp. D21

SEQ ID NO: 42 - protein, 1138 aa, Acidothermus cellulolyticus
MGGSEVGTVPVTWRLGVDVGERSIGLAAVSYEEDKPKEILAAVSWIHDGGVGDERSGASRLALRGMARRARRLRRFRRARLRDLDMLLSELGWTPLPDKNVSPVDAWLARKRLAEEYVVDETERRRLLGYAVSHMARHRGWRNPWTTIKDLKNLPQPSDSWERTRESLEARYSVSLEPGTVGQWAGYLLQRAPGIRLNPTQQSAGRRAELSNATAFETRLRQEDVLWELRCIADVQGLPEDVVSNVIDAVFCQKRPSVPAERIGRDPLDPSQLRASRACLEFQEYRIVAAVANLRIRDGSGSRPLSLEERNAVIEALLAQTERSLTWSDIALEILKLPNESDLTSVPEEDGPSSLAYSQFAPFDETSARIAEFIAKNRRKIPTFAQWWQEQDRTSRSDLVAALADNSIAGEEEQELLVHLPDAELEALEGLALPSGRVAYSRLTLSGLTRVMRDDGVDVHNARKTCFGVDDNWRPPLPALHEATGHPVVDRNLAILRKFLSSATMRWGPPQSIVVELARGASESRERQAEEEAARRAHRKANDRIRAELRASGLSDPSPADLVRARLLELYDCHCMYCGAPISWENSELDHIVPRTDGGSNRHENLAITCGACNKEKGRRPFASWAETSNRVQLRDVIDRVQKLKYSGNMYWTRDEFSRYKKSVVARLKRRTSDPEVIQSIESTGYAAVALRDRLLSYGEKNGVAQVAVFRGGVTAEARRWLDISIERLFSRVAIFAQSTSTKRLDRRHHAVDAVVLTTLTPGVAKTLADARSRRVSAEFWRRPSDVNRHSTEEPQSPAYRQWKESCSGLGDLLISTAARDSIAVAAPLRLRPTGALHEETLRAFSEHTVGAAWKGAELRRIVEPEVYAAFLALTDPGGRFLKVSPSEDVLPADENRHIVLSDRVLGPRDRVKLFPDDRGSIRVRGGAAYIASFHHARVFRWGSSHSPSFALLRVSLADLAVAGLLRDGVDVFTAELPPWTPAWRYASIALVKAVESGDAKQVGWLVPGDELDFGPEGVTTAAGDLSMFLKYFPERHWVVTGFEDDKRINLKPAFLSAEQAEVLRTERSDRPDTLTEAGEILAQFFPRCWRATVAKVLCHPGLTVIRRTALGQPRWRRGHLPYSWRPWSADPWSGGTP

SEQ ID NO: 43 - protein, 1045 aa, Acidovorax avenae
MQKEKPLAYRLALDLGSTSLGWAVLRLSAPGEPSAVIRAGSRIFSDGRNPKDGSSLAVTRRAARAMRRRRDRLLKRKARMLAALERHGFFPQDEAARKALEKLNPYGLRARGLESALKPEEFGRALFHLNQRRGFQSNRKTDRKDSDSGALKQAIGTLRAQMHESGCRTVGEWFWKVRMERKPEGVKGQGVRARYRETPFTTDEGKKRIDKRYDLYVDRAMVAQEFDALWAAQATFAPALFNEAARAELRDILLHQRKLRPVQPGRCTLVPEEPRALLALPSTQRFRIYQEVNHLRVLHDELREEALTLAQRDQIVALLERQAKVTFTAMRKALGFSALFNLEDAKRDGLKGNATTAALGKKDLFGPLWAGFDTALQDEIVTQLMTEESEPRLIAWLQEHTGVDEARAQAIANAGLPEGYGSLGRTALARIVPELQRDVITYDKAVQAAGFAHHSDLGFSFEHDADEVERIGERTIASTGEIKPVFAFKQLPYYGRALQRHVAFAKENPRNDEERYGKIANPTVHIGLNQVRVVVNALMCRYGRPTEVVIELARDLKQSREQKLEAQQRQADNQKRNARIRRSIAEVLGISEERVRTLDIQKWILWEELSHDAADRRCPYSGVQISASMLLGERVEIEHILPFSMTLDDSLNNRTVALREANRIKRNRTPWDARTDFEAHGWSYDGILQRAERMPQRKRHRFAPDGYERWLGEDKDFLARALNDTRYLSRVAAEYLRLVCPGSATRVIPGQMTALLRGKFGLNDVLGLDGEKNRNDHRHHAVDACVIGVTDQRMMQRFAQANAQAREDGLTRLVEDMPLPWPTYRAHVERAVRHIWVSHKPDHGFEGAMMEETSYGILRDGTIKQRRKADGSAGREISRLIRITEPSQPQRHGVDAEGRPLPYKGYVGGSNYCLEITVNDKGKWEGQVISTFDAYRIVREGGLRQLRHSTQGQNGQALAMRLVIGDSVRLEVDEQERVMRIVKINGNNGQVFMAPVHEANVDARNSDKNEAFAYTSKIAGSFQKTKARQVTISPIGELRDPGFKG

SEQ ID NO: 44 - protein, 1131 aa, Acidovorax ebreus
MAQHVFGLDIGIASVGWAILGEQRIIDLGVRCFDKAETAKEGDPLNLTRRQARLLRRRLYRRAWRLTQLSRLLKRKGLIADAKLFAKAPSYGDSAWELRRQGLDRLLTPLEWARVIYHQCKHRGFHWTSKAEEAKADSDAEGGRVKQGLAHTKALMQAKNYRSAAEMVLAEFPDAQRNKRGQYDKALSRVLLGEELALLFATQRRLGNPHASDFFEKLILGDGDRKSGLFWQQKPALSGADLLKMLGKCTFEKGEYRAPKASFSVERHVWLTRLNNLRIVVDGRSRPLNEAERQAALLLPYQTETSKYKTLKNAFIKAGLWGDGVRFGGLAYPSQAQIDAEKTKDPEDQFLVKLPAWHELRKAFKAAGHEALWQQISTPALDGDPTLLDQIATVLSVYKDGAEVVQQLRQLALPEPAASIAVLEKISFDKFSSLSLKALRRIVPLMQSGLRYDEAVAQIPEYGHHSQRIEPGAAKHLYLPPFYEAQRKYAGKGDHIGSMQFRDDADIPRNPVVLRALNQARKVVNALIREYGSPIAVNIEMARDLSRPLDERNKVKRAQEEFRDRNDRARSEFERDFGYKPKAAAFEKWMLYREQLGQCAYSQQPLDIQRVLDDHNYAQVDHALPYSRSYDDSKNNKVLVLTHENQNKGNRTAFEYLTSFPDGEDGERWRTFVAWVQGNKAYRMAKRNRLLRKNYGVDESKGFIDRNLNDTRYICKFFKNYVEEHLQLAARADGDTARRCVVVNGQLTAFLRARWGLTKVRGDSDRHHALDAAVVAACTHGMVKALADYSRRKEISFLQEGFPDPETGEILNPAAFDRARQHFPEPWTHFAHELKARLFTDDLAALREDMQRLGSYTTEDLGRLRTLFVSRAPQRRSGGAVHKETIYAQPESLKQQGGVIEKILLTSLKLQDFDKLLNPESNDHFVEPHRNERLYAAIRQRLEQFGGRADKAFGPDNLFHKPDKNNQPTGPVVRSIKLVRGKQTGIPIRGGLAKNDSMLRVDIFTKAGKFHLVPVYVHHRVTGLPNRAIVAFKDEDEWTLIDESFAFLFSVYPNDYVKVTLKKEQQSGYYSGADRSTGAMNLWAHDRAASVGKDGLIRGIGVKTALSVEKFNVDVLGRIYLAPPETRSGLA

SEQ ID NO: 45 - protein, 1056 aa, Actinobacillus minor
  Actinobacillus minor NM305
MKALNYILGLDLGIASVGWAVVEIDQNELPIRLIDLGVRTFERAEVPKTGDSLALARRLARSSRRLVRRRAVRLLKAKRLLKQEGILQADDFHSSHLKPLPNNPWELRVKGLNHLLDRKEWAAVLLHLLKHRGYLSQRKNESKTDNKELGALLKGVSENRQLLQAQAFSTPAEIAIKKFQQEEGHIRNQRGAYSHTFDRNDLLAELRLLFQKQREFNNPYTSQSLEQAIAELLMWQKPALSGEAILKMLGKCTFEPSEYKAPKNSYSAEYFVWLTKLNNLRILENGADRGLTAEERQLLINQPFEKAKFTYAQARKLLELSDLAIFKGVRYGKDNAESATLMEMKAWHAIRKALESNGLKTEWNGLKTKPELLDKIGTAFSIYKTDEDISQYLNGELSPAVLNALLENLSFDKFIRLSLQSLAKILPLMEQGLRYDEACKQVYGDHYGKKEQLELRFLPKIPVEDIRNPVVLRTLSQARKVINGVVRLYGSPARIHIETGREVGKSFSERRDISKRQEENRNERQRAVEKFKEFFPHFVGEPKAKDILKMRLYEQQHGKCLYSGKELDLNRLLEKGYVEIDHALPFSRTWDDSFNNKVLVLASENQNKGNQTPYEWLNGKENAERWKLFQALVNGSRFPYSKKQRILTKYLDEDGFRERNLNDTRYVARFLCNFIEDNMQLVGQGKKRVFASNGQITALLRRSWGIQKVREDNDRHHAVDAVVVACSTRALQKKITDYVRYKEMNVFTGEKIDQETGEIIKFHFPEPWKFFRQEVEIRVFSETPAEDVVIALPDRPQANHEFIQPLFVSRAPTRKMTGQGHMETIKSAKRLAEGLSVSRVPLTQLKLKDLENMVNREREKALYEALKVRLEKFNNDPAKAFADPFYKKGGQQVKAVRVEQVQKSGVLVRQENGVADNASMVRVDVFIKGGKYFLVPIYTWQVAKGILPNRAATQGKEEEYWDIMDETAIFQFSLYQNDLIKLVTKKKTIFGYFNGLNRATSNINIKEHDLDKSKGKDGIYLEVGVKLALSLEKYQVDELGKNIQPCRSMKKRPPVR

SEQ ID NO: 46 - protein, 1054 aa, Actinobacillus pleuropneumoniae
  Actinobacillus pleuropneumoniae serovar 10 str. D13039
MKLTPLNYILGLDLGIASVGWAVVEIDEQENPLGLIDVGVRTFDRAEVAKTGESLALARRLARSSRRLVKRRADRIKKVKRLLKSENILLSADEQLPNDVWQLRVKGLDQKLERQEWAAVLLHLLKHRGYLSQRKNESKSENKELGALRSGVAANHQILQSAEYRTPAEIAVKKFHVEEGHIRNQRGAYTHTFSRLDLLAEIELLFTRQTELGNPHTSAKLLENLTALLMWQKPALAGEAILKMLGKCTFEPTEYKAAKNSYSAERFVWLTKLNNLRILEQGAERALTDNERFALLDQPYEKAKFTYAQARTMLALPDEAIFKGVRYQGEDKKAVETKTILMEMKAYHQIRKALENADLKAEWNELKNNSELLDDIGTAFSLHKTDEDICRYLDGKLSESILNALLENLNFDKFIQLSLKALQQILPLMLQGQRYDEAVSAIYGDHYGKKSAEINRLLPTIPADEIRNPVVLRTLTQARKVINAVVRLYGSPARIHIETGREVGKSYQDRKKLEKQQEDNRKHRESAVQKFKEYFPNFVGEPKGKDILKMRLYELQQAKCLYSGKSLELHRLLEKGYVEVDHALPFSRTWDDSFNNKVLVLANENQNKGNLTPYEWLDGKNNSEPWQNFVARVQTSGFSHTKKQRILSHKLDEKGFIERNLNDTRYVVRFLCNFIADNMLLTGKGKRKVFASNGQITALLRGRWGLQKVRDDNDRHHALDAVVVACSTVAMQQKITRFVRYEEGNVFSGERIDRETGEIIPLHFPSPWAFFRENVEIRIFSENPKLELENRLPDYPQYNHEFVQPLFVSRMPTRKMTGQGHMETVKSAKRLDEGLSVLKVPLTQLKLNDLERMVNREREMALYESLKVRLEQFDNDPAKAFAEPFYKKGGALVKAVRVEQTQKSGVLVRDGNGVADNASMVRVDVFTKAGKYFLVPIYTWQVAKGILPNKAVTANVDEIDWLEMDESYQFIFTMYPNDLVKVKLKKEEFFGYYGGLDRATGAIVIKEHDLEKSKGRQGIYRIGVKLALSFEKYQVDELGKNIRPCRPTKRQHVR

SEQ ID NO: 47 - protein, 1062 aa, Actinobacillus succinogenes
MNLNYILGLDLGIASVGWAVVEIDEQENPQRLIDVGVRTFDRAEVLKTGESLALARRLARSSRRLVKRRAERIKKAKRLLKAENLLLSADEILPNEAWQLRVKGLDQKLERQEWAAVLLHLLKHRGYLSQRKNESKSENKELGALLSGVAINHQILQSAEYRTPAEIAVNKFQAEEGHIRNQRGAYTHTFSRLDLLAEMELLFQRQATLGNPHTSTKLLENLTALLMWQKPALAGEAILKMLGKCTFEPTEYKAAKNSYSAERFVWLTKLNNLRILEQGAERALTDNERFALLDQPYEKAKLTYAQVRTLLGLSDEAIFKGLRYQGEDKKAVETKTTLMEVKAYHQIRKALEGLDLKAEWNELKNNPALLDEIGTAFSLYKTDDDIHRYLDGKLSESVLNALLENLNFDKFIQLSLKALQQILPLMLQGQRYDEAVSAIYGDHYGKKSDEIDRLLPNIPTDEIRNPVVLRTLTQARKVINAVVRLYGSPARIHIETGREVGKSYQDRKKLEKQQEENRKQRENAVKKFKEYFPNFVGEPKGKDILKMRLYELQQAKCLYSGKSLELYRLLEKGYVEVDHALPFSRTWDDSFNNKVLVLANENQNKGNATPYEWLDGKNNSEGWQHFVARVQTSGFSYAKKQRVLIQELDEKSFIERNLNDTRYVARFLCNHIADNMLLTGKGKRKVFASNGQITALLRGCWGLQKVRENNDRHHALDAVVVACSTKSMQDKITKFVKYKEGRLFKDKKDGVYKGERINRETGEIISLHFPTPWKFFKENVEIRIFSENPKLELENRLPDYPQYNHEFVQPLFVSRMPTRKMTGQGHMETVKSAKRLDKGLSVLKVPLTQLKLSDLERMVNREREMALYEALKECLEQFGNDPAKAFAEPFYKKGGALVKAVRVEQTQKSGVLVRNGNGVADNATGSIVRVDVFTKGGKYFLVPIYTWQVAKGILPNKAVIQGKDESEWEEMDENAVFQFSMHKNDLIKVKTKKGEIFGYFNGLDRATGSIEIEEHDLEKSKGKNGSHRGLGVKTAFFLEKYQVDELGKNIRPCRPTKRQHVR

SEQ ID NO: 48 - protein, 1054 aa, Actinobacillus suis
MKLTPLNYILGLDLGIASVGWAVVEIDEQENPLGLIDVGVRTFDRAEVPKTGESLALARRLARSARRLVKRRADRIKKAKRLLKAENILLSADEHLPNDVWQLRVKGLDQKLERQEWAAVLLHLLKHRGYLSQRKNESKSENKELGALLSGVETNHQILQSAEYRTPAEIAVKKFHVEDGHIRNQRGAYTHTFSRLDLLAEMELLFQRQTDLGNPHTSAKLLENLTALLMWQKPALAGEAILKMLGKCTFEPTEYKAAKNSYSAERFVWLTKLNNLRILEQGAERALTDNERFALLDQPYEKAKFTYAQARTMLALPDEAIFKGVRYQGEDKKAVETKTILMEMKAYHQIRKALENADLKAEWNELKNNSELLDDIGTAFSLHKTDEDICRYLDGKLSESILNALLENLNFDKFIQLSLKALQQILPLMLQGQRYDEAVSAIYGDHYGKKSAEINRLLPTIPADEIRNPVVLRTLTQARKVINAVVRLYGSPARIHIETGREVGKSYQDRKKLEKQQEDNRKQRESAVKKFKEYFPNFVGEPKGKDILKMRLYELQQAKCLYSGKSLELHRLLEKGYVEVDHALPFSRTWDDSFNNKVLVLANENQNKGNLTPYEWLDGKNNSEHWQNFVARVQTSGFSHTKKQRILSHKLDEKGFIERNLNDTRYVARFLCNFIADNMLLTGKGKRKVFASNGQITALLRGRWGLQKVRDDNDRHHALDAVVVACSTVVMQQKITRFVRYEEGNVFSGERIDRETGEIIPLHFPSPWAFFRENVEIRIFSENPKLELENRLPDYPQYNHEFVQPLFVSRMPTRKMTGQGHMETVKSAKRLDEGLSVLKVPLTQLKLSDLERMVNREREVTLYESLKARLEQFGNDPAKAFAEPFHKKGGAVVKAVRVEQTQKSGVLVRDGNGVADNASMVRVDVFTKGGKYFLVPIYTWQVAKGILPNKAVTANVDEIDWLEMDESYQFIFTMYPNDLVKVKLKKEEFFGYYGGLDRATGAIVIKEHDLEKSKGKQGIYRIGVKLALSFEKYQVDELGKNIRPCRPTKRQHVR

SEQ ID NO: 49 - protein, 1105 aa, Actinomyces coleocanis
  Actinomyces coleocanis DSM 15436
MDNKNYRIGIDVGLNSIGFCAVEVDQHDTPLGFLNLSVYRHDAGIDPNGKKTNTTRLAMSGVARRTRRLFRKRKRRLAALDRFIEAQGWTLPDHADYKDPYTPWLVRAELAQTPIRDENDLHEKLAIAVRHIARHRGWRSPWVPVRSLHVEQPPSDQYLALKERVEAKTLLQMPEGATPAEMVVALDLSVDVNLRPKNREKTDTRPENKKPGFLGGKLMQSDNANELRKIAKIQGLDDALLRELIELVFAADSPKGASGELVGYDVLPGQHGKRRAEKAHPAFQRYRIASIVSNLRIRHLGSGADERLDVETQKRVFEYLLNAKPTADITWSDVAEEIGVERNLLMGTATQTADGERASAKPPVDVTNVAFATCKIKPLKEWWLNADYEARCVMVSALSHAEKLTEGTAAEVEVAEFLQNLSDEDNEKLDSFSLPIGRAAYSVDSLERLTKRMIENGEDLFEARVNEFGVSEDWRPPAEPIGARVGNPAVDRVLKAVNRYLMAAEAEWGAPLSVNIEHVREGFISKRQAVEIDRENQKRYQRNQAVRSQIADHINATSGVRGSDVTRYLAIQRQNGECLYCGTAITFVNSEMDHIVPRAGLGSTNTRDNLVATCERCNKSKSNKPFAVWAAECGIPGVSVAEALKRVDFWIADGFASSKEHRELQKGVKDRLKRKVSDPEIDNRSMESVAWMARELAHRVQYYFDEKHTGTKVRVFRGSLTSAARKASGFESRVNFIGGNGKTRLDRRHHAMDAATVAMLRNSVAKTLVLRGNIRASERAIGAAETWKSFRGENVADRQIFESWSENMRVLVEKFNLALYNDEVSIFSSLRLQLGNGKAHDDTITKLQMHKVGDAWSLTEIDRASTPALWCALTRQPDFTWKDGLPANEDRTIIVNGTHYGPLDKVGIFGKAAASLLVRGGSVDIGSAIHHARIYRIAGKKPTYGMVRVFAPDLLRYRNEDLFNVELPPQSVSMRYAEPKVREAIREGKAEYLGWLVVGDELLLDLSSETSGQIAELQQDFPGTTHWTVAGFFSPSRLRLRPVYLAQEGLGEDVSEGSKSIIAGQGWRPAVNKVFGSAMPEVIRRDGLGRKRRFSYSGLPVSWQG

SEQ ID NO: 50 - protein, 1113 aa, Actinomyces georgiae
  Actinomyces georgiae F0490
MSASSQNVERIRYKVGIDVGLRSIGFCAVQVDADDRPVKLLNTVVHVHDAGVSPADAKKADTRKLVSGVARRTRRLYRTRKRRLVDLDRQLDGLGWPLVDPARFADPREPWFAREKLVSGRVDDADERKELLSVALRHIAHHRGWRNPYSTVESLQADAPPSEFLQGLNQRVSEKLGTELDPGLTQGQLVAKLLHRFPNAKIRGPEGILRGKLHQSDNAGELRLICRTQGLDCHITEELVRLVFQAKSPKANKEMRKRIGRDQLPGQGAHIRAEKAHPVFQRFRIVAVLANLRIREAHVDRRLTAEEMRTLTDFLLGLAGSEQPTWEELADNLNIERHQLRGTAKASVDGAPALRFPPIDATTDRIYASKLKWLAEWWRQADEERRGYMVDALSNSGGSEDEPYLDDEIAEMLEQASEEDQAKLDSLHLPGGRASYCLDTLRRLTDAMLGGGLDLFEARKAVFHVDDDWAPPTDPIGAPVGNPPVDRVLKHVARWLEAATGRWGAPQTINIEHVREGLGSEKAARELTRMNDRRRRNNQKLVEEMGEKLGMSGRIRRSDRMRYEAIRRQNCECLYCGQPITYQTMEMDHIVPRAGAASTNSRSNLAAVCRRCNHQKGKLPFAVWAESQDSPAEVRLQDAVQRVRHWLRDAGMGQKELQALRVQVIARLKSKRPDEEFDGRSMESIAWMANELRARVEAQYRGSGTTVRVYRGALTAEARKASGFEGRVNLIGGRGKDRFDRRHHAMDALVIALMNQSVAQTLALRLNMRDSQWLTQSEQTWRQFHGAPGEAARKWEAWDRDMRDASDLFNLALDGGRIPITENVRLRVGNGRVHEDGVIRFKPEYEVKGKTIKGGEARLLGDSLPSEQIDRAETPALWTALTRLPEYDRKSGLPENPDRVIRVNGAVVQATDRIRFFGTPASVAVRGGYAKLGESIHHARIYRINGKTPKYAMIRVYTIDLMRLNHEDIFTAVLKPSTISMRCAEKKLKYAIAEGNAEQIGWLVEGDQLELDAAAYAKGVGADLMREYPMATCWRVAGFPDEAKLRLRPVLLAAEGMGEDAPKFMREVLENQGWRPAVNALLSPGSVRVVRRNVLGEPRFKSSGHLPTTVDLV

SEQ ID NO: 51 - protein, 1101 aa, Actinomyces naeslundii
  Actinomyces naeslundii str. Howell 279
MWYASLMSAHHLRVGIDVGTHSVGLATLRVDDHGTPIELLSALSHIHDSGVGKEGKKDHDTRKKLSGIARRARRLLHHRRTQLQQLDEVLRDLGFPIPTPGEFLDLNEQTDPYRVWRVRARLVEEKLPEELRGPAISMAVRHIARHRGWRNPYSKVESLLSPAEESPFMKALRERILATTGEVLDDGITPGQAMAQVALTHNISMRGPEGILGKLHQSDNANEIRKICARQGVSPDVCKQLLRAVFKADSPRGSAVSRVAPDPLPGQGSFRRAPKCDPEFQRFRIISIVANLRISETKGENRPLTADERRHVVTFLTEDSQADLTWVDVAEKLGVHRRDLRGTAVHTDDGERSAARPPIDATDRIMRQTKISSLKTWWEEADSEQRGAMIRYLYEDPTDSECAEIIAELPEEDQAKLDSLHLPAGRAAYSRESLTALSDHMLATTDDLHEARKRLFGVDDSWAPPAEAINAPVGNPSVDRTLKIVGRYLSAVESMWGTPEVIHVEHVRDGFTSERMADERDKANRRRYNDNQEAMKKIQRDYGKEGYISRGDIVRLDALELQGCACLYCGTTIGYHTCQLDHIVPQAGPGSNNRRGNLVAVCERCNRSKSNTPFAVWAQKCGIPHVGVKEAIGRVRGWRKQTPNTSSEDLTRLKKEVIARLRRTQEDPEIDERSMESVAWMANELHHRIAAAYPETTVMVYRGSITAAARKAAGIDSRINLIGEKGRKDRIDRRHHAVDASVVALMEASVAKTLAERSSLRGEQRLTGKEQTWKQYTGSTVGAREHFEMWRGHMLHLTELFNERLAEDKVYVTQNIRLRLSDGNAHTVNPSKLVSHRLGDGLTVQQIDRACTPALWCALTREKDFDEKNGLPAREDRAIRVHGHEIKSSDYIQVFSKRKKTDSDRDETPFGAIAVRGGFVEIGPSIHHARIYRVEGKKPVYAMLRVFTHDLLSQRHGDLFSAVIPPQSISMRCAEPKLRKAITTGNATYLGWVVVGDELEINVDSFTKYAIGRFLEDFPNTTRWRICGYDTNSKLTLKPIVLAAEGLENPSSAVNEIVELKGWRVAINVLTKVHPTVVRRDALGRPRYSSRSNLPTSWTIE

SEQ ID NO: 52 - protein, 1144 aa, Actinomyces sp.
  Actinomyces sp. ICM47
MSMIDSSENVPGIRYRVGIDVGLKSIGFCAVEVDRNDQPVRMLNSMVFIHDAGVDPNENKAAKSRKLTAGVARRTRRLYRTRHQRLVNLDRVLSKEFGWPLPDLTSFKDPREPWHVRAGLLEGYIADDEKRKEALSIALRHIARHRGWRNPYAKVETLLQPSEPSDFLKGLNDRISEELGRAFPADATPGQLVDTYLAHPDYVGRAGTPKLRGPQGILAGKLHQSDNAQEIRGICDVQRIEPAERDRLIRVVFEAKSPKGSAKERGLVGYDELPGQGRHVRAEKAHPAFQLFRMVSVLANLRIREGREERPLTPDELEDLVDFINQVSLKQEVTWQDLADKLRIERADLRGTAKASFDGSPVLRNPPTDVTTEKIMACKVKWLKEWWKEADDEQRGYMVDAFSNSGGSEDGTDVNDEVAELLEQATEDDQLEFEKISLPQGRAAYSLDSLRRLTDRMLRDGVDLHTARRLEFNVGDDWKPAVEPIGAPTGNPAVDRVLKQVSRWLHAATERWGEPTVINIEHARDGLGSERVARELMRENEKRRKANASAVAEMAAKLKLSGKVHRSDQIRYFALQRQNCQCLYCGAPITYTTAEMDHIVPRADGSSTNDRSNLAAVCRTCNHMKGKIPFAVWASSDKANQGVSLTGALERVNMWQRDSGMSPRQLKQLQREVCARLKSKKPDQEFDGRSMESVAWMAVELRTRIEGFYRSRDEESVPSVGVYRGQLTAEARRASGFESRVNLIGGRGKTRFDRRHHAMDALVIALMNPSVSRTLALRLNMRDAQRLTGVEETWKHFYGKPGEASKRFESWRESMLRGVELFNIALSDNAIPFVENIRLRVGSSVIHDATVHSFCPPKTPDGKQIITKGYGEQHSLGSAMPVELIDRAETPALWTALTRCPDFDPKKGLPENPQRTISVNGTRVGPTELVNFFEFSKSGPKACLKVRGGYVDLSGAIHHARIYRIAGKKTAYAMIRVFQVDLLRLKDHDVFTTPLKPSTISMRTAEPKIREALANGTATQIGWLVEGDELVIDTSKYSGGFIGEVLARYPEATSWRVAGFMTPAKLRIKPILLSKEGFVDETQAALLGVEVTSEAIQKTVDRPGWLPAVNVLFGAGGVRVIRRNCLGEERYHSSASLPVSMTLE

SEQ ID NO: 53 - protein, 1095 aa, Actinomyces sp.
  Actinomyces sp. oral taxon 175 str. F0384
MPAHHLRVGIDVGTHSVGLATLRVDDQGTPIELLSALSHIHDSGIGKEGQKDHDTRKKLSGVARRTRHLLRNRRERLQQLDKVLVDLGFPIPKPEEYPDLSERTDPYRVWRVRARLVEETLPEELRGPAISMAVRHIARHRGWRNPYSKVESLLSPAEESSFMKALRKRIMTKTGEVLDDDITPGQAMAQVALTHKIYMRGPEGILGKLHQSDNANEIRKICARQGISSDVCKQLLRAVFKAESPRGSAVSRVAPDPLPGQGSFRRAPKCDPEFQRFRIISIVANLRISETKGENRPLTVDERRQVVAFLMEDSQADLTWVDVAEKLRVSRQALRGTAMLTADGERSAAQPPIDVTDQIMRKTKISALKTWWDKADAERRGAMVRYLYEGLEDSECAEVIAKLPEKDHAKLDSLHLPAGRAAYSRESLTALSDHMLETTNDLHEARKRLFGVDDSWAPPAEPVGAPVGNPSVDRTLKIVARYLSAVESIWGTPEVIHVEHVRDGFTSERTAEERDKANRSRHNDNQKAIEKIQHDYGKEGYISRGDIVRFHALKLQGSACLYCGTTIGYHTCQLDHIVPQAGPGSNNRRGNLVAVCERCNHSKSNTPFAVWAQKCGIPHVGVKEAISRVNGWVEHNHSTSSGDLTRLKKEVIARLRRTQKDPEIDERSMESVAWMANELHHRIAAAYPETTVMVYRGSITAAARKAASIESRINLIGEKGRKDRLDRRHHAVDASVVALMEPSVAKTLAERSSLRGEQRLTGQEQTWKQYTGLTVGARERFEAWRGHMHRLTELFNESLAADEVYVTQNIRLRLSDGSAHTVKASKLVSHRLGDGLTVQQIDRACTPALWCALTREIDFDEKNGLPAREDRVIRVHGQEISSADCIQVFSKRKKTKSDRDEAPFGAIAVRGGFVEIGSSIHHARIYRIEGEKPAYAMLRVFTHDLLSQRHGDLFSAVIPPQSISMRCAATELRQAISEGRATYLGWIVSGDELHIPVETFTTHKIGSFLKDYPNTTRWRICGYDSETMLILKPRILSAEGLNNSSDIAEYVIKNKGWRVAINKLAKVHPTVVRRDALGRPRHSSRSNLPVTWSIE

SEQ ID NO: 54 - protein, 1181 aa, Actinomyces sp.
  Actinomyces sp. oral taxon 180 str. F0310
MLHCIAVIRVPPSEEPGFFETHADSCALCHHGCMTYAANDKAIRYRVGIDVGLRSIGFCAVEVDDEDHPIRILNSVVHVHDAGTGGPGETESLRKRSGVAARARRRGRAEKQRLKKLDVLLEELGWGVSSNELLDSHAPWHIRKRLVSEYIEDETERRQCLSVAMAHIARHRGWRNSFSKVDTLLLEQAPSDRMQGLKERVEDRTGLQFSEEVTQGELVATLLEHDGDVTIRGFVRKGGKATKVHGVLEGKYMQSDLVAELRQICRTQRVSETTFEKLVLSIFHSKEPAPSAARQRERVGLDELQLALDPAAKQPRAERAHPAFQKFKVVATLANMRIREQSAGERSLTSEELNRVARYLLNHTESESPTWDDVARKLEVPRHRLRGSSRASLETGGGLTYPPVDDTTVRVMSAEVDWLADWWDCANDESRGHMIDAISNGCGSEPDDVEDEEVNELISSATAEDMLKLELLAKKLPSGRVAYSLKTLREVTAAILETGDDLSQAITRLYGVDPGWVPTPAPIEAPVGNPSVDRVLKQVARWLKFASKRWGVPQTVNIEHTREGLKSASLLEEERERWERFEARREIRQKEMYKRLGISGPFRRSDQVRYEILDLQDCACLYCGNEINFQTFEVDHIIPRVDASSDSRRTNLAAVCHSCNSAKGGLAFGQWVKRGDCPSGVSLENAIKRVRSWSKDRLGLTEKAMGKRKSEVISRLKTEMPYEEFDGRSMESVAWMAIELKKRIEGYFNSDRPEGCAAVQVNAYSGRLTACARRAAHVDKRVRLIRLKGDDGHHKNRFDRRNHAMDALVIALMTPAIARTIAVREDRREAQQLTRAFESWKNFLGSEERMQDRWESWIGDVEYACDRLNELIDADKIPVTENLRLRNSGKLHADQPESLKKARRGSKRPRPQRYVLGDALPADVINRVTDPGLWTALVRAPGFDSQLGLPADLNRGLKLRGKRISADFPIDYFPTDSPALAVQGGYVGLEFHHARLYRIIGPKEKVKYALLRVCAIDLCGIDCDDLFEVELKPSSISMRTADAKLKEAMGNGSAKQIGWLVLGDEIQIDPTKFPKQSIGKFLKECGPVSSWRVSALDTPSKITLKPRLLSNEPLLKTSRVGGHESDLVVAECVEKIMKKTGWVVEINALCQSGLIRVIRRNALGEVRTSPKSGLPISLNLR

SEQ ID NO: 55 - protein, 1103 aa, Actinomyces sp.
  Actinomyces sp. oral taxon 181 str. F0379
MTKINDDLRYRVGIDVGLKSIGFCAVEVDENDQPLRLLNSMVFVHDAGVDPNENKAAKSRKLTAGVARRTQRGTAQNRRRLAELDRALSEELNWPLPNLEDFEDSYEPWHTRAELVEHYIKDDAERAEALAIAIRHIARHRGWRNPYLSVDSLLTPQEPSKFLRGLNERVTQALGREFPADATPGQLICAYIDSPKYAETQGIRGDSGILSGKLHQFDNVGEIRKICEVQRLDHDVFKLLVRKVFFAKSPRGSAAGLVGHDQIPGQGKYIRAEKAHPDFQLFRIVAVLTNLRIREGKAERCLTPDELRGLVDYILEVQLKQQVTWADLADNLGIERTDLRGTARASFDGSPALRFPPTDVTAEKIMASKVKWLKDWWDKADSERRGFMVDALSNSGGSTGDNDIDDEVAALLEAATEDEQAELEKIQLPQGRAAYSLDSLRRLTKRMLEEGVDLHTARKEEFNVDDDWRPEPEPIEAPVGNPAVDRVLKQVARWLNMATDRWGVPDVINIEHTRDGLGSEKVARELLRESQKRQDLNQKDMDKMIRELGISGKARRSSLIKYQAIQRQNSMCLYCGTEIGFETAEMDHIVPRALSGSTNDRSNLAAVCRACNHQKGAVPFAVWATSGEAHAGVSLEDAIKRVRLWQKGPGMSPKQHKAFQNEVISRLKSRKPDEEFDGRSMESVAWMAVELRTRIDGYYRKVNSDSVPKVGIYRGQLTAEARKASGFENRVNLIGGKGKTRFDRRHHAMDALVIAMMNQSVSQTLALRVNMRESQRITGQEETWKNFYGKPGQASERFEKWREGMLRAVELFNIELAKNAIPFHENVRLRVGSSKVHDDTVRKFIHAKLGEALSVAMIDCAETPALWTALTRLPDFDPKDGLPEDLSREIYIHSRKITADEQLNFFNSPSACLKVRGGYVEIGSSIHHARVYRIDGKKTTYSMVRVFATDLVKMTHEDVFTTPLKPSTISMRTADPKIRKALADGTATQIGWLVEGDELQLETDKYSGGLIGEVLAEYPQLTSWRVAGFYGVTQLRLRPYMLAAEGIPSDASESLRKVIEGKGWLPAINALLSSGCVKVVRRNCLGEPRFNAKSSLPVSQLLR

SEQ ID NO: 56 - protein, 1120 aa, Actinomyces sp.
  Actinomyces sp. oral taxon 848 str. F0332
MNAMKQYNAGIDVGINSVGFAAIEVDSKGLPLNILNNMVVLHDSGVDPGTAKTGATRLANSGTARRTRKLIARRRKRLQKLDRYIEVQGWPLVDFSSLPDPYTPWKIRAKLTQDRLEGEEQGRGLSIALRHMARHRGWRNPYEGVESLHSPKEASKQFKDLKDRVTKVSGVIFDEDATPAEVVCDIGLSPKQRLRSAPSAKYKEGATLADEPVGGKSKEGLLGGKLMQSDNANELRKIGIVQGLSNEKVNEIIDQVFASESPKGQAGKRAKKDELPGQEQYVRALRAHLAFQRFRIVAAVANLRILEAEPKHERLLSQSEKDKVIEFLMSADGDDGVTWSDVAEELGIERECLSGTAKRGADGERPSSFPPTNSTNISIVRSKVKPLIEWWRKASDDEQATLVTALSNADELTDDQPSAETVRQFLSSPDEQSQEKIDKISLPKGRAAYSVNSLERLTRRMLKDSVDLFEARKREFGVDNNWTPTPDSIGEPVGNPAVDRVLKIVNRWLLAVTRKWGPPKVVNIEHVRVGFTSAAQTRKYEEENKTNRERNLAILEELRDKFGTSGKIRREDITRFAALRRQNCQCAYCGEAITFFDCEMDHIVPRKGPGSTNTRNNLVAICERCNKSKSNMPFSLWAQNCDIPGVSVEAVIDRVRTWIKDPELNPKQYNNFKKDVIERLRKTVDDDAIDNRSIESVAWMATELADRIGSHFRTAGANTKVRVYRGWLTSEARKASGFEGKINLIGGRGKTRLDRRHHAMDAATIALMRQSVAQTLVERASIRESDRLRRVVSSSWKDYRGADRDKQFSYGSWLNSMNALAELFNRAIDADGIPVTQNLRLRLGNGEAHDATIRSLEKKRVGASWTIGEIDRASTPQLWLALTRQEDFDQNDGLPANASRELRVKNHWFHAEENVTLFPTKSAAIAVRGGYAEIGNTIHHARLYKLPGKKLTYGMIRVFAIDLLCAWHTDLFSSPLLPESISLRTAETKVRRAVEDGAAMYIGWLVDGDEIVLDPETKAFKSNKIGEYLCEFPGTKRWKVDGFPDKEKLRLRPLQLAGEGLPEDVSAGTEEILGPKGNGWRVAINALFKSSQLVVVRRTALGMVRKLSRRHLPLTTRLRG

SEQ ID NO: 57 - protein, 1114 aa, Actinomyces turicensis
  Actinomyces turicensis ACS-279-V-Col4
MQFHFYMVYVTMKGMNDKDASQQLRYRVGIDVGTHSIGFCAVEVDESGMPIQLLNSMVHKHDSGIDPGGNDTATTRLAEAGVARRTRRLIRRRKKRLQELDAFIEECGWPLVDLATITDARSPWRIRAHLATEHIDDEAEQGKLLSIALRHMARHRGWRSPYARISSLHIQADPSEQLKALAQRVSEKTGISLTADQTPAQLISVYLDVFETGKLRGPEGILGGKLMQSDNANELRRIATVQGLDNDLLKKIIGFVFAAESPKGSAAKRVGKDVLPGAHGLRAEKAHPAFQQFRIVSIVQNLRIKEGTGLRALTSEETEIVVDFLNQAGLTEAPTWEEVADNLEIPRSHLKGTATEGFDGIAPSTRPPFDVTSQKILNGKLKKLSAWWKDADYDHRCAMVNALSNVGSDDEGSLADDDVREFLSDFTDEELEALDKVELPGGRAAYSVDSLEKLTNTMLSEGCDLHSARKIAFGVDDSWTPPAEPIGQPVGNPAVDRVLKQVARWISAATNQWGTPESVNIEHVRDALGSEKASREYQRSLQTRRIRNEKLFAEMRERLDIGGKPRRSELTRYLALQRQNCQCLYCGMPITYTDAEMDHIVPRKGAASTNTRENFAAVCRACNHQKSNLPFAVWAEKTERPGVSVKEAYKRVSDMRIEPGMNGRQMNEFRKAIRLRLTTKHADAEIDGRSLESVAWMANELRHRIEGFYRSAENDVTVRVFRGAVTAEGRRASGFESRVNLIGGKGKTRLDRRHHAMDALTIALMEPGIAQTIALRMNMRESQRVLGEQETWKSFTGGSDTARKRWEHWCEEMLRASELFNVFLAEDRIPICQNKRLRLGSSAVHKAIVQPFEASDKRIVSDAMPVELIDRASTPALWTALTRDPDFDPKEGLPANPSRTIRLHDKRLGPNETVEFFPTAAACLAIRGGYCEIGAGIHHARIFRISGKKTTYAMLRVYQCDLVRFQKENLLTVELPANTISVRTAVPKLREALAHGTAEQIGWLVVGDELKIDLSGFTTGQIETFNETYPQATRWEVTGFPTKTQLRLKPLLIASEGLADDVPDDIVKIVKGPGWWPAIDKLLKIGNVVLYRRDTHGKPRVVSHRSLPLSSKLQ

SEQ ID NO: 58 - protein, 1101 aa, Akkermansia muciniphila
MSRSLTFSFDIGYASIGWAVIASASHDDADPSVCGCGTVLFPKDDCQAFKRREYRRLRRNIRSRRVRIERIGRLLVQAQIITPEMKETSGHPAPFYLASEALKGHRTLAPIELWHVLRWYAHNRGYDNNASWSNSLSEDGGNGEDTERVKHAQDLMDKHGTATMAETICRELKLEEGKADAPMEVSTPAYKNLNTAFPRLIVEKEVRRILELSAPLIPGLTAEIIELIAQHHPLTTEQRGVLLQHGIKLARRYRGSLLFGQLIPRFDNRIISRCPVTWAQVYEAELKKGNSEQSARERAEKLSKVPTANCPEFYEYRMARILCNIRADGEPLSAEIRRELMNQARQEGKLTKASLEKAISSRLGKETETNVSNYFTLHPDSEEALYLNPAVEVLQRSGIGQILSPSVYRIAANRLRRGKSVTPNYLLNLLKSRGESGEALEKKIEKESKKKEADYADTPLKPKYATGRAPYARTVLKKVVEEILDGEDPTRPARGEAHPDGELKAHDGCLYCLLDTDSSVNQHQKERRLDTMTNNHLVRHRMLILDRLLKDLIQDFADGQKDRISRVCVEVGKELTTFSAMDSKKIQRELTLRQKSHTDAVNRLKRKLPGKALSANLIRKCRIAMDMNWTCPFTGATYGDHELENLELEHIVPHSFRQSNALSSLVLTWPGVNRMKGQRTGYDFVEQEQENPVPDKPNLHICSLNNYRELVEKLDDKKGHEDDRRRKKKRKALLMVRGLSHKHQSQNHEAMKEIGMTEGMMTQSSHLMKLACKSIKTSLPDAHIDMIPGAVTAEVRKAWDVFGVFKELCPEAADPDSGKILKENLRSLTHLHHALDACVLGLIPYIIPAHHNGLLRRVLAMRRIPEKLIPQVRPVANQRHYVLNDDGRMMLRDLSASLKENIREQLMEQRVIQHVPADMGGALLKETMQRVLSVDGSGEDAMVSLSKKKDGKKEKNQVKASKLVGVFPEGPSKLKALKAAIEIDGNYGVALDPKPVVIRHIKVFKRIMALKEQNGGKPVRILKKGMLIHLTSSKDPKHAGVWRIESIQDSKGGVKLDLQRAHCAVPKNKTHECNWREVDLISLLKKYQMKRYPTSYTGTPR

SEQ ID NO: 59 - protein, 1113 aa, Alcanivorax pacificus
  Alcanivorax pacificus W11-5
MRYRVGLDLGTASVGAAVFSMDEQGNPMELIWHYERLFSEPLVPDMGQLKPKKAARRLARQQRRQIDRRASRLRRIAIVSRRLGIAPGRNDSGVHGNDVPTLRAMAVNERIELGQLRAVLLRMGKKRGYGGTFKAVRKVGEAGEVASGASRLEEEMVALASVQNKDSVTVGEYLAARVEHGLPSKLKVAANNEYYAPEYALFRQYLGLPAIKGRPDCLPNMYALRHQIEHEFERIWATQSQFHDVMKDHGVKEEIRNAIFFQRPLKSPADKVGRCSLQTNLPRAPRAQIAAQNFRIEKQMADLRWGMGRRAEMLNDHQKAVIRELLNQQKELSFRKIYKELERAGCPGPEGKGLNMDRAALGGRDDLSGNTTLAAWRKLGLEDRWQELDEVTQIQVINFLADLGSPEQLDTDDWSCRFMGKNGRPRNFSDEFVAFMNELRMTDGFDRLSKMGFEGGRSSYSIKALKALTEWMIAPHWRETPETHRVDEEAAIRECYPESLATPAQGGRQSKLEPPPLTGNEVVDVALRQVRHTINMMIDDLGSVPAQIVVEMAREMKGGVTRRNDIEKQNKRFASERKKAAQSIEENGKTPTPARILRYQLWIEQGHQCPYCESNISLEQALSGAYTNFEHILPRTLTQIGRKRSELVLAHRECNDEKGNRTPYQAFGHDDRRWRIVEQRANALPKKSSRKTRLLLLKDFEGEALTDESIDEFADRQLHESSWLAKVTTQWLSSLGSDVYVSRGSLTAELRRRWGLDTVIPQVRFESGMPVVDEEGAEITPEEFEKFRLQWEGHRVTREMRTDRRPDKRIDHRHHLVDAIVTALTSRSLYQQYAKAWKVADEKQRHGRVDVKVELPMPILTIRDIALEAVRSVRISHKPDRYPDGRFFEATAYGIAQRLDERSGEKVDWLVSRKSLTDLAPEKKSIDVDKVRANISRIVGEAIRLHISNIFEKRVSKGMTPQQALREPIEFQGNILRKVRCFYSKADDCVRIEHSSRRGHHYKMLLNDGFAYMEVPCKEGILYGVPNLVRPSEAVGIKRAPESGDFIRFYKGDTVKNIKTGRVYTIKQILGDGGGKLILTPVTETKPADLLSAKWGRLKVGGRNIHLLRLCAE

SEQ ID NO: 60 - protein, 1029 aa, Alicycliphilus denitrificans
  Alicycliphilus denitrificans BC
MRSLRYRLALDLGSTSLGWALFRLDACNRPTAVIKAGVRIFSDGRNPKDGSSLAVTRRAARAMRRRRDRLLKRKTRMQAKLVEHGFFPADAGKRKALEQLNPYALRAKGLQEALLPGEFARALFHINQRRGFKSNRKTDKKDNDSGVLKKAIGQLRQQMAEQGSRTVGEYLWTRLQQGQGVRARYREKPYTTEEGKKRIDKSYDLYIDRAMIEQEFDALWAAQAAFNPTLFHEAARADLKDTLLHQRPLRPVKPGRCTLLPEEERAPLALPSTQRFRIHQEVNHLRLLDENLREVALTLAQRDAVVTALETKAKLSFEQIRKLLKLSGSVQFNLEDAKRTELKGNATSAALARKELFGAAWSGFDEALQDEIVWQLVTEEGEGALIAWLQTHTGVDEARAQAIVDVSLPEGYGNLSRKALARIVPALRAAVITYDKAVQAAGFDHHSQLGFEYDASEVEDLVHPETGEIRSVFKQLPYYGKALQRHVAFGSGKPEDPDEKRYGKIANPTVHIGLNQVRMVVNALIRRYGRPTEVVIELARDLKQSREQKVEAQRRQADNQRRNARIRRSIAEVLGIGEERVRGSDIQKWICWEELSFDAADRRCPYSGVQISAAMLLSDEVEVEHILPFSKTLDDSLNNRTVAMRQANRIKRNRTPWDARAEFEAQGWSYEDILQRAERMPLRKRYRFAPDGYERWLGDDKDFLARALNDTRYLSRVAAEYLRLVCPGTRVIPGQLTALLRGKFGLNDVLGLDGEKNRNDHRHHAVDACVIGVTDQGLMQRFATASAQARGDGLTRLVDGMPMPWPTYRDHVERAVRHIWVSHRPDHGFEGAMMEETSYGIRKDGSIKQRRKADGSAGREISNLIRIHEATQPLRHGVSADGQPLAYKGYVGGSNYCIEITVNDKGKWEGEVISTFRAYGVVRAGGMGRLRNPHEGQNGRKLIMRLVIGDSVRLEVDGAERTMRIVKISGSNGQIFMAPIHEANVDARNTDKQDAFTYTSKYAGSLQKAKTRRVTISPIGEVRDPGFKG

SEQ ID NO: 61 - protein, 1029 aa, Alicycliphilus sp.; identical to SEQ ID NO: 60

SEQ ID NO: 62 - protein, 1146 aa, Alicyclobacillus hesperidum
  Alicyclobacillus hesperidum URH17-3-68
MAYRLGLDIGITSVGWAVVALEKDESGLKPVRIQDLGVRIFDKAEDSKTGASLALPRREARSARRRTRRRRHRLWRVKRLLEQHGILSMEQIEALYAQRTSSPDVYALRVAGLDRCLIAEEIARVLIHIAHRRGFQSNRKSEIKDSDAGKLLKAVQENENLMQSKGYRTVAEMLVSEATKTDAEGKLVHGKKHGYVSNVRNKAGEYRHTVSRQAIVDEVRKIFAAQRALGNDVMSEELEDSYLKILCSQRNFDDGPGGDSPYGHGSVSPDGVRQSIYERMVGSCTFETGEKRAPRSSYSFERFQLLTKVVNLRIYRQQEDGGRYPCELTQTERARVIDCAYEQTKITYGKLRKLLDMKDTESFAGLTYGLNRSRNKTEDTVFVEMKFYHEVRKALQRAGVFIQDLSIETLDQIGWILSVWKSDDNRRKKLSTLGLSDNVIEELLPLNGSKFGHLSLKAIRKILPFLEDGYSYDVACELAGYQFQGKTEYVKQRLLPPLGEGEVTNPVVRRALSQAIKVVNAVIRKHGSPESIHIELARELSKNLDERRKIEKAQKENQKNNEQIKDEIREILGSAHVTGRDIVKYKLFKQQQEFCMYSGEKLDVTRLFEPGYAEVDHIIPYGISFDDSYDNKVLVKTEQNRQKGNRTPLEYLRDKPEQKAKFIALVESIPLSQKKKNHLLMDKRAIDLEQEGFRERNLSDTRYITRALMNHIQAWLLFDETASTRSKRVVCVNGAVTAYMRARWGLTKDRDAGDKHHAADAVVVACIGDSLIQRVTKYDKFKRNALADRNRYVQQVSKSEGITQYVDKETGEVFTWESFDERKFLPNEPLEPWPFFRDELLARLSDDPSKNIRAIGLLTYSETEQIDPIFVSRMPTRKVTGAAHKETIRSPRIVKVDDNKGTEIQVVVSKVALTELKLTKDGEIKDYFRPEDDPRLYNTLRERLVQFGGDAKAAFKEPVYKISKDGSVRTPVRKVKIQEKLTLGVPVHGGRGIAENGGMVRIDVFAKGGKYYFVPIYVADVLKRELPNRLATAHKPYSEWRVVDDSYQFKFSLYPNDAVMIKPSREVDITYKDRKEPVGCRIMYFVSANIASASISLRTHDNSGELEGLGIQGLEVFEKYVVGPLGDTHPVYKERRMPFRVERKMN

SEQ ID NO: 63 - protein, 1052 aa, Aminomonas paucivorans
  Aminomonas paucivorans DSM 12260
MIGEHVRGGCLFDDHWTPNWGAFRLPNTVRTFTKAENPKDGSSLAEPRRQARGLRRRLRRKTQRLEDLRRLLAKEGVLSLSDLETLFRETPAKDPYQLRAEGLDRPLSFPEWVRVLYHITKHRGFQSNRRNPVEDGQERSRQEEEGKLLSGVGENERLLREGGYRTAGEMLARDPKFQDHRRNRAGDYSHTLSRSLLLEEARRLFQSQRTLGNPHASSNLEEAFLHLVAFQNPFASGEDIRNKAGHCSLEPDQIRAPRRSASAETFMLLQKTGNLRLIHRRTGEERPLTDKEREQIHLLAWKQEKVTHKTLRRHLEIPEEWLFTGLPYHRSGDKAEEKLFVHLAGIHEIRKALDKGPDPAVWDTLRSRRDLLDSIADTLTFYKNEDEILPRLESLGLSPENARALAPLSFSGTAHLSLSALGKLLPHLEEGKSYTQARADAGYAAPPPDRHPKLPPLEEADWRNPVVFRALTQTRKVVNALVRRYGPPWCIHLETARELSQPAKVRRRIETEQQANEKKKQQAEREFLDIVGTAPGPGDLLKMRLWREQGGFCPYCEEYLNPTRLAEPGYAEMDHILPYSRSLDNGWHNRVLVHGKDNRDKGNRTPFEAFGGDTARWDRLVAWVQASHLSAPKKRNLLREDFGEEAERELKDRNLTDTRFITKTAATLLRDRLTFHPEAPKDPVMTLNGRLTAFLRKQWGLHKNRKNGDLHHALDAAVLAVASRSFVYRLSSHNAAWGELPRGREAENGFSLPYPAFRSEVLARLCPTREEILLRLDQGGVGYDEAFRNGLRPVFVSRAPSRRLRGKAHMETLRSPKWKDHPEGPRTASRIPLKDLNLEKLERMVGKDRDRKLYEALRERLAAFGGNGKKAFVAPFRKPCRSGEGPLVRSLRIFDSGYSGVELRDGGEVYAVADHESMVRVDVYAKKNRFYLVPVYVADVARGIVKNRAIVAHKSEEEWDLVDGSFDFRFSLFPGDLVEIEKKDGAYLGYYKSCHRGDGRLLLDRHDRMPRESDCGTFYVSTRKDVLSMSKYQVDPLGEIRLVGSEKPPFVL

SEQ ID NO: 64 - protein, 1361 aa, Anaerococcus tetradius
  Anaerococcus tetradius ATCC 35098
MGNYYLGLDIGTNSVGWAVTDENYNIERFKKKNMWGIRLFDEAKTAESRRIHRQARRMRQRKIQRLNLLMELFDVEISKVDESFFIRKKESDLHYEDKSQDSRYALFNDKEFNDKDYHNKYPTIFHLIMDLIENDEKKDIRLLYLACHYLIKNRGHFIFEGQKFDVNSSLNNNINKLKSHLDQFYNICLDFDNDKLIEILVNQNLNISEKSKKIKELLRKTNLEVGIANLIAGGSIKLSNMFDDDELKNLDYNSLSFKNSNFDEGRELFEEVLEDRFELVEILKDIHDASVLETMLSSASISPDGGKYISSSMINSYNKHKRDLKLLKKIIKKYKKSEYDNIFRDENIKNNYLSYTRTGINKNKKVQAEDNTDSDGFYKYIVKILKDIKENDSDEDIKYILSEIDKKNFVPKQRTKENSVIPYQLREIELRKIIDNQSKYHKFLNEVDEKGISVKEKIISLLTFRIPYYIGPLNPSYNEEKNFTTSWVKRLAKGKVTPWNFEDMVDIDASREAFIENKLNKCSFLLDETVLPKDSLLYQEYMVLNELNNLKINGQSINTDLKKSIYEELFKKYKKVTRKRLISYIKEKENMSGDIVITGIDGDFKQGLKSYIAFKDIIGEKIDDDIYRKEVEKIIRDISLYGDDKSFIQKKIKNENKLDLSDDQISKIAKLKFKDWGRFSKKLLVGIKASDKNTGEIDNIIGFMRNYNYNIMQLMANVFTFKDEIEKLNSKYYTDEKINIDYLDDLYLSSPAKRMLWQSFQIVDEIKNIKNSDPKKIFIEMARSKEDKPTRKMSRKSRLEKLYTDSKKQFIKLFGPDEYDKLNNEIKNKSESDFRWDNLYLYYTQFGRCMYSLDPIDLEELSNKNLYDQDHIYPKSKIYDDSIENRVLVKKQLNLDKSNEYPIPDRVLNKDKNKLLAFWKMLNEKELIGDKKYARLIRKSPFTDEELGDFIARQLVETRQATKETANMLKRLCPDSKIVYVKAKNVSDFRRKFDILKCRSINDLHHAHDAYLNIVVGNVFDTKFTSNPLNFIKNNSKNRSYNLEKIYDYDVIRNEKIAWLAERKEENQDGSIATVLKNLSKNDIRVTRRTYIKCEDLFDENIVRKGNGKFPIKENNNKSDTNKYGGYSGIKNAYFVLLEDEKHNRILEAIPSFIYKKEKNGEKGSVINYLQNILGIKSAKILRDKIKIGSLLKIDKFPYNLAGKSGNGILISGGVQLILDKNTSKYIKKIENYKYKLDENKDYQINIFDKLSKEENIKLFDLFVDKFENSIYKNRVNIKLKEIKLARPKFEHLSIEEQIKTLTQMLILFGRENNAVNLEYIGLPKNTGKTKINKKINNKDIKIINQSITGLYETEEDLANI

SEQ ID NO: 65 - protein, 1552 aa, Anaerophaga sp.
  Anaerophaga sp. HS1
MFSQRNNPYCELLQNVKQLYKEKFGKTNQVDNSIIYGFMKRILGLDLGTNSIGWALVENDENDRKGKIIGMGSRIIPMDMSELDNFNKGASISKTAERTRLRMTRRLRERHLLRRARLHRILNIMGFLPEHYRNSIDFIDKKGCFFEGQEPKIAYKPDKNSEQFCFLFTSSFHEMLEDFRKFQPELIQNRKKVPYDWTIYYLRKKALTQKISKEELAWIILNFNTKRGYYHLRGEDEDNQDNKKIKEFRALKVVNVTEREGANSSGKKWYDMELENGWVYSRQSNLPPNLEGKTIELIVSYTLDNNGNIKKDKNGKEKYSLSMPGEEDWNLVKIKTENDLKTSKKSVGEYIYDHLLKNPDQKIRGKLISTIERKFYKEELSRILKTQMNFYEELKNRELYQKCVEELYPNNKSHQQTLLQKDFIHLIVEDIIFYQRPLKSKRAFVNNCPLEYRVYVDKKSGELIKSGVKCIPKSHPLFQEFRLWQYVRNLRIYERERMVNGRLMVNVDVTNELLPDEEHIVRLFDLLNDRKSFKQDDVLRFVGIKSPKDRKRYSWNYPEDKELPGNETRHLILAWLKKVDGVPEDWLDPEKLKALWHLLYSVTDREEIIKGLHSFAKKYELPDTFVEHFKKIPRLEREYGSFSEKAIKKLLPLMRMGKYWKAEEIPADLLEKAQKIIDAEADDRISDEVREKLLHLKDISQLKGLPLWQASYLVYGRHSETGEVVKWRTSEDLEKYILQFKQHSLRNPVVEQVILEALRVVKDIWEHYGEGKEGFFNEIHVEIGRELKNPADKRKKITSQIQENENTNLRIKALLEELFNDPSVKNVRPYSPAQQEILRIYEDGVLNGQKEIPDDILKISKMARPSKSQLVKYKLWLEQKYRSPYTGEIIPLSQLFTSAYEIEHIIPQARYFDDSFSNKVICEAEVNREKGHQLAFEFITKRGGDEIELNFGKKVTILNVEEYQKFVKDHYGRSLRSLSKMRKLLMEDIPDDFIDRQLNDSRYISKVVRNLLSNIVRAEDENSLVSKHLITCTGGVTTRLKHEWGLNDVWNELITPRFVRLNKMGKEKFGEWINKKGKQVFQIQMPLELQKGFNKKRIDHRHHALDALVVACASRSHVNYLNNDSARANASETRYDLRNKLCYKDKTDSNGNYRWKFYKPWESFTEEAKNRLAGTVVSFKSNRRIMTRSSNRYFKWVDTSEGKKKKLVRQIKGDNQAIRKPLHKDTVLGKVSLRKEKKVSLSKAIDLWESIVDKPLKKRIQSLREQGYDKKLLLKYFKDRNNQFNGQDISRVNIYFFDNNLAARRVTLDASFNSEKRIDGITDSGIKKILYAHLQNEKYHGKKDEKGNEISPYELAFSPEGLEEMNANIKKLNGGKPHCPIYKVRLAETIGEKFKLGEKGNKNKKYVEAAKGTNLFFAVYVDEKGVRSFETIPFSVALERRKQKLAVVPEENENKEKLLFYLSPNDLVYVPDEDEKLIDYRQLSINPTRIYKMVSSSGTQCFFIPHFVASPIVQTMELGPNNKSERAWDGQMIKNVCYKLSVDRLGNVKIEK

SEQ ID NO: 66 - protein, 1515 aa, Anaerophaga thermohalophila
  Anaerophaga thermohalophila DSM 12881
MKRILGLDLGTNSIGWALVESDEEQKSGKIQGIGSRIIPMDQNELDNFNKGNTVSQTAERTRLRMVRRLRERHLLRRERLHRVLKEIGFLPEHYLEQIDFTEKPGGFLPGKEPKIAYKPDNFKDKYDFLFQDSYHEMLSDFQDKNPEFIQKRKKVPQDWTIYYLRKKALTAKITKEELAWIILNFNQKRGYYQLRGEDEDVAKNTKKEEFHALKVVKVKEREDSEGASGKWYDIELENGWVYPRQSNIRPDWEGKILELIVTYNLDKDGNIKTDKEGNEKRSFRMPNKDDWTLRKKRTENEIEKSGKTVGEYIYDNLLDAPDLKIRGKLVSTIERKYYRSELEQILTAQKKYHPELSNSELFNKCISNLYPNNDIHRKALLSKDFVHLIINDIIFYQRPLKSKRSTVSNCPLEYRVYVDKVTGEKKKVPLKCIPKSHPLYQEFRLWQYVKNLRLFEKERFENGRLLTNVDVTEQFLPDEDKYVELFEFLNGRKTFKQDDILKFAGIKSAKDRVKYYWNYPQEKEYPGNETRYLIESRLKKIENVPDEWLNYEKIEELWHLLYSVTDKVEIEKGLQSFAAKYQLPDLFVEVFKGFPRMEREYGAFSKKAIKKLLPLMRMGKYWKLENINPDLIEKVQKIIDGEADDNINDGIRERFSEINEMSDLRGMPLWKASYLVYGRHSEAAEVIRWRTSADLDQYIKDFKQHALRNPIVEQVVLEALRVVKDVWNYFGEGREKFFDEIHVEIGRDLKNPADKRQKIANQIQENENTNLRIKALLVELFNDPEVQNVRPYSPVQQQLLKIYEDGVLNAERDIPDDIQKISRMANPTRNQLIRYKLWLEQKYRSPYTGEIIPLNKLFTSEYEVEHIIPRARYFDDSFSNKIISEAEVNRKKDRMLAFEFIKKLGGSTIDLNYGKKVSVLTVEEYQQFVKDHYGINPHSRLKMQKLLMDEIPESFIERQLNDSRYISKMVRNLLSNIVREENENSPVAKQLITCSGSITNTLKQEWGLNDVWNTIITPRFERLNKMGEQKYGEWVNKEGKPVFQIQMPLELQKGFNKKRIDHRHHALDALIVASATRSHVNYLSNEAAKTNAKDTRFDLRNRLCYKEKRGQNRNFTWRFYKPWNTFTEDAKNALNDIVVSFKSNHRVINKSTNRYFKWENLPGGMKKKRLVRQEKGDNWAIRQSLHKDTVLGKVSLRKVKPVSLSVALDSWNNIVDKALKKKIRSLKDQGYDKKLMLKYFKDRRNEYNGENISRVNVYYFDEEMAARRVDLDTSFNSEKRIEGITDSGIKKIIYAHLKNEKYHGQKDDKGKDISPYELAFSPEGIAEMNANIKQLNGGKPHCPIYKVRLAEPVGEKFQLGETGNKTEKLVEVAKGTNLFFGVYANDEGVRSFATVPFYLAVEREKQGLPAVPQENENGDQLLFWLSPNDLVYVPSEEDAHFANPKQIELDNSRIYKMVSSTGTQCFFIPHFVATPIVQTIELGPNNKSERAWDGQMIKKVCYKLSVDRLGNVEIE

SEQ ID NO: 67 - protein, 1168 aa, Azospirillum lipoferum
MARPAFRAPRREHVNGWTPDPHRISKPFFILVSWHLLSRVVIDSSSGCFPGTSRDHTDKFAEWECAVQPYRLSFDLGTNSIGWGLLNLDRQGKPREIRALGSRIFSDGRDPQDKASLAVARRLARQMRRRRDRYLTRRTRLMGALVRFGLMPADPAARKRLEVAVDPYLARERATRERLEPFEIGRALFHLNQRRGYKPVRTATKPDEEAGKVKEAVERLEAAIAAAGAPTLGAWFAWRKTRGETLRARLAGKGKEAAYPFYPARRMLEAEFDTLWAEQARHHPDLLTAEAREILRHRIFHQRPLKPPPVGRCTLYPDDGRAPRALPSAQRLRLFQELASLRVIHLDLSERPLTPAERDRIVAFVQGRPPKAGRKPGKVQKSVPFEKLRGLLELPPGTGFSLESDKRPELLGDETGARIAPAFGPGWTALPLEEQDALVELLLTEAEPERAIAALTARWALDEATAAKLAGATLPDFHGRYGRRAVAELLPVLERETRGDPDGRVRPIRLDEAVKLLRGGKDHSDFSREGALLDALPYYGAVLERHVAFGTGNPADPEEKRVGRVANPTVHIALNQLRHLVNAILARHGRPEEIVIELARDLKRSAEDRRREDKRQADNQKRNEERKRLILSLGERPTPRNLLKLRLWEEQGPVENRRCPYSGETISMRMLLSEQVDIDHILPFSVSLDDSAANKVVCLREANRIKRNRSPWEAFGHDSERWAGILARAEALPKNKRWRFAPDALEKLEGEGGLRARHLNDTRHLSRLAVEYLRCVCPKVRVSPGRLTALLRRRWGIDAILAEADGPPPEVPAETLDPSPAEKNRADHRHHALDAVVIGCIDRSMVQRVQLAAASAEREAAAREDNIRRVLEGFKEEPWDGFRAELERRARTIVVSHRPEHGIGGALHKETAYGPVDPPEEGFNLVVRKPIDGLSKDEINSVRDPRLRRALIDRLAIRRRDANDPATALAKAAEDLAAQPASRGIRRVRVLKKESNPIRVEHGGNPSGPRSGGPFHKLLLAGEVHHVDVALRADGRRWVGHWVTLFEAHGGRGADGAAAPPRLGDGERFLMRLHKGDCLKLEHKGRVRVMQVVKLEPSSNSVVVVEPHQVKTDRSKHVKISCDQLRARGARRVTVDPLGRVRVHAPGARVGIGGDAGRTAMEPAEDIS

SEQ ID NO: 68 - protein, 1068 aa, Bacillus cereus
  Bacillus cereus BAG4X12-1
MRYVLGLDIGIASCGWAVINQEKERIEDLGVRIFDKAENPKDGKSLAAPRRDARSTRRTLRRKKHRMQRIKILLVKQGLLFKTELNHLYESATEFDVWNLRLDALERKLHPKEFARVLIHLAKRRGFKSNRKETTLSENGQILESISENQQIMEQQNYRTVGEMILKDKKFENHKRNKDGTYIGTVTRQQLQDEIQMIFHTQRLYKNDYATEEFESSYLEIWASQRPYASKDQIEKMIGYCTLEPKEKRTPKASWSFQYFVALQTINNLRLISKDKIEELSFEEKKQIMNLALEKPIVKYIDIRKLLSIPNDFQFNSLSYSADTVDTTLENKRCIELKEYHSINKVYKQVYGKNTPNLLPIDYDTIAYGLTIFKDDKDILEYLQNKYVNAKGKPIKNLAKKTYDDTFIQALLNLNFTKMGHLSFKALKNIIPFLEEGLSYDKACEKAGYNFKGTSYTERTKYLPVIPQNTNPVVHRALSQTRKVINAIIKKYGSPNAIHIETARELSKTFQERKEIDSRYQDNSKKNEHAIHKLKELGNINPSGINIVKFKLWSEQDGRCMYSGKYIEPHRLFEEGYTEVDHILPYSRSLDDSYNNKILTLGTENQRKGNKTPYEYMGNTSIWDEFETRVQSNKKINFKKQQKLLLQNFSYAREQEFIERNLNDTRYATIYLTSLIQQHLIFSESSSKKKVRTVSGIITSHLRSRWGFNKDRKEGHIHHALDAVIVAVTSNHMIQRVTKYYKLKELNKNLQAKQLPFPEPWEGFRLELEARISPNTQQYLKGIHFKNYADVNLSDIKPIFVSRMPKRSITGELHQETIRKFLGYNEKGKVLTAIKTKLEDIPFDANGDFPMYGKETDLYTYNAIKERYLSHEKDKRKSFQEPLYKPTKSGEIGPLIKSIKIMDTRTIVNPVNQGKGVVYNSKIARTDVFKKEDKYYLIPIYTIDLLKNILPHKAITAGKGYEDWTTIDSSFTFLFSLFPNDLIQIVPSKNKTIKARTTVSKKEILLPSLTGYFKGVHSGTAGITVETHDGSVIANVGSKQLLLFEKYQVDVLGHYTKIKEEKRMGMAI

SEQ ID NO: 69 - protein, 1078 aa, Bacillus cereus
  Bacillus cereus BAG4X2-1
MRYVLGLDIGIASCGWAVINQEKERIEDLGVRIFDKAENPKDGKSLAAPRRDARSTRRTLRRKKHRMQRIKVLLVKHGLLSKTELDHLYESATEVDVWNLRLDALERKLYPKEFARILIHLAKRRGFKSNRKETTLSENGQILESISENQQIMEKQNYRTVGEMILKDKKFENHKRNKNGTYVGTVTRQQLQDEIQMIFHAQRLYKNDYATEEFESSYLEIWASQRPYASKDQIEKMIGYCTLEPKEKRAPKASWSFQYFVALQTINNLRLISKDRIEELSFEEKKQIMNLALEKSIVKYIDIRKLLSVPNEFQFNSLSYSADTVDTAVESRKCIELKEYHSINKVYKQIYGENALNLLPKYYDTIAYGLTIFKDDKDILEYLQNKYVNAKGKPISNFANKTYDDTFIQALLNLNFTKMGHLSFKALKNIIPFLEEGLSYDKACEKAGYNFKGTSYTEQTKYLPVIPQNTNPVVHRALSQTRKVINAIIKKYGSPNAIHIETARELSKTFQERKEIDSMYQDNSKKNEHAIHKLKELGNINPSGINIVKFKLWNEQDGRCMYSGKYIEPHRLFEEGYTEVDHILPYSRSLDDSYNNKTLTLGTENQRKGNKIPYEYMGNTSIWNDFETRVQSNKKINKKKQQKLLLQHFSYAREQEFIERNLNDTRYATIYLSSLIQQHLIFSESSRKKKVHTVSGIITSHLRSRWGFNKDRKEGHIHHALDAVIVAVTSDHMIQRVTKYYKLKELNRNLQAKRMPFPEPWEGFRLELEARISPNTQQYLKGLRFKNYADVNLSEIKSIFVSRMPKHSITGELHQETIRKFIGYNEKGKVLTAIKTKLEDIPFDANGDFPMYGKESDLYTYNAIKERYLSHKKDKRKSFQEPLYKPTKSGGIGPLIKSIKIMDTRTIVNPVNQGKGVVYNSKIARTDVFKKEEKYYLIPIYTIDLMKNILPQKAITAGKGYEDWTTIDPSFTFLFSLFPNDLIQIVPSKNKTIKARTTVSKKEVLLPSLTGYFKGVHSGTAGITVETHDGSVIANVGSKQLLLIEKYQVDVLGNYTKIKEEKRIGLTTYNDNKKIAAC

SEQ ID NO: 70 - protein, 1069 aa, Bacillus cereus
  Bacillus cereus Rock1-15
MNYDIGLRIGITSCGWSIINKDLERIEDLGVRVFEKAENPDGTASAAPRREARKSRRKHRRKKHRIERIKRLIVQHDLLSKKELDSLYLSPFNIDVWNLQVEALERKLDNREFARVLIHLVQRRGFQTIRKSVEIQEEGKLLENVSENERIMKVNGYKTVGEMFSKHEKFTHHKRNKDGSYTSVVTRSLLLKEIKTIFNSQRILGNVFSTQKLESDYLYIWGSQRPTLTYEQLMSMVGNCIYEKKEKRAPKTSWAFQYFSLLQKINKLKVSDDNTLRKLSKEERDIVIELAFKKKNVSFVDIRKALKLNDNTKFNHLTYSHVVETKKVEKATFIELKGYHLIKKQLKDRNVELTQELQPKDYDAIAAASTFFKNDIEFRDYLRNQYLDSNGKRKSNIANKVFEDKVIAAVFELNFSKVCHLSFKSLYKLIPHLEKGLDYKEAILCAGYNFRDENKRDKKLFLPVIQQETNPVVHRALTQARKVINAIIREYGSPNTIRFVVANDLAKTYKQRKELESTLKKNRAENEKIKTKLLSMGIINPTGMDIVKYKLWYEQSGICLYTGRQMELSSLFKPGYSIVNHIIPYNRSFDDTYHNRVLTLTETKYEKGNKIPFEYFGAEETCWNEYEKRVSTSKKIHDKKREKLLIRNFDIEYENEMISNNVFDTHYIGSYFEKYIDEHLQFKKSTKKQKVFSIHGNMVAHLHSRWGFNKNSREIYLNHAVDAAIVAVLTDQLIRNIADYYRRDNILEQKGSLKFPEPWKSFSIELEARISPQVRDLIKKLNLDSYLDVDILHIKPVFISKKPRRKVNGEAHKSTIRSLIGINEIGKTVTCIKTRLEDIPFDENGDFPMYGKDTDKYTYTAIKERYLEFNKDKEKAFSTPLYKLKRNGEPGNQIKSVKIIDTRNIVNKVNQGKGIAYNSNIIRVDVFSRDQKYYVVPIYLRDFIKGSLPNKIITAAKGFMQWPETDNSYTFLFSIFPNDLIKVVPKEGKFIKAKNENKENINLTEILGYFKGLDSSTGAFTLESHDGSLLARGIGTKNLLLIEKYQVDVLGRYNKVGNEERQDIKIQQN

SEQ ID NO: 71 - protein, 1088 aa, Bacillus smithii
  Bacillus smithii 7_3_47FAA
MNYKMGLDIGIASVGWAVINLDLKRIEDLGVRIFDKAEHPQNGESLALPRRIARSARRRLRRRKHRLERIRRLLVSENVLTKEEMNLLFKQKKQIDVWQLRVDALERKLNNDELARVLLHLAKRRGFKSNRKSERNSKESSEFLKNIEENQSILAQYRSVGEMIVKDSKFAYHKRNKLDSYSNMIARDDLEREIKLIFEKQREFNNPVCTERLEEKYLNIWSSQRPFASKEDIEKKVGFCTFEPKEKRAPKATYTFQSFIVWEHINKLRLVSPDETRALTEIERNLLYKQAFSKNKMTYYDIRKLLNLSDDIHFKGLLYDPKSSLKQIENIRFLELDSYHKIRKCIENVYGKDGIRMFNETDIDTFGYALTIFKDDEDIVAYLQNEYITKNGKRVSNLANKVYDKSLIDELLNLSFSKFAHLSMKAIRNILPYMEQGEIYSKACELAGYNFTGPKKKEKALLLPVIPNIANPVVMRALTQSRKVVNAIIKKYGSPVSIHIELARDLSHSFDERKKIQKDQTENRKKNETAIKQLIEYELTKNPTGLDIVKFKLWSEQQGRCMYSLKPIELERLLEPGYVEVDHILPYSRSLDDSYANKVLVLTKENREKGNHTPVEYLGLGSERWKKFEKFVLANKQFSKKKKQNLLRLRYEETEEKEFKERNLNDTRYISKFFANFIKEHLKFADGDGGQKVYTINGKITAHLRSRWDFNKNREESDLHHAVDAVIVACATQGMIKKITEFYKAREQNKESAKKKEPIFPQPWPHFADELKARLSKFPQESIEAFALGNYDRKKLESLRPVFVSRMPKRSVTGAAHQETLRRCVGIDEQSGKIQTAVKTKLSDIKLDKDGHFPMYQKESDPRTYEAIRQRLLEHNNDPKKAFQEPLYKPKKNGEPGPVIRTVKIIDTKNKVVHLDGSKTVAYNSNIVRTDVFEKDGKYYCVPVYTMDIMKGTLPNKAIEANKPYSEWKEMTEEYTFQFSLFPNDLVRIVLPREKTIKTSTNEEIIIKDIFAYYKTIDSATGGLELISHDRNFSLRGVGSKTLKRFEKYQVDVLGNIHKVKGEKRVGLAAPTNQKKGKTVDSLQSVSD

SEQ ID NO: 72 - protein, 1069 aa, Bacillus thuringiensis
MNYDIGLRIGITSCGWSIINKDLERIEDLGVRVFEKAENPDGTASAAPRREARKSRRKHRRKKHRIERIKRLIVQHDLLSKKELDSLYLSPFNIDVWNLRVEALERKLDNREFARVLIHLVQRRGFQTIRKSVEIQEEGKLLENVSENERIMKVNGYKTVGEMFSKHEKFTHHKRNKDGSYTSVVTRSLLLKEIKTIFNSQRILGNVFSTQKLESDYLYIWGSQRPTLTYEQLMSMVGNCIYEKKEKRAPKTSWAFQYFSLLQKINKLKVSDDNTLRKLSKEERDIVIELAFKKKNVSFVDIRKALKLNDNTKFNHLTYSHVVETKKVEKATFIELKGYHLIKKQLKDRNVELTQELQPKDYDAIAAASTFFKNDIEFRDYLRNQYLDSNGKRKSNIANKVFEDKVIAAVFELNFSKVCHLSFKSLYKLIPHLEKGLDYKEAILCAGYNFRDENKRDKKLFLPVIQQETNPVVHRALTQARKVINAIIREYGSPNTIRFVVANDLAKTYKQRKELESTLKKNRAENEKIKTKLLSMGIINPTGMDIVKYKLWYEQSGICLYTGRQMELSSLFKPGYSIVNHIIPYNRSFDDTYHNRVLTLTETKYEKGNKIPFEYFGAEETCWNEYEKRVSTSKKIHDKKREKLLIRNFDIEYENEMISNNVFDTHYIGSYFEKYIDEHLQFKKSTKKQKVFSIHGNMVAHLHSRWGFNKNSREIYLNHAVDAAIVAVLTDQLIRNIADYYRRDNILEQKGSLKFPEPWKSFSIELEARISPQVRDLIKKLNLDSYLDVDILHIKPVFISKKPRRKVNGEAHKSTIRSLIGINEIGKTVTCIKTRLEDIPFDENGDFPMYGKDTDKYTYTAIKERYLEFNKDKEKAFSTPLYKLKRNGEPGNQIKSVKIIDTRNIVNKVNQGKGIAYNSNIIRVDVFSRDQKYYVVPIYLRDFIKGSLPNKIITAAKGFMQWPETDNSYTFLFSIFPNDLIKVVPKEGKFIKAKNENKENINLTEILGYFKGLDSSTGAFTLESHDGSLLARGIGTKNLLLIEKYQVDVLGRYNKVGNEERQDIKIQQN

SEQ ID NO: 73 - protein, 1509 aa, Bacteroides coprophilus
  Bacteroides coprophilus DSM 18228
MKKTLGLDLGTNSIGWAVINSNIDSEGKEKLVGISSCGSRIIPMDATTLGDFGKGNTKSPVAERTRLRGIRRLLERSLLRRERLHRVLSVMGFLPEHYASQLDRYGKFLPETEPKLAWYKDDSGRYQFLFQKSFHEMLEDFRQHQPELVAGEKKIPYDWTIYYLRKKALSQEITKEELAWILLNFNQKRGYYQLRGEEEQEENNKSVEYHALKVVSVEDSGERKGKDIWYNVTLENGWVYRRASNIPLDWTGKVKEFVVTTELDDAGNPKKDKEGNVKRSFRAPKEDDWGLLKTRTQAQIDESGKTVGTYIYESLLCMPNQKIRGKLVRTIERKYYKDELRQILVKQSEFHAALQDHNLLLSCIEELYPNNEAHRRLLSASSFIYFLIEDILFYQRPLKSQKGLIDNCPYESHIYKDKKDGSLHHVPLKCVSKSHPLFQEFRLWQFLSNLRIYQRERMMDGSLKLDVDVTREFLPSEEDYVKLFDWLNERKEISQKFLLAYKPFGLKKNEQANYRWNYVEDKSYPCNETRAEIKSRLSKAGVPEEFLTEEKEEALWHILYSISDKKELTKALGTFAAKNCLNESFVEVFAKIPPFESNYAAYSLKAIRKLLALMRMGKYWNEQAIDRQTRDRIEKILTGEYDETIRSRVREKAMLLTDISSFRGLPLWLACYIVYDRHSESKELVKWETPADIDHFLSKFKQNSLRNPIVEQVITESLRTVRDIWKQEGKIDEIHVELGREMKNPAKERARITAQVQENENTNLRIKALLAEFMNPEFEIENVHPYSPGQQEILRIYEDGVLSGIAEKDLPDDITAILKKFRENDVKKRPTTSEVLRYKLWLEQRYRSPYTGRVIPLGKLFTPAYEIEHVIPQSRYFDDSISNKVICESAVNKLKDNCLGYEFIKKHSGEMVELGNGETVPVFSVEEYERFVKESYFGNSKKMKKLLLEDIPDSFIERQLNDSRYISRVVTSLLSNLVCEEGEQDGLSKNVIVCTGGITDRLKKDWGVQEVWNRIILPRFLRLNEITGRTDFTSTSVNGHLLPALPLYLQKGFNKKRIDHRHHAMDAIVIACANRNIVNYLNNSSARKNSEISRYDLQRLLCEKVKTDANGNYKWILRKPWETFTQDVYAALTNIVVSFKQNLRVINRTTNYYQHYNEAGEKRMIPQTKGDRWAIRKPMHKDTVYGEVNLRKEKTLPLRDVVKNPSIVVDKSLKNKLYELLKSQYDLKAIAKYFETHQDVWADVNLKKIKVYYFTKETNERFFATRKSLDPSFDQKKIEEEVTDTGVQKILLHHLQQNNNDPDMAFSPDGIDRMNQNMTILNDGKWHQPIYKVRTYEKADKFAVGESGNKAKKFVEAAKGTNLFFAVYESVQEDEAIGKQVCKRTFATIPLNEVIKRKKQGLPAAPEDLNGNLPKFVLSPNDLVYLPTEEERNSSRIIQPLDRERIYKMVSSSGSQCFFIKVFVANSIWDKNEYSSLNKMERAITNEMIKEICVPIKIDRLGNVSLIQI

SEQ ID NO: 74 - protein, 1504 aa, Bacteroides coprosuis
  Bacteroides coprosuis DSM 18011
MKKVLGLDIGTNSVGWAVVNQNDKGEFLSIEKIGSRIIPMSQDVMDKFGAGQTESSTAQRTQYRGVRRLRERSLLRRERLHRVLHILHFLPQHYDAAIGWNKKENKTYGKFLPGVEVNIPWVATDQGHQFIFMDSYAEMLKDLKQHQPHLFEKSSTPVPLDWTIYYLRKKALTQAISKEELAWILLNFNQKRGYYQLRGEEVEDNTKREEFYALKVVKVELDKDNTSAKTWYKVHLENGFIYPCPSDTPIDSWVGMVKDFIVTTTLEKDGSEKRTADGEIKRSFRAPKEDDWTLLKKKTESELEKSGKQVGAFIYDTLLSNPDQKIIGGLIKTIERKYYKKELEQILETQQKFIAELSDKKLFQACAEELYPLNDSHRENLLERDFKHLFVQDIIFYHRPLKTKKSLISNCTYEYRTFYKNGEKQISPIKCIAKSNPLFQEFRVWQFVQNLRILQRQRSEGDSIKYNVDVTAEFLKDENDIANLFTWLNERKVIKQDQLLKSYFKLKVNKETKELDYRWNYVDDKNKEYPCNATRTHILSFLEKCKEEKRIEDDRFVYSLWHLLYSVVEPIELRGALAKFAEREHLHPSFVDVFAQFPPLEKEYGSYSEKAIKRLLPLMRMGDYWHEDKIDVKTKQRIQRIIDGEADDDITHRSREKVENLRSITDFKGLPLWKAGYVVYNRHSESGELTKWKTPHELSNYIQNEFKQYSLRNPIVEQIVLETLRVVHDLWVKHGDFSEIHLELGRDIKNSSDKRKRMAERQQENENSRQRVLEMLIDLKKEAAFADLNPYSPSQQEKLRIVEDGVLRSNIEIPKDIEKITKSAKPTSRELTKYRLWLDQKYRSPYTGQPISLAQLFTSKYEIEHVIPQAKYFDDSFTNKVICESEVNKEKGSMLAHEFILKNGGSTVNVGGRQVQVLKNDAYVELINRLYGKNNPVKAKKLLAEDIDEVVGDFSERQLNDTRYISRVVQKLLSNIVREEDEQESTSKHVIGCSGQVTTALKKDWGLNDIWNKIIQPRFERLNEMTATEDYGVWQSPNHFQIRVPEEIQKGFTKKRIDHRHHAMDALVIACATRSHINYISNRSGQDRNAKFETTRTDLRSKLCYKENSSGNNYNYIFNKPWDTFTQDAHRALENIVVSHKQNLRVLTKTNNYTQFINKDGKKDLQKQVKGDHFAVRKPMHQETIYGRVSIRSIKEVALKKALENWKQIVDRTLKDKIRELIGAYGKYDAQTILKYFKDRDYKFNNLKINRVEVYEYDHNCAAVRKSIGDDLTIKQIERITDESIRKILMNHLSNYDDNLKEAFSPEGLMEMNKNIKELNGGKNHQPIYKVRLFEDLGSKFPLGVSHNNPDKYAIAAKGTNLFFGIYEDQEGKRMFDSIPLNIVIDRLKEKKSPVPETYNESKLKFHLSPNDLVYVPTDEEQKQPELVDVDHLSDEQKGRVYKAVSFTGNRAFFVNHRVSKVIHDYVEFGTKNKIENDDDKRSLKHICWKLKVNRLGEITDVKR

SEQ ID NO: 75 - protein, 1504 aa, Bacteroides dorei
  Bacteroides dorei DSM 17855
MKNIVGLDLGTNSIGWAVVNGSVNDDGSEQLVKIQASGSRIIPMDAAMIGDFNKGNSISQTAERTRLRGVRRLSERYLLRRERLHRILDILGFLPFHFAQDLDRHGKIVKGKEPKLAWRKNEAGQFEFIFQDSFKEMLEDFKLNYPNLITDDKKVPYDWTIYYLRKKGLTSKISKEELAWILLNFNQKRGYYQLRGEEEEENKDKLVEFYALKVVAVEDSGEKKGKDIWYNVHLENGWVYRRTSNMSLDWVGKTKEFIVTTDLEKDGTPKKDKEGNVKRSFRAPKEDDWSLVKKKTEADIDQTHKTVGAYIYDTLLGNPSQKIRGRLVRTIERKYYKEELKLILEKQKEFHLELQDRALYAACIEELYPINEAHRNNVGNRDFTYLFLEDILFYQRPLKSKKSLIDNCPYEENQGLDKETGEIKSFPVKCIAKSHPLFQEFRLWQFIINLRIYRKDLAQDVDVTNELLKTEEDYVALFDWLNGKKEIDQKAFLKYPVFGLKKEIENYRWNYVQDKPYPCNETRSLMLARLEKCDISIEFLTKENEEALWHILYSVEDKNEIVKALQKFADKHDLNASFVDVFQKFPPFKKEYGSYSAKAIKKLLPLMRMGKYWSENSIDKGTRERIDKIITGEYDEKIENRVREKAIHLADVSDFKGLPLWLVCYIVYGRHSEAKEIIQWKSPADIDSYLRSFKQHSLRNPIVEQIIIETLRVVRDIWKQVGNIDEIHVELGREMKNPADKRKKMTQQMSENENTNLRIKYLLTEFLNPEYEVENVRPYSPSQQDILRIYEEGVLNSVSDLPEEISDILKKFTETDLKKRPSRSEVLRYKLWLEQKYRSPYTGEVIPLGKLFTPAYEIEHVIPQSYYFDDSFSNKVICEAEVNKLKSNLLGHEFIVKHHGEIVELPFGKKVRIFTVDEYEQFVKDNYSRTRSKMKKLLMDDIPEEFVTRQLNDSRYISKVVKSLLSNIVREKGEEEAISKNVIPCTGGVTDRLKKDWGINEVWNKIILPRFQRLNELTGTNKFTTKNVGIQEIPTMPLELQKGFNKKRIDHRHHAMDAIIIACANRNIINYLNNKSATAKAELSRYDLQKMLCDKAKTDNNGNYKWVIRKPWASFTQDTYLALENIIVSFKQNLRVINKATNRFLHYNEEGKKIFVKQGKGDNWAIRKSMHKDTVFGEVNLRRIKTVALNEAMKNPQSIVVKDFKRKLLELWNLGFDAKRIKKYFEDNRETWSDINLSKIEVYYFSKDTKDRFFATRKPLDTSFDRKKIENNITDTGIQKILLRHLELKDNNPDIAFSPDGIDEMNRNIIQLNNGKYHQPIIKIRWYEQADKFAVGQTGNKSSKFVEAAKGTNLFFAVYESNILDKKTNTIIKKRNYATIPLNVAIERQKQGLPVAPEDENGNDPIFVLSPNDLVYLPTDDELANGIIAQPLDRGRIYKMVSSSGEQCFFIKHIVANVLVDKFEFSPLNKMERALTGEMIKMICIPIKVDRLGNVLESSSSYKK

SEQ ID NO: 76 - protein, 1509 aa, Bacteroides eggerthii
  Bacteroides eggerthii 1_2_48FAA
MKTILGLDLGTNSVGWAVINSVIKEQAERIWIEMAGSRIIPMDAAVLGDFDKGNSISQTSERTRLRGARRLRERQLLRRERLHKVLNILGFLPNHYLEYIDFEKHPGKFLADAEPKLAWVKDEQGKYTFLFQAAFDEMLADFAIHQPSLVSGDKKIPYDWTIYYLRKKALTEMISKEELAWILLNFNQKRGYYQLRGEEEEDNAGKSVEFYALKVLTVEATDEKKGRDVWYNVHLENGWIYRRSSSVPLDWEGQVKEFIVTTDLNPDGTPKLDKYGEVKRSFRAPKEDDWMLIKKRTEADIANTHKTVGAYIYDTLLQKPQQKIIGKLVKTVERKLYRDELSLILQKQCAFHAELQDRALYARCVEALYPSNEVRRKNIANRDFVYLLMDDILFYQRPLKTKKSLIANCPYEENEYVDRETGEIKKTPLKCIAKSHPLFQEFRLWNFLSNIRIYQKEKEINGTLHLDVDVTAEFLKTEDDYVALFDWLNSRKEIEQKTFLKYPKFGLKKEISNYRWNYVEDKQYPCNETRHAILSSLEKANVCIDFLSNEKEVALWHILYSVSDKQEIEKALRTFAAKNGLDESFVEAFKKFPPFKSEYGAYSAKAIKKMLPLMRCGKYWDVSSIDDTTKERIKKIVTGEYDERISVKVRDKVMNLSDISCFRRLPLWLACYIVYNRHSEDKEAVKWESPADIDAYLASFKQHSLRNPIVEQVITETLRVVRDIWKQVGRIDEIHIELGREMKNPADKRKRMTAQILENENANLRIKALLAEFMNPEYEIENVRPYSPSQQEILRIYEDTVLHAEDQLPEEIDAILKKFNSSKVPTKSEFLRYKLWLEQKYRSPYTGELIPLGKLFTAAYEIEHVIPQSRYFDDSFSNKVICESAVNKLKDNQLGYEFIKNHHGQKVEVGFGKSVEIFSVDSYERFVKEQYAKSAVKMKKLLMDDIPEQFIERQLNDSRYISKVIKGLLSNIVREKNDSGEYEPEAVSKNIVVCTGSVTDRLKRDWGMNDVWNSIVYPRFERLNSLTDTQSFGHWENKSGKKVFQTELPLEYQKGFSKKRIDHRHHAMDAIVIACATRNHVNYLSNESASRNAKISRYDLQRLLCDKNRTDDNGNYKWVIKKPWDTFTQDAREVLSKIVVSLKQNLRIINKTTNVYRHLDATGNRVYEKQKTGDSWAIRKPMHKDTVFGAVNLRKVKVVRLSVALDTPAMIVDKRVKNKVFELLSYKYDKKRIEKYFKENAFLWKELDLAKVAVYYFTEATTEPLVAVRKPLDSTFNEKKIKESVTDTGIQKILLNHLCTKEGKPDLAFSAEGIEEMNRNLLQLNNGKSHQPIYKVRVYEPRGNKFSVGVLGNKGTKWVEAAKGTNLFFAIYITEDGKRTYETIPLNVVIEREKQGLVPVPDRNKKGDKLLFWLSPNDLVYLPTEEEREFGRINEPIDRGRIYKMVSCTGNEGHFIPANVANPIVPVIELGSNNKAQRAWTNEMIKDICIPIKVDRLGHIIEVKYRIDE

SEQ ID NO: 77 - protein, 1526 aa, Bacteroides faecis
  Bacteroides faecis MAJ27
MKKILGLDLGTNSIGWAVLNAADDNSLKYIEAAGSRIIPMDAAILGDFDRGNSISQTAERTRIRGMRHLRERYLLRRARLHRILNLLGFLPFHYAQDIDRYGNFSADMEPKIAWCKNLEGELEFIFIESFNEMLEDFRKNQPELVADNKKVPYDWVIYYLRKKALEKKISKEELAWILLNFNQKRGYYQLRGEDDDESMKTAKTRQYFDKQIIKNIIDTNQTYKGQRILIVELQNGDKGKIFKKEIPDWIGQEKNIIVTVDIDKDGNDKYEESGSLSCRFKIPTDAEWESEWKLIKMKTQKDLDESNKTVGTYIYDSILQNPTQKVRGKLVRTIERKYYKAELKQILEKQTEFHSELQDKDLYIECLNELYSNNDTHRNAITDRDFVYLFMNDILFYQRPLKSKKSLIDNCPYERNIYIDKETGEIKYSPIKCIAKSHPLFQEFRLWKFISSIRIYQRESVVEVVDKQLDLFSSQSTSVQKLVTDVDVTDKFLTCENDYVALFEWLNKKKIIDQKEFLKYRPFGLKGDIDNYRWNYVEDKSYPCNETHAMILTYFAKAGISEDILTKEMEEALWHILYSVEDRQEITKALRTFASKYHLSDSFVKVFSNIPPFKKEYGSYSAKAIKKLLSLMRMGKYWSEDAIDVNTRERIDKIVTGEYDEKIRDRVREKTIRLNDIRHFRALPDWLACYVVYDRHSETREITEWKSPEEIDEYIRNFKQHSLRNPIVEQVITETLRTVRDIWKQVGCIDEIHVELGREMKNPADKRKRITSQIIENENANLRVKALLTEFVNSEFEIENVRPYSLSQQDILRIYEDGVLNSVAEVPGDIAGILKKFNENDAKKRPTTSEILRYKLWLEQKYRSPYTGEMIPLSKLFTSAYEIEHVIPQSRYFDDSFSNKVICEAEVNKLKDNALGYEFIKKHHGEKVELGFGKIVEIFSVSVYEQFVKDNYSRNRGKMKKLLMDEIPEQFIERQLNDSRYISKVVKTLLSNVVREKAEQEAVSKNVIVCTGGVTDRLKKDWGINDVWNKIVLPRFLRLNELTNSTNFTAKNAAGNEIPAMPLELQKGFNKKRIDHRHHAMDAIVIACANRNIVNYLNNESASRKAKISRHDLQAILCDKVRTDDKGNYQWRVKKPWDTFTQDVYVALENIIVSFKQNLRVINKTSNYYWHYENGKKVLVKQVKGDSWAIRKPMHKDTVFGEVNLRKVKSVSLNEALKNPQFIVEKDLKRQLLSLLQQNFDIKKIKKYFEEHKDIWSDISLSKMNIYYFTKETKDRYFATRKPLDASFDKKKIESCITDTGIQQILLRHLELKENDPERAFSPDGIDEMNRNIIQLNKGKGHHPIAKVRVYEKADKFEVGQRGNKSSKFVEAAKGTNLFFAVYETEYPDEKTNSIVRKRNYATIPLNIAIERQKRGLSTAPEDEKGNVPSFVLSPNDLVYLPTSEDIVNGHITQPIDKSRIYKMVSSSGSQCFFIKHNIANIIVDKYEFSPLNKMERAISNEMIKEICIPVKVDRLGNIVKLGKSE

SEQ ID NO: 78 - protein, 1509 aa, Bacteroides fluxus
  Bacteroides fluxus YIT 12057
MKTILGLDLGTNSVGWAVINSVIKEQAERIWIEMAGSRIIPMDAAVLGDFDKGNSISQTSERTRLRGVRRLRERQLLRRERLHKVLNILGFLPNHYLEYIDFEKHPGKFLSDAEPKLPWVKDEQGKYTFLFQAAFDEMLADFAIHQPSLVSGDKKIPYDWTIYYLRKKALTEMISKEELAWILLNFNQKRGYYQLRGEEEEDNAGKSVEFYALKVLTVEATDEKKGRDVWYNVHLENGWIYRRSSSVPLDWEGQIKEFIVTTDLNPDSTPKLDKYGEVKRSFRAPKEDDWMLIKKRTEADIANTHKTVGAYIYDTLLQKPQQKIIGKLVKTVERKLYRDELSLILQKQCAFHAELQDRTLYARCVEALYPNNEVQRRNIANRDFVYLLMDDVLFYQRPLKTKKSLIANCPYEENEYVDRETGEIKKAPLKCIAKSHPLFQEFRLWNFLSNIRIYQKEKEINGTLHLDVDVTAEFLKTEDDYVALFDWLNSRKEIEQKTFLKYPKFGLKKEISNYRWNYVEDKQYPCNETRHAILSRLEKANVCIDFLSNEKEVALWHILYSVSDKQEIEKALRTFAAKNGLDESFVEAFKKFPPFKSEYGAYSAKAIKKLLPLMRCGKYWDVSSIDDTTKERIKKIVAGEYDERIAVKVRDKVMNLSDISCFKRLPLWLACYIVYNRHSEDKEAVKWESPADIDAYLASFKQHSLRNPIVEQVITETLRVVRDIWKQVGRIDEIHIELGREMKNPADKRKRMTAQILENENANLRIKALLAEFMNPEYEIENVRPYSPSQQEILRIYEDMVLHAEDQLPEEIDAILKKFNSSKVPTKSEFLRYKLWLEQKYRSPYTGELIPLGKLFTAAYEIEHVIPQSRYFDDSFSNKVICESAVNKLKDNQLGYEFIKNHHGQKVEVGFGKSVEIFSVDSYERFVKEQYAKSAVKMKKMLMDDIPEQFIERQLNDSRYISKVIKGLLSNIVREKNDSGEYEPEAVSKNIVVCTGSVTDRLKRDWGMNDVWNSIVYPRFERLNSLTDTQSFGHWENKSGKKVFQTELPLEYQKGFSKKRIDHRHHAMDAIVIACATRNHVNYLSNESASRNAKISRYDLQRLLCDKSRTDDNGNYKWVIKKPWDTFTQDAREVLSKIVVSLKQNLRIINKTTNVYRHLDATGNRVYEKQKTGDSWAIRKPMHKDTVFGAVNLRKVKVVRLSVALDAPTMIVDKRVKNKVFELLSYKYDKKRIEKYFKENAVLWKELDLARVAVYYFTEATTEPLVAVRKPLDSTFNEKKIKESVTDTGIQKILLNHLCTKEGKPDLAFSAEGIEEMNRNLLQLNNGKRHQPIYKVRVYEPRGNKFSVGVLGNKGTKWVEAAKGTNLFFAIYITEDGKRTYETIPLNMVIEREKQGLAPVPDKNEKGDKLLFWLSPNDLVYLPTEEELEFGRINEPIDRGRIYKMVSSSGNQCFFIPQSISNAIIPTKELGANNKAERSWDGAMIKNICIPVKVDRLGRIIEVKYRINE

SEQ ID NO: 79 - protein, 1436 aa, Bacteroides fragilis
MKRILGLDLGTNSIGWALVNEAENKDERSSIVKLGVRVNPLTVDELTNFEKGKSITTNADRTLKRGMRRNLQRYKLRRETLTEVLKEHKLITEDTILSENGNRTTFETYRLRAKAVTEEISLEEFARVLLMINKKRGYKSSRKAKGVEEGTLIDGMDIARELYNNNLTPGELCLQLLDAGKKFLPDFYRSDLQNELDRIWEKQKEYYPEILTDVLKEELRGKKRDAVWAICAKYFVWKENYTEWNKEKGKTEQQEREHKLEGIYSKRKRDEAKRENLQWRVNGLKEKLSLEQLVIVFQEMNTQINNSSGYLGAISDRSKELYFNKQTVGQYQMEMLDKNPNASLRNMVFYRQDYLDEFNMLWEKQAVYHKELTEELKKEIRDIIIFYQRRLKSQKGLIGFCEFESRQIEVDIDGKKKIKTVGNRVISRSSPLFQEFKIWQILNNIEVTVVGKKRKRRKLKENYSALFEELNDAEQLELNGSRRLCQEEKELLAQELFIRDKMTKSEVLKLLFDNPQELDLNFKTIDGNKTGYALFQAYSKMIEMSGHEPVDFKKPVEKVVEYIKAVFDLLNWNTDILGFNSNEELDNQSYYKLWHLLYSFEGDNTPTGNGRLIQKMTELYGFEKEYATILANVSFQDDYGSLSAKAIHKILPHLKEGNRYDVACVYAGYRHSESSLTREEIANKVLKDRLMLLPKNSLHNPVVEKILNQMVNVINVIIDIYGKPDEIRVELARELKKNAKEREELTKSIAQTTKAHEEYKTLLQTEFGLTNVSRTDILRYKLYKELESCGYKTLYSNTYISREKLFSKEFDIEHIIPQARLFDDSFSNKTLEARSVNIEKGNKTAYDFVKEKFGESGADNSLEHYLNNIEDLFKSGKISKTKYNKLKMAEQDIPDGFIERDLRNTQYIAKKALSMLNEISHRVVATSGSVTDKLREDWQLIDVMKELNWEKYKALGLVEYFEDRDGRQIGRIKDWTKRNDHRHHAMDALTVAFTKDVFIQYFNNKNASLDPNANEHAIKNKYFQNGRAIAPMPLREFRAEAKKHLENTLISIKAKNKVITGNINKTRKKGGVNKNMQQTPRGQLHLETIYGSGKQYLTKEEKVNASFDMRKIGTVSKLAYRDALLKRLYENDNDPKKAFAGKNSLDKQPIWLDKEQMRKVPEKVKIVTLEAIYTIRKEISPDLKVDKVIDVGVRKILIDRLNEYGNDAKKAFSNLDENPIWLNKEKGISIKRVTISGISNAQSLHVKKDKDGKPILDENGRNIPVDFVNTGNNHHVAVYYRPVIDKRGQLVVDEAGNPKYELEEVVVSFFEAVTRANLGQPIIDKDYKTTEGWQFLFSMKQNEYFVFPNEKTGFNPKEIDLLDVENYGLISPNLFRVQKFSLKNYVFRHHLETTIKDTSSILRGITWIDFRSSKGLDTIVKVRVNHIGQIVSVGEY

SEQ ID NO: 80 - protein, 1436 aa, Bacteroides sp.
MKRILGLDLGTNSIGWALVNEAENKDERSSIVKLGVRVNPLTVDELTNFEKGKSITTNADRTLKRGMRRNLQRYKLRRETLTEVLKEHKLITEDTILSENGNRTTFETYRLRAKAVTEEISLEEFARVLLMINKKRGYKSSRKAKGVEEGTLIDGMDIARELYNNNLTPGELCLQLLDAGKKFLPDFYRSDLQNELDRIWEKQKEYYPEILTDVLKEELRGKKRDAVWAICAKYFVWKENYTEWNKEKGKTEQQEREHKLEGIYSKRKRDEAKRENLQWRVNGLKEKLSLEQLVIVFQEMNTQINNSSGYLGAISDRSKELYFNKQTVGQYQMEMLDKNPNASLRNMVFYRQDYLDEFNMLWEKQAVYHKELTEELKKEIRDIIIFYQRRLKSQKGLIGFCEFESRQIEVDIDGKKKIKTVGNRVISRSSPLFQEFKIWQILNNIEVTVVGKKRKRRKLKENYSALFEELNDAEQLELNGSRRLCQEEKELLAQELFIRDKMTKSEVLKLLFDNPQELDLNFKTIDGNKTGYALFQAYSKMIEMSGHEPVDFKKPVEKVVEYIKAVFDLLNWNTDILGFNSNEELDNQPYYKLWHLLYSFEGDNTPTGNGRLIQKMTELYGFEKEYATILANVSFQDDYGSLSAKAIHKILPHLKEGNRYDVACVYAGYRHSESSLTREEIANKVLKDRLMLLPKNSLHNPVVEKILNQMVNVINVIIDIYGKPDEIRVELARELKKNAKEREELTKSIAQTTKAHEEYKTLLQTEFGLTNVSRTDILRYKLYKELESCGYKTLYSNTYISREKLFSKEFDIEHIIPQARLFDDSFSNKTLEARSVNIEKGNKTAYDFVKEKFGESGADNSLEHYLNNIEDLFKSGKISKTKYNKLKMAEQDIPDGFIERDLRNTQYIAKKALSMLNEISHRVVATSGSVTDKLREDWQLIDVMKELNWEKYKALGLVEYFEDRDGRQIGRIKDWTKRNDHRHHAMDALTVAFTKDVFIQYFNNKNASLDPNANEHAIKNKYFQNGRAIAPMPLREFRAEAKKHLENTLISIKAKNKVITGNINKTRKKGGVNKNMQQTPRGQLHLETIYGSGKQYLTKEEKVNASFDMRKIGTVSKSAYRDALLKRLYENDNDPKKAFAGKNSLDKQPIWLDKEQMRKVPEKVKIVTLEAIYTIRKEISPDLKVDKVIDVGVRKILIDRLNEYGNDAKKAFSNLDKNPIWLNKEKGISIKRVTISGISNAQSLHVKKDKDGKPILDENGRNIPVDFVNTGNNHHVAVYYRPVIDKRGQLVVDEAGNPKYELEEVVVSFFEAVTRANLGLPIIDKDYKTTEGWQFLFSMKQNEYFVFPNEKTGFNPKEIDLLDVENYGLISPNLFRVQKFSLKNYVFRHHLETTIKDTSSILRGITWIDFRSSKGLDTIVKVRVNHIGQIVSVGEY

SEQ ID NO: 81 - protein, 1512 aa, Bacteroides nordii
  Bacteroides nordii CL02T12C05
MKNILGLDLGTNSIGWAVINSEEDGPIVKKRIELAGSRIIPMDAAVLGNFDSGVTKSQTAERTSFRSIRRLRERQLLRRERLHKVLQILGFLPEHYVNDIDFENHPGKIKRNTEPKLPWRKNSMGQFEFIFQDSFEAMLTDFATHQPVFVSEGKKVPYDWTLYYLRKKALTEGISKEELAWLILNFNQKRGYYQLRGEEEEEQSNKLVEFYALRVVKVEATDDKKGKDTWYNVHLENGWIYRRTSNIPLDWEGKVKEFIVTTDLNEDGTPKLDKYGEVKRSFRAPKEDDWTLIKKKTESDIANSHKTVGCYIYDALLQNPHQKIKGRLVRTVERKFYKEELRLILEKQLSFHPELQDRDLYRACIDALYVSNEAHKNNISGRDFVYLFIDDIIFYQRPLKTKKSLIDNCPYEENQYMDRETGEVKQAPIKCIAKSHPLFQEFRLWQFISNIRIYQRERVLDDGKLETDVDVTPDFLKTEDDYTTLFEWFNDRKEVDQKAFLKNPQFGLKKTFTEYRWNYVEDKSYPCNETRNAILNGLQKAGVSADFLSREVEEALWHILYSVEDKIEIESALRKFASKHDLDDRFADVFKKLPPFKKEYGAYSAKAIKKLLPLMRIGKYWELSNIDDKTKERIDKIITGEWDENIHDRVREKAIKLSDITDFKGLPLWLSCYVVYNRHSEARAIAKWESPEDIDSYLRLFRQHSLRNPIVEQVITETLRTVRDIWKRVGQIDEIHVELGREIKNPADKRAKMTAQIVENENTNLRIKALLAEFINSEYEIENVRPYSSNQQEKLKIYEDTVLNGVKEIPEDINTILKKFRESDLKKRPTKSDFLHYKLWLEQKYCSPYTGRIIPLGKLFTSAYEIEHIIPQAHYFDDSFSNKVICEAEVNGLKDKKLGYEFIKHNPGKMVEIGFGKPPVRIFSVEEYERFVKENYSGIKNKMNKLLMDDIPETFIERQLNDSRYISKVVKSLLSNIVREKDSNGEYEPEAISKNVIVCTGSVTDRLKRDWGVNDVWNSIIYPRFERLNELTGSQQFGCWENKEGKRVFQTAVPLEMQKGFSKKRIDHRHHAMDAIVIACATRNHINYLSNESASKKAKISRTDLQRLLCTKCRTDDNGNYKWIVKKPWPAFTQDIRKALENITVSFKQNLRVINKTTNYYVHFDESGKKVLEKQINGDSWAIRKPMHKDTVFGKVNLQKVKEVRLSLALDTPKMIVDKKLKEKVLQLYSYKYDKKRIDKYFKENASLWKDLNLSKVAVYYFTNDSTEPLVAVRKPLDTSFNAKKIKESVTDTGIQKILLNHLSNNQDDPNLAFSPDGIDKMNKNLTALNDGKYHQPIYKVRVCEPQGNKFSVGTSGNKTSKYVEAAKGTNLFFAVYQTEDGKRSYETIPLNVVIEREKLGWTPVPENNNNGDKLLFWLSPNDLVYVPTADELNNGMRLDNMDKGRIYKMISCSGPQCFFIPQNVSNAIIPVIELGANNKAEKSWNNEMIKVVCVPIRVDRLGCITQINNQK

SEQ ID NO: 82 - protein, 1436 aa, Bacteroides sp.
  Bacteroides sp. 2_1_16
MKRILGLDLGTNSIGWALVNEAENKDERSSIVKLGVRVNPLTVDELTNFEKGKSITTNADRTLKRGMRRNLQRYKLRRETLTEVLKEHKLITEDTILSENGNRTTFETYRLRAKAVTEEISLEEFARVLLMINKKRGYKSSRKAKGVEEGTLIDGMDIARELYNNNLTPGELCLQLLDAGKKFLPDFYRSDLQNELDRIWEKQKEYYPEILTDVLKEELRGKKRDAVWAICAKYFVWKETYTEWNKEKGKTEQQEREHKLEGIYSKRKRDEAKRENLQWRVNGLKEKLSLEQLVIVFQEMNTQINNSSGYLGAISDRSKELYFNKQTVGQYQMEMLDKNPNASLRNMVFYRQDYLDEFNMLWEKQAVYHKELTEELKKEIRDIIIFYQRRLKSQKGLIGFCEFESRQIEVDIDGKKKIKTVGNRVISRSSPLFQEFKIWQILNNIEVTVVGKKRKRRKLKENYSAIFEELNDAEQLELNGSRRLCQEEKELLAQELFVRDKMTKSEVLKLLFDNPQELDLNFKTIDGNKTGYALFQAYSKMIEMSGHEPVDFKKPVEKVVEYIKAVFDLLNWNTDILGFNSNEELDNQSYYKLWHLLYSFEGDNTPTGNGRLIQKMTELYGFEKEYATILANVSFQDDYGSLSAKAIHKILPHLKEGNRYDVACVYAGYRHSESSLTREEIANKVLKDRLMLLPKNSLHNPVVEKILNQMVNVINVIIDIYGKPDEIRVELARELKKNAKEREELTKSIAQTTKANEEYKTLLQTEFGLTNVSRTDILRYKLYKELESCGYKTLYSNTYISREKLFSKEFDIEHIIPQARLFDDSFSNKTLEARSVNIEKGNKTAYDFVKEKFGESGADNSLEHYLNNIEDLFKSGKISKTKYNKLKMAEQDIPDGFIERDLRNTQYIAKKALSMLNEISHRVVATSGSVTDKLREDWQLIDVMKELNWEKYKALGLVEYFEDRDGRQIGRIKDWTKRNDHRHHAMDALTVAFTKDVFIQYFNNKNASLDPNANEHAIKNKYFQNGRAIAPMPLREFRAEAKKHLENTLISIKAKNKVITGNINKTRKKGGVNKNMQQTPRGQLHLETIYGSGKQYLTKEEKVNASFDMRKIETVSKSAYRDALLKRLYENDNDPKKAFAGKNSLDKQPIWLDKEQMRKVPEKVKIVTLEAIYTIRKEISPDLKVDKVIDVGVRKILIDRLNEYGNDAKKAFSNLDKNPIWLNKEKGISIKRVTISGISNAQSLHVKKDKDGKPILDENGRNIPVDFVNTGNNHHVAVYYRPVIDKRGQLVVDEAGNPKYELEEVVVSFFEAVTRANLGLPIIDKDYKTTEGWQFLFSMKQNEYFVFPNEKIGFNPKEIDLLDVENYGLISPNLFRVQKFSLKNYVFRHHLETTIKDTSSILRGITWIDFRSSKGLDTIVKVRVNHIGQIVSVGEY

SEQ ID NO: 83 - protein, 1517 aa, Bacteroides sp.
  Bacteroides sp. 20_3
MKKIVGLDLGTNSIGWALINAYINKEHLYGIEACGSRIIPMDAAILGNFDKGNSISQTADRTSYRGIRRLRERHLLRRERLHRILDLLGFLPKHYSDSLNRYGKFLNDIECKLPWVKDETGSYKFIFQESFKEMLANFTEHHPILIANNKKVPYDWTIYYLRKKALTQKISKEELAWILLNFNQKRGYYQLRGEEEETPNKLVEYYSLKVEKVEDSGERKGKDTWYNVHLENGMIYRRTSNIPLDWEGKTKEFIVTTDLEADGSPKKDKEGNIKRSFRAPKDDDWTLIKKKTEADIDKIKMTVGAYIYDTLLQKPDQKIRGKLVRTIERKYYKNELYQILKTQSEFHEELRDKQLYIACLNELYPNNEPRRNSISTRDFCHLFIEDIIFYQRPLKSKKSLIDNCPYEENRYIDKESGEIKHASIKCIAKSHPLYQEFRLWQFIVNLRIYRKETDVDVTQELLPTEADYVTLFEWLNEKKEIDQKAFFKYPPFGFKKTTSNYRWNYVEDKPYPCNETHAQIIARLGKAHIPKAFLSKEKEETLWHILYSIEDKQEIEKALHSFANKNNLSEEFIEQFKNFPPFKKEYGSYSAKAIKKLLPLMRMGKYWSIENIDNGTRIRINKIIDGEYDENIRERVRQKAINLTDITHFRALPLWLACYLVYDRHSEVKDIVKWKTPKDIDLYLKSFKQHSLRNPIVEQVITETLRTVRDIWQQVGHIDEIHIELGREMKNPADKRARMSQQMIKNENTNLRIKALLTEFLNPEFGIENVRPYSPSQQDLLRIYEEGVLNSILELPEDIGIILGKFNQTDTLKRPTRSEILRYKLWLEQKYRSPYTGEMIPLSKLFTPAYEIEHIIPQSRYFDDSLSNKVICESEINKLKDRSLGYEFIKNHHGEKVELAFDKPVEVLSVEAYEKLVHESYSHNRSKMKKLLMEDIPDQFIERQLNDSRYISKVVKSLLSNIVREENEQEAISKNVIPCTGGITDRLKKDWGINDVWNKIVLPRFIRLNELTESTRFTSINTNNTMIPSMPLELQKGFNKKRIDHRHHAMDAIIIACANRNIVNYLNNVSASKNTKITRRDLQTLLCHKDKTDNNGNYKWVIDKPWETFTQDTLTALQKITVSFKQNLRVINKTTNHYQHYENGKKIVSNQSKGDSWAIRKSMHKETVHGEVNLRMIKTVSFNEALKKPQAIVEMDLKKKILAMLELGYDTKRIKNYFEENKDTWQDINPSKIKVYYFTKETKDRYFAVRKPIDTSFDKKKIKESITDTGIQQIMLRHLETKDNDPTLAFSPDGIDEMNRNILILNKGKKHQPIYKVRVYEKAEKFTVGQKGNKRTKFVEAAKGTNLFFAIYETEEIDKDTKKVIRKRSYSTIPLNVVIERQKQGLSSAPEDENGNLPKYILSPNDLVYVPTQEEINKGEVVMPIDRDRIYKMVDSSGITANFIPASTANLIFALPKATAEIYCNGENCIQNEYGIGSPQSKNQKAITGEMVKEICFPIKVDRLGNIIQVGSCILTN

SEQ ID NO: 84 - protein, 1424 aa, Bacteroides sp.
  Bacteroides sp. 3_1_19
MKRILGLDLGTNSIGWALVNEAETDEEVSSIIRLGVRVNPLTVDETQNFEKGKSITTNAERTLKRSMRRNLQRYKLRRDALVEFLKELGFITDETILSEQGNRTTFETCRLRAKAAEEEISLEELSRVLLMINKKRGYKSSRKVKKEEDGVLIDGMEIAKKLYEEDLTPGQLCSQLLESGKKVLPDFYHSDLQEELDRIWSVQKQFHPDVFCDAAKEEIKGKNRSQTWAILANYFVWKEEVVGWNDREAKNETIEKECKLVGLKRTTKGYELKKENYRWRAQALTEQLGLEEIAVVLQEINGQINASSGYLGAISDRSKVLYFNHQTVGQYQMAELDKNPHASLRNMVFYRQDYLDEFDRIWEKQAEFHKELTAELKKEIRDMIIFYQRRLKSQKGLISFCEFERLEIVVEKDGKKQTKVIGCKVIPRSHPLFQEFKVWQTLNDIKVLGREKKRNALSASESRALYPEEKEILARELAIKENMKKADVLKLLFENPQELDLNFKQIDGNRTGFSLFSAYSKMIEKYGYEPLDFKKPADEIIGQLRTIFTDLGWNTNLFTIDLTKEGKELEMQPYFRLWHLLYSFEGDNTSTGNGKLIEKIMQLCGVEKEYAVELASLSFQDDYGSLSAKAIKRILPYLKEGNLYDVACEYAGYRHSKSSLTKEEIENKVLKGKLEVLPKNSLRNPVVEKILSQMVNVINTIIDTYGKPDEIRVELARELKKSAKEREELTKAIAKSTREHEEIRKLLQDEFGMMNVSRNDIIRYKLYEELKDNGYKTLYSNQYIPKEKIFSKEIDIEHIIPQSRLFDDSLSNKTLEYKAINIEKGNKTAYDFVKEKYGEEGLQQYINRCESLFNDKKAKLRKLKMEQKDIPDGFIDRDLRNTQYIAKKALAMLNEICRRVVATTGSITDQLREDWQLVDVMKELNLPKYEALGFVETYEDKDGRKIKRIKDWTKRNDHRHHAMDALTVAFTKDAFIQYFNNKNAAQDSGNRNHTNIIGIKTRYFDKGRALPPIPLEQFRIEAKQHLEKLLVSIKAKNKVVTVNVNRTKKRKGENTKIQQTPRGQLHLETVYGSHKQYVTKIEKVNASFDAAKIATVSKRAYRNALLKRLETFGNDPKKAFTGKNALEKNPLYADKYQTIRVPEKVQTVEFETIYTIRKPVDPALNVDKVVDVKVRAILERRLKEYGGDPKKAFVNFWENPIWLNKEKGISIKRVSIRGINNAQSIHVKKDKNGNPIWDENGKQIPVDFVNTGNNHHVAIYRKPVLDKKGQVTFDEDGNLMYELDEVVVPFFEAVTRANLGLPIIDKDYRKSEGWQFLFSMKQNEYFVFPNEKTGFNPKEVDLLNPDNYAMISPNLFRVQTMSKVMYGNNVVRDYKFRHHLETTVKDMKELKDIAYKQYKTLSFGNSVVKIRINHIGQIVSVGEY

SEQ ID NO: 85 - protein, 1510 aa, Bacteroides sp.
  Bacteroides sp. D2
MKRILGLDLGTNSIGWALVDSEEQRILGMGSRIIPMDQGVLDTFSGGNPVETQTAARTAYRGTRRLRERALLRRERLIRVLNMMKFLPEHYASQIDFEKRLGQFFDEKEPKLAWKQNDEGRFEFIFQQSFNEMIEEFKNKGVVREDKKIPYDWTIYYLRKKALSQEIEKEELAWILLNFNQKRGYYQLRGEEEEENPNKLVEYYSLKIVDVIADEKPNSKGDIWYSLHLENGWIYRRSSKIPLFGWKDKTRDFIVTTDLNDDGTVKKDKEGIEKRSFRAPSENDWVLLKKKTESDIEKSHKTVGAYVYETLLQNPMQKVRGKLVRTIERKFYKDELKQILEKQREFHPELRDEDLYNDCVRELYRSNETYQFILSKRDFVHLFLDDILFYQRPLRSQKSAIGDCILEFKTYKDKDGNNIKEYLKVISKSNPLYQEFRIWQWLYNLKIYRKEDDEDVTLQFIANIEDKEQLFDFLSNRKSIEQKPLLEYLIKAKGLKKQVKTEAYRWNYVEDKIYPCSETKTMISTRLAKVENIPDNFFTKEIEQKLWHIIYSVTDKNEFEKALRTFAKKYDLDIASFVDNFKKIPPFKNEYGSFSEKAIKKLLPLMRLGKYWKWNDIDNNTQNRISKIITGEYDEEIKDIVREKSIALTNENDFQGLQLWLAQYLVYGRHSEADIAGKWHSVADLEKYLNEFKQHSLRNPIVEQIITETLRVVRDIWRKYGQGAENFFSEIHVELGRDMKNTADERKKIVNVVTENENTNLRIKALLMELKNNSDGKLEVENVRPYSPTQQDILKIYEEYAISTGLDNEKDEKVKEDIKKISRVAQPTTTELQRYKLWLEQKYCSPYTGKVIPLGKLFTEEYQIEHIIPKSRYYDDSFSNKVICEAAVNKLKDKCLGLEFIKNYHGQIVETGFGQKVTIFDEEAYQNFVKQHYAYNRSKRTKLLLEEIPEKMIERQMNDTRYISKFVLPLLSNLVRAEENDNGVNSKNVLPVNGKITTMLKQDWGLNDVWNDLILPRFVRMNELAKTIAFTSWNEQHQKYLPTVPLELSKGFQKKRIDHRHHAMDALVIACATRDHVNLLNNKHANTDTIRYDLQRKLRLFERVTYIDPQTKNNVTKDIPKEFKKPWDNFTVDARNELEKIIVSFKQNLRIINKATNIYTKYENGKKIKVGQKGLNWAIRKPLHKETVFAKVSLRKRKTVRLSEALKDWKKIVDKKLKQEIKRLTCQYGKFDVDTILRYFKDRKYQFGEVDVSKVKMYYFDEENAAVRKNVDTSFTEKFIQGSVTDTGIQKILLNHLEAKGNKVEIAFSPEGIEEMNKNIIQLNEGKLHLPIFKVRVYETIGNKFSVGVKGNKKDKYVEAAKGTNLFFAIYVDENGIRSYETIPLNIVIERLKQGLSVVPEKNRKEHSLLFYLSPNDLVYVPIEDERENIHAVNLDQLNNEQRKRIYKMVSCTGSECHFVPYYVASPIVNKVEYSSLNKIGRSLTGEMIKDVCIKLKVDRLGNVKGISGL

SEQ ID NO: 86 - protein, 1436 aa, Bacteroides sp.
  Bacteroides sp. D2
MKRILGLDLGTNSIGWALVDEAENKDERSSIVKLGVRVNPLTVDELTNFEKGKSITTNADRTLKRGMRRNLQRYKLRRETLMEVLKEHKLITEDTILSENGNRTTFETYRLRAKAATEKISLEEFARVLLMINKKRGYKSCRKAKGAEEGTLIDGMDIARELYNNNLTPGELCLQLLDAGKKYLPDFYRSDLQNELDRIWEKQKEYYPEILTEVLKEELRGKKRDAVWAICAKSFVWEEYYTEWNKEKGKTEQQEREHKLEGIYSKRKRDEAKRENLQWRVNGLKEKLSLEQLVIVLQEMNIQINNSSGYLGAISDRSKELYFNKQTVGQYQMEMLDKNPNASLRNMVFYRQDYLDEFNTLWEKQAEYHKELTGELKKEIRDIVIFYQRRLKSQKGLVGFCEFESRQIEVEIDGKKKIKTVGNRVIPRSSPLFQEFKIWQILNNIEVTVVGKKGKRRKQKDNSPTLFDGLDDTEQLELNGSRYLYQEEKELLAQELFVRDKMTKSDVLKLLFDNPQELDLNFKTIDGNKTGYTLFQAYSKMIEMSGHEPVDFKKTVEKVVEHVKAVFDLLNWNTDILGFNSNEELDNQSYYKLWHLLYSFEGDNTPTGNARLVQKITELYGFEKEYAIILANVTFQDDYGSLSAKAIHKILPHLKEGNRYDVACAYAGYKHSESSLTKEEIANKALKDRLTLLPKNNLRNPVVEKILNQMVNVINAIIDTYGKPDEIRVELARELKKNAKEREELTKFIAETTRKHEEFKILLQSEFGLTNVSRTDILRYKLYKELESCGYKTLYSNTYIPREKLFSKEFDIEHIIPQARLFDDSFSNKTLEARSINLEKGNKTAYDFVKEKFGESGADNSLDHYLNNIEDLFKSGKISKTKYNKLKMAEQDIPDGFINRDLRNTQYIAKKALSMLNEISRRVVATSGTITDKLRQDWQLVDVMKELNWEKYKALGLVEYFEDKDGRQIGRIKDWTKRNDHRHHAMDALTVAFTKDIFIQYFNNKNASLNSNTNEYAIKNKYFQNGRAIAPIPLREFRVEAKKHLENTLISIKAKNKVVTGNINKTKKRGGVNKYLQQTPRGQLHLETIYGSGKQYLTKEEKVNASFDMKKIATVSKSAYRDVLLKRLHENDNDPKKAFTGKNSLDKQPIWLDKEQTRKVPEKVKTVTLETIYTVRKEISPDLKVDKVIDAGVRKILTGRLNEYGNDAKKAFSNLDENPIWLNKEKGISIKRVTISGISNAQSLHVKKDKDGKPILDEDSRNIPVDFVNTGNNHHVAVYRRPVIDKRGQLVIDEAGNPKYELEEVVVSFFEAVTRANLGQPIIDKDYKTSEGWQFLFSMKQNEYFVFPNEKTGFNPKEIDLLDAENYGVISPNLFRVQKFAHKNYVFRHHLETTIKDTSSILKGITWIDFRSSKGLDAIVKVRVNHIGQIVSVGEY

SEQ ID NO: 87 - protein, 1508 aa, Bacteroides uniformis
  Bacteroides uniformis CL03T00C23
MRTILGLDLGTNSIGWAVINSVIKEQTERIWIEMAGSRIIPMDAAILGDFDKGNSISQTAERTRFRGVRRLRERQLLRRERLHKVLKILGFLPEHYLKGIDFEKHTGKFLSGSEPKLPWVKDRWGKYSFLFQTAFNEMLADFAKHQPSLVFDGKKIPYDWTVYYLRKKALTEMISKEELAWILLNFNQKRGYYQLRGEEEEDNAGKSVEFYALKVLSVEATDEKKGRDIWYNVHLENGWVYRRSSNVPLDWEGRVKEFIVTTDLNPDGTPKLDKYGEVKRSFRAPKEDDWMLIKKRTEADITGTHKTIGSYIYDALLQEPQQKIIGKLVKTVERKFYKEELNFILQKQCAFHAELQDRDLYMRCIEALYPGNEVQRRNIANRDFIYLLIDDVLFYQRPLKTKKSLIANCPYEENEYVNRKTGEIKTAPLKCIAKSHPLFQEFRLWYFLSNIRVYQKEREVNGTLHLDVDVTTEFLKTEDDYVALFDWLNSRKEIDQKAFLRYPAFGLKKEINNYRWNYVEDKFYPCNETRHAILSRLEKAGIGIDFLSDEKETALWHILYSVSDKQEIEKALATFAVKNGLNESFVEVFKKFPPFKSEYGAYSAKAIKKLLPLMRCGKYWDMSLIDGTTKERIERIIAGECDESIGAKVREKAMNLSDISCFKRLPLWLACYVVYNRHSEDKEITKWETPADIDAYLAAFKQHSLRNPIVEQVITETLRVVRDIWKQVGKIDEIRIELGREMKNPADKRKRMTTQILENENANLRIKALLAEFVNPEYGVENVRPYSPSQQEILRIYEDAVLKGEEQIPEDIDVILKKFNTSKLPTKSEFLRYKLWLEQKYRSPYTGELIPLAKLFTAAYEIEHVIPQSRYFDDSFSNKVICESAVNKLKDNQLGYEFIKNHHGQKVEVGFGKTVEIFSVDSYERFVKEQYAKSGIKMKKLLMDDIPEQFIERQLNDSRYISKVVKGLLSNIVREKNDSGEYEPEAVSKNILVCTGSVTDRLKKDWGMNDVWNSIVSPRFERLNALTETQCFGHWENKDGKKVFQTAVPLEYQKGFSKKRIDHRHHAMDAIVIACATRNHVNYLNNESASRNAKISRYDLQRLLCDKSRGDGNGNYRWIIKKPWTTFTQDAREALSGIIVSLKQNLRIINKTTNIYQHFDANGTRVYEKQKIGDSWAIRKPMHKDTVFGAVNLRKVKVVRLSVALDTPSMIVNKRVKNKVLELLSYKYDKKKIEKYFKENAFLWKELDIAKVAVYYFTENTTEPLVAVRKSLDSTFNEKKIASVTDTGIQKILLNHLKSKEGKAELAFSAEGIEEMNRNLLQLNDGKGHQPIYKVRVYEPRGNKFKVGVLGNKGAKWVEAAKGTNLFFAIYITEDGNRTYETIPLNWVIEREKQGLVPVPDRNEKGDKLLFWLSPNDLVYLPTEEERDFGRINEPIDRGRIYKMVSSSGNQCFFIPQSISNAIISTKELGSNNKAEKSWDGEMIKNICIPVKVDRLGRIIEVKYRVNE

SEQ ID NO: 88 - protein, 1504 aa, Bacteroides vulgatus
  Bacteroides vulgatus CL09T03C04
MKNIVGLDLGTNSIGWAVVNGSVNDDGSEQLVKIQASGSRIIPMDAAMIGDFNKGNSISQTAERTRLRGVRRLSERYLLRRERLHRILDILGFLPFHFAQDLDRHGKIVKGKEPKLAWRKNEAGQFEFIFQDSFKEMLEDFKLNHPNLITDDKKVPYDWTIYYLRKKGLTSKISKEELAWILLNFNQKRGYYQLRGEEEEENKNKLVEFYALKVVAVEDSGEKKGKDIWYNVHLENGWVYRRTSNMPLDWVGKTKEFIVTTDLEKDGTPKKDKEGNVKRSFRAPKEDDWSLLKKKTEADIDQTHKTVGVYIYDTLLGNPSQKIRGRLVRTIERKYYKEELKQILEKQKEFHLELQDRALYAACIEELYPINEAHRNNVGNRDFTYLFLEDILFYQRPLKSKKSLIDNCPYEENQGLDKETGEIKSFPVKCIAKSHPLFQEFRLWQFIVNLRIYRKDLAQDVDVTNELLKTEEDYVALFDWLNGKKEIDQKAFLKYPVFGLKKEIENYRWNYVQDKPYPCNETRSLMLARLEKCDISIEFLTKENEEALWHILYSVEDKNEIVKALQKFADKHDLNASFVDVFQKFPPFKKEYGSYSAKAIKKLLPLMRMGKYWSENSIDKGTRERIDKIITGEYDEKIENRVREKAIHLADVSDFKGLPLWLVCYIVYGRHSEAKEITQWKSPADIDSYLRSFKQHSLRNPIVEQIIIETLRVVRDIWKQVGNIDEIHVELGREMKNPADKRKKMTQQMSENENTNLRIKYLLTEFLNPEYEVENVRPYSPSQQDILRIYEEGVLNSVSDLPEEISDILKKFTETDLKKRPSRSEILRYKLWLEQKYRSPYTGEVIPLGKLFTPAYEIEHVIPQSCYFDDSFSNKVICEAEVNKLKSNLLGHEFIVKHHGEIVELPFGKKVRIFTVDEYEQFVKDNYSRTRSKMKKLLMDDIPEEFVTRQLNDSRYISKVVKSLLSNIVREKGEEEAISKNVIPCTGGVTDRLKKDWGINEVWNKIILPRFQRLNELTGTNKFTTKNVGIQEIPTMPLELQKGFNKKRIDHRHHAMDAIIIACANRNIINYLNNESATAKAELSRYDLQKMLCDKAKTDNNGNYKWVIRKPWASFTQDTYLALENIIVSFKQNLRVINKATNRFLHYNEEGKKIFVKQGKGDNWAIRKSMHKDTVFGEVNLRRIKTVALNEAMKNPQSIVVKDFKRKLLELWNLGFDAKRIKKYFEDNRETWSDINLSKIEVYYFSKDTKDRFFATRKPLDTSFDRKKIENNITDTGIQKILLRHLELKDNNPDIAFSPDGIDEMNRNIIQLNNGKYHQPIIKIRWYEQADKFAVGQTGNKFSKFVEAAKGTNLFFAVYESNILDKKTNTIIKKRNYATIPLNVAIERQKQGLPVAPEDENGNDPIFVLSPNDLVYLPTDDELANGIIAQPLDRGRIYKMVSCTGNEGHFIPARIANPILQTIELGSNNKAQKAWTDEMIKEICMPIKVDRLGNVLESSSSYKK

SEQ ID NO: 89 - protein, 1434 aa, Unknown
  Description of Unknown: Bacteroidetes oral taxon 274 str. F0058 polypeptide
MKNILGLDLGTNSIGWAYVKQAQNDSEKSEIAELGVRVNPLTVDEKTNFEKGKPISTNADRTLKRGARRNLQRYKLRRQELIELLKDYQVISDKTILAEDGKETTFETLRLRVKSAKEQVSLEELARILLMINKKRGYKSSRKAKNEDEGQLIDGMEIARRLYDENLTTGQLSLQLLKEGKKSLPDYYRSDLQHELDKVWNFQKQFHPDILTDEFYTSIQGKGQKATRESFSSKYGIDTAENKGSREEKKLQAYQWRADATHKELTKEELAFVITEINNNINNSSGYLGAISDRSKELIFANETVGEYLWKQIQNDPHTSLKNQVFYRQDYFDEFERIWETQSGFYPQILTESLKNELRDILIFYQRKLKSQKALVSICEFESKEIPLKDKQGNPISKNGIPVTKLVGPKVAPKSSPLFQEFKIWQNLNNVLVRPKGSRKRKVTTNQQSTLLEGQEPVFELNLEQKELLFEELNLKGNLKTDYCLELIGYSAKEWEMNYPTLEGNKTNKALYEAYLKIIDSEGYDAKKLLKVKTDKDDINLDDIKVSASEIKTMISDIFNELGINTKILDFDAELERKQFEAQASYRLWHLLYSYEGDDSKSGNELLYRLLEDKFGFKREHSKTLANVSLLSDYGNLSTKAIRTIYPYIKENKFSTACELAGYRHSKLSISKEENENRTLKDTLDVLKKNSLRQPVVEKILNQMINLINELIEKHSEKDEKGNIVKYFKFDEIHIELARELKKNAEERRELDSKVREGKDRNEKIITILKSEFGLPYPTKNDITRYRLYEELKDNGYKDLYTNTYIPREKLFSKEIDIEHIIPKSRLFNDSFSNKTICYRQDNLNKGERTAYDYIEGLGKTQLDEYLNRVENLYTNKFITKAKYRNLLKKESEIGDGFIERDLRETQYIAKKAKEMLLQITRHVVSTTGSITDRLRDDWELVNVMRELNLPKYKVLGLTEIQERKNGQTVEVITDWTKRNDHRHHAMDALTVAFTKHSHIQYLNFLNARKDEKHKEYSNIMGIQQLETEKTTDKDGKDRRVFKTPIPNFRQVAKEHLESILISHKTKNKVVTRATNKIAGSKKQQETLSPRGQLHKETVYGKYRRYVQKEEKIGSKFDLQTIERVANPLYKRLLTKRLEENGGDPKKAFTGKNALAKSPIYLDETQTQQLPEKVKLVWLETDFSIRKDITPDNFKDEKSIDKVLDEGIKRILKDRLKSFDGDAKRAFTDLEQNPIWLNKEKGIAIKRVTISGVSNAEPLHTKKDHLGNEIFDDTGKPIPVDYVSTGNNHHIAIYRDENGNLQEKAVSFFEAVTRANQGLPTVDKTYNQHLGWQFLFTMKQNEMFVFPNKETGFDPQEIDLLDPKNKKLISPNLFRVQKISTKNYFFRHHLETSVETHNALNGVTYKSQLGLNGITDIIKVRINHLGDIVHIGEY

SEQ ID NO: 90 - protein, 1153 aa, Barnesiella intestinihominis
  Barnesiella intestinihominis YIT 11860
MKNILGLDLGLSSIGWSVIRENSEEQELVAMGSRVVSLTAAELSSFTQGNGVSINSQRTQKRTQRKGYDRYQLRRTLLRNKLDTLGMLPDDSLSYLPKLQLWGLRAKAVTQRIELNELGRVLLHLNQKRGYKSIKSDFSGDKKITDYVKTVKTRYDELKEMRLTIGELFFRRLTENAFFRCKEQVYPRQAYVEEFDCIMNCQRKFYPDILTDETIRCIRDEIIYYQRPLKSCKYLVSRCEFEKRFYLNAAGKKTEAGPKVSPRTSPLFQVCRLWESINNIVVKDRRNEIVFISAEQRAALFDFLNTHEKLKGSDLLKLLGLSKTYGYRLGEQFKTGIQGNKTRVEIERALGNYPDKKRLLQFNLQEESSSMVNTETGEIIPMISLSFEQEPLYRLWHVLYSIDDREQLQSVLRQKFGIDDDEVLERLSAIDLVKAGFGNKSSKAIRRILPFLQLGMNYAEACEAAGYNHSNNYTKAENEARALLDRLPAIKKNELRQPVVEKILNQMVNVVNALMEKYGRFDEIRVELARELKQSKEERSNTYKSINKNQRENEQIAKRIVEYGVPTRSRIQKYKMWEESKHCCIYCGQPVDVGDFLRGFDVEVEHIIPKSLYFDDSFANKVCSCRSCNKEKNNRTAYDYMKSKGEKALSDYVERVNTMYTNNQISKTKWQNLLTPVDKISIDFIDRQLRESQYIARKAKEILTSICYNVTATSGSVTSFLRHVWGWDTVLHDLNFDRYKKVGLTEVIEVNHRGSVIRREQIKDWSKRFDHRHHAIDALTIACTKQAYIQRLNNLRAEEGPDFNKMSLERYIQSQPHFSVAQVREAVDRILVSFRAGKRAVTPGKRYIRKNRKRISVQSVLIPRGALSEESVYGVIHVWEKDEQGHVIQKQRAVMKYPITSINREMLDKEKVVDKRIHRILSGRLAQYNDNPKEAFAKPVYIDKECRIPIRTVRCFAKPAINTLVPLKKDDKGNPVAWVNPGNNHHVAIYRDEDGKYKERTVTFWEAVDRCRVGIPAIVTQPDTIWDNILQRNDISENVLESLPDVKWQFVLSLQQNEMFILGMNEEDYRYAMDQQDYALLNKYLYRVQKLSKSDYSFRYHTETSVEDKYDGKPNLKLSMQMGKLKRVSIKSLLGLNPHKVHISVLGEIKEIS

SEQ ID NO: 91 - protein, 1352 aa, Belliella baltica
MKKILGLDLGTTSIGWAFIKEPEKDVVGSEIVDMGVRIVPLSSDEENDFAKGNTISINADRTLKRGARRNLQRFKQRRNALLEIFKEKKLISTNFKYAEDGPSSTFSTLNLRAKAAKEKIELQDLVKVLLQINKKRGYKSSRKAKSEEDDGSAIDSMGIAKELYENDLTPGQWVYEALQKGRKNVPDFYRSDLQEEFKKIVNYQSEFFPDIFNASFVEDWMGKASTPTKQYFNKKGVQLAENKGKREERRLQEYKWRAEAVNFKIDLSEIALILSQINSQISNSSGYLGAISDRSKELYFKNLTVGQYLYQQIKKNPHTRLKGQVFYRQDYLDEFERIWSVQSSFYPQLNDALKREVRDITIFFQRRLKSQKHLISNCEFEDHHKVVPKSHPVFQEFRIWQNLNNLLLIKKDNLNEKFDLELESKIALANELAFKRELNVKDALKILGLKPNEWEFNFTKIEGNRTNQAFFDAFAKIIELEDGEPIDLGDLKADDILDQFSEAFLRIGIDTELLQVNSDIEGAEYEKQSYIQFWHLLYSSEDDQKLKLNLIRKFGFKPEHAKILASISLQDDHASLSSRAIKKILPHLQSGLIYDKACTYAGYNHSSSFTKDENEKRELRAELELLKKNSLRNPVVEKILNQMINVVNAILKDPELGRPDEIRVEMARELKANAEQRKNMTSNIASATRDHDKYREILKSEFGLKRVTKNDLLRYKLWLETDGISLYTGKPIEASKLFSKEYDIEHIIPKARLFDDSFSNKTICERQLNIDKANVTAFSFLQNKLSADEFEQYQSRVKSLYGKLSKAKIQKLLMANDKIPEDFIARQLQETRYISKKAKEILFEISRRVSVTTGTITDKLREDWGLVEIMKELNWEKYDKLGLTYTIEGKHGERLNKIKDWSKRNDHRHHAMDALTVALTKPAYIQYLNNLNAKGLNNKKGTEVFAIEQKYLKRENGKLCFIPPIENIRSEAKKHLSRILVSYKAKNKVVTINKNKTKSKAGLNEQIALTPRGQLHKETVYGKSFHYSTKFEKIGASFNVQKINTVAKKEEREALLKRLAENGNDPKKAFTGKNTLNKMPIYLDLGKNIKLSEKVKTVVLEQNYTIRKNIDPDLKVDKVIDVGIKRILESRLEEFGGNAKLAFSNLEENPIWLNKEKGISIKRVKISGVSNVESLHVKKDHFGEPILDQEGNEIPVDFVSTGNNHHVAIYEDENGNLQEEVVSFFEAVVRQNQGLPIIKKNHTLGWKFLFTLKQNEYFVFPSDDFVPADVDLMDEQNYHLISPNLFRVQKIARKNYVFNNHLETKAVDNDLLKSKKELSKITYHFYQTPEHLRGIIKIRINHLGKIIQIGEY

SEQ ID NO: 92 - protein, 1415 aa, Bergeyella zoohelcum
  Bergeyella zoohelcum ATCC 43767
MKHILGLDLGTNSIGWALIERNIEEKYGKIIGMGSRIVPMGAELSKFEQGQAQTKNADRRTNRGARRLNKRYKQRRNKLIYILQKLDMLPSQIKLKEDFSDPNKIDKITILPISKKQEQLTAFDLVSLRVKALTEKVGLEDLGKIIYKYNQLRGYAGGSLEPEKEDIFDEEQSKDKKNKSFIAFSKIVFLGEPQEEIFKNKKLNRRAIIVETEEGNFEGSTFLENIKVGDSLELLINISASKSGDTITIKLPNKTNWRKKMENIENQLKEKSKEMGREFYISEFLLELLKENRWAKIRNNTILRARYESEFEAIWNEQVKHYPFLENLDKKTLIEIVSFIFPGEKESQKKYRELGLEKGLKYIIKNQVVFYQRELKDQSHLISDCRYEPNEKAIAKSHPVFQEYKVWEQINKLIVNTKIEAGTNRKGEKKYKYIDRPIPTALKEWIFEELQNKKEITFSAIFKKLKAEFDLREGIDFLNGMSPKDKLKGNETKLQLQKSLGELWDVLGLDSINRQIELWNILYNEKGNEYDLTSDRTSKVLEFINKYGNNIVDDNAEETAIRISKIKFARAYSSLSLKAVERILPLVRAGKYFNNDFSQQLQSKILKLLNENVEDPFAKAAQTYLDNNQSVLSEGGVGNSIATILVYDKHTAKEYSHDELYKSYKEINLLKQGDLRNPLVEQIINEALVLIRDIWKNYGIKPNEIRVELARDLKNSAKERATIHKRNKDNQTINNKIKETLVKNKKELSLANIEKVKLWEAQRHLSPYTGQPIPLSDLFDKEKYDVDHIIPISRYFDDSFTNKVISEKSVNQEKANRTAMEYFEVGSLKYSIFTKEQFIAHVNEYFSGVKRKNLLATSIPEDPVQRQIKDTQYIAIRVKEELNKIVGNENVKTTTGSITDYLRNHWGLTDKFKLLLKERYEALLESEKFLEAEYDNYKKDFDSRKKEYEEKEVLFEEQELTREEFIKEYKENYIRYKKNKLIIKGWSKRIDHRHHAIDALIVACTEPAHIKRLNDLNKVLQDWLVEHKSEFMPNFEGSNSELLEEILSLPENERTEIFTQIEKFRAIEMPWKGFPEQVEQKLKEIIISHKPKDKLLLQYNKAGDRQIKLRGQLHEGTLYGISQGKEAYRIPLTKFGGSKFATEKNIQKIVSPFLSGFIANHLKEYNNKKEEAFSAEGIMDLNNKLAQYRNEKGELKPHTPISTVKIYYKDPSKNKKKKDEEDLSLQKLDREKAFNEKLYVKTGDNYLFAVLEGEIKTKKTSQIKRLYDIISFFDATNFLKEEFRNAPDKKTFDKDLLFRQYFEERNKAKLLFTLKQGDFVYLPNENEEVILDKESPLYNQYWGDLKERGKNIYVVQKFSKKQIYFIKHTIADIIKKDVEFGSQNCYETVEGRSIKENCFKLEIDRLGNIVKVIKR

SEQ ID NO: 93 - protein, 1430 aa, Bergeyella zoohelcum
  Bergeyella zoohelcum CCUG 30536
MKHILGLDLGTNSIGWAVVKEAQNDNEQSEIVDVGVRVNPLTTDEKTNFEKGKPISTNADRTLKRSARRNLQRYKLRRKELIELLKEHQLISTDTILTENGKGTTFQTLELRAKSAKEKISLEELARVFLTINKKRGYKSSRKAKNEDEGQLIDGMEIAKRLYEENLTTGQLSLQLLKEGKKSLPDYYRSDLQFELDKVWNFQKQFHSDILTDEFYAQLKGKGQRATSALFLAKYQIYTAENKGSREDKKLQAYQWRVDALSKELTREQLAFVITEINNNLNNSSGYLGAISDRSKELYFNNETVGEYLWKQIAANPHTSLKNQVFYRQDYLDEFEQIWKTQSAFYPEILTDELKKELRDVVIFYQRKLKSQKSLVSFCEFENKEIEIKKEDGTSTKKVIGLKVAPKSSPLFQEFKIWQNLNNVLIRKKGSKTKKVAKNQQAVLFEEEKTISELDLEAKQALFNELNLKGNLKADYCLEILGYSPKEWEMNYSVLEGNRTNKALYEAYLKITDLEGYDAKNHLKVKLNKDEVELDDLKVPASEIKDMVQAIFKEAGINTDILHFNAELDGKDFENQASYQLWHLLYSYEGDDSKSGNELLYKLLETKFGFKKEYAQILANVSLSDDYGSLSTKAMRKIHPYIKENKFSTACELAGYRHSKHSLTKEENDNRVLKDSLEVLKKNSLRQPVVEKILNQMINLVNALLKKYRTENPNFKFDEIRIELARELKKNAEERANMTANINKAKTEHEKIIKILKNEFGLPNPTRNDIIRYRLYEELKANGYKDLYTNIKIPQEKLFTKEIDIEHIIPKSRVFDDSFSNKTLSFRKTNLDKGERTAFDYMESKFGADKLEEYVARVEDLYKNNIISKAKYQKLLKKESEIGDGFVERDLRETQYIAKKAKEILLQITPNVLSTSGGITDRLREDWDLINVMKELNLPKYRALGLTQMEDRKYGQQVEVITDWTKRNDHRHHAMDALTVAFTKHNHIQYLNYLNARKNEKHKEHSNIMGIQQLETIKVTDKNGNEKRVFKAPMPNFRQVTKAFLENILISHKAKNKVVTKNKNKVAGSNKVQEVLTPRGQLHKETVYGKYQYYVQKEEKIGAKFDLETIKKVANPLYQSLLKKRLEENGGDPKKAFTGKNSLAKNPIYLDDTQTEQLPEKVKLVWLENSFSIRKDITPENFKDEKLIDKILDEGVKRILKERLQSFGNDAKKAFSDLDKNPIWLNKEKGITIKRVTISGVANAEPLHTKKDHLGKEILDKEGKPIPVDFISTGSNHHVAVYRDEKGNLQEKVVSVFEAVVRANQGLPIIDKTYNQHLGWEFLFTMKQNEMFVFPNESTGFNPNDIDLLDPKNKRIISPNLFRVQKFSKLQYGNSFVREFVFRHHLETTVEDRKELQGITYKQMKNSTFFNDIIKVRINHLGDIVSIGEY

SEQ ID NO: 94 - protein, 1420 aa, Bifidobacterium bifidum
MSRKNYVDDYAISLDIGNASVGWSAFTPNYRLVRAKGHELIGVRLFDPADTAESRRMARTTRRRYSRRRWRLRLLDALFDQALSEIDPSFLARRKYSWVHPDDENNADCWYGSVLFDSNEQDKRFYEKYPTIYHLRKALMEDDSQHDIREIYLAIHHMVKYRGNFLVEGTLESSNAFKEDELLKLLGRITRYEMSEGEQNSDIEQDDENKLVAPANGQLADALCATRGSRSMRVDNALEALSAVNDLSREQRAIVKAIFAGLEGNKLDLAKIFVSKEFSSENKKILGIYFNKSDYEEKCVQIVDSGLLDDEEREFLDRMQGQYNAIALKQLLGRSTSVSDSKCASYDAHRANWNLIKLQLRTKENEKDINENYGILVGWKIDSGQRKSVRGESAYENMRKKANVFFKKMIETSDLSETDKNRLIHDIEEDKLFPIQRDSDNGVIPHQLHQNELKQIIKKQGKYYPFLLDAFEKDGKQINKIEGLLTFRVPYFVGPLVVPEDLQKSDNSENHWMVRKKKGEITPWNFDEMVDKDASGRKFIERLVGTDSYLLGEPTLPKNSLLYQEYEVLNELNNVRLSVRTGNHWNDKRRMRLGREEKTLLCQRLFMKGQTVTKRTAENLLRKEYGRTYELSGLSDESKFTSSLSTYGKMCRIFGEKYVNEHRDLMEKIVELQTVFEDKETLLHQLRQLEGISEADCALLVNTHYTGWGRLSRKLLTTKAGECKISDDFAPRKHSIIEIMRAEDRNLMEIITDKQLGFSDWIEQENLGAENGSSLMEVVDDLRVSPKVKRGIIQSIRLIDDISKAVGKRPSRIFLELADDIQPSGRTISRKSRLQDLYRNANLGKEFKGIADELNACSDKDLQDDRLFLYYTQLGKDMYTGEELDLDRLSSAYDIDHIIPQAVTQNDSIDNRVLVARAENARKTDSFTYMPQIADRMRNFWQILLDNGLISRVKFERLTRQNEFSEREKERFVQRSLVETRQIMKNVATLMRQRYGNSAAVIGLNAELTKEMHRYLGFSHKNRDINDYHHAQDALCVGIAGQFAANRGFFADGEVSDGAQNSYNQYLRDYLRGYREKLSAEDRKQGRAFGFIVGSMRSQDEQKRVNPRTGEVVWSEEDKDYLRKVMNYRKMLVTQKVGDDFGALYDETRYAATDPKGIKGIPFDGAKQDTSLYGGFSSAKPAYAVLIESKGKTRLVNVTMQEYSLLGDRPSDDELRKVLAKKKSEYAKANILLRHVPKMQLIRYGGGLMVIKSAGELNNAQQLWLPYEEYCYFDDLSQGKGSLEKDDLKKLLDSILGSVQCLYPWHRFTEEELADLHVAFDKLPEDEKKNVITGIVSALHADAKTANLSIVGMTGSWRRMNNKSGYTFSDEDEFIFQSPSGLFEKRVTVGELKRKAKKEVNSKYRTNEKRLPTLSGASQP

SEQ ID NO: 95 - protein, 1138 aa, Bifidobacterium dentium
MLCRCHRRYRIGIDVGLMSVGLAAIEVDETGFPIRILNIQSVIHDGGIDPQLGKKKSISRKAISGVARRTRRMRRRKVVRLRQLDATLESLGFPIVEPDSLDTWEIWLTRAKLASSYIQDDETRKEDVSIALRHIARHRGWRNPYSNVESLFVDVAPSEQYEELRRKAEEKLGTSLSGNPTSAEIVECILKRQVGEVQLRTRSRKGVNGNAVEKEGLLPTKLMQSDNAAEIRRIFKVQRIDDETGRKLLRAVFKACSPKGSVERRVGRDALAPGLPRALKASLAFQEYRIANVLTNLVISEDGTKRKLTIAEKQRVFGFLSSNETDDITWIDVAEKLGLERRQIQGVGCLTADGEERISSTPPRNITALHIHSAKPVIREKLVAWWKAASPTVRETMVELLSNTVDIDRVREDMDYSSAVAFIDSLGDEELTALDSVDLLSGRAAYSRQTLKQLTERMLNTDDDLHEARKAVFGVDDNWKPPVDAISTSVGNPAVDRVLKIVNRYLLACQKRWRNPQSVQIEHVRESFSSVAKAKETERVQGERARYRNDLRRELCEQEGLNKIRESDIRRWESVQRQNGTCLYCGSPITFRTCEMDHIVPRKGVGSTNTRVNLAAACAACNKLKSNTAFSVWARTEGAANRKVSQRDAIERVKTFIFNKSVPPREQRAFKQAVISRLRQAESDPAIDNRSIESVAWMADELHRRIEAYFNQDADVSGNTPATQVWVFQGRVTALARKASGIEGRIHFAGEWKKTRLDRRHHAVDAAVIAMMNHSAAQTLVERDSLRLSQWITRKPETWKNYPFSEGQKKTRFKEWLDCMNALLDLLNDALDSDRVPVTRCQRMSLGNSQAHAATIRKMKRVELFSPMDADLIRRASTPALYCALTRLPEYSPEKGLPENRGREIVLNGRHIRSTETVDFFASGAAQLMVRNGSAEIGDSIHHMRIYRYRKTGAKSQEYVYGMIRVFQIDLLHASSENLFAVQLPSQSVSVRYGDKNVVQAIQEGRAEYLGHIVPNDEILISYEGVRMKDSEKIGAYANDFSGTASELAQRRHWVVVGSDVSKLALRPSYLSEEGLENSGSESERLSKQTRKVIEGKGWVVAVNILAKYHPVVIRRNALGEPRFRTNSGMPVSWRWDR

SEQ ID NO: 96 - protein, 1187 aa, Bifidobacterium longum
MLSRQLLGASHLARPVSYSYNVQDNDVHCSYGERCFMRGKRYRIGIDVGLNSVGLAAVEVSDENSPVRLLNAQSVIHDGGVDPQKNKEAITRKNMSGVARRTRRMRRRKRERLHKLDMLLGKFGYPVIEPESLDKPFEEWHVRAELATRYIEDDELRRESISIALRHMARHRGWRNPYRQVDSLISDNPYSKQYGELKEKAKAYNDDATAAEEESTPAQLVVAMLDAGYAEAPRLRWRTGSKKPDAEGYLPVRLMQEDNANELKQIFRVQRVPADEWKPLFRSVFYAVSPKGSAEQRVGQDPLAPEQARALKASLAFQEYRIANVITNLRIKDASAELRKLTVDEKQSIYDQLVSPSSEDITWSDLCDFLGFKRSQLKGVGSLTEDGEERISSRPPRLTSVQRIYESDNKIRKPLVAWWKSASDNEHEAMIRLLSNTVDIDKVREDVAYASAIEFIDGLDDDALTKLDSVDLPSGRAAYSVETLQKLTRQMLTTDDDLHEARKTLFNVTDSWRPPADPIGEPLGNPSVDRVLKNVNRYLMNCQQRWGNPVSVNIEHVRSSFSSVAFARKDKREYEKNNEKRSIFRSSLSEQLRADEQMEKVRESDLRRLEAIQRQNGQCLYCGRTITFRTCEMDHIVPRKGVGSTNTRTNFAAVCAECNRMKSNTPFAIWARSEDAQTRGVSLAEAKKRVTMFTFNPKSYAPREVKAFKQAVIARLQQTEDDAAIDNRSIESVAWMADELHRRIDWYFNAKQYVNSASIDDAEAETMKTTVSVFQGRVTASARRAAGIEGKIHFIGQQSKTRLDRRHHAVDASVIAMMNTAAAQTLMERESLRESQRLIGLMPGERSWKEYPYEGTSRYESFHLWLDNMDVLLELLNDALDNDRIAVMQSQRYVLGNSIAHDATIHPLEKVPLGSAMSADLIRRASTPALWCALTRLPDYDEKEGLPEDSHREIRVHDTRYSADDEMGFFASQAAQIAVQEGSADIGSAIHHARVYRCWKTNAKGVRKYFYGMIRVFQTDLLRACHDDLFTVPLPPQSISMRYGEPRVVQALQSGNAQYLGSLVVGDEIEMDFSSLDVDGQIGEYLQFFSQFSGGNLAWKHWVVDGFFNQTQLRIRPRYLAAEGLAKAFSDDVVPDGVQKIVTKQGWLPPVNTASKTAVRIVRRNAFGEPRLSSAHHMPCSWQWRHE

SEQ ID NO: 97 - protein, 1124 aa, Bifidobacterium longum
  Bifidobacterium longum subsp. longum 2-2B
LTGHSGHTFWPTSSSPPIQLEQEKRPLPQRNTSQNGHTFWPITRERCFMRGKRYRIGIDVGLNSVGLAAVEVSDENSPVRLLNAQSVIHDGGVDPQKNKEAITRKNMSGVARRTRRMRRRKRERLHKLDMLLGKFGYPVIEPESLDKPFEEWHVRAELATRYIEDDELRRESISIALRHMARHRGWRNPYRQVDSLISDNPYSKQYGELKEKAKAYNDDATAAEEESTPAQLVVAMLDAGYAEAPRLRWRTGSKKPDAEGYLPVRLMQEDNANELKQIFRVQRVPADEWKPLFRSVFYAVSPKGSAEQRVGQDPLAPEQARALKASLAFQEYRIANVITNLRIKDASAELRKLTVDEKQSIYDQLVSPSSEDITWSDLCDFLGFKRSQLKGVGSLTEDGEERISSRPPRLTSVQRIYESDNKIRKPLVAWWKSASDNEHEAMIRLLSNTVDIDKVREDVAYASAIEFIDGLDDDALTKLDSVDLPSGRAAYSVETLQKLTRQMLTTDDDLHEARKTLFNVTDSWRPPADPIGEPLGNPSVDRVLKNVNRYLMNCQQRWGNPVSVNIEHVRSSFSSVAFARKDKREYEKNNEKRSIFRSSLSEQLRADEQMEKVRESDLRRLEAIQRQNGQCLYCGRTITFRTCEMDHIVPRKGVGSTNTRTNFAAVCAECNRMKSNTPFAIWARSEDAQTRGVSLAEAKKRVTMFTFNPKSYAPREVKAFKQAVIARLQQTEDDAAIDNRSIESVAWMADELHRRIDWYFNAKQYVNSASIDDAEAETMKTTVSVFQGRVTASARRAAGIEGKIHFIGQQSKTRLDRRHHAVDASVIAMMNTAAAQTLMERESLRESQRLIGLMPGERSWKEYPYEGTSRYESFHLWLDNMDVLLELLNDALDNDRIAVMQSQRYVLGNSIAHDATIHPLEKVPLGSAMSADLIRRASTPALWCALTRLPDYDEKEGLPEDSHREIRVHDTRYSADDEMGFFASQAAQIAVQEGSADIGSAIHHARVYRCWKTNAKGVRKYFYGMIRVFQTDLLRACHDDLFTVPLPPQSISMRYGEPRVVQALQSGNAQYLGSLVVGDEIEMDFPVSMLMVRLASIYNSSRSLVEGTLHGNIGLLMDSLTRRS

SEQ ID NO: 98 - protein, 1138 aa, Bifidobacterium sp.
MNSVGLAAVEVSDENSPVRLLNAQSVIHDGGVDPQKNKEAITRKNMSGVARRTRRMRRRKRERLHKLDMLLGKFGYPVIEPESLDKPFEEWHVRAELATRYIEDDELRRESISIALRHMARHRGWRNPYRQVDSLISDNPYSKQYGELKEKAKAYNDDATAAEEESTPAQLVVAMLDAGYAEAPRLRWRTGSKKPDAEGYLPVRLMQEDNANELKQIFRVQRVPADEWKPLFRSVFYAVSPKGSAEQRVGQDPLAPEQARALKASLAFQEYRIANVITNLRIKDASAELRKLTVDEKQSIYDQLVSPSSEDITWSDLCDFLGFKRSQLKGVGSLTEDGEERISSRPPRLTSVQRIYESDNKIRKPLVAWWKSASDNEHEAMIRLLSNTVDIDKVREDVAYASAIEFIDGLDDDALTKLDSVDLPSGRAAYSVETLQKLTRQMLTTDDDLHEARKTLFNVTDSWRPPADPIGEPLGNPSVDRVLKNVNRYLMNCQQRWGNPVSVNIEHVRSSFSSVAFARKDKREYEKNNEKRSIFRSSLSEQLRADEQMEKVRESDLRRLEAIQRQNGQCLYCGRTITFRTCEMDHIVPRKGVGSTNTRTNFAAVCAECNRMKSNTPFAIWARSEDAQTRGVSLAEAKKRVTMFTFNPKSYAPREVKAFKQAVIARLQQTEDDAAIDNRSIESVAWMADELHRRIDWYFNAKQYVNSASIDDAEAETMKTTVSVFQGRVTASARRAAGIEGKIHFIGQQSKTRLDRRHHAVDASVIAMMNTAAAQTLMERESLRESQRLIGLMPGERSWKEYPYEGTSRYESFHLWLDNMDVLLELLNDALDNDRIAVMQSQRYVLGNSIAHDATIHPLEKVPLGSAMSADLIRRASTPALWCALTRLPDYDEKEGLPEDSHREIRVHDTRYSADDEMGFFASQAAQIAVQEGSADIGSAIHHARVYRCWKTNAKGVRKYFYGMIRVFQTDLLRACHDDLFTVPLPPQSISMRYGEPRVVQALQSGNAQYLGSLVVGDEIEMDFSSLDVDGQIGEYLQFFSQFSGGNLAWKHWVVDGFFNQTQLRIRPRYLAAEGLAKAFSDDVVPDGVQKIVTKQGWLPPVNTASKTAVRIVRRNAFGEPRLSSAHHMPCSWQWRHE

SEQ ID NO: 99 - protein, 1151 aa, Bifidobacterium sp.
  Bifidobacterium sp. 12_1_47BFAA
MRGKRYRIGIDVGLNSVGLAAVEVSDENSPVRLLNAQSVIHDGGVDPQKNKEAITRKNMSGVARRTRRMRRRKRERLHKLDMLLGKFGYPVIEPESLDKPFEEWHVRAELATRYIEDDELRRESISIALRHMARHRGWRNPYRQVDSLISDNPYSKQYGELKEKAKAYNDDATAAEEESTPAQLVVAMLDAGYAEAPRLRWRTGSKKPDAEGYLPVRLMQEDNANELKQIFRVQRVPADEWKPLFRSVFYAVSPKGSAEQRVGQDPLAPEQARALKASLAFQEYRIANVITNLRIKDASAELRKLTVDEKQSIYDQLVSPSSEDITWSDLCDFLGFKRSQLKGVGSLTEDGEERISSRPPRLTSVQRIYESDNKIRKPLVAWWKSASDNEHEAMIRLLSNTVDIDKVREDVAYASAIEFIDGLDDDALTKLDSVDLPSGRAAYSVETLQKLTRQMLTTDDDLHEARKTLFNVTDSWRPPADPIGEPLGNPSVDRVLKNVNRYLMNCQQRWGNPVSVNIEHVRSSFSSVAFARKDKREYEKNNEKRSIFRSSLSEQLRADEQMEKVRESDLRRLEAIQRQNGQCLYCGRTITFRTCEMDHIVPRKGVGSTNTRTNFAAVCAECNRMKSNTPFAIWARSEDAQTRGVSLAEAKKRVTMFTFNPKSYAPREVKAFKQAVIARLQQTEDDAAIDNRSIESVAWMADELHRRIDWYFNAKQYVNSASIDDAEAETMKTTVSVFQGRVTASARRAAGIEGKIHFIGQQSKTRLDRRHHAVDASVIAMMNTAAAQTLMERESLRESQRLIGLMPGERSWKEYPYEGTSRYESFHLWLDNMDVLLELLNDALDNDRIAVMQSQRYVLGNSIAHDATIHPLEKVPLGSAMSADLIRRASTPALWCALTRLPDYDEKEGLPEDSHREIRVHDTRYSADDEMGFFASQAAQIAVQEGSADIGSAIHHARVYRCWKTNAKGVRKYFYGMIRVFQTDLLRACHDDLFTVPLPPQSISMRYGEPRVVQALQSGNAQYLGSLVVGDEIEMDFSSLDVDGQIGEYLQFFSQFSGGNLAWKHWVVDGFFNQTQLRIRPRYLAAEGLAKAFSDDVVPDGVQKIVTKQGWLPPVNTASKTAVRIVRRNAFGEPRLSSAHHMPCSWQWRHE

SEQ ID NO: 100 - protein, 1092 aa, Brevibacillus laterosporus
  Brevibacillus laterosporus GI-9
MAYTMGIDVGIASCGWAIVDLERQRIIDIGVRTFEKAENPKNGEALAVPRREARSSRRRLRRKKHRIERLKYMFVRNGLAVDIQHLEQTLRSQNEIDVWQLRVDGLDRMLTQKEWLRVLIHLAQRRGFQSNRKTDGSSEDGQVLVNVTENDRLMEEKDYRTVAEMMVKDEKFSDHKRNKNGNYHGVVSRASLLVEIHTLFESQRQHHNFLASKDFELEYINIWSSQRPVATKDQIEKMIGTCTFLPKEKRAPKASWHFQYFMLLQTINHIRITNAQGTRPLNKEEIEQVVNMALTKSKVSYHDIRKVLDLSEEYQFVGLDYGKEDEKKKVESKETIIKLDDYHKLNKIFNEVELAKGETWEAVDYDTVAYALTFFKDDEDIRDYLQNKYKDSKNRLVKNVANKEYTNELIEKVSTLSFRKVGHLSLKALRKIIPFLEQGMTYDKACQAAGFNFQGISKKKRSVVLPVIDQISNPVVNRALTQTRKVINALIKKYGSPETIHIETARELSKRFDERKNITKDYKENRDKNERAKKHLSELGIINPTGLDIVKYKLWCEQQGRCMYSNQPISFERLRESGYTEVDHIIPYSRSMNDSYNNRVLVMTRENREKSNQTPYEYMGNDTQRWDEFEQRVTTNPQIKKEKRQNLLLKGFTNRRELEMLERNLNDTRHITKYLSHFISTNLEFSPSDKKKKVVNTSGRITSHLRSRWGLEKNREQNDLHHAMDAVVIAVTSDSFIQQVTNYYKRKERRELNGDDKFPLPWKFFREEVIARLSPNPKEQIEALPNHFYSEDELADLQPIFVSRMPKRSITGEAHQAQFRRVVGKTKEGKNITAKKTALVDISYDKNGDFNMYGRETDPATYEAIKERYLEFGGNAKKAFSTDLHKPKKDGTKGPLIKSVRIMENKTLVHPVNKGKGVVYNSSIVRTDVFQRKEKYYLLPVYVTDVTKGKLPNKVIAAKKGYDDWIEVDDSFTFLYSLYPNDLIFIRQNPKKKISLKKRIESHSISDSKEVQEILTYYKGVDSSTAAIEFITHDGSYYAKGVGVQNLDCFEKYQVDILGNYSKVKGEKRLELETSDNNHKGKDVNSIKSTSR

SEQ ID NO: 101 - protein, 1428 aa, Burkholderiales bacterium
  Burkholderiales bacterium 1_1_47
MGKTHIIGVGLDLGGTYTGTFITSHPSDEAEHRDHSSAFTVVNSEKLSFSSKSRTAVRHRVRSYKGFDLRRRLLLLVAEYQLLQKKQTLAPEERENLRIALSGYLKRKGYARTEAETDTSVLESLDPSVFSSAPSFTNFFNDSEPLNIQWEAIANSPETTKALNKELSGQKEADFKKYIKTSFPEYSAKEILANYVEGRRAILDASKYIANLQSLGHKHRSKYLSDILQDMKRDSRITRLSEAFGSTDNLWRIIGNISNLQERAVRWYFNDAKFEQGQEQLDAVKLKNVLVRALKYLRSDDKEWSASQKQIIQSLEQSGDVLDVLAGLDPDRTIPPYEDQNNRRPPEDQTLYLNPKALSSEYGEKWKSWANKFAGAYPLLTEDLTEILKNTDRKSRIKIRSDVLPDSDYRLAYILQRAFDRSIALDECSIRRTAEDFENGVVIKNEKLEDVLSGHQLEEFLEFANRYYQETAKAKNGLWFPENALLERADLHPPMKNKILNVIVGQALGVSPAEGTDFIEEIWNSKVKGRSTVHSICNAIENERKTYGPYFSEDYKFVKTALKEGKTEKELSKKFAAVIKVLKMVSEVVPFIGKELRLSDEAQSKFDNPYSLAQLYNLIETERNGFSKVSLAAHLENAWRMTMTDGSAQCCRLPADCVRPFDGFIRKAIDRNSWEVAKRIAEEVKKSVDFTNGTVKIPVAIEANSFNFTASLTDLKYIQLKEQKLKKKLEDIQRNEENQEKRWLSKEERIRADSHGICAYTGRPLDDVGEIDHIIPRSLTLKKSESIYNSEVNLIFVSAQGNQEKKNNIYLLSNLAKNYLAAVFGASDLSQITNEIESTVLQLKAAGRLGYFDLLSEKERACARHALFLNSDSEARRAVIDVLGSRRKASVNGTQAWFVRSIFSKVRQALAAWTQETGNELIFDAISVPAADSSEMRKRFAEYRPEFRKPKVQPVASHSIDAMCIYLAACSDPFKTKRMGSQLAIYEPINFDNLFTGSCQVIQNTPRNFSDKTNIANSPIFKETIYAERFLDIIVSRGEIFIGYPSNMPFEEKPNRISIGGKDPFSILSVLGAYLDKAPSSEKEKLTIYRVVKNKAFELFSKVAGSKFTAEEDKAAKILEALHFVTVKQDVAATVSDLIKSKKELSKDSIENLAKQKGCLKKVEYSSKEFKFKGSLIIPAAVEWGKVLWNVFKENTAEELKDENALRKALEAAWPSSFGTRNLHSKAKRVFSLPVVATQSGAVRIRRKTAFGDFVYQSQDTNNLYSSFPVKNGKLDWSSPIIHPALQNRNLTAYGYRFVDHDRSISMSEFREVYNKDDLMRIELAQGTSSRRYLRVEMPGEKFLAWFGENSISLGSSFKFSVSEVFDNKIYTENAEFTKFLPKPREDNKHNGTIFFELVGPRVIFNYIVGGAASSLKEIFSEAGKERS

SEQ ID NO: 102 - protein, 1442 aa, Caenispirillum salinarum
  Caenispirillum salinarum AK4
MPVLSPLSPNAAQGRRRWSLALDIGEGSIGWAVAEVDAEGRVLQLTGTGVTLFPSAWSNENGTYVAHGAADRAVRGQQQRHDSRRRRLAGLARLCAPVLERSPEDLKDLTRTPPKADPRAIFFLRADAARRPLDGPELFRVLHHMAAHRGIRLAELQEVDPPPESDADDAAPAATEDEDGTRRAAADERAFRRLMAEHMHRHGTQPTCGEIMAGRLRETPAGAQPVTRARDGLRVGGGVAVPTRALIEQEFDAIRAIQAPRHPDLPWDSLRRLVLDQAPIAVPPATPCLFLEELRRRGETFQGRTITREAIDRGLTVDPLIQALRIRETVGNLRLHERITEPDGRQRYVPRAMPELGLSHGELTAPERDTLVRALMHDPDGLAAKDGRIPYTRLRKLIGYDNSPVCFAQERDTSGGGITVNPTDPLMARWIDGWVDLPLKARSLYVRDVVARGADSAALARLLAEGAHGVPPVAAAAVPAATAAILESDIMQPGRYSVCPWAAEAILDAWANAPTEGFYDVTRGLFGFAPGEIVLEDLRRARGALLAHLPRTMAAARTPNRAAQQRGPLPAYESVIPSQLITSLRRAHKGRAADWSAADPEERNPFLRTWTGNAATDHILNQVRKTANEVITKYGNRRGWDPLPSRITVELAREAKHGVIRRNEIAKENRENEGRRKKESAALDTFCQDNTVSWQAGGLPKERAALRLRLAQRQEFFCPYCAERPKLRATDLFSPAETEIDHVIERRMGGDGPDNLVLAHKDCNNAKGKKTPHEHAGDLLDSPALAALWQGWRKENADRLKGKGHKARTPREDKDFMDRVGWRFEEDARAKAEENQERRGRRMLHDTARATRLARLYLAAAVMPEDPAEIGAPPVETPPSPEDPTGYTAIYRTISRVQPVNGSVTHMLRQRLLQRDKNRDYQTHHAEDACLLLLAGPAVVQAFNTEAAQHGADAPDDRPVDLMPTSDAYHQQRRARALGRVPLATVDAALADIVMPESDRQDPETGRVHWRLTRAGRGLKRRIDDLTRNCVILSRPRRPSETGTPGALHNATHYGRREITVDGRTDTVVTQRMNARDLVALLDNAKIVPAARLDAAAPGDTILKEICTEIADRHDRVVDPEGTHARRWISARLAALVPAHAEAVARDIAELADLDALADADRTPEQEARRSALRQSPYLGRAISAKKADGRARAREQEILTRALLDPHWGPRGLRHLIMREARAPSLVRIRANKTDAFGRPVPDAAVWVKTDGNAVSQLWRLTSVVTDDGRRIPLPKPIEKRIEISNLEYARLNGLDEGAGVTGNNAPPRPLRQDIDRLTPLWRDHGTAPGGYLGTAVGELEDKARSALRGKAMRQTLTDAGITAEAGWRLDSEGAVCDLEVAKGDTVKKDGKTYKVGVITQGIFGMPVDAAGSAPRTPEDCEKFEEQYGIKPWKAKGIPLA

SEQ ID NO: 103 - protein, 984 aa, Campylobacter coli
  Campylobacter coli 1098
MARILAFDIGISSIGWAFSENDELKDCGVRIFTKAENPKTGESLALPRRLARSARKRLARRKARLNHLKHLIANEFKLNYEDYQSFDESLAKAYKGSLISPYELRFRALNELLSKQDFARVILHIAKRRGYDDIKNNGDEEKSEILKAIKQNEEKLVNYQSVGEYLYKEYFQKFKENSKEFINVRNKKESYERCIAQSFLKDELKLIFQKQREFGFSFSKKFEEEVLSVAFYKRALKDFSHLVGNCSFFTDEKRAPKNSPLAFMFVALTRIINLLNNLKNTEGILYTKDDLNALLNEVLKNGTLTYKQTKKLLGLSDDYEFKGEKGTYFIEFKKYKEFIKALGEHNLSQDDLNEIAKDITLIKDEIKLKKALAKYDLNQNQIDSLSKLEFKDHLNISFKALKLITPLMLEGKKYDEACNELNLKVAINEDKKDFLPAFNETYYKDEVTNPVVLRAIKEYRKVLNALLKKYGKVHKINIELAREVGKNYSQRAKIEKEQNENYKAKKDAELECEKLGLKINSKNILKLRLFKEQKEFCAYSGEKIKISDLQDEKMLEIDHIYPYSRSFDDSYMNKVLVFTKQNQEKLNQTPFEAFGNDSAKWQKIEVLAKNLPTKKQKRILDKNYKDKEQKNFKDRNLNDTRYIARLVLNYTKDYLDFLPLSDDENTKLNDTQKGSKVHVEAKSGMLTSALRHTWGFSAKDRNNHLHHAIDAVIIAYANNSIVKAFSDFKKEQESNSAELYAKKISELDYKNKRKFFEPFSGFRQKVLDKIDEIFVSKPERKKPSGALHEETFRKEEEFYQSYGGKEGVLKALELGKIRKVNGKIVKNGDMFRVDIFKHKKTNKFYAVPIYTMDFALKVLPNKAVARSKKGEIKDWILMDENYEFCFSLYKDSLILIQTKDMQEPEFVYYNAFTSSTVSLIVSKHDNKFETLSKNQKILFKNANEKEVIAKSIGIQNLKVFEKYIVSALGEVTKAEFRQREDFKK

SEQ ID NO: 104 - protein, 984 aa, Campylobacter coli
  Campylobacter coli 111-3
MARILAFDIGISSIGWAFSENDELKDCGVRIFTKAENPKTGESLALPRRLARSARKRLARRKARLNHLKHLIANEFKLNYEDYQSFDESLAKAYKGSLISPYELRFRALNELLSKQDFARVILHIAKRRGYDDIKNNGDEEKSEILKAIKQNEEKLVNYQSVGEYLYKEYFQKFKENSKEFINVRNKKESYERCIAQSFLKDELKLIFQKQREFGFSFSKKFEEEVLSVAFYKRALKDFSHLVGNCSFFTDEKRAPKNSPLAFMFVALTRIINLLNNLKNTEGILYTKDDLNTLLNEVLKNGTLTYKQTKKLLGLSDDYEFKGEKGTYFIEFKKYKEFIKALGEHNLSQDNLNEIAKDITLIKDEIKLKKALAKYDLNQNQIDSLSKLEFKDHLNISFKALKLITPLMLEGKKYDEAYNELNLKVAINEDKKDFLPAFNETYYKDEVTNPVVLRAIKEYRKVLNALLKKYGKVHKINIELAREVGKNHSQRAKIEKEQNENYKAKKDAELECEKLGLKINSKNILKLRLFKEQKEFCAYSGEKIKISDLQDEKMLEIDHIYPYSRSFDDSYMNKVLVFTKQNQEKLNQTPFEAFGNDSAKWQKIEVLAKNLPTKKQKRILDKNYKDKEQKDFKDRNLNDTRYIARLVLNYTKDYLDFLPLSDDENTKLNDTQKGSKVHVEAKSGMLTSALRHTWGFSAKDRNNHLHHAIDAVIIAYANNSIVKAFSDFKKEQESNSAELYAKKISELDYKNKRKFFEPFSGFRQKVLDKIDEIFVSKPERKKPSGALHEETFRKEEEFYQSYGGKEGVLKALELGKIRKVNGKIVKNGDMFRVDIFKHKKTNKFYAVPIYTMDFALKVLPNKAVARSKKGEIKDWILMDENYEFCFSLYKDSLILIQTKDMQEPELVYFNAFTSSTVSLIVSKHDNKFETLSKNQKILFKNANEKEVIAKSIGIQNLKVFEKYIVSALGEVTKAEFRQREDFKK

SEQ ID NO: 105 - protein, 987 aa, Campylobacter coli
  Campylobacter coli 132-6
MARILAFDIGISSIGWAFSENDELKDCGVRIFTKAENPKTGESLALPRRLARSARKRLARRKARLNHLKHLIANEFKLNYEDYQSFDESLAKAYKGSLISPYELRFRALNELLSKQDFARVILHIAKRRGYDDIKNNGDEEKSEILKAIKQNEEKLVNYQSVGEYLYKEYFQKFKENSKEFINVRNKKESYERCIAQSFLKDELKLIFQKQREFGFSFSKKFEEEVLSVAFYKRALKDFSHLVGNCSFFTDEKRAPKNSPLAFMFVALTRIINLLNNLKNTEGILYTKDDLNTLLNEVLKNGTLTYKQTKKLLGLSDDYEFKGEKGTYFIEFKKYKEFIKALGEHNLSQDNLNEIAKDITLIKDEIKLKKALAKYDLNQNQIDSLSKLEFKDHLNISFKALKLITPLMLEGKKYDEAYNELNLKVAINEDKKDFLPAFNETYYKDEVTNPVVLRAIKEYRKVLNALLKKYGKVHKINIELAREVGKNHSQRAKIEKEQNENYKAKKDAELECEKLGLKINSKNILKLRLFKEQKEFCAYSGEKIKISDLQDEKMLEIDHIYPYSRSFDDSYMNKVLVFTKQNQEKLNQTPFEAFGNDSAKWQKIEVLAKNLPTKKQKRILDKNYKDKEQKDFKDRNLNDTRYIARLVLNYTKDYLDFLPLSDDENTKLNDTQKGSKVHVEAKSGMLTSALRHTWGFSAKDRNNHLHHAIDAVIIAYANNSIVKAFSDFKKEQESNSAELYAKKISELDYKNKRKFFEPFSGFRQKVLDKIDEIFVSKPERKKPSGALHEETFRKEEEFYQSYGGKEGVLKALELGKIRKVNGKIVKNGDMFRVDIFKHKKTNKFYAVPIYTMDFALKVLPNKAVARSKKGEIKDWILMDENYEFCFSLYKDSLILIQTKDMQEPELVYFNAFTSSTVSLIVSKHDNKFETLSKNQKILFKNANEKEVIAKSIGIQNLKVFEKYIVSALGEVTKAEFRQREDFKNELR

SEQ ID NO: 106 - protein, 984 aa, Campylobacter coli
  Campylobacter coli 151-9
MARILAFDIGISSIGWAFSENDELKDCGVRIFTKAENPKTGESLALPRRLARSARKRLARRKARLNHLKHLIANEFKLNYEDYQSFDESLAKAYKGSLISPYELRFRALNELLSKQDFARVILHIAKRRGYDDIKNNGDEEKSEILKAIKQNEEKLVNYQSVGEYLYKEYFQKFKENSKEFINVRNKKESYERCIAQSFLKDELKLIFQKQREFGFSFSKKFEEEVLSVAFYKRALKDFSHLVGNCSFFTDEKRAPKNSPLAFMFVALTRIINLLNNLKNTEGILYTKDDLNTLLNEVLKNGTLTYKQTKKLLGLSDDYEFKGEKGTYFIEFKKYKEFIKALGEHNLSQDNLNEIAKDITLIKDEIKLKKALAKYDLNQNQIDSLSKLEFKDHLNISFKALKLITPLMLEGKKYDEAYNELNLKVAINEDKKDFLPAFNETYYKDEVTNPVVLRAIKEYRKVLNALLKKYGKVHKINIELAREVGKNHSQRAKIEKEQNENYKAKKDAELECEKLGLKINSKNILKLRLFKEQKEFCAYSGEKIKISDLQDEKMLEIDHIYPYSRSFDDSYMNKVLVFTKQNQEKLNQTPFEAFGNDSAKWQKIEVLAKNLPTKKQKRILDKNYKDKEQKDFKDRNLNDTRYIARLVLNYTKDYLDFLPLSNDENTKLNDTQKGSKVHVEAKSGMLTSALRHTWGFSAKDRNNHLHHAIDAVIIAYANNSIVKAFSDFKKEQESNSAELYAKKISELDYKNKRKFFEPFSGFRQKVLDKIDEIFVSKPERKKPSGALHEETFRKEEEFYQSYGGKEGVLKALELGKIRKVNGKIVKNGDMFRVDIFKHKKTNKFYAVPIYTMDFALKVLPNKAVARSKKGEIKDWILMDENYEFCFSLYKDSLILIQTKDMQEPELVYFNAFTSSTVSLIVSKHDNKFETLSKNQKILFKNANEKEVIAKSIGIQNLKVFEKYIVSALGEVTKAEFRQREDFKK

SEQ ID NO: 107 - protein, 984 aa, Campylobacter coli
  Campylobacter coli 1909
MARILAFDIGISSIGWAFSENDELKDCGVRIFTKAENPKTGESLALPRRLARSARKCLARRKARLNHLKHLIANEFKLNYEDYQSFDESLAKAYKGSLISPYELRFRALNELLSKQDFARVILHIAKRRGYDDIKNNGDEEKSEILKAIKQNEEKLVNYQSVGEYLYKEYFQKFKENSKEFINVRNKKESYERCIAQSFLKDELKLIFQKQREFGFSFSKKFEEEVLSVAFYKRALKDFSHLVGNCSFFTDEKRAPKNSPLAFMFVALTRIINLLNNLKNTEGILYTKDDLNALLNEVLKNGTLTYKQTKKLLGLSDDYEFKGEKGTYFIEFKKYKEFIKALGEHNLSQDDLNEIAKDITLIKDEIKLKKALAKYDLNQNQIDSLSKLEFKDHLNISFKALKLITPLMLEGKKYDEACNELNLKVAINEDKKDFLPAFNETYYKDEVTNPVVLRAIKEYRKVLNALLKKYGKVHKINIELAREVGKNHSQRAKIEKEQNENYKAKKDAELECEKLGLKINSKNILKLRLFKEQKEFCAYSGEKIKISDLQDEKMLEIDHIYPYSRSFDDSYMNKVLVFTKQNQEKLNQTPFEAFGNDSAKWQKIEVLAKNLPTKKQKRILDKNYKDKEQKNFKDRNLNDTRYIARLVLNYTKDYLDFLPLSDDENTKLNDTQKGSKVHVEAKSGMLTSALRHTWGFSAKDRNNHLHHAIDAVIIAYANNSIVKAFSDFKKEQESNSAELYAKKISELDYKNKRKFFEPFSGFRQKVLDKIDEIFVSKPERKKPSGALHEETFRKEEEFYQSYGGKEGVLKALELGKIRKVNGKIVKNGDMFRVDIFKHKKTNKFYAVPIYTMDFALKVLPNKAVARSKKGEIKDWILMDENYEFCFSLYKDSLILIQTKDMQEPEFVYYNAFTSSTVSLIVSKHDNKFETLSKNQKILFKNANEKEVIAKSIGIQNLKVFEKYIVSALGEVTKAEFRQREDFKK

SEQ ID NO: 108 - protein, 965 aa, Campylobacter coli
  Campylobacter coli 1957
MKIIGFNLGIANIGWALRENDEIIDCGVRVFDIPENPKNGNSLALERRENKARMKIVKRKKARMLATKTFLKKELNVDLSKLFLIGSTQSIYELRTKALSSLISKEELSAIILHIAKHRGYDDSALKNENGTIIEALNKNKEAMLKFKSVGEYFYKNFVQNKEVKKIRNTTEDYSNSVPRSLLKQELDLILDKQKELGLIKNADFKEKLFEIIFFKRPLKDFSNKIGNCIFFENEKRAAKNTISACEFVALGKVVNLLKSIEKDIGIVYEKDSINEIMSIILDKTSISYKKIRDILNLPQDINFKGLDYSKNNAENSKLVDLKKLNEFKKALGDGFANLDKDILDSIATDITLTKDTATLKEKLKNYNVLNAEQIEKLSELVFNDHINLSLKALKQIIPLMYEGKRYDEACELCNFTIAKNQEKNEYLPLFEKTRFAKDISSPVVIRAICEFRKLLNDIIRRYGSVHKIHLELTRDFGISFNDRKKIIKEIEQNEQSRIKALETIKELKLEETSKNIQIVRLFEDQKGICPYSGLKMDLKCLDELVIDYIRPYNRSLDDSYSNKILTFKKLNDLKQGKTPFEAFGEDEKLWAEINERIKEYNGKKRFKIFDKFFKDKKPFDFTEQTLQDTRWLTKLVASYLNEYLLFLPINEDENTALGYGEKGSKQHVVLSSGMITQMLRNFWYLGFKNHKDYKNNAMDAIIVAFTTNSIIFAFNNFKKELDLAKAEFYANKISESDYLLKRKFLPPFSGFKEQALEKVKNIFVSHSLKIKNKGTLHELTPLKIKELKNTYGDLDLAVKLGKIRKYNDKYYANAKGSLVRTDLFADKENKFHAVSIYKADFSTKKLPNKTPATTSNGETKEGIEMNENYNFCMSLYKNTPISVKIKGMKEPIICYYHGFNTSGSKITYKKHDNNYHNLSEDEMVVFRKNDKESIVVGKILEIKKYSISPSGELSLIENEERKWF

SEQ ID NO: 109 - protein, 984 aa, Campylobacter coli
  Campylobacter coli 2692
MARILAFDIGISSIGWAFSENDELKDCGVRIFTKAENPKTGESLALPRRLARSARKRLARRKARLNHLKHLIANEFKLNYEDYQSFDESLAKAYKGSLISPYELRFRALNELLSKQDFARVILHIAKRRGYDDIKNSDDKEKGAILKAIKQNEEKLTNYQSVGEYLYKEYFQKFKENSKEFTNVRNKKESYERCIAQSFLKDELKLIFKKQREFGFSFSKKFEEEVLSVAFYKRALKDFSHLVGNCSFFTDEKRAPKNSPLAFMFVALTRIINLLNNLKNTEGILYTKDDLNALLNEVLKNGTLTYKQTKKLLGLSDDYEFKGEKGTYFIEFKKYKEFIKALGDHSLSQDDLNEIAKDITLIKDEIKLKKALAKYDLNQNQIDSLSKLEFKDHLNISFKALKLITPLMLEGKKYDEACNELNLKVAINEDKKDFLPAFNETYYKDEVTNPVVLRAIKEYRKVLNALLKKYGKVHKINIELAREVGKNYSQRAKIEKEQNENYKAKKDAELECEKLGLKINSKNILKLRLFKEQKEFCAYSGEKIKISDLQDEKMLEIDHIYPYSRSFDDSYMNKVLVFTKQNQEKLNQTPFEAFGNDSAKWQKIEVLAKNLPTKKQKRILDKNYKDKEQKDFKDRNLNDTRYIARLVLNYTKDYLDFLPLSDDENTKLNDTQKGSKVHVEAKSGMLTSALRHTWGFSAKDRNNHLHHAIDAVIIAYANNSIVKAFSDFKKEQESNSAELYAKKISELDYKNKRKFFEPFSGFRQKVLDKIDEIFVSKPERKKPSGALHEETFRKEEEFYQSYGGKEGVLKALELGKIRKVNGKIVKNGDMFRVDIFKHKKTNKFYAVPIYTMDFALKVLPNKAVARSKKGEIKDWILMDENYEFCFSLYKDSLILIQTKDMQEPEFVYYNAFTSSTVSLIVSKHDNKFETLSKNQKILFKNANEKEVIAKSIGIQNLKVFEKYIVSALGEVTKAEFRQREDFKK

SEQ ID NO: 110 - protein, 984 aa, Campylobacter coli
  Campylobacter coli 59-2
MARILAFDIGISSIGWAFSENDELKDCGVRIFTKAENPKTGESLALPRRLARSARKRLARRKARLNHLKHLIANEFKLNYEDYQSFDESLAKAYKGSLISPYELRFRALNELLSKQDFARVILHIAKRRGYDDIKNNGDEEKGKILKAIKQNEEKLVNYQSVGEYLYKEYFQKFKENSKEFINVRNKKESYERCITQSFLKYELKLIFQKQREFGFSFSKKFEEEVLSVAFYKRALKDFSHLVGNCSFFSDEKRAPKNSPLAFMFVALTRIINLLNNLKNTEGILYTKDDLNALLNEVLKNGTLTYKQTKKLLGLSDDYEFKGEKGTYFIEFKKYKEFIKALGEHNLSQDDLNEIAKDITLIKDEIKLKKALAKYDLNQNQIDSLSKLEFKDHLNISFKALKLITPLMLEGKKYDEACNELNLKVAINEDKKDFLPAFNETYYKDEVTNPVVLRAIKEYRKVLNALLKKYGKVHKINIELAREVGKNYSQRAKIEKEQNENYKAKKDAELECEKLGLKINSKNILKLRLFKEQKEFCAYSGEKIKISDLQDEKMLEIDHIYPYSRSFDDSYMNKVLVFTKQNQEKLNQTPFEAFGNDSAKWQKIEVLAKNLPTKKQKRILDKNYKDKEQKNFKDRNLNDTRYIARLVLNYTKDYLDFLPLSDDENTKLNDTQKGSKVHVEAKSGMLTSALRHTWGFSAKDRNNHLHHAIDAVIIAYANNSIVKAFSDFKKEQESNSAELYAKKISELDYKNKRKFFEPFSGFRQKVLDKIDEIFVSKPERKKPSGALHEETFRKEEEFYQSYGGKEGVLKALELGKIRKVNGKIVKNGDMFRVDIFKHKKTNKFYAVPIYTMDFALKVLPNKAVARSKKGEIKDWILMDENYEFCFSLYKDSLILIQTKDMQEPEFVYYNAFTSSTVSLIVSKHDNKFETLSKNQKILFKNANEKEVIAKSIGIQNLKVFEKYIVSALGEVTKAEFRQREDFKK

SEQ ID NO: 111 - protein, 965 aa, Campylobacter coli
  Campylobacter coli 67-8
MKIIGFNLGIANIGWALRENDEIIDCGVRVFDIPENPKNGNSLALERRENKARMKIVKRKKARMLATKTFLKKELNVDLSKLFLIGSTQSIYELRTKALSSLISKEELSAIILHIAKHRGYDDSALKNENGTIIEALNKNKEAMLKFKSVGEYFYKNFVQNKEVKKIRNTTEDYSNSVPRSLLKQELDLILDKQKELGLIKNADFKAKLFEIIFFKRPLKDFSNKIGNCIFFENEKRAAKNTISACEFVALGKVVNLLKSIEKDIGIVYEKDSINEIMSIILDKTSISYKKIRDILNLPQDINFKGLDYSKNNAENSKLVDLKKLNEFKKALGDGFANLDKDILDSIATDITLTKDTATLKEKLKNYNVLNAEQIEKLSELVFNDHINLSLKALKQIIPLMYEGKRYDEACELCNFTIAKNQEKNEYLPLFEKTRFAKDISSPVVIRAICEFRKLLNDIIRRYGSVHKIHLELTRDFGISFNDRKKIIKEIEQNEQSRIKALETIKELKLEETSKNIQIVRLFEDQKGICPYSGLKMDLKCLDELVIDYIRPYNRSLDDSYSNKVLTFKKLNDLKQGKTPFEAFGEDEKLWAEINERIKEYNGKKRFKIFDKFFKDKKPFDFTEQTLQDTRWLTKLVASYLNEYLSFLPISEDENTALGYGEKGSKQHVVLSSGMITQMLRNFWYLGFKNHKNYKNNAMDAIIVAFTTNSIIFAFNNFKKELDLAKAEFYANKISESDYLLKRKFLPPFSGFKEQALEKVKNIFVSHSLKIKNKGTLHELTPLKIKELKNTYGDLDLAVKLGKIRKYNDKYYANTKGSLVRTDLFVDKENKFHAVSIYKADFSTKKLPNKTPATTSNGETKEGIEMNENYNFCMSLYKNTPVSVKIKGMKEPIICYYHGFNTSGSKITYKKHDNNYHNLSEDEMVVFRKNDKESIVVGKILEIKKYSISPSGELSLIENEKRKWF

SEQ ID NO: 112 - protein, 965 aa, Campylobacter coli
  Campylobacter coli 80352
MKIIGFNLGIANIGWALRENDEIIDCGVRVFDIPENPKNGNSLALERRENKARMKIVKRKKARMLATKTFLKKELNVDLSKLFLIGSTQSIYELRTKALSSLISKEELSAIILHIAKHRGYDDSALKNENGTIIEALNKNKEAMLKFKSVGEYFYKNFVQNKEVKKIRNTTEDYSNSVPRSLLKQELDLILDKQKELGLIKNADFKAKLFEIIFFKRPLKDFSNKIGNCIFFENEKRAAKNTISACEFVALGKVVNLLKSIEKDIGIVYEKDSINEIMSIILDKTSISYKKIRDILNLPQDINFKGLDYSKNNVENSKLVDLKKLNEFKKALGDGFTNLDKDILDSIATDITLTKDTATLKEKLKNYNVLNAEQIEKLSELVFNDHINLSLKALKQIIPLMYEGKRYDEACELCNFTIAKNQEKNEYLPLFEKTRFAKDISSPVVIRAICEFRKLLNDIIRRYGSVHKIHLELTRDFGISFNDRKKIIKEIEQNEQSRIKALETIKELKLEETSKNIQIVRLFEDQKGICPYSGLKMDLKCLDELVIDYIRPYNRSLDDSYSNKVLTFKKLNDLKQGKTPFEAFGEDEKLWAEINERIKEYNGKKRFKIFDKFFKDKKPFDFTEQTLQDTRWLTKLVASYLNEYLSFLPISEDENTALGYGEKGSKQHVILSSGMITQMLRNFWYLGFKNHKDYKNNAMDAIIVAFTTNSIIFTFNNFKKELDLAKAEFYANKISESDYLLKRKFLPPFSGFKEQALEKVKNIFVSHSLKIKNKGTLHELTPLKIKELKNTYGDLDLAVKLGKIRKYNDKYYANAKGSLVRTDLFADKENKFHAVSIYKADFSTKKLPNKTPATTSNGETKEGIEMNENYNFCMSLYKNTPISVKIKGMKEPIICYYHGFNTSGSKITYKKHDNNYHNLSEDEMVVFRKNDKESIVVGKILEIKKYSISPSGELSLIENEERKWF

SEQ ID NO: 113 - protein, 987 aa, Campylobacter coli
  Campylobacter coli 80352
MARILAFDIGISSIGWAFSENDELKDCGVRIFTKAENPKTGESLALPRRLARSARKRLARRKARLNHLKHLIANEFKLNYEDYQSFDESLAKAYKGSLISPYELRFRALNELLSKQDFARVILHIAKRRGYDDIKNSDDKEKGAILKAIKQNEEKLANYQSVGEYLYKEYFQKFKENSKEFTNVRNKKESYERCIAQSFLKDELKLIFKKQREFGFSFSKKFEEEVLSVAFYKRALKDFSHLVGNCSFFTDEKRAPKNSPLAFMFVALTRIINLLNNLKNTEGILYTKDDLNALLNEVLKNGTLTYKQTKKLLGLSDDYEFKGEKGTYFIEFKKYKEFIKALGDHSLSQDDLNEIAKDITLIKDEIKLKKALAKYDLNQNQIDSLSKLEFKDHLNISFKALKLITPLMLEGKKYDEACNELNLKVAINEDKKDFLPAFNETYYKDEVTNPVVLRAIKEYRKVLNALLKKYGKVHKINIELAREVGKNYSQRAKIEKEQNENYKAKKDAELECEKLGLKINSKNILKLRLFKEQKEFCAYSGEKIKISDLQDEKMLEIDHIYPYSRSFDDSYMNKVLVFTKQNQEKLNKTPFEAFGNDSTKWQKIEVLAKNLPEKKQKRILDKNYKDKEQKDFKDRNLNDTRYIARLVLNYTKDYLDFLPLSDDENTKLNDTQKGSKVHVEAKSGMLTSALRHTWGFSTKDRNNHLHHAIDAVIIAYANNSIVKAFSDFKKEQESNSAELYAKKISELDYKNKRKFFEPFSGFRQKVLDKIDEIFVSKPERKKPSGALHEETFRKEEEFYQSYGGKEGVLKALELGKIRKVNGKIVKNGDMFRVDIFKHKKTNKFYAVPIYTMDFALKVLPNKAVARSKKGEIKDWILMDENYEFCFSLYKDSLILIQTKDMQEPEFVYYNAFTSSTVSLIVSKHDNKFETLSKNQKILFKNANEKEVIAKSIGIQNLKVFEKYIVSALGEVTKAEFRQREDFKNELR

SEQ ID NO: 114 - protein, 984 aa, Campylobacter jejuni
MAKILAFDIGISSIGWAFSENDELKDCGVRIFTKAENPKTGESLALPRRIARSARKRLARRKARLNHLKHLIANEFKLNYEDYQSFDEILAKAYKGSLISPYELRFRALNELLSKQDFARVILHIAKRRGYDDIKNNGDEEKGKILKAIKQNEEKLANYQSVGEYLYKEYFQKFKENSKEFINVRNKKESYERCIAQSFLKDELKLIFKKQREFGFSFSKKFEEEVLSVAFYKRALKDFSHLVGNCSFFTDEKRAPKNSPLAFMFVALTRIINLLNNLKNTLYTKDDLNALLNEVLKNGTLTYKQTKKLLGLSDDYEFKGEKGNYFIEFKKYKEFIKALGEHSLSQDDLNEIAKDITLIKDEIKLKKALAKYDLNENQIDNLSKLEFKDHLNISFKALKLITPLMLEGKKYDEACNELTLKVAINEDKKDFLPAFNETYYKDEVTNPVVLRAIKEYRKVLNALLKKYGKVHKINIELAREVGKNHSQRAKIEKEQNENYKAKKDAELECEKLGLKINSKNILKLRLFKEQKEFCVYSGEKIKLSDLQDEKMLEIDHIYPYSRSFDDSYMNKVLVFTKQNQEKLNQTPFEAFGNDSAKWQKIEVLAKNLPTKKQKRILDKNYKDKEQKDFKDRNLNDTRYIARLVLNYTKDYLDFLPLSDDENTKLNDTQKGSKVHVEAKSGMLTSALRHTWGFSTKDRNNHLHHAIDAVIIAYANNSIVKAFSDFKKEQESNTAELYAKKISELDYKNKRKFFEPFSGFRQKVLDKIDEIFVSKPERKKPSGALHEETFRKEEEFYQSYGGKEGVLKALELGKIRKVNGKIVKNGDMFRVDIFKHKKTNKFYAVPIYTMDFALKVLPNKAVARSKKGEIKDWILMDENYEFCFSLYKDSLILIQTKDMQEPEFVYYNAFTSSTVSLIVSKHDNKFETLSKNQKILFKNANEKEVIAKSIGIQNLKVFEKYIVSALGEVTKAEFRQREEFKNELR

SEQ ID NO: 115 - protein, 987 aa, Campylobacter jejuni
  Campylobacter jejuni subsp. jejuni 110-21
MARILAFDIGISSIGWAFSENDELKDCGVRIFTKAENPKTGESLALPRRLARSARKRLARRKARLNHLKHLIANEFKLNYEDYQSFDESLAKAYKGSLISPYELRFRALNELLSKQDFARVILHIAKRRGYDNIKNSDNEEKSEILKAIKQNEEKLVNYQSVGEYLYKEYFQKFKENSKEFINVRNKKESYERCIAQSFLKDELKLIFQKQREFGLSFSKKFEEEVLSVAFYKRALKDFSHLVGNCSFFTDEKRAPKNSPLAFMFVALTRIINLLNNLKNTEGILYTKDDLNTLLNEVLKNGTLTYKQTKKLLGLSDDYEFKGEKGTYFIEFKKYKEFIKALGDHSLSQDDLNEIAKDITLIKDEIKLKKALAKYDLNQNQIDSLSKLEFKDHLNISFKALKLITPLMLEGKKYDEACNELNLKVVINEDKKDFLPAFNETYYKDEVTNPVVLRAIKEYRKVLNALLKKYGKVHKINIELAREVGKNHSQRAKIEKEQNENYKAKKDAELECEKLGLKINNKNILKLRLFKEQKEFCAYSGEKIKLSDLQDEKMLEIDHIYPYSRSFDDSYMNKVLVFTKQNQEKLNKTPFEAFGNDSTKWQKIEVLAKNLPTKKQKRILDKNYKDKEQKDFKDRNLNDTRYIARLVLNYTKDYLDFLPLSDDENTKLNDIQKGSKVHVEAKSGMLTSALRHTWGFSTKDRNNHLHHAIDAVIIAYANNSIVKAFSDFKKEQESNSAELYAKKISELDYKNKRKFFEPFSGFRQKVLDKIDEIFVSKPERKKPSGALHEETFRKEEEFYQSYGGKEGVLKALELGKIRKVNGKIVKNGDMFRVDIFKHKKTNKFYAVPIYTMDFALKVLPNKAVVQGKDKKSGLIKDWILMDENYEFCFSLYKDSLILIQTKDMQEPEFVYYNAFTSSTVSLIVSKHDNKFETLSKNQKILFKNANEKEVIAKSIGIQNLKVFEKYIVSALGEVTKAEFRQREDFKK

SEQ ID NO: 116 - protein, 987 aa, Campylobacter jejuni
  Campylobacter jejuni subsp. jejuni 129-258
MARILAFDIGISSIGWAFSENDELKDCGVRIFTKAENPKTGESLALPRRLARSARKRLARRKARLNHLKHLIANEFKLNYEDYQSFNESLAKAYKGSLISPYELRFRALNELLSKQDFARVILHIAKRRGYDDIKNSDDKEKGAILKVIKQNEEKLANYQSVGEYLYKEYFQKFKENSKEFTNVRNKKESYERCIAQSFLKDELKLIFQKQREFGFSFSKKFEEEVLSVAFYKRALKDFSHLVGNCSFFTDEKRAPKNSPLAFMFVALTRIINLLNNLKNTEGILYTKDDLNALLNEVLKNGTLTYKQTKKLLGLSDDYEFKGEKGTYFIEFKKYKEFIKALGDHSLSQDDLNEIAKDITLIKDEIKLKKALAKYDLNQNQIDSLSKLEFKDHLNISFKALKLITPLMLEGKKYDEACNELNLKVAINEDKKDFLPAFNETYYKDEVTNPVVLRAIKEYRKVLNALLKKYGKVHKINIELAREVGKNYSQRAKIEKEQNENYKAKKDAELECEKLGLKINSKNILKLRLFKEQKEFCAYSGEKIKISDLQDEKMLEIDHIYPYSRSFDDSYMNKVLVFTKQNQEKLNQTPFEAFGNDSAKWQKIEVLAKNLPTKKQKRILDKNYKDKEQKDFKDRNLNDTRYIARLVLNYTKDYLDFLPLSDDENTKLNDTQKGSKVHVEAKSGMLTSALRHTWGFSAKDRNNHLHHAIDAVIIAYANNSIVKAFSDFKKEQESNSAELYAKKISELDYKNKRKFFEPFSGFRQKVLDKIDEIFVSKPERKKPSGALHEETFRKEEEFYQSYGGKEGVLKALELGKIRKVNGKIVKNGDMFRVDIFKHKKTNKFYAVPIYTMDFALKVLPNKAVARSKKGEIKDWILMDENYEFCFSLYKDSLILIQTKDMQEPELVYFNAFTSSTVSLIVSKHDNKFETLSKNQKILFKNANEKEVIAKSIGIQNLKVFEKYIVSALGEVTKAEFRQREDFKNELR

SEQ ID NO: 117 - protein, 987 aa, Campylobacter jejuni
  Campylobacter jejuni subsp. jejuni 1336
MARILAFDIGISSIGWAFSENDELKDCGVRIFTKAENPKTGESLALPRRLARSARKRLARRKARLNHLKHLIANEFKLNYEDYQSFDESLAKAYKGSLISPYELRFRALNELLSKQDFARVILHIAKRRGYDDIKNNGDEEKGKILKAIKQNEEKLVSYQSVGEYLYKEYFQKFKENSKEFINVRNKKESYERCIAQSFLKDELKLIFQKQREFGFSFSKKFEEEVLSVAFYKRALKDFSHLVGNCSFLLMKKERQKNSPLAFMFVALTRIINLLNNLKNTEGILYTKDDLNTLLNEALKNGTLTYKQTKKLLGLSNDYEFKGEKGTYFIEFQKYKEFVKALGEHNLSQDDLNEIAKDITLIKDEIKLKKALAKYDLNQNQIDSLSKLEFKDHLNISFKALKLITPLMLEGKKYDEACNELNLKVAINEDKKDFLPAFNETYYKDEVTNPVVLRAIKEYRKVLNALLKKYGKVHKINIELAREVGKNHSQRAKIEKEQNENYKAKKDAELECEKLGLKINSKNILKLRLFKEQKEFCVYSGEKIKISDLQDEKMLEIDHIYPYSRSFDDSYMNKVLVFTKQNQEKLNKTPFETFGNDRVKWQKIEVLAKNLPTKKQKRILDKNYKDKEQKDFKDRNLNDTRYIARLVLNYTKDYLDFLPLSDDENTKLNDTQKGSKVHVEAKSGMLTSTLRHTWGFSTKDRNNHLHHAIDAAIIAYANNSIVKAFSDFKKEQESNTAELYAKKISELDYKNKRKFFEPFSGFRQKLLDKIDEIFVSKPERKKPSGALHEETFRKEEEFYQSYGGKEGVLKALELGKIRKVNGKMVKNGDMFRVDIFKHKKTNKFYAVPIYTMDFALKVLPNKAVVQGKDKKSGLIKDWILMDENYEFCFSLYKDSLILIQTKDMQEPELVYYERLDSSNASLTVSKHDNKFETLSKNQKILFKNANEKEVIAKSIGIQNLKVFEKYIVSALGEVTKAEFRQREDFKK

SEQ ID NO: 118 - protein, 984 aa, Campylobacter jejuni
  Campylobacter jejuni subsp. jejuni 140-16
MARILAFDIGISSIGWAFSENDELKDCGVRIFTKVENPKTGESLALPRRLARSARKRLARRKARLNHLKHLIANEFKLNYEDYQSFDESLAKAYKGSLISPYELRFRALNELLSKQDFARVILHIAKRRGYDDIKNSDDKEKGAILKAIKQNEEKLANYQSVGEYLYKEYFQKFKENSKEFTNVRNKKESYERCIAQSFLKDELKLIFKKQREFGFSFSKKFEEEVLSVAFYKRALKDFSHLVGNCSFFTDEKRAPKNSPLAFMFVALTRIINLLNNLKNTEGILYTKDDLNALLNEVLKNGTLTYKQTKKLLGLSDDYEFKGEKGTYFIEFKKYKEFIKALGEHNLSQDDLNEIAKDITLIKDEIKLKKALAKYDLNQNQIDSLSKLEFKDHLNISFKALKLITPLMLEGKKYDEACNELNLKVAINEDKKDFLPAFNETYYKDEVTNPVVLRAIKEYRKVLNALLKKYGKVHKINIELAREVGKNHSQRAKIEKEQNENYKAKKDAELECEKLGLKINSKNILKLRLFKEQKEFCAYSGEKIKISDLQDEKMLEIDHIYPYSRSFDDSYMNKVLVFTKQNQEKLNKTPFEAFGNDSAKWQKIEVLAKNLPTKKQKRILDKNYKDKEQKDFKDRNLNDTRYIARLVLNYTKDYLDFLPLSDDENTKLNDTQKGSKVHVEAKSGMLTSALRHTWGFSTKDRNNHLHHAIDAVIIAYANNSIVKAFSDFKKEQESNSAELYAKKISELDYKNKRKFFEPFSGFRQKVLDKIDEIFVSKPERKKPSGALHEETFRKEEEFYQSYGGKEGVLKALELGKIRKVNGKIVKNGDMFRVDIFKHKKTNKFYAVPIYTMDFALKVLPNKAVARSKKGEIKDWILMDENYEFCFSLYKDSLILIQTKDMQEPEFVYYNAFTSSTVSLIVSKHDNKFETLSKNQKILFKNANEKEVIAKSIGIQNLKVFEKYIVSALGEVTKAEFIQREDFKK

SEQ ID NO: 119 - protein, 984 aa, Campylobacter jejuni
  Campylobacter jejuni subsp. jejuni 1577
MARILAFDIGISSIGWAFSENDELKDCGVRIFTKVENPKTGESLALPRRLARSARKRLARRKVRLNHLKHLIANEFKLNYEDYQSFDESLAKAYKGSLISPYELRFRALNELLSKQDFARVILHIAKRRGYDDIKNSDDKEKGAILKAIKQNEEKLANYQSVGEYLYKEYFQKFKENSKEFTNVRNKKESYERCIAQSFLKDELKLIFKKQREFGFSFSKKFEEEVLSVAFYKRALKDFSHLVGNCSFFTDEKRAPKNSPLAFMFVALTRIINLLNNLKNTEGILYTKDDLNALLNEVLKNGTLTYKQTKKLLGLSDDYEFKGEKGTYFIEFKKYKEFIKALGEHNLSQDDLNEIAKDITLIKDEIKLKKALAKYDLNQNQIDSLSKLEFKDHLNISFKALKLITPLMLEGKKYDEACNELNLKVAINEDKKDFLPAFNETYYKDEVTNPVVLRAIKEYRKVLNALLKKYGKVHKINIELAREVGKNHSQRAKIEKEQNENYKAKKDAELECEKLGLKINSKNILKLRLFKEQKEFCAYSGEKIKISDLQDEKMLEIDHIYPYSRSFDDSYMNKVLVFTKQNQEKLNKTPFEAFGNDSAKWQKIEVLAKNLPTKKQKRILDKNYKDKEQKDFKDRNLNDTRYIARLVLNYTKDYLDFLPLSDDENTKLNDTQKGSKVHVEAKSGMLTSALRHTWGFSTKDRNNHLHHAIDAVIIAYANNSIVKAFSDFKKEQESNSAELYAKKISELDYKNKRKFFEPFSGFRQKVLDKIDEIFVSKPERKKPSGALHEETFRKEEEFYQSYGGKEGVLKALELGKIRKVNGKIVKNGDMFRVDIFKHKKTNKFYAVPIYTMDFALKVLPNKAVARSKKGEIKDWILMDENYEFCFSLYKDSLILIQTKDMQEPEFVYYNAFTSSTVSLIVSKHDNKFETLSKNQKILFKNANEKEVIAKSIGIQNLKVFEKYIVSALGEVTKAEFRQREDFKK

SEQ ID NO: 120 - protein, 987 aa, Campylobacter jejuni
  Campylobacter jejuni subsp. jejuni 1854
MARILAFDIGISSIGWAFSENDELKDCGVRIFTKAENPKTGESLALPRRLARSARKRLARRKARLNHLKHLIANEFKLNYEDYQSFDESLAKAYKGSLISPYELRFRALNELLSKQDFARVILHIAKRRGYDDIKNSDDKEKGAILKAIKQNEEKLANYQSVGEYLYKEYFQKFKENSKEFTNVRNKKESYERCIAQSFLKDELKLIFKKQREFGFSFSKKFEEEVLSVAFYKRALKDFSHLVGNCSFFTDEKRAPKNSPLAFMFVALTRIINLLNNLKNTEGILYTKDDLNTLLNEVLKNGTLTYKQTKKLLGLSDDYEFKGEKGTYFIEFKKYKEFIKSLGDHSLSQDDLNEIAKDITLIKDEIKLKKALAKYDLNQNQIDSLSKLEFKDHLNISFKALKLITPLMLEGKKYDEACNELNLKVAINEDKKDFLPAFNETYYKDEVTNPVVLRAIKEYRKVLNALLKKYGKVHKINIELAREVGKNHSQRAKIEKEQNENYKAKKDAELECEKLGLKINSKNILKLRLFKEQKEFCAYSGEKIKISDLQDEKMLEIDHIYPYSRSFDDSYMNKVLVFTKQNQEKLNQTPFEAFGNDSAKWQKIEVLAKNLPTKKQKRILDKNYKDKEQKNFKDRNLNDTRYIARLVLNYTKDYLDFLPLSDDENTKLNDTQKGSKVHVEAKSGMLTSALRHTWGFSAKDRNNHLHHAIDAVIIAYANNSIVKAFSDFKKEQESNSAELYAKKISELDYKNKRKFFEPFSGFRQKVLDKIDEIFVSKPERKKPSGALHEETFRKEEEFYQSYGGKEGVLKALELGKIRKVNGKIVKNGDMFRVDIFKHKKTNKFYAVPIYTMDFALKVLPNKAVARSKKGEIKDWILMDENYEFCFSLYKDSLILIQTKDMQEPEFVYYNAFTSSTVSLIVSKHDNKFETLSKNQKILFKNANEKEVIAKSIGIQNLKVFEKYIVSALGEVTKAEFRQREDFKNELR

SEQ ID NO: 121 - protein, 984 aa, Campylobacter jejuni
  Campylobacter jejuni subsp. jejuni 1997-10
MARILAFDIGISSIGWAFSENDELKDCGVRIFTKAENPKTGESLALPRRLARSARKRLARRKARLNRLKHLIANEFKLNYEDYQSFDESLAKAYKGSLISPYELRFRALNELLSKQDFARVILHIAKRRGYDDIKNSDDKEKGAILKAIKQNEEKLANYQSVGEYLYKEYFQKFKENSKEFTNVRNKKESYERCIAQSFLKDELKLIFKKQREFGFSFSKKFEEEVLSVAFYKRALKDFSHLVGNCSFFTDEKRAPKNSPLAFMFVALTRIINLLNNLKNTEGILYTKDDLNALLNEVLKNGTLTYKQTKKLLGLSDDYEFKGEKGTYFIEFKKYKEFIKALGDHSLNQDDLNEIAKDITLIKDEIKLKKALAKYDLNQNQIDSLSKLEFKDHLNISFKALKLITPLMLEGKKYDEACNELNLKVAINEDKKDFLPAFNETYYKDEVTNPVVLRAIKEYRKVLNALLKKYGKVHKINIELAREVGKNYSQRAKIEKEQNENYKAKKDAELECEKLGLKINSKNILKLRLFKEQKEFCVYSGEKIKISDLQDEKMLEIDHIYPYSRSFDDSYMNKVLVFTKQNQEKLNQTPFEAFGNDSAKWQKIEVLAKNLPTKKQKRILDKNYKDKEQKDFKDRNLNDTRYIARLVLNYTKDYLDFLPLSDDENTKLNDTQKGSKVYVEAKSGMLTSALRHTWGFSTKDRNNHLHHAIDAVIIAYANNSIVKAFSDFKKEQESNSAELYAKKISELDYKNKRKFFEPFSGFRQKVLDKIDEIFVSKPERKKPSGALHEETFRKEEEFYQSYGGKEGVLKALELGKIRKVNGKIVKNGDMFRVDIFKHKKTNKFYAVPIYTMDFALKVLPNKAVARSKKGEIKDWILMDENYEFCFSLYKDSLILIQTKDMQEPEFVYYNAFTSSTVSLIVSKHDNKFETLSKNQKILFKNANEKEVIAKSIGIQNLKVFEKYIVSALGEVTKAEFRQREDFKK

SEQ ID NO: 122 - protein, 987 aa, Campylobacter jejuni
  Campylobacter jejuni subsp. jejuni 2008-1025
MARILAFDIGISSIGWAFSENDELKDCGVRIFTKAENPKTGESLALPRRLARSARKRLARRKARLNHLKHLIANEFKLNYEDYQSFDESLAKAYKGSLISPYELRFRALNELLSKQDFARVILHIAKRRGYDDIKNNGDEEKSEILKAIKQNEEKLVNYQSVGEYLYKEYFQKFKENSKEFINVRNKKESYERCIAQSFLKDELKLIFQKQREFGFSFSKKFEEEVLSVAFYKRALKDFSHLVGNCSFFTDEKRAPKNSPLAFMFVALTRIINLLNNLKNTEGILYTKDDLNTLLNEVLKNGTLTYKQTKKLLGLSDDYEFKGEKGTYFIEFKKYKEFIKALGEHNLSQDNLNEIAKDITLIKDEIKLKKALAKYDLNQNQIDSLSKLEFKDHLNISFKALKLITPLMLEGKKYDEAYNELNLKVAINEDKKDFLPAFNETYYKDEVTNPVVLRAIKEYRKVLNALLKKYGKVHKINIELAREVGKNHSQRAKIEKEQNENYKAKKDAELECEKLGLKINSKNILKLRLFKEQKEFCAYSGEKIKISDLQDEKMLEIDHIYPYSRSFDDSYMNKVLVFTKQNQEKLNQTPFEAFGNDSAKWQKIEVLAKNLPTKKQKRILDKNYKDKEQKDFKDRNLNDTRYIARLVLNYTKDYLDFLPLSDDENTKLNDTQKGSKVHVEAKSGMLTSALRHTWGFSAKDRNNHLHHAIDAVIIAYANNSIVKAFSDFKKEQESNSAELYAKKISELDYKNKRKFFEPFSGFRQKVLDKIDEIFVSKPERKKPSGALHEETFRKEEEFYQSYGGKEGVLKALELGKIRKVNGKIVKNGDMFRVDIFKHKKTNKFYAVPIYTMDFALKVLPNKAVVQGKDKKSGLIKDWILMDENYEFCFSLYKDSLILIQTKDMQEPELVYFNAFTSSTVSLIVSKHDNKFETLSKNQKILFKNANEKEVIAKSIGIQNLKVFEKYIVSALGEVTKAEFRQREDFKK

SEQ ID NO: 123 - protein, 984 aa, Campylobacter jejuni
  Campylobacter jejuni subsp. jejuni 2008-872
MARILAFDIGISSIGWAFSENDELKDCGVRIFTKVENPKTGESLALPRRLARSARKRLARRKARLNHLKHLIANEFKLNYEDYQSFDESLAKAYKGSLISPYELRFRALNELLSKQDFARVILHIAKRRGYDDIKNSDDKEKGAILKAIKQNEEKLANYQSVGEYLYKEYFQKFKENSKEFTNVRNKKESYERCIAQSFLKDELKLIFKKQREFGFSFSKKFEEEVLSVAFYKRALKDFSHLVGNCSFFTDEKRAPKNSPLAFMFVALTRIINLLNNLKNTEGILYTKDDLNALLNEVLKNGTLTYKQTKKLLGLSDDYEFKGEKGTYFIEFKKYKEFIKALGEHNLSQDDLNEIAKDITLIKDEIKLKKALAKYDLNQNQIDSLSKLEFKDHLNISFKALKLITPLMLEGKKYDEACNELNLKVAINEDKKDFLPAFNETYYKDEVTNPVVLRAIKEYRKVLNALLKKYGKVHKINIELAREVGKNHSQRAKIEKEQNENYKAKKDAELECEKLGLKINSKNILKLRLFKEQKEFCAYSGEKIKISDLQDEKMLEIDHIYPYSRSFDDSYMNKVLVFTKQNQEKLNKTPFEAFGNDSAKWQKIEVLAKNLPTKKQKRILDKNYKDKEQKDFKDRNLNDTRYIARLVLNYTKDYLDFLPLSDDENTKLNDTQKGSKVHVEAKSGMLTSALRHTWGFSTKDRNNHLHHAIDAVIIAYANNSIVKAFSDFKKEQESNSAELYAKKISELDYKNKRKFFEPFSGFRQKVLDKIDEIFVSKPERKKPSGALHEETFRKEEEFYQSYGGKEGVLKALELGKIRKVNGKIVKNGDMFRVDIFKHKKTNKFYAVPIYTMDFALKVLPNKAVARSKKGEIKDWILMDENYEFCFSLYKDSLILIQTKDMQEPEFVYYNAFTSSTVSLIVSKHDNKFETLSKNQKILFKNANEKEVIAKSIGIQNLKVFEKYIVSALGEVTKAEFRQREDFKK

SEQ ID NO: 124 - protein, 987 aa, Campylobacter jejuni
  Campylobacter jejuni subsp. jejuni 2008-979
MARILAFDIGISSIGWAFSENDELKDCGVRIFTKAENPKTGESLALPRRLARSARKRLARRKARLNHLKHLIANEFKLNYEDYQSFDESLAKAYKGSLISPYELRFRALNELLSKQDFARVILHIAKRRGYDDIKNSDDKEKGAILKAIKQNEEKLVNYQSVGEYLYKEYFQKFKENSKEFTNVRNKKESYERCIAQSFLKDELKLIFKKQREFGFSFSKKFEEEVLSVAFYKRALKDFSHLVGNCSFFTDEKRAPKNSPLAFMFVALTRIINLLNNLKNTEGILYTKDDLNALLNEVLKNGTLTYKQTKKLLGLSDDYEFKGEKGTYFIEFKKYKEFIKALGDHSLSQDDLNEIAKDITLIKDEIKLKKALAKYDLNQNQIDSLSKLEFKDHLNISFKALKLITPLMLEGKKYDEACNELNLKVAINEDKKDFLPAFNETYYKDEVTNPVVLRAIKEYRKVLNALLKKYGKVHKINIELAREVGKNYSQRAKIEKEQNENYKAKKDAELECEKLGLKINSKNILKLRLFKEQKEFCAYSGEKIKISDLQDEKMLEIDHIYPYSRSFDDSYMNKVLVFTKQNQEKLNQTPFEAFGNDSAKWQKIEVLAKNLPTKKQKRILDKNYKDKEQKDFKDRNLNDTRYIARLVLNYTKDYLDFLPLSDDENTKLNDTQKGSKVHVEAKSGMLTSALRHTWGFSAKDRNNHLHHAIDAVIIAYANNSIVKAFSDFKKEQESNSAELYAKKISELDYKNKRKFFEPFSGFRQKVLDKIDEIFVSKPERKKPSGALHEETFRKEEEFYQSYGGKEGVLKALELGKIRKVNGKIVKNGDMFRVDIFKHKKTNKFYAVPIYTMDFALKVLPNKAVARSEKGEIKDWILMDENYEFCFSLYKDSLILIQTKDMQEPELVYFNAFTSSTVSLIVSKHDNKFETLSKNQKILFKNANEKEVIAKSIGIQNLKVFEKYIVSALGEVTKAEFRQREDFKNELR

SEQ ID NO: 125 - protein, 965 aa, Campylobacter jejuni
  Campylobacter jejuni subsp. jejuni 2008-988
MKIIGFNLGIANIGWALRENDEIIDCGVRVFDIPENPKNGNSLALERRENKARMKIVKRKKARMLATKTFLKKELNVDLSKLFLIGSTQSIYELRAKALSSLISKEELSAIILHIAKHRGYDDSALKNENGTIIEALNKNKETMLKFKSVGEYFYKNFVQNKEVKKIRNTTEDYSNSVPRSLLKQELDLILDKQKELGLIKNADFKEKLFEIIFFKRPLKDFSNKIGNCIFFENEKRAAKNTISACEFVALGKVVNLLKSIEKDIGIVYEKDSINEIMSIILDKTSISYKKIRDILNLPQEINFKGLDYSKNNVENSKLVDLKKLNEFKKALGDGFANLDKDILDSIATDITLTKDTATLKEKLKNYNVLNAEQIEKLSELVFNDHINLSLKALKQIIPLMYEGKRYDEACELCNFTIAKNQEKSEYLPLFEKTRFAKDISSPVVIRAICEFRKLLNDIIRRYGSVHKIHLELTRDFGISFSDRKKIIKEIEQNEQSRIKALETIKELKLEETSKNIQIVRLFEDQKGICPYSGLKMDLNRLDELVIDYIRPYNRSLDDSYSNKVLTFKKLSDLKQGKTPFEAFGEDEKLWAEINERIKEYNGKKRFKIFDKFFKDKKPFDFTEQTLQDTRWLTKLVASYLNEYLSFLPISEDENTALGYGEKGSKQHVILSSGMITQMLRNFWYLGFKNHKDYKNNAMDAIIVAFTTNSIIFAFNNFKKELDLAKAEFYANKISESDYLLKRKFLPPFSGFKEQALEKVKNIFVSHSLKIKNKGTLHDLTPLKIKELKNTYGDLDLAVKLGKIRKYNDKYYANANGSLVRADLFVDKKNKFHAVSIYKADFSTKKLPNKTPATTSNGETKEGIEMNENYNFCMSLYKNTPISVKIKGMKEPIICYYHGFNTSGSKITYKKHDNNYHNLSEDEMVVFRKNDKESIAVGKILEIKKYSISPSGELSLIENEERKWF

SEQ ID NO: 126 - protein, 984 aa, Campylobacter jejuni
  Campylobacter jejuni subsp. jejuni 2008-988
MARILAFDIGISSIGWAFSENDELKDCGVRIFTKVENPKTGESLALPRRLARSARKRLARRKARLNHLKHLIANEFKLNYEDYQSFDESLAKAYKGSLISPYELRFRALNELLSKQDFARVILHIAKRRGYDDIKNSDDKEKGAILKAIKQNEEKLANYQSVGEYLYKEYFQKFKENSKEFTNVRNKKESYERCIAQSFLKDELKLIFKKQREFGFSFSKKFEEEVLSVAFYKRALKDFSHLVGNCSFFTDEKRAPKNSPLAFMFVTLTRIINLLNNLKNTEGILYTKDDLNALLNEVLKNGTLTYKQTKKLLGLSDDYEFKGEKGTYFIEFKKYKEFIKALGEHNLSQDDLNEIAKDITLIKDEIKLKKALAKYDLNQNQIDSLSKLEFKDHLNISFKALKLITPLMLEGKKYDEACNELNLKVAINEDKKDFLPAFNETYYKDEVTNPVVLRAIKEYRKVLNALLKKYGKVHKINIELAREVGKNHSQRAKIEKEQNENYKAKKDAELECEKLGLKINSKNILKLRLFKEQKEFCAYSGEKIKISDLQDEKMLEIDHIYPYSRSFDDSYMNKVLVFTKQNQEKLNKTPFEAFGNDSAKWQKIEVLAKNLPTKKQKRILDKNYKDKEQKDFKDRNLNDTRYIARLVLNYTKDYLDFLPLSDDENTKLNDTQKGSKVHVEAKSGMLTSALRHTWGFSTKDRNNHLHHAIDAVIIAYANNSIVKAFSDFKKEQESNSAELYAKKISELDYKNKRKFFEPFSGFRQKVLDKIDEIFVSKPERKKPSGALHEETFRKEEEFYQSYGGKEGVLKALELGKIRKVNGKIVKNGDMFRVDIFKHKKTNKFYAVPIYTMDFALKVLPNKAVARSKKGEIKDWILMDENYEFCFSLYKDSLILIQTKDMQEPEFVYYNAFTSSTVSLIVSKHDNKFETLSKNQKILFKNANEKEVIAKSIGIQNLKVFEKYIVSALGEVTKAEFRQREDFKK

SEQ ID NO: 127 - protein, 961 aa, Campylobacter jejuni
  Campylobacter jejuni subsp. jejuni 260.94
MARILAFDIGISSIGWAFSENDELKDCGVRIFTKAENPKTGESLALPRRLARSARKRLARRKARLNHLKHLIANEFKLNYEDYQSFDESLAKAYKGSLISPYELRFRALNELLSKQDFARVILHIAKRRGYDDIKNNGDEEKGKILKAIKQNEEKLVNYQSVGEYLYKEYFQKFKENSKEFINVRNKKESYERCITQSFLKYELKLIFQKQREFGFSFSKKFEEEVLSVAFYKRALKDFSHLVGNCSFFSDEKRAPKNSPLAFMFVALTRIINLLNNLKNTEGILYTKDDLNALLNEVLKNGTLTYKQTKKLLGLSDDYEFKGEKGTYFIEFKKYKEFIKALGEHNLSQDDLNEIAKDITLIKDEIKLKKALAKYDLNQNQIDSLSKLEFKDHLNIGFKALKLITPLMLEGKKYDEACNELNLKVAINEDKKDFLPAFNETYYKDEVTNPVVLRAIKEYRKVLNALLKKYGKVHKINIELAREVGKNHSQRAKIEKEQNENYKAKKDAELECEKLGLKINSKNILKLRLFKEQKEFCAYSGEKIKLSDLQDEKMLEIDHIYPYSRSFDDSYMNKVLVFTKQNQEKLNKTPFEAFGNDNVKWQKIEVLAKNLPEKKQKRILDKNYKDKEQKDFKDRNLNDTRYIARLVLNYTKDYLDFLPLSDDENTKLKGSKVHVEAKSGMLTSALRHTWGFSTKDRNNHLHHAIDAAIIAYANNSIVKDFSDFKKEQESNSAELYAKKISELDYKNKRKFFEPFSGFRQKVLDKIDEIFVSKPERKKPSGALHEETFRKEEEFYQSYGGKEGVLKALELGKIRKVNGKIVKNGDMFRVDIFKHKKTNKFYAVPIYTMDFALKVLPNKAVARSKKGEIKDWILMDENYEFCFSLYKDSLILIQTKDMQEPELVYFNAFTSSTVSLIVSKHDNKFETLSKNLKVFEKYIVSALGEVTKAEFRQREDFKNELR

SEQ ID NO: 128 - protein, 985 aa, Campylobacter jejuni
  Campylobacter jejuni subsp. jejuni 414
MAKILAFDIGISSIGWAFVENDELKDCGVRIFTKAENPKTGESLALPRRLARSARKRLARRKARLNHLKHLIANEFKLNYEDYQSFDESLAKAYKGTLISPYELRFKALNELLSKQDLARVILHIAKRRGYDNIKNSDDKEKGAILKAVKENEEKLANYKSVGEYLYKEYFQKFKENSKEFINVRNKKESYERCIAQSFLKDELKLIFQKQREFGFNFSKKFEEEVLSVAFYKRALKDFSHLVGNCSFFVDEKRAPKNSPLAFEFVALTRIVNLLNNLNKNNSYIKDDLNALLSEVLKNGTLTYKQTKKILGLSDDYEFKGQKGNYFIEFKKYKEFIKALCEHNLNQDDLNEIAKDITLVKDETKLKKALAKYDLNQNQIENLSKIEFKDHLNISFKALKLIVPLMREGKKYDEVCNELNLKTAINEDKKEFLPAFNETYYKDEVNNPVVLRAIKEYRKVLNSLLKKYGKVHKINIELAREVGKNHRERSKIEKEQNENFKAKKDAELECEKLGLKINSKNILKLRLFKEQKEFCVYSGEKIKISDLQDEKMLEIDHIYPYSRSFDDSYMNKVLVFTKQNQEKLNKTPFEAFGKDDVKWQKIETLAKNLPAKKQKRILDKNYKDKEQKDFKDRNLNDTRYIARLVLNYTKDYLEFLPLSDDENIKLNDTQKGSKVHVEAKSGMLTSVLRHTWGFSTKDRNNHLHHAIDAVIIAYANASVVKAFSDFKKEQENYTAELYAKKINELDFKNKRKFFEPFSNFRQKVLEKIDEIFVSKPERKKPSGALHEETFYKEEEFYKEYGGKEGVLKALELGKIRKVNGKIVSNANMFRVDIFKYKKTNKFYAVPIYTMDFALGILPNKAVVGGKDKQGIIKDWLLMDENYEFCFSLYKDSLILLQTKDMQEPELVYFKSFKSSTAGLVVSKHDNKFENLNENQKKLFKSANEKKVVAEGIGIQNLKVFEKYIVSALGEITKAEIKERENFKKK

SEQ ID NO: 129 - protein, 984 aa, Campylobacter jejuni
  Campylobacter jejuni subsp. jejuni 51037
MARILAFDIGISSIGWAFSENDELKDCGVRIFTKAENPKTGESLALPRRLARSARKRLARRKARLNHLKHLIANEFKLNYEDYQSFDESLAKAYKGSLISPYELRFRALNELLSKQDFARVILHIVKRRGYDDIKNSDDKEKGTILKAIKQNEEKLANYQSVGEYLYKEYFQKFKENSKEFTNVRNKKESYERCIAQSFLKDELKLIFKKQREFGFSFSKKFEEEVLSVAFYKRALKDFSHLVGNCSFFTDEKRAPKNSPLAFMFVALTRIINLLNNLKNTEGILYTKDDLNTLLNEVLKNGTLTYKQTKKLLGLSDDYEFKGEKGTYFIEFKKYKEFIKALGEHNLSQDDLNEIAKDITLIKDEIKLKKALAKYDLNQNQIDSLSKLEFKDHLNISFKALKLITPLMLEGKKYDEACNELNLKVAINEDKKDFLPAFNETYYKDEVTNPVVLRAIKEYRKVLNALLKKYGKVHKINIELAREVGKNYSQRAKIEKEQNENYKAKKDAELECEKLGLKINSKNILKLRLFKEQKEFCAYSGEKIKISDLQDEKMLEIDHIYPYSRSFDDSYMNKVLVFTKQNQEKLNQTPFEAFGNDSAKWQKIEVLAKNLPTKKQKRILDKNYKDKEQKDFKDRNLNDTRYIARLVLNYTKDYLDFLPLSDDENTKLNDTQKGSKVHVEAKSGMLTSALRHTWGFSAKDRNNHLHHAIDAVIIAYANNSIVKAFSDFKKEQESNSAELYAKKISELDYKNKRKFFEPFSGFRQKVLDKIDEIFVSKPERKKPSGALHEETFRKEEEFYQSYGGKEGVLKALELGKIRKVNGKIVKNGDMFRVDIFKHKKTNKFYAVPIYTMDFALKVLPNKAVARSKKGEIKDWILMDENYEFCFSLYKDSLILIQTKDMQEPEFVYYNAFTSSTVSLIVSKHDNKFETLSKNQKILFKNANEKEVIAKSIGIQNLKVFEKYIVSALGEVTKAEFRQREDFKK

SEQ ID NO: 130 - protein, 984 aa, Campylobacter jejuni
  Campylobacter jejuni subsp. jejuni 51494
MARILAFDIGISSIGWAFSENDELKDCGVRIFTKAENPKTGESLALPRRLARSARKRLARRKARLNHLKHLIANEFKLNYEDYQSFDESLAKAYKGSLISPYELRFRALNELLSKQDFARVILHIAKRRGYDDIKNSDDKEKGAILKAIKQNEEKLANYQSVGEYLYKEYFQKFKENSKEFTNVRNKKESYERCIAQSFLKDELKLIFKKQREFGFSFSKKFEEEVLSVAFYKRALKDFSHLVGNCSFFTDEKRAPKNSPLAFMFVALTRIINLLNNLKNTEGILYTKDDLNTLLNEVLKNGTLTYKQTKKLLGLSDDYEFKGEKGTYFIEFKKYKEFIKALGEHNLSQDDLNEIAKDITLIKDEIKLKKALAKYDLNQNQIDSLSKLEFKDHLNISFKALKLITPLMLEGKKYDEACNELNLKVAINEDKKDFLPAFNETYYKDEVTNPVVLRAIKEYRKVLNALLKKYGKVHKINIELAREVGKNYSQRAKIEKEQNENYKAKKDAELECEKLGLKINSKNILKLRLFKEQKEFCAYSGEKIKISDLQDEKMLEIDHIYPYSRSFDDSYMNKVLVFTKQNQEKLNKTPFEAFGNDSTKWQKIEVLAKNLPEKKQKRILDKNYKDKEQKDFKDRNLNDTRYIARLVLNYTKDYLDFLPLSDDENTKLNDTQKGLKVHVEAKSGMLTSALRHTWGFSAKDRNNHLHHAIDAVIIAYANNSIVKAFSDFKKEQESNSAELYAKKISELDYKNKRKFFEPFSGFRQKVLDKIDEIFVSKPERKKPSGALHEETFRKEEEFYQSYGGKEGVLKALELGKIRKVNGKIVKNGDMFRVDIFKHKKTNKFYAVPIYTMDFALKVLPNKAVARSKKGEIKDWILMDENYEFCFSLYKDSLILIQTKDMQEPEFVYYNAFTSSTVSLIVSKHDNKFETLSKNQKILFKNANEKEVIAKSIGIQNLKVFEKYIVSALGEVTKAEFRQREDFKK

SEQ ID NO: 131 - protein, 987 aa, Campylobacter jejuni
  Campylobacter jejuni subsp. jejuni 53161
MARILAFDIGISSIGWAFSENDELKDCGVRIFTKAENPKTGESLALPRRLARSARKRLARRKARLNHLKHLIANEFKLNYEDYQSFDEGLAKAYKGSLISPYELRFRALNELLSKQDFARVILHIAKRRGYDDIKNNGDEEKSEILKAIKQNEEKLVNYQSVGEYLYKEYFQKFKENSKEFINVRNKKESYERCIAQSFLKDELKLIFQKQREFGFSFSKKFEEEVLSVAFYKRALKDFSHLVGNCSFFTDEKRAPKNSPLAFMFVALTRIINLLNNLKNTEGILYTKDDLNTLLNEVLKNGTLTYKQTKKLLGLSDDYEFKGEKGTYFIEFKKYKEFIKALGEHNLSQDNLNEIAKDITLIKDEIKLKKALAKYDLNQNQIDSLSKLEFKDHLNISFKALKLITPLMLEGKKYDEAYNELNLKVAINEDKKDFLPAFNETYYKDEVTNPVVLRAIKEYRKVLNALLKKYGKVHKINIELAREVGKNHSQRAKIEKEQNENYKAKKDAELECEKLGLKINSKNILKLRLFKEQKEFCAYSGEKIKISDLQDEKMLEIDHIYPYSRSFDDSYMNKVLVFTKQNQEKLNQTPFEAFGNDSAKWQKIEVLAKNLPTKKQKRILDKNYKDKEQKDFKDRNLNDTRYIARLVLNYTKDYLDFLPLSDDENTKLNDTQKGSKVHVEAKSGMLTSALRHTWGFSAKDRNNHLHHAIDAVIIAYANNSIVKAFSDFKKEQESNSAELYAKKISELDYKNKRKFFEPFSGFRQKVLDKIDEIFVSKPERKKPSGALHEETFRKEEEFYQSYGGKEGVLKALELGKIRKVNGKIVKNGDMFRVDIFKHKKTNKFYAVPIYTMDFALKVLPNKAVVQGKDKKSGLIKDWILMDENYEFCFSLYKDSLILIQTKDMQEPELVYFNAFTSSTVSLIVSKHDNKFETLSKNQKILFKNANEKEVIAKSIGIQNLKVFEKYIVSALGEVTKAEFRQREDFKK

SEQ ID NO: 132 - protein, 984 aa, Campylobacter jejuni
  Campylobacter jejuni subsp. jejuni 60004
MARILAFDIGISSIGWAFSENDELKDCGVRIFTKAENPKTGESLALPRRLARSARKRLARRKARLNHLKHLIANEFKLNYEDYQSFDESLAKAYKGSLISPYELRFRALNELLSKQDFARVILHIAKRRGYDDIKNNGDEEKGKILKAIKQNEEKLVNYQSVGEYLYKEYFQKFKENSKEFINVRNKKESYERCITQSFLKYELKLIFQKQREFGFSFSKKFEEEVLSVAFYKRALKDFSHLVGNCSFFTDEKRAPKNSPLAFMFVALTRIINILNNLKNTEGILYTKDDLNALLNEVLKNGTLTYKQTKKLLGLSDDYEFKGEKGTYFIEFKKYKEFIKALGEHNLSQDDLNEIAKDITLIKDEIKLKKALAKYDLNQNQIDSLSKLEFKDHLNISFKALKLITPLMLEGKKYDEACNELNLKVAINEDKKDFLPAFNETYYKDEVTNPVVLRAIKEYRKILNALLKKYGKVHKINIELAREVGKNHSQRAKIEKEQNENYKAKKDAEIECEKLGLKINSKNILKLRLFKEQKEFCAYSGEKIKISDLQDEKMLEIDHIYPYSRSFDDSYMNKVLVFTKQNQEKLNQTPFEAFGNDSAKWQKIEVLAKNLPTKKQKRILDKNYKDKEQKDFKDRNLNDTRYIARLVLNYTKDYLDFLPLSDDENTKLNDTQKGSKVHVEAKSGMLTSALRHTWGFSAKDRNNHLHHAIDAVIIAYANNSIVKAFSDFKKEQESNSAELYAKKISELDYKNKRKFFEPFSGFRQKVLDKIDEIFVSKPERKKPSGALHEETFRKEEEFYQSYGGKEGVLKALELGKIRKVNGKIVKNGDMFRVDIFKHKKTNKFYAVPIYTMDFALKVLPNKAVARSKKGEIKDWILMDENYEFCFSLYKDSLILIQTKDMQEPEFVYYNAFTSSTVSLIVSKHDNKFETLSKNQKILFKNANEKEVIAKSIGIQNLKVFEKYIVSALGEVTKAEFRQREDFKK

SEQ ID NO: 133 - protein, 984 aa, Campylobacter jejuni
MARILAFDIGISSIGWAFSENDELKDCGVRIFTKAENPKTGESLALPRRLARSARKRLARRKARLNHLKHLIANEFKLNYEDYQSFDESLAKAYKGSLISPYELRFRALNELLSKQDFARVILHIAKRRGYDDIKNNGDEEKSEILKAIKQNEEKLVNYQSVGEYLYKEYFQKFKENSKEFINVRNKKESYERCITQSFLKDELKLIFQKQREFGFSFSKKFEEEVLSVAFYKRALKDFSHLVGNCSFFTDEKRAPKNSPLAFMFVALTRIINILNNLKNTEGILYTKDDLNALLNEVLKNGTLTYKQTKKLLGLSDDYEFKGEKGTYFIEFKKYKEFIKALGEHNLSQDDLNEIAKDITLIKDEIKLKKALAKYDLNQNQIDSLSKLEFKDHLNISFKALKLITPLMLEGKKYDEACNELNLKVAINEDKKDFLPAFNETYYKDEVTNPVVLRAIKEYRKILNALLKKYGKVHKINIELAREVGKNHSQRAKIEKEQNENYKAKKDAEIECEKLGLKINSKNILKLRLFKEQKEFCAYSGEKIKLSDLQDEKMLEIDHIYPYSRSFDDSYMNKVLVFTKQNQEKLNKTPFEAFGNDSTKWQKIEVLAKNLPEKKQKRILDKNYKDKEQKDFKDRNLNDTRYIARLVLNYTKDYLDFLPLSDDENTKLNDTQKGSKVHVEAKSGMLTSALRHTWGFSAKDRNNHLHHAIDAAIIAYANNSIVKAFSDFKKEQESNSVELYAKKISELDYKNKRKFFEPFSGFRQKVLDKIDEIFVSKPERKKPSGALHEETFRKEEEFYQSYGGKEGVLKALELGKIRKVNGKIVKNGDMFRVDIFKHKKTNKFYAVPIYTMDFALKVLPNKAVARSKKGEIKDWILMDENYEFCFSLYKDSLILIQTKDMQEPELVYFNAFTSSTVSLIVSKHDNKFETLSKNQKILFKNANEKEVIAKSIGIQNLKVFEKYIVSALGEVTKAEFRQREDFKK

SEQ ID NO: 134 - protein, 984 aa, Campylobacter jejuni
  Campylobacter jejuni subsp. jejuni 84-25
MVRILAFDIGISSIGWAFSENDELKDCGVRIFTKVENPKTGESLALPRRLARSARKRLARRKARLNHLKHLIANEFKLNYEDYQSFDESLAKAYKGSLISPYELRFRALNELLSKQDFARVILHIAKRRGYDDIKNSDDKEKGAILKAIKQNEEKLANYQSVGEYLYKEYFQKFKENSKEFTNVRNKKESYERCIAQSFLKDELKLIFKKQREFGFSFSKKFEEEVLSVAFYKRALKDFSHLVGNCSFFTDEKRAPKNSPLAFMFVALTRIINLLNNLKNTEGILYTKDDLNALLNEVLKNGTLTYKQTKKLLGLSDDYEFKGEKGTYFIEFKKYKEFIKALGEHNLSQDDLNEIAKDITLIKDEIKLKKALAKYDLNQNQIDSLSKLEFKDHLNISFKALKLITPLMLEGKKYDEACNELNLKVAINEDKKDFLPAFNETYYKDEVTNPVVLRAIKEYRKVLNALLKKYGKVHKINIELAREVGKNHSQRAKIEKEQNENYKAKKDAELECEKLGLKINSKNILKLRLFKEQKEFCAYSGEKIKISDLQDEKMLEIDHIYPYSRSFDDSYMNKVLVFTKQNQEKLNKTPFEAFGNDSAKWQKIEVLAKNLPTKKQKRILDKNYKDKEQKDFKDRNLNDTRYIARLVLNYTKDYLDFLPLSDDENTKLNDTQKGSKVHVEAKSGMLTSALRHTWGFSTKDRNNHLHHAIDAVIIAYANNSIVKAFSDFKKEQESNSAELYAKKISELDYKNKRKFFEPFSGFRQKVLDKIDEIFVSKPERKKPSGALHEETFRKEEEFYQSYGGKEGVLKALELGKIRKVNGKIVKNGDMFRVDIFKHKKTNKFYAVPIYTMDFALKVLPNKAVARSKKGEIKDWILMDENYEFCFSLYKDSLILIQTKDMQEPEFVYYNAFTSSTVSLIVSKHDNKFETLSKNQKILFKNANEKEVIAKSIGIQNLKVFEKYIVSALGEVTKAEFRQREDFKK

SEQ ID NO: 135 - protein, 984 aa, Campylobacter jejuni
  Campylobacter jejuni subsp. jejuni 87459
MARILAFDIGISSIGWAFSENDELKDCGVRIFTKAENPKTGESLALPRRLARSARKRLARRKARLNHLKHLIANEFKLNYEDYQSFDESLAKAYKGSLISPYELRFRALNELLSKQDFARVILHIAKRRGYDDIKNSDDKEKGAILKAIKQNEEKLANYQSVGEYLYKEYFQKFKENSKEFTNVRNKKESYERCIAQSFLKDELKLIFKKQREFGFSFSKKFEEEVLSVAFYKRALKDFSHLVGNCSFFTDEKRAPKNSPLAFMFVALTRIINLLNNLKNTEGILYTKDDLNTFLNEVLKNGTLTYKQTKKLLGLSDDYEFKGEKGTYFIEFKKYKEFIKALGDHNLSQDDLNEIAKDITLIKDEIKLKKALAKYDLNQNQIDSLSKLEFKDHLNISFKALKLITPLMLEGKKYDEACNELNLKVAINEDKKDFLPAFNETYYKDEVTNPVVLRAIKEYRKVLNALLKKYGKVHKINIELAREVGKNHSQRAKIEKEQNENYKAKKDAELECEKLGLKINSKNILKLRLFKEQKEFCAYSGEKIKISDLQDEKMLEIDHIYPYSRSFDDSYMNKVLVFTKQNQEKLNKTPFEAFGNDSAKWQKIEVLAKNLPTKKQKRILDKNYKDKEQKDFKDRNLNDTRYIARLVLNYTKDYLDFLPLSDDENTKLNDTQKGSKVHVEAKSGMLTSALRHTWGFSTKDRNNHLHHAIDAVIIAYANNSIVKAFSDFKKEQESNSAELYAKKISELDYKNKRKFFEPFSGFRQKVLDKIDEIFVSKPERKKPSGALHEETFRKEEEFYQSYGGKEGVLKALELGKIRKVNGKIVKNGDMFRVDIFKHKKTNKFYAVPIYTMDFALKVLPNKAVARSKKGEIKDWILMDENYEFCFSLYKDSLILIQTKDMQEPEFVYYNAFTSSTVSLIVSKHDNKFETLSKNQKILFKNANEKEVIAKSIGIQNLKVFEKYIVSALGEVTKAEFRQREDFKK

SEQ ID NO: 136 - protein, 984 aa, Campylobacter jejuni
  Campylobacter jejuni subsp. jejuni ATCC 33560
MARILAFDIGISSIGWAFSENDELKDCGVRIFTKAENPKTGESLALPRRLARSARKRLARRKARLNHLKHLIANEFKLNYEDYQSFDESLAKAYKGSLISPYELRFRALNELLSKQDFARVILHIAKRRGYDDIKNSDDKEKGAILKAIKQNEEKLANYQSVGEYLYKEYFQKFKENSKEFTNVRNKKESYERCIAQSFLKDELKLIFKKQREFGFSFSKKFEEEVLSVAFYKRALKDFSHLVGNCSFFTDEKRAPKNSPLAFMFVALTRIINLLNNLKNTEGILYTKDDLNALLNEVLKNGTLTYKQTKKLLGLSDDYEFKGEKGTYFIEFKKYKEFIKALGDHSLSQDDLNEIAKDITLIKDEIKLKKALAKYDLNQNQIDSLSKLEFKDHLNISFKALKLITPLMLEGKKYDEACNELNLKVAINEDKKDFLPAFNETYYKDEVTNPVVLRAIKEYRKVLNALLKKYGKVHKINIELAREVGKNYSQRAKIEKEQNENYKAKKDAELECEKLGLKINSKNILKLRLFKEQKEFCAYSGEKIKISDLQDEKMLEIDHIYPYSRSFDDSYMNKVLVFTKQNQEKLNQTPFEAFGNDSAKWQKIEVLAKNLPTKKQKRILDKNYKDKEQKNFKDRNLNDTRYIARLVLNYTKDYLDFLPLSDDENTKLNDTQKGSKVHVEAKSGMLTSALRHTWGFSAKDRNNHLHHTIDAVIIAYANNSIVKAFSDFKKEQESNSAELYAKKISELDYKNKRKFFEPFSGFRQKVLDKIDEIFVSKPERKKPSGALHEETFRKEEEFYQSYGGKEGVLKALELGKIRKVNGKIVKNGDMFRVDIFKHKKTNKFYAVPIYTMDFALKVLPNKAVARSKKGEIKDWILMDENYEFCFSLYKDSLILIQTKDMQEPEFVYYNAFTSSTVSLIVSKHDNKFETLSKNQKILFKNANEKEVIAKSIGIQNLKVFEKYIVSALGEVTKAEFRQREDFKK

SEQ ID NO: 137 - protein, 987 aa, Campylobacter jejuni
  Campylobacter jejuni subsp. jejuni CF93-6
MARILAFDIGISSIGWAFSENDELKDCGVRIFTKVENPKTGESLALPRRLARSARKRLARRKARLNHLKHLIANEFKLNYEDYQSFDESLAKAYKGSLISPYELRFRALNELLSKQDFARVILHIAKRRGYDDIKNSDDKEKGAILKAIKQNEEKLANYQSVGEYLYKEYFQKFKENSKEFTNVRNKKESYERCIAQSFLKDELKLIFKKQREFGFSFSKKFEEEVLSVAFYKRALKDFSHLVGNCSFFTDEKRVPKNSPLAFMFVALTRIINLLNNLKNTEGILYTKDDLNALLNEVLKNGTLTYKQTKKLLGLSDDYEFKGEKGTYFIEFKKYKEFIKALGEHNLSQDDLNEIAKDITLIKDEIKLKKALAKYDLNQNQIDSLSKLEFKDHLNISFKALKLITPLMLEGKKYDEACNELNLKVAINEDKKDFLPAFNETYYKDEVTNPVVLRAIKEYRKVLNALLKKYGKVHKINIELAREVGKNHSQRAKIEKEQNENYKAKKDAELECEKLGLKINSKNILKLRLFKEQKEFCAYSGEKIKISDLQDEKMLEIDHIYPYSRSFDDSYMNKVLVFTKQNQEKLNQTPFEAFGNDSAKWQKIEVLAKNLPTKKQKRILDKNYKDKEQKNFKDRNLNDTRYIARLVLNYTKDYLDFLPLSDDENTKLNDTQKGSKVHVEAKSGMLTSALRHTWGFSAKDRNNHLHHAIDAVIIAYANNSIVKAFSDFKKEQESNSAELYAKKISELDYKNKRKFFEPFSGFRQKVLDKIDEIFVSKPERKKPSGALHEETFRKEEEFYQSYGGKEGVLKALELGKIRKVNGKIVKNGDMFRVDIFKHKKTNKFYGVPIYTMDFALKVLPNKAVARSKKGEIKDWILMDENYEFCFSLYKDSLILIQTKDMQEPEFVYYNAFTSSTVSLIVSKHDNKFETLSKNQKILFKNANEKEVIAKSIGIQNLKVFEKYIVSALGEVTKAEFRQREDFKNELR

SEQ ID NO: 138 - protein, 984 aa, Campylobacter jejuni
  Campylobacter jejuni subsp. jejuni CG8486
MARILAFDIGISSIGWAFSENDELKDCGVRIFTKAENPKTGESLALPRRLARSARKRLARRKARLNHLKHLIANEFKLNYEDYQSFDESLAKAYKGSLISPYELRFRALNELLSKQDFARVILHIAKRRGYDDIKNSDDKEKGAILKAIKQNEEKLANYQSVGEYLYKEYFQKFKENSKEFTNVRNKKESYERCIAQSFLKDELKLIFKKQREFGFSFSKKFEEEVLSVAFYKRALKDFSHLVGNCSFFTDEKRAPKNSPLAFMFVALTRIINLLNNLKNTEGILYTKDDLNALLNEVLKNGTLTYKQTKKLLGLSDDYEFKGEKGTYFIEFKKYKEFIKALGDHSLSQDDLNEIAKDITLIKDEIKLKKALAKYDLNQNQIDSLSKLEFKDHLNISFKALKLITPLMLEGKKYDEACNELNLKVAINEDKKDFLPAFNETYYKDEVTNPVVLRAIKEYRKVLNALLKKYGKVHKINIELAREVGKNYSQRAKIEKEQNENYKAKKDAELECEKLGLKINSKNILKLRLFKEQKEFCAYSGEKIKISDLQDEKMLEIDHIYPYSRSFDDSYMNKVLVFTKQNQEKLNQTPFEAFGNDSAKWQKIEVLAKNLPTKKQKRILDKNYKDKEQKDFKDRNLNDTRYIARLVLNYTKDYLDFLPLSDDENTKLNDTQKGSKVHVEAKSGMLTSALRHTWGFSAKDRNNHLHHAIDAVIIAYANNSIVKAFSDFKKEQESNSAELYAKKISELDYKNKRKFFEPFSGFRQKVLDKIDEIFVSKPERKKPSGALHEETFRKEEEFYQSYGGKEGVLKALELGKIRKVNGKIVKNGDMFRVDIFKHKKTNKFYAVPIYTMDFALKVLPNKAVARSKKGEIKDWILMDENYEFCFSLYKDSLILIQTKDMQEPEFVYYNAFTSSTVSLIVSKHDNKFETLSKNQKILFKNANEKEVIAKSIGIQNLKVFEKYIVSALGEVTKAEFRQREDFKK

SEQ ID NO: 139 - protein, 984 aa, Campylobacter jejuni
  Campylobacter jejuni subsp. jejuni HB93-13
MARILAFDIGISSIGWAFSENDELKDCGVRIFTKVENPKTGESLALPRRLARSARKRLARRKARLNHLKHLIANEFKLNYEDYQSFDESLAKAYKGSLISPYELRFRALNELLSKQDFARVILHIAKRRGYDDIKNSDDKEKGAILKAIKQNEEKLANYQSVGEYLYKEYFQKFKENSKEFTNVRNKKESYERCIAQSFLKDELKLIFKKQREFGFSFLKKFEEEVLSVAFYKRALKDFSHLVGNCSFFTDEKRAPKNSPLAFMFVALTRIINLLNNLKNTEGILYTKDDLNALLNEVLKNGTLTYKQTKKLLGLSDDYEFKGEKGTYFIEFKKYKEFIKALGEHNLSQDDLNEIAKDITLIKDEIKLKKALAKYDLNQNQIDSLSKLEFKDHLNISFKALKLITPLMLEGKKYDEAYNELNLKVAINEDKKDFLPAFNETYYKDEVTNPVVLRAIKEYRKVLNALLKKYGKVHKINIELAREVGKNHSQRAKIEKEQNENYKAKKDAELECEKLGLKINSKNILKLRLFKEQKEFCAYSGEKIKISDLQDEKMLEIDHIYPYSRSFDDSYMNKVLVFTKQNQEKLNQTPFEAFGNDSAKWQKIEVLAKNLPTKKQKRILDKNYKDKEQKDFKDRNLNDTRYIARLVLNYTKDYLDFLPLSDDENTKLNDTQKGSKVHVEAKSGMLTSALRHTWGFSAKDRNNHLHHAIDAVIIAYANNSIVKAFSDFKKEQESNSAELYAKKISELDYKNKRKFFEPFSGFRQKVLDKIDEIFVSKPERKKPSGALHEETFRKEEEFYQSYGGKEGVLKALELGKIRKVNGKIVKNGDMFRVDIFKHKKTNKFYAVPIYTMDFALKVLPNKAVARSKKGEIKDWILMDENYEFCFSLYKDSLILIQTKDMQEPELVYFNAFTSSTVSLIVSKHDNKFETLSKNQKILFKNANEKEVIAKSIGIQNLKVFEKYIVSALGEVTKAEFRQREDFKK

SEQ ID NO: 140 - protein, 987 aa, Campylobacter jejuni
  Campylobacter jejuni subsp. jejuni LMG 23210
MARILAFDIGISSIGWAFSENDELKDCGVRIFTKAENPKTGESLALPRRLARSARKRLARRKARLNHLKHLIANEFKLNYEDYQSFDESLAKAYKGSLISPYELRFRALNELLSKQDFARVILHIAKRRGYDDIKNSDDKEKGAILKAIKQNEEKLANYQSVGEYLYKEYFQKFKENSKEFTNVRNKKESYERCIAQSFLKDELKLIFKKQREFGFSFSKKFEEEVLSVAFYKRALKDFSHLVGNCSFFTDEKRAPKNSPLAFMFVALTRIINLLNNLKNTEGILYTKDDLNALLNEVLKNGTLTYKQTKKLLGLSDDYEFKGEKGTYFIEFKKYKEFIKALGDHSLSQDDLNEIAKDITLIKDEIKLKKALVKYDLNQNQIDSLSKLEFKDHLNISFKALKLITPLMLEGKKYDEACNELNLKVAINEDKKDFLPAFNETYYKDEVTNPVVLRAIKEYRKVLNALLKKYGKVHKINIELAREVGKNYSQRAKIEKEQNENYKAKKDAELECEKLGLKINSKNILKLRLFKEQKEFCAYSGEKIKISDLQDEKMLEIDHIYPYSRSFDDSYMNKVLVFTKQNQEKLNQTPFEAFGNDSAKWQKIEVLAKNLPTKKQKRILDKNYKDKEQKDFKDRNLNDTRYIARLVLNYTKDYLDFLPLSDDENTKLNDTQKGSKVHVEAKSGMLTSALRHTWGFSAKDRNNHLHHAIDAVIIAYANNSIVKAFSDFKKEQESNSAELYAKKISELDYKNKRKFFEPFSGFRQKVLDKIDEIFVSKPERKKPSGALHEETFRKEEEFYQSYGGKEGVLKALELGKIRKVNGKIVKNGDMFRVDIFKHKKTNKFYAVPIYTMDFALKVLPNKAVARSKKGEIKDWILMDENYEFCFSLYKDSLILIQTKDMQEPELVYFNAFTSSTVSLIVSKHDNKFETLSKNQKILFKNANEKEVIAKSIGIQNLKVFEKYIVSALGEVTKAEFRQREDFKNELR

SEQ ID NO: 141 - protein, 984 aa, Campylobacter jejuni
  Campylobacter jejuni subsp. jejuni LMG 23211
MARILAFDIGISSIGWAFSENDELKDCGVRIFTKAENPKTGESLALPRRLARSARKRLARRKARLNHLKHLIANEFKLNYEDYQSFDESLAKAYKGSLISPYELRFRALNELLSKQDFARVILHIAKRRGYDDIKNNGDEEKSEILKAIKQNEEKLVNYQSVGEYLYKEYFQKFKENSKEFINVRNKKESYERCITQSFLKDELKLIFQKQREFGFSFSKKFEEEVLSVAFYKRALKDFSHLVGNCSFFTDEKRAPKNSPLAFMFVALTRIINLLNNLKNTEGILYTKDDLNALLNEVLKNGTLTYKQTKKLLGLSDDYEFKGEKGTYFIEFKKYKEFIKALDEHSLSQDDLNEIAKDITLIKDEIKLKKALAKYDLNQNQIDSLSKLEFKDHLNISFKALKLITPLMLEGKKYDEACNELNLKVAINEDKKDFLPAFNETYYKDEVTNPVVLRAIKEYRKILNALLKKYGKVHKINIELAREVGKNHSQRAKIEKEQNENYKAKKDAEIECEKLGLKINSKNILKLRLFKEQKEFCAYSGEKIKISDLQDEKMLEIDHIYPYSRSFDDSYMNKVLVFTKQNQEKLNKTPFEAFGNDGVKWQKIEVLAKNLPEKKQKRILDKNYKDKEQKDFKDRNLNDTRYIARLVLNYTKDYLDFLPLSDDENTKLNDTQKGSKVHVEAKSGMLTSALRHTWGFSTKDRNNHLHHAIDAAIIAYANNSIVKAFSDFKKEQESNSAELYAKKISELDYKNKRKFFEPFSGFRQKVLDKIDEIFVSKPERKKPSGALHEETFRKEEEFYQSYGGKEGVLKALELGKIRKVNGKIVKNGDMFRVDIFKHKKTNKFYAVPIYTMDFALKVLPNKAVARSKKGEIKDWILMDENYEFCFSLYKDSLILIQTKDMQEPELVYFNAFTSSTVSLVVSKHDNKFETLSKNQKILFKNANEKEVIAKSIGIQNLKVFEKYIVSALGEVTKAEFRQREDFKK

SEQ ID NO: 142 - protein, 984 aa, Campylobacter jejuni
  Campylobacter jejuni subsp. jejuni LMG 23263
MARILAFDIGISSIGWAFSENDELKDCGVRIFTKAENPKTGESLALPRRLARSARKRLARRKARLNHLKHLIANEFKLNYEDYQSFDESLAKAYKGSLISPYELRFRALNELLSKQDFARVILHIVKRRGYDDIKNSDDKEKGAILKAIKQNEEKLANYQSVGEYLYKEYFQKFKENSKEFTNVRNKKESYERCIAQSFLKDELKLIFKKQREFGFSFSKKFEEEVLSVAFYKRALKDFSHLVGNCSFFTDEKRAPKNSPLAFMFVALTRIINLLNNLKNTEGILYTKDDLNTLLNEVLKNGTLTYKQTKKLLGLSDDYEFKGEKGTYFIEFKKYKEFIKALGDHSLSQDDLNEIAKDITLIKDEIKLKKALAKYDLNQNQIDSLSKLEFKDHLNISFKALKLITPLMLEGKKYDEACNELNLKVAINEDKKDFLPAFNETYYKDEVTNPVVLRAIKEYRKVLNALLKKYGKVHKINIELAREVGKNHSQRAKIEKEQNENYKAKKDAEFECEKLGLKINSKNILKLRLFKEQKEFCAYSGEKIKISDLQDEKMLEIDHIYPYSRSFDDSYMNKVLVFTKQNQEKLNKTPFEAFGNDSAKWQKIEVLAKNLPTKKQKRILDKNYKDKEQKDFKDRNLNDTRYIARLVLNYTKDYLDFLPLSDDENTKLNDTQKGSKVHVEAKSGMLTSALRHTWGFSTKDRNNHLHHAIDAVIIAYANNSIVKAFSDFKKEQESNSAELYAKKISELDYKNKRKFFEPFSGFRQKVLDKIDEIFVSKPERKKPSGALHEETFRKEEEFYQSYGGKEGVLKALELGKIRKVNGKIVKNGDMFRVDIFKHKKTNKFYAVPIYTMDFALKVLPNKAVARSKKGEIKDWILMDENYEFCFSLYKDSLILIQTKDMQEPEFVYYNAFTSSTVSLIVSKHDNKFETLSKNQKILFKNANEKEVIAKSIGIQNLKVFEKYIVSALGEVTKAEFRQREDFKK

SEQ ID NO: 143 - protein, 984 aa, Campylobacter jejuni
  Campylobacter jejuni subsp. jejuni LMG 23264
MARILAFDIGISSIGWAFSENDELKDCGVRIFTKVENPKTGESLALPRRLARSARKRLARRKARLNHLKHLIANEFKLNYEDYQSFDESLAKAYKGSLISPYELRFRALNELLSKQDFARVILHIAKRRGYDDIKNSDDKEKGAILKAIKQNEEKLANYQSVGEYLYKEYFQKFKENSKEFTNVRNKKESYERCIAQSFLKDELKLIFKKQREFGFSFSKKFEEEVLSVAFYKRALKDFSHLVGNCSFFTDEKRAPKNSPLAFMFVALTRIINLLNNLKNTEGILYTKDDLNALLNEVLKNGTLTYKQTKKLLGLSDDYEFKGEKGTYFIEFKKYKEFIKALGEHNLSQDDLNEIAKDITLIKDEIKLKKALAKYDLNQNQIDSLSKLEFKDHLNISFKALKLITPLMLEGKKYDEACNELNLKVAINEDKKDFLPAFNETYYKDEVTNPVVLRAIKEYRKVLNALLKKYGKVHKINIELAREVGKNHSQRAKIEKEQNENYKAKKDAELECEKLGLKINSKNILKLRLFKEQKEFCAYSGEKIKISDLQDEKMLEIDHIYPYSRSFDDSYMNKVLVFTKQNQEKLNKTPFEAFGNDSAKWQKIEVLAKNLPTKKQKRILDKNYKDKEQKDFKDRNLNDTRYIARLVLNYTKDYLDFLPLSNDENTKLNDTQKGSKVHVEAKSGMLTSALRHTWGFSTKDRNNHLHHAIDAVIIAYANNSIVKAFSDFKKEQESNSAELYAKKISELDYKNKRKFFEPFSGFRQKVLDKIDEIFVSKPERKKPSGALHEETFRKEEEFYQSYGGKEGVLKALELGKIRKVNGKIVKNGDMFRVDIFKHKKTNKFYAVPIYTMDFALKVLPNKAVARSKKGEIKDWILMDENYEFCFSLYKDSLILIQTKDMQEPEFVYYNAFTSSTVSLIVSKHDNKFETLSKNQKILFKNANEKEVIAKSIGIQNLKVFEKYIVSALGEVTKAEFRQREDFKK

SEQ ID NO: 144 - protein, 987 aa, Campylobacter jejuni
  Campylobacter jejuni subsp. jejuni LMG 23269
MARILAFDIGISSIGWAFSENDELKDCGVRIFTKAENPKTGESLALPRRLARSARKRLARRKARLNHLKHLIANEFKLNYEDYQSFDESLAKAYKGSLISPYELRFRALNELLSKQDFARVILHIAKRRGYDDIKNNGDEEKSEILKAIKQNEEKLVNYQSVGEYLYKEYFQKFKENSKEFINVRNKKESYERCIAQSFLKDELKLIFQKQREFGFSFSKKFEEEVLSVAFYKRALKDFSHLVGNCSFFTDEKRAPKNSPLAFMFVALTRIINLLNNLKNTEGILYTKDDLNTLLNEVLKNGTLTYKQTKKLLGLSDDYEFKGEKGTYFIEFKKYKEFIKALGEHNLSQDNLNEIAKDITLIKDEIKLKKALAKYDLNQNQIDSLSKLEFKDHLNISFKALKLITPLMLEGKKYDEAYNELNLKVAINEDKKDFLPAFNETYYKDEVTNPVVLRAIKEYRKVLNALLKKYGKVHKINIELAREVGKNHSQRAKIEKEQNENYKAKKDAELECEKLGLKINSKNILKLRLFKEQKEFCAYSGEKIKISDLQDEKMLEIDHIYPYSRSFDDSYMNKVLVFTKQNQEKLNQTPFEAFGNDSAKWQKIEVLAKNLPTKKQKRILDKNYKDKEQKDFKDRNLNDTRYIARLVLNYTKDYLDFLPLSDDENTKLNDTQKGSKVHVEAKSGMLTSALRHTWGFSAKDRNNHLHHAIDAVIIAYANNSIVKAFSDFKKEQESNSAELYAKKISELDYKNKRKFFEPFSGFRQKVLDKIDEIFVSKPERKKPSGALHEETFRKEEEFHQSYGGKEGVLKALELGKIRKVNGKIVKNGDMFRVDIFKHKKTNKFYAVPIYTMDFALKVLPNKAVVQGKDKKSGLIKDWILMDENYEFCFSLYKDSLILIQTKDMQEPELVYFNAFTSSTVSLIVSKHDNKFETLSKNQKILFKNANEKEVIAKSIGIQNLKVFEKYIVSALGEVTKAEFRQREDFKK

SEQ ID NO: 145 - protein, 987 aa, Campylobacter jejuni
  Campylobacter jejuni subsp. jejuni LMG 23357
MARILAFDIGISSIGWAFSENDELKDCGVRIFTKAENPKTGESLALPRCLARSARKRLARRKARLNHLKHLIANEFKLNYEDYQSFDESLAKAYKGSLISPYELRFRALNELLSKQDFARVILHIAKRRGYDDIKNNGDEEKGEILKAIKQNEEKLVSYQSVGEYLYKEYFQKFKENSKEFINVRNKKESYERCIAQSFLKDELKLIFQKQRKFGFSFSKKFEEEVLSVAFYKRALKDFSHLVGNCSFFTDEKRAPKNSPLAFMFVALTRIINLLNNLKNTEGILYTKDDLNTLLNEVLKNGTLTYKQTKKLLGLSNDYEFKGEKGTYFIEFQKYKEFVKALGEHNLSQDDLNEIAKDITLIKDEIKLKKALAKYDLNQNQIDSLSKLEFKDHLNISFKALKLITPLMLEGKKYDEACNELNLKVAINEDKKDFLPAFNETYYKDEVTNPVVLRAIKEYRKVLNALLKKYGKVHKINIELAREVGKNHSQRAKIEKEQNENYKAKKDAELECEKLGLKINSKNILKLRLFKEQKEFCVYSGEKIKISDLQDEKMLEIDHIYPYSRSFDDSYMNKVLVFTKQNQEKLNKTPFETFGNDRVKWQKIEVLAKNLPTKKQKRILDKNYKDKEQKDFKDRNLNDTRYIARLVLNYTKDYLDFLPLSDDENTKLNDTQKGSKVHVEAKSGMLTSTLRHTWGFSTKDRNNHLHHAIDAAIIAYANNSIVKAFSDFKKEQESNTAELYAKKISELDYKNKRKFFEPFSGFRQKLLDKIDEIFVSKPERKKPSGALHEETFRKEEEFYQSYGGKEGVLKALELGKIRKVNGKIVSNGDMFRVDIFKHKKTNKFYAVPIYTMDFALKVLPNKAVVQGKDKKSGLIKDWILMDENYEFCFSLYKDSLILIQTKDMQEPELVYYERLDSSNASLTVSKHDNKFETLSKNQKILFKNANEKEVIAKSIGIQNLKVFEKYIVSALGEVTKAEFRQREDFKK

SEQ ID NO: 146 - protein, 984 aa, Campylobacter jejuni
  Campylobacter jejuni subsp. jejuni NCTC 11168 = ATCC 700819
MARILAFDIGISSIGWAFSENDELKDCGVRIFTKVENPKTGESLALPRRLARSARKRLARRKARLNHLKHLIANEFKLNYEDYQSFDESLAKAYKGSLISPYELRFRALNELLSKQDFARVILHIAKRRGYDDIKNSDDKEKGAILKAIKQNEEKLANYQSVGEYLYKEYFQKFKENSKEFTNVRNKKESYERCIAQSFLKDELKLIFKKQREFGFSFSKKFEEEVLSVAFYKRALKDFSHLVGNCSFFTDEKRAPKNSPLAFMFVALTRIINLLNNLKNTEGILYTKDDLNALLNEVLKNGTLTYKQTKKLLGLSDDYEFKGEKGTYFIEFKKYKEFIKALGEHNLSQDDLNEIAKDITLIKDEIKLKKALAKYDLNQNQIDSLSKLEFKDHLNISFKALKLVTPLMLEGKKYDEACNELNLKVAINEDKKDFLPAFNETYYKDEVTNPVVLRAIKEYRKVLNALLKKYGKVHKINIELAREVGKNHSQRAKIEKEQNENYKAKKDAELECEKLGLKINSKNILKLRLFKEQKEFCAYSGEKIKISDLQDEKMLEIDHIYPYSRSFDDSYMNKVLVFTKQNQEKLNQTPFEAFGNDSAKWQKIEVLAKNLPTKKQKRILDKNYKDKEQKNFKDRNLNDTRYIARLVLNYTKDYLDFLPLSDDENTKLNDTQKGSKVHVEAKSGMLTSALRHTWGFSAKDRNNHLHHAIDAVIIAYANNSIVKAFSDFKKEQESNSAELYAKKISELDYKNKRKFFEPFSGFRQKVLDKIDEIFVSKPERKKPSGALHEETFRKEEEFYQSYGGKEGVLKALELGKIRKVNGKIVKNGDMFRVDIFKHKKTNKFYAVPIYTMDFALKVLPNKAVARSKKGEIKDWILMDENYEFCFSLYKDSLILIQTKDMQEPEFVYYNAFTSSTVSLIVSKHDNKFETLSKNQKILFKNANEKEVIAKSIGIQNLKVFEKYIVSALGEVTKAEFRQREDFKK

SEQ ID NO: 147 - protein, 983 aa, Campylobacter jejuni
  Campylobacter jejuni subsp. jejuni NW
MARILAFDIGISSIGWAFSENDELKDCGVRIFTKAENPKTGESLALPRRLARSARKRLARRKARLNHLKHLIANEFKLNYEDYQSFDESLAKAYKGSLISPYELRFRALNELLSKQDFARVILHIAKRRGYDDIKNSDDKEKGAILKAIKQNEEKLANYQSVGEYLYKEYFQKFKENSKEFTNVRNKKESYERCIAQSFLKDELKLIFKKQREFGFSFSKKFEEEVLSVAFYKRALKDFSHLVGNCSFFTDEKRAPKNSPLAFMFVALTRIINLLNNLKNTEGILYTKDDLNALLNEVLKNGTLTYKQTKKLLGLSDDYEFKGEKGTYFIEFKKYKEFIKALGEHNLSQDDLNEIAKDITLIKDEIKLKKALAKYDLNQNQIDSLSKLEFKDHLNISFKALKLVTPLMLEGKKYDEACNELNLKVAINEDKKDFLPAFNETYYKDEVTNPVVLRAIKEYRKVLNALLKKYGKVHKINIELAREVGKNHSQRAKIEKEQNENYKAKKDAELECEKLGLKINSKNILKLRLFKEQKEFCAYSGEKIKISDLQDEKMLEIDHIYPYSRSFDDSYMNKVLVFTKQNQEKLNQTPFEAFGNDSAKWQKIEVLAKNLPTKKQKRILDKNYKDKEQKNFKDRNLNDTRYIARLVLNYTKDYLDFLPLSDDENTKLNDTQKGSKVHVEAKSGMLTSALRHTWGFSAKDRNNHLHHAIDAVIIAYANNSIVKAFSDFKKEQESNSAELYAKKISELDYKNKRKFFEPFSGFRQKVLDKIDEIFVSKPERKKPSGALHEETFRKEEFYQSYGGKEGVLKALELGKIRKVNGKIVKNGDMFRVDIFKHKKTNKFYAVPIYTMDFALKVLPNKAVARSKKGEIKDWILMDENYEFCFSLYKDSLILIQTKDMQEPEFVYYNAFTSSTVSLIVSKHDNKFETLSKNQKILFKNANEKEVIAKSIGIQNLKVFEKYIVSALGEVTKAEFRQREDFKK

SEQ ID NO: 148 - protein, 987 aa, Campylobacter jejuni
MARILAFDIGISSIGWAFSENDELKDCGVRIFTKAENPKTGESLALPRRLARSARKRLARRKARLNHLKHLIANEFKLNYEDYQSFDESLAKAYKGSLISPYELRFRALNELLSKQDFARVILHIAKRRGYDDIKNNGDEEKSEILKAIKQNEEKLVNYQSVGEYLYKEYFQKFKENSKEFINVRNKKESYERCIAQSFLKDELKLIFQKQREFGFSFSKKFEEEVLSVAFYKRALKDFSHLVGNCSFFTDEKRAPKNSPLAFMFVALTRIINLLNNLKNTEGILYTKDDLNTLLNEVLKNGTLTYKQTKKLLGLSDDYEFKGEKGTYFIEFKKYKEFIKALGEHNLSQDNLNEIAKDITLIKDEIKLKKALAKYDLNQNQIDSLSKLEFKDHLNISFKALKLITPLMLEGKKYDEAYNELNLKVAINEDKKDFLPAFNETYYKDEVTNPVVLRAIKEYRKVLNALLKKYGKVHKINIELAREVGKNHSQRAKIEKEQNENYKAKKDAELECEKLGLKINSKNILKLRLFKEQKEFCAYSGEKIKISDLQDEKMLEIDHIYPYSRSFDDSYMNKVLVFTKQNQEKLNQTPFEAFGNDSAKWQKIEVLAKNLPTKKQKRILDKNYKDKEQKDFKDRNLNDTRYIARLVLNYTKDYLDFLPLSDDENTKLNDTQKGSKVHVEAKSGMLTSALRHTWGFSAKDRNNHLHHAIDAVIIAYANNSIVKAFSDFKKEQESNSAELYAKKISELDYKNKRKFFEPFSGFRQKVLDKIDEIFVSKPERKKPSGALHEETFRKEEEFYQSYGGKEGVLKALELGKIRKVNGKIVKNGDMFRVDIFKHKKTNKFYPVPIYTMDFALKVLPNKAVVQGKDKKSGLIKDWILMDENYEFCFSLYKDSLILIQTKDMQEPELVYFNAFTSSTVSLIVSKHDNKFETLSKNQKILFKNANEKEVIAKSIGIQNLKVFEKYIVSALGEVTKAEFRQREDFKK

SEQ ID NO: 149 - protein, 1003 aa, Campylobacter lari
MRILGFDIGINSIGWAFVENDELKDCGVRIFTKAENPKNKESLALPRRNARSSRRRLKRRKARLIAIKRILAKELKLNYKDYVAADGELPKAYEGSLASVYELRYKALTQNLETKDLARVILHIAKHRGYMNKNEKKSNDAKKGKILSALKNNALKLENYQSVGEYFYKEFFQKYKKNTKNFIKIRNTKDNYNNCVLSSDLEKELKLILEKQKEFGYNYSEDFINEILKVAFFQRPLKDFSHLVGACTFFEEEKRACKNSYSAWEFVALTKIINEIKSLEKISGEIVPTQTINEVLNLILDKGSITYKKFRSCINLHESISFKSLKYDKENAENAKLIDFRKLVEFKKALGVHSLSRQELDQISTHITLIKDNVKLKTVLEKYNLSNEQINNLLEIEFNDYINLSFKALGMILPLMREGKRYDEACEIANLKPKTVDEKKDFLPAFCDSIFAHELSNPVVNRAISEYRKVLNALLKKYGKVHKIHLELARDVGLSKKAREKIEKEQKENQAVNAWALKECENIGLKASAKNILKLKLWKEQKEICIYSGNKISIEHLKDEKALEVDHIYPYSRSFDDSFINKVLVFTKENQEKLNKTPFEAFGKNIEKWSKIQTLAQNLPYKKKNKILDENFKDKQQEDFISRNLNDTRYIATLIAKYTKEYLNFLLLSENENANLKSGEKGSKIHVQTISGMLTSVLRHTWGFDKKDRNNHLHHALDAIIVAYSTNSIIKAFSDFRKNQELLKARFYAKELTSDNYKHQVKFFEPFKSFREKILSKIDEIFVSKPPRKRARRALHKDTFHSENKIIDKCSYNSKEGLQIALSCGRVRKIGTKYVENDTIVRVDIFKKQNKFYAIPIYAMDFALGILPNKIVITGKDKNNNPKQWQTIDESYEFCFSLYKNDLILLQKKNMQEPEFAYYNDFSISTSSICVEKHDNKFENLTSNQKLLFSNAKEGSVKVESLGIQNLKVFEKYIITPLGDKIKADFQPRENISLKTSKKYGLR

SEQ ID NO: 150 - protein, 1430 aa, Capnocytophaga canimorsus
MKHILGLDLGTNSIGWAVVKEAQNDNEQSEIVDVGVRVNPLTTDEKTNFEKGKPISTNADRTLKRSARRNLQRYKLRRKELIELLKEHQLISTDTILTENGKGTTFQTLELRAKSAKEKISLEELARVFLTINKKRGYKSSRKAKNEDEGQLIDGMEIAKRLYEENLTTGQLSLQLLKEGKKSLPDYYRSDLQFELDKVWNFQKQFHSHILTDEFYAQLKGKGQRATSALFLAKYQIYTAENKGSREDKKLQAYQWRVDALSKELTREQLAFVITEINNNLNNSSGYLGAISDRSKELYFNNETVGEYLWKQIAANPHTSLKNQVFYRQDYLDEFEQIWKTQSAFYPEILTDELKKELRDVVIFYQRKLKSQKSLVSFCEFENKEIEIKKEDGTSTKKVIGLKVAPKSSPLFQEFKIWQNLNNVLIRKKGSKTKKVDKNQQAVLFEEEKTIFELDLEAKQALFNELNLKGNLKAYYCLEILGYSPKEWEMNYSVLEGNRTNKALYEAYLKITDLEGYDAKNHLKVKLNKDEVELDDLKVPASEIKDMVQAIFKEAGINTDILHFNAELDGKDFENQASYQLWHLLYSYEGDDSKSGNELLYKLLETKFGFKKEYAQILANVSLSDDYGSLSTKAMRKIHPYIKENKFSTACELAGYRHSKHSLTKEENDNRVLKDSLEVLKKNSLRQPVVEKILNQMINLVNALLKKYRTENPNFKFDEIRIELARELKKNAEERANMTVNINKAKTEHEKIIKILKNEFGLPNPTRNDIIRYRLYEELKANGYKDLYTNEYIEKQDLFTKNIDIEHIIPKSRVFDDSFSNKTLSFRKTNLDKGERTAFDYIESKFGADKLEEYVARVEDLYKNNIISKAKYQKLLKKESEIGDGFVERDLRETQYIAKKAKEILLQITPNVLSTSGGITDRLREDWDLINVMKELNLPKYRALGLTQMEDRKYGQQVEVIIDWTKRNDHRHHAMDALTVAFTKHNHIQYLNYLNARKNEKHREHSNIMGIQQLETIKVTDKNGNEKRVFKAPMPNFRQVTKAFLENVLISHKAKNKVVTKNKNKVAGSNKVQEVLTPRGQLHKETVYGKYQYYVQKEEKIGGKFDLETIKKVANPLYQSLLKKRLEENGGDPKKAFTGKNSLAKNPIYLDDAQTEQLPEKVKLVWLENSFSIRKDITPENFKDEKLIDKILDEGVKRILKERLQSFGNDAKKAFSDLDKNPIWLNKEKGIAIKRVAISGVANAEPLHTKKDHLGKEILDKEGKSIPVDFISTGNNHHVAVYRDEKGNLQEKVVSVFEAVVRANQGLPIIDKTYNQHLGWEFLFTMKQNEMFVFSNESTGFNPNDIDLLDPKNKKIISPNLFRVQKFSKLQYGNSFVREFVFRHHLETTVEDRKELQGITYKQMKNSAFFNDIIKVRINHLGGIVSVGEY

SEQ ID NO: 151 - protein, 1436 aa, Capnocytophaga gingivalis
  Capnocytophaga gingivalis ATCC 33624
MKYIKYILGLDIGSNSIGWALIQLDLLQKTKRIIAAGSRIIPMDQKVLSDFGKGITISPTAQRTSYRNARHCRERHLLRRERLHRVLHILGFLPTHYDKQIDFSKRYGKFVDNTEPKIAYNEGKFLFMDSFQEMLSDFKSHQPDLFYTKKNGEESKIPYDWTIYYLRKKALSQKISKEELAWIILNFNQKRGYYQLREEEGNKENDFEIISSKIISVIKKDKDKKYNKYWYDIILENGLVYQAAFYNDFVYNWINQDREFIIERTSLKNGAEKVKLSYLPTFDEIDKMDKKEQDKYYKKIKIKTENSIGNKTVGCYIYDHILQNPNEKIKGKLVRTIERKYYKEELKAILEKQIALQPELFTDQLLADCIRELYSKNEAQQRNLAARDFVHLLVEDIIFYQRPLRRQKSTLANCSLESRSYIDKDSHTRKEAPLKVCPKSNPYYQEFRVLQWLQNLKIYEIDSDQEVTHQFIKTLEDKQQLFEFLMAQKEIDCEELLKYFLNQTYPNAKEKALKSELKKWKDTYRWNYVYDIGEKSSKKYPMNETRYELKRHLEKVANLPDDFLSSEVEYLLWHLIYSVKDKVAYEKGLKKFAQKHHLDKDSFVESFKKFNPYPSEYGSFSEKAIRKLLPLMRFGAHWDFNHIDKNTQKRIEDLITGVENEEIRTILREKAEKYQLEKETDFQDLPLWLAQYIVYNRHAEASSLEKWTSVNDLETYLNEFKQHSLRNPIVEQVVMETLRVVRDIWQQYGQGQASFFNEIHIELGRELKKTAKEREKLSKQNQKNEDINLSIKEKLKELEKYNTRAYSITHQEKYKLWLEQKHISPYTGQIISPENLFTDNYEIEHIIPQSRFFDDSLSNKVVCESIVNKAPYKDRQLGLEFIKNQGGRIVKELSKENKTIKIFTEEQYRTFIKEHYSNNPEKTKKLLLEEIPEKMVARQMNDTCYISKFISEILSKIVRSDEQDEGVHSKNVILCTGKITSILRQDWGLNDIWDNLILPRFERMNNLLQKEKFTIYSIEKQKKIPVVPINDQFKSFQKKRIDHRHHAMDAIIIACTTREHINYINNQHALEKEKDKKEKQEERDKLREKLCIKKYNNRSEGNYSWIFKKPWDTFTQEVRVALEDIVVSFKQNLRVINKATNYYERWVEENGKYIKKMVKQEGTNWAIRKPLHEETISGKIYLDREKITKNDILTATRKTVDSSFDDKRIKKITDTGIQKILLNYLKYKGSPEIAFSPEGLEELNKNLSIYNDGKPHKPIYKVRIYEKGSGRFALGEKGRKYKKYVQGASNLYFGIYQGAKRSFATIPLNEVIERQKQGLPSVPEYNEKGDLLLFSLSPNDLVYVPIEGEIIENIDFRNLSKEQKERIYNVNDFSSTCYFTPNRIAKAIFPKEVDLQRKGDKLSGSYDTKTASLEGIQIKEVCIKLKVDRLGNISKA

SEQ ID NO: 152 - protein, 1426 aa, Capnocytophaga ochracea
MKNILGLDLGTTSIGFAHIVEDENKEKSEIKELGVRIVSLTTDEQSDFEKGKSITTNANRTLKHGARLNLDRYQQRRKYLIDLLQKANLITPSSILAENGKNTTHSTWQLRAKAVTERIEKEEFARILLAINKKRGYKSSRKAKTEDEGQAIDGMAIAKRLYDENLTPGQLSLQLLQQNKKLLPDFYRSDLQKEFDLVWNFQKQFYPDILTDIFYKELQGKGKDATSKAFSKRYHFDTTENKGSKESVRLQAYQWRAEAISKQLSKEEVAYVLTEINNNLNNASGYLGAISDRSKELYFNRQTVGQYLYAKLQENRHNSLKNKVFYRQDYLDEFERIWETQASFHKELTDELKKQIRDVVIFYQRKPKSQKGLISFCEFESKEIEIEKDGKTITKNIGARVVPKSSPLFQEFKIWQILNNVICKRKGIRKKKISAKTTQLDLLNESSQTIFSLDMECKQLLFDELNLKGDLKSDKVLKLLGYSPQEWEINYNQLEGNRTQKALYEAYLKIVEMEAHDVKDILQIKSAKDDWSLDESPLSASEIREKVKAIFQTLGICTKILYFDPLLPVKEFEEQDSYQLWHLLYSYESDDSTSGNETLYRILEKKYAFKREHARILANVALQDDYGSLSTKAIRKIYPNIKENQYSTACEKAGYKHSKLSLTTEELEARELKNIIPLLKKNALRNPVVEKILNQMINVVNALIEKNSERDAEGKITKYFHFDEIRIELARELKKNAQKRYEMTQNINKAKLEHQKISEILQKEFGIKNPTKSDIIRYRLYQELEHNGYKELYTNAPIARDMLFSKNIEIEHIVPKARVFDDSFSNKTLTFHRINSDKGEYTAFDYITSLNSEEELNQYLTRVENAYKTKSISPTKYKNLLKKASEIGDDFINRDLRDTQYIAKKAKEILFQVTKNVLSTSGSITDRLREDWGLVDVMKELNMPKYQSLGLTEVEERKDGNKVTVIKNWTKRNDHRHHAMDALTVAFTKPSYIQYLNHLNARKDENNKNYSVILAIEEKETIKVPTNNGKNKRVFIEPIPNFRQVAKKHLEEIFISHKAKNKVVTKNTNKPAGTDKQQITLTPRGQLHKETIYGKYQYYINKEEKIGVKFDERTIAKVSNPVYREALLKRLQANDNDPKKAFAGKNALSKNPIYLDESKTKTLPEKVNLTYLEEDFSIRKDISPDNFKDLKSIEKVIDQGVKRILIKRLQAYDNDPKKAFVDLEKNPIWLNKEKGIAIKRVTISGVNNAQPLHIGKDHLGKTTLNKEGKEIPVDYVSTGNNHHVAIYRDKEGNLQEQIVSFFDAVVRAQQGIPIIDKTYKQAEGWQFLFTMKQNEMFVFPNATTGFNPAEIDLLDPKNKKLISPNLFRVQKIATKDYFFRHHLETNVETDNILKNVTWKREGLSGLKDIVKVRINHLGDIVSIGEY

SEQ ID NO: 153 - protein, 1437 aa, Capnocytophaga sp.
  Capnocytophaga sp. CM59
MKYIKYILGLDIGSNSIGWALIQLDLLQKTKRIIATGSRIIPMDQKVLSDFGKGITISPTAQRTSYRNARHCRERHLLRRERLHRVLHILGFLPTHYDKQIDFSKRYGKFVDNTEPKIAYNERKFLFMDSFQEMLADFKIHQPDLFYTKKNGEESKIPYDWTIYYLRKKALSRKISKEELAWIILNFNQKRGYYQLREEEEENKENDFEIISSKIISVIKKDKDKKYNKYWYDIILENGLVYQAAFYNDFVYNWINQDREFIIERISLKNGTEKVKLSYLPTFDEIDKMDKKEQDKYYKKIKIKTENSIGNKTVGCYIYDHILQNPNEKIKGKLVRTIERKYYKEELKAILEKQVALQPELFTDQLFADCIRELYSKNEAQQRNLAARDFVHLFVEDIIFYQRSLRRQKSTLANCSLESRSYIDKDSHTRKEAPLKVCPKSNPYYQEFRVLQWLQNLKIYEIDTDQEVTHEFIKTLEDKQQFFDFLMNQKEIDCEELLKYFLNQTYPNAREKALKSELKKWKDTYRWNYVYDIGEKSSKKYPMNETRYELKRHLEKVANLPDDFLSSEVEYLLWHLIYSVKDKVAYEKGLKTFAQKHHLDKDSFVESFKKFKPYPSEYGSFSEKAIRKLLPLMRFGSYWDFNHIDKNTQKRIEDLITGVENEEIRTILREKAEKYQLEKETDFQDLPLWLAQYIVYNRHAEASSLEKWTSVNDLETYLNEFKQYSLRNPIVEQVVMETLRVVRDIWQQYGQGQASFFDEIHIELGRELKKTAKEREKLSKQNQKNEDINLSIKEKLKELEKYNTRAYSITHQEKYKLWLEQKHISPYTGQIISPENLFTDNYEIEHIIPQSRFFDDSLSNKVVCESIVNKAPYKDRQLGLEFIKNQGGRIVKELSTENKTIKIFTEEQYRTFIKEHYSNNPEKTKKLLLEEIPEKMVARQMNDTCYISKFISEILSKIVRSDEQDEGVHSKNVILCTGKITSALKQDWGVNDVWNDLILPRFERMNDLTQSTLFTTYNEKYQKYLPTVPMEYSNGFQKKRIDHRHHAMDAIIIACATREHINYINNQHALEKGKDKKEKQKEHDKLREKLCIKKDNKGSEENYSWIFKKPWDTFTQEVQAALEGIVVSFKQNLRVINKATNYYERWVEENGKYIKKMVKQEGTNWAIRKPLHEETISGKIYLDREEITKNDILTATRKTVDSSFDEKRIKKITDTGIQKILLNYLKYKGSPEIAFSPEGLEELNKNLSIYNDGKPHKPIYKVRIYEKGSGRFALGEKGRKYKKYVQGAPNLYFGIYQGANKRSFATIPLNEVIERQKQGRPSIPEYNEKGDPLLFSLSPNDLVYVPVEGEIIEDIDFQNLSKEQKERIYNVNDFSSTCYFTPNRIAKAIFPKEVDLQRKGDKLPGSYDTKTASLEGIQIKEVCIKLKIDRLGNISKA

SEQ ID NO: 154 - protein, 1471 aa, Capnocytophaga sp.
  Capnocytophaga sp. oral taxon 324 str. F0483
MCKYFYIKNFITFVLSKSIIPMKHILGLDLGSNSIGWAFVQQDFENKQGKIIATGSRIIPMDQGILGDFERGNTVSQTAERTTYRSTRRLRERHLLRRERLHRVLHILGFLPPHYDAQIDFTKRYGKFIDNAEPKIAYNNGNFIFMNSFNEMIEDFKKHQPQLFYKKSNGEESKIPYDWTIYYLRKKALSQKITQQELAWLILHFNQKRGYYQLRGEEETENPNKEVAFHSLKVVDVEAEAPNKKGEIWYTIRLENGWIYRRTSKIPLDDWKGKTRDFIVTTDLNDDGTIKVDKEGKEKRSFRAPDENDWNLLKKKTEHDIDFSGKTVGAYIYDHLLQNPNQKIKGKLVRTIERKYYKDELKAILAKQIALQPELFTETLLADCIRELYRKNETQQQNLLSKDFLHLFVEDIIFYQRPLRSKKSTIANCTLEKRSYIDKETNERKDAPIKVCAKSNPYYQEFRVLQWLQNLRIYEIETDREVTAEFIETPQDCEALFNFLMSQKEIDNKGLLKYFLFAKNPQIKDKAAKSELKKWLTTYRWNYVYDAADNSSKKYPMNETGYELQRYLQKVEGLPANFLTFDITYQLWHLLYSVKDKVEFEKALKKFAKKKQLDKTSFVDSFKNFKPYPNEYGSFSEKAIKKLLPLMRFGNHWDFNRIDVSTQKRIDDLINGVANEDIRTIIREKAEKYQLNSETCFQDLPLWLAQYVVYNRHAEATDIEKWTSVSDLEAYLEDFKQHSLRNPIVEQVVTETLRVVRDIWQQYGGGQANFFDEIHIELGRELKKTAEERKQLSDKNQENESTNLRIKKLLAELKEDASIQNVRPYSLVQQELLKIYEEGVFSATDEVEEDIQKIRKKAEPSKADLQRYKLWLEQKYKSPYTGEVISLTKLFTEEYEIEHIIPQSRYYDDSLSNKVICESAVNKLKTNQLGLEFIQNHHGEKVRITANKEVTIFTEEQYKEFVKKHYANNSAKQQKLLLNEIPEKMVARQLNDTRYISKYISEILSKIVRSDEKDEGVNSKNIIPCTGKITTALKQDWGLNDVWNKLILPRFERMNQLTQTQLFTSYNDRLQKNLPTVPIEYSQGFQKKRIDHRHHAMDALVIACATREHINYMNNQHALDKSKDKKEKQQSRIDLRTILCEKKNNNWQFKKPWSTFTQEAKEALEHIVVSFKQNLRVINKATNYYEKWEEKNGVLVKKKVKQEGTNWAIRKPLHKETVSGKIVLDRKIGKDKILTATRKAVDITFTEKIISSITDTGIQKILLNYLKYKGSPEVAFSTEGLEELNKNIAQYNNGKKHQPIYKVRIFEEGSKFPLGETGAKATKYVEAAKGTNLFFGVYQGKGKRTYATIPLNEVIERQKQGLPSVPERNEKGEPLLFSLSPNDLVYVPMEGEIAETIDFNNLSKEQKERIYKTVSFTGNQCFFVQEAVATPIVNKMEYSPLNKMERDILGTMIKEVCIKLKVDRLGNITKA

SEQ ID NO: 155 - protein, 1450 aa, Capnocytophaga sp.
  Capnocytophaga sp. oral taxon 326 str. F0382
MKRILGLDLGSNSIGWAFVEQDFENKQGKIIATGSRIIPMDQGILGDFEKGNTVSQTAERTTYRSMRRLRERHLLRRERLHRVLHILGFLPPHYDAQIDFTKRYGKFIDNAEPKIAYNNGNFIFMNSFNEMIEDFKKYQPQLFYKKSNGEESKIPYDWTIYYLRKKVLSQKITQQELAWLILHFNQKRGYYQLRGEEETENPNKEVAFHSLKVVDVEAEAPNKKGEIWYTIRLENGWIYRRTSKIPLDDWKGKTRDFIVTTDLNDDGTIKVDKEGKEKRSFRAPDENDWNLLKKKTEHDIDFSGKTVGAYIYDHLLQNPNQKIKGKLVRTIERKYYKDELKAILAKQIALQPELFTETLLADCIRELYRKNETQQQNLLSKDFLHLFVEDIIFYQRPLRSKKSTIANCTLEKRSYIDKETNERKDTFIKVCAKSNPYYQEFRVLQWLQNLRIYEIETDREVTAEFIETAEDYEALFNFLMSQKEIDNEGLLKYFLFAKNPQIKDKVAKSELKKWLTTYRWNYVYDAADNSSKKYPMNETGYDLQRYLQKVEGLPANFLTFDITYRLWHLLYSVKDKVEFEKALKKFAQEYQLDEASFVDSFKNFKPYPNEYGSFSEKAIKKLLPLMRFGNHWDFNRIDVSTQKRIDDLINGVANDEIRTIIREKAEKYQLNSESCFQGLPLWLAQYVVYNRHAEATDIEKWTSVSDLETYLEDFKQHSLRNPIVEQVVTETLRVVRDIWQQYGGGQANFFDEIHIELGRELKKTAEERKQLSNRNQENENTNLRIKKLLAELKEDASIQNVRPYSPVQQELLKIYEEGVFSSTDQVEEDIQKIRKKAEPTTPEIQRYKLWLEQKYKSPYTGEVISLTKLFTEEYEIEHIIPQSRYYDDSLSNKVICESAVNKLKTNQLGLEFIQNHHGEKVRITGNKEVTIFTEEQYKEFVKKHYANNSAKQQKLLLNEIPEKMVARQLNDTRYISKYISEILSKIVRSDEKDEGVNSKNVIPCTGKITTALKQDWGLNDVWNELILPRFERMNQLTQTQLFTSYNDRFQKNLPTVPIEYSQGFQKKRIDHRHHAMDALVIACATREHINYMNNQHALDKNKDKKEKQQSRIDLRTILCEKKNNNWQFKKPWSTFTQETKEALEHIVVSFKQNLRVINKATNYYEKWEEKNGVLVKKKVKQEGTNWAIRKPLHKETVSGKIVLDRKIGKDKILTATRKEVDITFTEKIISSITDTGIQKILLNYLNYKGSPEVAFSAEGLEELNKNIAQYNDGKKHQPIYKVRIFEEGSKFPLGETGAKATKFVEAAKGTNLFFGVYQGKEKRSYATIPLNEVIERQKQGLPSVPERNEKGEPLLFSLSPNDLVYVPMEGEIAETIDFNNLSKEQKERIYKTVSFTGNQCFFVQEAVATPIVNKMEYSPLNKMERDILGTMIKEVCIKLKVDRLGNITKA

SEQ ID NO: 156 - protein, 1435 aa, Capnocytophaga sp.
  Capnocytophaga sp. oral taxon 329 str. F0087
MKNILGLDLGTTSIGFAHIVEDENKEKSEIKELGVRIVSLATDEQSDFEKGKSISTNANRTLKHGARLNLDRYQQRRKFLIDLLQKANLITSASILAENGKNTTHSTWQLRAKAVTERIEKEEFARVLLAINKKRGYKNSRKTKTEDEGQAIDGMAIAKCLYDENLTPGQLSLQLLQQNKKLLPDFYRSDLQKEFDLVWNLQKQFYPDILTDSFYKELQGKGKDATSKAFSKRYHFDTAENKGSKESVRLQAYQWRAEAISKQLSKEEVAYVLTEINNNLNNSSGYLGAISDRSKELYFNRQTVGQYLYAQLQENRHNSLKNKVFYRQDYLDEFERIWETQASFHKELTDELKKQIRDVVIFYQRKLKSQKGLVSFCEFESKEIEIEKDGKAITKSIGARVVPKSSPLFQEFKIWQILNNVTCKRKGIRKKKSSAKSTELDLFNEPSQSIFSLDMECKQLLFDELNLKGDLKSDKVLKLLGYSPQEWEINYNQLEGNRTQKSLYEAYLKIIEIEGYEVKDILQIKSTKDDWSLDESPLSASEIRERVKVIFQTLGICTKILYFDPLLPVKEFEQQYSYQLWHLLYSYESDDSTSGNETLYRILEKKYAFKREHATILANVALQDDYGSLSTKAIRKIYPYIKENQYSTACELAGYKHSKLSLTTEELEARELKNIIPLLKKNALRNPVVEKILNQMINVVNALIEKNSERDAEGKITKYFHFDEIRIELARELKKNAQERYEMTQNINKAKLEHQKISEKLQKQFGIKNPTKSDIIRYRLYQELEHNGYKELYTNTYIAPDVLFSKNIDIEHIVPKARVFDDSFSNKTLAFKEFNIKKGESTAFDYITSLNCEGELNQYLTRVENAYKTKSISLTKYKNLLKKASEIGDGFINRDLRDTQYIAKKAKEILFQVTKNVLSTSGSITDRLREDWGLVDVMKELNMPKYQSLGLTEVEERKDGNKVTVIKDWTKRNDHRHHAMDALTVAFTKPSYIQYLNHLNARKDENNKNYSVILAIEKKETIKVPINNGKNKRVFIEPILNFRQVAKKHLEEIFISHKAKNKVVTKNINKPAGTDKQQITLTPRGQLHKETIYGKYQYYVNKEEKVGVKFDERTITKVSNPLYREALLKRLQANDNDPKKAFAGKNALSKNPIYLDEAKTKTLPEKVNLTYLEEDFSIRKDISPDNFKDLKSIEKVIDQGVKRILIKRLQAYDNDPKKAFVDLEKNPIWLNKEKGIAIKRVTISGVSNAQPLHIGKDHLGKTTLNKEGKEVPVDYVSTGNNHHVAIYRDKEGNLQEQIVSFFEAVVRAQQGLPIIDKNYKQAEGWQFMFTMKQNEMFVFPNEATGFNPAEIDLLDPKNKKLISPNLFRVQTISIVKYGNSVVRDFKFRHHLETTLQDDKILQGITFQQIKSLEPLRNIVKVRINHLGDIVNIGEY

SEQ ID NO: 157 - protein, 1426 aa, Capnocytophaga sp.
  Capnocytophaga sp. oral taxon 335 str. F0486
MKNILGLDLGTTSIGFTHIVEDENKEKSEIKELGVRIVSLTTDEQSDFEKGKSISTNANRTLKHGARLNLDRYQQRRKFLIDLLQKANLITSSSILAENGKNTTHSTWQLRAKAVTERIEKEEFARVLLAINKKRGYKSSRKAKTEDEGQAIDGMAIAKRLYDENLTPGQLSLQLLQQNKKLLPDFYRSDLQKEFDLVWNFQKQFYPDILTDSFYKELQGKGKDATSKAFSKRYHFDTAENKGSRESVRLQAYQWRAEAISKQLSKEEVAYVLTEINNNLNNASGYLGAISDRSKELYFNRQTVGQYLYAQLQENKHNSLKNKVFYRQDYLDEFERIWETQASFHKELTEELKKQIRDVVIFYQRKLKSQKGLISFCEFESKEIEIEKDGKTITKSIGARVVPKSSPLFQEFKIWQILNNVTCKRKGIRKKKSSAKSTELDLFNEPSQTIFSLDMECKQLLFEELNLKGDLKSDKVLKLLGYSPQEWEINYNQLEGNRTQKALYEAYLKIVEMEAHDVKDILQIKSTKDDWALEESPLSASEIRERVKAIFQTLGICTKILYFDPLLPVKEFEEQDSYQLWHLLYSYESDDSTSGNETLYRILEKKYAFKREHATILANVTLQDDYGSLSTKAIRKIYPYIKENQYSTACEKAGYKHSKLSLTTEELEARELKNIIPLLKKNALRNPVVEKILNQMINVVNALIEKNSERDAEGKITKYFHFDEIRIELARELKKNAQERYEMTQNINKAKLEHQKISGILQKEFGIKNPTKSDITRYRLYQELAHNGYNDLYTNTYIPKELLFSKNIDIEHIVSKARVFDDSFSNKTLAFREFNIKKGESTAFDYITSLNNEEELNQYLNRVENAYKTKNISPAKYKNLLKKASEIGDGFINRDLRDTQYIAKKAKEILFQVTKNVLSTSGSITDRLREDWGLVDVMKELNMPKYQSLGLTEVEERKEGNKVTVIKNWTKRNDHRHHAMDALTVAFTKPSYIQYLNHLNARKDKNNKNYSVILAIEEKETIKVPTNNGKNKRVFIEPIPNFRQVAKKHLEEIFISHKAKNKVVTKNTNKPAGTDKQQITLTPRGQLHKETVYGKYQYYVNKEEKIGVKFDKETIAKVSNPVYREALLKRLQANDNDPKKAFAGKNALSKNPIYLDEAKTKTLTEKVNLTYLEEDFSIRKDISPDNFKDLKSIEKVIDQGVKRILIKRLQDYDNDPKKAFVDLEKNPIWLNKEKGIAIKRVTISGVNNAQPLHIGKDHLGKTTLNKEGKEIPVDYVSTGNNHHVAIYRDKEGNLQEQIVSFFEAVVGAQQGLPIVDKTYKQAEGWQFLFTMKQNEMFVFPNEATGFNPAEIDLLDPKNKKQISPNLFRVQKIATKDYFFRHHLETNVDTDNVLKNTTWKREGLSGLKDIVKVRINHLGDIVSIGEY

SEQ ID NO: 158 - protein, 1432 aa, Capnocytophaga sp.
  Capnocytophaga sp. oral taxon 380 str. F0488
MKNILGLDLGTTSIGFAHIVEDENKEKSEIKELGVRIVSLTTDEQSDFEKGKSITTNANRTLKHGARLNLDRYQQRRKYLIDLLHKANLITPSSILAENGKNTTHSTWQLRAKAVTERIEKEEFARILLAINKKRGYKSSRKAKTEDEGQAIDGMAIAKRLYDENLTPGQLSLQLLQQNKKLLPDFYRSDLQKEFDLVWNFQKQFYPDILTDIFYKELQGKGKDATSKAFSKRYHFDTAENKGSKESVRLQAYQWRAEAVSKQLSKEEVAYVLTEINNNLNNASGYLGAISDRSKELYFNRQTVGQYLYAQLQENRHNSLKNKVFYRQDYLDEFERIWETQALFHKELTDELKKQIRDVVIFYQRKPKSQKGLISFCEFESKEIEIEKDGKTITKNIGARVVPKSSPLFQEFKIWQILNNVICKRKGIRKKKISAKTTQLDLLNESSQTIFSLDMECKQLLFDELNLKGDLKSDKVLKLLGYSPQEWEINYNQLEGNRTQKALYEAYLKIVEMEAHDVKDILQIKSTKDDWSLDESPLSASEIRESVKAIFQALGICTKILYFDPLLPVKDFEEQDSYQLWHLLYSYESDDSTSGNETLYRILEKKYAFKREHARILANVALQDDYGSLSTKAIRKIYPNIKENQYSTACEMAGYKHSKLSLTTEELEARELKNIIPLLKKNALRNPVVEKILNQMINVVNALIEKNSERDAEGKITKYFHFDEIRIELARELKKNAQKRYEMTQNINKAKSEHQKISEILQKEFGIKNPTKSDIIRYRLYKELEHNGYKELYTNTYIAPDVLFSKNIDIEHIVPKARVFDDSFSNKTLAFKDFNIKKGESTAFDYITSLKNEEKLNQYLARVENAYKTKNISPAKYKNLLKKASEIGDGFINRDLRDTQYIAKKAKEILFQVTKNVLSTSGSITDRLREDWSLVDVMKELNMPKYQSLGLTEVEERKDGNKVTVIKDWTKRNDHRHHAMDALTVAFTKPSYIQYLNHLNARKDENNKNYSVILAIEKKETIKVPTNNGKNKRVFIEPIPNFRQVAKKHLEEIFISHKAKNKVVTKNTNKPAGTNKQQITLTPRGQLHKETIYGKYQYYVNKEEKVGVKFDKETIAKVSNPLYREALLKRLQANDNDPKKAFTGKNALSKNPIYLDEAKTKTLPEKVNLTYLEEDFSVRKKIVPKNPTSKEFVPNLKSIEKVVDEGVRNILIERLRVYNNDPEKAFVDLEKNPIWLNKEKGIAIKRVTISGVNNAQPLHIGKDHLGKTTLNKEGKEIPVDYVSTGNNHHVAIYRDKEGNLQEQIVSFFEAVVRTQQGLPIIDKTYKQEEGWQFLFTMKQNEMFVFPNEATGFNPAEIDLLDPKNKKQISPNLFRVQKIATKDYFFRHHLETNVETDNVLKNTTWKREGLSGLKDIVKVRINHLGDIVSIGEY

SEQ ID NO: 159 - protein, 1450 aa, Capnocytophaga sp.
  Capnocytophaga sp. oral taxon 412 str. F0487
MKHILGLDLGSNSIGWAFVQQDFENKQGKIIATGSRIIPMDQGILGDFERGNTVSQTAERTTYRNTRRLRERHLLRRERLHRVLHILGFLPPHYDSQIDFTKRYGKFIDNAEPKIAYNNGNFIFMNSFNEMIEDFKKYQPQLFYKKSNGEESKIPYDWTIYYLRKKALSQKITQQELAWLILHFNQKRGYYQLRGEEETENPNKEVAFHSLEVVDVEAEAPNKKGEIWYTIRLENGWIYRRTSKIPLDDWKGKTRDFIVTTDLNDDGTIKLDKEGKEKRSFRAPDENDWNLLKKKTEHDIDFSGKTVGAYIYDHLLQNPNQKIKGKLVRTIERKYYKDELKAILAKQIALQPELFTETLLADCIRELYRKNETQQQNLLSKDFLHLFVEDIIFYQRPLRSKKSTIANCTLEKRSYIDKETNERKDTPIKVCAKSNPYYQEFRVLQWLQNLRIYEIETDREVTAEFIETAQDNEALFNFLMSQKEIDNESLLKYFLFAKNPQIKDKVAKSELKKWLTTYRWNYVYDAADNSSKKYPMNETGYELQQYLQKVEGLPANFLTFDITYRLWHLLYSVKDKVEFEKALKKFAQEYQLDEASFVDSFKNFKPYPNEYGSFSEKAIKKLLPLMRFGNHWDFNRIDVSTQKRIDDLINGVANDEIRTIIREKAEKYQLNSETCFQGLPLWLAQYVVYNRHAEAADIEKWTSVNDLEAYLEDFKQHSLRNPIVEQVITETLRVVRDIWQRYGGGQANFFDEIHIELGRELKKTAEERKQLSNRNQENENTNLRIKKLLAELKEDASIQNVRPYSPVQQELLKIYEEGVFSATDEVEEDIQKIRKKAEPTTPEIQRYKLWLEQKYKSPYTGEVISLTKLFTEEYEIEHIIPQSRYYDDSLSNKVICESAVNKLKTNQLGLEFIQNHHGEKVRITANKEVTIFTEEQYKEFVKKHYANNSAKQQKLLLNEIPEKMVARQLNDTRYISKYISEILSKIVRSDEKDEGVNSKNIIPCTGKITTALKQDWGLNDVWNELILPRFERMNQLTQTQLFTSYNDRFQKNLPTVPIEYSQGFQKKRIDHRHHAMDALVIACATREHINYMNNQHALDKSKDKKEKQQSRIDLRTILCEKKNNNWQFKKPWSTFTQEAQEALEHIVVSFKQNLRVINKATNYYEKWEEKNGVLVKKKVKQEGTNWAIRKPLHKETVSGKIVLDRKIGKDKILTATRKSVDITFTEKIISSITDTGIQKILLNYLKYKGSPEVAFSAEGLEELNKNIAQYNDGKKHQPIYKVRIFEEGSKFPLGETGAKATKYVEAAKGTNLFFGVYQGKGKRTYATIPLNEVIERQKQGLPSVPERNEKGEPLLFSLSPNDLVYVPMEGEIAETIDFNNLSKEQKERIYKTVSFTGNQCFFVQEAVATPIVNKIEYSPLNKMERDILGTMIKEVCIKLKVDRLGNITKA

SEQ ID NO: 160 - protein, 1426 aa, Capnocytophaga sputigena
  Capnocytophaga sputigena ATCC 33612
MKNILGLDLGITSISFAHIVEDENKEKSEIKELGVRIVSLTTDEQSDFEKGKSITTNANRTLKHGARLNLDRYQQRRKYLIDLLQKANLITSSSILAENGKNTTHSTWQLRAKAVTERIEKEEFARVLLAINKKRGYKSSRKAKTEDEGQAIDGMAIAKRLYDENLTPGQLSLQLLQQNKKLLPDFYRSDLQREFDLVWNFQKQFYPDILTDSFYKELQGKGKDATSKAFSKRYHFDTAENKGSKESVRLQAYQWRAEAISKQLSKEEVAYVLTEINNNLNNASGYLGAISDRSKELYFNRQTVGQYLYAQLQENRHNSLKNKVFYRQDYLDEFERIWETQASFHKELTDELKKQIRDVVIFYQRKLKSQKGLISFCEFESKEIEIEKDGKTITKTIGARVVPKSSPLFQEFKIWQILNNVTCKRKGIRKKKSSAKSTELDLFNEPSQTIFSLDMECKQLLFDELNLKGDLKSDKVLKLLGYSPQEWEINYNQLEGNRTQKALYEAYLKIVEMEAHDVKDILQIKSAKDDWSLDESPLSASEIKEKVKDIFQALGICTKILYFDPLLPVKEFEKQDSYQLWHLLYSYESDDSTSGNETLYRILEKKYAFKREHARILANVALQDDYGSLSTKAIRKIYPNIKENQYSKACELAGYKHSKLSLTTEELEARELKNIIPLLKKNALRNPVVEKILNQMINVVNALIEKNSERDAEGKITKYFHFDEIRIELARELKKNAQKRYEMTQNINKAKLEHQKISEILQKKFGIKNPTKSDIIRYRLYQELEHNGYKELYTNAPIARDMLFSKNIEIEHIVPKARVFDDSFSNKTLTFHRINSNKGEYTAFDYITSLNSEEELNQYLTRVENAYKTKSISLTKYKNLLKKASEIGDGFINRDLRDTQYIAKKAKEILFQVTKNVLSTSGSITDRLREDWGLVDVMKELNMPKYQSLGLTEVEERKEGNKVTVIKNWTKRNDHRHHAMDALTVAFTKPSYIQYLNHLNARKDENNKNYSVILAIEEKETIKVPTNNGKNKRVFIEPIPNFRQVAKKHLEEIFISHKAKNKVVTKNVNKPAGTDKQQITLTPRGQLHKETIYGKYQYYVNKEEKVGVKFDERTITKVSNPLYREALLKRLQANDNDPKKAFTGKNALSKNPIYLDETKTKTLPEKVNLTYLEEDFSIRKDISPDNFKDLKSIEKVIDQGVKRILIKRLQDYDNDPKKAFVDLEKNPIWLNKEKGIAIKRVTISGVSNAQPLHIGKDHLGKTTLNKEGNEIPVDYVSTGNNHHVAIYRDKEGNLQEQIVSFFEAVVRTQQGLPIIDKTYKQEEGWQFLFTMKQNEMFVFPNATTGFNPAEIDLLDPKNKKLISPNLFRVQKIATKDYFFRHHLETNVETDNVLKNTTWKREGLSGLKDIVKVRINHLGDIVSIGEY

SEQ ID NO: 161 - protein, 1140 aa, Catellicoccus marimammalium
  Catellicoccus marimammalium M35/04/3
MKNMTKVNVGLDVGISSAGWSVINAETNQILESGVRLFSGSDADENVNRRNQRQGRRLFRRRKLRIQEAKKYLENVFQLKDIEPKDEWNPYEIRVRALNEKVSKEELSIALLNIVKHRGISYELEDVTDEEGTNTQSFQSGLDYNRRLLKTKTVGEIQYDRLQKYGQVRGQIQTEDGLLINIFPTKNYVEEVERILETQKKYHPEIDDVFIEKIISFVTRKREYFVGPGNEKSRTDYGIYRENGETLDNLFEILIGKDKFYPEEYRAAGSSYTAQIFNLLNDLNNLRIPTTEDHHLTKAQKEEIITELKNTSRLSGGMLKLISKVTKAPKEEISGYRKDEKDKPDLHSLAYYRKQKNMLEKEGIQIADFSEELLDELATMMTLNTEPGEIRKQLNKITNQYDILTPEVIEVLVKNHTAFVATSNHKWHRFSLKLMKEFIPELLETSKEQSTILCERGFIQNRASYLDENHHFNYAELRENLYNPVVRKSTCEMLKVFTAIQEKYPNIQNVIVELPRETNEDEQKRKIKKINDNNAKRKKEILKEAQAQSGLSEEALEEKLLKTKGLYLKLMLWYEQEGKCVYSGQEIPLSDLLQNKGGYEVDHIIPISISFDDRLCNKVLVRQQLNSQKSNQTPFEYMTTHTDGHLSFHELKELVGKNKRFSKEKRELLLAEIYSNDIETRKRFINRNLVDTSYTARIVLNALQQYKKENQLSMNVSVVRGAMTNILRKKVKLDKTRETFHHHAIDASLMAVIPNIEFFKERKEWLPKSANEEVVEVEVSEEETMPEKEFKVKMRLPESFIQDVQILQRNSFAKEEVSGPQTRERNLKIKFSHQVDQKMNRKVADDTIYGTRQAQLGKDKKEETYVIGKIKDIYNYDEYVRFKKRYDKNKESFLMYHHDPQTFEKLEEILAQYPEYIEDEKGKKKKVSPFALYREENGPVTKYAKKNNGPVIKQLKYYDSKLNRKIDISHKYSTKNRQVVLQSLKPYRTDVYRNQDTGEYTLVGIDQNDGKFVNGHYGIPKSRYEEIKANNKLSEHDEFVFSLYKNSMVKVIDENGESIVVRYLSRSMPNRKNNAEIKPVEKYQFEDGEVVPVYGKCRKQMQTVFVKKGWTLLKGNTDILGNTYFVEKESENPKKMIDDK

SEQ ID NO: 162 - protein, 1329 aa, Catenibacterium mitsuokai
  Catenibacterium mitsuokai DSM 15897
IVDYCIGLDLGTGSVGWAVVDMNHRLMKRNGKHLWGSRLFSNAETAANRRASRSIRRRYNKRRERIRLLRAILQDMVLEKDPTFFIRLEHTSFLDEEDKAKYLGTDYKDNYNLFIDEDFNDYTYYHKYPTIYHLRKALCESTEKADPRLIYLALHHIVKYRGNFLYEGQKFNMDASNIEDKLSDIFTQFTSFNNIPYEDDEKKNLEILEILKKPLSKKAKVDEVMTLIAPEKDYKSAFKELVTGIAGNKMNVTKMILCEPIKQGDSEIKLKFSDSNYDDQFSEVEKDLGEYVEFVDALHNVYSWVELQTIMGATHTDNASISEAMVSRYNKHHDDLKLLKDCIKNNVPNKYFDMFRNDSEKSKGYYNYINRPSKAPVDEFYKYVKKCIEKVDTPEAKQILNDIELENFLLKQNSRTNGSVPYQMQLDEMIKIIDNQAEYYPILKEKREQLLSILTFRIPYYFGPLNETSEHAWIKRLEGKENQRILPWNYQDIVDVDATAEGFIKRMRSYCTYFPDEEVLPKNSLIVSKYEVYNELNKIRVDDKLLEVDVKNDIYNELFMKNKTVTEKKLKNWLVNNQCCSKDAEIKGFQKENQFSTSLTPWIDFTNIFGKIDQSNFDLIENIIYDLTVFEDKKIMKRRLKKKYALPDDKVKQILKLKYKDWSRLSKKLLDGIVADNRFGSSVTVLDVLEMSRLNLMEIINDKDLGYAQMIEEATSCPEDGKFTYEEVERLAGSPALKRGIWQSLQIVEEITKVMKCRPKYIYIEFERSEEAKERTESKIKKLENVYKDLDEQTKKEYKSVLEELKGFDNTKKISSDSLFLYFTQLGKCMYSGKKLDIDSLDKYQIDHIVPQSLVKDDSFDNRVLVVPSENQRKLDDLVVPFDIRDKMYRFWKLLFDHELISPKKFYSLIKTEYTERDEERFINRQLVETRQITKNVTQIIEDHYSTTKVAAIRANLSHEFRVKNHIYKNRDINDYHHAHDAYIVALIGGFMRDRYPNMHDSKAVYSEYMKMFRKNKNDQKRWKDGFVINSMNYPYEVDGKLIWNPDLINEIKKCFYYKDCYCTTKLDQKSGQLFNLTVLSNDAHADKGVTKAVVPVNKNRSDVHKYGGFSGLQYTIVAIEGQKKKGKKTELVKKISGVPLHLKAASINEKINYIEEKEGLSDVRIIKDNIPVNQMIEMDGGEYLLTSPTEYVNARQLVLNEKQCALIADIYNAIYKQDYDNLDDILMIQLYIELTNKMKVLYPAYRGIAEKFESMNENYVVISKEEKANIIKQMLIVMHRGPQNGNIVYDDFKISDRIGRLKTKNHNLNNIVFISQSPTGIYTKKYKL

SEQ ID NO: 163 - protein, 1419 aa, Chryseobacterium sp.
  Chryseobacterium sp. CF314
MMIKNILGLDLGTNSIGWALIKQNFENKYGEILGMGSRIIPMSQDVLGEFGKGNSVSQTAARTGYRGVRRLRERFLLRRERLHRVLNVLNFLPEHYASQIDFEKRFGKFKYETEPKLAYNNDGFFFKNSFDEMLGDFKDHQFHLLENGRKVPYDWTIYYLRKKALSQKIEKEELAWILLNFNQKRGYYQLRGEDFEEEKDRVFVRLKVDRVVDSGENIKGKILYDVYFENGWKYEKQIVKTEDWIGRTKEFIVTESILKNGDTKRTFKAVDSEKDWIAIKTKTEQEIDKSHKTVGAYIYEALLQNPKQKIKGKLVRTIERKFYREELKKILERQKEFHPELQSDDLYNDCIRELYRNNEAHQITLSKKDFVHLLLNDLIFYQRPLRSQKSSVSNCTLEFRKYKDENGVEHAQYLKTIPKSNPYYQEFRVWQWMFNLNIYRKDDDTNVTKEFLSSTEDYETLFEFLNNRKEVDQKALLRHFKLNEKTHRWNYVEDKKYPCNETKTMISTRLEKVENYPSDFLTREMEQNIWHIIYSVNDKIEYEKALKSFAHKNNLDENSFFEAFKKFPPFKSEYGSFSEKAIKKLLPLLRLGKYWNWESIDRKSQGRIEKIITGEFDGNIKDKVREKAIHLTAENDFQGLQLWLAQYIVYGRHSEASMIGKWNSADDLEEFLKGFKQHSLRNPIVEQVITETLRVVKDIWLKYGNGAKDFFSEIHIELGREMKQTKDERVDATKRITENENTNLRIKALLAEMMNDNSVENIRPYSPMQQEILKIYEDGILKSDIEIDDDILKISKTAQPSSSDLKRYKLWLEQRYKSPYTGQIIPLNKLFTSEYEIEHIIPQSRYFDDSFSNKIICESAVNKLKDNYIGLGFIKQFGGMIVECGFGKSVEIFKAEEYEDFVKKHYANNRSKRNKLLLEEIPEKMIDRQLNDTRHISKYISGVLSNIVRQEDGTDEGVNSKNIVPGNGKITTQLKQDWGLNDVWNELILPRFERMNQLTNSTDFTSWNKNHQKFLPTVPIEFSKGFSKKRIDHRHHAMDALVIACATKDHINLLNNQSAKSDTKRYDLKRKLMKFERVVYSHSKTGEKIEKEVPKQFLKPWDNFTVDAKNKMETIIVSFKQNLRVINKATNHYEKWIEKDGIKRKELIKQEGTNWAIRKPMHKETVSGKVDLPGIKIPKGKILTATRKSLDTSFDLKTINSITDTGIQKILKNYLEFKGSSELAFSPEGIEDMNKNIEKFNDGKPHQSINKVRIFELGSKFSVGQTGNKKDKYVEAAKGTNLFFAVYEDKNGKRSYETIPLNEVIERQKQGLDSVSFKNKEDFLLCPNDLVYVPSEDELENIYNIDFKNLTTEKTGNIYKVVSFSGNQIFFIRQDIAISIVNKAEFSTLNKMERAIDGSMIKENCIKLKIDRLGNIAKI

SEQ ID NO: 164 - protein, 1021 aa, Clostridium cellulolyticum
MKYTLGLDVGIASVGWAVIDKDNNKIIDLGVRCFDKAEESKTGESLATARRIARGMRRRISRRSQRLRLVKKLFVQYEIIKDSSEFNRIFDTSRDGWKDPWELRYNALSRILKPYELVQVLTHITKRRGFKSNRKEDLSTTKEGVVITSIKNNSEMLRTKNYRTIGEMIFMETPENSNKRNKVDEYIHTIAREDLLNEIKYIFSIQRKLGSPFVTEKLEHDFLNIWEFQRPFASGDSILSKVGKCTLLKEELRAPTSCYTSEYFGLLQSINNLVLVEDNNTLTLNNDQRAKIIEYAHFKNEIKYSEIRKLLDIEPEILFKAHNLTHKNPSGNNESKKFYEMKSYHKLKSTLPTDIWGKLHSNKESLDNLFYCLTVYKNDNEIKDYLQANNLDYLIEYIAKLPTFNKFKHLSLVAMKRIIPFMEKGYKYSDACNMAELDFTGSSKLEKCNKLTVEPIIENVTNPVVIRALTQARKVINAIIQKYGLPYMVNIELAREAGMTRQDRDNLKKEHENNRKAREKISDLIRQNGRVASGLDILKWRLWEDQGGRCAYSGKPIPVCDLLNDSLTQIDHIYPYSRSMDDSYMNKVLVLTDENQNKRSYTPYEVWGSTEKWEDFEARIYSMHLPQSKEKRLLNRNFITKDLDSFISRNLNDTRYISRFLKNYIESYLQFSNDSPKSCVVCVNGQCTAQLRSRWGLNKNREESDLHHALDAAVIACADRKIIKEITNYYNERENHNYKVKYPLPWHSFRQDLMETLAGVFISRAPRRKITGPAHDETIRSPKHFNKGLTSVKIPLTTVTLEKLETMVKNTKGGISDKAVYNVLKNRLIEHNNKPLKAFAEKIYKPLKNGTNGAIIRSIRVETPSYTGVFRNEGKGISDNSLMVRVDVFKKKDKYYLVPIYVAHMIKKELPSKAIVPLKPESQWELIDSTHEFLFSLYQNDYLVIKTKKGITEGYYRSCHRGTGSLSLMPHFANNKNVKIDIGVRTAISIEKYNVDILGNKSIVKGEPRRGMEKYNSFKSN

SEQ ID NO: 165 - protein, 1065 aa, Clostridium perfringens
  Clostridium perfringens C str. JGS1495
MNKDINYALGLDIGITSVGWAVINLDLNRIEDLGVRIFNAAENPKDGSSLALPRRLARGRRRLLRRKAYRVERVRKLIVKNNILTKEELEGLFKNKEVIDVWEARVKGLDYKLSREEWAKILINFCKRRGFKSNRKNETKDKEAGQILSSISYNIEKMKETNSRTIGEYIYNEVKNSDDSYAPLRNKFGEYKMCVSRDVLREEIHTLFEKQRELGNNFASDEIEDKYFEIFNSQRPFSNFEDLEKLVGFCTFERKKHKRAPKHCISSEEFTLYEGINKLSIIKDGEKRKLSEEERTLVVNEAFNKKEIKYTTLRKLLGLSEDELFSTLTYSIDKDISKTENTKFVSLKGYHEIKRAIEKGVSKKAWQDIENNRNLLNDIAYVLTLGKTDDEIEKQLRLRNVPEELFESLLDMSFSKFNNLSIYALEKILPFMKEGYQYNEACEKAGYNFKAIYEGVRTKKLPVIEIDEIVNPVVNRALAQTRKVINSVIDKYGSPVRINIELARDLAKNFKDRKLIEKEQKENRANLDKIRENLRELMDKEPTAVEVLKYRLWEQQRGECAYTQSQIALERLFSPGYCEIDHIIPFSRSFDDSLSNKILVLGSENQRKGNKIPYEYFGEDSERWNSFEIWVKGSYLNYKKKANLLKKKFTEEEQRDWKARNLQDTKYICRYISNFVNNRLEFKESENKQKVITVNGRATAYLRSRWGLNKVREDGDKHHALDAAVVGVTTQGMVQKISKYSKAHELYTVRKNDEFVDVETGECVDVDEYKEIRKDILPRPWRGFSEELKLRLSDNPLEELKKLPIETYNEEFIKENVKPIFVSRVPFRKISGKLFKETIYSERAFKDGYFVSKKSLVDLKRGDLDNFYNYECDKKLYDAISERMKEFNYNGKKAFESPFRKPTKSGKEGPVVRSVKIKSAAPFKDGIPMNEGLVAKEGMVRIDIYEKEGKYFVVPVYRYQLAKGIVPKRAAIAGKSELKWPIMDQTYNFKFSIFKNDLIEIKYAKKDGYFGYYDGFDRHTASLVIENHDNSDRYRGIGVKTGVVEFNKYEVDVLGNYHKVNLGGN

SEQ ID NO: 166 - protein, 1065 aa, Clostridium perfringens
  Clostridium perfringens D str. JGS1721
MNKDINYALGLDIGITSVGWAVINLDLNRIEDLGVRIFNAAENLKDGSSLALPRRLARGRRRLLRRKAYRVERVRKLILKNNILTKEELEGLFKNKEVIDVWEARVKGLDYKLSREEWAKILINFCKRRGFKSNRKNEAKDKEAGQILSSISYNIEKMKETNSRTIGEYIYNEVKNSEDSYAPLRNKFGEYKMCVSRDVIREEIHTLFEKQRELGNNFASDEIEDKYFEIFNSQRPFSNFEDLEKLVGFCTFERKKHKRAPKHCISSEEFTLYEGINKLSIIKDGEKRKLSEEERTLVVNEAFNKKEIKYTTLRKLLGLSEEELFSTLTYSIDKDISKTENTKFVSLKGYHEIKRAIEKGVSKKAWQDIENNRNLLNDIAYVLTLGKTDDEIEKQLRLRNVPEELFESLLDMSFNKFNNLSIYALEKILPFMKEGYQYNEACEKAGYNFKAIYEGVRTKKLPVIEIDEIVNPVVNRALAQTRKVINSVIDKYGSPVRINIELARDLAKNFKDRKLIEKEQKENRANLDKIRENLRELMDKEPTVVEVLKYRLWEQQRGECAYTQSQIPLERLFSPGYCEIDHIIPFSRSFDDSLSNKILVLGSENQRKGNRTPYEYFGEDSERWNSFEIWVKGSYLNYKKKANLLKKKFSEEEQRDWKARNLQDTKYICRYISNFVNNRLEFKESENKQKVITVNGRATAYLRSRWGLNKVREDGDKHHALDAAVVGVTTQGMVQKISKYSKAHELYTVRKNDEFVDVETGECVDVDEYKEIRKDILPRPWRGFSEELKLRLSDNPLEELKKSPIETYNEEFIKENVKPIFVSRVPFRKISGKLFKETIYSERAFKDGYFVSKKSLVDLKRGDLDNFYNYECDKKLYDAISERMKEFNYNGKKAFESPFRKPTKSGKEGPVVRSVKIKSAVPFKDGIPMNEGLVAKEGMVRIDIYEKEGKYFVVPVYRYQLAKGIVPKRAAIAKKDELKWPIMDQTYNFKFSIYKNDLIEVKYDKKGVYFGYYDGFDRNSASLTIEKHDNSERYRSIGLKVGVLEINKYEVDVLGNYHKVKLGGN

SEQ ID NO: 167 - protein, 1116 aa, Clostridium spiroforme
  Clostridium spiroforme DSM 1552
MVEFLLKEMKIMGRLVLGLDIGITSVGYGVIDIDKNEFVDYGVRLFKEGTAINNEERRSKRGARRLKRRKTNRIADMKKLLERNGLIDEQYTALNNPYEIRKKGLKNKLSNYELATAILHITKNRGTCLESNADETQDEESTKNILSKNALELKDKYICEIQLARLEESGKIRGINNNFKTEDYLKELSKILENQDLEKETIDKIKEIVARRRRYDQGPGSEKSPTPYGSYRMENGELVHVNLIDMMRGKCSVFPDQLRAPQQSYSAELFNLLNDLNNLKINGEKLSSTEKQKIIDFVNEKGGITVKQLLKLIDVGITEISGFRIDKNEKPLITEFKGYKKVLKVFKNYNQESLLNDKSIVDTIMDINTKIKSIDERSDQLKQVLPSLDTSIINDLASIKGVSGYHSLSLKALNLINNEMLKTEMNQMQVLHQLDIFDKNRVSLKGQRQIYADDNAILSPVAKRAHRETFKVINKLRSIYGEFDSIVIETTRDKNTQDQKKRIKNNQKNYEERNTEVNNFLKEAGYNPENINAKTKMKIRLYIEQDAKSAYTLQDINLKELIEDEKAYEIDHIIPISISLDDSFNNKVLTTHDENQEKGNLTPISAFLKGKFHNGNLNTYKVFIQNNKNLNRKKKEYLLCEDDITRYEVVQNFINRNLVDTSYACRTVMNTLVHYFKDNEINTKVHTIKGQATSTFRKRIGLIKDREEDYFHHAIDALIVASLKKMNLINSYLMKVDFNEMYDEETGEIFNVLPDNSYLDEKYISFVSNLKNIYEESNKYIRGVMIKEKMTYPLIKVSHKIDTKPNRKISDDTIYSTRNVDNQDMLVERIKNIYDPKENAANTLINDIINDNTDKYIMYHKDPQTFDKIKAIVLNHFNEFKTDKNCYIVTKEGLYKLKGTSPLALYYEEFGPITKYAKKNNGPTIHSMKFYSEKLGNHLSITHKYSTVNKKVITKQISPYRTDFYQSPEGKYKFVTVRYKDVAYNAKKDKYIIDHSWYREQKKLKKIADEWIFVCSVHRDELIGIMKADGQKRIFDSSTESDGETLYHDAKTYEILKFTATNNDITGRFEVKPIYCYCKKQLMVSIGTCRKIQKFATDVLGNLYIVKDNVLKLEFK

SEQ ID NO: 168 - protein, 1338 aa, Coprococcus catus
  Coprococcus catus GD/7
MKQEYFLGLDMGTGSLGWAVTDSTYQVMRKHGKALWGTRLFESASTAEERRMFRTARRRLDRRNWRIQVLQEIFSEEISKVDPGFFLRMKESKYYPEDKRDAEGNCPELPYALFVDDNYTDKNYHKDYPTIYHLRKMLMETTEIPDIRLVYLVLHHMMKHRGHFLLSGDISQIKEFKSTFEQLIQNIQDEELEWHISLDDAAIQFVEHVLKDRNLTRSTKKSRLIKQLNAKSACEKAILNLLSGGTVKLSDIFNNKELDESERPKVSFADSGYDDYIGIVEAELAEQYYIIASAKAVYDWSVLVEILGNSVSISEAKIKVYQKHQADLKTLKKIVRQYMTKEDYKRVFVDTEEKLNNYSAYIGMTKKNGKKVDLKSKQCTQADFYDFLKKNVIKVIDHKEITQEIESEIEKENFLPKQVTKDNGVIPYQVHDYELKKILDNLGTRMPFIKENAEKIQQLFEFRIPYYVGPLNRVDDGKDGKFTWSVRKSDARIYPWNFTEVIDVEASAEKFIRRMTNKCTYLVGEDVLPKDSLVYSKFMVLNELNNLRLNGEKISVELKQRIYEELFCKYRKVTRKKLERYLVIEGIAKKGVEITGIDGDFKASLTAYHDFKERLTDVQLSQRAKEAIVLNVVLFGDDKKLLKQRLSKMYPNLTTGQLKGICSLSYQGWGRLSKTFLEEITVPAPGTGEVWNIMTALWQTNDNLMQLLSRNYGFTNEVEEFNTLKKETDLSYKTVDELYVSPAVKRQIWQTLKVVKEIQKVMGNAPKRVFVEMAREKQEGKRSDSRKKQLVELYRACKNEERDWITELNAQSDQQLRSDKLFLYYIQKGRCMYSGETIQLDELWDNTKYDIDHIYPQSKTMDDSLNNRVLVKKNYNAIKSDTYPLSLDIQKKMMSFWKMLQQQGFITKEKYVRLVRSDELSADELAGFIERQIVETRQSTKAVATILKEALPDTEIVYVKAGNVSNFRQTYELLKVREMNDLHHAKDAYLNIVVGNAYFVKFTKNAAWFIRNNPGRSYNLKRMFEFDIERSGEIAWKAGNKGSIVTVKKVMQKNNILVTRKAYEVKGGLFDQQIMKKGKGQVPIKGNDERLADIEKYGGYNKAAGTYFMLVKSLDKKGKEIRTIEFVPLYLKNQIEINHESAIQYLAQERGLNSPEILLSKIKIDTLFKVDGFKMWLSGRTGNQLIFKGANQLILSHQEAAILKGVVKYVNRKNENKDAKLSERDGMTEEKLLQLYDTFLDKLSNTVYSIRLSAQIKTLTEKRAKFIGLSNEDQCIVLNEILHMFQCQSGSANLKLIGGPGSAGILVMNNNITACKQISVINQSPTGIYEKEIDLIKL

SEQ ID NO: 169 - protein, 1384 aa, Coriobacterium glomerans
MKLRGIEDDYSIGLDMGTSSVGWAVTDERGTLAHFKRKPTWGSRLFREAQTAAVARMPRGQRRRYVRRRWRLDLLQKLFEQQMEQADPDFFIRLRQSRLLRDDRAEEHADYRWPLFNDCKFTERDYYQRFPTIYHVRSWLMETDEQADIRLIYLALHNIVKHRGNFLREGQSLSAKSARPDEALNHLRETLRVWSSERGFECSIADNGSILAMLTHPDLSPSDRRKKIAPLFDVKSDDAAADKKLGIALAGAVIGLKTEFKNIFGDFPCEDSSIYLSNDEAVDAVRSACPDDCAELFDRLCEVYSAYVLQGLLSYAPGQTISANMVEKYRRYGEDLALLKKLVKIYAPDQYRMFFSGATYPGTGIYDAAQARGYTKYNLGPKKSEYKPSESMQYDDFRKAVEKLFAKTDARADERYRMMMDRFDKQQFLRRLKTSDNGSIYHQLHLEELKAIVENQGRFYPFLKRDADKLVSLVSFRIPYYVGPLSTRNARTDQHGENRFAWSERKPGMQDEPIFPWNWESIIDRSKSAEKFILRMTGMCTYLQQEPVLPKSSLLYEEFCVLNELNGAHWSIDGDDEHRFDAADREGIIEELFRRKRTVSYGDVAGWMERERNQIGAHVCGGQGEKGFESKLGSYIFFCKDVFKVERLEQSDYPMIERIILWNTLFEDRKILSQRLKEEYGSRLSAEQIKTICKKRFTGWGRLSEKFLTGITVQVDEDSVSIMDVLREGCPVSGKRGRAMVMMEILRDEELGFQKKVDDFNRAFFAENAQALGVNELPGSPAVRRSLNQSIRIVDEIASIAGKAPANIFIEVTRDEDPKKKGRRTKRRYNDLKDALEAFKKEDPELWRELCETAPNDMDERLSLYFMQRGKCLYSGRAIDIHQLSNAGIYEVDHIIPRTYVKDDSLENKALVYREENQRKTDMLLIDPEIRRRMSGYWRMLHEAKLIGDKKFRNLLRSRIDDKALKGFIARQLVETGQMVKLVRSLLEARYPETNIISVKASISHDLRTAAELVKCREANDFHHAHDAFLACRVGLFIQKRHPCVYENPIGLSQVVRNYVRQQADIFKRCRTIPGSSGFIVNSFMTSGFDKETGEIFKDDWDAEAEVEGIRRSLNFRQCFISRMPFEDHGVFWDATIYSPRAKKTAALPLKQGLNPSRYGSFSREQFAYFFIYKARNPRKEQTLFEFAQVPVRLSAQIRQDENALERYARELAKDQGLEFIRIERSKILKNQLIEIDGDRLCITGKEEVRNACELAFAQDEMRVIRMLVSEKPVSRECVISLFNRILLHGDQASRRLSKQLKLALLSEAFSEASDNVQRNVVLGLIAIFNGSTNMVNLSDIGGSKFAGNVRIKYKKELASPKVNVHLIDQSVTGMFERRTKIGL

SEQ ID NO: 170 - protein, 1099 aa, Corynebacterium accolens
  Corynebacterium accolens ATCC 49725
MSLSYRVGIDVGTYSLGCTAIEVDDNDQPVNILSSVSLIHDSGLDPDQQKRAVTRLASSGVARRTRRLYRRRRRRMINLEKFLTSQGWETRPFEHYSDPYLPWNARVALVNGYISDDAQRGMYLSIAFRHIANHRGWRNPYWKVSSLYSPDKPSDAFEQIRKELEESTGHKIPETVTVGQLISFAQFGKDRLRGGGKKKDEKKPQEQVNQAVISARLHQIDHAREINEICRVQKIDDALRKQILDLVFAAESPKGAQIGRVGKDPLQPKLPRALKASDAFQQYRIVALAGNLRIYRDGVSTPLDRDEKLIVFNYLINLSHKEEPSWLKVAEVLNIDRGQLHGTATMTDDGERAGAAPPVHDTNRTILGCKIKPLVHWWEGANDDERAAMLKALSNSEVEDFDSPAGAQTQAFFANLDESEQEKLDSLHLPIGRAAYSEDTLMRLTSRMLDENLDLYEARLAEFDIPKDWAPPAPRIGEPVGNPAVDRVLKGVARWLEAAADEWGAPKSVVIEHVRDGFISKSKANEIDRANNARHKRNRELFKQMQENLGIDGKLRSSDLWRYQSVQRQNCQCAYCGSPITYTTCEMDHIVPRAGEGSTNTRDNLVATCHRCNLAKKNIPFAVWAAQTNIPGVSVKEALDRTRHWSEDSGMTSKDFKKFRKNVCDRLKRTVVDEPLDARSMESVAWMANELRGRVAQRFQEENTVVNVYRGELTAEARRAAGISDKLRFIDGTGKSRLDRRHHAVDAAVVAFTQNYVAETLAIRSNKKREAQLLQAAEQWKEFTGSDAEHRAAWNAWLPKMQKLAVLLQKALDEDRIAVTSNLRLRLGNGRAHEDSIGELKTIRVGDAISVTDIDRASSEALWCALTREPDFDENNGLPENPDRRIRIHGTWYDAEDDIEVFPVGAGAIKVRGGYAELSRFHHARIYKIPGKKAPVYCMLRVYNADLIRHRHEDLFSVEIKPQTMSVRQAEPKLRKALAENTAEYLGWLVTDDELVIDTSNFNTGQIAEMQSELGQVRRWRLDGFYSPSTLRLRPLQMSAEGLREDTSIGAKKIIDRPGWLPAINKLFGEGHVTVVRRDALGRARLTSNAHLPISWKAE

SEQ ID NO: 171 - protein, 1099 aa, Corynebacterium accolens
  Corynebacterium accolens ATCC 49726
MSLLYRVGIDVGTYSLGCTAIEVDDNDQPVSILSSVSLIHDSGLDPDQQKRAVTRLASSGVARRTRRLYRRRRRRMVKLENFLTAQGWETLPFERYSDPYLPWHARVALVNGYISDDTQRGQYLSIAFRHIANHRGWRNPYWKVSSLYSPDKPSDAFEQIRKELEASTGRQIPETATVGQLISFAQFGKDRLRGGGKQKDKKKPQEQVNQAVISARLHQIDHAREINEICRVQKIDDTLRKQILDLVFAAESPKGAQKGRVGKDPLQPKLFRALKASDAFQQYRIAALTGNLRIYRNGVTVPLDRDEKLIVFNYLVNLPKKEEPSWLKIAEILNIDRGQLRGTATMTDDGERAGATPPVHDTNRTILDSKVKPLAHWWENASDDERAAMLKSLSNSEVEDFDSPAGAQVQAFFADLDETEQEKLDSLHLPMGRAAYSEDTLMRLTNRMLDENLDLYEARLAEFGIPKDWAPPAPRIGEPVGNPAVDRVLKGVARWLEAAADEWGAPKSVVIEHVRDGFVSKSKAIEIDRANNNRHKRNRELFQKMQENLGIEGKVRSSDLWRYQSVQRQNCQCAYCGSPITYTTCEMDHIVPRAGEGSTNTRDNLVATCHRCNLAKKNIPFAVWAEKSTIPGVSVKEALDRTRHWSEDSGMSKKDFQKFRKNVCERLNRTVVDEPLDARSMESVAWMANELRGRVAQRFQEENTTVNVYRGALTAEARRAAGITDKLRFIDGTGKSRLDRRHHAVDAAVVAFIHNYVAETLAIRSNKKREAQLLQGTSQWKEFTGSDDKHRAVWNAWIPKMQKLAVLLQIALDEDRIVVTSNLRLRLGNGRAHEDTISELKTIRVGDAISVTDIDRASSEALWCALTREPDFDEKDGLPENPNRRIRVHGTWYDAEDEIEVFPVGAGAIKVRGGYAKLSRFHHARVYKIPGKKAPIYCMLRVYNTDLVQHRHEDLFSVELKPQTMSVRQAEPKLRKALAENTAEYLGWLVTDDELIIDTSTFRTGLIEEMQSEFGLVRRWRLDGFDSPSLLTLRPLHMSAEGLPDDCALGSRKIIDTKGWRVSINKVFNAGNTTVVRRDALGRARLTSNAHLPISWKEE

SEQ ID NO: 172 - protein, 1084 aa, Corynebacterium diphtheriae
MKYHVGIDVGTFSVGLAAIEVDDAGMPIKTLSLVSHIHDSGLDPDKIKSAVTRLASSGIARRTRRLYRRKRRRLQQLDKFIQRQGWPVIELEDYSDPLYPWKVRAELAASYIADEKERGEKLSVALRHIARHRGWRNPYAKVSSLYLPDEPSDAFKAIREEIKRASGQPVPETATVGQMVTLCELGTLKLRGEGGVLSARLQQSDHAREIQEICRMQEIGQELYRKIIDVVFAAESPKGSASSRVGKDPLQPGKNRALKASDAFQRYRIAALIGNLRVRVDGEKRILSVEEKNLVFDHLVNLAPKKEPEWVTIAEILGIDRGQLIGTATMTDDGERAGARPPTHDTNRSIVNSRIAPLVDWWKTASALEQHAMVKALSNAEVDDFDSPEGAKVQAFFADLDDDVHAKLDSLHLPVGRAAYSEDTLVRLTRRMLADGVDLYTARLQEFGIEPSWTPPAPRIGEPVGNPAVDRVLKTVSRWLKSATKTWGAPERVIIEHVREGFVTEKRAREMDGDMRRRAARNAKLFQEMQEKLNVQGKPSRADLWRYQSVQRQNCQCAYCGSPITFSNSEMDHIVPRAGQGSTNTRENLVAVCHRCNQSKGNTPFAIWAKNTSIEGVSVKEAVERTRHWVTDTGMRSTDFKKFTKAVVERFQRATMDEEIDARSMESVAWMANELRSRVAQHFASHGTTVRVYRGSLTAEARRASGISGKLEFLDGVGKSRLDRRHHAIDAAVIAFTSDYVAETLAVRSNLKQSQAHRQEAPQWREFTGKDAEHRAAWRVWCQKMEKLSALLTEDLRDDRVVVMSNVRLRLGNGSAHEETIGKLSKVKLGSQLSVSDIDKASSEALWCALTREPDFDPKDGLPANPERHIRVNGTHVYAGDNIGLFPVSAGSIALRGGYAELGSSFHHARVYKITSGKKPAFAMLRVYTIDLLPYRNQDLFSVELKPQTMSMRQAEKKLRDALATGNAEYLGWLVVDDELVVDTSKIATDQVKAVEAELGTIRRWRVDGFFGDTRLRLRPLQMSKEGIKKESAPELSKIIDRPGWLPAVNKLFSEGNVTVVRRDSLGRVRLESTAHLPVTWKVQ

SEQ ID NO: 173 - protein, 1084 aa, Corynebacterium diphtheriae
MKYHVGIDVGTFSVGLAAIEVDDAGMPIKTLSLVSHIHDSGLDPDKMKSAVTRLASSGIARRTRRLYRRKRRRLQQLDKFIQRQGWPVIELEDYSDPLYPWKVRAELAASYIADEKERGEKLSVALRHIARHRGWRNPYAKVSSLYLPDEPSDAFKSIREEIKRASGQPVPETATVGQMVTLCELGTLKLRGEGGVLSARLQQSDHAREIQEICRMQEIGQELYRKIIDVVFAAESPKGSASSRVGKDPLQPGKNRALKASDAFQRYRIAALIGNLRVRVDGEKRILSVEEKNLVFDHLVNLAPKKEPEWVTIAEILGIDRGQLIGTATMTDDGERAGARPPTHDTNRSIVNSRIAPLVDWWKTASALEQHAMVKALSNAEVDDFDSPEGAKVQAFFADLDDDVHAKLDSLHLPVGRAAYSEDTLVRLTRRMLADGVDLYTARLQEFGIEPSWTPPAPRIGEPVGNPAVDRVLKTVSRWLESATKTWGAPERVIIEHVREGFVTEKRAREMDGDMRRRAARNAKLFQEMQEKLNVQGKPSRADLWRYQSVQRQNCQCAYCGSPITFSNSEMDHIVPRAGQGSTNTRENLVAVCHRCNQSKGNTPFAIWAKNTSIEGVSVKEAVERTRHWVTDTGMRSTDFKKFTKAVVERFQRATMDEEIDARSMESVAWMANELRSRVAQHFASHGTTVRVYRGSLTAEARRASGISGKLEFLDGVGKSRLDRRHHAIDAAVIAFTSDYVAETLAVRSNLKQSQAHRQEAPQWREFTGKDAEHRAAWRVWCQKMEKLSALLTEDLRDDRVVVMSNVRLRLGNGSAHEETIGKLSKVKLGSQLSVSDIDKASSEALWCALTREPDFDPKDGLPANPERHIRVNGTHVYAGDNIGLFPVSAGSIALRGGYAELGSSFHHARVYKITSGKKPAFAMLRVYTIDLLPYRNQDLFSVELKPQTMSMRQAEKKLRDALATGNAEYLGWLVVDDELVVDTSKIATDQVKAVEAELGTIRRWRVDGFFGDTRLRLRPLQMSKEGIKKESAPELSKIIDRPGWLPAVNKLFSEGNVTVVRRDSLGRVRLESTAHLPVTWKVQ

SEQ ID NO: 174 - protein, 1084 aa, Corynebacterium diphtheriae
MKYHVGIDVGTFSVGLAAIEVDDAGMPIKTLSLVSHIHDSRLDPDKIKSAVTRLASSGIARRTRRLYRRKRRRLQQLDKFIQRQGWPVIELEDYSDPLYPWKVRAELAASYIADEKERGEKLSVALRHIARHRGWRNPYAKVSSLYLPDEPSDAFKAIREEIKRASGQPVPETATVGQMVTLCELGTLKLRGEGGVLSARLQQSDHAREIQEICRMQEIGQELYRKIIDVVFAAESPKGSASSRVGKDPLQPGKNRALKASDAFQRYRIAALIGNLRVRVDGEKRILSVEEKNLVFDHLVNLAPKKEPEWVTIAEILGIDRGQLIGTATMTDDGERAGARPPTHDTNRSIVNSRIAPLVDWWKTASALEQHAMVKALSNAEVDDFDSPEGAKVQAFFADLDDDVHAKLDSLHLPVGRAAYSEDTLVRLTRRMLADGVDLYTARLQEFGIEPSWTPPAPRIGEPVGNPAVDRVLKTVSRWLESATKTWGAPERVIIEHVREGFVTEKRAREMDGDMRRRAARNAKLFQEMQEKLNIQGKPSRADLWRYQSVQRQNCQCAYCGSPITFSNSEMDHIVPRAGQGSTNTRENLVAVCHRCNQSKGNTPFAIWAKNTSIEGVSVKEAVERTRHWVTDTGMRSTDFKKFTKAVVERFQRVTMDEEIDARSMESVAWMANELRSRVAQHFASRGTTVRVYRGSLTAEARRASGISGKLEFLDGVGKSRLDRRHHAIDAAVIAFTSDYVAETLAVRSNLKQSQAHRQEAPQWREFTGKDAEHRAAWRVWCQKMEKLSALLTEDLRDDRVVVMSNVRLRLGNGSAHEETIGKLSKVKLGSQLSVSDIDKASSEALWCALTREPDFDPKDGLPANPERHIRVNGTHVYAGDNIGLFPVSAGSIALRGGYAELGSSFHHARVYKITSGKKPAFAMLRVYTIDLLPYRNQDLFSVELKPQTMSMRQAEKKLRDALATGNAEYLGWLVVDDELVVDTSKIATDQVKAVEAELGTIRRWRVDGFFGDTRLRLRPLQMSKEGIKKESAPELSKIIDRPGWLPAVNKLFSEGNVTVVRRDSLGRVRLESTAHLPVTWKVQ

SEQ ID NO: 175 - protein, 1084 aa, Corynebacterium diphtheriae
  Corynebacterium diphtheriae bv. intermedius str. NCTC 5011
MKYHVGIDVGTFSVGLAAIEVDDAGMPIKTLSLVSHIHDSGLDPDEIKSAVTRLASSGIARRTRRLYRRKRRRLQQLDKFIQRQGWPVIELEDYSDPLYPWKVRAELAASYIADEKERGEKLSVALRHIARHRGWRNPYAKVSSLYLPDGPSDAFKAIREEIKRASGQPVPETATVGQMVTLCELGTLKLRGEGGVLSARLQQSDHAREIQEICRMQEIGQELYRKIIDVVFAAESPKGSASSRVGKDPLQPGKNRALKASDAFQRYRIAALIGNLRVRVDGEKRILSVEEKNLVFDHLVNLAPKKEPEWVTIAEILGIDRGQLIGTATMTDDGERAGARPPTHDTNRSIVNSRIAPLVDWWKTASALEQHAMVKALSNAEVDDFDSPEGAKVQAFFADLDDDVHAKLDSLHLPVGRAAYSEDTLVRLTRRMLADGVDLYTARLQEFGIEPSWTPPAPRIGEPVGNPAVDRVLKTVSRWLESATKTWGAPERVIIEHVREGFVTEKRAREMDGDMQRRAARNAKLFQEMQEKLNVQGKPSRADLWRYQSVQRQNCQCAYCGSPITFSNSEMDHIVPRAGQGSTNTRENLVAVCHRCNQSKGNTPFAIWAKNTSIEGVSVKEAVERTRHWVTDTGMRSPDFKKFTKAVVERFQRATMDEEIDARSMESVAWMANELRSRVAQHFASHGTTVRVYRGSLTAEARRASGISGKLKFFDGVGKSRLDRRHHAIDAAVIAFTSDYVAETLAVRSNLKQSQAHRQEAPQWREFTGKDAEHRAAWRVWCQKMEKLSALLTEDLRDDRVVVMSNVRLRLGNGSAHKETIGKLSKVKLGSQLSVSDIDKASSEALWCALTREPDFDPKEGLPANPERHIRVNGTHVYAGDNIGLFPVSAGSIALRGGYAELGSSFHHARVYKITSGKKPAFAMLRVYTIDLLPYRNQDLFSVELKPQTMSMRQAEKKLRDALATGNAEYLGWLVVDDELVVDTSKIATDQVKAVEAELGTIRRWRVDGFFSPSKLRLRPLQMSKEGIKKESAPELSKIIDRPGWLPAVNKLFSDGNVTVVRRDSLGRVRLESTAHLPVTWKVQ

SEQ ID NO: 176 - protein, 1084 aa, Corynebacterium diphtheriae
MKYHVGIDVGTFSVGLAAIEVDDAGMPIKTLSLVSHIHDSGLDPDKIKSAVTRLASSGIARRTRRLYRRKRRRLQQLDKFIQRQGWPVIELEDYSDPLYPWKVRAELAASYIADEKERGEKLSVALRHIARHRGWRNPYAKVSSLYLPDEPSDAFKAIREEIKRASGQPVPETATVGQMVTLCELGTLKLRGEGGVLSARLQQSDHAREIQEICRMQEIGQELYRKIIDVVFAAESPKGSASSRVGKDPLQPGKNRALKASDAFQRYRIAALIGNLRVRVDGEKRILSVEEKNLVFDHLVNLAPKKEPEWVTIAEILGIDRGQLIGTATMTDDGERAGARPPTHDTNRSIVNSRIAPLVDWWKTASALEQHAMVKALSNAEVDDFDSPEGAKVQAFFADLDDDVHAKLDSLHLPVGRAAYSEDTLVRLTRRMLADGVDLYTARLQEFGIEPSWTPPAPRIGEPVGNPAVDRVLKTVSRWLESATKTWGAPERVIIEHVREGFVTEKRAREMDGDMRRRAARNAKLFQEMQEKLNVQGKPSRADLWRYQSVQRQNCQCAYCGSPITFSNSEMDHIVPRAGQGSTNTRENLVAVCHRCNQSKGNTPFAIWAKNTSIEGVSVKEAVERTRHWVTDTGMRSTDFKKFTKAVVERFQRATMDEEIDARSMESVAWMANELRSRVAQHFASHGTTVRVYRGSLTAEARRASGISGKLEFLDGVGKSRLDRRHHAIDAAVIAFTSDYVAETLAVRSNLKQSQAHRQEAPQWREFTGKDAEHRAAWRVWCQKMEKLSALLTEDLRDDRVVVMSNVRLRLGNGSAHEETIGKLSKVKLGSQLSVSDIDKASSEALWCALTREPDFDPKDGLPANPERHIRVNGTHVYAGDNIGLFPVSAGSIALRGGYAELGSSFHHARVYKITSGKKPAFAMLRVYTIDLLPYRNQDLFSVELKPQTMSMRQAEKKLRDALATGNAEYLGWLVVDDELVVDTSKIATDQVKAVEAELGTIRRWRVDGFFGDTRLRLRPLQMSKEGIKKESAPELSKIIDRPGWLPAVNKLFSEGNVTVVRRDSLGRVRLESTAHLPVTWKVQ

SEQ ID NO: 177 - protein, 1084 aa, Corynebacterium diphtheriae
MKYHVGIDVGTFSVGLAAIEVDDAGMPIKTLSLVSHIHDSGLDPDEIKSAVTRLASSGIARRTRRLYRRKRRRLQQLDKFIQRQGWPVIELEDYSDPLYPWKVRAELAASYIADEKERGEKLSVALRHIARHRGWRNPYAKVSSLYLPDGPSDAFKAIREEIKRASGQPVPETATVGQMVTLCELGTLKLRGEGGVLSARLQQSDHAREIQEICRMQEIGQELYRKIIDVVFAAESPKGSASSRVGKDPLQPGKNRALKASDAFQRYRIAALIGNLRVWVDGEKRILSVEEKNLVFDHLVNLTPKKEPEWVTIAEILGIDRGQLIGTATMTDDGERAGARPPTHDTNRSIVNSRIAPLVDWWKTASALEQHAMVKALSNAEVDDFDSPERAKVQAFFADLDDDVHAKLDSLHLPVGRAAYSEDTLVRLTRRMLSDGVDLYTARLQEFGIEPSWTPPTPRIGEPVGNPAVDRVLKTVSRWLESATKTWGAPERVIIEHVREGFVTEKRAREMDGDMRRRAARNAKLFQEMQEKLNVQGKPSRADLWRYQSVQRQNCQCAYCGSPITFSNSEMDHIVPRAGQGSTNTRENLVAVCHRCNQSKGNTPFAIWAKNTSIEGVSVKEAVERTRHWVTDTGMRSTDFKKFTKAVVERFQRATMDEEIDARSMESVAWMANELRSRVAQHFASHGTTVRVYRGSLTAEARRASGISGKLEFLDGVGKSRLDRRHHAIDAAVIAFTSDYVAETLAVRSNLKQSQAHRQEAPQWREFTGKDAEHRATWRVWCQKMEKLSALLTEDLRDDRVVVMSNVRLRLGNGSAHEETIGKLSKVKLGSQLSVSDIDKASSEALWCALTREPDFDPKDGLPANPERHIRVNGTHVYAGDNIGLFPVSAGSIALRGGYAELGSSFHHARVYKITSGKKPAFAMLRVYTIDLLPYRNQDLFSVELKPQTMSMRQAEKKLRDALATGNAEYLGWLVVDDELVVDTSKIATDQVKAVEAELGTIRRWRVDGFFGDTRLRLRPLQMSKEGIKKESAPELSKIIDRPGWLPAVNKLFSEGNVTVVRRDSLGRVRLESTAHLPVTWKVQ

SEQ ID NO: 178 - protein, 1084 aa, Corynebacterium diphtheriae
MKYHVGIDVGTFSVGLAAIEVDDAGMPIKTLSLVSHIHDSGLDPDEIKSAVTRLASSGIARRTRRLYRRKRRRLQQLDKFIQRQGWPVIELEDYSDPLYPWKVRAELAASYIADEKERGEKLSVALRHIARHRGWRNPYAKVSSLYLPDGPSDAFKAIREEIKRASGQPVPETATVGQMVTLCELGTLKLRGEGGVLSARLQQSDYAREIQEICRMQEIGQELYRKIIDVVFAAESPKGSASSRVGKDPLQPGKNRALKASDAFQRYRIAALIGNLRVRVDGEKRILSVEEKNLVFDHLVNLTPKKEPEWVTIAEILGIDRGQLIGTATMTDDGERAGARPPTHDTNRSIVNSRIAPLVDWWKTASALEQHAMVKALSNAEVDDFDSPEGAKVQAFFADLDDDVHAKLDSLHLPVGRAAYSEDTLVRLTRRMLSDGVDLYTARLQEFGIEPSWTPPTPRIGEPVGNPAVDRVLKTVSRWLESATKTWGAPERVIIEHVREGFVTEKRAREMDGDMRRRAARNAKLFQEMQEKLNVQGKPSRADLWRYQSVQRQNCQCAYCGSPITFSNSEMDHIVPRAGQGSTNTRENLVAVCHRCNQSKGNTPFAIWAKNTSIEGVSVKEAVERTRHWVTDTGMRSTDFKKFTKAVVERFQRATMDEEIDARSMESVAWMANELRSRVAQHFASHGTTVRVYRGSLTAEARRASGISGKLKFFDGVGKSRLDRRHHAIDAAVIAFTSDYVAETLAVRSNLKQSQAHRQEAPQWREFTGKDAEHRAAWRVWCQKMEKLSALLTEDLRDDRVVVMSNVRLRLGNGSAHKETIGKLSKVKLSSQLSVSDIDKASSEALWCALTREPGFDPKEGLPANPERHIRVNGTHVYAGDNIGLFPVSAGSIALRGGYAELGSSFHHARVYKITSGKKPAFAMLRVYTIDLLPYRNQDLFSVELKPQTMSMRQAEKKLRDALATGNAEYLGWLVVDDELVVDTSKIATDQVKAVEAELGTIRRWRVDGFFSPSKLRLRPLQMSKEGIKKESAPELSKIIDRPGWLPAVNKLFSDGNVTVVRRDSLGRVRLESTAHLPVTWKVQ

SEQ ID NO: 179 - protein, 1084 aa, Corynebacterium diphtheriae
MKYHVGIDVGTFSVGLAAIEVDDAGMPIKTLSLVSHIHDSGLDPDKMKSAVTRLASSGIARRTRRLYRRKRRRLQQLDKFIQRQGWPVIELEDYSDPLYPWKVRAELAASYIADEKERGEKLSVALRHIARHRGWRNPYAKVSSLYLPDEPSDAFKSIREEIKRASGQPVPETATVGQMVTLCELGTLKLRGEGGVLSARLQQSDHAREIQEICRMQEIGQELYRKIIDVVFAAESPKGSASSRVGKDPLQPGKNRALKASDSFQRYRIAALISNLRVRVDGEKRILSVEEKNLVFDHLVNLAPKKEPEWVTIAEILGIDRGQLIGTATMTDDGERAGARPPTHDTNRSIVNSRIAPLVDWWKTASALEQHAMVKALSNAEVDDFDSPEGAKVQAFFADLDDDVHAKLDSLHLPVGRAAYSEDTLVRLTRRMLADGVDLYTARLQEFGIEPSWTPPAPRIGEPVGNPAVDRVLKTVSRWLESATKTWGAPERVIIEHVRDGFVTEKRAREMDGDMRRRAARNAKLFQEMQEKLNVQGKPSRADLWRYQSVQRQNCQCAYCGSPITFSNSEMDHIVPRAGQGSTNTRENLVAVCHRCNQSKGNTPFAIWAKNTSIEGVSVKEAVERTRHWVTDTGMRSTDFKKFTKAVVERFQRATMDEEIDARSMESVAWMANELRSRVAQHFASHGTTVRVYRGSLTAEARRASGISGKLEFLDGVGKSRLDRRHHAIDAAVIAFTSDYVAETLAVRSNLKQSQAHRQEAPQWREFTGKDAEHRAAWRVWCQKMEKLSALLTEDLRDDRVVVMSNVRLRLGNGSAHEETIGKLSKVKLGSQLSVSDIDKASSEALWCALTREPDFDPKDGLPANPERHIRVNGTHVYAGDNIGLFPVSAGSIALRGGYAELGSSFHHARVYKITSGKKPAFAMLRVYTIDLLPYRNQDLFSVELKPQTMSMRQAEKKLRDALATGNAEYLGWLVVDDELVVDTSKIATDQVKAVEAELGTIRRWRVDGFFGDTRLRLRPLQMSKEGIKKELAPELSKIIDRPGWLPAVNKLFSEGNVTVVRRDSLGRVRLESTAHLPVTWKVQ

SEQ ID NO: 180 - protein, 1089 aa, Corynebacterium matruchotii
  Corynebacterium matruchotii ATCC 14266
MNSANVNYRVGIDVGSYSLGMAAIAIDDDGKPTEILSAISLIHDSGVDPDSAKSAATRLATSGIARRTRRLYRRKRKRLAKLDKFISSQGWPLKEFEKYEDPFYPWRVRAELATTAITDQQELGEKLSIALRHIARHRGWRNPYSKVTALYTVTEPSDAFLAMQEECAKQLGRTIPETITVGQLVTGMNLGKTRLRGENSLLAARPRQSDNANEIHTIAKVQGLSNELVRQIIDHVFAAESPKGSAAEQVGKDPLQPTKKRALKASDAFQQYRIAALIGNLRIRGGKGNRRLTTEETRLVFDYLRSLPAKQEPTWQLVAEQLKIDRGNLVGTAIMTDDGERAGAKPPVHDTNRIMENTKIKPLATWWKSADADARAAMVKALSNAEVDDFDSQAGAQVQEFFFGISDEDQEKLDGLHLPIGRAAYSEDTLDRLTKRMIGEGMDLYEARQAEFKISNDWAPPAPEIGERVGNPAVDRVLKATARWLNAAERQWGAPKSVNIEHVRAAFMSESSARELDRDNQQRAKRNVKVVAEMQEKLGIEGRPSRADVWRFQSIQRQNGKCAYCGAEISFKNSEMDHIIPQAGEGSTNTRDNLVAVCRECNSSKSNIAFAVWAENTSRPGVSVQKAIERTHHWVTDSGLRKPEFDKFRKQVCDRLRRKATDEPIDARSLESVAWMANELRSRIAQKFKDGDTKVRVYKGALTAEARRASGISGKLEFVDGKGKSRLDRRHHAVDAAVVAFTSNYVAETLALRSNMKFDQELRRKAPQWREFTGSDHVHQVEWTKWKYRMQALAELLNNALVQDRIVVMHNLRLRLGNGAAHEDTIGKLTRLKVGDAISTTDIDRASSEALWCALTRDPDYDPKTGLPENPNRTIRIHGTHLTASDEITVFPVAAASIPIRDGFAKLGSNYHHVRLFRVPSGKKYKYCLMQVYTVDLLKFRKEDLFTVELKPQTISVRTCEALLRKALANGTAEYLGWLVSDDELLIDTSSFDTPGIVKLREEYGPVNRWRLAGLTSVTRLNLRPLYLSKEGLKPNVNPEIKKIIDNRSWIITVNKLFSSGHVKIIRRDALGRPRLHSAAHLPICWEVK

SEQ ID NO: 181 - protein, 1069 aa, Corynebacterium matruchotii
  Corynebacterium matruchotii ATCC 33806
MAAIAIDDDGKPTEILSAISLIHDSGVDPDSAKSAATRLATSGIARRTRRLYRRKRKRLAKLDKFISSQGWPLKEFEKYEDPFYPWRVRAELATTAITDQQELGEKLSIALRHIARHRGWRNPYSKVTALYTVTEPSDAFLAMQEECAKQLGRTIPETITVGQLVTGMNLGKTRLRGENSLLAARPRQSDNANEIHTIAKVQGLSNELVRQIIDHVFAAESPKGSAAEQVGKDPLQPTKKRALKASDAFQQYRIAALIGNLRIRGGKGNRRLTTEETRLVFDYLRSLPAKQEPTWQLVAEQLKIDRGNLVGTAIMTDDGERAGAKPPVHDTNRIMENTKIKPLATWWKSADADARAAMVKALSNAEVDDFDSQAGAQVQEFFFGISDEDQEKLDGLHLPIGRAAYSEDTLDRLTKRMIGEGMDLYEARQAEFKISNDWAPPAPEIGERVGNPAVDRVLKATARWLNAAERQWGAPKSVNIEHVRAAFMSESSARELDRDNQQRAKRNVKVVAEMQEKLGIEGRPSRADVWRFQSIQRQNGKCAYCGAEISFKNSEMDHIIPQVGEGSTNTRDNLVAVCRECNSSKSNIAFAVWAENTSRPGVSVQKAIERTHHWVTDSGLRKPEFDKFRKQVCDRLRRKATDEPIDARSLESVAWMANELRSRIAQKFKDGDTKVRVYKGALTAEARRASGISGKLEFVDGKGKSRLDRRHHAVDAAVVAFTSNYVAETLALRSNMKFDQELRRKAPQWREFTGSDHVHQVEWTKWKYRMQALAELLNNALVQDRIVVMHNLRLRLGNGAAHEDTIGKLTRLKVGDAISTTDIDRASSEALWCALTRDPDYDPKTGLPENPNRTIRIHGTHLTASDEITVFPVAAASIPIRDGFAKLGSNYHHVRLFRVPSGKKYKYCLMQVYTVDLLKFRKEDLFTVELKPQTISVRTCEALLRKALANGTAEYLGWLVSDDELLIDTSSFDTPGIVKLREEYGPVNRWRLAGLTSVTRLNLRPLYLSKEGLKPNVNPEIKKIIDNRSWIITVNKLFSSGHVKIIRRDALGRPRLHSAAHLPICWEVK

SEQ ID NO: 182 - protein, 1079 aa, Dinoroseobacter shibae
MRLGLDIGTSSIGWWLYETDGAGSDARITGVVDGGVRIFSDGRDPKSGASLAVDRRAARAMRRRRDRYLRRRATLMKVLAETGLMPADPAEAKALEALDPFALRAAGLDEPLPLPHLGRALFHLNQRRGFKSNRKTDRGDNESGKIKDATARLDMEMMANGARTYGEFLHKRRQKATDPRHVPSVRTRLSIANRGGPDGKEEAGYDFYPDRRHLEEEFHKLWAAQGAHHPELTETLRDLLFEKIFFQRPLKEPEVGLCLFSGHHGVPPKDPRLPKAHPLTQRRVLYETVNQLRVTADGREARPLTREERDQVIHALDNKKPTKSLSSMVLKLPALAKVLKLRDGERFTLETGVRDAIACDPLRASPAHPDRFGPRWSILDADAQWEVISRIRRVQSDAEHAALVDWLTEAHGLDRAHAEATAHAPLPDGYGRLGLTATTRILYQLTADVVTYADAVKACGWHHSDGRTGECFDRLPYYGEVLERHVIPGSYHPDDDDITRFGRITNPTVHIGLNQLRRLVNRIIETHGKPHQIVVELARDLKKSEEQKRADIKRIRDTTEAAKKRSEKLEELEIEDNGRNRMLLRLWEDLNPDDAMRRFCPYTGTRISAAMIFDGSCDVDHILPYSRTLDDSFPNRTLCLREANRQKRNQTPWQAWGDTPHWHAIAANLKNLPENKRWRFAPDAMTRFEGENGFLDRALKDTQYLARISRSYLDTLFTKGGHVWVVPGRFTEMLRRHWGLNSLLSDAGRGAVKAKNRTDHRHHAIDAAVIAATDPGLLNRISRAAGQGEAAGQSAELIARDTPPPWEGFRDDLRVRLDRIIVSHRADHGRIDHAARKQGRDSTAGQLHQETAYSIVDDIHVASRTDLLSLKPAQLLDEPGRSGQVRDPQLRKALRVATGGKTGKDFENALRYFASKPGPYQAIRRVRIIKPLQAQARVPVPAQDPIKAYQGGSNHLFEIWRLPDGEIEAQVITSFEAHTLEGEKRPHPAAKRLLRVHKGDMVALERDGRRVVGHVQKMDIANGLFIVPHNEANADTRNNDKSDPFKWIQIGARPAIASGIRRVSVDEIGRLRDGGTRPI

SEQ ID NO: 183 - protein, 1332 aa, Dolosigranulum pigrum
  Dolosigranulum pigrum ATCC 51524
MQKNYTIGLDIGTNSVGWAVMKDDYTLIRKRMKVLGNTDIKKIKKNFWGVRLFDEGETAKETRLKRGTRRRYQRRRNRLIYLQDIFQQPMLAIDENFFHRLDDSFFVPDDKSYDRHPIFGSLEEEVAYHNTYPTIYHLRKHLADNPEKADLRLVYTALAHIVKYRGHFLIEGELNTENTSISETFEQFLDTYSDIFKEQLVGDISKVEEILSSKQSRSRKHEQIMALFPNENKLGNFGRFMMLIVGNTSNFKPVFDLDDEYKLKLSDETYEEDLDTLLGMTDDVFLDVFMAAKNVYDAVEMSAIISTDTGNSKAVLSNQMINFYDEHKVDLAQLKQFFKTHLPDKYYECFSDPSKNGYAGYIDGKTNQEDFYKYIEKVMKTIKSDKKDYFLDKIDREVFLRKQRSFYNSVIPHQIHLQEMQAILDRQSQYYPFLAENRDKIESLVTFRIPYYVGPLTVSDQSEFAWMERQSDEPIRPWNFDEIVNKERSAEKFIERMTNMDTYLLEEKVLPKRSLLYQTFEVYNELTKVRYTNEQGKTEKLNRQQKAEIIETLFKQKNRVREKDIANYLEQYGYVDGTDIKGVEDKFNASLSTYNDLAKIDGAKAYLDDPEYADVWEDIIKILTIFEDKAMRKKQLQTYSDTLSPEILKKLERKHYTGWGRFSKKLINGLRDEGSNKTILDYLKSDEGSSGPTNRNFMQLIRDNTLSFKKKIEDAQTIEDTTHIYDTVAELPGSPAIKKGIRQALKIVEEIIDIIGYEPENIVVEMARESQTTKKGKDLSKERLEKLTEAIKEFDGPSDVKVKDLKNENLRNDRLYLYYLQNGRDMYTNEPLDINNLSKYDIDHIIPQSFTTDNSIDNKVLVSRTKNQGNKSDDVPSINIVHKMKPFWRQLHKAGLISDRKFKNLTKAEHGGLTEADRAHFLNRQLVETRQITKHVANLLDSQYNTAEEQRINIVLLKSSMTSRFRKEFKLYKVREINDYHHGHDAYLNAVVATTIMKVYPNLKPQFVYGQYKKTSMFKEEKATARKHFYSNITKFFKKEKVVNEETGEILWDTERHLSTIKRVLSWKQMNIVKKVEKQKGQLWKETIYPKGDSSKLIPVKEGMDPQKYGGLSQVSEAFAVVITHEKGKKKQLKSDLISIPIVDQKAYEQHPTAYLEEAGYNNPTVLHELFKYQLFELEDGSRRMIASAKEFQKGNQMVLPLELVELLYHANRYDKVKFPDSIEYVHDNLAKFDDLLEYVIDFSNKYINADKNVQKIQKIYKEHGTEDVELTVESFVNLMTFTAMGAPATFKFYGESITRSRYTSITEFRGSTLIFQSITGLYETRYKLEDN

SEQ ID NO: 184 - protein, 1340 aa, Dorea longicatena
  Dorea longicatena DSM 13814
MEQEYYLGLDMGTGSVGWAVTDSEYHVLRKHGKALWGVRLFESASTAEERRMFRTSRRRLDRRNWRIEILQEIFAEEISKKDPGFFLRMKESKYYPEDKRDINGNCPELPYALFVDDDFTDKDYHKKFPTIYHLRKMLMNTEETPDIRLVYLAIHHMMKHRGHFLLSGDINEIKEFGTTFSKLLENIKNEELDWNLELGKEEYAVVESILKDNMLNRSTKKTRLIKALKAKSICEKAVLNLLAGGTVKLSDIFGLEELNETERPKISFADNGYDDYIGEVENELGEQFYIIETAKAVYDWAVLVEILGKYTSISEAKVATYEKHKSDLQFLKKIVRKYLTKEEYKDIFVSTSDKLKNYSAYIGMTKINGKKVDLQSKRCSKEEFYDFIKKNVLKKLEGQPEYEYLKEELERETFLPKQVNRDNGVIPYQIHLYELKKILGNLRDKIDLIKENEDKLVQLFEFRIPYYVGPLNKIDDGKEGKFTWAVRKSNEKIYPWNFENVVDIEASAEKFIRRMTNKCTYLMGEDVLPKDSLLYSKYMVLNELNNVKLDGEKLSVELKQRLYTDVFCKYRKVTVKKIKNYLKCEGIISGNVEITGIDGDFKASLTAYHDFKEILTGTELAKKDKENIITNIVLFGDDKKLLKKRLNRLYPQITPNQLKKICALSYTGWGRFSKKFLEEITAPDPETGEVWNIITALWESNNNLMQLLSNEYRFMEEVETYNMGKQTKTLSYETVENMYVSPSVKRQIWQTLKIVKELEKVMKESPKRVFIEMAREKQESKRTESRKKQLIDLYKACKNEEKDWVKELGDQEEQKLRSDKLYLYYTQKGRCMYSGEVIELKDLWDNTKYDIDHIYPQSKTMDDSLNNRVLVKKKYNATKSDKYPLNENIRHERKGFWKSLLDGGFISKEKYERLIRNTELSPEELAGFIERQIVETRQSTKAVAEILKQVFPESEIVYVKAGTVSRFRKDFELLKVREVNDLHHAKDAYLNIVVGNSYYVKFTKNASWFIKENPGRTYNLKKMFTSGWNIERNGEVAWEVGKKGTIVTVKQIMNKNNILVTRQVHEAKGGLFDQQIMKKGKGQIAIKETDERLASIEKYGGYNKAAGAYFMLVESKDKKGKTIRTIEFIPLYLKNKIESDESIALNFLEKGRGLKEPKILLKKIKIDTLFDVDGFKMWLSGRTGDRLLFKCANQLILDEKIIVTMKKIVKFIQRRQENRELKLSDKDGIDNEVLMEIYNTFVDKLENTVYRIRLSEQAKTLIDKQKEFERLSLEDKSSTLFEILHIFQCQSSAANLKMIGGPGKAGILVMNNNISKCNKISIINQSPTGIFENEIDLLKI

SEQ ID NO: 185 - protein, 1380 aa, Eggerthella sp.
  Eggerthella sp. YY7918
MNLRHVGNYNIGLDMGTASVGWAAIDEQGELLHFKGKPTWGSRLFDSANTAATARMPRGQRRRYIRRRWRLDLLQKFFSEEMAEKDPEFFIRLRQSSLWPEDREGGHTAYHWPLFNDSDFNEKEYYEKFPTIFHLRQWLMETDEKADIRLIYLAFHNIVKHRGNFLQENNDSLSAQNANMRESLESFCIALEEWCDEKELTCSCDPQKLEHLFKEVKYRSDIRDGFAALLGLACSGENEVDVKAMAKEMGKAIVGYKADFSKIFTECDKEGSSFRLSDDEGPEAFLDICPDDGIALFEAIQMVYSSFILTGMLTEKGLSLSKISAYNQYGQDLESLKALVKEYVPNEYSSFFRGPTYSGSTEYDPSKAQGYTRYNLGPSKKGSGAKPMAYEDFKKSVEQLFANTNAINDERYKEMMGRFAEEKFLRRLRTSDNGRIPFQLNLEEMTAIIINQGKYYPFLLEQQEKLESLVRFRIPYYVGPLTRINARLDSKGNACFAWSKRKDGMDSASIKPWNWDEVIDKHASAQAFIERMTGTCTYLRGEPVLPRCSLLYEEYCVLNELNGARWTQDGDKFIRFDYKDRSDIIEELFKKRRGRIQYAAVADWMKQERSHANVHVSGGQGENAFESRLSSYHFFCNDVFGVDELPGSYVDMVEEIILWSTLFEDRSILREEIQRKYGDVLNEEQIKTICKKRFSGWGRLSRKLLCSLKAQTDNGPKSIMDILQEGDQNNGRVGRAMVFQEILHDEQLGFEQKIEEENTQSMLEGENLLIEDLPGSPAIRRSINQAVRIVDEIVGIAGHAPDNIFIEVTREDDTKKKGKRTTTRYSNIQKALEALKEEGAEALRELKTYKHNELDKRLSLYFMQNGKSLYSGIPLDIRRLSEYQIDHIIPQSYIKDDSYENMALVLPGENQSKADNLLISQDIRIKMKATWTALHKAGLMGDKKYNNLMNSSISDAKMKGFINRQLVETSQSVKLTQMMLSQKYPGAKVRPIKASISSQLRDACDLVKCREANDYHHAHDAYLACQVGRFVLKRHSSMFDNPIGMTKVIRDFVKRQGQEFKRNGKLPAYASRSGFIVQSFMRSGFDAETGELLRDDWNAPFEIARIKRCLNYRDCYISRMPMEDSGAFWDATIYSPKAGKKGALPVKQGLPVEKYGSYSREQFAYFFVYKAYNPKKKAYRLEFEAVPVRVASAVETRENALEEYAKSVAKQAGLEFVEVARPKVYKYQLIELGEDRLYITGKREVRNASQLAFSLDEIDLLKRLAEGEETSSEERERLFDVLIEKYARYAPRLARQLSVDSMSATFETLNAEEQLGILLSLVEIANGKRNMIDLSSAGGSKNAGCMNPTFSSELSSPGSNFTFIDQSVTGMFERRQRLEL

SEQ ID NO: 186 - protein, 1195 aa, Elusimicrobium minutum
MQKNINTKQNHIYIKQAQKIKEKLGDKPYRIGLDLGVGSIGFAIVSMEENDGNVLLPKEIIMVGSRIFKASAGAADRKLSRGQRNNHRHTRERMRYLWKVLAEQKLALPVPADLDRKENSSEGETSAKRFLGDVLQKDIYELRVKSLDERLSLQELGYVLYHIAGHRGSSAIRTFENDSEEAQKENTENKKIAGNIKRLMAKKNYRTYGEYLYKEFFENKEKHKREKISNAANNHKFSPTRDLVIKEAEAILKKQAGKDGFHKELTEEYIEKLTKAIGYESEKLIPESGFCPYLKDEKRLPASHKLNEERRLWETLNNARYSDPIVDIVTGEITGYYEKQFTKEQKQKLFDYLLTGSELTPAQTKKLLGLKNTNFEDIILQGRDKKAQKIKGYKLIKLESMPFWARLSEAQQDSFLYDWNSCPDEKLLTEKLSNEYHLTEEEIDNAFNEIVLSSSYAPLGKSAMLIILEKIKNDLSYTEAVEEALKEGKLTKEKQAIKDRLPYYGAVLQESTQKIIAKGFSPQFKDKGYKTPHTNKYELEYGRIANPVVHQTLNELRKLVNEIIDILGKKPCEIGLETARELKKSAEDRSKLSREQNDNESNRNRIYEIYIRPQQQVIITRRENPRNYILKFELLEEQKSQCPFCGGQISPNDIINNQADIEHLFPIAESEDNGRNNLVISHSACNADKAKRSPWAAFASAAKDSKYDYNRILSNVKENIPHKAWRFNQGAFEKFIENKPMAARFKTDNSYISKVAHKYLACLFEKPNIICVKGSLTAQLRMAWGLQGLMIPFAKQLITEKESESFNKDVNSNKKIRLDNRHHALDAIVIAYASRGYGNLLNKMAGKDYKINYSERNWLSKILLPPNNIVWENIDADLESFESSVKTALKNAFISVKHDHSDNGELVKGTMYKIFYSERGYTLTTYKKLSALKLTDPQKKKTPKDFLETALLKFKGRESEMKNEKIKSAIENNKRLFDVIQDNLEKAKKLLEEENEKSKAEGKKEKNINDASIYQKAISLSGDKYVQLSKKEPGKFFAISKPTPTTTGYGYDTGDSLCVDLYYDNKGKLCGEIIRKIDAQQKNPLKYKEQGFTLFERIYGGDILEVDFDIHSDKNSFRNNTGSAPENRVFIKVGTFTEITNNNIQIWFGNIIKSTGGQDDSFTINSMQQYNPRKLILSSCGFIKYRSPILKNKEG

SEQ ID NO: 187 - protein, 1337 aa, Enterococcus faecalis
  Enterococcus faecalis ATCC 29200
MKKDYVIGLDIGTNSVGWAVMTEDYQLVKKKMPIYGNTEKKKIKKNFWGVRLFEEGHTAEDRRLKRTARRRISRRRNRLRYLQAFFEEAMTDLDENFFARLQESFLVPEDKKWHRHPIFAKLEDEVAYHETYPTIYHLRKKLADSSEQADLRLIYLALAHIVKYRGHFLIEGKLSTENISVKEQFQQFMIIYNQTFVNGESRLVSAPLPESVLIEEELTEKASRTKKSEKVLQQFPQEKANGLFGQFLKLMVGNKADFKKVFGLEEEAKITYASESYEEDLEGILAKVGDEYSDVFLAAKNVYDAVELSTILADSDKKSHAKLSSSMIVRFTEHQEDLKKFKRFIRENCPDEYDNLFKNEQKDGYAGYIAHAGKVSQLKFYQYVKKIIQDIAGAEYFLEKIAQENFLRKQRTFDNGVIPHQIHLAELQAIIHRQAAYYPFLKENQEKIEQLVTFRIPYYVGPLSKGDASTFAWLKRQSEEPIRPWNLQETVDLDQSATAFIERMTNFDTYLPSEKVLPKHSLLYEKFMVFNELTKISYTDDRGIKANFSGKEKEKIFDYLFKTRRKVKKKDIIQFYRNEYNTEIVTLSGLEEDQFNASFSTYQDLLKCGLTRAELDHPDNAEKLEDIIKILTIFEDRQRIRTQLSTFKGQFSAEVLKKLERKHYTGWGRLSKKLINGIYDKESGKTILGYLIKDDGVSKHYNRNFMQLINDSQLSFKNAIQKAQSSEHEETLSETVNELAGSPAIKKGIYQSLKIVDELVAIMGYAPKRIVVEMARENQTTSTGKRRSIQRLKIVEKAMAEIGSNLLKEQPTTNEQLRDTRLFLYYMQNGKDMYTGDELSLHRLSHYDIDHIIPQSFMKDDSLDNLVLVGSTENRGKSDDVPSKEVVKDMKAYWEKLYAAGLISQRKFQRLTKGEQGGLTLEDKAHFIQRQLVETRQITKNVAGILDQRYNANSKEKKVQIITLKASLTSQFRSIFGLYKVREVNDYHHGQDAYLNCVVATTLLKVYPNLAPEFVYGEYPKFQTFKENKATAKAIIYTNLLRFFTEDEPRFTKDGEILWSNSYLKTIKKELNYHQMNIVKKVEVQKGGFSKESIKPKGPSNKLIPVKNGLDPQKYGGFDSPIVAYTVLFTHEKGKKPLIKQEILGITIMEKTRFEQNPILFLEEKGFLRPRVLMKLPKYTLYEFPEGRRRLLASAKEAQKGNQMVLPEHLLTLLYHAKQCLLPNQSESLAYVEQHQPEFQEILERVVDFAEVHTLAKSKVQQIVKLFEANQTADVKEIAASFIQLMQFNAMGAPSTFKFFQKDIERARYTSIKEIFDATIIYQSTTGLYETRRKVVD

SEQ ID NO: 188 - protein, 1337 aa, Enterococcus faecalis
  Enterococcus faecalis ATCC 4200
MKKDYVIGLDIGTNSVGWAVMTEDYQLVKKKMPIYGNTEKKKIKKNFWGVRLFEEGHTAEDRRLKRTARRRISRRRNRLRYLQAFFEEAMTALDENFFARLQESFLVPEDKKWHRHPIFAKLEDEVAYHETYPTIYHLRKKLADSSEQADLRLIYLALAHIVKYRGHFLIEGKLSTENISVKEQFQQFMIIYNQTFVNGESRLVSAPLPESVLIEEELTEKASRTKKSEKVLQQFPQEKANGLFGQFLKLMVGNKADFKKVFGLEEEAKITYASESYEEDLEGILAKVGDEYSDVFLAAKNVYDAVELSTILADSDKKSHAKLSSSMIVRFTEHQEDLKKFKRFIRENCPDEYDNLFKNEQKDGYAGYIAHAGKVSQLKFYQYVKKIIQDIAGAEYFLEKIAQENFLRKQRTFDNGVIPHQIHLAELQAIIHRQAAYYPFLKENQEKIEQLVTFRIPYYIGPLSKGDASTFAWLKRQSEEPIRPWNLQETVDLDQSATAFIERMTNFDTYLSSEKVLPKHSLLYEKFMVFNELTKISYTDDRGIKANFSGKEKEKIFDYLFKTRRKVKKKDIIQFYRNEYNTEIVTLSGLEEDQFNASFSTYQDLLKCGLTRAELDHPDNAEKLEDIIKILTIFEDRQRIRTQLSTFKGQFSAEVLKKLERKHYTGWGRLSKKLINGIYDKESGKTILGYLIKDDGVSKHYNRNFMQLINDSQLSFKNAIQKAQSSEHEETLSETVNELAGSPAIKKGIYQSLKIVDELVAIMGYAPKRIVVEMARENQTTSTGKRRSIQRLKIVEKAMAEIGSNLLKEQPTTNEQLRDTRLFLYYMQNGKDMYTGDELSLHRLSHYDIDHIIPQSFMKDDSLDNLVLVGSTENRGKSDDVPSKEVVKDMKAYWEKLYAAGLISQRKFQRLTKGEQGGLTLEDKAHFIQRQLVETRQITKNVAGILDQRYNANSKEKKVQIITLKASLTSQFRSIFGLYKVREVNDYHHGQDAYLNCVVATTLLKVYPNLAPEFVYGEYPKFQAFKENKATAKAIIYTNLLRFFTEDEPRFTKDGEILWSNSYLKTIKKELNYHQMNIVKKVEVQKGGFSKESIKPKGPSNKLIPVKNGLDPQKYGGFDSPVVAYTVLFTHEKGKKPLIKQEILGITIMEKTRFEQNPILFLEEKGFLRPRVLMKLPKYTLYEFPEGRRRLLASAKEAQKGNQMVLPEHLLTLLYHAKQCLLPNQSESLAYVEQHQPEFQEILERVVDFAEVHTLAKSKVQQIVKLFEANQTADVKEIAASFIQLMQFNAMGAPSTFKFFQKDIERARYTSIKEIFDATIIYQSTTGLYETRRKVVD

SEQ ID NO: 189 - protein, 1337 aa, Enterococcus faecalis
  Enterococcus faecalis D6
MKKDYVIGLDIGTNSVGWAVMTEDYQLVKKKMPIYGNTEKKKIKKNFWGVRLFEEGHTAEDRRLKRTARRRISRRRNRLRYLQAFFEEAMTALDENFFARLQESFLVPEDKKWHRHPIFAKLEDEVAYHETYPTIYHLRKKLADSSEQADLRLIYLALAHIVKYRGHFLIEGKLSTENISVKEQFQQFMIIYNQTFVNGESRLVSAPLPESVLIEEELTEKASRTKKSEKVLQQFPQEKANGLFGQFLKLMVGNKADFKKVFGLEEEAKITYASESYEEDLEGILAKVGDEYSDVFLAAKNVYDAVELSTILADSDKKSHAKLSSSMIVRFTEHQEDLKNFKRFIRENCPDEYDNLFKNEQKDGYAGYITHAGKVSQLKFYQYVKKIIQDIAGAEYFLEKIAQENFLRKQRTFDNGVIPHQIHLAELQAIIHRQAAYYPFLKENQEKIEQLVTFRIPYYVGPLSKGDANTFAWLKRQSEEPIRPWNLQETVDLDQSATAFIERMTNFDTYLPSEKVLPKHSLLYEKFMVFNELTKISYTDDRGIKANFSGKEKEKIFDYLFKTRRKVKKKDIIQFYRNEYNTEIVTLSGLEEDQFNASFSTYQDLLKCGLTRAELDHPDNAEKLEDIIKILTIFEDRQRIRTQLSTFKGQFSAEVLKKLERKHYTGWGRLSKKLINGIYDKESGKTILDYLIKDDGVSKHYNRNFMQLINDSQLSFKNAIQKAQSSEHEETLSETVNELAGSPAIKKGIYQSLKIVDELVAIMGYAPKRIVVEMARENQTTSTGKRRSIQRLKIVEKAMAEIGSNLLKEQPTTNEQLRDTRLFLYYMQNGKDMYTGDELSLHRLSHYDIDHIIPQSFMKDDSLDNLVLVGSTENRGKSDDVPSKEVVKDMKAYWEKLYAAGLISQRKFQRLTKGEQGGLTLEDKAHFIQRQLVETRQITKNVAGILDQRYNAKSKEKKVQIITLKASLTSQFRSIFGLYKVREVNDYHHGQDAYLNCVVATTLLKVYPNLAPEFVYGEYPKFQTFKENKATAKAIIYTNLLRFFTEDEPRFTKDGEILWSNSYLKTIKKELNYHQMNIVKKVEVQKGGFSKESIKPKGPSNKLIPVKNGLDPQKYGGFDSPIVAYTVLFTHEKGKKPLIKQEILGITIMEKTRFEQNPILFLEEKGFLRPRVLMKLPKYTLYQFPEGRRRLLASAKEAQKGNQMVLPEHLLTLLYHAKQCLLPNQSESLAYVEQHQPEFQEILERVVDFAEVHTLAKSKVQQIVKLFEANQTADVKEIAASFIQLMQFNAMGAPSTFKFFQKDIERARYTSIKEIFDATIIYQSTTGLYETRRKVVD

SEQ ID NO: 190 - protein, 1337 aa, Enterococcus faecalis
  Enterococcus faecalis E1Sol
MKKDYVIGLDIGTNSVGWAVMTEDYQLVKKKMPIYGNTEKKKIKKNFWGVRLFEEGHTAEDRRLKRTARRRISRRRNRLRYLQAFFEEAMTDLDENFFARLQESFLVPEDKKWHRHPIFAKLEDEVAYHETYPTIYHLRKKLADSSEQADLRLIYLALAHIVKYRGHFLIEGKLSTENTSVKEQFQQFMVIYNQTFVNGESRLVSAPLPESVLIEEELTEKASRTKKSEKVLQQFPQEKANGLFGQFLKLMVGNKADFKKVFGLEEEAKITYASESYEEDLEGILAKVGDEYSDVFLAAKNVYDAVELSTILADSDKKSHAKLSSSMIVRFTEHQEDLKKFKRFIRENCPDEYDNLFKNEQKDGYAGYIAHAGKVSQLKFYQYVKKIIQDIAGAEYFLEKIAQENFLRKQRTFDNGVIPHQIHLAELQAIIHRQAAYYPFLKENQEKIEQLVTFRIPYYVGPLSKGDASTFAWLKRQSEEPIRPWNLQETVDLDQSATAFIERMTNFDTYLPSEKVLPKHSLLYEKFMVFNELTKISYTDDRGIKANFSGKEKEKIFDYLFKTRRKVKKKDIIQFYRNEYNTEIVTLSGLEEDQFNASFSTYQDLLKCGLTRAELDHPDNAEKLEDIIKILTIFEDRQRIRTQLSTFKGQFSAEVLKKLERKHYTGWGRLSKKLINGIYDKESGKTILDYLVKDDGVSKHYNRNFMQLINDSQLSFKNAIQKAQSSEHEETLSETVNELAGSPAIKKGIYQSLKIVDELVAIMGYAPKRIVVEMARENQTTSTGKRRSIQRLKIVEKAMAEIGSNLLKEQPTTNEQLRDTRLFLYYMQNGKDMYTGDELSLHRLSHYDIDHIIPQSFMKDDSLDNLVLVGSTENRGKSDDVPSKKVVKKMKAYWEKLYAAGLISQRKFQRLTKGEQGGLTLEDKAHFIQRQLVETRQITKNVAGILDQRYNAKSKEKKVQIITLKASLTSQFRSIFGLYKVREVNDYHHGQDAYLNCVVATTLLKVYPNLAPEFVYGEYPKFQAFKENKATAKTIIYTNLMRFFTEDEPRFTKDSEILWSNSYLKTIKKELNYHQMNIVKKVEVQKGGFSKESIKPKGPSNKLIPVKNGLDPQKYGGFDSPVVAYTVLFTHEKGKKPLIKQEILGITIMEKTRFEQNPILFLEEKGFLRPRVLMKLPKYTLYEFPEGRRRLLASAKEAQKGNQMVLPEHLLTLLYHAKQCLLPNQSESLAYVEQHQPEFQEILERVVDFAEVHTLAKSKVQQIVKLFEANQTADVKEIAASFIQLMQFNAMGAPSTFKFFQKDIERARYTSIKEIFDATIIYQSTTGLYETRRKVVD

SEQ ID NO: 191 - protein, 1150 aa, Enterococcus faecalis
  Enterococcus faecalis Fly1
MYSIGLDLGISSVGWSVIDERTGNVIDLGVRLFSAKNSEKNLERRTNRGGRRLIRRKTNRLKDAKKILAAVGFYEDKSLKNSCPYQLRVKGLTEPLSKGEIYKVTLHILKKRGISYLDEDDTEAAKESQDYKEQVRKNAQLLTKYTPGQIQLQRLKENNRVKTGINAQGNYQLNVFKVSAYANELATILKTQQAFYPNELTDDWIALFVQPGIAEEAGLIYRKRPYYHGPGNEANNSPYGRWSDFKKTGQPATNIFDRLIGKDFQGELRASGLSLSAQQYNLLNDLTNLKIDGEIPLSPEQKEYILAELMTKEFTRFGVNDVAKLLGVKKERLSGWRLDKKGKPEIHTLKGYRNWRKIFAESGIDLATLPTETIDCLAKVLTLNTEHEGIENTLAFELPELAESVKLLVLDRYKELSQSVSTQAWHRFSLKTLHLLIPELMNATSEQNTLLEQFQLKSDVRKRYSEYKKLPTKDVLTEIYNPTVNKTVSQAFKVIDALLVKYGKEQIRYITIEMPRDDNEEDEKKRIKELHAKNSQRKNDSQSYFMQKSGWSQEKFQTTIQKNRRFLAKLLYYYEQDGICAYTGLSISPELLVSDSTEIDHIIPISISLDDSINNKVLVLSKANQVKGQQTPYDAWMDGSFKKINGKFSNWDDYQKWVESRHFSHKKENNLLETRNIFDSEQVEKFLARNLNDTRYASRLVLNTLQSFFANHETKVRVVNGSFTHTLRKKWGADLDKTRETHHHHAVDATLCAVTPFVKVSRYHYAVKEETGEKVMREIDFETGEIVDEMSYQEFKKSKKYERKTYQVKWPNFREQLKPVNLHPRIKFSHQVDRKANRKLSDATIYSVREKTEVKTLKSGKQKITTDEYTIGKIKDIYTVDGWEAFKKKQDKLLMKDLDEKTYERLLSIAETTPDFQEVEEKNGKVKRVKRSPFAVYCEENDIPAIQKYAKKNNGPLIRSLKYYDGKLNKHINITKDSQGRPVEKTKNGRKVTLQSLKPYRYDIYQDLETKAYYTVQLYYSDLRFVEGKYGITEKEYMKKVAEQTKGQVVRFCFSLQKNDGLEIEWKDSQRYDVRFYNFQSANSINFKGLEQEMMPAENQFKQKPYNNGAINLNIAKYGKEGKKLRKFNTDILGKKHYLYYEKEPKNIIK

SEQ ID NO: 192 - protein, 1337 aa, Enterococcus faecalis
MKKDYVIGLDIGTNSVGWAVMTEDYQLVKKKMPIYGNTEKKKIKKNFWGVRLFEEGHTAEDRRLKRTARRRISRRRNRLRYLQAFFEEAMTDLDENFFARLQESFLVPEDKKWHRHPIFAKLEDEVAYHETYPTIYHLRKKLADSSEQADLRLIYLALAHIVKYRGHFLIEGKLSTENISVKEQFQQFMIIYNQTFVNGESRLVSAPLPESVLIEEELTEKASRTKKSEKVLQQFPQEKANGLFGQFLKLMVGNKADFKKVFGLEEEAKITYASESYEEDLEGILAKVGDEYSDVFLAAKNVYDAVELSTILADSDKKSHAKLSSSMIVRFTEHQEDLKKFKRFIRENCPDEYDNLFKNEQKDGYAGYIAHAGKVSQLKFYQYVKKIIQDIAGAEYFLEKIAQENFLRKQRTFDNGVIPHQIHLAELQAIIHRQAAYYPFLKENQEKIEQLVTFRIPYYVGPLSKGDASTFAWLKRQSEEPIRPWNLQETVDLDQSATAFIERMTNFDTYLPSEKVLPKHSLLYEKFMVFNELTKISYTDDRGIKANFSGKEKEKIFDYLFKTRRKVKKKDIIQFYRNEYNTEIVTLSGLEEDQFNASFSTYQDLLKCGLTRAELDHPDNAEKLEDIIKILTIFEDRQRIRTQLSTFKGQFSAEVLKKLERKHYTGWGRLSKKLINGIYDKESGKTILDYLVKDDGVSKHYNRNFMQLINDSQLSFKNAIQKAQSSEHEETLSETVNELAGSPAIKKGIYQSLKIVDELVAIMGYAPKRIVVEMARENQTTSTGKRRSIQRLKIVEKAMAEIGSNLLKEQPTTNEQLRDTRLFLYYMQNGKDMYTGDELSLHRLSHYDIDHIIPQSFMKDDSLDNLVLVGSTENRGKSDDVPSKEVVKDMKAYWEKLYAAGLISQRKFQRLTKGEQGGLTLEDKAHFIQRQLVETRQITKNVAGILNQRYNANSKEKKVQIITLKASLTSQFRSIFGLYKVREVNDYHHGQDAYLNCVVATTLLKVYPNLAPEFVYGEYPKFQTFKENKATAKAIIYTNLLRFFTEDEPRFTKDGEILWSNSYLKTIKKELNYHQMNIVKKVEVQKGGFSKESIKPKGPSNKLIPVKNGLDPQKYGGFDSPVVAYTVLFTHEKGKKPLIKQEILGITIMEKTRFEQNPILFLEEKGFLRPRVLMKLPKYTLYEFPEGRRRLLASAKEAQKGNQMVLPEHLLTLLYHAKQCLLPNQSESLAYVEQHQPEFQEILERVVDFAEVHTLAKSKVQQIVKLFEANQTADVKEIAASFIQLMQFNAMGAPSTFKFFQKDIERARYTSIKEIFDATIIYQSTTGLYETRRKVVD

SEQ ID NO: 193 - protein, 1150 aa, Enterococcus faecalis
  Enterococcus faecalis R508
MYSIGLDLGISSVGWSVIDERTGNVIDLGVRLFSAKNSEKNLERRTNRGGRRLIRRKTNRLKDAKKILAAVGFYEDKSLKNSCPYQLRVKGLTEPLSKGEIYKVTLHILKKRGISYLDEDDTEAAKESQDYKEQVRKNAQLLTKYTPGQIQLQRLKENNRVKTGINVQGNYQLNVFKVSAYANELATILKTQQAFYPNELTDDWIALFVQPGIAEEAGLIYRKRPYYHGPGNEANNSPYGRWSDFQKTGEPATNIFDKLIGKDFQGELRASGLSLSAQQYNLLNDLTNLKIDGEVPLSSEQKEYILTELMTKEFTRFGVNDVVKLLGVKKERLSGWRLDKKGKPEIHTLKGYRNWRKIFAEAGIDLATLPTETIDCLAKVLTLNTEREGIENTLAFELPELSESVKLLVLDRYKELSQSISTQSWHRFSLKTLHLLIPELMNATSEQNTLLEQFQLKSDVRKRYSEYKKLPTKDVLAEIYNPTVNKTVSQAFKVIDALLVKYGKEQIRYITIEMPRDDNEEDEKKRIKELHAKNSQRKNDSQSYFMQKSGWSQEKFQTTIQKNRRFLAKLLYYYEQDGICAYTGLPISPELLVSDSTEIDHIIPISISLDDSINNKVLVLSKANQVKGQQTPYDAWMDGSFKKINGKFSNWDDYQKWVESRHFSHKKENNLLETRNIFDSEQVEKFLARNLNDTRYASRLVLNTLQSFFTNQETKVRVVNGSFTHTLRKKWGADLDKTRETHHHHAVDATLCAVTPFVKVSRYHYAVKEETGEKVMREIDFETGEIVNEMSYREFKKSKKYERKTYQVKWPNFREQLKPVNLHPRIKFSHQVDRKANRKLSDATIYSVREKTEVKTLKSGKQKITTDEYTIGKIKDIYTLDGWEAFKKKQDKLLMKDLDEKTYERLLSIAETTPDFQEVEEKNGKVKRVKRSPFAVYCEENDIPAIQKYAKKNNGPLIRSLKYYDGKLNKHINITKDSQGRPVEKTKNGRKVTLQSLKPYRYDIYQDLETKAYYTVQLYYSDLRFVEGKYGITEKEYMKKVAEQTKGQVVRFCFSLQKNDGLEIEWKDSQRYDVRFYNFQSANSINFKGLEQEIMPAENQFKQKPYNNGAINLNIAKYGKEGKKLRKFNTDILGKKHYLFYEKEPKNIIK

SEQ ID NO: 194 - protein, 1150 aa, Enterococcus faecalis
  Enterococcus faecalis T11
MYSIGLDLGISSVGWSVIDERTGNVIDLGVRLFSAKNSEKNLERRTNRGGRRLIRRKTNRLKDAKKILAAVGFYEDKSLKNSCPYQLRVKGLTEPLSKGEIYKVTLHILKKRGISYLDEDDTEAAKESQDYKEQVRENAQLLTKYTPGQIQLQRLKENNRVKTGINAQGNYQLNVFKVSAYANELATILKTQQAFYPNELTDDWIALFVQPGIAEEAGLIYRKRPYYHGPGNEANNSPYGRWSDFKKTGQPATNIFDKLIGKDFQGELRASGLSLSAQQYNLLNDLTNLKIDGEIPLSPEQKEYILAELMTKEFTRFGVNDVVKLLGVKKERLSGWRLDKKGKPEIHTLKGYRNWRKIFAESGIDLAMLPTETIDCLAKILTLNTEREGIENTLAFELPELAESVKLLVLDRYKELSQSVSTQAWHRFSLKTLHLLIPELMNATSEQNTLLEQFQLKSDVRKRYSEYKKLPTKDVLTEIYNPTVNKTVSQAFKVIDALLVKYGKEQIRYITIEMPRDDNEEDEKKRIKELHAKNSQRKNDSQSYFMQKSGWSQEKFQTTIQKNRRFLAKLLYYYEQDGICAYTGLSISPELLVSDSTEIDHIIPISISLDDSINNKVLVLSKANQVKGQQTPYDAWMDGSFKKINGKFSNWDDYQKWVESRHFSHKKENNLLETRNIFDSEQVEKFLARNLNDTRYASRLVLNTLQSFFANQETKVRVVNGSFTHTLRKKWGADLDKTRETHHHHAVDATLCAVTPFVKVSRYHYAVKEETGEKVMREIDFETGEIVDEMSYREFKKSKKYERKTYQVKWPNFREQLKPVNLHPRIKFSHQVDRKANRKLSDATIYSVREKTEVKTLKSGKQKITTDEYTIGKIKDIYTVDGWEAFKKKQDKLLMKDLDEKTYERLLSIAETTPDFQEVEEKNGKVKRVKRSPFAVYCEENDIPAIRKYAKKNNGPLIRSLKYYDGKLNKHINITKDSQGRPVEKTKNGRKVTLQSLKPYRYDIYQDLETKAYYTVQLYYSDLRFVEGKYGITEKEYMKKVAEQTKGQVVRFCFSLQKNDGLEIEWKDSQRYDVRFYNFQSANSINFKGLEQEMMPAENQFKQKPYNNGAINLNIAKYGKEGKKLRKFNTDILGKKHYLYYEKEPKNIIK

SEQ ID NO: 195 - protein, 1150 aa, Enterococcus faecalis
  Enterococcus faecalis TX0012
MYSIGLDLGISSVGWSVIDERTGNVIDLGVRLFSAKNSEKNLERRTNRGGRRLIRRKTNRLKDAKKILAAVGFYEDKSLKNSCPYQLRVKGLTEPLSRGEIYKVTLHILKKRGISYLDEVDTEAAKESQDYKEQVRKNAQLLTKYTPGQIQLQRLKENNRVKTGINAQGNYQLNVFKVSAYANELATILKTQQAFYPNELTDDWIALFVQPGIAEEAGLIYRKRPYYHGPGNEANNSPYGRWSDFQKTGEPATNIFDKLIGKDFQGELRASGLSLSAQQYNLLNDLTNLKIDGEVPLSSEQKEYILTELMTKEFTRFGVNDVVKLLGVKKERLSGWRLDKKGKPEIHTLKGYRNWRKIFAEAGIDLATLPTETIDCLAKVLTLNTEREGIENTLAFELPELSESVKLLVLDRYKELSQSISTQSWHRFSLKTLHLLIPELMNATSEQNTLLEQFQLKSDVRKRYSEYKKLPTKDVLAEIYNPTVNKTVSQAFKVIDALLVKYGKEQIRYITIEMPRDDNEEDEKKRIKELHAKNSQRKNDSQSYFMQKSGWSQEKFQTTIQKNRRFLAKLLYYYEQDGICAYTGLPISPELLVSDSTEIDHIIPISISLDDSINNKVLVLSKANQVKGQQTPYDAWMDGSFKKINGKFSNWDDYQKWVESRHFSHKKENNLLETRNIFDSEQVEKFLARNLNDTRYASRLVLNTLQSFFTNQETKVRVVNGSFTHTLRKKWGADLDKTRETHHHHAVDATLCAVTSFVKVSRYHYAVKEETGEKVMREIDFETGEIVNEMSYWEFKKSKKYERKTYQVKWPNFREQLKPVNLHPRIKFSHQVDRKANRKLSDATIYSVREKTEVKTLKSGKQKITTDEYTIGKIKDIYTLDGWEAFKKKQDKLLMKDLDEKTYERLLSIAETTPDFQEVEEKNGKVKRVKRSPFAVYCEENDIPAIQKYAKKNNGPLIRSLKYYDGKLNKHINITKDSQGRPVEKTKNGRKVTLQSLKPYRYDIYQDLETKAYYTVQLYYSDLRFVEGKYGITEKEYMKKVAEQTKGQVVRFCFSLQKNDGLEIEWKDSQRYDVRFYNFQSANSINFKGLEQEMMPAENQFKQKPYNNGAINLNIAKYGKEGKKLRKFNTDILGKKHYLFYEKEPKNIIK

SEQ ID NO: 196 - protein, 1150 aa, Enterococcus faecalis; identical to SEQ ID NO: 195
  Enterococcus faecalis TX0012

SEQ ID NO: 197 - protein, 1337 aa, Enterococcus faecalis
  Enterococcus faecalis TX0470
MKKDYVIGLDIGTNSVGWAVMTEDYQLVKKKMPIYGNTEKKKIKKNFWGVRLFEEGHTAEDRRLKRTARRRISRRRNRLRYLQAFFEEAMTALDENFFARLQESFLVPEDKKWHRHPIFAKLEDEVAYHETYPTIYHLRKKLADSSEQADLRLIYLALAHIVKYRGHFLIEGKLSTENISVKEQFQQFMIIYNQTFVNGESRLVSTPLPESVLIEEELTEKASRTKKSEKVLQQFPQEKANGLFGQFLKLMVGNKADFKKVFGLEEEAKITYASESYEEDLEGILAKVGDEYSDVFLAAKNVYDAVELSTILADSDKKSHAKLSSSMIVRFTEHQEDLKNFKRFIRENCPDEYDNLFKNEQKDGYAGYITHAGKVSQLKFYQYVKKIIQDIAGAEYFLEKIAQENFLRKQRTFDNGVIPHQIHLAELQAIIHRQAAYYPFLKENQEKIEQLVTFRIPYYVGPLSKGDASTFAWLKRQSEEPIRPWNLQETVDLDQSATAFIERMTNFDTYLPSEKVLPKHSLLYEKFMVFNELTKISYTDDRGIKANFSGKEKEKIFDYLFKTRRKVKKKDIIQFYRNEYNTEIVTLSGLEEDQFNASFSTYQDLLKCGLTRAELDHPDNAEKLEDIIKILTIFEDRQRIRTQLSTFKGQFSAEVLKKLERKHYTGWGRLSKKLINGIYDKESGKTILDYLVKDDGVSKHYNRNFMQLINDSQLSFKNAIQKAQSSEHEETLSETVNELAGSPAIKKGIYQSLKIVDELVAIMGYAPKRIVVEMARENQTTSTGKRRSIQRLKIVEKAMAEIGSNLLKEQPTTNEQLRDTRLFLYYMQNGKDMYTGDELSLHRLSHYDIDHIIPQSFMKDDSLDNLVLVGSTENRGKSDDVPSKEVVKDMKAYWEKLYAAGLISQRKFQRLTKGEQGGLTLEDKAHFIQRQLVETRQITKNVAGILDQRYNAKSKEKKVQIITLKASLTSQFRSIFGLYKVREVNDYHHGQDAYLNCVVATTLLKVYPNLAPEFVYGEYPKFQTFKENKATAKAIIYTNLLRFFTEDEPRFTKDGEILWSNSYLKTIKKELNYHQMNIVKKVEVQKGGFSKESIKPKGPSNKLIPVKNGLDPQKYGGFDSPIVAYTVLFTHEKGKKPLIKQEILGITIMEKTRFEQNPILFLEEKGFLRPRVLMKLPKYTLYEFPEGRRRLLASAKEAQKGNQMVLPEHLLTLLYHAKQCLLPNQSESLAYVEQHQPEFQEILERVVDFAEVHTLAKSKVQQIVKLFEANQTADVKEIAASFIQLMQFNAMGAPSTFKFFQKDIERARYTSIKEIFDATIIYQSTTGLYETRRKVVD

SEQ ID NO: 198 - protein, 1150 aa, Enterococcus faecalis
  Enterococcus faecalis TX1342
MYSIGLDLGVSSVGWSVIDERTGNVIDLGVRLFSAKNSEKNLERRTNRGGRRLIRRKTNRLKDAKKILAAVGFYEDKSLKNSCPYQLRVKGLTEPLSKGEIYKVTLHILKKRGISYLDEDDTEAAKESQDYKEQVRENAQLLTKYTPGQIQLQRLKENNRVKTGINAQGNYQLNVFKVSAYANELATILKTQQAFYPNELTDDWIALFVQPGIAEEAGLIYRKRPYYHGPGNEANNSPYGRWSDFKKTGQPATNIFDKLIGKDFQGELRASGLSLSAQQYNLLNDLTNLKIDGEIPLSPEQKEYILAELMTKEFTRFGINDVAKLLGVKKERLSGWRLDKKGKPEIHTLKGYRNWRKIFAESGIDLATLPTETIDCLAKVLTLNTEREGIENTLAFELPELAESVKLLVLDRYKELSQSVSTQAWHRFSLKTLHLLIPELMNATSEQNTLLEQFQLKSDVRKRYSEYKKLPTKDVLTEIYNPTVNKTVSQAFKVIDALLVKYGKEQIRYITIEMPRDDNEEDEKKRIKELHAKNSQRKNDSQSYFMQKSGWSQEKFQTTIQKNRRFLAKLLYYYEQDGICAYTGLSISPELLVSDSTEIDHIIPISISLDDSINNKVLVLSKANQVKGQQTPYDAWMDGSFKKINGKFSNWDDYQKWVESRHFSHKKENNLLETRNIFDSEQVEKFLARNLNDTRYASRLVLNTLQSFFANQETKVRVVNGSFTHTLRKKWGADLDKTRETHHHHAVDATLCAVTPFVKVSRYHYAVKEETGEKVMREIDFETGEIVDEMSYREFKKSKKYERKTYQVKWPNFREQLKPVNLHPRIKFSHQVDRKANRKLSDATIYSVREKTEVKTLKSGKQKITTDEYTIGKIKDIYTVDGWEAFKKKQDKLLMKDLDEKTYERLLSIAETTPDFQEVEEKNGKVKRVKRSPFAVYCEENDIPAIRKYAKNNNGPLIRSLKYYDGKLNKHINITKDSQGRPVEKTKNGRKVTLQSLKPYRYDIYQDLETKAYYTVQLYYSDLRFVEGKYGITEKEYMKKVAEQTKGQVVRFCFSLQKNDGLEIEWKDSQCYDVRFYNFQSANSINFKGLEQEMMPAENQFKQKPYNNGAINLNIAKYGKEGKKLRKFNTDILGKKHYLYYEKEPKNIIK

SEQ ID NO: 199 - protein, 1337 aa, Enterococcus faecalis
  Enterococcus faecalis TX4244
MKKDYVIGLDIGTNSVGWAVMTEDYQLVKKKMPIYGNTEKKKIKKNFWGVRLFEEGHTAEDRRLKRTARRRISRRRNRLRYLQAFFEEAMTDLDENFFARLQESFLVPEDKKWHRHPIFAKLEDEVAYHETYPTIYHLRKKLADSSEQADLRLIYLALAHIVKYRGHFLIEGKLSTENISVKEQFQQFMIIYNQTFVNGESRLVSAPLPESVLIEEELTEKASRTKKSEKVLQQFPQEKANGLFGQFLKLMVGNKADFKKVFGLEEEAKITYASESYEEDLEGILAKVGDEYSDVFLAAKNVYDAVELSTILADSDKKSHAKLSSSMIVRFTEHQEDLKKFKRFIRENCPDEYDNLFKNEQKDGYAGYIAHAGKVSQLKFYQYVKKIIQDIAGAEYFLEKIAQENFLRKQRTFDNGVIPHQIHLAELQAIIHRQAAYYPFLKENQEKIEQLVTFRIPYYVGPLSKGDASTFAWLKRQSEEPIRPWNLQETVDLDQSATAFIERMTNFDTYLPSEKVLPKHSLLYEKFMVFNELTKISYTDDRGIKANFSGKEKEKIFDYLFKTRRKVKKKDIIQFYRNEYNTEIVTLSGLEEDQFNASFSTYQDLLKCGLTRAELDHPDNAEKLEDIIKILTIFEDRQRIRTQLSTFKGQFSAEVLKKLERKHYTGWGRLSKKLINGIYDKESGKTILGYLIKDDGVSKHYNRNFMQLINDSQLSFKNAIQKAQSSEHEETLSETVNELAGSPAIKKGIYQSLKIVDELVAIMGYAPKRIVVEMARENQTTSTGKRRSIQRLKIVEKAMAEIGSNLLKEQPTTNEQLRDTRLFLYYMQNGKDMYTGDELSLHRLSHYDIDHIIPQSFMKDDSLDNLVLVGSTENLGKSDDVPSKEVVKDMKAYWEKLYAAGLISQRKFQRLTKGEQGGLTLEDKAHFIQRQLVETRQITKNVAGILDQRYNANSKEKKVQIITLKASLTSQFRSIFGLYKVREVNDYHHGQDAYLNCVVATTLLKVYPNLAPEFVYGEYPKFQTFKENKATAKAIIYTNLLRFFTEDEPRFTKDGEILWSNSYLKTIKKELNYHQMNIVKKVEVQKGGFSKESIKPKGPSNKLIPVKNGLDPQKYGGFDSPIVAYTVLFTHEKGKKPLIKQEILGITIMEKTRFEQNPILFLEEKGFLRPRVLMKLPKYTLYEFPEGRRRLLASAKEAQKGNQMVLPEHLLTLLYHAKQCLLPNQSESLAYVEQHQPEFQEILERVVDFAEVHTLAKSKVQQIVKLFEANQTADVKEIAASFIQLMQFNAMGAPSTFKFFQKDIERARYTSIKEIFDATIIYQSTTGLYETRRKVVD

SEQ ID NO: 200 - protein, 1339 aa, Enterococcus faecium
  Enterococcus faecium 1,141,733
MKKEYTIGLDIGTNSVGWSVLTDDYRLVSKKMKVAGNTEKSSTKKNFWGVRLFDEGQTAEARRSKRTARRRLARRRQRILELQKIFAPEILKIDEHFFARLNESFLVLDEKKQSRHPVFATIKQEKSYHQTYPTIYHLRQALADSSEKADIRLVYLAMAHLLKYRGHFLIEGELNTENSSVTETFRQFLSTYNQQFSEADDKQTEKLDEAVDCSFVFTEKMSKTKKAETLLKYFPHEKSNGYLSQFIKLMVGNQGNFKNVFGLEEAKLQFSKETYEEDLEELLEKIGDDYIDLFVQAKNVYDAVLLSEILSDSTKNTRAKLSAGMIRRYDAHKEDLVLLKRFVKENLPKKYRAFFGDNSVNGYAGYIEGHATQEDFYKFVKKELTGIRGSEVFLTKIEQENFLRKQRTFDNGVIPHQIHLTELRAIIANQKKHYPFLKEEQEKLESLLTFKIPYYVGPLAKKQENSPFAWLIRKSEEKIKPWNLPEIVDMEGSAVRFIERMINTDMYMPHNKVLPKNSLLYQKFSIYNELTKVRYQDERGQMNYFSSIEKKEIFHELFEKNRKVTKKDLQEFLYLKYDIKHAELSGIEKAFNASYTTYHDFLTMSENKREMKQWLEDPELASMFEEIIKTLTVFEDREMIKTRLSHHEATLGKHIIKKLTKKHYTGWGRLSKELIQGIRDKQSNKTILDYLINDDDFPHHRNRNFMQLINDDSLSFKKEIKKAQMITDTENLEEIVKELTGSPAIKKGILQSLKIVDEIVGIMGYEPANIVVEMARENQTTGRGLKSSRPRLKALEESLKDFGSQLLKEYPTDNSSLQKDRLYLYYLQNGRDMYTGAPLDIHRLSDYDIDHIIPRSFTTDNSIDNKVLVSSKENRLKKDDVPSEKVVKKMRSFWYDLYSSKLISKRKLDNLTKIKLTEEDKAGFIKRQLVETRQITKHVAGILHHRFNKAEDTNEPIRKVRIITLKSALVSQFRNRFGIYKVREINEYHHAHDAYLNGVVALALLKKYPQLAPEFVYGEYLKFNAHKANKATVKKEFYSNIMKFFESDTPVCDENGEIFWDKSKSIAQVKKVINHHHMNIVKKTEIQKGGFSKETVEPKKDSSKLLPRKNNWDPAKYGGLGSPNVAYTVAFTYEKGKARKRTNALEGITIMEREAFEQSPVLFLKNKGYEQAEIEMKLPKYALFELENGRKRMVASNKEAQKANSFLLPEHLVTLLYHAKQYDEISHKESFDYVNEHHKEFSEVFARVLEFAGKYTLAEKNIEKLEKIYKENQTDDLAKLASSFVNLMQFNAMGAPADFKFFDVTIPRKRYTSLTEIWQSTIIHQSITGLYETRIRMGK

SEQ ID NO: 201 - protein, 1340 aa, Enterococcus faecium
  Enterococcus faecium 1,231,408
MKKEYTIGLDIGTNSVGWSVLTDDYRLVSKKMKVAGNTEKSSTKKNFWGVRLFDEGQTAEARRSKRTARRRLARRRQRILELQKIFAPEILKIDEHFFARLNESFLVPDEKKQSRHPVFATIKQEKSYHQTYPTIYHLRQALADSSEKADIRLVYLAMAHLLKYRGHFLIEGELNTENSSVTETFRQFLSTYNQQFSEAGDKQTEKLDEAVDCSFVFTEKMSKTKKAETLLKYFPHEKSNGYLSQFIKLMVGNQGNFKNVFGLEEEAKLQFSKETYEEDLEELLEKIGDDYIDLFVQAKNVYDAVLLSEILSDSTKNTRAKLSAGMIRRYDAHKEDLVLLKRFVKENLPKKYRAFFGDNSVNGYAGYIEGHATQEAFYKFVKKELTGIRGSEVFLTKIEQENFLRKQRTFDNGVIPHQIHLSELRAIIANQKKHYPFLKEEQEKLESLLTFKIPYYVGPLAKKQENSPFAWLIRKSEEKIKPWNLPEIVDMEGSAVRFIERMINTDMYMPHNKVLPKNSLLYQKFSIYNELTKVRYQDERGQMNYFSSIEKKEIFHELFEKNRKVTKKDLQEFLYLKYDIKHAELSGIEKAFNASYTTYHDFLTMSENKREMKQWLEDPELASMFEEIIKTLTVFEDREMIKTRLSHHEATLGKHIIKKLTKKHYTGWGRLSKELIQGIRDKQSNKTILDYLINDDDFPHHRNRNFMQLINDDSLSFKKEIKKAQMITDTENLEEIVKELTGSPAIKKGILQSLKIVDEIVGIMGYEPANIVVEMARENQTTGRGLKSSRPRLKALEESLKDFGSQLLKEYPTDNSSLQKDRLYLYYLQNGRDMYTGAPLDIHRLSDYDIDHIIPRSFTTDNSIDNKVLVSSKENRLKKDDVPSEKVVKKMRSFWYDLYSSKLISKRKLDNLTKIKLTEEDKAGFIKRQLVETRQITKHVAGILHHRFNKAEDTNDPIRKVRIITLKSALVSQFRNRFGIYKVREINEYHHAHDAYLNGVVALALLKKYPQLAPEFVYGEYLKFNAHKANKATVKKEFYSNIMKFFESDTPVCDENGEIFWDKSKSIAQVKKVINHHHMNIVKKTEIQKGGFSKETVEPKKDSSKLLPRKNNWDPAKYGGLGSPNVAYTVAFTYEKGKARKRTNALEGITIMEREAFEQSPVLFLKNKGYEQAEIEMKLPKYALFELENGRKRMVASNKEAQKANSFLLPEHLVTLLYHAKQYDEISHKESFDYVNEHHKEFSEVFARVLEFAGKYTLAEKNIEKLEKIYKENQTDDLAKLASSFVNLMQFNAMGAPADFKFFDVTIPRKRYTSLTEIWQSTIIHQSITGLYETRIRMGK

SEQ ID NO: 202 - protein, 1339 aa, Enterococcus faecium
  Enterococcus faecium E1133
MKKEYTIGLDIGTNSVGWSVLTDDYRLVSKKMKVAGNTEKSSTKKNFWGVRLFDEGQTAEARRSKRTARRRLARRRQRILELQKIFAPEILKIDEHFFARLNESFLVLDEKKQSRHPVFATIKQEKSYHQTYPTIYHLRQALADSSEKADIRLVYLAMAHLLKYRGHFLIEGELNTENSSVTETFRQFLSTYNQQFSEADDKQTEKLDEAVDCSFVFTEKMSKTKKAETLLKYFPHEKSNGYLSQFIKLMVGNQGNFKNVFGLEEAKLQFSKETYEEDLEELLEKIGDDYIDLFVQAKNVYDAVLLSEILSDSTKNTRAKLSAGMIRRYDAHKEDLVLLKRFVKENLPKKYRAFFGDNSVNGYAGYIEGHATQEDFYKFVKKELTGIRGSEVFLTKIEQENFLRKQRTFDNGVIPHQIHLTELRAIIANQKKHYPFLKEEQEKLESLLTFKIPYYVGPLAKKQENSPFAWLIRKSEEKIKPWNLPEIVDMEGSAVRFIERMINTDMYIPHNKVLPKNSLLYQKFSIYNELTKVRYQDERGQMNYFSSIEKKEIFHELFEKNRKVTKKDLQEFLYLKYDIKHAELSGIEKAFNASYTTYHDFLTMSENKREMKQWLEDPELASMFEEIIKTLTVFEDREMIKTRLSHHEATLGKHIIKKLTKKHYTGWGRLSKELIQGIRDKQSNKTILDYLINDDDFPHHRNRNFMQLINDDSLSFKKEIKKAQMITDTENLEEIVKELTGSPAIKKGILQSLKIVDEIVGIMGYEPANIVVEMARENQTTGRGLKSSRPRLKALEESLKDFGSQLLKEYPTDNSSLQKDRLYLYYLQNGRDMYTGAPLDIHRLSDYDIDHIIPRSFTTDNSIDNKVLVSSKENRLKKDDVPSEKVVKKMRSFWYDLYSSKLISKRKLDNLTKIKLTEEDKAGFIKRQLVETRQITKHVAGILHHRFNKAEDTNEPIRKVRIITLKSALVSQFRNRFGIYKVREINEYHHAHDAYLNGVVALALLKKYPQLAPEFVYGEYLKFNAHKANKATVKKEFYSNIMKFFESDTPVCDENGEIFWDKSKSIAQVKKVINHHHMNIVKKTEIQKGGFSEETVEPKKDSSKLLPRKNNWDPAKYGGLGSPNVAYTVAFTYEKGKARKRTNALEGITIMEREAFEQSPVLFLKNKGYEQAEIEMKLPKYALFELENGRKRMVASNKEAQKANSFLLPEHLVTLLYHAKQYDEISHKESFDYVNEHHKEFSEVFARVLEFAGKYTLAEKNIEKLEKIYKENQTDDLAKLASSFVNLMQFNAMGAPADFKFFDVTIPRKRYTSLTEIWQSTIIHQSITGLYETRIRMGK

SEQ ID NO: 203 - protein, 1340 aa, Enterococcus faecium
  Enterococcus faecium E3083
MKKEYTIGLDIGTNSVGWSVLTDDYRLVSKKMKVAGNTEKSSTKKNFWGVRLFDEGQTAEARRSKRTARRRLARRRQRILELQKIFAPEILKIDEHFFARLNESFLVLDEKKQSRHPVFATIKQEKSYHQTYPTIYHLRQALADSSEKADIRLVYLAMAHLLKYRGHFLIEGELNTENSSVTETFRQFLSTYNQQFSEADDKQTEKLDEAVDCSFVFTEKMSKTKKAETLLKYFPHEKSNGYLSQFIKLMVGNQGNFKNVFGLEEEAKLQFSKETYEEDLEELLEKIGDDYIDLFVQAKNVYDAVLLSEILSDSTKNTRAKLSAGMIRRYDAHKEDLVLLKRFVKENLPKKYRAFFGDNSVNGYAGYIEGHATQEDFYKFVKKELTGIRGSEVFLTKIEQENFLRKQRTFDNGVIPHQIHLTELRAIIANQKKHYPFLKEEQEKLESLLTFKIPYYVGPLAKKQENSPFAWLIRKSEEKIKPWNLPEIVDMEGSAVRFIERMINTDMYIPHNKVLPKNSLLYQKFSIYNELTKVRYQDERGQMNYFSSIEKKEIFHELFEKNRKVTKKDLQEFLYLKYDIKHAELSGIEKAFNASYTTYHDFLTMSENKREMKQWLEDPELASMFEEIIKTLTVFEDREMIKTRLSHHEATLGKHIIKKLTKKHYTGWGRLSKELIQGIRDKQSNKTILDYLINDDDFPHHRNRNCMQLINDDSLSFKKEIKKAQMITDTENLEEIVKELTGSPAIKKGILQSLKIVDEIVGIMGYEPANIVVEMARENQTTGRGLKSSRPRLKALEESLKDFGSQLLKEYPTDNSSLQKDRLYLYYLQNGRDMYTGAPLDIHRLSDYDIDHIIPRSFTTDNSIDNKVLVSSKENRLKKDDVPSEKVVKKMRSFWYDLYSSKLISKRKLDNLTKIKLTEEDKAGFIKRQLVETRQITKHVAGILHHRFNKAEDTNEPIRKVRIITLKSALVSQFRNRFGIYKVREINEYHHAHDAYLNGVVALALLKKYPQLAPEFVYGEYLKFNAHKANKATVKKEFYSNIMKFFESDTPVCDENGEIFWDKSKSIAQVKKVINHHHMNIVKKTEIQKGGFSKETVEPKKDSSKLLPRKNNWDPTKYGGLGSPNVAYTVAFTYEKGKARKRTNALEGITIMEREAFEQSPVLFLKNKGYEQAEIEMKLPKYALFELENGRKRMVASNKEAQKANSFLLPEHLVTLLYHAKQYDEISHKESFDYVNEHHKEFSEVFARVLEFAGKYTLAEKNIEKLEKIYKENQTDDLAKLASSFVNLMQFNAMGAPADFKFFDVTIPRKRYTSLTEIWQSTIIHQSITGLYETRIRMGK

SEQ ID NO: 204 - protein, 1340 aa, Enterococcus faecium
  Enterococcus faecium PC4.1
MKKEYTIGLDIGTNSVGWSVLTDDYRLVSKKMKVAGNTEKSSTKKNFWGVRLFDEGQTAEARRSKRTARRRLARRRQRILELQKIFAPEILKIDEHFFARLNESFLVLDEKKQSRHPVFATIKQEKSYHQTYPTIYHLRQALADSSEKADIRLVYLAMAHLLKYRGHFLIEGELNTENSSVTETFRQFLSTYNQQFSEADDKQTEKLDEAVDCSFVFTEKMSKTKKAETLLKYFPHEKSNGYLSQFIKLMVGNQGNFKNVFGLEEEAKLQFSKETYEEDLEELLEKIGDDYIDLFVQAKNVYDAVLLSEILSDSTKNTRAKLSAGMIRRYDAHKEDLVLLKRFVKENLPKKYRAFFGDNSVNGYAGYIEGHATQEDFYKFVKKELTGIRGSEVFLTKIEQENFLRKQRTFDNGVIPHQIHLTELRAIIANQKKHYPFLKEEQEKLESLLTFKIPYYVGPLAKKQENSPFAWLIRKSEEKIKPWNLPEIVDMEGSAVRFIERMINTDMYIPHNKVLPKNSLLYQKFSIYNELTKVRYQDERGQMNYFSSIEKKEIFHELFEKNRKVTKKDLQEFLYLKYDIKHAELSGIEKAFNASYTTYHDFLTMSENKREMKQWLEDPELASMFEEIIKTLTVFEDREMIKTRLSHHEATLGKHIIKKLTKKHYTGWGRLSKELIQGIRDKQSNKTILDYLINDDDFPHHRNRNFMQLINDDSLSFKKEIKKAQMITDTENLEEIVKELTGSPAIKKGILQSLKIVDEIVGIMGYEPANIVVEMARENQTTGRGLKSSRPRLKALEESLKDFGSQLLKEYPTDNSSLQKDRLYLYYLQNGRDMYTGAPLDIHRLSDYDIDHIIPRSFTTDNSIDNKVLVSSKENRLKKDDVPSEKVVKKMRSFWYDLYSSKLISKRKLDNLTKIKLTEEDKAGFIKRQLVETRQITKHVAGILHHRFNKAEDTNEPIRKVRIITLKSALVSQFRNRFGIYKVREINEYHHAHDAYLNGVVALALLKKYPQLAPEFVYGEYLKFNAHKANKATVKKEFYSNIMKFFESDTPVCDENGEIFWDKSKSIAQVKKVINHHHMNIVKKTEIQKGGFSKETVEPKKDSSKLLPRKNNWDPAKYGGLGSPNVAYTVAFTYEKGKARKRTNALEGITIMEREAFEQSPVLFLKNKGYEQAEIEMKLPKYALFELENGRKRMVASNKEAQKANSFLLPEHLVTLLYHAKQYDEISHKESFDYVNEHHKEFSEVFARVLEFAGKYTLAEKNIEKLEKIYKENQTDDLAKLASSFVNLMQFNAMGAPADFKFFDVTIPRKRYTSLTEIWQSTIIHQSITGLYETRIRMGK

SEQ ID NO: 205 - protein, 1340 aa, Enterococcus faecium
  Enterococcus faecium TX1330
MKKEYTIGLDIGTNSVGWSVLTDDYRLVSKKMKVAGNTEKSSTKKNFWGVRLFDEGQTAEARRSKRTARRRLARRRQRILELQKIFAPEILKIDEHFFARLNESFLVLDEKKQSRHPVFATIKQEKSYHQTYPTIYHLRQALADSSEKADIRLVYLAMAHLLKYRGHFLIEGELNTENSSVTETFRQFLSTYNQQFSEADDKQTEKLDEAVDCSFVFTEKMSKTKKAETLLKYFPHEKSNGYLSQFIKLMVGNQGNFKNVFGLEEEAKLQFSKETYEEDLEELLEKIGDDYIDLFVQAKNVYDAVLLSEILSDSTKNTRAKLSAGMIRRYDAHKEDLVLLKRFVKENLPKKYRAFFGDNSVNGYAGYIEGHATQEDFYKFVKKELTGIRGSEVFLTKIEQENFLRKQRTFDNGVIPHQIHLTELRAIIANQKKHYPFLKEEQEKLESLLTFKIPYYVGPLAKKQENSPFAWLIRKSEEKIKPWNLPEIVDMEGSAVRFIERMNNTDMYIPHNKVLPKNSLLYQKFSIYNELTKVRYQDERGQMNYFSSIEKKEIFHELFEKNRKVTKKDLQEFLYLKYDIKHAELSGIEKAFNASYTTYHDFLTMSENKREMKQWLEDPELASMFEEIIKTLTVFEDREMIKTRLSHHEATLGKHIIKKLTKKHYTGWGRLSKELIQGIRDKQSNKTILDYLINDDDFPHHRNRNFMQLINDDSLSFKKEIKKAQMITDTENLEEIVKELTGSPAIKKGILQSLKIVDEIVGIMGYEPANIVVEMARENQTTGRGLKSSRPRLKALEESLKDFGSQLLKEYPTDNSSLQKDRLYLYYLQNGRDMYTGAPLDIHRLSDYDIDHIIPRSFTTDNSIDNKVLVSSKENRLKKDDVPSEKVVKKMRSFWYDLYSSKLISKRKLDNLTKIKLTEEDKAGFIKRQLVETRQITKHVAGILHHRFNKAEDTNEPIRKVRIITLKSALVSQFRNRFGIYKVREINEYHHAHDAYLNGVVALALLKKYPQLAPEFVYGEYLKFNAHKANKATVKKEFYSNIMKFFESDTPVCDENGEIFWDKSKSIAQVKKVINHHHMNIVKKTEIQKGGFSKETVEPKKDSSKLLPRKNNWDPAKYGGLGSPNVAYTVAFTYEKGKARKRTNALEGITIMEREAFEQSPVLFLKNKGYEQAEIEMKLPKYALFELENGRKRMVASNKEAQKANSFLLPEHLVTLLYHAKQYDEISHKESFDYVNEHHKEFSEVFARVLEFAGKYTLAEKNIEKLEKIYKENQTDDLAKLASSFVNLMQFNAMGAPADFKFFDVTIPRKRYTSLTEIWQSTIIHQSITGLYETRIRMGK

SEQ ID NO: 206 - protein, 1340 aa, Enterococcus faecium
  Enterococcus faecium TX1337RF
MKKEYTIGLDIGTNSVGWSVLTDDYRLVSKKMKVAGNTEKSSTKKNFWGVRLFDEGQTAEARRSKRTARRRLARRRQRILELQKIFAPEILKIDEHFFARLNESFLVLDEKKQSRHPVFATIKQEKSYHQTYPTIYHLRQALADSSEKADIRLVYLAMAHLLKYRGHFLIEGELNTENSSVTETFRQFLSTYNQQFSEADDKQTEKLDEAVDCSFVFTEKMSKTKKAETLLKYFPHEKSNGYLSQFIKLMVGNQGNFKNVFGLEEEAKLQFSKETYEEDLEELLEKIGDDYIDLFVQAKNVYDAVLLSEILSDSTKNTRAKLSAGMIRRYDAHKEDLVLLKRFVKENLPKKYRAFFGDNSVNGYAGYIEGHATQEDFYKFVKKELTGIRGSEVFLTKIEQENFLRKQRTFDNGVIPHQIHLTELRAIIANQKKHYPFLKEEQEKLESLLTFKIPYYVGPLAKKQENSPFAWLIRKSEEKIKPWNLPEIVDMEGSAVRFIERMINTDMYMPHNKVLPKNSLLYQKFSIYNELTKVRYQDERGQMNYFSSIEKKEIFHELFEKNRKVTKKDLQEFLYLKYDIKHAELSGIEKAFNASYTTYHDFLTMSENKREMKQWLEDPELASMFEEIIKTLTVFEDREMIKTRLSHHEATLGKHIIKKLTKKHYTGWGRLSKELIQGIRDKQSNKTILDYLINDDDFPHHRNRNFMQLINDDSLSFKKEIKKAQMITDTENLEEIVKELTGSPAIKKGILQSLKIVDEIVGIMGYEPANIVVEMARENQTTGRGLKSSRPRLKALEESLKDFGSQLLKEYPTDNSSLQKDRLYLYYLQNGRDMYTGAPLDIHRLSDYDIDHIIPRSFTTDNSIDNKVLVSSKENRLKKDDVPSEKVVKKMRSFWYDLYSSKLISKRKLDNLTKIKLTEEDKAGFIKRQLVETRQITKHVAGILHHRFNKAEDTNEPIRKVRIITLKSALVSQFRNRFGIYKVREINEYHHAHDAYLNGVVALALLKKYPQLAPEFVYGEYLKFNAHKANKATVKKEFYSNIMKFFESDTPVCDENGEIFWDKSKSIAQVKKVINHHHMNIVKKTEIQKGGFSKETVEPKKDSSKLLPRKNNWDPAKYGGLGSPNVAYTVAFTYEKGKARKRTNALEGITIMEREAFEQSPVLFLKNKGYEQAEIEMKLPKYALFELENGRKRMVASNKEAQKANSFLLPEHLVTLLYHAKQYDEISHKESFDYVNEHHKEFSEVFARVLEFAGKYTLAEKNIEKLEKIYKENQTDDLAKLASSFVNLMQFNAMGAPADFKFFDVTIPRKRYTSLTEIWQSTIIHQSITGLYETRIRMGK

SEQ ID NO: 207 - protein, 1336 aa, Enterococcus hirae
MTKDYTIGLDIGTNSVGWAVLTDDYQLMKRKMSVHGNTEKKKIKKNFWGARLFDEGQTAEFRRTKRTNRRRLARRKYRLSKLQDLFAEELCKQDDCFFVRLEESFLVPEEKQYKPASIFPTLEEEKEYYQKYPTIYHLRQKLVDSTEKEDLRLVYLALAHLLKYRGHFLFEGDLDTENTSIEESFRVFLEQYSKQSDQPLIVHQPVLTILTDKLSKTKKVEEILKYYPTEKINSFFAQCLKLIVGNQANFKRIFDLEAEVKLQFSKETYEEDLESLLEKIGDEYLDIFLQAKKVHDAILLSEIISSTVKHTKAKLSSGMVERYERHKADLAKFKQFVKENVPQKATVFFKDTTKNGYAGYIKGKTTQEEFYKFVKKELSGVVGSEPFLEKIDQETFLLKQRTYTNGVIPHQVHLIELKAIIDQQKQHYPFLEEAGPKIIALFKFRIPYYVGPLAKEQEASSFAWIERKTAEKINPWNFSEVVDIEKSAMRFIQRMTKQDTYLPTEKVLPKNSLLYQKYMIFNELTKVSYKDERGVKQYFSGDEKQQIFKQLFQKERGKITVKKLQNFLYTHYHIENAQIFGIEKAFNASYSTYHDFMKLAKTNQKAMQEWLEQPEMEPIFEDIVKILTIFEDRQMIKHQLSKYQEVFGEKLLKEFARKHYTGWGRFSAKLIHGIRDRKTNKTILDYLINDDDVPANRNRNLMQLINDEHLSFKEEIAKATVFSKHKSLVDVIQDLPGSPAIKKGIWQSLKIVEELIAIIGYKPKNIVIEMARENQKTHRTSPRLKALENGLKQIGSTLLKEQPTDNKALQKERLYLYYLQNGRDMYTGEPLEIENLHQYEVDHIIPRSFIVDNSIDNKVLVASKQNQKKRDDVPKKQIVNEQRIFWNQLKEAKLISPKKYAYLTKIELTPEDKARFIQRQLVETRQITKHVANILHQSFNQEEEGTDCDGVQIITLKATLTSQFRQTFGLYKVREINPHHHAHDAYLNGFIANVLLKRYPKLAPEFVYGKYVKYSLARENKATAKKEFYSNILKFLESDEPFCDENGEIYWEKSHHLPRIKKVLSSHQVNVVKKVEQQKGGFYKETVNSKEKPDKLIERKNNWDVTKYGGFGSPVIAYAIAFVYAKGKTQKKTRAIEGITIMEQAAFEKDPTTFLKEKGFPQVTEFIKLPKYTLFEFDNGRRRFLASHKESQKGNPFILSDQLVTLLYHAQHYDKITYQESFDYVNTHLSDFSAILTEVLAFAEKYTLADKNIERIQELYEENKYGETSMIAQSFLQLLQFNAIGAPADFKFFGVTIPRKRYTSLTEIWDATIIYQSVTGLYETRIRMGDLWAGEQ

SEQ ID NO: 208 - protein, 1330 aa, Enterococcus italicus
  Enterococcus italicus DSM 15952
MKNDYTIGLDIGTNSVGYSVVTDDYKVISKKMNVFGNTEKKSIKKNFWGVRLFESGQTAQEARMKRTSRRRIARRKNRICYLQEIFQPEMNHLDNNFFYRLNESFLVADDAKYDKHPIFGTLDEEIHFHEQFPTIYHLRKYLADGDEKADLRLVYLAIAHIIKFRGNFLIEGELNTENNSVIELSKVFVQLYNQTLSELEGFQFIDESIDFSEVLTQQLSKSERADNVLKLFPDEKGTGIFAQFIKLIVGNQGNFKKVFQLEEDQKLQLSTDDYEENIENLLAIIGDEYGDIFVAAQNLYQAILLAGILTSTEKTRAKLSASMIQRYEEHAKDLKLLKRFVKEHIPDKYAEIFNDATKNGYAGYIDGKTKEEEFYKYLKTTLVQKSGYQYFIEKIEQENFLRKQRIYDNGVIPHQVHAEELRAILRKQEKYYSFLKENHEKIEQIFKVRIPYYVGPLAKHNEQSRFAWNIRKSDEPIRPWNMNDVVDENASAVAFIERMTIKDIYLNENVLPRHSLIYEKFTVFNELTKVLYADDRGVFQRFSAEEKEDIFEKLFKSERKVTKKKLENYLRIELSISSPSVKGIEEQFNANFGTYLDLKKFDELHPYLDDEKYQDTLEEVIKVLTVFEDRSMIQNQLEQLPLNLSTKTIKALSRRKYTGWGRLSARLIDGIHDKNSGKTILDYLIEDESDSYIVNRNFMQLINDDHLSFKKIIEDSQPYKEQQSAEEIVSELSGSPAIKKGILQSLKIVDELVAIMGYKPKNIVVEMARENQTTGRGKQNSKPRLKGIENGLKEFSDSVLKGSSIDNKQLQNDRLYLYYLQNGKDMYTGHELDIDHLSTYDIDHIIPQSFLTDNSIDNRVLTTSKSNRGKSDNVPSEEVVRKMDRFWRKLLNAKLISERKYTNLTKKELTESDKAGFLKRQLVETRQITKHVATILDSKFNEDSNNRDVQIITLKSALVSEFRKTFNLYKVREINDLHHAHDAYLNAVVALSLLRVYPQLKPEFVYGEYGKNSIHDQNKATIKKQFYSNITRYFASKDYIINDDGEILWNKQETIAQVIKTLGMHQVNVVKKVEIQKGGFSKESIQPKGESQKLIRRKQQWNTKKYGGFDSPVVAYAILLSFDKGKRKARSFKIVGITIQDRESFEGNPILYLSKKDYHNPKVEAILPKYSLFEFENGRRRMVASASETQKGNQLIIPGHLMELLYHSKKIINGKNSDSVSYIQNNKEKFREIFEYIVDFSSKYISADANLNKIEKIFENNFHKASEQEIAKSFINLLTFTAMGAPADFEFFGEKIPRKRYVSISEIIDAVFIHQSITGLYETRVRLTEV

SEQ ID NO: 209 - protein, 1096 aa, Eubacterium dolichum
  Eubacterium dolichum DSM 3991
MMEVFMGRLVLGLDIGITSVGFGIIDLDESEIVDYGVRLFKEGTAAENETRRTKRGGRRLKRRRVTRREDMLHLLKQAGIISTSFHPLNNPYDVRVKGLNERLNGEELATALLHLCKHRGSSVETIEDDEAKAKEAGETKKVLSMNDQLLKSGKYVCEIQKERLRTNGHIRGHENNFKTRAYVDEAFQILSHQDLSNELKSAIITIISRKRMYYDGPGGPLSPTPYGRYTYFGQKEPIDLIEKMRGKCSLFPNEPRAPKLAYSAELFNLLNDLNNLSIEGEKLTSEQKAMILKIVHEKGKITPKQLAKEVGVSLEQIRGFRIDTKGSPLLSELTGYKMIREVLEKSNDEHLEDHVFYDEIAEILTKTKDIEGRKKQISELSSDLNEESVHQLAGLTKFTAYHSLSFKALRLINEEMLKTELNQMQSITLFGLKQNNELSVKGMKNIQADDTAILSPVAKRAQRETFKVVNRLREIYGEFDSIVVEMAREKNSEEQRKAIRERQKFFEMRNKQVADIIGDDRKINAKLREKLVLYQEQDGKTAYSLEPIDLKLLIDDPNAYEVDHIIPISISLDDSITNKVLVTHRENQEKGNLTPISAFVKGRFTKGSLAQYKAYCLKLKEKNIKTNKGYRKKVEQYLLNENDIYKYDIQKEFINRNLVDTSYASRVVLNTLTTYFKQNEIPTKVFTVKGSLTNAFRRKINLKKDRDEDYGHHAIDALIIASMPKMRLLSTIFSRYKIEDIYDESTGEVFSSGDDSMYYDDRYFAFIASLKAIKVRKFSHKIDTKPNRSVADETIYSTRVIDGKEKVVKKYKDIYDPKFTALAEDILNNAYQEKYLMALHDPQTFDQIVKVVNYYFEEMSKSEKYFTKDKKGRIKISGMNPLSLYRDEHGMLKKYSKKGDGPAITQMKYFDGVLGNHIDISAHYQVRDKKVVLQQISPYRTDFYYSKENGYKFVTIRYKDVRWSEKKKKYVIDQQDYAMKKAEKKIDDTYEFQFSMHRDELIGITKAEGEALIYPDETWHNFNFFFHAGETPEILKFTATNNDKSNKIEVKPIHCYCKMRLMPTISKKIVRIDKYATDVVGNLYKVKKNTLKFEFD

SEQ ID NO: 210 - protein, 1114 aa, Eubacterium rectale
MNYTEKEKLFMKYILALDIGIASVGWAILDKESETVIEAGSNIFPEASAADNQLRRDMRGAKRNNRRLKTRINDFIKLWENNNLSIPQFKSTEIVGLKVRAITEEITLDELYLILYSYLKHRGISYLEDALDDTVSGSSAYANGLKLNAKELETHYPCEIQQERLNTIGKYRGQSQIINENGEVLDLSNVFTIGAYRKEIQRVFEIQKKYHPELTDEFCDGYMLIFNRKRKYYEGPGNEKSRTDYGRFTTKLDANGNYITEDNIFEKLIGKCSVYPDELRAAAASYTAQEYNVLNDLNNLTINGRKLEENEKHEIVERIKSSNTINMRKIISDCMGENIDDFAGARIDKSGKEIFHKFEVYNKMRKALLEIGIDISNYSREELDEIGYIMTINTDKEAMMEAFQKSWIDLSDDVKQCLINMRKTNGALFNKWQSFSLKIMNELIPEMYAQPKEQMTLLTEMGVTKGTQEEFAGLKYIPVDVVSEDIFNPVVRRSVRISFKILNAVLKKYKALDTIVIEMPRDRNSEEQKKRINDSQKLNEKEMEYIEKKLAVTYGIKLSPSDFSSQKQLSLKLKLWNEQDGICLYSGKTIDPNDIINNPQLFEIDHIIPRSISFDDARSNKVLVYRSENQKKGNQTPYYYLTHSHSEWSFEQYKATVMNLSKKKEYAISRKKIQNLLYSEDITKMDVLKGFINRNINDTSYASRLVLNTIQNFFMANEADTKVKVIKGSYTHQMRCNLKLDKNRDESYSHHAVDAMLIGYSELGYEAYHKLQGEFIDFETGEILRKDMWDENMSDEVYADYLYGKKWANIRNEVVKAEKNVKYWHYVMRKSNRGLCNQTIRGTREYDGKQYKINKLDIRTKEGIKVFAKLAFSKKDSDRERLLVYLNDRRTFDDLCKIYEDYSDAANPFVQYEKETGDIIRKYSKKHNGPRIDKLKYKDGEVGACIDISHKYGFEKGSKKVILESLVPYRMDVYYKEENHSYYLVGVKQSDIKFEKGRNVIDEEAYARILVNEKMIQPGQSRADLENLGFKFKLSFYKNDIIEYEKDGKIYTERLVSRTMPKQRNYIETKPIDKAKFEKQNLVGLGKTKFIKKYRYDILGNKYSCSEEKFTSFC

SEQ ID NO: 211 - protein, 1391 aa, Eubacterium sp.
  Eubacterium sp. AS15
MENKQYYIGLDVGTNSVGWAVTDTSYNLLRAKGKDMWGARLFDEAKTAVERRTKRTSRRRSEREKARKAMLKELFADEINKVDPNFFIRLEESKFFLDDRSENNRQRYTLFNDAKFTDKDYYEKYKTIFHLRSALINSDEKFDVRLVFLAILNLFSHRGHFLNASLKGDGEIQGVDIFYNDLYEVCEEFEIDLPQISNIDNFEKILSQKGKSRTKILEELSEELSISKKEKIKYSLLKLICGMKIKVVDIYADEDIQEDDKKKDLGFRESDYEKSSLEVKEIIGDDHFELIERAKAVHDIGLLANIIGNSKYLCEARVEAYDNHHKDLQKIKELLKKYDIKAYTDMFRKMTDKNYSAYVGSVNSNIAKERRSVDNRKIEDLYEYIKKIALKNISDDNEDKIEILKKIETGEFLKKQLTASNGVIPNQLQSRELRAILKKAENYLPFLKEKGEKNLTVSEMIIQLFEFQIPYYVGPLDKNPKKDKNANSWAVIPSGGRILPWNFEDKVDVKGSRKEFIEKMVRKCTYLSEEHTLPKQSLLYEKFMVLNEINNIKIDGEKISVEAKQKIYNDLFMKGKKVSQKAIKQELISLNIMSKDSVLSGIDTVCNAYLSSIAKFRGVFDENVNNQSTIDMIEDIIFLKTVYSDEKRFVKEEIVEKYGDEIDKDKIKRILGFKFSNWGNISKSFLELEGADVGTGEIRSIIQSLWETNFNLMELLSSRFTYMDELEKRVKKLEKPLSEWTIEDLDDMYLSSPVKRMIWQSMKIVDEIQTVIGYAPKRIFVEMTRSEGEKVRTKSRKDRLKELYSAIKEDSKQWVKELDAKDESYFRSKKMYLYYLQKGRCMYSGEVIELDKLMDDNLYDIDHIYPRSFVKDDSLDNLVLVKKEINNRKQNDPITPQIQASCQGFWKVLHEQGFISNEKYSRLTRKTQEFSDEEKLSFINRQIVETGQATKCMAQILQKSMGEDVDVVFSKARLVSEFRHKFELFKSRLINDFHHANDAYLNIVVGNSYFVKFTRNPANFIKDARKNPDNPAYKYHMDRFFERDVKSKSEVAWIGQSEGNAGTIAIVKKTMSKNSPLITKKVEEGHGSITKETIVGVKEIKFGRNKVEKADKTPKKANLQAYRPIKTSDERLCNILRYGGRTSISISGYCLVEYVKKRKTIRSLEAIPVYLGRKDSLSEEKLLNYFRYNLNDGGKDSVSDIRLCLPFISTNSLVKIDGYLYYLGGKNDDRIQLYNAYQLKMKKEEVEYIRKIEKAVSMSKFDEIDREKNPVLTEEKNIELYNKIQDKFENTVFSKRMSLVKYNKKDLSFGDFLKNKKSKFEEIDLEKQCKVLYNIIFNLSNLKEVDLSDIGGSKSTGKCRCKKNITNYKEFKLIQQSITGLYSCEKDLMTI

SEQ ID NO: 212 - protein, 1107 aa, Eubacterium ventriosum
  Eubacterium ventriosum ATCC 27560
MGYTVGLDIGVASVGVAVLDENDNIVEAVSNIFDEADTSNNKVRRTLREGRRTKRRQKTRIEDFKQLWETSGYIIPHKLHLNIIELRNKGLTELLSLDELYCVLLSMLKHRGISYLEDADDGEKGNAYKKGLAFNEKQLKEKMPCEIQLERMKKYGKYHGEFIIEINDEKEYQSNVFTTKAYKKELEKIFETQRCNGNKINTKFIKKYMEIYERKREYYIGPGNEKSRTDYGIYTTRTDEEGNFIDEKNIFGKLIGKCSVYPEEYRASSASYTAQEFNLLNDLNNLKINNEKLTEFQKKEIVEIIKDASSVNMRKIIKKVIDEDIEQYSGARIDKKGKEIYHTFEIYRKLKKELKTINVDIDSFTREELDKTMDILTLNTERESIVKAFDEQKFVYEENLIKKLIEFRKNNQRLFSGWHSFSYKAMLQLIPVMYKEPKEQMQLLTEMNVFKSKKEKYVNYKYIPENEVVKEIYNPVVVKSIRTTVKILNALIKKYGYPESVVIEMPRDKNSDDEKEKIDMNQKKNQEEYEKILNKIYDEKGIEITNKDYKKQKKLVLKLKLWNEQEGLCLYSGKKIAIEDLLNHPEFFEIDHIIPKSISLDDSRSNKVLVYKTENSIKENDTPYHYLTRINGKWGFDEYKANVLELRRRGKIDDKKVNNLLCMEDITKIDVVKGFINRNLNDTRYASRVVLNEMQSFFESRKYCNTKVKVIRGSLTYQMRQDLHLKKNREESYSHHAVDAMLIAFSQKGYEAYRKIQKDCYDFETGEILDKEKWNKYIDDDEFDDILYKERMNEIRKKIIEAEEKVKYNYKIDKKCNRGLCNQTIYGTREKDGKIHKISSYNIYDDKECNSLKKMINSGKGSDLLMYNNDPKTYRDMLKILETYSSEKNPFVAYNKETGDYFRKYSKNHNGPKVEKVKYYSGQINSCIDISHKYGHAKNSKKVVLVSLNPYRTDVYYDNDTGKYYLVGVKYNHIKCVGNKYVIDSETYNELLRKEGVLNSDENLEDLNSKNITYKFSLYKNDIIQYEKGGEYYTERFLSRIKEQKNLIETKPINKPNFQRKNKKGEWENTRNQIALAKTKYVGKLVTDVLGNCYIVNMEKFSLVVDK

SEQ ID NO: 213 - protein, 1391 aa, Eubacterium yurii
  Eubacterium yurii subsp. margaretiae ATCC 43715
MENKQYYIGLDVGTNSVGWAVTDTSYNLLRAKGKDMWGARLFEKANTAAERRTKRTSRRRSEREKARKAMLKELFADEINRVDPSFFIRLEESKFFLDDRSENNRQRYTLFNDATFTDKDYYEKYKTIFHLRSALINSDEKFDVRLVFLAILNLFSHRGHFLNASLKGDGDIQGMDVFYNDLVESCEYFEIELPRITNIDNFEKILSQKGKSRTKILEELSEELSISKKDKSKYNLIKLISGLEASVVELYNIEDIQDENKKIKIGFRESDYEESSLKVKEIIGDEYFDLVERAKSVHDMGLLSNIIGNSKYLCEARVEAYENHHKDLLKIKELLKKYDKKAYNDMFRKMTDKNYSAYVGSVNSNIAKERRSVDKRKIEDLYKYIEDTALKNIPDDNKDKIEILEKIKLGEFLKKQLTASNGVIPNQLQSRELRAILKKAENYLPFLKEKGEKNLTVSEMIIQLFEFQIPYYVGPLDKNPKKDNKANSWAKIKQGGRILPWNFEDKVDVKGSRKEFIEKMVRKCTYISDEHTLPKQSLLYEKFMVLNEINNIKIDGEKISVEAKQKIYNDLFVKGKKVSQKDIKKELISLNIMDKDSVLSGTDTVCNAYLSSIGKFTGVFKEEINKQSIVDMIEDIIFLKTVYGDEKRFVKEEIVEKYGDEIDKDKIKRILGFKFSNWGNLSKSFLELEGADVGTGEVRSIIQSLWETNFNLMELLSSRFTYMDELEKRVKKLEKPLSEWTIEDLDDMYLSSPVKRMIWQSMKIVDEIQTVIGYAPKRIFVEMTRSEGEKVRTKSRKDRLKELYNGIKEDSKQWVKELDSKDESYFRSKKMYLYYLQKGRCMYSGEVIELDKLMDDNLYDIDHIYPRSFVKDDSLDNLVLVKKEINNRKQNDPITPQIQASCQGFWKILHDQGFMSNEKYSRLTRKTQEFSDEEKLSFINRQIVETGQATKCMAQILQKSMGEDVDVVFSKARLVSEFRHKFELFKSRLINDFHHANDAYLNIVVGNSYFVKFTRNPANFIKDARKNPDNPVYKYHMDRFFERDVKSKSEVAWIGQSEGNSGTIVIVKKTMAKNSPLITKKVEEGHGSITKETIVGVKEIKFGRNKVEKADKTPKKPNLQAYRPIKTSDERLCNILRYGGRTSISISGYCLVEYVKKRKTIRSLEAIPVYLGRKDSLSEEKLLNYFRYNLNDGGKDSVSDIRLCLPFISTNSLVKIDGYLYYLGGKNDDRIQLYNAYQLKMKKEEVEYIRKIEKAVSMSKFDEIDREKNPVLTEEKNIELYNKIQDKFENTVFSKRMSLVKYNKKDLSFGDFLKNKKSKFEEIDLEKQCKVLYNIIFNLSNLKEVDLSDIGGSKSTGKCRCKKNITNYKEFKLIQQSITGLYSCEKDLMTI

SEQ ID NO: 214 - protein, 1142 aa, Facklamia hominis
  Facklamia hominis CCUG 36813
MYSVGLDIGIASCGYSIINDVNGNIVELGTLLFKSRNSDNNEERRTNRGSRRLINRRRTRLDDGKKLLAEKGFKQDSKLKHVCPYELRVKGLHEKLTQGEIYKVVLHILKKRGISYLDESDENSSGIDGASYKDQVNLNLNLQKELTPGQIQLKRLKENGRIKSGVTFENGYQLNVFSVSAYANELNKILTKQSEYYSEIDQIWIDRFTKNGYRKEAGLVYRKRPYYDGPGNEKNNSIYGRWANFKEDGHPKENIFDQLIGLDSVDSTQVRASASTLTAQKYNLLNDLNNLTIIEDDRKFTTDEKVSIINYLMTQDITRFGPKELAKFYQLEVDQIRGWRIDNKGNPEIHSLKVYRDWKKIFNTSSIDLTSIQTWVVDELANVITLNTEIPSTLATLKIKIPDIDQQILNFVENNFYELKKKTSKNSWHSFSLKTLNILIPELLNTSEEQNTILERLNLKFDLKNKYAEKNQIPVKELLEQIYNPTVTKSVHQSIKLFNEIIEKYGKNNISYVTIEMPRDKNDQDQKDTIKRINKLNSERKNDSEKYFLERSGWDTIRFESALKKPRFAEKLLFYYEQKGKCAYSGQDILAESLLNESCEVDHIIPLSISFDDSIHNKVLVTASSNQEKGQRTPYMAFIDGAKLGQSWDDFVAWVNSCGFHRKKVQNLLYEENIFNPDVQRGFVSRNLNDTRYASRIVLNAIQSFFYKQKDLTKVKVVNGSFTHTLRKKWGSSLDKNRDTYHHHAVDATLCAVTPFINIVKYEFFEEDGIKYMVDLTTGEKVAYSDYKKMKFYDKRAYVPIWDGFIKQLTPANLYPKIKFSHQVDSKWNRKISDATIYSTRKIVETKINKKGVAKETVKDIVIDKIKDIYTPEGWRKFKEKQDKLLMKNFDEKTYNKLIKIAKEYPEKKEVQTSNGKVSLVEVSPFKMYCEEQNVPAIRKYSKKGNGPYIRSLKFYDKELGKHINITKDSYGNDIERTIRNKKIILKNQNSWRTDVYYNSVNNCYELLGIKYCHLKFYRGKYGIPKSIYDELKKEDEISSESVFKFSLYRHDRVRFEKDGEYIEALFGSKNESNKNYLELSPIDKNKWLSKENVKFFGEVAASGRFIKGLKPGIKVIKQSTDYMGHVYAIHQEKLKFVLSDA

SEQ ID NO: 215 - protein, 1512 aa, Fibrobacter succinogenes
MKKILGLDLGTNSIGWAVVNADEITRDDGSRYLKPNGISAAGSRIIPMSADILGDFEKGNSISQTAERTRMRMARRLHERALLRRERLLRVLNLLDFLPKHFADKIDRYGKFTDDSEPKLAWRKNTEGKYEFIFQDAFNEMLAEFKDKQPEIVEEGKKIPYDWTIYYLRKKALEKALSKEELSWILLQFNQKRGYYQLRGEEEEIPQDKKIEYLAQKVVKVEATDQKKGDDVWYNVYLENGMIYRRTSKAPLDWEGKVKEFIVTTEVENDGETPKKDKEGNIKRSFRAPKEDDWTLLKKKTEADIENSHKTVGCYIYDSLLNNPKQKIIGKLVRTVERKFYKEELTQILKKQVELIPELRDDNLYKQCIEELYPINEAHRNTIAKTDFANLFINDILFYQRPLKSKKSQIDNCPYEERIFIDSKTGEKKKVPVKCIAKSNPLFQEFRLWQFIQNLRIYQREKEIDGKLLTDIDITSECLKSEEDYVRLFDWLNDRETIEQEDLLKHLFNTKKSKNKENPYRWNYVEDKVYPCNETRATILKGFSKCGINASVLSPELEMALWHILYSVEDKKEIETALTHFAQKQGWNDDFAKVFSKAKPFKKDYGSYSEKAIKKLLSLMRMGKYWNQDNIDKNTLDRIDKIINGEYDEKISNRVRDNAINLKDISDFRGLPVWLACYIVYDRHSEAKDCTKWNSPEEIDSYLKKFKQHSLRNPIVEQVVTETLRTVRDIWIQEEQIDEIHLELGRDLKNPADKRKKMSENILKNENTNLRIKAMLMEFMNPSMGIENVRPYSPSQQDILRIYEENALDNLTKDDKDFDFISKISKQAQPSKTDIIRYKCWLEQKYRSPYTGKTISLSKLFTPAYEIEHVIPQSLYFDDSFSNKVICEAEVNKLKDRQLGYKFIAEHHGEKVQLSQGEVVEILSVDAYEKFVKENYANNRIKMKKLLMESIPDEFIERQLNDSRYISKVVKGLLSNIVREKIDDENYEPEAVSKNLISCNGAITDRLKKDWGMNDVWNSIILPRFIRMNQITGKDCFTTTNAEGHLIPQMPLELQKGFNKKRIDHRHHAMDAIVIACTTRDHVNLLNNEAAHSKFNATRYQLQRKLRRFEKAVIDGKEREVAKEFLKPWDSFSSDSKNILENIIVSFKQNQRVINKTTNAFLHFDENGKKTFIKQGKGDSWAIRKSMHKDTVFGEINLRKVRSVSLNEAIKVPERVLNKKIKEKILELKNNKIDAKNIKKYIEENHTGGYGIDSSKIDVFYFTKETKERFFATRKTLDTSFNQAKIKDSIADSGIQKILLAHLKSKNGDAEQAFSPDGIDEMNKNIVELNNGKFHQPILKVRVYEKADKFAVGQKGNKKVKFVEAAKGTNLFFAIFEKDGKRSYLTIPLNVMIDCQKQYGNQWKNNIEAYLKEKELVEKDVKLQFILSPNDLVYLPTEGSIDKKRIYKVVSFTNNRLYAIPYAIAKSIVDKNEFTQLNKIEFTDNKESIKDACVPVIIDRLGNVIEFNGKRL

SEQ ID NO: 216 - protein, 1365 aa, Filifactor alocis
MTKEYYLGLDVGTNSVGWAVTDSQYNLCKFKKKDMWGIRLFESANTAKDRRLQRGNRRRLERKKQRIDLLQEIFSPEICKIDPTFFIRLNESRLHLEDKSNDFKYPLFIEKDYSDIEYYKEFPTIFHLRKHLIESEEKQDIRLIYLALHNIIKTRGHFLIDGDLQSAKQLRPILDTFLLSLQEEQNLSVSLSENQKDEYEEILKNRSIAKSEKVKKLKNLFEISDELEKEEKKAQSAVIENFCKFIVGNKGDVCKFLRVSKEELEIDSFSFSEGKYEDDIVKNLEEKVPEKVYLFEQMKAMYDWNILVDILETEEYISFAKVKQYEKHKTNLRLLRDIILKYCTKDEYNRMFNDEKEAGSYTAYVGKLKKNNKKYWIEKKRNPEEFYKSLGKLLDKIEPLKEDLEVLTMMIEECKNHTLLPIQKNKDNGVIPHQVHEVELKKILENAKKYYSFLTETDKDGYSVVQKIESIFRFRIPYYVGPLSTRHQEKGSNVWMVRKPGREDRIYPWNMEEIIDFEKSNENFITRMTNKCTYLIGEDVLPKHSLLYSKYMVLNELNNVKVRGKKLPTSLKQKVFEDLFENKSKVTGKNLLEYLQIQDKDIQIDDLSGFDKDFKTSLKSYLDFKKQIFGEEIEKESIQNMIEDIIKWITIYGNDKEMLKRVIRANYSNQLTEEQMKKITGFQYSGWGNFSKMFLKGISGSDVSTGETFDIITAMWETDNNLMQILSKKFTFMDNVEDFNSGKVGKIDKITYDSTVKEMFLSPENKRAVWQTIQVAEEIKKVMGCEPKKIFIEMARGGEKVKKRTKSRKAQLLELYAACEEDCRELIKEIEDRDERDFNSMKLFLYYTQFGKCMYSGDDIDINELIRGNSKWDRDHIYPQSKIKDDSIDNLVLVNKTYNAKKSNELLSEDIQKKMHSFWLSLLNKKLITKSKYDRLTRKGDFTDEELSGFIARQLVETRQSTKAIADIFKQIYSSEVVYVKSSLVSDFRKKPLNYLKSRRVNDYHHAKDAYLNIVVGNVYNKKFTSNPIQWMKKNRDTNYSLNKVFEHDVVINGEVIWEKCTYHEDTNTYDGGTLDRIRKIVERDNILYTEYAYCEKGELFNATIQNKNGNSTVSLKKGLDVKKYGGYFSANTSYFSLIEFEDKKGDRARHIIGVPIYIANMLEHSPSAFLEYCEQKGYQNVRILVEKIKKNSLLIINGYPLRIRGENEVDTSFKRAIQLKLDQKNYELVRNIEKFLEKYVEKKGNYPIDENRDHITHEKMNQLYEVLLSKMKKFNKKGMADPSDRIEKSKPKFIKLEDLIDKINVINKMLNLLRCDNDTKADLSLIELPKNAGSFVVKKNTIGKSKIILVNQSVTGLYENRREL

SEQ ID NO: 217 - protein, 1347 aa, Finegoldia magna
  Finegoldia magna ACS-171-V-Col3
MKSEKKYYIGLDVGTNSVGWAVTDEFYNILRAKGKDLWGVRLFEKAKTAADTRTFRSGRRRNDRKGMRLQILREIFEDEIKKVDKDFYDRLDESKFWAEDKKVSGKYSLFNDKNFSDKQYFEKFPTIFHLRKYLMEEHGKVDIRYYFLAINQMMKRRGHFLIDGQISHVTDDKPLKEQLILLINDLLKIELEEELMDSIFEILADVNEKRTDKKNNLKELIKGQDFNKQEGNILNSIFESIVTGKAKIKNIISDEDILEKIKEDNKEDFVLTGDSYEENLQYFEEVLQENITLFNTLKSTYDFVILQSILKGKSTLSDAQVERYDEHKKDLEILKKVIKKYDEDGKLFKQVFKEDNGNGYVSYIGYYLNKNKKITAKKKISNIEFTKYVKGILEKQCDCEDEAVKYLLGKIEQENFLLKQISSINSVIPHQIHLFELDKILENLAKNYPSFNNKKEEFTKIEKIRKTFTFRIPYYVGPLNDYHKNNGGNAWIFRNKGEKIRPWNFEKIVDLHKSEEEFIKRMLNQCTYLPEETVLPKSSILYSEYMVLNELNNLRIKGKPLDTDVKLKLIEELFKKKTKVTLKSIRDYMIRNNFADKEDFDNSEKNLEIVSNMKSYIDFNNILGDKFELEMVEDLIEKITIHTGNKTLLKKYIEETYPDLSSSQIQKIINLKYKDWGRLSRKLLDGIKGRNKTDDVNTVINFMRNSSDNLMQIIEGKNYSFNEYIDNLRKKYIPQEISYEVVENLYVSPSVKKMIWQVIRVTEEITKVMGYDPDKIFIEMAKSEEEKKTTISRKNKLLDLYKAIKKDERDSQYEKLLTGLNKLDESELRSKKLYLYYTQMGRDMYTGEKIDLDKLFDSTHYDKDHIIPQSMKKDDSIINNLVLVNKNANQTTKGNIYPVPSSIRNNPDIYNYWKYLMEKEFISKEKYNRLIRNTPLTNEELGVFINRQLVETRQSTKAIKELFEKFYQKSKIIPVKASLASDLRKDMNTLKSREVNDLHHAHDAFLNIVAGDVWNREFTSNPINYVNENREGDKVKYSLSKYFTRPRKSKGKVIWTPEKGRKLIVDTLNKPSVLISNESHVKKGELFNATISGKKDYKKGKIYLPLKKDDRLKDVSKYGGYKAINGAFFFLVEHTKSKKRIRSIELFPLHLLSKFYEDKNTVLDYAINVLQLQDPKIIIDKINYRTEIIIDNFSYLISTKSNDGSITVKPNEQMYWRVDEISNLKKIENKYKKDAILTEEDRKIMESYIDKIYQQFKAGKYKNRRTTDTIIEKYEIIDLDTLDNKQLYQLLVAFISLSYKTSNNAVDFTVIGLGTECGKPRITNLPDNTYLVYKSITGIYEKRIRIK

SEQ ID NO: 218 - protein, 1348 aa, Finegoldia magna
MKSEKKYYIGLDVGTNSVGWAVTDEFYNILRAKGKDLWGVRLFEKADTAANTRIFRSGRRRNDRKGMRLQILREIFEDEIKKVDKDFYDRLDESKFWAEDKKVSGKYSLFNDKNFSDKQYFEKFPTIFHLRKYLMEEHGKVDIRYYFLAINQMMKRRGHFLIDGQISHVTDDKPLKEQLILLINDLLKIELEEELMDSIFEILADVNEKRTDKKNNLKELIKGQDFNKQEGNILNSIFESIVTGKAKIKNIISDEDILEKIKEDNKEDFVLTGDSYEENLQYFEEVLQENITLFNTLKSTYDFLILQSILKGKSTLSDAQVERYDEHKKDLEILKKVIKKYDEDGKLFKQVFKEDNGNGYVSYIGYYLNKNKKITAKKKISNIEFTKYVKGILEKQCDCEDEDVKYLLGKIEQENFLLKQISSINSVIPHQIHLFELDKILENLAKNYPSFNNKKEEFTKIEKIRKTFTFRIPYYVGPLNDYHKNNGGNAWIFRNKGEKIRPWNFEKIVDLHKSEEEFIKRMLNQCTYLPEETVLPKSSILYSEYMVLNELNNLRINGKPLDTDVKLKLIEELFKKKTKVTLKSIRDYMVRNNFADKEDFDNSEKNLEIASNMKSYIDFNNILEDKFDVEMVEDLIEKITIHTGNKKLLKKYIEETYPDLSSSQIQKIINLKYKDWGRLSRKLLDGIKGTKKETEKTDTVINFLRNSSDNLMQIIGSQNYSFNEYIDKLRKKYIPQEISYEVVENLYVSPSVKKMIWQVIRVTEEITKVMGYDPDKIFIEMAKSEEEKKTTISRKNKLLDLYKAIKKDERDSQYEKLLTGLNKLDDSDLRSRKLYLYYTQMGRDMYTGEKIDLDKLFDSTHYDKDHIIPQSMKKDDSIINNLVLVNKNANQTTKGNIYPVPSSIRNNPKIYNYWKYLMEKEFISKEKYNRLIRNTPLTNEELGGFINRQLVETRQSTKAIKELFEKFYQKSKIIPVKASLASDLRKDMNTLKSREVNDLHHAHDAFLNIVAGDVWNREFTSNPINYVKENREGDKVKYSLSKDFTRPRKSKGKVIWTPEKGRKLIVDTLNKPSVLISNESHVKKGELFNATIAGKKDYKKGKIYLPLKKDDRLQDVSKYGGYKAINGAFFFLVEHTKSKKRIRSIELFPLHLLSKFYEDKNTVLDYAINVLQLQDPKIIIDKINYRTEIIIDNFSYLISTKSNDGSITVKPNEQMYWRVDEISNLKKIENKYKKDAILTEEDRKIMESYIDKIYQQFKAGKYKNRRTTDTIIEKYEIIDLDTLDNKQLYQLLVAFISLSYKTSNNAVDFTVIGLGTECGKPRITNLPDNTYLVYKSITGIYEKRIRIK

SEQ ID NO: 219 - protein, 1348 aa, Finegoldia magna
  Finegoldia magna SY403409CC001050417
MKSEKKYYIGLDVGTNSVGWAVTDEFYNILRAKGKDLWGVRLFEKAKTAADTRTFRSGRRRNDRKGVRLQILREIFEDEIKKVDKDFYDRLDESKFWAEDKKVSGKYSLFNDKNFSDKQYFEKFPTIFHLRKYLMEEHGKVDIRYYFLAINQMMKRRGHFLIDGQISHVTDDKPLKQQLILLINDLLKIELEEEFMDSIFEILADVNEKKTEKKNILKELINAQDFNKQEGKILYSIFESIVTGKAKIKNIISDEDILEKIKEDNKEDFVLTGDSYEENLQYFEEVLQENITLFNTLKSAYDFVILQSILKGKSTLSDAQVERYDEHKKDLEILKKVIKKYDEDGKLFKQVFKEDNGNGYVSYIGYYLNKNKKITAKKKISNIEFTKYVKGILEKQCDCEDEDVKYLLGKIEQENFLLKQISSINSVIPHQIHLFELDKILENLAKYYPSFNNKKEEFTKIEKIRKTFTFRIPYYVGPLNDYHKNNGGNAWIFRNKGEKIRPWNFEKIVDLHKSEEEFIKRMLNQCTYLPEETVLPKSSILYSEYMVLNELNNLRINGKPIDTDVKLKLIEELFKKKTKVTLKSIRDYMIRNNFADKEDFDNSEKNLEIVSNMKSYIDFNNILGDKFELEMVEDLIEKITIHTGNKKLLKKYIEETYPDLSSSQIQKIINLKYKDWGRLSRKLLDGITGTNIETGEIDTVINFLRNSSDNLMQIIGSQNYSFNNDIDKLRKKYIPQEISYEVVENLYVSPSVKKMIWQVIRITEEITKVMGYDPDKIFIEMAKSEEGKKTTISRKNKLLALYKAIKKDERDSQYEKLLTGLNKLDDSDLRSRKLYLYYTQMGRDMYTGEKIDLDKLFDSTHYDKDHIIPQSMKKDDSIINNLVLVNKNANQTTKGNIYPVPSSIRNNPKIYNYWKYLMEKEFISKEKYNRLIRNTPLTNEELGGFINRQLVETRQSTKAIKELFEKFYKKSKIIPVKAILASDLRKDMNTLKSREVNDLHHAHDAFLNIVAGDVWNREFTSNPINYVKENREGDKVKYSLSKYFTRPRKSKGKVIWTPEKGRKLIVDTLNKPSVLISNESHVKKGELFNATIAGKKDYKKGKIYLPLKKDDRLQDVSKYGGYKAINGAFFFLVEHTKSKKRIRSIELFPLHLLSKFYEDKNTVLDYAINVLQLQDPKIIIDKINYRTEIIIDNFSYLISTKSNDGSITVKPNEQMYWRVDEISNLKKIENKYKKDAILTEEDRKIMESYIDKIYQQFKAGKYKNRRTTDTIIEKYEIIDLDTLDNKQLYQLLVAFISLSYKTSNNAVDFTVIGLGTECGKPRITNLPDNTYLVYKSITGIYEKRIRIK

SEQ ID NO: 220 - protein, 1516 aa, Flavobacteriaceae bacterium
  Flavobacteriaceae bacterium S85
MLKQQKDKIIGMNKKILGLDLGTNSIGWALVKQDLENKYGEIIGCGSRIIPMSQDVLGKFDAGISISQTAERTNYRSVRKLIQRNTLRRERLHRVLHQLDFLPKHYNDSIDFEKKLGQFKTDKETKLNYFVNQHGKHEFLFKDSFNEMVKEFKEEQPELFYIKNNGKETKIPYDWTIYYLRKKALSKKISKEELSWLVLNFNQKRGYYQLRGEIDEEKEKNKRYEKLYVSEVVKTNNTIKKTGEYLYDIYFDNGWKYEKQTTKPQDWLHKHKEFIITTTTLKNGETKRTFKTVDSEKDWIAIKSKTEQDIKESNKTVGAFIYDTLLKNPTQKIRGSLVKTIERKFYREEFEKILKEQIKHRPEINVNTAIGKENYTKCVTELYPRNEAHANNILTNDFNYLFTKDILFYQRPLKSKKSEIANCQYEYRTYIKKKEKTGKEERVKQPLKATPKSHPLFQEFRLWQFIHNLKIYIRETTVGNKPLFDVDITDTFFTSENDWATLFEYLNNKKEIEQKHVLEYLVSKKIISKSEKTDYRWNYVEDKKYPGNETRVDFINRLKKVENLNVDEFLTSELEFKLWHIIYSVTDKNEYEKALENFAIRQNIDKDSFVNSFKKFPPFKSDYGAYSTKAIKKLLPLMRLGKFWDGSEIPKVVVEKITDIKTRLTSVNYDESLFKKDEKKILETIVDDITPKQLLKSFVKLKGKNHLAGLNTYQACYLVYERHSESSDITQWENPDDIDSFLNHFKQHSLRNPIVEQVVTETLRTVRDIWKYYGNGSPNYFNEIHIELGREMKNPADKRKQMSAKINENENTNQRIKGILQELMNDGVQDIKPYSPSQQEILKIYEEGISQNPNVDYSKVSEDEITKIKKSNNPTLKEIQRYKLWLEQKYISPYTGKPIPLSELFTPAYQIEHIIPQSRYFDNSLSNKIICESEVNEDKSNKTAYEYLKTNGGSIVHGHHLLSLKEYEDHCQHYFKKNRTKLKNLLSEEIPEGFINRQLNDSRYISKLIKGLLSNIVREENEQEATSKNIVPVTGSITSKLKQDWGLNDKWNEIIAPRFKRLNKMTNSNDFGYFDEKINTFRIQVPDAISRGFNKKRIDHRHHTLDALVIACCTKKHIQYLNSLNNEIIKHELKPSILIKNAQGDYTKHFMLPWNNFPIDCKNAIENTIVSFKQNLRVINKTSNKYQSYKDENGNLRLGKDGKPKKGLTKQTKGNNWAVRKAMHEDTFYGEIVDGENKGKLKIKTLLDTSFDVKKIEDKVLDKSIRTILINYLKQDKYKNLSKPHEEAFSPNGIIEMNKNIISLNNNIPHKPIKRVTLKHEKGKKFSIKTLLDKKTKFAKSATGTNVFFCIYKNINGKIKYHTPSFEEIIEIQKQEFEIKYKSKLNVPETLFDKKESFELLFYLQPNDLVYLPNDEELKNRQLIDFNNLNKKQIKRIYKFTDGSGTTANFIPYQVAKVIFNLNKKEQAKSSFKYPIQNEFGVGSPQSKNQKSIEGILIKERCIKLKIDRLGNISKA

SEQ ID NO: 221 - protein, 1473 aa, Flavobacterium branchiophilum
MAKILGLDLGTNSIGWAVVERENIDFSLIDKGVRIFSEGVKSEKGIESSRAAERTGYRSARKIKYRRKLRKYETLKVLSLNRMCPLSIEEVEEWKKSGFKDYPLNPEFLKWLSTDEESNVNPYFFRDRASKHKVSLFELGRAFYHIAQRRGFLSNRLDQSAEGILEEHCPKIEAIVEDLISIDEISTNITDYFFETGILDSNEKNGYAKDLDEGDKKLVSLYKSLLAILKKNESDFENCKSEIIERLNKKDVLGKVKGKIKDISQAMLDGNYKTLGQYFYSLYSKEKIRNQYTSREEHYLSEFITICKVQGIDQINEEEKINEKKFDGLAKDLYKAIFFQRPLKSQKGLIGKCSFEKSKSRCAISHPDFEEYRMWTYLNTIKIGTQSDKKLRFLTQDEKLKLVPKFYRKNDFNFDVLAKELIEKGSSFGFYKSSKKNDFFYWFNYKPTDTVAACQVAASLKNAIGEDWKTKSFKYQTINSNKEQVSRTVDYKDLWHLLTVATSDVYLYEFAIDKLGLDEKNAKAFSKTKLKKDFASLSLSAINKILPYLKEGLLYSHAVFVANIENIVDENIWKDEKQRDYIKTQISEIIENYTLEKSRFEIINGLLKEYKSENEDGKRVYYSKEAEQSFENDLKKKLVLFYKSNEIENKEQQETIFNELLPIFIQQLKDYEFIKIQRLDQKVLIFLKGKNETGQIFCTEEKGTAEEKEKKIKNRLKKLYHPSDIEKFKKKIIKDEFGNEKIVLGSPLTPSIKNPMAMRALHQLRKVLNALILEGQIDEKTIIHIEMARELNDANKRKGIQDYQNDNKKFREDAIKEIKKLYFEDCKKEVEPTEDDILRYQLWMEQNRSEIYEEGKNISICDIIGSNPAYDIEHTIPRSRSQDNSQMNKTLCSQRFNREVKKQSMPIELNNHLEILPRIAHWKEEADNLTREIEIISRSIKAAATKEIKDKKIRRRHYLTLKRDYLQGKYDRFIWEEPKVGFKNSQIPDTGIITKYAQAYLKSYFKKVESVKGGMVAEFRKIWGIQESFIDENGMKHYKVKDRSKHTHHTIDAITIACMTKEKYDVLAHAWTLEDQQNKKEARSIIEASKPWKTFKEDLLKIEEEILVSHYTPDNVKKQAKKIVRVRGKKQFVAEVERDVNGKAVPKKAASGKTIYKLDGEGKKLPRLQQGDTIRGSLHQDSIYGAIKNPLNTDEIKYVIRKDLESIKGSDVESIVDEVVKEKIKEAIANKVLLLSSNAQQKNKLVGTVWMNEEKRIAINKVRIYANSVKNPLHIKEHSLLSKSKHVHKQKVYGQNDENYAMAIYELDGKRDFELINIFNLAKLIKQGQGFYPLHKKKEIKGKIVFVPIEKRNKRDVVLKRGQQVVFYDKEVENPKDISEIVDFKGRIYIIEGLSIQRIVRPSGKVDEYGVIMLRYFKEARKADDIKQDNFKPDGVFKLGENKPTRKMNHNQFTAFVEGIDFKVLPSGKFEKI

SEQ ID NO: 222 - protein, 1459 aa, Flavobacterium columnare
MKFNLGLDIGTNSIGWALVNEDYENKKGKIIAAGSRIIPMTQDILDKFGSGAITETQTALRTDYRSKRKLIQRFLLRRERLHRVLNVLDFLPKHYAESIDFEKYFGKFLPNTEPKLAYNQNQFIFQNSFLEMLKEFQEKHPELLTNNKKIPYDWTIYYLRKKALNQRIEKEELAWLLLQFNQKRGYNQLRDEEEESVPNKQVEFYSLKIIDVVADQPKEGRDKRWYSINLENGWTYRRESKTPLFNWEGKTKDFIVTTDLNQDGSIKKDKEGKEKRSFRAPSEGDWTLLKKKTEKEIYESGKTLGTYIYDALLNTPDLKIKGDFIRTIDRSIYKEELQQIINKQKEYHLELNSSKLYKACLEELYPKNEIYKSALKNKDIAYLFINDILYYQRPLKAPKYNIGKCTYESRTFKKEDKKIREYIPAVAKSHPLFQEFRLWQWIKNLKIYEKLSSDNCTDFFLTNEQDFENLFEFLWNKKEIDHKGILEYLVKTKFPDLKPKQVKTKVKEYRWNYVYDHEKDESKTYPCGETYFLLKNKLDKIYNAQDDFLDKERLYNLWHIIYSVTDKKQYEKALAKFALKNHLDTKSFVNTFKRIPPFKNDYAIYSLKAIKKLLPLMRVGKYWNYDDIDPITKQKIQCIITGEENDTISTLVREKTNHFSNENDFKNLPLWLAGYIVYNSHNESSEIEKWKSPQDIDTFLKKFKQHALRNPIVEQVVTETLRVVRDIWSKKGQGKKDFFNEIHIELGKDLKNPVDKRRKLSSTNTKNESTNTRIKALLIELFTQGVENVKPNSPKHQEILKIFEEGALNSGIEIEEDIIKISNTDQPTKKQLELYILWLEHKYKSPYTGQSIPLSKLFTPNYEIEHIIPRSKYYDDNLSNKVICETEINRLKNNQLGYEFINNHEIREVTLEEGKTIRLLSPEQYWNFVTTYYAKNKAKRENLLLKELPVQMVEKQLNDTRYVSKYVMQLLSKIVRKEDGTDNGINSTNILSISGKMTRALKNDWDLNDVWNDLLLYRFERLNTITKTNLFTTYSEQKQKRMPIVPDQYAKGFHKKRLDHRHHALDAIVIACITRNHINYMNNQNIQGEKLKKNAIEKENYREILQKSRLDIRAQLCEKKYNDNDPTKYNWVFIKPWADFTENTKDILESIIPSFKQNLRIINKTVNYYEKYNENGKKVKVRQIKGDNWAIRKPLHKETISGKVHLSYKTPAKGKILTATRKVLDSSMDFKSIEKITDTGIQKILKNYLEYKKSPELAFSPEGIEELNATITKYNNGFHHKPIYKVRIYEEGVKFPLGNKGNKKSKYVEAEKGTNLFFAIYKDQENNRYFETIPFNDVLETLKKGMSAVPEKNQEENTLVFALSPQDLVFVPTLDEIENPDIVDFKNLTKDQTNRIYKMVSSSGKQCFFIKAEVATSIVNKMEFSTSNKMENSIEGIQIKSNCWKLKLDRLGTITRVIK

SEQ ID NO: 223 - protein, 1535 aa, Flavobacterium columnare
MTKILGLDLGTNSIGWAIRDTENEGINQILDKGARIFSEGVKSENGKEISRAAERTAYRSARKIKYRRKLRKYETLKVLSINGMCPLSVEEVEQWKKSGFKEYPLNPEFLDWLRTNEDKNINPYLFRDKASKQKVTLFELGRALYHIAQRRGFLSNRLDQSAEGVFEEHNPQIQNLIEDLDSSNTILNELKEYYINLGIIDETEKSGFKKDLDEGEKKLKSLYNSLVAITKKNANDIETCKQELIARLNKKEDLGKVKGKIKDISQAMLDRNFKTLGQYFFSLYNKERIRNQYTSREEHYLEEFIIICQTQGIEGINTNEKLPEKKFTGLAKDLYRAIFFQRPLKSQKGLIGKCSFEKNKSRCAVSHPDYEEFRMWSYLNTIKIGTQSEKTLRFLTLEEKLKLVPKFYRKSDFNFEVLAKELVEKGASFGYYKSSKKNEFFYWFNYKPTDSVSACVVSASLENAIGKDWKIKTFEYQTRNTEKNEVTKSVDYKDLWHLLSVATSDTYLYDFAIEKLKLEPKNAKAFSKTKLKKDFASLSLAAIAKILPYLKQGLLYSHAVFMANIENIVDADIWKDEEQQKFIQSKIVELVDNYIVEKSKLELINGLLKIYNTEDKEGRKVYYSKEAESLFEADLRKKLVPFYKANIIIEEHEQEIIFQDLFPILMDQLKKQEFIKIGRLDKQIEAFLEGENEEGQIFCNHTDKLKKLYHPSDIEVFKKKTIKDEWGNEKVVLGSPLTTSIKNPMAMRALHQLRKVLNTLIANDQIDEDTRIHIEMARELNDANKRKGIQDFQNENKKFREEAIKEIKKLYLEECHKDVNPTEDDILRYQLWLEQGKCEIYEEGNNISICDIIGSNPSYDIEHTIPRSISQDNSQMNKTLCSLKFNRSIKKQKMPVELSNYNDILPRIAHWKKEAEELTRQIETISRSIKSAATKVAKDKNIRKRHYLTLKRDYILGKYERFTWEEPKVGFKNSQIPDTGIITKYAQAYLKSYFKRVESVKGGAVAEFRKLWGIQESFIDENWWKHYKDKDRDKHTHHTIDAITIACMPKDKYDLLAHAWRLEDEQDKKAAKVLIEQAKPWKTFKEDIEKIETEILVSHFTPDNVKKQSKSIIKNRGKKVYVLKNELPVNFKNKIEGKDYFKLKFDSKILYKIPKKKEKQTDTFYEELPKNYLNGVEGKDYFKINTTGKTFYKIPIFNQGDTIRGSLHQETTYGAIKLPDIDIETKKPLHTDKGGFILKKDIKGNEIVFFVVRKEISKISENDVQNIVDNVVRKKIENAIANSLITFKIVKKKKVAVIKEGVTIWMREPNIEKGIEGIPIKKVRIITNSVKNPIEIKVHSPLSKSRHKHKQKVYGQNDENYAMALYELDGKREFELINNFNLAKLLKQSQSYYPLHKEKEIKGKKILVPIEKRNNKDVILKRGQQVVFYDKTVENPKDISEIIDFRERIYIIEGLTIQRQKDKKTSKVNEYGIIQLRHFKEARKSEEISKDNFKPDGEFKINENKPTRKMNHNQFTAFVEGIDFKVLPSGKFQKI

SEQ ID NO: 224 - protein, 1354 aa, Flavobacterium psychrophilum
  Flavobacterium psychrophilum JIP02/86
MKKILGLDLGTNSIGWAFINEAENEIEVSSIVNTGVRIVPLTTDEESDFKKGNTISINADRTLKRGARRGLQRFKQRREALLETFNRIKFIATDFVYAETGAATTFSSYQLRAKSAVEAVTKEELVKVLLMLNKKRGYKSSRKAKTAEEGDAIDGMKIAKEIFENNLTPGQWVYNSLSKGGKFIPDFYHSDLQKELEKIVRFQNQFHSEQINDKLLADIQGKSRTQTSQHFSKTLNIPLAENKGTREETKLQHYQWRNEALANELDMKILAFIITEINNQINQSSGYLGAISDRSKELYFNQETVGQYQYKQLQENVHAKLKNQVFYRQDYLDEFEKIWETQAKFHSELNEKLKAEIRDITIFYQRKLKSQKHLVSFCEFEKGHKAIPKSSPLFQEFRIWQNLNNVVVKNETTKEVFELSEELKQLIAEELQFKESMTDVQMLTFCELKKGTHTVNFKKIEGNRTNTSIYKAFEKILEVEGYEIDFSKMKPLEIKETVAPIFETLNINTVILDFDPTIQGNDFDKQPYYQLWHLLYSAEDDDKLKETLKTKFGFKENHLPFILNINLQADYGSLSAKAIKKILPHLMDGHIYDKACLMVGYNHSSSLTTAQNNDRVLKDTLELLKKNSLRNPVVEKILNQMINVINAIMKDPAMGKPDEIRVELARELKANNEQRKKATSDINTATTEHERIRKLLHSEFNIPRVTRNDIIRYKLWLETGGISLYTGNPIKASDLFSKNYDIEHIIPKSRLFDDSFSNKTLCERQLNIDKSNKTAYSFLQEKLSENDFAAYENRVKDLFKTGKIKSYTKYKKLLMADNEIPEGFIDRQLRETQYIAKKAKEILLEVSRNVTATIGSVTDKLRQDWELVDVMKELNWEKYDKLGLTHIEEGKNGERLSKIKDWTKRNDHRHHAMDAITVAFTKPAYIQYLNNLNAKTQGENKANSIIGIENKHLYRDKNNKLRFISPMKNFREEAKKQLESILISYKAKNKVVTKNKNTTKKSGGTNQKIQLTPRGRLHKETVYGKLQQYATKEEKVNASFTEDYIQKVAKKEYREALLKRLEENDNDPKKAFTGKNALNKTPIYISLKDNIIVPEKVKTVWLETDYTIRKDITPDLKIDKVIDVGIKRILQNRLNEFNGDPKKAFVNLGESPIWLNKEKGIAIKRVTISGVSNAQALHTKKDHLGNEILDKNGNPIPVDFISTGNNHHVAIYRDEKGNLQEEVVSFYDAVIRRNLGLSVINKNHEKGWEFLFSMKQNEFFIFPSDGFNPHEIDLLNPNNYHLISPNIFRVQKISTKNYMFNHHLETKAVDGEMLKSKKELSKTSYHFIQTPTNLNGIIKVRINHLGKIVHLGEY

SEQ ID NO: 225 - protein, 1458 aa, Fluviicola taffensis
MTKTILGLDLGTNSIGWALINQDFDNKKGEILGMGSRIIPMTQDIKDEFGKGNSISQTAERTRLRGVRRLIHRTLLRRERLHRVLNIIGFLPEHYANQIDFEKRFGKFKPESEPKISFDGNDVFLFEKSYQEMLVDFKIHQPQLVSNGKKIPHDWTIYYLRKKALSKKIEKEELAWILLNFNQKRGYYQLRGEEEEETPNKLVEFHSLKIVEVNADEPQKGKPEIWYSLVLENGWVYRRASKTPLFDWKDKIREFIVTTEINNDGTVKTDKEGTEKRSFRAPKPEDWTLQKKKTEFELSKSGNEVGAFIYESILQKPNQKIRGKLISTIERKFYKEELKTILKTQLFFHKELKDEKLYNACIEELYKNNEAHRSLLSNKGFEHLFINDILFYQRPLRSKKSQISNCPLEKRTYKKEGIEITEGIKVISKSNPIYQEFRLWQWISNLSLYCIEPTETNVTSTFLNSIEDYENLFEFLNNRKEIEQKHLLKYLLENQGFKGKLLTNELEKFRWNFVADKKYPCNETGSLLHTRLSKVKNISPDFLTKEIEHQLWHIIYSVTDKIEYEQALKTFARKNNLDVDSFFEHFKKIPPFESTYGAYSEKAIKKLLPLIRLGKYWNWEAIDSISKDRISKILSGEYDENIKNRVREKAVHLTSENNFQGLQEWLAKYIVYDRHSEGNDLGKWTSVSDLETYLKEFKQHSLRNPIVEQVITETLRVVKDIWIKHGKGTENFFDEIHVELGREMKNNSEDRKRLTNTITENENTNLRIKALLMEMMNDNDVENVRPYSPSQQEILKIYEDGALNSNIELDDEIVKISKKAEPTKSELQRYKLWLEQKYRSPYTGQVIPLNKLFTSEYEIEHVVPQSRFFDDSFSNKVICESAVNKRKDNQLGLQFIKNHSGEKVELGFGKVVQVFTEEQYLDFVKEHYSKNRSKHNKLLLEEIPEKMIERQLNDTRYISKFVSSILSNIVRSEKDDDGLNSKNILPGNGKITTELKRDWGLNDVWNDLILPRFERMNTITNSDLFTTYNDKYQKHLPTVPFEYSKGFQKKRIDHRHHAMDALVIACATRDHLNLMNNQSAKSELKRYDLQNKLRKKEPYFNQKENKQKEAFKDFIKPWGTFTEDSKNALEKIIISFKQNLRVINKATNSYESYKDEDGNLRIGKDGKPEKGLIKQKGLNWAIRKPLHKDTVSGQINLSRIKLPNGKILTATRKNLDTSFDLKTIENSITDTGIQKILKNYLLSKESPELAFSPEGLEEMNNEIEKYNNGKFHHPINKARIYELGSKFNVGQTGNRRDKFVEAAKGTNLFFAIYQDENKNRSYETIPLNEVIEHQKWRASLPKEEQEKIPLVPVNKLKGTFIFSLSPNDLVYVPSNDELERSASIDFSKLKKEQINRLYKMVSSSGSQCFFVKSEVATSVVNKMEYSSLNKMEKSIDNLMVKEICIKLKIDRLGNISKA

SEQ ID NO: 226 - protein, 1646 aa, Francisella tularensis
MNIKILPIAIDLGAKNTGVFSAFYQKGTSLESLDNKNGKVYELSKDSYTLLMNNRTARRHQRRGIDRKQLVKRLFKLIWTKQLNLEWNKDTQQTISFLLNRRGFSFITDGYSPEYLNIAPEAVKAILMSILDDYNGEDDLDSYLQSATENDSKIDELYNKLLQKALEFKLRKLCIDIKEDKVTTKTLKELSNTEFKLLANYLVDYDRILRTQKFSYTDKQGNLRELNYYHHDKYNIQEFLKRNIIINDVILEKLTDDLDIWNLNFDKFDFEKNLEKLENQEDKDYLQTHLHHFVFAVNKIKSEMASGGRHRSQYFQEITNVLVENNHQEGYLKNFCENLHNKKYSNLSVKNLVNLIGNLSNLELKPLRKYFNDKIHAKADYWDEQKFAETYSDWILGEWRVGAKDKDKKDGAKYSYKNLCDELKQKVGINQDGIINQTKSDFVDFLLELDPCRTIPPYLDNNNRKPPKCQSLILNPKFLDNKYPNWQQYLQELKKLQTVQNYLGNFEIDLKDLKSSKEQPYFVKYKSLNQQIASGQRDYKDLDARVLQFIFDRVKASDELLLNEIYSHAKKLKQNTSSELEKLELCKKLDEVIANSQLSQILKSQHVNGIFEQGTFLHLVCKYYKQRQRARDSRLYIMPEYRYDKKLDKYNNTGRFDDDNQLLTYCNHKPRQKRYQLLNDLAGVLQVSPNFLKDKIGSDDDLFISKWLVEHIRGFKKACEDSLKIQKDNRGLLNHKINIARNTKGKCEKEIFNLICKIEGSEDKKGNYKHGLAYELGVLLFGEPNQASKLEFDRKIKKFNSIYSFAQIQQIAFAERKGNANTCAVCSADNAHRMQQIKVAKPVEGNKDNIILSAKAQRLPAIPTRIVDGAVKKIATILARNIVDDNWDNIKQALSNNQQLHVPIITESNAFEFEPALADIKGKSLKDKRKKALERIDPENVFKDKNNRIKEFAKGISAYSDANLANGDFDGAKEELDHIIPRSHKKYGTLNDEANLICVTREDNQNRGNKAVFLYDLKPNYKLKQFNTTDDLEIEKKIADTIWDASKQDFKFGNYRSFINLTPQEQIAFRHALFLADKNPIKKAVIRAIDNRNRTFVNGTQRYFAEVLANNIYLRAKKENLATNRITFDYFGIETTNSNGRGIADVRKLYEKVDSDIQAYAKGDKPQDSYSHLIDAMIAFCVAADEHKNEGSIGLKMGNQYGLFPTPDKYDENTGEIISWHNDDIFRKIKVSDNQFSDKKLVRKKATEGFNTHRQMTRDGIYGESYLPILIHKNLNEVRKGYNWENSEEIKIFKGKKYDIQQLNNLVYCLKFVDKPISIDIQITTLEELRNILETNNISTTAEYYYINLKTQKLHEYYIENYNTALGYKKYTKEMEFLRSLAYRTERVKIKSIDDVSMILAKDSNFKAGKIELPFKTEWQRLYLEWQNTTIKDNHEFLKSYFSVKNATKQHKKVRKDFSLPISTNEGKLLVKRKTWDNNFIYQILNDSDSRADGTKPFIPAFDISKNEIVETIIKSFTSKNIFWLPKNIELQKVDNKSIFAIDTSRWFEVETPKDLIEIGVSTIQYKIDNNSRPKVRVKLDYVMDDDSKINYFMNHSLLKSRYPDKVLEILKQSTIIEFESSGFNKTIKEMLGMTLAGIYNETSNN

SEQ ID NO: 227 - protein, 1629 aa, Francisella tularensis
MNFKILPIAIDLGVKNTGVFSAFYQKGTSLERLDNKNGKVYELSKDSYTLLMNNRTARRHQRRGIDRKQLVKRLFKLIWTEQLNLEWDKDTQQAISFLFNRRGFSFITDGYSPEYLNIVPEQVKAILMDIFDDYNGEDDLDSYLKLATEQESKISEIYNKLMQKILEFKLRKLCTDIKDDKVSTKTLKEITSYEFELLADYLANYSEILKTQKFSYTDKQGNLKELSYYHHDKYNIQEFLKRHATINIQILDTLLTDDLDIWNFNFEKFDFDKNEEKLQNQEDKDHIQAHLHHFVFAVNKIKSEMASGGRHRSQYFQEITNVLDENNHQEGYLKNFCENLHNKKYSNLSVKNLVNLIGNLSNLELKPLRKYFNDKIHAKADHWDEQKFTETYCHWILGEWRVGVKDQDKKDGAKYSYKDLCNELKQKVTKAGLVDFLLELDPCRTIPPYLDNNNRKPPKCQSLILNPKFLDNQYPNWQQYLQELKKLQSIQNYLESFETDLKVLKSSKDQPYFVEYRSSNQQIASGQRDYKDLDARILQFIFDRVKASDELLLNEIYFQAKKLKQKASSELEKLESSKKLDEVIANSQLSQILKSQHTNGIFEQGTFLHLVCKYYKQRQRARDSRLYIMPEYRYDKKLHKYNNTGRFDDDNQLLTYCNHKPRQKRYQLLNDLAGVLQVSPNFLKDKIGSDDDLFISKWLVEHIRGFKKACEDSLKIQKDNRGLLNHKINIARNTKGKCEKEIFNLICKIEGSEDKKGNYKHGLAYELGVLLFGEPNEASKPEFDRKIKKFNSIYSFAQIQQIAFAERKGNANTCAVCSADNAHRMQQIKITEPVEDNKDKIILSAKAQRLPAITTRIVDGAVKKMATILAKNIVDDNWQNIKQVLSAKHQLHIPIITESNAFEFEPALADVKGKSLKDRRKKALERISPENIFKDKNNRIKEFAKGISAYSGANLTDGDFDGAKEELDHIIPRSHKKYGTLNDEANLICVTRGDNKNKGNRIFCLRDLANNYKLKQFETTDDLEIEKKIADTIWDANKKDFKFGNYRSFINLTPQEQKAFRHALFLADENPIKQAVIRAINNRNRTFVNGTQRYFAEVLANNIYLRAKKENLNTDKISFDYFGIPTIGNGRGIAEIRQLYEKVDSDIQAYAKGDKPQASYSHLIDAMLAFCIAADEHRNDGSIGLEIDKNYSLYPLDKNTGEVFTKDIFSQIKITDNEFSDKKLVRKKATEGFNTHRQMTRDGIYAENYLPILIHKELDEVRKGYTWKNSEEIKIFKGKKYDIQQLNNLLYCLKFVDKPISIDIQISTLEELRNILTTNNIAATAEYYYINLKTQKLHEYYIENYNTALGYKKYTKEMEFLRSLAYRSERVKIKSIDDVKQVLDKDSNFIIGKITLPFKKEWQRLYREWQNITIKDDYEFLKSFFNVKSITKLHKKVRKDFSLPISTNEGKFLVKRKTWDNNFIYQILNDSDSRVDGTKPFIPAFDISKNEIVEAIIDSFTSKNIFWLPKNIELQKVDNKNIFAIDTSKWFEVETPSDLRDIGVATIQYKIDNNSRPKVRVKLDYVIDDDSKINYFTNHSLLKSRYPDKVLEILKQSTIIEFESSGFNKTIKEMLGMTLAGIYNETSNN

SEQ ID NO: 228 - protein, 1629 aa, Francisella novicida
  Francisella novicida FTG
MNFKILPIAIDLGVKNTGVFSAFYQKGTSLERLDNKNGKVYELSKDSYTLLMNNRTARRHQRRGIDRKQLVKRLFKLIWTEQLNLEWDKDTQQAISFLFNRRGFSFITDGYSPEYLNIVPEQVKAILMDIFDDYNGEDDLDSYLKLATEQESKISEIYNKLMQKILEFKLMKLCTDIKDDKVSTKTLKEITSYEFELLADYLANYSESLKTQKFSYTDKQGNLKELSYYHHDKYNIQEFLKRHATINDRILDTLLTDDLDIWNFNFEKFDFDKNEEKLQNQEDKDHIQAHLHHFVFAVNKIKSEMASGGRHRSQYFQEITNVLDENNHQEGYLKNFCENLHNKKYSNLSVKNLVNLIGNLSNLELKPLRKYFNDKIHAKADHWDEQKFTETYCHWILGEWRVGVKDQDKKDGAKYSYKDLCNELKQKVTKAGLVDFLLELDPCRTIPPYLDNNNRKPPKCQSLILNPKFLDNQYPNWQQYLQELKKLQSIQNYLDSFETDLKVLKSSKDQPYFVEYKSSNQQIASGQRDYKDLDARILQFIFDRVKASDELLLNEIYFQAKKLKQKASSELEKLESSKKLDEVIANSQLSQILKSQHTNGIFEQGTFLHLVCKYYKQRQRARDSRLYIMPEYRYDKKLHKYNNTGRFDDDNQLLTYCNHKPRQKRYQLLNDLAGVLQVSPNFLKDKIGSDDDLFISKWLVEHIRGFKKACEDSLKIQKDNRGLLNHKINIARNTKGKCEKEIFNLICKIEGSEDKKGNYKHGLAYELGVLLFGEPNEASKPEFDRKIKKFNSIYSFAQIQQIAFAERKGNANTCAVCSADNAHRMQQIKITEPVEDNKDKIILSAKAQRLPAIPTRIVDGAVKKMATILAKNIVDDNWQNIKQVLSAKHQLHIPIITESNAFEFEPALADVKGKSLKDRRKKALERISPENIFKDKNNRIKEFAKGISAYSGANLTDGDFDGAKEELDHIIPRSHKKYGTLNDEANLICVTRGDNKNKGNRIFCLRDLADNYKLKQFETTDDLEIEKKIADTIWDANKKDFKFGNYRSFINLTPQEQKAFRHALFLADENPIKQAVIRAINNRNRTFVNGTQRYFAEVLANNIYLRAKKENLNTDKISFDYFGIPTIGNGRGIAEIRQLYEKVDSDIQAYAKGDKPQASYSHLIDAMLAFCIAADEHRNDGSIGLEIDKNYSLYPLDKNTGEVFTKDIFSQIKITDNEFSDKKLVRKKAIEGFNTHRQMTRDGIYAENYLPILIHKELNEVRKGYTWKNSEEIKIFKGKKYDIQQLNNLVYCLKFVDKPISIDIQISTLEELRNILTTNNIAATAEYYYINLKTQKLHEYYIENYNTALGYKKYSKEMEFLRSLAYRSERVKIKSIDDVKQVLDKDSNFIIGKITLPFKKEWQRLYREWQNTTIKDDYEFLKSFFNVKSITKLHKKVRKDFSLPISTNEGKFLVKRKTWDNNFIYQILNDSDSRVDGTKPFIPAFDISKNEIVEAIIDSFTSKNIFWLPKNIELQKVDNKNIFAIDTSKWFEVETPSDLRDIGVATIQYKIDNNSRPKVRVKLDYVIDDDSKINYFTNHSLLKSRYPDKVLEILKQSTTIEFESSGFNKTIKEMLGMTLAGIYNETSNN

SEQ ID NO: 229 - protein, 1629 aa, Francisella novicida
  Francisella novicida GA99-3548
MNFKILPIAIDLGVKNTGVFSAFYQKGTSLERLDNKNGKVYELSKDSYTLLMNNRTARRHQRRGIDRKQLVKKLFKLIWTEQLNLEWDKDTQQAISFLFNRRGFSFITDGYSPEYLNIVPEQVKAILMDIFDDYNGEDDLDSYLKLATEQESKISEIYNKLMQKILEFKLRKLCTDIKDDKVSTKTLKEITSYEFELLADYLANYSESLKTQKFSYTDKQGNLKELSYYHHDKYNIQEFLKRHATINDEILDTLLTDDLDIWNFNFEKFDFDKNEEKLQNQEDKDHTQAHLHHFVFAVNKIKSEMASGGRHRGQYFQEITNVLDENNHQEGYLKNFCENLHNKKYSNLSVKNLVNLIGNLSNLELKPLRKYFNDKIHAKADHWDEQKFTETYCHWILGEWRVGLKDQDKKEGAKYSYKDLCNELKQKVTNAGLIDFLLELDPCRTIPPYLDNNNRKPPKCQSLILNPKFLDNQYPNWQQYLQELKKLQIIQDYLESFETDLKVLKSSKDQPYFVEYKSSNQQIASGQRDYKDLDARILQFIFDRVKASDELLLNEIYFQAKKLKQKASSELEKLESSKKLDEVIANSQLSKILKSQHTNGIFEQGTFLHLVCKYYKQRQRARDSRLYIMPEYRYDKKLDKYNNTGRFDDDNQLLTYCNHKPRQKRYQLLNDLAGVLQVSPNFLKDKIGSDDDLFISKWLVEHIRGFKKACEDSLKIQKDNRGLLNHKINIARNTKGKCEKEIFNLICKIEGSEDKKGNYKHGLAYELGVLLFGEPNEASKPEFDRKIKKFNSIYSFAQIQQIAFAERKGNANTCAVCSADNAHRMQQIKITEPVEDNKDKIILSAKAQRLPAIPTRIVDGAVKKMATILAKNIVDDNWQNIKQVLSAKHQLHIPIITESNAFEFEPALADVKGKSLKDRRKKALERISPENIFKDKNNRIKEFAKGISAYSGANLTDGDFDGAKEELDHIIPRSHKKYGTLNDEANLICVTRDDNKNKGNRIFCLHDLANNYKLKQFETTDDLEIEKKIADTIWDASKKDFKFGNYRSFINLTPQEQKAFRHALFLADENPIKQAVIRAINNRNRTFVNGTQRYFAEVLANNIYLRAKKENLNTDKISFDYFGIPTIGNGRGIAEIRQLYEKVDSDIQVYAKGDKPQASYSHLIDAMLAFCIAADEHRNDGSIGLEIDKNYSLYPLDKNTGEVFTKDIFSQIKITDNEFSDKKLVRKKATEGFNTHRQMTRDGIYAENYLPILIHKELDEVRKGYTWKNSEEIKIFKGKKYDIQQLNNLLYCLKFVDKPISIDIQISTLEELRNILTTNNIAATAEYYYINLKTQKLHEYYIENYNTALGYKKYTKEMEFLRSLAYRSERVKIKSIDDVKQVLDKDSNFIIGKITLPFKKEWQRLYREWQNTTIKDDYEFLKSFFNVKSITKLHKKVRKDFSLPISTNEGKFLVKRKTWDNNFIYQILNDSDSRVDGTKPFIPAFDISKNEIVEAIIDSFTSKNIFWLPKNIELQKVDNKNIFAIDTSKWFEVETPSDLRDIGVATIQYKIDNNSRPKVRVKLDYVIDDDSKINYFTNHSLLKSRYPDKVLEILKQSTIIEFESSGFNKTIKEMLGMTLAGIYNETSNN

SEQ ID NO: 230 - protein, 1629 aa, Francisella tularensis; identical to SEQ ID NO: 30

SEQ ID NO: 231 - protein, 1629 aa, Francisella novicida
  Francisella novicida GA99-3549
MNVKILPIAIDLGVKNTGVFSAFYQKGTSLERLDNKNGKVYELSKDSYTLLMNNRTARRHQRRGIDRKQLVKRLFKLIWTEQLNLEWDKDTQQAISFLFNRRGFSFITDGYSPEYLNIVPEQVKAILMDIFDDYNGEDDLDSYLKLATEQESKISEIYNKLMQKILEFKLRKLCTDIKDDKVSTKTLKEITSYEFELLADYLANYSEILKTQKFSYTDKQGNLKELSYYHHDKYNIQEFLKRHATINDEILDTLLTDDLDIWNFNFEKFDFDKNEEKLQNQEDKDHTQAHLHHFVFAVNKIKSEMASGGRHRGQYFQEITNVLDENNHQEGYLKNFCENLHNKKYSNLSVKNLVNLIGNLSNLELKPLRKYFNDKIHAKADHWDEQKFTETYCHWILGEWRVGVKDQDKKDGAKYSYKDLCNELKQKVTKAGLVDFLLELDPCRTIPPYLDNNNRKPPKCQSLILNPKFLDNQYPNWQQYLQELKKLQSIQNYLESFETDLKVLKSSKDQPYFVEYKSSNQQIASGQRDYKDLDARILQFIFDRVKASDELLLNEIYFQAKKLKQKASSELEKLESSKKLDEVIANSQLSQILKSQHTNGIFEQGTFLHLVCKYYKQRQRARDSRLYIMPEYRYDKKLDKYNNTGRFDDDNQLLTYCNHKPRQKRYQLLNDLAGVLQVSPNFLKDKIGSDDDLFISKWLVEHIRGFKKACEDSLKIQKDNRGLLNHKINIARNTKGKCEKEIFNLICKIEGSEDKKGNYKHGLAYELGVLLFGEPNEASKPEFDRKIKKFNSIYSFAQIQQIAFAERKGNANTCAVCSADNAHRMQQIKITEPVEDNKDKIILSAKAQRLPAIPTRIVDGAVKKMATILAKNIVDDNWQNIKQVLSAKHQLHIPIITESNAFEFEPALADVKGKSIKDRRKKALERISPENIFKDKNNRIKEFAKGISAYSGDNLASGDFDGAKEELDHIIPRSHKKYGTLNDEANLICVTRDDNKNKGNRIFCLHDLANNYKLKQFETTDDLEIEKKIADTIWDASKKDFKFGNYRSFINLTPQEQKAFRHALFLADENPIKQAVIRAINNRNRTFVNGTQRYFAEVLANNIYLRAKKENLNTDKISFDYFGIPTIGNGRGIVEIRQLYEKVDSDIQAYAKGDKPQASYSHLIDAMLAFCIAADEHRNDGSIGLEIDKNYSLYPLDKNTGEVFTKDIFSQIKITNNEFSDKKLVRKKATEGFNTHRQMTRDGIYAENYLPILIHKELDEVRKGYTWGNSEELKIHKGKKYDIQQLNNLVYCLKFIDKSISIDIQISTLEELRNILTTNNIATTAEYYYINLKTQKLHEYYIENYNTALGYKKYTKEMEFLRSLAYRSERVKIKSIDDVKQVLDKDSNFIIGKITLPFKKEWQRLYREWQNTTIKDDYEFLKSFFNVKSITKLHKKVRKDFSLPISTNEGKFLVKRKTWDNNFIYQILNDSDSRVDGTKPFIPAFDISKNEIVEAIIDSFTSKNIFWLPKNIELQKVDNKNIFAIDTSKWFEVETPSDLRDIGVATIQYKIDNNSRPKVRVKLDYVIDDDSKINYFTNHSLLKSRYPDKVLEILKQSTIIEFESSGFNKTIKEMLGMTLAGIYNETSNN

SEQ ID NO: 232 - protein, 1323 aa, Fructobacillus fructosus
  Fructobacillus fructosus KCTC 3544
MVYDVGLDIGTGSVGWVALDENGKLARAKGKNLVGVRLFDTAQTAADRRGFRTTRRRLSRRKWRLRLLDELFSAEINEIDSSFFQRLKYSYVHPKDEENKAHYYGGYLFPTEEETKKFHRSYPTIYHLRQELMAQPNKRFDIREIYLAIHHLVKYRGHFLSSQEKITIGSTYNPEDLANAIEVYADEKGLSWELNNPEQLTEIISGEAGYGLNKSMKADEALKLFEFDNNQDKVAIKTLLAGLTGNQIDFAKLFGKDISDKDEAKLWKLKLDDEALEEKSQTILSQLTDEEIELFHAVVQAYDGFVLIGLLNGADSVSAAMVQLYDQHREDRKLLKSLAQKAGLKHKRFSEIYEQLALATDEATIKNGISTARELVEESNLSKEVKEDTLRRLDENEFLPKQRTKANSVIPHQLHLAELQKILQNQGQYYPFLLDTFEKEDGQDNKIEELLRFRIPYYVGPLVTKKDVEHAGGDADNHWVERNEGFEKSRVTPWNFDKVFNRDKAARDFIERLTGNDTYLIGEKTLPQNSLRYQLFTVLNELNNVRVNGKKFDSKTKADLINDLFKARKTVSLSALKDYLKAQGKGDVTITGLADESKFNSSLSSYNDLKKTFDAEYLENEDNQETLEKIIEIQTVFEDSKIASRELSKLPLDDDQVKKLSQTHYTGWGRLSEKLLDSKIIDERGQKVSILDKLKSTSQNFMSIINNDKYGVQAWITEQNTGSSKLTFDEKVNELTTSPANKRGIKQSFAVLNDIKKAMKEEPRRVYLEFAREDQTSVRSVPRYNQLKEKYQSKSLSEEAKVLKKTLDGNKNKMSDDRYFLYFQQQGKDMYTGRPINFERLSQDYDIDHIIPQAFTKDDSLDNRVLVSRPENARKSDSFAYTDEVQKQDGSLWTSLLKSGFINRKKYERLTKAGKYLDGQKTGFIARQLVETRQIIKNVASLIEGEYENSKAVAIRSEITADMRLLVGIKKHREINSFHHAFDALLITAAGQYMQNRYPDRDSTNVYNEFDRYTNDYLKNLRQLSSRDEVRRLKSFGFVVGTMRKGNEDWSEENTSYLRKVMMFKNILTTKKTEKDRGPLNKETIFSPKSGKKLIPLNSKRSDTALYGGYSNVYSAYMTLVRANGKNLLIKIPISIANQIEVGNLKINDYIVNNPAIKKFEKILISKLPLGQLVNEDGNLIYLASNEYRHNAKQLWLSTTDADKIASISENSSDEELLEAYDILTSENVKNRFPFFKKDIDKLSQVRDEFLDSDKRIAVIQTILRGLQIDAAYQAPVKIISKKVSDWHKLQQSGGIKLSDNSEMIYQSATGIFETRVKISDLL

SEQ ID NO: 233 - protein, 1374 aa, Fusobacterium nucleatum
  Fusobacterium nucleatum subsp. vincentii ATCC 49256
MKKQKFSDYYLGFDIGTNSVGWCVTDLDYNVLRFNKKDMWGSRLFDEAKTAAERRVQRNSRRRLKRRKWRLNLLEEIFSDEIMKIDSNFFRRLKESSLWLEDKNSKEKFTLFNDDNYKDYDFYKQYPTIFHLRDELIKNPEKKDIRLIYLALHSIFKSRGHFLFEGQNLKEIKNFETLYNNLISFLEDNGINKSIDKDNIEKLEKIICDSGKGLKDKEKEFKGIFNSDKQLVAIFKLSVGSSVSLNDLFDTDEYKKEEVEKEKISFREQIYEDDKPIYYSILGEKIELLDIAKSFYDFMVLNNILSDSNYISEAKVKLYEEHKKDLKNLKYIIRKYNKENYDKLFKDKNENNYPAYIGLNKEKDKKEVVEKSRLKIDDLIKVIKGYLPKPERIEEKDKTIFNEILNKIELKTILPKQRISDNGTLPYQIHEVELEKILENQSKYYDFLNYEENGVSTKDKLLKTFKFRIPYYVGPLNSYHKDKGGNSWIVRKEEGKILPWNFEQKVDIEKSAEEFIKRMTNKCTYLNGEDVIPKDSFLYSEYIILNELNKVQVNDEFLNEENKRKIIDELFKENKKVSEKKFKEYLLVNQIANRTVELKGIKDSFNSNYVSYIKFKDIFGEKLNLDIYKEISEKSILWKCLYGDDKKIFEKKIKNEYGDILNKDEIKKINSFKFNTWGRLSEKLLTGIEFINLETGECYSSVMEALRRTNYNLMELLSSKFTLQESIDNENKEMNEVSYRDLIEESYVSPSLKRAILQTLKIYEEIKKITGRVPKKVFIEMARGGDESMKNKKIPARQEQLKKLYDSCGNDIANFSIDIKEMKNSLSSYDNNSLRQKKLYLYYLQFGKCMYTGREIDLDRLLQNNDTYDIDHIYPRSKVIKDDSFDNLVLVLKNENAEKSNEYPVKKEIQEKMKSFWRFLKEKNFISDEKYKRLTGKDDFELRGFMARQLVNVRQTTKEVGKILQQIEPEIKIVYSKAEIASSFREMFDFIKVRELNDTHHAKDAYLNIVAGNVYNTKFTEKPYRYLQEIKENYDVKKIYNYDIKNAWDKENSLEIVKKNMEKNTVNITRFIKEEKGELFNLNPIKKGETSNEIISIKPKLYDGKDNKLNEKYGYYTSLKAAYFIYVEHEKKNKKVKTFERITRIDSTLIKNEKNLIKYLVSQKKLLNPKIIKKIYKEQTLIIDSYPYTFTGVDSNKKVELKNKKQLYLEKKYEQILKNALKFVEDNQGETEENYKFIYLKKRNNNEKNETIDAVKERYNIEFNEMYDKFLEKLSSKDYKNYINNKLYTNFLNSKEKFKKLKLWEKSLILREFLKIFNKNTYGKYEIKDSQTKEKLFSFPEDTGRIRLGQSSLGNNKELLEESVTGLFVKKIKL

SEQ ID NO: 234 - protein, 1367 aa, Fusobacterium sp.
  Fusobacterium sp. 1_1_41FAA
MKKQQFSDYYLGFDIGTNSVGWCVTDFNYNVLRFNKKDMWGSRLFDEAKTAAERRVQRNSRRRLKRRKWRLNLLEEIFSDEILKIDSNFFRRLKESSLWLEDKSSKEKFTLFNDDNYKDYDFYKQYPTIFHLRNELIKNPEKKDIRLVYLALHSIFKSRGHFLFEGQNLKDIKNFETLYNNLMAFLEDNDIYKNIDSSYIGNLENIICDSKKGLKDKEKEFKEIFNSDKQLVGFFKLSVGSSVSLNDLFDTDEYKKGEVEKEKISFREQIYEDDKPIYYSILGEKIEFLDIAKSFYDFMVLNNILADSQYISEAKVKLYDEHKRDLKNLKYIIRKYNKENYDKLFKDKNESNYSAYIGLNKEKGKKEVIEKSRLKIDDFAKIIKGYLPKAEKIDEKDRSIFNEILDKIELKTILPKQRISDNGTLPYQIHEAELEKILENQAKYYDFLNHEENGISTKDKLLMTFKFRIPYYVGPLNSYHKNKGGNSWIVRKEEGKILPWNFEQKVDIEKSAEEFIKRMTNKCTYLNGEDVIPKDSFLYSEYIILNELNKVQVNDEFLNKEIKKKIIEDLFKKSKKISEKNFREYLLVNQITNKTVELKGVKDAFNSNYVSYIKFKDIFGDKLNLDIYKEISEKSILWKCLYGDDKKIFEKKIKSVYGDILTKDEIKKINSFKFNTWGRLSEKLLTEIEFIDLETGECYSSVMDALRRTNYNLMELLSSKFTLQENIDNENKEVSEFSYRDLVEESYVSPSLKRAILQTLKIYEEIRKITGRIPKKVFIEMARGGDETMKNKKIPARQEQLKKLYDSCGKDISNFSIDIKEMKNSLNSYDNNSLRQKKLYLYYLQFGKCMYTGKEIDLNRLLQNNDTYDIDHIYPRSKVIKDDSFDNLVLVLKNENAEKSNEYPLKKEIQEKMKSFWKFLKEKNFISDEKYKRLTGKDEFELRGFMARQLVNVRQTTKEAGKILQQIEPEIKIVYSKAEIASSFREMFDFIKVRELNDTHHAKDAYLNIVAGNVYNTKFTEKPYRYLQEIKENYDVKKIYNYDIKNAWDKEKSLEIVKKNMEKNTVNITRFIKEEKGQLFDLNPIRKGETSNEIIAIKPKFYEGSTEKLNEKYGYYKSLNPAYFIYVEHKEKNKIIRSFERVNLVDVNKIKDEKSLIKYLIENKGLIEPKVIKKVYKRQVILINNFPYSIVALDSNKLMDFENLKPLFLERKYEKILKNAIKFLEDNQGKTEEYYKFLYLKKKDRNEKNETIDSVKERYNIEFNEMYDKFLEKLDSKDYKNYINNKKYSELVNVKEKFIKLNLFDKAFTLKSFLDLFNRKTMADFSKVGLTKYLGKIQKISSNVLSKNELHLLEESVTGLFVKKIKL

SEQ ID NO: 235 - protein, 1367 aa, Fusobacterium sp.
  Fusobacterium sp. 3_1_27
MKKQKFSDYYLGFDIGTNSVGWCVTDLDYNVLRFNKKDMWGSRLFDEAKTAAERRVQRNSRRRLKRRKWRLNLLEEIFSDEIMKIDSNFFRRLKESSLWLEDKNSKEKFTLFNDDNYKDYDFYKQYPTIFHLRDELIKNPEKKDIRLIYLALHSIFKSRGHFLFEGQNLKEIKNFETLYNNLISFLEDNGINKSIDKDNIKKLEKIICDSGKGLKDKEKEFKEIFNSDKQLVAIFKLSVGSSVSLNDLFDTDEYKKEEVEKEKISFREQIYEDDKPIYYSILGEKIELLDIAKSFYDFMVLNNILSDSNYISEAKVKLYEEHKKDLKNLKYIIRKYNKENYDKLFKDKNENNYPAYIGLNKEKGKKEVVEKSGLKIDDLIKVIKGYLPKPERIEEKDKIIFNEILNKIELKTILPKQRISDNGTLPYQIHEVELEKILENQSKYYDFLNYEENGVSTKDKLLKTFKFRIPYYVGPLNSYHKDKGGNSWIVRKEEGKILPWNFEQKVDIEKSAEEFIKRMTNKCTYLNGEDVIPKDSFLYSEYIILNELNKVQVNDEFLNEENKRKIIDELFKENKKVSEKKFKEYLLVNQIANRTVELKGIKDSFNSNYVSYIKFKDIFGEKLNLDIYKEISEKSILWKCLYGDDKKIFEKKIKNEYGDILNKDEIKKINSFKFNTWGRLSEKLLTGIEFINLETGECYSSVMEALRRTNYNLMELLSSKFTLQESIDNGNKEMNEVSYRDLIEESYVSPSLKRAILQTLKIYEEIKKITGRVPKKVFIEMARGGDETMKNKKIPARQEQLKKLYDSCGNDIANFSIDIKKMKSSLSSYDNNSLRQKKLYLYYLQFGKCMYTGREIDLDRLLQNNDTYDIDHIYPRSKVIKDDSFDNLVLVLKNENAEKSNEYPVKKEIQEKMKSFWRFLKEKNFISDEKYKRLTGKDDFELRGFMARQLVNVRQTTKEVGKILQQIEPEIKIVYSKAEIASSFREMFDFIKVRELNDTHHAKDAYLNIVAGNVYNTKFTEKPYRYLQEIKENYDVKKIYNYDIKNAWDKENSLEIVKKNMKKNTVNITRFIKEEKGQLFDLNPIKKGETSNEIISIKPKLYNGKEEKLNEKYGYYKSLNPAYFLYVEHKEKNKRIKSFERVNLVDVNNIKDEKSLVKYLIENKKLVEPRLIKKVYKRQVILINDYPYSIVALDSNKLMDFENLKPLFLENKYEKILKNVIKFLEDNQGKSEENYKFIYLKKKDRYEKNETLESVKDRYNLEFNEMYDKFLEKLDSKDYKNYINNKKYKNLLDVKEKFIKLNLFDKAFTLKSFLDLFNRKTMADFSKVGLTKYLGKIQKISSNVLSKNELYLLEESVTGLFVKKIKL

SEQ ID NO: 236 - protein, 1367 aa, Fusobacterium sp.
  Fusobacterium sp. 3_1_36A2
MKKQKFSDYYLGFDIGTNSVGWCVTDLDYNVLRFNKKDMWGSRLFDEAKTAAERRVQRNSRRRLKRRKWRLNLLEEIFSDEIMKIDSNFFRRLKESSLWLEDKNSKEKFTLFNDDNYKDYDFYKQYPTIFHLRDELIKNPEKKDIRLIYLALHSIFKSRGHFLFEGQNLKEIKNFETLYNNLISFLEDNGINKSIDKDNIKKLEKIICDSGKGLKDKEKEFKEIFNSDKQLVAIFKLSVGSSVSLNDLFDTDEYKKEEVEKEKISFREQIYEDDKPIYYSILGEKIELLDIAKSFYDFMVLNNILSDSNYISEAKVKLYEEHKKDLKNLKYIIRKYNKENYDKLFKDKNENNYPAYIGLNKEKGKKEVVEKSGLKIDDLIKVIKGYLPKPERIEEKDKTIFNEILNKIELKTILPKQRISDNGTLPYQIHEVELEKILENQSKYYDFLNYEENGVSTKDKLLKTFKFRIPYYVGPLNSYHKDKGGNSWIVRKEEGKILPWNFEQKVDIEKSAEEFIKRMTNKCTYLNGEDVIPKDSFLYSEYIILNELNKVQVNDEFLNEENKRKIIDELFKENKKVSEKKFKEYLLVNQIANRTVELKGIKDSFNSNYVSYIKFKDIFGEKLNLDIYKEISEKSILWKCLYGDDKKIFEKKIKNEYGDILNKDEIKKINSFKFNTWGRLSEKLLTGIEFINLETGECYSSVMEALRRTNYNLMELLSSKFTLQESIDNGNKEMNEVSYRDLIEESYVSPSLKRAILQTLKIYEEIKKITGRVPKKVFIEMARGGDETMKNKKIPARQEQLKKLYDSCGNDIANFSIDIKKMKSSLSSYDNNSLRQKKLYLYYLQFGKCMYTGREIDLDRLLQNNDTYDIDHIYPRSKVIKDDSFDNLVLVLKNENAEKSNEYPVKKEIQEKMKSFWRFLKEKNFISDEKYKRLTGKDDFELRGFMARQLVNVRQTTKEVGKILQQIEPEIKIVYSKAEIASSFREMFDFIKVRELNDTHHAKDAYLNIVAGNVYNTKFTEKPYRYLQEIKENYDVKKIYNYDIKNAWDKENSLEIVKKNMKKNTVNITRFIKEEKGQLFDLNPIKKGETSNEIISIKPKLYNGKEEKLNEKYGYYKSLNPAYFLYVEHKEKNKRIKSFERVNLVDVNNIKDEKSLVKYLIENKKLVEPRLIKKVYKRQVILINDYPYSIVALDSNKLMDFENLKPLFLENKYEKILKNVIKFLEDNQGKSEENYKFIYLKKKDRYEKNETLESVKDRYNLEFNEMYDKFLEKLDSKDYKNYINNKKYKNLLDVKEKFIKLNLFDKAFTLKSFLDLFNRKTMADFSKVGLTKYLGKIQKISSNVLSKNELYLLEESVTGLFVKKIKL

SEQ ID NO: 237 - protein, 1391 aa, Galbibacter sp.
  Galbibacter sp. ck-I2-15
MKTILGLDLGTNSIGWALVKEAENENEVSDIIKLGVRVNPLTVDELTNFEGGKAYSNNAERTLKRGARRNLQRYKLRRENLIEILLKNGLINKDTALTEVGKETTHQTLKLRSKSANEKVSLEDLAKILLSINKKRGYKSSRKVNAEDDGVAIDGMEVAKLLYDENMTPGEYVLRLLESGKKHLPDFYRSDLQEEFNLVWKKQSEFYPLILTKELFFELHGKNKSQTWAICKEPLGIVGVKLKGSAKEQKFARYRLRKEALTQQIELEHLAIVLQDINNDSNKSSGYLGAISDRSKELFFNKETVGQYQYKQLQKDPNTSLKNQVFYRQDYLDEFEVIWRNQAKFYPQLTNELKQEIRDVVIFYQRKLKSQKNLISFCQFESTQQNYVEKETGKTKIRTIGRRVIPRSSPLFQEFKIWQSLNNLKFVNSESNQIIQFIELEDDVKKVVFDELNLRGDLKPNQVLKILSKYMKIGKLTQWKCNLEEIEGNRTNSALYNVFQMIAEEEGYGFNWGKKSALEIKSELKAIFSSIGINDSILDFDFSKKLDQQLSYQLWHLLYSAEEGNSKITEEDKFTYGNTGVALKKKLHLKFGFKPEYSTLISNLRFTSDYGNLSSKAISKILPFLRDGSDYSKACQYAGYNHSNSLSADELDNRELKPKLELLKKNSLRNPVVEKILNQMVNVVNQVIDNYGKPDEVRIELARELKKSAKERSQMTKNISDATRRNAEIKKYLSKEFGIPNPTKGDVIRYRLWEELASNGYKDLFRDKYIPKEKLFSNEIDIEHIIPKALLFDDSFSNKTLAFKVDNLKKADRTAFDFMSTDFSKDVDSYIGRIETLHKDGKISSSKYKKLMIPKSKLVDGFIERDLRNTQYIAKQARKMLLEVFKTVVPTTGKITDKLREDWDLINVMKELNFPKYKALGLTKKIERFDVGSEKIKSINVIEGWSKRNDHRHHAMDALAVAFTTHNHIQYLNYLNARKDIHHEMHGTIKSIENQIIGKDVMGKRRFIPPISDLRMKAKLQIESILISFKNKNKVVTWSVNKTKLKGKDNYNKRRQLTPRGQLHKETVYGKIKLIDPKPLKLNNKFTLVRASMIVDKVHREIVLQHLSKYDNNSEVAFDSKTIKIDPILIEGIGLKEVVCYEDVFKIRKKISGDNFKNEKHLEKVIDEKVKQILKDRVIKFQGNFKEAFSNLEENPIWLNKSKGIAVKSVAIKGVNNAESLHEGKDHFGDQILDKNKKQIPVDFVSTGNNHHVGIYEDKDGNLQERVVSFFEAVTRVNEGLPIIDKTYNSDIGWKFKFTMKQNEMFVFPSDDFDPNEFDLTDGKNAAKISPNLYRVQKIATKNYMFRHHLETVVTNDLEFTYKSIRSTGWLRNLVKVRINHLGEIVYVGEY

SEQ ID NO: 238 - protein, 1025 aa, Unknown
  Description of Unknown: gamma proteobacterium HdN1 polypeptide
MGGYMPQLMRYRLALDIGSTSIGWAMIRLSMQNEPIAIIRMGVRIFSDGRNPKDGSSLAVTRRVARQMRRRRDRLLKRKTRLLNALVQKKFFPEDADARKALVVLNPYELRKEGLYRQLSGPEFGRALFHISQRRGFLSNRKTDKKDNDSSVLKKAIVDLRQQLEVENCQTIGEWLFKQQQSGKSVRARLRGKTQKDKAYDFYIDRAMIAHEFDTLWVSQAKYDPLLFNEDARAILRDILLYQRPLKPVKPGRCTLIPDESRAPLALPLTQQARIYQELNHLRITTPALGAQALTVAQRNTIAALLEKSDVTFVKIAKALGLTSTTEFNLQDIKRDRLKGNATAIILARNQYFGRRWHDFNADLQNLIVDKLVNEGSETALIEWLKANTDVDESAAERVSGVTLPEGYGSLSVAALRRLLPALKEDVVVYSEAVKRAGFDSHSALSLIEQTGELYQELPYYGEVLQRHVGFGSGDPNDSPERRFGKIANPTVHIGLNELRKIINALIKRYGNPAEVVVELARDLKLSREKRKEIQEEQKQRQDRNEKRIKDACEILGIDPLVIDRGKRREISQKMQLWDELNPKDAANRRCPYTGDQISIEKLLSAEVEIEHILPFSKTLDDSLNNKTVAMRRANRDKGNRTPYEAFGESLNPDYDYDAILQRASLMPREKRKRFASDGYQQWLRDDKDFLSRALNDTAYLSRIAKEYLTLICPPNSVRAIPGRMTAQLRAMFGLNRLLSEGGIKNREDHRHHAIDAAVIGVTDQGLLQKFSRASARTRELQLSRLVDDMPLPWDTYREHVTRALEHLVVSHKPDHGYQGKMHEDTAWGLRDNGQVTRRVRSEDGGPRQRLLENKNVVKINSTRDFSRHGIDEQGQVNAYKGYVGGSNYCIEIWIDEKGKWNSDVVSTFQAYQIVRELGEKAAWQKLRNPLLSLSAKPLVMRLIIDDVVKMQIAGQNKIMRVVKIAQNGQIFFAEHNEANVDARDKDKNNPFKYISKTAGSLQKAGGIHMAISPIGDARPVRYGR

SEQ ID NO: 239 - protein, 1397 aa, Unknown
  Description of Unknown: gamma proteobacterium HTCC5015 polypeptide
MTKNYISPIAIDLGAKFTGVALYQYLEGADCTQEVAKGLLVDDRGNVTWSQEGRRGKRHQVRGYKRRKMAKRLLWLILDSEYGIKREEVTEPLLKFINGLLNRRGYTYISEEVDEESMNVSPLPFSEMMPDYFNSSAPLLEQLAKLLSDKNKLVRFRAEGKIPSNKNEFKKLLDTALDGKYKDEKKELSEAWGNILIASENVLKSTVDGHKSRSEYLANIKEDIKSNEELEKQISSKEIDGFYNLVGHLSNFQLRLLRKYFNDPNMSGVSYWDEKRLEKYFYQWVQGWHTKGGTDEAEKKNIILKTKGAPLLKTLKSLSADLTIPPYEDQNNRRPPKCQSVLLSDEKLTMHYPKWKEWVGQLVKQNDNAYLNENVTLANALHRIVERSRSIDPYQLRLLISITDAEKRNDLAGYKRLKLSLGSEVDEFLLLVKNIVDETKEAREGLWFETENKLFFKCGKTPPRKEKLKSTLLSAVLGKNLSDDEQSSFIEEFWKSGTPKIERRNVRGWCRLASQVQKTYGVYLKEYGLQQLHKLEAGKKLDDKPLALLYKNSGLIASKIGEALNIEPDEVSRFASPHSLAQIFNIIEGDVAGFNKTCRACTYENIWRMQEEKVESLLTNQLLSEIHGERKVPLKSAMCTRLSADSTRPFDGQMASIIEHIARKIAQHKIAQINDVPKEFSIDIPIIIESNQFSFTAELEEIKRGRGSAKAKKAKELGEKSKAGWVSKTERIKTSSEGICPYTGAPLGGSGEIDHIIPRSLTGRTKKTVFNSEANLIYCSSKGNHDKGNRVYVIEQLNDKYLKKQFSTSDVNLIKKKIKTTIQRFTEGGEKLRSFSELSREDQKAFRHALFVPELKSEVTSLLAVKNITRVNGTQAWLAKKIASLLAEHLDKQGRDYTLSAHQIDPWSVSKQRKMLASAEPIWAKKDPQPAASHVVDAVCTFLEALEQPHTASRLKTISSTSFEKTGWRSALIPDLIKVDALDRRPKYRRYNIGSTSLFKDGIYAERFLPILIDENGLMAGYDIDNSLKAKGADVVFESLSPFLLFKGEEVGAQSLSDWQERIDGRYLYMSIDKVKAFDYLQEKVGEKDIAAELLNSIHFTQRKTELRAKFSDDSGKKMKTLDAIRKSLKLTVTVNEIGKRKEKCGFSGTIGIPAKSAWENLLDEPLLETYWGTKMPPQEIWEKVYRKHFPRNIPNQAHRKVRKDFSLPVVDSVSGGFRVKRKTPNGYNYQLLAIDGYSAVGFKKEGDNVDFKSPALVPQIAESKSVTPISSELVHLDKNEIVYFDEWRKIDISDSDLKQFVSSLELAPGSQNRFYIRFTVDEDQFERHFKSALRVNGIQDLDTVNKTFDWNREIPSLLIPPRSNLFLLETGQKITFEYIANGANAEVKKAYSLRRA

SEQ ID NO: 240 - protein, 1186 aa, Gardnerella vaginalis
  Gardnerella vaginalis 1500E
MEGNISYAIGIDVGLNSVGLAAIRLDNNGEPIRILKAMSVIHDAGIDPNGAKESDTRKAISGVARRVRRLYRQRRRRLQKLDFLLHSLGFPVVENKDLDFSDSFIPWIFRAKLADEYIADEKQRKQMLSVAIRHIARHRGWRNPYQSIKSMTQETEYSEFYNELLKNIEKFAPGVGCEGSTPAQLVRDYLLLQQGKASRRLRITTDEKRKNHPNSLNPILPRKLMQSDNMLEILNIFNVQHIDDKYVREQIINAVFYAKSPRGSAENRVGKDAITGKGKRALKASLAFQKYRIISTISNLRIRENSKERCLTIEEKQSVYKLLTTSTDESSKEKSAEAPLYTWIDVADCLGIERYKLRGVGSQIGDGESVGNRPPMLNSELAIIYANNKSLGKSLLTWWLDANRTQEDKEALIEILSNTVDIEAIHDNPEYQDKYGSAIAFIDSMDETEIAALENISLPDGRAAYSLETLDKLNKQMLETDDDLFEARKKLFNLPNNWRPSEAPIAEPTGNPSVDRVLKIVHRFLISAKNRWGNPERINIEHVRSGFKSKKMANSYKELLDKRTKGKENLKAMMRNSLHLGMSDSISDADIRRYEAVQRQNGQCLYCGSEITYHTCELDHIVPRKGPGSTNTRENLVATCSLCNAQKCNTPFSTWCEQSTYCKNHDISVDSAINRVRAFIFPPNSYDKRGANQFKKEVIARLKQKVGDEAFDNRSIESVAWMANELHRRIDWYYNSQNYQTNNGISDITNKAQTNVGVYAGSLTAIARRMSGIDGKLEFFDGRRKTRFDRRHHAVDASVIAMMTPGIAQILAIKCNLRETQLLQGNKVVPGGIDWKEYPTANDQGYQQYANWSVRMNALLKLLNEEMRADRIAVVNSIRLRYNNSSVHQYKVNALLKLHVGDEIDSGTIRRSSTPALYCALTRNPDYDVNNGLPENPNRAILLHDKKLNADDSITFFKAQAVQLFVREGSAEIGSSTHHLRIYEYFKKLKSGKIKKSYGMIRVFQNDLHRHIHEDLFSCDLPEQSISMRYADTEVAHAVQTGNSNYLGYLVPGDEIIVDFSHVKLSGNIGTFVEFLNKIGANCAAYNHWVVVGTDTEKVLILKPSMISSEGIDKLYSNCKRNNFDYSSYEKSINEILVGKGWRVSVNVLAKYNAETIRRNALGEVRWTSRSHLPISWSWNTGENRE

SEQ ID NO: 241 - protein, 1186 aa, Gardnerella vaginalis
  Gardnerella vaginalis 284V
MEGNISYAIGIDVGLNSVGLAAIRLDDYGEPIRILKAMSVIHDAGIDPNGAKESDTRKAISGVARRVRRLYRQRRRRLQKLDFLLQSLGWPVVENKDLDFSDSFIPWIFRAKLADEYIADEEQRKQMLSVAIRHIARHRGWRNPYQSIKSMMQETEYSEFYNELLKNIEKLAPGVGCEGSTPAQLVRDYLLSQQGKASRRLRITTGGRRKNHPHSLDPVLPRKLMQSDNMLEILNIFNVQHIDDKYVREQIINAVFYAESPRGSAENRVGKDAITGKGKRALKASLAFQKYRIISTISNLRIRENSKERCLTIEEKQNVYKLLTTSIDKSSKRKSAEAPLYTWIDVADCLGIERYKLRGVGSQIGDGESVGNRPPMLNSELAILYANNKSLGQSLITWWLASNRTQEDKEALIEILSNTVDIEAIHDNPEYQDKYGSAIAFIDSMNETEIAALENISLPDGRAAYSLETLDELNKQMLETDDDLFEARKKLFNLPNNWRPAEAPIAEPTGNPSVDRVLKIVHRFLISAKNRWGNPERINIEHVRSGFQSKKMANSYKELLDKRTEGKENLKAMMRNSLHLGTSDSISDADIRRYEAVQRQNGQCLYCGSEITYHTCELDHIVPRKGPGSTNTRENLVATCSSCNAQKCNTPFATWCEQSTYCKNHDISADSAINRVRAFIFPPNSYDKRGANQFKKEVIARLKQKVGDEAFDNRSIESVAWMANELHRRIDWYYNSQNYQTNNGISDISNKAQTNVGVYAGSLTAIARRMSGIDGKLEFFDGRRKTRFDRRHHAVDASVIAMMTPGIAQILAIKCNLRETQLLQGNKVVPGGIDWKEYPTANDQGYQQYANWSVRMNALLKLLNEEMRADRIAVVNSIRLRYSNSSVHQYEVNALLKLHVGDEIDSETIRRSSTPALYCALTRNPDYDVNNGFPENPGRTILLHNKKLNADDSITFFKAQAVQLFVREGSAKIGNSIHHLRIYEYFEKLKSGKIKKSYGMIRVFQNDLHRHIHEDLFSCDLPEQSISMRYADTKVAHAVQTGNANYLGYLVPGDEIIVDFSHITLSENIGKFVEFLNKIGADCTAYRHWVVVGTDTEKVLILKPSMISSEGIDKLYSNCERNNFDYSSYEKSINEILAGKGWRVSVNVLAQYKAATIRRNALGEVRWASRSHLPISWSWDTGENRE

SEQ ID NO: 242 - protein, 1186 aa, Gardnerella vaginalis
  Gardnerella vaginalis 5-1
MEGNISYAIGIDVGLNSVGLAAIRLDNNGEPIRILKAMSVIHDAGIDPNGAKESDTRKAISGVARRVRRLYRQRRRRLQKLDFLLHSLGFPVVENKDLDFSDSFTPWIFRAKLADEYIADEKQRKQMLSVAIRHIARHRGWRNPYQSIKSMTQETEYSEFYNELLKNIEKFAPGVSCEGSTPAQLVRDYLLSQQGKASRRLRITTDDRRKNHPNSLDPVLPRKLMQSDNMLEILNIFNVQHIDNKYVREQIINAVFYAKSPRGSAENRVGKDAITGKGKRALKASLAFQKYRIISTISNLRIRENSKERCLTIEEKQSVYKLLTTSTDEYSKEKSAEAPLYTWIDVADCLGIERYKLRGVGSQIEDGESVGNRPPMLNSELAILYANAKSLKQSLITWWLAANRTQEDKEAFIEILSNTVDIEAIHDNPEYQDKYGSVIAFIDSMDETEIAALENISLPNGRAAYSLETLDKLNKQMLETDDDLFEARKKLFNLPNNWRPSEAPIAEPTGNPSVDRVLKIVHRFLISAKNRWGNPERINIEHVRSGFQSKKMANSYKKLLDKRTEGKENLKAMMRNSLHLGTSDSISDADIRRYEAVQRQNGQCLYCGSEITYHTCELDHIVPRKGPGSTNTRENLVATCSSCNAQKCNTPFATWCEESTYCKNHDISVDSAINRVRAFIFPPNSYDKRGASQFKKEVIARLKQKVGDEAFDNRSIESVAWMANELHRRIDWYYNSQNYQTNNGISDITNKAQTNVGVYAGSLTAIARRMSGIDGKLEFFDGRRKTRFDRRHHAVDASVIAMMTPGIAQILAIKCNLRETQLLQGNKVVPGGIDWKEYPTANDQGYQQYANWSVRMNALLELLNEEMRADRIAVVNSIRLRYSNSSVHKDDVHALLKLHVGDEIDSETIRRASTPALYCALTRNPDYDVNNGLPENTDRTILLHDKKLNADDSITFFKSKAAQLFVREGSVEIGNSIHHLRIYEYFEKLKSGKVKKSYGMIRVFQDDLHRYIHEDLFSCDLPEQSISMRYADTKVAHAVQTGNANYLGYLVPGDEIIVDFSHVKLSGYIGEFVEFLNKIGANCAAYKHWVVAGTDDKTTLILKPSMISSEGIDKLYSNCERNNFDYASYEKSIDKILVDKGWRVSVNVLDQYKAATIRRNALGEPRWASRSHLPISWSWDTGENRE

SEQ ID NO: 243 - protein, 1392 aa, Gemella haemolysans
  Gemella haemolysans ATCC 10379
MANKTWYLGLDIGSASVGWAATDTGYKIIRKNKKRLWGVRLFEEAKTAEDRRGYRSSRRRLARRKWRLNLLEELFTSEVKKVDENFFLRLKESQYHYEDKTHKVPYAIFNDKDYTDKDYYKDYPTIYHLRSKLMTEENPDIRKVFLAIHHIIKNRGHFLLQGQSFKDGNLNNLIKELLELDILHVGFEVTEEVVDKIADISLEKKTSKDKLNDIKELYPKEKQLLEVFRLIFGGKTSLDKLFAIDEYKELDAAIKSVSFKEKIYEEVRHDYEQVLSNYIELLDLAKLVYDSIILSDIKKEGKTLSESKVELFEKHRDDLLKLKNLVKNDSKLSEDKKVELYALIFKEDKDKGTNYVNYIRKSEEGKGCNYEDFKKFLVKELAKLEESSVKTEIIKDLELEQFLPLQRTKDNSVVPYQIHKEELVKILDNAARYHSFLNEKDESGYNVREKVIQLLEFRIPYYVGPLNSSKKAKEGGFAWSVRNTGYENTPVTPWNYSKVIDESASAEKFITNLTNKCTYLKGEDVLPKSSLLYSEFALLNELNALKYDGNRISLEARNTIIEKLFKQQGKKVTKTSIKNLLKAEGYIDGKGEITGIDITVKNDLKSYRDFKKILGNKFNSEHVENIILWITLYGESRKLIKAKIESVYGEVYSKDEITKMSRLVYKDWGRFSRKLLTELVSKKLYNEETGECLNIIGAMRQNNILFMELLADRFDYSKQIVEFNKELQEDVTEIAPEILDDLYVSPAVKRSIWQTVRIVEELKKIIGCAPAKIFVETTRSNQEKKKPTDSRKKQLELAYKAVKKDVKELEKEIGTINFDVLNDRLSSVEPSKLKAKKLYLYYTQLGRCMYSEEPINISELFDNNKYDIDHIYPQSKIKDDSFTNTVLVKRESNAAKTDRYPLGSDIQTPSNRRFWKFLKEKGLISDEKYNRLVRTEEFSDEELSGFIARQLVETSQSVKAVASILGELNPETSICYSKAENVSSFRQNFGKIKKGDRDSKNNDQLIKVREINDYHHAKDAYLNVVVGNVYDTKFTRNVFNFIKDKKDGRKYSLNKVFYENVSDSKTVAWEMDKTIHQVEKVMNNNNIMVTRRTSEQKGGLFDATVYKAKVAAKAKDGVYYPLKTSNSVVKDVAKYGGYTSIGIAYYSIFEYTIVNKKGEEKITRIIPIPIYISQNIKDSTALIEFGKSQIFCRAYEKIKDFKLLYRKLCIGSKININNYQYYIGGKSDERFYYDSAIQVTLDKKSEKYLKILSKYQNWKKENKDGELWENITKENNIELYNKLVEKMNSEIFTKKKSNKYNELNSEEIRNNFIKISVEEQAKVLLEILNLLTNKKSIFDLKSIDIKAARGKISFNLTSLIQFSIIEQSITGFYEKEITIIGDKGNDMENNNS

SEQ ID NO: 244 - protein, 1385 aa, Gemella morbillorum
  Gemella morbillorum M424
MKNKTWYLGLGVGPTSIGWAATDSNYKLLRKNKKRLWGVRLFEEAKTAVDRRTFRAERRRLARRKWRISLLEELFAKEVSKNDPNFFLRLKESKYHFEDKSLMNEYILFNDKDYTDKDYYKEYPTIYHLRLSLTTEENPDIRKVYLAVHSMLKNRGHFLLQGQSFNDSNIDSVIKELLELETVKINFEVTDEVIHSLKKIALEKKNLSDKNNDVKKLYPKEKQLQEIFKLVFGGKTSLDKLYDIEEYKELDNSVKSISFKEKVYEEVRPDYEQILSNYIELLDLAKLVYDSIVLADIKKEGKTISESKVELYNKHKDDLANLKKLVKIDSKLSEDKKKEVYFTIFKEDKEKGTNYVNYTHRSQEGKSCSYEDFKKFLKKELEKLEDSPTKTTILEELDLETFLPLQRTKDNSVVPYQIHKEELVKILDNAAKYHSFLAEKDDSGYSTREKVVQLFEFRIPYYIGPLNAHHNTENGGYSWAIRKKGMESVPVTPWNFKDVIDESASAEAFVNNLKNKCAYLSGEDVLPKNSLLYSEYALLNELNALRYEGNRISVEARDVIVTKLFKEQGKKVTKKTIKELLKTEGFIDGKGEIVGIDNIVKNDLKSYRDFKKILADKFDKERVENIILWITLYGESRKLIKEKITKVYGDFYTVDEIEKMSRLTYKDWGILSRKLLTELVSEKLYNEETGECLNIIGAMRQGTILFMELLADKFDYMSQIKNHNKENKDDITEITPDILENLHASPAVKRSIWQTVRIVEELKTIIGCVPTKIFIETTKRNNAPYKVPTLNRNDLVTKYKTIREHEIFELEKELKNTLDFTLNKNRLINEEPSKLKATKLYLYYTQLGRCMYTGKKIDLGELFDNNNKYDIDHIYPQSKVKDGSFNNIVLVTKASNDMKADVFPLKSKFQTKENKIFWRFLKEKKLITEEKYNRLVRTEEFSNGELTGFITRQLVETSQAIKVISNVLRELNPETTICYSKAENVSSFRQSFGKIKEANRKAENNEKLIRVQEINDYYNAKDAYLSIVVGNVYDVKFTRNVHNFIKNNKDARRYSLNGLFYTDVKNANTIAWEMDKTVHVVEKTMNNNNILITRRTSEQKGALYDATLYKAKVAEKAKEGTYYPLKTTDSKIKDVGKYGGFTKIKIAYYSIFEYTLDGKKGKQKITRIVPIPIYISQNIKDDKALLEYAQTRLPGKDLKIKYRKLCIGSLVKINNFNYYIGGKTNNNFTFDSAVQVILDKDSESYIKELAKYLNWKKENKDGKLWESITEDKNIQLYDSLVKKMNTGIFIRKTPNKYTELLTLEVKNKFINIDIDEQVKLLLEILNLLTNKKFTSKLNEIGITASRGVCSFNLSNQSQFSIIEQSVTGVYEKEKLIIEKKKEGIL

SEQ ID NO: 245 - protein, 1003 aa, Gluconacetobacter diazotrophicus
MIDESLTFGIDLGIGSCGWAVLRRPSAFGRKGVIEGMGSWCFDVPETSKERTPTNQIRRSNRLLRRVIRRRRNRMAAIRRLLHAAGLLPSTDSDALKRPGHDPWELRARGLDKPLKPVEFAVVLGHIAKRRGFKSAAKRKATNISSDDKKMLTALEATRERLGRYRTVGEMFARDPDFASRRRNREGKYDRTTARDDLEHEVHALFAAQRRLGQGFASPELEEAFTASAFHQRPMQDSERLVGFCPFERTEKRAAKLTPSFERFRLLARLLNLRITTPDGERPLTVDEIALVTRDLGKTAKLSIKRVRTLIGLEDNQRFTTIRPEDEDRDIVARTGGAMTGTATLRKALGEALWTDMQERPEQLDAIVQVLSFFEANETITEKLREIGLTLAVLDVLLTALDAGVFAKFKGAAHISTKAARNLLPHLEQGRRYDEACTMAGYDHAASRLSHHGQIVAKTQFNALVTEIGESIANPIARKALIEGLKQIWAMRNHWGLPGSIHVELARDVGNSIEKRREIEKHIEKNTALRARERREVHDLLDLEDVNGDTLLRYRLWKEQGGKCLYTGKAIHIRQIAATDNSVQVDHILPWSRFGDDSFNNKTLCLASANQQKKRSTPYEWLSGQTGDAWNAFVQRIETNKELRGFKKRNYLLKNAKEAEEKFRSRNLNDTRYAARLFAEAVKLLYAFGERQEKGGNRRVFTRPGALTAALRQAWGVESLKKQDGKRINDDRHHALDALTVAAVDEAEIQRLTKSFHEWEQQGLGRPLRRVEPPWESFRADVEATYPEVFVARPERRRARGEGHAATIRQVKERECTPIVFERKAVSSLKEADLERIKDGERNEAIVEAIRSWIATGRPADAPPRSPRGDIITKIRLATTIKAAVPVRGGTAGRGEMVRADVFSKPNRRGKDEWYLVPVYPHQIMNRKAWPKPPMRSIVANKDEDEWTEVGPEHQFRFSLYPRSNIEIIRPSGEVIEGYFVGLHRNTGALIPTPVGPDSYVIA

SEQ ID NO: 246 - protein, 1050 aa, Gluconacetobacter diazotrophicus
MGENMIDESLTFGIDLGIGSCGWAVLRRPSAFGRKGVIEGMGSWCFDVPETSKERTPTNQIRRSNRLLRRVIRRRRNRMAAIRRLLHAAGLLPSTDSDALKRPGHDPWELRARGLDKPLKPVEFAVVLGHIAKRRGFKSAAKRKATNISSDDKKMLTALEATRERLGRYRTVGEMFARDPDFASRRRNREGKYDRTTARDDLEHEVHALFAAQRRLGQGFASPELEEAFTASAFHQRPMQDSERLVGFCPFERTEKRAAKLTPSFERFRLLARLLNLRITTPDGERPLTVDEIALVTRDLGKTAKLSIKRVRTLIGLEDNQRFTTIRPEDEDRDIVARTGGAMTGTATLRKALGEALWTDMQERPEQLDAIVQVLSFFEANETITEKLREIGLTLAVLDVLLTALDAGVFAKFKGAAHISTKAARNLLPHLEQGRRYDEACTMAGYDHAASRLSHHGQIVAKTQFNALVTEIGESIANPIARKALIEGLKQIWAMRNHWGLPGSIHVELARDVGNSIEKRREIEKHIEKNTALRARERREVHDLLDLEDVNGDTLLRYRLWKEQGGKCLYTGKAIHIRQIAATDNSVQVDHILPWSRFGDDSFNNKTLCLASANQQKKRSTPYEWLSGQTGDAWNAFVQRIETNKELRGFKKRNYLLKNAKEAEEKFRSRNLNDTRYAARLFAEAVKLLYAFGERQEKGGNRRVFTRPGALTAALRQAWGVESLKKQDGKRINDDRHHALDALTVAAVDEAEIQRLTKSFHEWEQQGLGRPLRRVEPPWESFRADVEATYPEVFVARPERRRARGEGHAATIRQVKERECTPIVFERKAVSSLKEADLERIKDGERNEAIVEAIRSWIATGRPADAPPRSPRGDIITKIRLATTIKAAVPVRGGTAGRGEMVRADVFSKPNRRGKDEWYLVPVYPHQIMNRKAWPKPPMRSIVANKDEDEWTEVGPEHQFRFSLYPRSNIEIIRPSGEVIEGYFVGLHRNTGALTISAHNDPKSIHSGIGTKTLLAISKYQVDRFGRKSPVRKEVRTWHGEACISPTPPG

SEQ ID NO: 247 - protein, 1371 aa, Gordonibacter pamelaeae
  Gordonibacter pamelaeae 7-10-1-b
MNLRNVESYQVGLDIGTGSVGWAVLDDNGDLCRFKGKPTWGSRVFPTAETAAEARVHRGQRRRYDRRRQRIDLLQRFFADEVAKVDPEFFIRLNQARLHPENRDPAHADYRWPLFNGSNFTEKDYYRQFPTIYHLRAHLLKSDEPADIRLVYLALHNIVKHRGNFLHQDNPSLSARNANVGDAVEALCLALDEWCGAHDVECACDEAALAEALGDASLRPGEKRERAEAALGVEKAHKKLAKAVSSAVVGYAAEFGHVFFAESEGSKFALSNDEKVEAYVCPDEGRDLFDAMRAVHSSYVLMGILSEAQGELLSVCKVGEYERYKRDLETLKSLVRAYGPERYDEFFCGPFYEGTRDYDPGKAQGYTKYNLGASKLSHEDFLKEVQKLLKDIGAQADERYADIERAIEAGAFLRRLKTSDNGTIPYQLHLEEMDAIIERQAAFYPFLAQEKDKLKSLVSFRIPYYVGPLTQKNAARDGKGEARFAWSSRKPGMEDARVYPWNWEDVIDKDQSAEDFIRRMTGTCTYLKGEPVLARCSLDYELFCVLNELAGARWTQDGDKSYRFDAADRLGIVEDLFKKRKRVTYEAAEKWLARTHGPESGKSAGGAYHVSGGQGEDAFESQLSSHYDFCKILGVDELSDADEAMAEDIILWNTVFEDRSILKRKIKLAYGDRLGDAQVRKLCQKRYTGWGRLSGELLRGLRSATDNGPKTIMDILLEGDPNHARRMGAAMNLMEILHDDLLEFQAKIDEHNRERALAVGGMSVDEVTGSPALRRGINQALRVVDEIAGIAGKPPAHIYVEVTRDEGARNKGRRTTSRYRALEAALSSIKAQCADVYAELKERDPRALDDERLTLYFMQCGKCMYSGDALDINKLQTYQVDHILPQSYVKDDSFENKVLVRPDTNQRKGDTLLLDERLIARMRGFWRTLRDAELIGEKKFNNLTRTSVSDEQMKKFVSRQLVETGQMVKQVQQLLQARYPESEVQPVKAGVSHQLRVGCALAKSREINDFHHAHDAYLACQVGRFVQYRHSAVYSEPVKMAAVVKQFIKKQAEDYRRTRELPGSDGFIVSSFMTPGFDVKTGEVFRDAWDAGAEIDRIRRCFDYKDCFISRMPEETHGAFWDATIYSPRAAGKTLSLPLKRGLDPRKYGSYSREQFAYFFVYEAVKPKKKQRVLEFAPVPVRVASALANDPDALEDYARELAEAEGLVFERIRRRKVYKYQQIIVGDSRLYVTGREEVRNARQLAFSQDETKLICRIEQGEECEEGELLDLFRSMQRKYLACAPRLARLMKVAEMEEGFIAATASGKREVLLSLTSIAAAHRNSIDLKPIGRKGSSGQMKITFSKELSTNGILFVDSSVTGMFERRCRLGL

SEQ ID NO: 248 - protein, 1054 aa, Haemophilus parainfluenzae
  Haemophilus parainfluenzae ATCC 33392
MENKNLNYILGLDLGIASVGWAVVEIDEKENPLRLIDVGVRTFERAEVPKTGESLALSRRLARSARRLTQRRVARLKKAKRLLKSENILLSTDERLPHQVWQLRVEGLDHKLERQEWAAVLLHLIKHRGYLSQRKNESKSENKELGALLSGVDNNHKLLQQATYRSPAELAVKKFEVEEGHIRNQQGAYTHTFSRLDLLAEMELLFSRQQHFGNPFASEKLLENLTALLMWQKPALSGEAILKMLGKCTFEDEYKAAKNTYSAERFVWITKLNNLRIQENGLERALNDNERLALMEQPYDKNRLFYSQVRSILKLSDEAIFKGLRYSGEDKKAIETKAVLMEMKAYHQIRKVLEGNNLKAEWAELKANPTLLDEIGTAFSLYKTDEDISAYLAGKLSQPVLNALLENLSFDKFIQLSLKALYKLLPLMQQGLRYDEACREIYGDHYGKKTEENHHFLPQIPADEIRNPVVLRTLTQARKVINGVVRLYGSPARIHIETGREVGKSYKDRRELEKRQEENRKQRENAIKEFKEYFPHFAGEPKAKDILKMRLYKQQNAKCLYSGKPIELHRLLEKGYVEVDHALPFSRTWDDSFNNKVLVLANENQNKGNLTPFEWLDGKHNSERWRAFKALVETSAFPYAKKQRILSQKLDEKGFIERNLNDTRYVARFLCNFIADNMHLTGEGKRKVFASNGQITALLRSRWGLAKSREDNDRHHALDAVVVACSTVAMQQKITRFVRFEAGDVFTGERIDRETGEIIPLHFPTPWQFFKQEVEIRIFSDNPKLELENRLPDRPQANHEFVQPLFVSRMPTRKMTGQGHMETVKSAKRLNEGISVIKMPLTKLKLKDLELMVNREREKDLYDTLKARLEAFNDDPAKAFAEPFIKKGGAIVKSVRVEQIQKSGVLVREGNGVADNASMVRVDVFTKGGKYFLVPIYTWQVAKGILPNKAATQYKDEEDWEVMDNSATFKFSLHPNDLVKLVTKKKTILGYFNGLNRATGNIDIKEHDLDKSKGKQGIFEGVGIKLALSFEKYQVDELGKNIRLCKPSKRQPVR

SEQ ID NO: 249 - protein, 1052 aa, Haemophilus sputorum
  Haemophilus sputorum CCUG 13788
MKNTSLNYVLGLDLGISSVGWAVVEIDEKENPLSLIDVGVRTFERAETQKGESLALARRLARSARRLTQRRVARLKKAKRLLKSENILLSTDECLPHQVWQLRVEGLERKLERQEWAAVLLHLIKHRGYLSQRKNESKSENKELGALLSGVANNHKLLQQTTYRTPAELAVKKFEVEEGHIRNQQGSYTHTFSRLDLLSEMELLFSRQQHFGNPFTSEKLLENLTALLMWQKPALSGDAILKMLGKCTFENEYKAAKHTYSAERFIWITKLNNLRIQENGLERALNDNERLALMKQPYEKAKLTYAQVRSILNLSDEAIFKGLRYSGEDKKTSETKTVLMEMKAYHQIRLALEKNDLKTEWAELKVNSSLLDEIGTAFSLYKTDEDISTCLAGKLSQPVLNALLENLNFDKFIQLSLKALHKILPLMQQGLRYDEACAEIYGDHYGKKTEENHLLLPQIPADEIRNPVVLRTLTQARKVINGVVRLYSSPARIHIETGREVGKSYQDRRELEKRQEENRKQREKAISEIKTLFPNFSGEPKAKDILKMRLYYQQNAKCLYSGKPLELHRLLEQGYVEIDHALPFSRTWDDSFNNKVLVLANENQNKGNLTPFEWLDGKNNSERWKAFKALVETSAFPYTKKQRILSQKLDEKGFIERNLNDTRYVARFLCNFIADNMHLTGEGKRKVFASNGQITALLRGRWGLAKSREDNDRHHALDAVVVACSTVSMQQKITRFVRFEEGNVFTGERIDRETGEIIPLHFPAPWKFFREEVEIRIFSDNPKLELENRLIARPQANHEFVQPLFVSRMPTRKMIGQGHMETIKSAKRLNEGLSVIKMLLTKLRLKDLESMVNREREKELYEALKARLEAFNDEPAKAFAEPFMKKGGAIVKSVRVEQVQKSGVLVRDGNGVADNASMVRVDVFTKGGKYFLVPIYTWQVAKGILPNKAVIQGKNEEDWEVMDDATFRFSLHQNDLVKLVTKKKTIFGYFNGLNRATGNIDIKEHDLEKSKVKDGIHQSIGIKLALSFEKYQVDELGKNIRLCKSSKRQAVR

SEQ ID NO: 250 - protein, 1052 aa, Haemophilus parainfluenzae
MENKNLHYILGLDLGIASVGWAVVEIDEKENPLRLIDVGVRTFERAETQKGESLALSRRSARSARRLTQRRVARLKKAKRLLKSENILLSTDERLPHQVWQLRVEGLDRKLERQEWAAVLLHLIKHRGYLSQRKNESKSENKELGALLSGVASNHELLQQATYRTPAELAVKKFEVEEGHIRNQQGAYTHTFSRLDLLAEMELLFSRQQHFGNPFASEKLLENLTALLMWQKPALSGEDILKMLGKCTFEDEYKAAKNTYTAERFVWITKLNNLRIQENGLERALSDNERLMLIEQPYEKAKLTYAQVRSILNLSDDAIFKGVRYSGEDKKAIETKTTLMEMKAYHQIRKVLEGNNLKAEWVALKANPTLLDEIGTAFSLYKTDEDISAYLAGKLSQPVLNALLENLSFDKFIQLSLKALYKLLPLMQQGLRYDEACREIYGDHYGKKTEETHHFLPQIPADEIRNPVVLRTLTQARKVINGVVRLYGSPARIHIETGREVGKSYKDRHELKKRQEENRKQREKTISEIKTLFPNFSGEPKGKDILKMRLYYQQNAKCLYSGKPLELHRLFEQKYVEVDHALPLSRTWDDSFNNKVLVLANENQNKGNLTPFEWLDGKNNSERWRTFKALVETSAFPYAKKQRILSQKLDEKGFIERNLNDTRYVARFLCNFIADNMHLTGEGKRKVFASNGQITALLRRRWGLAKSREDNDRHHALDAVLVACSTVAMQQKITRFVRFKAGDVFTGERIDRETGEIIPLHFPTPWQFFKQEVEIRIFSDNPKLELENRLPDRPQANHEFVQPLFVSRMPTRKMTGQGHMETVKSAKRLNEGISMIKMPLTKLKLKDLELMVNREREKDLYDALKTRLEAFNDDPAKAFAEPFMKKGGAIVKSVRVEQVQKSGVLVRQGNGVADNASMVRVDVFTKDGKYFLVPIYTWQVAKGILPNKAVIQGKDEEDWEDIDDATFQFSLHPNDLISVKTKKDEFLGYFNGLNRHTGGINIRTHDLEKSKGKQGIFEGIGVKIALSFEKYQIDELGKNIRLCKPSKRQPVR

SEQ ID NO: 251 - protein, 1052 aa, Haemophilus sputorum
  Haemophilus sputorum HK 2154
MKNTSLNYVLGLDLGISSVGWAVVEIDEKENPLSLIDVGVRTFERAETQKGESLALARRLARSARRLTQRRVARLKKAKRLLKSENILLSTDECLPHQVWQLRVEGLERKLERQEWAAVLLHLIKHRGYLSQRKNESKSENKELGALLSGVANNHKLLQQTTYRTPAELAVKKFEVEEGHIRNQQGSYTHTFSRLDLLSEMELLFSRQQHFGNPFTSEKLLENLTALLMWQKPALSGDAILKMLGKCTFENEYKAAKHTYSAERFIWITKLNNLRIQENGLERALNDNERLALMKQPYEKAKLTYAQVRSILNLSDEAIFKGLRYSGEDKKTSETKTVLMEMKAYHQIRLALEKNDLKTEWAELKVNSSLLDEIGTAFSLYKTDEDISTCLAGKLSQPVLNALLENLNFDKFIQLSLKALHKILPLMQQGLRYDEACAEIYGDHYGKKTEENHLLLPQIPADEIRNPVVLRTLTQARKVINGVVRLYSSPARIHIETGREVGKSYQDRRELEKRQEENRKQREKAISEIKTLFPNFSGEPKAKDILKMRLYYQQNAKCLYSGKPLELHRLLEQGYVEIDHALPFSRTWDDSFNNKVLVLANENQNKGNLTPFEWLDGKNNSERWKAFKALVETSAFPYTKKQRILSQKLDEKGFIERNLNDTRYVARFLCNFIADNMHLTGEGKRKVFASNGQITALLRGRWGLAKSREDNDRHHALDAVVVACSTVSMQQKITRFVRFEEGNVFTGERIDRETGEIIPLHFPAPWKFFREEVEIRIFSDNPKLELENRLIARPQANHEFVQPLFVSRMPTRKMTGQGHMETIKSAKRLNEGLSVIKMLLTKLRLKDLESMVNREREKELYEALKARLEAFNDEPAKAFAEPFMKKGGAIVKSVRVEQVQKSGVLVRDGNGVADNASMVRVDVFTKGGKYFLVPIYTWQVAKGILPNKAVIQGKNEEDWEVMDDATFRFSLHQNDLVKLVTKKKTIFGYFNGLNRATGNIDIKEHDLEKSKVKDGIHQSIGIKLALSFEKYQVDELGKNIRLCKSSKRQAVR

SEQ ID NO: 252 - protein, 1338 aa, Helcococcus kunzii
  Helcococcus kunzii ATCC 51366
MQDYYLGLDIGTNSVGWAVTDENYNLLRKKGKDLWGVRLFKEAQPATERRGHRSSRRRTIRKSLRKQLLRELFEEEINAIDKDFFLRLDESKYWLEDKKIEGKYSLFNDENFTDKDYYEKFPTIFHLRKALIESDDKEDIRLYFLAINQMMKRRGHFLIDGKLSNVEDITPFKECIQNLINEELDTEIETEFYDKAIKIVSDYSLKKTEKKNLIKDLVKETDSIEDSKKIINIFNLLISGKSKVNGIFDDEEILEKIKEDNKEDFYLTSEKYEENLEYFSQLLDYRFELISSLKSIYDYIILQEVLKGKKYLSYAQVERYKNHKEDLRKLKQLIKKYDKNGKIYYQIFRDENFKKGYVAYLGYYKKNKKNVPVKKCDYDTFSKNIKSTLDKICDKEDPLYIELIDKIEKGGFLLKQIVSTNSVIPHQVHELELDKILENLEKNYPSFKEISDGVSKIDKIKMIFNFRIPYYVGPLNDYHKDKVNSNTWIVKNEGFENENIRPWNFSKIVDEHACEEEFIKRMINECSYIPGEKVLPKSSLLYSEYMVLNELNNLRVNGDKLNPKIKKEIVENIYKKERKVTLKKIRNFLIINNYVDSKVEFSGLSDGIKANMSSYIDFAEILDDNFDNNMVEDLIEQITIHVGNVKLLTEKISNKYPNLEKKQINKIVNLKFKDWARFSRKLLVGIEGTEKETGEINTIIGFLRETNENFMELMSNRYTFSEEISEIKKKYIPNKLSKQIVDDLYVSPAVKKMIWQVLNINDELIKVLGKQPKKIFIEMARGKEEKPEVKDSRKNKLIELYKNLGKEGKEWLNRIEDKTEADFRNRALYLYYTQMGRCMYTGEIIDIERLYDKELYDLDHIIPRKMKKDDSIHKNLVLVTRNSNQYEKKDNYPVPEVIKSRENVRHLWYALKKKGLITEEKYNRLTRINPLSDKELSEFIERQLVETRQTTKVVKDLFENYYTDSKIVTVKAGLVSELRRDFEVLKCREINDLNHAHDAFLNIIVGDVWSKKFTSNPYNFVKKNREKYTLNNIFTKNQKDLRGNEIWNCAEGKKRIIKTLNKPSVLFSVENFEQTGQLFDQNIIGKQDYKEKTSYVPIKGDERLQDISKYGGYRGISGAYFFIVEHTEKNKRVKTIESLPIYMKSYVEENGLLDFCTNEMKLVDPKIIVKKLNYKSEIIVDGFKYLISGKTENRLSLETNEYLYWNHTQTTDIKKILNINEKIELEKYNGDIESERENIIKYIQIILEKFKLKPFIKRRNLPNIEINFADYETEKLLQLLVNLIPLTTKYVSPVDLTVISGSKYAGKVLIPKKISNLNEVIFISKSITGIYESRRRII

SEQ ID NO: 253 - protein, 1007 aa, Helicobacter canadensis
  Helicobacter canadensis MIT 98-5491
MKVLGFDIGINSIGWAFVENNELKDCGVRLFTKAENPKTKESLALPRRNARSSRVRLRRRRSRLLSLKHIISKEFGLHYEDYIALDGNLPKAYTGKIESIYKLRYEALSQAISKEDLARVILHIAKHRGYMNKNQKTSQDSEKGAILSAIKENSNKIKHYQTAGEYFYKELFENLRDGTKEFKNIRNKAMKNEKTGNMESTYYNTILASDLEKELKLILEKQQAYHNYSDTFIKEVLEIAFYQRPLKDFSHLVGSCTFYENEKRACKNSYSAWEFIALGKIINTLESIKKDTGEIFSNEIITQILKEVLDKGSLSYTKLRKMINLDEKVKFKGLKYDKEGVEKTNLIEFKKLKEFKKALGEHNLERKTLDEIATHITLTKDENQLKKQLEQYALSQNQIDALAELDFNDHINLSFKALYEILPLMEKGKRYDEACNELGLKAKTSNQKSEFLPAFCDSIFAQELTNPIVNRAISEYRKVLNRLLKKYGKMHKIHIELARDAGLSKEARNKIEKEQKENKDINDKAEKTCKEFGLKPNAKNILKIKLWREQGEICAYSGKKITIDDLKEDKALEVDHIYPYSRSYDDSYNNKVLVFIKENQLKLNQTPYEAFGSNQEKWSKIQVLAQKLPYKKKNRILDENFKNKDQIEFISRNLNDTRYATSLIAKYTKEYLEFLPLSDDEDISLKSGEKGSKTHVQTMNGMLTSVLRHAWGFSQKDRNNHLHHALDAIIIAYSTNSIIKAFSDFKKNQEILKAKLYAKKLTSEEYKNQSKFTGFEKYRSKILEKLDSIFVSKPPNKNTKGALHEQTFYSYQDILEEYKTQEGLKRALECGKVRKIGTKYVVNDRMVRLDIFKKDNKFYGIPIYTMDFALGVLPNKVVTIGTDKDKIKKEWKTIDETYEFCFSLYKGDLVLIQKKEMQESEFAYYNGFDISSASISLEKHDNKFENLTENQKLLFPKAKEGDVEVRGIGIQGLKVFKKYMVTPLGEIQETRTEARQNIQPRKKHGLR

SEQ ID NO: 254 - protein, 1023 aa, Helicobacter cinaedi
  Helicobacter cinaedi CCUG 18818 = ATCC BAA-847
MKIYSFDIGVASIGWAFIENEVLQDCGIRIFTKAENPKNGASLALPRREARGVRKRLARRRGRLNTIKQLLCKEFGLQLEDYLSNDGELPKAYTASKANPLKSPYELRTLALSQKLDSKDLVRVILHIAKHRGYGNKHAKDSKDTESGKVKKAIEFNRKTLAEKGYRSVGEYLYREFFQQSRISQNNGATEFINVRNKAGNYEHCVAQDMLKEELESILNAQRQFGFSLKQDFESKLLTKIFEQRPLKSFADKVGNCCFIAGEKRAPKDSPSAIEFIALSRTINTLINLSKESGEIYNRAIILQIVESTLKKGEISYKELREIIRLDERLRFKDPRLDYSREIKEAEKVKFLEFKQLKGFKKALGESFTTLAISQLDEIAEHIALIKDRVKLNEKLESYALTKEQREALSNLSFSAHINLSLQALKQILPFMRGDNGEQCLDYDESVEKAGLKALSKDTLKGQMLPPLNEFEPYLSNPVVARALAEYRKVLNVLLKQYGSPHKIHIEYAREAKLSSTERQKYEKEQKDNYAANQAAHKKCQELGLEPSSTNLLKLKLWQEQGGLCLYSGAKITISYLQDPTALQVDHIYPYSRSFDDSYMNKCLVLTKANQEKGNRTPFEAFGTDSAKWGVITTLAQKLPHKKRRRILNTAFNDKEAGFKLRNLNDTSYIARLVADYTETYLEFLPLVESENTTLSKGQKGSKKHIAIVNGVLTSTMRYYLGFASKDRDNHLHHALDAVIIGFMNDSVIKAFSDFKKTQETSKAAYYAHTLSKQEYKKQRAFIQLPSGENFRVSVLEKVESVFVSKPPRKRVRGALHEATFYSPNDPKLLKNYGGTKGVERALALGKMRKVGAKIVSNGAMVRVDIFRHKSSGKFYGVPVYTMDFALGILPNKAVVVGKDQNGVIKDWLEMDSSYEFIFSLYKDDVILVQKKEMQRPELCYFVSFDTSGASIKVAKHDNNFSTLTENQKLLFSNATKEEVVGKSIGIQNLKVFEKWQVSVLGEVKRTQSYPRENISLASKAKK

SEQ ID NO: 255 - protein, 1023 aa, Helicobacter cinaedi
  Helicobacter cinaedi CCUG 18818
MKIYSFDIGVASIGWAFIENEVLQDCGIRIFTKAENPKNGASLALPRREARGVRKRLARRRGRLNTIKQLLCKEFGLQLEDYLSNDGELPKAYTASKANPLKSPYELRTLALSQKLDSKDLVRVILHIAKHRGYGNKHAKDSKDTESGKVKKAIEFNRKTLAEKGYRSVGEYLYREFFQQSRISQNNGATEFINVRNKAGNYEHCVAQDMLKEELESILNAQRQFGFSLKQDFENKLLTKIFEQRPLKSFADKVGNCCFIAGEKRAPKDSPSAIEFIALSRTINTLINLSKESGEIYNRAIILQIVESTLKKGEISYKELREIIRLDERLRFKDPRLDYSREIKEAEKVKFLEFKQLKGFKKALGESFTTLAISQLDEIAEHIALIKDRVKLNEKLESYALTKEQREALSNLSFSAHINLSLQALKQILPFMRGDNGEQCLDYDESVEKAGLKALSKDTLKGQMLPPLNEFEPYLSNPVVARALAEYRKVLNVLLKQYGSPHKIHIEYAREAKLSSTERQKYEKEQKDNYAANQAAHKKCQELGLEPSSTNLLKLKLWQEQGGLCLYSGAKITISYLQDPTALQVDHIYPYSRSFDDSYMNKCLVLTKANQEKGNRTPFEAFGTDSAKWGVITTLAQKLPHKKRRRILNTAFNDKEAGFKLRNLNDTSYIARLVADYTETYLEFLPLVESENTTLSKGQKGSKKHIAIVNGVLTSTMRYYLGFASKDRDNHLHHALDAVIIGFMNDSVIKAFSDFKKTQETSKAAYYAHTLSKQEYKKQRAFIQLPSGENFRVSVLEKVESVFVSKPPRKRVRGALHEATFYSPNDPKLLKNYGGTKGVERALALGKMRKVGAKIVSNGAMVRVDIFRHKSSGKFYGVPVYTMDFALGILPNKAVVVGKDQNGVIKDWLEMDSSYEFIFSLYKDDVILVQKKEMQRPELCYFVSFDTSGASIKVAKHDNNFSTLTENQKLLFSNATKEEVVGKSIGIQNLKVFEKWQVSVLGEVKRTQSYPRENISLASKAKK

SEQ ID NO: 256 - protein, 1023 aa, Helicobacter cinaedi
MKIYSFDIGVASIGWAFIENEVLQDCGIRIFTKAENPKNGASLALPRREARGVRKRLARRRGRLNTIKQLLCKEFGLQLEDYLSNDGELPKAYTASKANPLKSPYELRTLALSQKLDSKDLVRVILHIAKHRGYGNKHAKDSKDTESGKVKKAIEFNRKTLAEKGYRSVGEYLYREFFQQSRISQNNGATEFINVRNKAGNYEHCVAQDMLKEELESILNAQRQFGFSLKQDFENKLLTKIFEQRPLKSFADKVGNCCFIAGEKRTPKDSLSAIEFIALSRTINTLINLSKESGEIYNRAIILQIVESTLKKGEISYKELREIIRLDERLRFKDPRLDYSREIKEAEKVKFLEFKQLKGFKKALGESFTTLARSQLDEIAEHIALIKDRVKLNEKLESYALTKEQREALSNLSFSAHINLSLQALKQILPFMRGDNGEQCLDYDESVEKAGLKALSKDTLKGQMLPPLNEFEPYLSNPVVARALAEYRKVLNALLKQYGSPHKIHIEYAREAKLSSTERQKYEKEQKDNYAANQAAHKKCQELGLEPSSTNLLKLKLWQEQGGLCLYSGAKITISYLQDPTALQVDHIYPYSRSFDDSYMNKCLVLTKANQEKGNRTPFEAFGTDSAKWGVITTLAQKLPHKKRRRILNTAFNDKEAGFKLRNLNDTSYIARLVADYTETYLEFLPLVESENTTLGKGQKGSKKHIAIVNGALTSTMRYYLGFASKDRDNHLHHALDAVIIGFMNDSVIKAFSDFKKTQETSKAAYYAHTLSKQEYKKQRAFIQLPSGENFRASVLEKVESVFVSKPPRKRVRGALHEATFYSPNDPKLLKNYGGTKGVERALALGKMRKVGAKIVSNGAMVRVDIFRHKSSGKFYGVPVYTMDFALGILPNKAVVVGKDKNGVIKDWLEMDSSYEFIFSLYKDDLLLVQKKEMAEPELCYFMSFNSSIAQISVAKHDNNFSTLTKNQKLLFSNATQEDVSGKSIGIQNLQVFEKWQVSVLGEVKRTQSYPRENISLASKAKK

SEQ ID NO: 257 - protein, 1024 aa, Helicobacter mustelae
MIRTLGIDIGIASIGWAVIEGEYTDKGLENKEIVASGVRVFTKAENPKNKESLALPRTLARSARRRNARKKGRIQQVKHYLSKALGLDLECFVQGEKLATLFQTSKDFLSPWELRERALYRVLDKEELARVILHIAKRRGYDDITYGVEDNDSGKIKKAIAENSKRIKEEQCKTIGEMMYKLYFQKSLNVRNKKESYNRCVGRSELREELKTIFQIQQELKSPWVNEELIYKLLGNPDAQSKQEREGLIFYQRPLKGFGDKIGKCSHIKKGENSPYRACKHAPSAEEFVALTKSINFLKNLTNRHGLCFSQEDMCVYLGKILQEAQKNEKGLTYSKLKLLLDLPSDFEFLGLDYSGKNPEKAVFLSLPSTFKLNKITQDRKTQDKIANILGANKDWEAILKELESLQLSKEQIQTIKDAKLNFSKHINLSLEALYHLLPLMREGKRYDEGVEILQERGIFSKPQPKNRQLLPPLSELAKEESYFDIPNPVLRRALSEFRKVVNALLEKYGGFHYFHIELTRDVCKAKSARMQLEKINKKNKSENDAASQLLEVLGLPNTYNNRLKCKLWKQQEEYCLYSGEKITIDHLKDQRALQIDHAFPLSRSLDDSQSNKVLCLTSSNQEKSNKTPYEWLGSDEKKWDMYVGRVYSSNFSPSKKRKLTQKNFKERNEEDFLARNLVDTGYIGRVTKEYIKHSLSFLPLPDGKKEHIRIISGSMTSTMRSFWGVQEKNRDHHLHHAQDAIIIACIEPSMIQKYTTYLKDKETHRLKSHQKAQILREGDHKLSLRWPMSNFKDKIQESIQNIIPSHHVSHKVTGELHQETVRTKEFYYQAFGGEEGVKKALKFGKIREINQGIVDNGAMVRVDIFKSKDKGKFYAVPIYTYDFAIGKLPNKAIVQGKKNGIIKDWLEMDENYEFCFSLFKNDCIKIQTKEMQEAVLAIYKSTNSAKATIELEHLSKYALKNEDEEKMFTDTDKEKNKTMTRESCGIQGLKVFQKVKLSVLGEVLEHKPRNRQNIALKTTPKHV

SEQ ID NO: 258 - protein, 1688 aa, Ignavibacterium album
MEFKKVLGLDIGTNSIGCALLSLPKSIQDYGKGGRLEWLTSRVIPLDADYMKAFIDGKNGLPQVITPAGKRRQKRGSRRLKHRYKLRRSRLIRVFKTLNWLPEDFPLDNPKRIKETISTEGKFSFRISDYVPISDESYREFYREFGYPENEIEQVIEEINFRRKTKGKNKNPMIKLLPEDWVVYYLRKKALIKPTTKEELIRIIYLFNQRRGFKSSRKDLTETAILDYDEFAKRLAEKEKYSAENYETKFVSITKVKEVVELKTDGRKGKKRFKVILEDSRIEPYEIERKEKPDWEGKEYTFLVTQKLEKGKFKQNKPDLPKEEDWALCTTALDNRMGSKHPGEFFFDELLKAFKEKRGYKIRQYPVNRWRYKKELEFIWTKQCQLNPELNNLNINKEILRKLATVLYPSQSKFFGPKIKEFENSDVLHIISEDIIYYQRDLKSQKSLISECRYEKRKGIDGEIYGLKCIPKSSPLYQEFRIWQDIHNIKVIRKESEVNGKKKINIDETQLYINENIKEKLFELFNSKDSLSEKDILELISLNIINSGIKISKKEEETTHRINLFANRKELKGNETKSRYRKVFKKLGFDGEYILNHPSKLNRLWHSDYSNDYADKEKTEKSILSSLGWKNRNGKWEKSKNYDVFNLPLEVAKAIANLPPLKKEYGSYSALAIRKMLVVMRDGKYWQHPDQIAKDQENTSLMLFDKNLIQLTNNQRKVLNKYLLTLAEVQKRSTLIKQKLNEIEHNPYKLELVSDQDLEKQVLKSFLEKKNESDYLKGLKTYQAGYLIYGKHSEKDVPIVNSPDELGEYIRKKLPNNSLRNPIVEQVIRETIFIVRDVWKSFGIIDEIHIELGRELKNNSEERKKTSESQEKNFQEKERARKLLKELLNSSNFEHYDENGNKIFSSFTVNPNPDSPLDIEKFRIWKNQSGLTDEELNKKLKDEKIPTEIEVKKYILWLTQKCRSPYTGKIIPLSKLFDSNVYEIEHIIPRSKMKNDSTNNLVICELGVNKAKGDRLAANFISESNGKCKFGEVEYTLLKYGDYLQYCKDTFKYQKAKYKNLLATEPPEDFIERQINDTRYIGRKLAELLTPVVKDSKNIIFTIGSITSELKITWGLNGVWKDILRPRFKRLESIINKKLIFQDEDDPNKYHFDLSINPQLDKEGLKRLDHRHHALDATIIAATTREHVRYLNSLNAADNDEEKREYFLSLCNHKIRDFKLPWENFTSEVKSKLLSCVVSYKESKPILSDPFNKYLKWEYKNGKWQKVFAIQIKNDRWKAVRRSMFKEPIGTVWIKKIKEVSLKEAIKIQAIWEEVKNDPVRKKKEKYIYDDYAQKVIAKIVQELGLSSSMRKQDDEKLNKFINEAKVSAGVNKNLNTTNKTIYNLEGRFYEKIKVAEYVLYKAKRMPLNKKEYIEKLSLQKMFNDLPNFILEKSILDNYPEILKELESDNKYIIEPHKKNNPVNRLLLEHILEYHNNPKEAFSTEGLEKLNKKAINKIGKPIKYITRLDGDINEEEIFRGAVFETDKGSNVYFVMYENNQTKDREFLKPNPSISVLKAIEHKNKIDFFAPNRLGFSRIILSPGDLVYVPTNDQYVLIKDNSSNETIINWDDNEFISNRIYQVKKFTGNSCYFLKNDIASLILSYSASNGVGEFGSQNISEYSVDDPPIRIKDVCIKIRVDRLGNVRPL

SEQ ID NO: 259 - protein, 1092 aa, Ilyobacter polytropus
MKYSIGLDIGIASVGWSVINKDKERIEDMGVRIFQKAENPKDGSSLASSRREKRGSRRRNRRKKHRLDRIKNILCESGLVKKNEIEKIYKNAYLKSPWELRAKSLEAKISNKEIAQILLHIAKRRGFKSFRKTDRNADDTGKLLSGIQENKKIMEEKGYLTIGDMVAKDPKFNTHVRNKAGSYLFSFSRKLLEDEVRKIQAKQKELGNTHFTDDVLEKYIEVFNSQRNFDEGPSKPSPYYSEIGQIAKMIGNCTFESSEKRTAKNTWSGERFVFLQKLNNFRIVGLSGKRPLTEEERDIVEKEVYLKKEVRYEKLRKILYLKEEERFGDLNYSKDEKQDKKTEKTKFISLIGNYTIKKLNLSEKLKSEIEEDKSKLDKIIEILTFNKSDKTIESNLKKLELSREDIEILLSEEFSGTLNLSLKAIKKILPYLEKGLSYNEACEKADYDYKNNGIKFKRGELLPVVDKDLIANPVVLRAISQTRKVVNAIIRKYGTPHTIHVEVARDLAKSYDDRQTIIKENKKRELENEKTKKFISEEFGIKNVKGKLLLKYRLYQEQEGRCAYSRKELSLSEVILDESMTDIDHIIPYSRSMDDSYSNKVLVLSGENRKKSNLLPKEYFDRQGRDWDTFVLNVKAMKIHPRKKSNLLKEKFTREDNKDWKSRALNDTRYISRFVANYLENALEYRDDSPKKRVFMIPGQLTAQLRARWRLNKVRENGDLHHALDAAVVAVTDQKAINNISNISRYKELKNCKDVIPSIEYHADEETGEVYFEEVKDTRFPMPWSGFDLELQKRLESENPREEFYNLLSDKRYLGWFNYEEGFIEKLRPVFVSRMPNRGVKGQAHQETIRSSKKISNQIAVSKKPLNSIKLKDLEKMQGRDTDRKLYEALKNRLEEYDDKPEKAFAEPFYKPTNSGKRGPLVRGIKVEEKQNVGVYVNGGQASNGSMVRIDVFRKNGKFYTVPIYVHQTLLKELPNRAINGKPYKDWDLIDGSFEFLYSFYPNDLIEIEFGKSKSIKNDNKLTKTEIPEVNLSEVLGYYRGMDTSTGAATIDTQDGKIQMRIGIKTVKNIKKYQVDVLGNVYKVKREKRQTF

SEQ ID NO: 260 - protein, 1354 aa, Indibacter alkaliphilus
  Indibacter alkaliphilus LW1
MKKILGLDLGTTSIGWAFIKEPEKDVVGSEIVDMGVRIVPLSSDEENDFAKGNTISINADRTLKRGARRNLQRFKQRRNALLETFKEKNLIPSNFQYAEDGPSSTFSTLKLRDKAAKEKIELDDFVKVLLQINKKRGYKSSRKAMSEEDEGTAIDSMGIAKELYENDLTPGQWVYEALKNGRKNVPDFYRSDLQEEFKKIVNYQSEFYPDILNTSFVEDWMGKASTPTKQYFNKRGVQLAENKGKREERRLQEYKWRAEAVNFKIDLSEIALILSQINSQISNSSGYLGAISDRSKELYFKNLTVGQYLYQQVKKNPHTRLKGQVFYRQDYLDEFEKIWSVQSSFYPQLNDELKQEVRDVTIFFQRRLKSQKHLISNCEFEEHHKVVPKSHPIFQEFRIWQNLNNLTLIKKDNLNEKCELALEDKTALANELAFKKELSVKDALKVLGLKPSDWEFNFTKIEGNRTNHAFFEAFAKIIELEDGEPIDLGNLKADDILDQFSEAFLRIGIDTELLQVNSDIEGAEYEKQSYIQFWHLLYSSEDDQKLKQNLIRKFGFKPEHAKILASISLQDDHASLSSRAIKKILPHLQSGLIYDKACTYAGYNHSSSFTKDENEKRELRAELELLKKNSLRNPVVEKILNQMINVVNAILKDPNLGRPDEIRVEMARELKANAEQRKNMTSNIASATRDHEKYREILKKEFGLKRVTKNDLLRYKLWLETDGISLYTGKPIEASKLFSKEYDIEHIIPKARLFDDSFSNKTICERQLNIDKANVTAFSFLQNKLSADEFEQYQSRVKSLYGKLSKAKIQKLLMANDKIPEDFIARQLQETRYISKKAKEILFEITMRVSVTTGTITDKLREDWGLVEIMKELNWEKYDKLGLTYTIEGKHGERLNKIKDWNKRNDHRHHAMDALTVALTKPAYIQYLNNLNAKAIGNKKGTEIFAIEQKYLKRENGKLCFIPPIENIRAEAKKHLSKILVSYKAKNKVVTINKNKTKKKAGFNEQTALTPRGQLHKETVYGKSFHYSTKFEKIGASFDAQKINTVAKKEEREALLKRLAENGNDPKKAFTGKNSLNKMPIYLDLGKNIKLSEKVKTVVLEQNYTIRKNIDPDLKVDKVIDVGIKRILESRLEEFGGNAKLAFSNLEENPIWLNKEKGIPIKRVKISGVSNVESLHVKKDHFGEKILDEEGNEIPVDFVSTGNNHHVAIYEDEDGNLQDEVVNFYEAVIRRNQGESIIKYRHEEGWNFLYSIKQNEFFVFPSQDFNPNDFDLLDPKNYDLISPNLYRAQKFSKVMYGNSAVRDYVFRHHLETVLNDVKELKDVAYKQLKSLQYLNGIKKVRLNHLGQIIQVGEY

SEQ ID NO: 261 - protein, 1397 aa, Joostella marina
  Joostella marina DSM 19592
MKKVLGLDLGTNSIGWALVNEATKEEKKEGKSSEIIKLGVRVNPLTVDEKTNFEKGRPLSTNADRTLKRSARRNLQRYKLRRRNLIEILIKNGFITKDTPLTETGKDTTHQTLKLRAKSAKEKVDLKDFAKILLTINKKRGYKSSRKVNSDEDGLAIDGMAVAKHLYEQNLTPGQYVLNLLQKNKKYVPDFYRSDLQEEFKNIWNNQKTYYFDILTDTLFEELKDKNKSQTWAICKKPFDIAGIKQIGKASDKRLERYKWRTEGLTQKLNLEYLAIALQEINNDINKSSGYLGAISDRSKELFFNKETVGENLYRQLVKTPHTSLRNQVFYRQDYLDEFETIWETQAKFYPQLTHTLKEEIRDVIIFYQRKLKSQKSLISFCQFESWEQTYIEKETGKSKTRTVGRKVIPKSSPLFQEFKIWQNLNSLEFRNSDEGEIIEFIKLDEDIRQTVFEELNLRGNLKPNDVLKILGNYISLGKVSQWKCNFEEIEGNRTNAALYNVYQIIAENEGYGFDWAKKTASEINKELKNIFPQLGIDASILDFDFTQANFDKQTSYQLWHLLYSAEEDFKISEEDKVLYGNSSVSLKKKLHQKYGFKPEYTKLLTNISLQPDYGNLSAKAICNILPYLKENNVYSEACDLTGYNHSNFLTAEEQAKRPLKPILELLKKNSLRNPVVEKILNQMVNVVNQVIETYGKPDEIRIELTRELKKSAKERANMTKSIADATRRNDDYRKTIIKEFGIPNPTKSDVVRYRLWQELASRGYKDIFTDTEIKPQELFSNKIDIEHIIPKALLFDDSFSNKTLAFKKDNLKKANRTAYDFIANDYAPNLENYIERVESLHKDRKITRAKRNKLLMLQSKLPDGFIERDLRNSQYITKEAKKMLYEVCRTVVSTSGSITDKLREDWDLINVMKELNFPKYKALGLTEKIERYDIGAEKMKEVEIIEDWNKRNDHRHHAIDALTVAFSTHSHIQYLNHLNARRDEGHKKHAAIIAIESTITEKEGNKKRRFIAPLPNFRLQAKEHIESILVSFKNKNKVVTNNINKTKRIKKDKFNTKVQLTPRGQLHKETIYGKIKQPLEKHIKLNKSFTLEQAKLIIDKRQREKVLNHLEKYAHNSDIAFNSKTLKKNPLLISDEPLKEVLCFEEVFTIRKDISYDNFKNEKQLDKVIDEKVKQALKERINQYNGDFREAFSDIERNPIWLNKAKGICVKRATIKGVSNAEPLHTAKNHLGEEVLTENKEQIPVDYVSTGNNHHVAIYEDEDGNLQEKVVSFYEAVIRVNEGLPIIDKEYNKSLGWTFKFTMKQNEMFVFPSEDFNPTEIDLLDQKNASLISPNLFRVQKFTIKDYFFRHHLETTVENNNTLKNTTWRREGLSGIYGIIKIRLNHLGEIVQVGEY

SEQ ID NO: 262 - protein, 1060 aa, Kingella kingae
  Kingella kingae PYKK081
MAAKSLNYILGLDLGIASCGWAVVEMDEQENPLRLIDVGVRTFEEAENPKDGSSLAETRRLARAQRRLISRRANRMNKLCRLLKQENVLQANDYDEKGLIIGLPNQAWELRAQGLDRKLEPKEWAAVLIHLVKHRGYLSQRKNESQTADKELGALLSGMNHNHQLLQSQSNQYRTPAELAIKQFATQDGHIRNQRGAYTHTFNRLDLQNELNQLFDAQTRLGNPHVSGSLKTAINDLLMNQKAALSGDAILEMLGRCTFEPSEYKAAKNTYSAERFVWLGKLTNLRIQDNGLESALSREQRELLLNEPYNKTKLTYQQVRKLLRLPETAFFKGLRYGKDNAESATFMEMKSYHAIRKSLENKSLKSEWEKLKTQPKLLDLIGTAFSIYKTDDEIAGCLKNQLPENVIIALQGQLNFSNFMELSLKALEKLLPLMEQGLRYDEACTQIYGNRHEKIADKTEKFLPNIPADKLRNPVVLRTLTQARKVINAIIRRYGSPARVHIETGREVGKSFSDRDKLKKQQEENQEQRRRAIDEWKQFFPNAAHEPKAVDILKLRLYQLQQGKCLYSGLPIDVRRLPEKGYVEIDHALPFSRTWDDSFNNKILVLASENQNKGNQTPYEYLRGADNSESWRLFVENVQNCQFSPNKKQKIMAKQLDEKGFLERNLNDTRYVSRFLCQFISEHLHLTGKGKKRVFASNGQITALLRGRWGLSKNREENDRHHAVDAVVVACSTVAMQQKITQFVRYQKGNVFTGERIDKETGEVISIHFPTPWEHFREEVMIRVFDDNPLRTLPEKLPNRPEALHEYVMPLFVSRMPTRKMTGQGHKETIKSAKRLDEKISVLRVPLTQLKLNDLENMVNREREPALYEALKARLEQFKNDPAKAFAEPFFKQGGQQVKAVRVEIVQKSGMLLRKINGVADNGSMVRVDVFEKSGKFYLVPIYAWQVAEGILPNYAVVAHKDESDWILMDESYHFKFALYKNDLLEVQTKKGGIMGYFASLDRATGAITIREHDRDKKKCKDGEHRSIGVKMASSFKKLQVDELGKNIHETRSRKRPNIG

SEQ ID NO: 263 - protein, 1391 aa, Kordia algicida
  Kordia algicida OT-1
MKKILGLDLGTNSIGWALVNEAEHEHEQSSIVKLGVRVNPLSVDEKTNFEKGRPLSINADRTSKRSARRNLQRFKLRRKNLINLLLKHHIISNETILTEVGKNTTHQTLKLRSKATQEKISLEEFARILLSINKKRGYKSSRKEKNEDEGFTIDGMAIAKELYDNQLTPGQYVYNILQDGKNYIPDFYRSDLQAEFDDVWQFQKKFYSSILTDEFYLKLKGQGKENTRKLFLAIHQVYTAENKGKRDAVKLQYYKWRSEAVKKQLSIEEVAYVLVEINNNINKSSGYLGAISDRSKALYFNNETVGEYLYGQLVKNRHNSLRNQVFYRQDYLDEFEKIWETQAKFYDELTNELKQEIRDVVIFYQRKLKSQKHLISDCLFEKHHKAIPKSSPLFQEFKIWQNLNYLEFVHTQSKEKIFFSELDDETRQFVFAELNIRGTLKIKEIKKLIGLETPVYWKSNFDEIEGNRTNQVLYNVYQNIADDLGYGFDWSKKHAFEINAELQAIFKDVGIDTAILNFDASIEENDFDKQKSYQLWHLLYSAEDTDKATEEDKLIYGNINTKLKKQLHQKYGFEAKYGNLLANISLQQDYGNLSAKAIKKILPYLESGNSFYEACTIVGYNPSNSLTKEQQQNRKLKDKLELLPKNSLRNPVVEKILNQKVNLINQLIDEYGKPDEVRIELARELKKSAKQRADLSKHINDATLKNQNIRKTLQKDFGIQNPSKNDVIRYKLYDELKDNGYKTLFTNKYIPKEQLFSKDVDIEHIIPKAILFDDSFSNKTLAYRNVNLAKADATAFDFISSKHLDDLDNYKARVETLFQSKRISKGKYKKLLMTRQNLPEDFIERDLRNSQYIAKKATAMLKEVFRSVVPTSGRITDKLREDWDLVNVMKELNLPKYRTLGLTEFIERKNGNKIEQIIDWTKRNDHRHHAMDALTVAFTTHNHIQYLNNLNVTHGLNGVDTDHEKSRLYAIKQAITKVYIVGKTKKRKFIPPMENFRSHAKNHLEGILISFKNKNKVVTKNKNRTKTKTKGVFNEKIQLTPRGQLHKETIYGHAKKVIVTKEKVSSKFTHEKILQVTKPAYREALLKRLASFKNDPKKAFSGKNALSKNPLYFDITSGKKVPDTVKLSYFENSYVIRKEVNSDNFKNEKSLQKVLDVGIRRILEKRLADYNGNAKEAFSNLEKNPIWKDKEKGVCIKKVRIEALKNAEPLHVKKDHLGKIILDDENKSTPVDFISTGNNHHVAIYEDKDGKLHDKVVSFYEVVSRVNLGLPIIDKSFNSHLDWKFLFSMKQNEMFVFPSEDFNPKEIDIGNPKNNELISKYLFRVQKFSKVTYGNSAVRDYVFRHHLETELIDKKELKGITYYQLKSIGMLEKLVKVRINHIGKIVHIGEY

SEQ ID NO: 264 - protein, 1314 aa, Lactobacillus animalis
  Lactobacillus animalis KCTC 3501
MLKKDYSIGLDIGTNSVGHAVVTDDYKVPTKKMKVFGDTSKKTIKKNMLGVLLFNEGQTAADTRLKRGTRRRYTRRKNRLRYLQEIFAPELAKVDPNFLYRLEESSLVAEDKKYDVYPIFGKREEELLYHDTYKTIYHLRSALANNDQPADLRLVYLALAHIIKYRGNFLLEGEIDLRTTDINKVFAEFSETLNENSDENLGKLDVADIFKNNTFSKTKKSEELLKLSGAKKNQLAHQLFKMMVGNMGSFKKVLGTDEEHKLSFGKDTYEDDLNDLLAEAGDQYLDIFVAAKKVYDAAILASILDVKDTQTKTVFSQAMIERYEEHQKDLIELKRVFKKYLPEKCHDFFSEPKISGYAGYIDGKVSEEDFYKYTKKTLKGIPETEEILQKIDANNYLRKQRTFDNGAIPHQVHLKELVAIVENQGKYYPFLRENKDKFEKILNFRIPYYVGPLARGNSKFAWLTRAGEGKITPYNFDEMIDKETSAEDFIKHMTINDLYLPTEPVLPKHSLLYERYTIFNELAGVRYVTENGEAKYFDAQTKRSIFELFKLDRKVSEKMVIKHLKVVMPAIRIQALKGLDNGKFNASYGTYKDLVDMGVAPELLNDEVNSEKWEDIIKTLTIFEGRKLIKRRLENYRDFLGEDILRKLSRKKYTGWGRLSAKLLDGIYDKKTHKTILDCLMTEDYSQNFMQLINDDNYSFKETIKNAQVIEKEETLAKTVQELPGSPAIKKGILQSLEIVDEIIKVMGYKPKSIVVEMARETQKTHGTRKREDRVQQIVENLKDANELPEKLPSNAELSDERKYLYCLQNGRDMYTGAPLDYDHLQFYDVDHIIPQSFLKDDSIENKVLTIKKENVRKTNGLPSEAVIQKMGSFWKKLLDAGAMTNKKYDNLRRNLHGGLNEKLKERFIERQLVETRQITKYVAQLLDQRLNYDGNGVELDEKIAIVTLKAQLASQFRSEFKLRKVRALNNLHHAHDAYLNAIVANLIMAKYPELEPEFVYGKYRKAKFKGLGKATAKNTLYANVLYFLKENEVYPFWDKARDLPTIKRYLYRAQVNKVRKAERQIGGFSDEMLVPKSDSGKLLPRKEGLDPVKYGGYAKAVESYAVLITADEVKKGKTKKVKTLVNIPIIDSKKYEADPTAYLASRGYTNVTNSFILPKYSLLEDPEGRRRYLASFKEFQKANELILPQHLVELLYWVNAKDGEQKLEDHKAEFKELFDKIMEFADKYVVAPKNSEKIRRLYEENQDATPMELGKNFVELLRYTADGAASDFKFFGENIPRKRYNSAGSLLNGTLIYQSKTGLYETRIDLGKL

SEQ ID NO: 265 - protein, 1377 aa, Lactobacillus brevis
  Lactobacillus brevis subsp. gravesensis ATCC 27305
MESNHDGEQVKYTLGLDIGTSSIGYAAIDKHQKPIRAKGKHVIGVRLFQEGQTAADRRAFRTTRRRLKRRKWRLNLLNRLFDPYLSEVDPNFLPRLRQSNLSPKDDNKHFNGSTLFPDKTDAAFYRQYPTMYHLRYALMTEKRKFDIREVYLAIHHIVKYRGNFLNSATVDSFKTSNIDFTSQFDRLNELYRQVILDEPFQINMDQVDEMTNKLLDNDALKLDTQKQVAKLLPVIYNDKPIDKQYTRIATEFSKAILGYKTKLDVILNLDTQNAKDWVIRLDDEDIDDKLPALVENLDESRQEIVTIIRDLYAQITLNAIVPKGKSLSESMVDKYNDHKDHLDLLMGLIHELGDDSAKGIKLREAYTQYVGKSDDKTLNQDDFYAAIKKNLDEDSKRSPKIQRLIEQASFMPKQRTSANGVIPHQLHQLELDRIIENQGRYYPFLKKPNPNTHKPNGGKYKLDELVAFRIPYYVGPLITKRDQEKTSGADFAWMIRKPGQEGEITPWNFDQKVDRMASANRFIRRMTTKDSYLVAEDVLPDASLIYEKFKALNELNMLKVNDSRLSPSQKQDLFNNLFKKQKTIRTKKLQTYIRTNWELPSVMISGLADPDKFNSSLSTYIDFRDIFGEKVDDPNRQADYEEIIEWSTVFEDRKIYQAKLNQLDWLTEPQRKALLTKRYTGWGRLSKKLLTGLKDQNGDSILDQLWKTNDNFMQIQSRDEFAKQIHDENAKQFHEANNVDDILDDAFTSPQNKKAIRQVDKVVQDVVKAVGYAPDKIAIEFTRSLENNPQRTVSRQRQLQAAYKNIPREIMKSGLMAELGSVADSKKVLSDKLYLYFTQMGKDMYEDKTINIDNLPNYDIDHILPQAFIKDDSIDNRVLISKEENARKSNRVPLKFFGAKRMGFWKDLLNNGLISNRKFQNLTTDPEKISKYSAKGFIHRQLVETSQVIRLVANILGNEYSQAGTTIIEVSAKMNRQLREDFHLIKNRNVNDYHHAMDAYLTAYVGDYLYLRYPKLRPYFVYGDFKKAEDQDLNIRNFNFLHDLKDNESLDKIVDSETGEIVWEKHGSVKQLKKVYHYKFMLVSQEVYTRQDALFNQTIYPASDADKRKLIPIKNSKPVDVYGGYSGNIDAYMAIVRVHGKKEDNYKVVGIPMRAVTKLKKAEKEGHDSYLNAVHEVLKPQFTKKKKNRKTGEITETVDEFDVLLGKVYYRQLIVDGNKKFMLGSSSYQYNAKQLVLSDKAMQVLSKNGKVKSQDENQNLIDVYDEILEKVDQYFELYDQRHYRESLHKGRGIFVNLPLSNQYDGSKLTSYGKYETIDAILNGLHANATMSNLRYLGISSPFGKMQASNGLTIDPDSIICYQSPTGLFERQIKLSDL

SEQ ID NO: 266 - protein, 1371 aa, Lactobacillus buchneri
MKVNNYHIGLDIGTSSIGWVAIGKDGKPLRVKGKTAIGARLFQEGNPAADRRMFRTTRRRLSRRKWRLKLLEEIFDPYITPVDSTFFARLKQSNLSPKDSRKEFKGSMLFPDLTDMQYHKNYPTIYHLRHALMTQDKKFDIRMVYLAIHHIVKYRGNFLNSTPVDSFKASKVDFVDQFKKLNELYAAINPEESFKINLANSEDIGHQFLDPSIRKFDKKKQIPKIVPVMMNDKVTDRLNGKIASEIIHAILGYKAKLDVVLQCTPVDSKPWALKFDDEDIDAKLEKILPEMDENQQSIVAILQNLYSQVTLNQIVPNGMSLSESMIEKYNDHHDHLKLYKKLIDQLADPKKKAVLKKAYSQYVGDDGKVIEQAEFWSSVKKNLDDSELSKQIMDLIDAEKFMPKQRTSQNGVIPHQLHQRELDEIIEHQSKYYPWLVEINPNKHDLHLAKYKIEQLVAFRVPYYVGPMITPKDQAESAETVFSWMERKGTETGQITPWNFDEKVDRKASANRFIKRMTTKDTYLIGEDVLPDESLLYEKFKVLNELNMVRVNGKLLKVADKQAIFQDLFENYKHVSVKKLQNYIKAKTGLPSDPEISGLSDPEHFNNSLGTYNDFKKLFGSKVDEPDLQDDFEKIVEWSTVFEDKKILREKLNEITWLSDQQKDVLESSRYQGWGRLSKKLLTGIVNDQGERIIDKLWNTNKNFMQIQSDDDFAKRIHEANADQMQAVDVEDVLADAYTSPQNKKAIRQVVKVVDDIQKAMGGVAPKYISIEFTRSEDRNPRRTISRQRQLENTLKDTAKSLAKSINPELLSELDNAAKSKKGLTDRLYLYFTQLGKDIYTGEPINIDELNKYDIDHILPQAFIKDNSLDNRVLVLTAVNNGKSDNVPLRMFGAKMGHFWKQLAEAGLISKRKLKNLQTDPDTISKYAMHGFIRRQLVETSQVIKLVANILGDKYRNDDTKIIEITARMNHQMRDEFGFIKNREINDYHHAFDAYLTAFLGRYLYHRYIKLRPYFVYGDFKKFREDKVTMRNFNFLHDLTDDTQEKIADAETGEVIWDRENSIQQLKDVYHYKFMLISHEVYTLRGAMFNQTVYPASDAGKRKLIPVKADRPVNVYGGYSGSADAYMAIVRIHNKKGDKYRVVGVPMRALDRLDAAKNVSDADFDRALKDVLAPQLTKTKKSRKTGEITQVIEDFEIVLGKVMYRQLMIDGDKKFMLGSSTYQYNAKQLVLSDQSVKTLASKGRLDPLQESMDYNNVYTEILDKVNQYFSLYDMNKFRHKLNLGFSKFISFPNHNVLDGNTKVSSGKREILQEILNGLHANPTFGNLKDVGITTPFGQLQQPNGILLSDETKIRYQSPTGLFERTVSLKDL

SEQ ID NO: 267 - protein, 1371 aa, Lactobacillus buchneri
MKVNNYHIGLDIGTSSIGWVAIGEDGKPLRIKGKTAIGARLFQEGNPAADRRMFRTTRRRLSRRKWRLKLLEEIFDPYITPVDSTFFARLKQSNLSPKDSRKEFKGSMLFPDLTDMQYHKDYPTIYHLRHALMTQDEKFDIRMVYLAIHHIVKYRGNFLNSTPVDSFKASKVNFVDQFKKLNELYTAINPEESFQINLANSEDIGHQFLDPSIRKFDKKKQIPKIVPVSVDDKATDKINGKIASEIINAILGYKSKLDVVVQCTPVDSKSWALKFDEEDIDAKLQKILPEMDENQQSIIAILQNLYSQVTLNQIVPNGMSLSESMIEKYNDHHDHLKLYKKIIDQLADPKKKAALKKAYSQYVGDDGKVIEQADFWSSVKKNLDDSDLSKQIMDLIDAEKFMPKQRTSQNGVIPHQLHQRELDEIIEHQSKYYPWLAEINPNKHDLHLAKYKIEELVAFRVPYYVGPMITPDDQAKSAETVFSWMERKGKEAGQITPWNFDEKVDRNASANRFIKRMTTKDTYLIGEDVLPDESLLYEKFKVLNELNMVRVNGKLLKVADKQAIFQDLFENYKHISVKKLQNYIKSKTGLPSDPEISGLSDPEYFNNSLGTYNDFKKLFGNKVDEPDLQDDFEKIVEWSTVFEDKRILREKLNEITWLSDQQKDVLESSRYQGWGRLSKKLLTGIVNDQGERIIDELWNTNKNFMQIQSDNDFAKRIHEANADQMKAVDVEDVLADAYTSPQNKKAIRQVVKVVDDIQKAMGGVAPKYISIEFTRSEDRNPRRTISRQRQLENTLKDTAKSLAKSINPELLSELDNAAKSKKGLTDRLYLYFTQLGKDIYTGKPINIDEISTYDIDHILPQAFVKDDSLNNRVLVSKAINNGKSDNVPVQLFGAKMGHFWKQLAEAGLISKRKLKNLQTDPDTISKYAMHGFIRRQLVETSQVIKLVANILGDKYRNDNTKIIEITARMNHQMRDEFGFIKNREINDYHHAFDAYLTAFLGRYLYHRYIKLRPYFVYGDFKKFKEDKVTMRNFNFLHDLTDDTQEKIADAETGEVIWDRENSIQQLKDVYHYKFMLISHEVYTLRGAMFNQTVYPASDAGKRKLIPIKADRPINVYGGYSGSADAYMAIVRIHNKKGDKYRVVGVPMRARDRLDAAKKVSDADCDRALKDVLTPQLTKTKKSRKTGEITQVVEDFEIVLGKVMYRQLMIDGDKKFMLGSSTYQYNAKQLVLSDQSVKTLASKGRLDPLQESMDYNNVYTEILDKVNQYFSLYDMNKFRHKLNLGFSKFISFPNHNVFDGNTKASSGKREILEEVLNGLHANPTFGNLKDIGITTPFGQLQQPNGILLSDEAKIRYQSPTGLFERTVSLKDL

SEQ ID NO: 268 - protein, 1361 aa, Lactobacillus casei
  Lactobacillus casei BL23
MTKLGKPYGIGVDIGSNSIGFAAVDENSHLIRLKGKTVIGARLFEEGKAAADRRASRTTRRRLSRNRWRLSFLRDFFESHITPTGPNFFMRQKYSEISPKDKARYKYEKRLFNDRTDAEFYQQYPTMYHLRNRLLTDPSKADVREIYFAIHHILKSRGHFLTSGYAKDFNTNKVALNEIFPALQDAYAQVYPDLDITFDENKVNEFKTVLLNEKATPSDTQRALVNLLLAEDGDKDILKQQKQVLTEFAKAVVGLKTKLNVALGTEVDSSEATVWNFSLGQLDDKWAGIESAMTDEGTEILDQIRDLYRARLLNGIVPAGKTLSQAKVDDYAQHHEDLELFKDYLKQLEDDGTAKAIRQLYDRYIDGDDAKPFVREDFVKALTKEVTAHPNAKSPELLERLAQPDFMLKQRNKANGAIPVQMQQRELDQIIKNQSVYYDWLAAPNPVEKHRKSMPYQLDELLNFRIPYYVGPLVTAKEQKAAQGGVFAWMVRKDPDGNITPYNFDEKVDREASANTFIQRMKTTDTYLIGEDVLPKQSLLYQRYEVLNELNNVRVNNEKLSIEQKQQVIRELFERHNSVTIKQFAENLRAHGDYAHIPEIRGLADEKRFLSSLSTYRQLKSLLPDAIDDPAKQADIENIIAWSTVFEDAAIFKTKLKEINWLDSQTITKLSNIRYRGWGQFSHKFLNGLTLGNGHTIIQELFLSNNNLMQILTDETLQKKMTELNADKLKAANINDAIDDAYTSPSNKKALRQVLRVIEDIKRAADGQDPSWLYVETADGGGTPGKRTRARQHQLQEIYANAAHELIDSAVRGELEDKIADKADFNDRLVLYFMQGGRDIYTGTPLNIDQLSSYDIDHILPQSLIKDNSLDNRVLVHAIINREKNATFASTIYAQKMNATWRQWHEAGLISGRKLRNLQMRPDQIDKYASGFVARQLVETRQIIKLTEQIVAAQYPETKIIAVKAGLSHQLREELEFPKNRDVNHYHHAFDAFLAARIGTYLLKRFPNLQAFFTYGKFKKADVKKLRGFNFIRDITHAEDKIVVKDTGEVIWDKKRDVDELDRIYNFKRMLITHEVHFEKADLFKQTVYGAKDSKEAGGKKQLISKKKGYPVDIYGGYTQETGSYLSVVRLTKKAMYAVVKVSTRDAAKLAVAKSISEQKENETLNDIIDEKLSKISKNGKITHELFEVVLPRVGQKTLFKNSKYNLFLVNSDTYMHNYQELWMPREYQKMWKDISLSKYGDAQTEDQLDQIFGFIVSQVNSYFNLYDINQFRKKLNDAADKFATLPMRDTDDMQGKIATIGQLLIGLQANAARSDLRNLDIKTPLGLLQIPNGISLDSDTSVVYQSPTGLLEREVHLSDL

SEQ ID NO: 269 - protein, 1361 aa, Lactobacillus casei
  Lactobacillus casei Lc-10
MTKLGKPYGIGVDIGSNSIGFAAVDENSHLIRLKGKTVIGARLFEEGKAAADRRASRTTRRRLSRNRWRLSFLRDFFESHITPTGPNFFMRQKYSEISPKDKARYKYEKRLFNDRTDAEFYQQYPTMYHLRNRLLTDPSKADVREIYFAIHHILKSRGHFLTSGYAKDFNTNKVALNEIFPALQDAYAQVYPDLDITFDENKVNEFKTVLLNEKATPSDTQRALVNLLLAEDGDKDILKQQKQVLTEFAKAVVGLKTKLNVALGTEVDSSEATVWNFSLGQLDDKWAGIESAMTDEGTEILDQIRDLYRARLLNGIVPAGNTLSQAKVDDYAQHHEDLELFKDYLKQLEDDGTAKAIRQLYDRYIDGDDAKPFVREDFVKALTKEVTAHPNAKSPELLERLAQPDFMLKQRNKANGAIPVQMQQRELDQIIKNQSVYYDWLAAPNPVEKHRKSMPYQLDELLNFRIPYYVGPLVTAKEQKAAQGGVFAWMVRKDPDGNITPYNFDEKVDREASANTFIQRMKTTDTYLIGEDVLPKQSLLYQRYEVLNELNNVRVNNEKLSIEQKQQVIRELFERHNSVTIKQFAENLRAHGDYAHIPEIRGLADEKRFLSSLSTYRQLKSLLPDAIDDPAKQADIENIIAWSTVFEDAAIFKTKLKEINWLDSQTITKLSNIRYRGWGQFSHKFLNGLTLGNGHTIIQELFLSNNNLMQILTDETLQKKMTELNADKLKAANINDAIDDAYTSPSNKKALRQVLRVIEDIKRAADGQDPSWLYVETADGGGTPGKRTRARQHQLQEIYANAAHELIDSAVRGELEDKIADKADFNDRLVLYFMQGGRDIYTGTPLNIDQLSSYDIDHILPQSLIKDNSLDNRVLVHAIINREKNATFASTIYAQKMNATWRQWHEAGLISGRKLRNLQMRPDQIDKYASGFVARQLVETRQIIKLTEQIVAAQYPETKIIAVKAGLSHQLREELEFPKNRDVNHYHHAFDAFLAARIGTYLLKRFPNLQAFFTYGKFKKADVKKLRGFNFIRDITHAEDKIVVKDTGEVIWDKKRDVDELDRIYNFKRMLITHEVHFEKADLFKQTVYGAKDSKEAGGKKQLISKKKGYPVDIYGGYTQETGSYLSVVRLTKKAMYAVVKVSTRDAAKLAVAKSISEQKENETLNDIIDEKLSKISKNGKITHELFEVVLPRVGQKTLFKNSKYNLFLVNSDTYMHNYQELWMPREYQKMWKDISLSKYGDAQTEDQLDQIFGFIVSQVNSYFNLYDINQFRKKLNDAADKFATLPMRDTDDMQGKIATIGQLLIGLQANAARSDLRNLDIKTPLGLLQIPNGISLDSDTSVVYQSPTGLLEREVHLSDL

SEQ ID NO: 270 - protein, 1363 aa, Lactobacillus casei
  Lactobacillus casei M36
MTKLGKPYGIGVDIGSNSIGFAAVDENSHLIRLKGKTVIGARLFEEGKAAADRRASRTTRRRLSRNRWRLSFLRDFFESHITPTDPNFFMRQKYSEISPKDKARYKYEKRLFNDRTDAEFYQQYPTMYHLRNRLLTDPSKADVREIYFAIHHILKSRGHFLTSGYAKDFNTNKVALNEIFPALQDAYAQVYPDLDITFDENKVNEFKTVLLDEKATPSDTQRALVNLLLAEDGDKDILKQQKQVLTEFAKAVVGLKMKLNVALGTEVDSSEATAWNFSLGQLDDKWAGIESAMTDEGTEILDQIRDLYRARLLNGIVPAGKTLSQAKVDDYEQHHEDLELFKDYLKQLEDDGMAKVIRQLYDRYIDGDDAKPFVREDFVKALTKEVTAHPNAKSPELLERLVQPDFMLKQRNKANGAIPVQMQQRELDQIIKNQSVYYDWLAAPNPVEKHRQSMPYQLDELLNFRIPYYVGPLVTAKEQKAAQGGVFAWMVRKDPDGNITPYNFDEKVDREASANTFIQRMKTTDTYLIGEDVLPKQSLLYQSYEVLNELNNVRVNDNKLSFDQKQQVLGELFERHNTVTIKQFVDNLLAHGDYDRIPEVRGLADEKRFLSSLSTYNQLKGILHEAIDDSDKQTDIEKIIAWSTIFEDKAIFKTKLNEISWLTAGMINSLANIRYRGWGQFSHKLLNELTLSTGRTVFEELLISSHNLMQILTDEVLKQKIAELNAHELKASGIYAAIDDAYTSPSNKKALRQVLSVIDDITNAAGQAPNWLYIETADGDGVPGKRTNSRQRKIQEIYANAAQELITGSVRGELEDKIASRADFTDRLVLYFMQGGRDIYTGEPLNIDNLSSYDIDHILPQSLIKDNSLDNRVLVHPLVNREKDTIFASTRFAKQMNGMWRQWHAAGLISSRKLRNLQMRPDEIDKYASGFVARQLVETRQIIKLTEQIVADQYPDAKIIAVKAGLSSQLRKELDFPKNREVNHYHHAFDAFLAARIGTYLLKRYPNLEPFFTYGKFKKTEVKKLKSLKSFNFIRDMTHAKDKIVAKETGEIVWDNASDINELDRIYNFKRMLITHEVRFETASLFKQTLYAAKNSKNRGGSRQLIPKKKGYLVDIYGGYTQETGSYLSVVRLTKKAMYAVVKVSTRDAAKLAVAKSISEQKENETLKKIIDGKLSKTSKKGKTTHQLFEIVLPRVGQKTLFKNSKYNQFLVNSDTYMHNYQELWMPREYQRMWKDILLSNHGDAQLEGQLDQIFKFIVSQVNSYFNLYDINQFRKKIADATDKFAKLPTHDTDNARGKIATIGQLLIGLQANAMRSDLRNLDIKTPFGLLQIGTGITLDLDTSIIYQSPTGLFEREVPLTDL

SEQ ID NO: 271 - protein, 1361 aa, Lactobacillus casei; identical to SEQ ID NO: 268
  Lactobacillus casei group

SEQ ID NO: 272 - protein, 1360 aa, Lactobacillus casei
  Lactobacillus casei T71499
MTKLGKPYGIGVDIGSNSIGFAAVDENSHLIRLKGKTVIGARLFEEGKAAADRRASRTTRRRLSRNRWRLSFLRDFFESHITPTDPNFFMRQKYSEISPKDKARYKYEKRLFNDRTDAEFYQQYPTMYHLRTRLLTDPSKADVREIYFAIHHILKSRGHFLTPGYAKDFNTNKVALNEIFPALQDAYAQVYPDLDITFDENKVNEFKTVLLNEKATPSDTQRALVNLLLAEDGDKDILKQQKQVLTEFAKAVVGLKTKLNVALGTEVDSSEATVWNFSLGQLDDKWAGIESAMTDEGTEILDQIRDLYRARLLNGIVPAGKTLSQAKVDDYAQHHEDLELFKDYLKQLEDDGTAKAIRQLYDRYIDGDDAKPFVREDFVKALTKEVTAHPNAKSPELLERLAQPDFMLKQRNKANGAIPVQMQQRELDQIIKNQSVYYDWLAAPNPVEKHRKSMPYQLDELLNFRIPYYVGPLVTAKEQKAAQGGVFAWMVRKDPDGNITPYNFDEKVDREASANTFIQRMKTTDTYLIGEDVLPKQSLLYQSYEVLNELNNVRVNDNKLSFDQKQQVLGELFERHNTVTIKQFVDNLLAHGDYDRIPEVRGLADEKRFLSSLSTYNQLKGILHEAIDDADKQTDIENIIAWSTIFEDKAIFKTKLNEISWLNAGMINSLANIRYRGWGQFSHKLLNELTLSTGRTVFEELLISSRNLMQILTDEVLKQKIAELNAHELKASGIYAAIDDAYTSPSNKKALRQVLSVIDDITNAAGQAPNWLYIETADGDGVPGKRTNSRQRKIQEIYANAAQELITGSVRGELEDKIASRADFTDRLVLYFMQGGRDIYTGEPLNIDNLSSYDIDHILPQSLIKDNSLDNRVLVHPLVNREKDTIFASTRFAKQMNGMWRQWHAAGLISSRKLRNLQMRPDEIDKYASGFVARQLVETRQIIKLTEQIVADQYPDTKIIAVKAGLSSQLRKELDFPKNREVNHYHHAFDAFLAARIGTYLLKRYPNLEPFFTYGKFKKTEVKKLKSFNFIRDMTHAKDKIVAKETGEIVWDNASDINELDRIYNFKRMLITHEVRFETASLFKQTLYAAKNSKNRGGSRQLIPKKKGYLVDIYGGYTQETGSYLSVVRLTKKAMYAVVKVSTRDAAKLAVAKSISEQKENETLKKIIDGKLSKTSKKGKTTHQLFEIVLPRVGQKTLFKNSKYNQFLVNSDTYMHNYQELWMPREYQRMWKDILLSNHGDAQLEGQLDQIFKFIVSQVNSYFNLYDINQFRKKIADATDKFAKLPTHDTDNARGKIATIGQLLIGLQANAMRSDLRNLDIKTPFGLLQIGTGITLDLDTSIIYQSPTGLFEREVPLTDL

SEQ ID NO: 273 - protein, 1366 aa, Lactobacillus casei
  Lactobacillus casei UCD174
MTKLGKPYGIGVDIGSNSIGFAAVDENSHLIRLKGKTVIGARLFEEGKAAAYRRASRTTRRRLSRNRWRLSFLRDFFESHITPTDPNFFMRQKYSEISPKDKARYKYEKRLFNDRTDAEFYQQYPTMYHLRTRLLTDPSKADVREIYFAIHHILKSRGHFLTPGYAKDFNTNKVALNEIFPALQDAYAQVYPDLDITFDENKVNEFKTVLLNEKATPSDTQRALVNLLLAKEGDRDILKQQKQVLTEFAKAVVGLKTKLNVALGTEVDSSEATAWNFSLGQLDDKWAGIESAMTDEGTEILDQIRDLYRARLLNGIVPAGKTLSQAKVDDYAQHHEDLELFKDYLKQLEDDGTAKAIRQLYDRYIDGDDAKPFVREDFVKALTKEVTAHPNAKSPELLERLAQPDFMLKQRNKANGAIPVQMQQRELDQIIKNQAVYYDWLAAPNPVEKHRQSMTYQLDELLNFRIPYYVGPLVTAKEQKAAQGGVFAWMVRKDPDGNITPYNFDEKVDREASANTFIQRMKTTDTYLIGEDVLPKQSLLYQSYEVLNELNNVRVNDNKLSFDQKQQVLGELFERHNTVTIKQFVDNLLAHGDYDRIPEVRGLADEKRFLSSLSTYNQLKGILHEAIDDADKQTDIENIIAWSTIFEDKAIFKTKLNEISWLNAGMINSLANIRYRGWGQFSHKLLNELTLSTGRTVFEELLISSRNLMQILTDEVLKQKIAELNAHELKASGIYAAIDDAYTSPSNKKALRQVLSVIDDITNAAGQAPNWLYIETADGDGVPGKRTNSRQRKIQEIYANAAQELITGSVRGEFEDKIASRADFTDRLVLYFMQGGRDIYTGEPLNIDNLSSYDIDHILPQSLIKDNSLDNRVLVHPLVNREKDTIFASTRFAKQMNGMWRQWHAAGLISSRKLRNLQMRPDEIDKYASGFVARQLVETRQIIKLTEQIVADQYPDTKIIAVKAGLSSQLRKELDFPKNREVNHYHHAFDAFLAARIGTYLLKRYPNLEPFFTYGKFKKTEVKKLKSLKSLKSFNFIRDMTHAKDKIVAKETGEIVWDNASDINELDRIYNFKRMLITHEVRFETASLFKQTLYAAKNSKNRGGSRQLIPKKKGYLVDIYGGYTQETGSYLSVVRLTKKAMYAVVKVSTRDAAKLAVAKSISEQKENETLKKIIDGKLSKTSKKGKTTHQLFEIVLPRVGQKTLFKNSKYNQFLVNSDTYMHNYQELWMPREYQRMWKDILLSNHGDAQIEGQLDQIFKFIVSQVNSYFNLYDINQFRKKIADATDKFAKLPTHDTDNARGKIATIGQLLIGLQANAMRSDLRNLDIKTPFGLLQIGTGITLDLDTSIIYQSPTGLFEREVPLTDL

SEQ ID NO: 274 - protein, 1389 aa, Lactobacillus casei
MIIRTYELKTITTIAILKMFQLLTGGLSMTKLGKPYGIGVDIGSNSIGFAAVDENSHLIRLKGKTVIGARLFEEGKAAADRRASRTTRRRLSRNRWRLSFLRDFFESHITPTGPNFFMRQKYSEISPKDKARYKYEKRLFNDRTDAEFYQQYPTMYHLRNRLLTDPSKADVREIYFAIHHILKSRGHFLTSGYAKDFNTNKVALNEIFPALQDAYAQVYPDLDITFDENKVNEFKTVLLNEKATPSDTQRALVNLLLAEDGDKDILKQQKQVLTEFAKAVVGLKTKLNVALGTEVDSSEATVWNFSLGQLDDKWAGIESAMTDEGTEILDQIRDLYRARLLNGIVPAGKTLSQAKVDDYAQHHEDLELFKDYLKQLEDDGTAKAIRQLYDRYIDGDDAKPFVREDFVKALTKEVTAHPNAKSPELLERLAQPDFMLKQRNKANGAIPVQMQQRELDQIIKNQSVYYDWLAAPNPVEKHRKSMPYQLDELLNFRIPYYVGPLVTAKEQKAAQGGVFAWMVRKDPDGNITPYNFDEKVDREASANTFIQRMKTTDTYLIGEDVLPKQSLLYQRYEVLNELNNVRVNNEKLSIEQKQQVIRELFERHNSVTIKQFAENLRAHGDYAHIPEIRGLADEKRFLSSLSTYRQLKSLLPDAIDDPAKQADIENIIAWSTVFEDAAIFKTKLKEINWLDSQTITKLSNIRYRGWGQFSHKFLNGLTLGNGHTIIQELFLSNNNLMQILTDETLQKKMTELNADKLKAANINDAIDDAYTSPSNKKALRQVLRVIEDIKRAADGQDPSWLYVETADGGGTPGKRTRARQHQLQEIYANAAHELIDSAVRGELEDKIADKADFNDRLVLYFMQGGRDIYTGTPLNIDQLSSYDIDHILPQSLIKDNSLDNRVLVHAIINREKNATFASTIYAQKMNATWRQWHEAGLISGRKLRNLQMRPDQIDKYASGFVARQLVETRQIIKLTEQIVAAQYPETKIIAVKAGLSHQLREELEFPKNRDVNHYHHAFDAFLAARIGTYLLKRFPNLQAFFTYGKFKKADVKKLRGFNFIRDITHAEDKIVVKDTGEVIWDKKRDVDELDRIYNFKRMLITHEVHFEKADLFKQTVYGAKDSKEAGGKKQLISKKKGYPVDIYGGYTQETGSYLSVVRLTKKAMYAVVKVSTRDAAKLAVAKSISEQKENETLNDIIDEKLSKISKNGKITHELFEVVLPRVGQKTLFKNSKYNLFLVNSDTYMHNYQELWMPREYQKMWKDISLSKYGDAQTEDQLDQIFGFIVSQVNSYFNLYDINQFRKKLNDAADKFATLPMRDTDDMQGKIATIGQLLIGLQANAARSDLRNLDIKTPLGLLQIPNGISLDSDTSVVYQSPTGLLEREVHLSDL

SEQ ID NO: 275 - protein, 1354 aa, Lactobacillus coryniformis
  Lactobacillus coryniformis subsp. coryniformis KCTC 3167
MTLHYNVGLDIGTNSVGYTIVDDNGKILQVKGKNGYGVRVFKEGATAAERRIFRTTHRRLKRRKWRLRLLQDFFEPYILPQDDGFFIRRKESNLVLNDRDEDTASLFNDRSDRDFYQAYPTIYHLRQALMTEKRQFDVREIYLAMHHIIKYRGHFLLNGTVNNFTNNKIDLHSDFEELNALLLNVIPELKFQIDLDHSTMFQTTLLNTTISRSGRQRDLVKSFYNGSDDKQLAKQQKSVATELLKAILGLKAKFHKLFNLDLLETTEWEFSFDAEDIDDKLAKLEPLMTENQQQVMDILQRIFAAITLNGIVPEGKTLSASKVDSYQKHKQDLKLLKAIAQHSDKKTATVLQTAYNEYINGIASKPLKQEDFYKRLTNAVKKSSDPQVADMLALIDQEKFLPKQRTKENGAIPHQLHQLELERIIDNQKDYYPWLAELNPNQARQKVAKYKLSELVAFRVPYYVGPLIEPEVQQATSNAHFAWMARKEAGPITPWNFDQKVDRNVSAERFIKRMTTKDTYLLAEDVLPLHSLLYQRFIVLNELNNVRVNGQKLTKKQKQAVYQDLFKRQPHVTKKQFKSYLVQTGEFAESSKIEGLANETSFNSGLTTENELRKIFGAQLDEARYQVDFEQIIEWATLFEDAKILRTKLAEITWLTTEQIEKLAGIRYRGWGRFSRKLLAGLRDQNGQQIIDLLWDTPNNFMVIVSQAAFSEAITKENEKLIDRRGAQDVITDLYTSPQNKKALRQVLAIVADVQKAMGGVPPQRIFIEFAREDEKNPRRSVERSRQLEKLYQTISNEFLINSEVRQELKEAVDQKVNFKDRLFLYFLQGGVDLYSGKRINIDQLSHYDIDHILPQSFIKDDSLDNRVLVSQKLNRSKSDSVPLSEFANYKFGPAMQAKWLQLKEAGLLSKRKYDNLTLDPTKLSKFAPLGFVNRQLVETRQVIKLAANLLASEETKVVTIKANMTHQVRKELDFPKNRNVNNYHHAFDAYLTAFVGIFLSKRYPKLKPYFTYGDFQKGNKLPDLKNFNFLYELKNKDRSIDSNTGEIIWDKQRDLAYMNKIYNFKKVTVVHEVLTKSGALYNQTLYKASEDKASGRGTKQLIRKKDNMPTELYGGYTGSTSAFMSIVRLWKKDKPYYKVVGIPTRMAAKLANQAQLLDYLTKKFTTRKLVKKTGDYKTTVERFELVVPKVGFNQLVIDGGQPFMLGSATYQYNARELFISKEAVKALNKQLSTHVDLVQVFDEILVQVNRWFPLYDTNGFREKLSHGRDRFMKLNDSFEEKSDTQIDVLNRILIGFHANAARTNLKILGLGTDLGFMTQQAGIRLTEKAILVHQSPSGLFERKVALRDLKGLR

SEQ ID NO: 276 - protein, 1119 aa, Lactobacillus coryniformis
  Lactobacillus coryniformis subsp. torquens KCTC 3535
MGYRIGLDVGITSTGYAVLKTDKNGLPYKILTLDSVIYPRAENPQTGASLAEPRRIKRGLRRRTRRTKFRKQRTQQLFIHSGLLSKPEIEQILATPQAKYSVYELRVAGLDRRLTNSELFRVLYFFIGHRGFKSNRKAELNPENEADKKQMGQLLNSIEEIRKAIAEKGYRTVGELYLKDPKYNDHKRNKGYIDGYLSTPNRQMLVDEIKQILDKQRELGNEKLTDEFYATYLLGDENRAGIFQAQRDFDEGPGAGPYAGDQIKKMVGKDIFEPTEDRAAKATYTFQYFNLLQKMTSLNYQNTTGDTWHTLNGLDRQAIIDAVFAKAEKPTKTYKPTDFGELRKLLKLPDDARFNLVNYGSLQTQKEIETVEKKTRFVDFKAYHDLVKVLPEEMWQSRQLLDHIGTALTLYSSDKRRRRYFAEELNLPAELIEKLLPLNFSKFGHLSIKSMQNIIPYLEMGQVYSEATTNTGYDFRKKQISKDTIREEITNPVVRRAVTKTIKIVEQIIRRYGKPDGINIELARELGRNFKERGDIQKRQDKNRQTNDKIAAELTELGIPVNGQNIIRYKLHKEQNGVDPYTGDQIPFERAFSEGYEVDHIIPYSISWDDSYTNKVLTSAKCNREKGNRIPMVYLANNEQRLNALTNIADNIIRNSRKRQKLLKQKLSDEELKDWKQRNINDTRFITRVLYNYFRQAIEFNPELEKKQRVLPLNGEVTSKIRSRWGFLKVREDGDLHHAIDATVIAAITPKFIQQVTKYSQHQEVKNNQALWHDAEIKDAEYAAEAQRMDADLFNKIFNGFPLPWPEFLDELLARISDNPVEMMKSRSWNTYTPIEIAKLKPVFVVRLANHKISGPAHLDTIRSAKLFDEKGIVLSRVSITKLKINKKGQVATGDGIYDPENSNNGDKVVYSAIRQALEAHNGSGELAFPDGYLEYVDHGTKKLVRKVRVAKKVSLPVRLKNKAAADNGSMVRIDVFNTGKKFVFVPIYIKDTVEQVLPNKAIARGKSLWYQITESDQFCFSLYPGDMVHIESKTGIKPKYSNKENNTSVVPIKNFYGYFDGADIATASILVRAHDSSYTARSIGIAGLLKFEKYQVDYFGRYHKVHEKKRQLFVKRDE

SEQ ID NO: 277 - protein, 1368 aa, Lactobacillus curvatus
  Lactobacillus curvatus CRL 705
MSRPYNIGLDIGTSSIGWSVVDDQSKLVSVRGKYGYGVRLYDEGQTAAERRSFRTTRRRLKRRKWRLGLLREIFEPYITPIDDTFFLRQKQSNLSPKDQRKLYTQTSLFNDRTDRAFYDDYPTIYHLRYRLMTEKRQFDIREIYLAMHHIVKYRGHFLNEAPVSSFKSSEINLVAHFDRLNTIFADLFSESGFQLETDKLAEVKALLLDNQQSASNRQRQALSLIYTPSTNKAVEKQNKAIATELLKAILGLKAKFNVLTGIEAEDVKAWTLTFNAENFDEEMVKLESSLDDNAHQIIESLQELYSGVLLAGIVPENQSLSQAMITKYDDHQKHLKMLKAVREALAPGDRQRLKQAYDQYVDGQENTKAYSKEDFYGDITKALKNNPDHPIVSEIKKLIELDQFMPKQRTKDNGAIPHQLHQQELDRIIENQQQYYPWLAELNPNSKRQTVAKYKLDELVAFRVPYYVGPLITAEQQRQSSDAKFAWLIRKAEGRITPWNFDDKVDRQASANEFIKRMTTTDTYLLAEDVLPKQSLIYQRFEVLNELNGLKIDDQPITTELKQAIFTDLFMQKISVTVKNIQDYLVSEKRYASRPAITGLSDENKFNSRLSTYHDLKMIVGDAVDDVDKQADLEKCIEWSTIFEDGKIYSAKLNEIDWLTDQQRVQLAAKRYRGWGRLSAKLLTQIVNANGQRIMDLLWDTTDNFMRIVHSEDFDKLITEANQMMLAENDVQDVINDLYTSPQNKKALRQILLVVNDIQKAMKGQAPERILIEFAREDEVNSRLSVQRKRQVEQVYQNISNELLNNTEIRNELKDLSNSALSNTRLFLYFMQGGRDMYTGDSLNIDRLSTYDIDHILPQSFIKDNSLDNRVLVSQKMNRSKADQVPTDFTSVELGQKMQIQWEQMLRAGLITKKKYDNLTLNPDHISKYAMKGFINRQLVETRQVIKLATNLLMEQYGEDNIELITVKSGLTHQMRTEFDFPKNRNLNNHHHAFDAYLTAFVGLYLLKRYPKLKPYFVYGEYQKASQQDKWRNFNFLNGLKKDELVDENTEAVIWDKESGLAYLNKIYQFKKILVTRGVHENSGALFNQTLYAAKDDKASGQGGKQLIPAKQDRSTALYGGYSGKTVAYMCIVRIKNKKGDLYKVCGVETSWLAQLKQLTDEDSQKAFLEQKISPQFTKVKKQKGNIIEAVEEFEVIAPHILINQRFFDNGQELTLGSATYKHNEQELILDKTAVKLLNGALPLTQSEELAEQVYDEILDQVMHYFPLYDTNQFRAKLSTGKAAFMKLPWKSQWDGNKMVQVGQQVILDRILIGLHANAAMSDLKVLKMTTPFGMIQQSTGITLSADTQIIYQSPTGLFERRVALRDL

SEQ ID NO: 278 - protein, 1126 aa, Lactobacillus farciminis
  Lactobacillus farciminis KCTC 3681
MADRISLGLDIGVASVGFSVLDIDKGKVIELGARLFSATVAAGNQDRRDMRGARRLLNRNKQRRQDTGKLFKKFGLIDDFDKGSFYDNFNQNLNPYELRVKGLTEQLTKEELAESLYQIVKHRGISYALKDADVDEGGTDYSVSLKINSQELAEKTPAQIQLQRLNDYGKVRGQVVIGDDPDNQKVLLNVFPTSAYEKEAKQIIATQQQFYPESLTDKFTEEYCQILTRKRDYFVGPGNEKSRTDYGIYKTDGRTLDNLFEELIGHDKIYPEELRASAASYTAQLFNVLNDLNNLRILNYEDGKLTKEDKEKIIAEIKNNTTTINMLNVIKKVAGCSKDDIKGFRVNEKDKPEISSMPVYRKIHKDLLKAGVDISDWPVEFIDELSFILTLNTENGEIRKQLNNRLAPKFDFLNADLIQLIIDNKDSFEIKTNNKWHRFSVKTMNKLIPEMMERPVEQMTLLNEMGLVKKDKKRFENNKYLPYKEIAKDIFNPVASKSVREALKIVNAVLKKYGHIDYLVVEMPRDKNLKEEQDNIKEFQNKNKKAKDAAFEAFVKSVGSEQRVKEALSKNRKLQMKMRLWYQQQEIDPYNGKTIDATDLINNPDKFEIDHIIPQSISFYDSINNKTLCFASMNQVKGQKTPYEFMLEGHGQSYDKFKATVMANKNFGKAKRANYLFEENVSDIETRKRFLSRNLVDTRYSSRVVLNSLQDFFREKSADTKVTVIRGKFTSNMRKHWHIDKTRETFHHHAIDASIIAATPFLRMWKKGGTIFPVKVGEESIDIETGEILDDKNFDKAMYEEPYSGFVSEIMNADDRIKFSHQVDKKMNRKVSDATIYSTRTGKLAKDKKDAEYIVAKVKDIYSVDGFKKFKKVYDKDKTKFLLYKYDPRTFSKLERIISDCPDKVEKVQTNGKVKAVDISPFEMYRRDHGMIKKYSKKGNGPAIKQLKYLDKKLGSHIDITPANANGKHVILQSLKPWRTDVYLNHETGEYEIMGIKYSDLKFNKNEGYGIKKDKYLEIKKVEEVSEKSEFMFSLYRKDRVKVQDMKTGESVELLFWSRNFSNKKYAELKPISQAENDKKLPVYGKGRLIKRLIPKNCKIWKVNTTILGDPYYLEKESDSPKDILD

SEQ ID NO: 279 - protein, 1356 aa, Lactobacillus farciminis
  Lactobacillus farciminis KCTC 3681
MTKKEQPYNIGLDIGTSSVGWAVTNDNYDLLNIKKKNLWGVRLFEEAQTAKETRLNRSTRRRYRRRKNRINWLNEIFSEELAKTDPSFLIRLQNSWVSKKDPDRKRDKYNLFIDGPYTDKEYYREFPTIFHLRKELILNKDKADIRLIYLALHNILKYRGNFTYEHQKFNISNLNNNLSKELIELNQQLIKYDISFPDDCDWNHISDILIGRGNATQKSSNILKDFTLDKETKKLLKEVINLILGNVAHLNTIFKTSLTKDEEKLNFSGKDIESKLDDLDSILDDDQFTVLDAANRIYSTITLNEILNGESYFSMAKVNQYENHAIDLCKLRDMWHTTKNEEAVEQSRQAYDDYINKPKYGTKELYTSLKKFLKVALPTNLAKEAEEKISKGTYLVKPRNSENGVVPYQLNKIEMEKIIDNQSQYYPFLKENKEKLLSILSFRIPYYVGPLQSAEKNPFAWMERKSNGHARPWNFDEIVDREKSSNKFIRRMTVTDSYLVGEPVLPKNSLIYQRYEVLNELNNIRITENLKTNPIGSRLTVETKQRIYNELFKKYKKVTVKKLTKWLIAQGYYKNPILIGLSQKDEFNSTLTTYLDMKKIFGSSFMEDNKNYDQIEELIEWLTIFEDKQILNEKLHSSKYSYTPDQIKKISNMRYKGWGRLSKKILMDITTETNTPQLLQLSNYSILDLMWATNNNFISIMSNDKYDFKNYIENHNLNKNEDQNISDLVNDIHVSPALKRGITQSIKIVQEIVKFMGHAPKHIFIEVTRETKKSEITTSREKRIKRLQSKLLNKANDFKPQLREYLVPNKKIQEELKKHKNDLSSERIMLYFLQNGKSLYSEESLNINKLSDYQVDHILPRTYIPDDSLENKALVLAKENQRKADDLLLNSNVIDRNLERWTYMLNNNMIGLKKFKNLTRRVITDKDKLGFIHRQLVQTSQMVKGVANILDNMYKNQGTTCIQARANLSTAFRKALSGQDDTYHFKHPELVKNRNVNDFHHAQDAYLASFLGTYRLRRFPTNEMLLMNGEYNKFYGQVKELYSKKKKLPDSRKNGFIISPLVNGTTQYDRNTGEIIWNVGFRDKILKIFNYHQCNVTRKTEIKTGQFYDQTIYSPKNPKYKKLIAQKKDMDPNIYGGFSGDNKSSITIVKIDNNKIKPVAIPIRLINDLKDKKTLQNWLEENVKHKKSIQIIKNNVPIGQIIYSKKVGLLSLNSDREVANRQQLILPPEHSALLRLLQIPDEDLDQILAFYDKNILVEILQELITKMKKFYPFYKGEREFLIANIENFNQATTSEKVNSLEELITLLHANSTSAHLIFNNIEKKAFGRKTHGLTLNNTDFIYQSVTGLYETRIHIE

SEQ ID NO: 280 - protein, 1313 aa, Lactobacillus fermentum
  Lactobacillus fermentum 28-3-CHN
MHYLDEIFAPHLQEVDENFLRRLKQSNIHPEDPAKNQAFIGKLLFPDLLKKNERGYPTLIKMRDELPVEQRAHYPVTNIYKLREAMINEDRQFDLREVYLAVHHIMKYRGHFLNNASVDKFKVGRIDFYKSFNVLNEAYEELQNGEGSFTIEPSKVEKIGQLLLDTKMRKLNRQKAVAKLLEVKVADKEETKRNKQIATAMSKLVLGYKADFATVAMANGNEWKIDLSSETSEDEIEKFREELSDAQNDILTEITSLFSQIMLNEIVPNGMSISESMMDRYWTHERQLAEVKEYLATQPASARKEFDQVYNKYIGQAPKERGFDLEKGLKKILSKKENWKEIDELLKAGDFLPKQRTSANGVIPHQMHQQELDRIIEKQAKYYPWLATENPATGERDRHQAKYELDQLVSFRIPYYVGPLVTPEVQKATSGAKFAWAKRKEDGEITPWNLWDKIDRAESAEAFIKRMTVKDTYLLNEDVLPANSLLYQKYNVLNELNNVRVNGRRLSVGIKQDIYTELFKKKKTVKVSDVASLVMAKTRGVNKPSVEGLSDPKKFNSNLATYLDLKSIVGDKVDDNRYQTDLENIIEWRSVFEDGEIFADKLTEVEWLTDQQRSALVKKRYKGWGRLSKKLLTGIVDENGQRIIDLMWNTDQNFMQIVNQPVFKEQIDQLNQKAITNDGMTLREWVESVLDGAYTSPQNKKAIWQVVRVVEDIVKAVGNAPKSISIEFARNEGNKGEITRSRRTQLQKLFEDQAHELVKDTSLTEELEKAPDLSDRYYLYFTQGGKDMYTGDPINFDEISTKYDIDHILPQSFVKDDSLDNRVLVSRAENNKKSDRVPAKLYAAKMKPYWNQLLKQGLITQRKFENLTMDVDQNIKYRSLGFVKRQLVETRQVIKLTANILGSMYQEAGTDIIETRAGLTKQLREEFDLPKVREVNDYHHAVDAYLTTFAGQYLNRRYPKLRSFFVYGEYMKFKHGSDLKLRNFNFFHELMEGDKSQGKVVDQQTGELITTRDEVAKSFDRLLNMKYMLVSKEVHDRSDQLYGATIVTAKESGKLTSPIEIKKKRPVDLYGAYTNGTSAFMTIIKFTGNKPKYKVIGVPTTSAVGLKRVGKPGSESYNQELHRIIKSNPKVKKDFEIVVPHVSYSQLIVDDDCKFTLASDTYQHPATQLVLSKESMEIIADDFKFVKENTATADEQLVRVFDEIVNQMNHYFTIFDQRSNRQKVTKARDKFVSLPTESEYEGAKKTQVGKTEVITNLLMGLHANSAQGDLKVLGLSTFGFFQSSGGLNLSEDAMIVYQSPTGLFERRICLKDI

SEQ ID NO: 281 - protein, 1381 aa, Lactobacillus fermentum
  Lactobacillus fermentum ATCC 14931
MDYVKEYHIGLDIGTSSIGWAVTDSQFKLMRIKGKTAIGVRLFEEGKTAAERRTFRTTRRRLKRRKWRLHYLDKIFAPHLQEVDENFLRRLKQSNIHPEDPAKNQAFIGKLLFPDLLKKNERGYPTLIKMRDELPVEQRAHYPVTNIYKLREAMINEDRQFDLREVYLAVHHIVKYRGHFLNNASVDKFKVGRIDFDKSFNVLNEAYEELQNGEGSFTIEPSKVEKIGQLLLDTKMRKLDRQKAVAKLLEVKVADKEETKRNKQIATAMSKLVLGYKADFATVAMANGNEWKIDLSSETSEDEIEKFREELSDAQNDILTEITSLFSQIMLNAIVPNGMSISESMMDRYWTHERQLAEVKEYLATQPASARKEFDQVYNKYIGQVPKEKGFDLEKGLKKILSKKENWKEIDELLKAGDFLPKQRTSANGVIPHQMHQQELDRIIEKQAKYYPWLATENPATGERDRHQAKYELDQLVSFRIPYYVGPLVTPEVQKATSGAKFAWAKRKEDGEITPWNLWDKIDRAESAEAFIKRMTVKDTYLLNEDVLPANSLLYQKYNVLNELNNVRVNGRRLSVGIKQDIYTELFKKKKTVKAGDVASLVMAKTRGVNKPSVEGLSDPKKFNSNLATYLDLKSIMGDKVDDNRYQMDLENIIEWRSVFEDGEIFADKLTEVEWLTDEQRSALVKKRYKGWGRLSKKLLTGIVDENGQRIIDLMWNTDQNFMQIVNQPVFKEQIDQLNQKAITNDGMTLRERVESVLDDAYTSPQNKKAIWQVVRVVEDIVKAVGNAPKSISIEFARNEGNKGEITRSRRTQLQKLFEDQAHELVKDTSLTEELEKAPDLSDRYYFYFTQGGKDMYTGDPINFDEISTKYDIDHILPQSFVKDDSLDNRVLVSRAENNKKSDRVPAKLYAAKMKPYWNQLLKQGLITQRKFENLTMDVDQNIKYRSLGFVKRQLVETRQVIKLTANILGSMYQEAGTDIIETRAGLTKQLREEFDLPKVREVNDYHHAVDAYLTTFAGQYLNRRYPKLRSFFVYGEYMKFKHGSDLKLRNFNFFHELMEGDKSQGKVVDQQTGELITTRDEVAKSFDRLLNMKYMLVSKEVHDRSDQLYGATIVTAKESGKLTSPIEIKKNRPVDLYGAYTNGTSAFMTIIKFTGNKPKYKVIGVPTTSAVGLKRVGKPGSESYNQELHRIIKSNPKVKKDFEIVVPHVSYSQLIVDGDCKFTLASDTYQHPATQLVLSKESMEIIADDFKFVKENPATADEQLVRVFDEIVNQMNHYFTIFDQRSNRQKVTKARDKFVSLPTESEYEGAKKTQVGKTEVITNLLMGLHANAAQGDLKVLGLSTFGFFQSSGGLNLSEDAMIVYQSPTGLFERRICLKDI

SEQ ID NO: 282 - protein, 1327 aa, Lactobacillus florum
  Lactobacillus florum 2F
MTEQQQPYNIGLDIGTSSIGWAVTDQNDKLLHIRGHNGIGVRLFKEGESAAERRGFRTTRRRLSRRRWRLRFLDRIFDAELAKVDPNFLARLKQSNISPLDPNKQMFGNILFDDPQFDDQKFHQQYPTIYHLRSALAQPDAPQADVRLIYLALHHMIKFRGHFLNGAAVEKFHGGQLHLESEFQELNQIFSNQQRDHVQLQTSSLDEVATILKDNQRTPSDRQRELSARLFVPVDKTIDKENKKLATELLKAVLGLKAKFDVILGVEATDPQAFKLQFSSDDFDDKIAELASELTDEANEILTVLQRLYFSLNLADILTNRQTKQVADSISTAMINRYDDHKHHLKMLKELEAQVTQEQRDGLKKAYDEYIDGDKPTIDTFYTNIKKNLDDSELANQIKSLIDLQAFMPKQRSKENGSIPHQLHQRELDQLIEVQGKYYPWLLAAKDKLDALIAFRVPYYVGPMIDPNQSDDPQNTKFAWMVRKEAGEITPWNFEEKVDKTSSATNFIKRMTTTDTYLLGEPVLPKNSLLYQQFTVLNELNKLKVNGKALTVDQKKYLYEHVCKKQRRVTLKKLSDCLMARGDFPMGAIFTGTTDQKNMNNTLKTYQDFQEIFGDEIDNPDRQVDFEKMIEWSAIFEDREIFKLKLAELNWLTSEQLERVSKKRYQGWGRLSQKLLTHIVNENGERIIDQLWNTNQNFMEIMGQDSVKQAIQEHNGANVAQTGINETIDELYTSPQNKKAIRQILLVVDDIKKAVGYAPANIMMEFAREDRDDHRLIASRARQLEKTYQEISKNWFDNESVTQELKDQIKNKTKFTDRLYLYFIQGGIDLYTGHPLNIDQLSSYDIDHILPQSFLLDNSLNNRVLTSQAENRVHKEDRLPGETVANKMRPTWKMMREQGLMTQRKYNNLTLKPDQISKFNNRGQFINRQLVETRQVIKLAADIMSQKYQADQTKVVTVKANLTHHMREKFNFYKSRNVNDYHHAFDAYLTLFVGNWLLKEYPKLQPYFVYGDFAKTGTNNLKSFNFLYRFERDHKLNDKGAIDTDKDQQLGYMKRIYRFKKMLVTKQLETNEGALYGQTLYPAPKNDKKTRNLINSKKNRPSDIYGGYSNENGSFLTLVKLKKGSKYDYRLVAVPVSKISEIKESELATIEKAIAPQFLKSSGKYRDFQVVLSKILINQKVIDDGMIFTIGSKSYKHNAKQVVLSDNSIQIVSTLSRISDKEKLITVFDEIVDITSKYLPWYKVNDVEKTKMLFRQMQDIDEMKKIIDNSLIGLHCNASITDLGKVGLSKYWGRFVLTAGISLTVDAQLIYQSPTGLFEHRVKVSDL

SEQ ID NO: 283 - protein, 1391 aa, Lactobacillus gasseri
  Lactobacillus gasseri JV-V03
MTKIKNEYIVGLDVGTNSCGWVAMDFQNTILRMHGKTAIGSHLFDAGNSAADRRAFRTTRRRIKRRKWRLKLLEEIFDPYMTEVDPYFFARLKESGLSPLDKRKNVSSIVFPTALEDKKFYCNYPTIYHLRYDLMSEDKKFDLREIYLAIHHIVKYRGNFLYNTPVKDFEASKIDVKDSLEKLNELYERLDSEFTVELDSSNALEIEKIIRDKKVFKINKVKSIHQLLSLKTENKERTKLIKDVSKQIINAILGYKTKFETILLKNISKDEADDWEFKLTDVDADNKFENLIGDLNENEQEILLEIRNLANAITLSNIVEEGKTLSESMIDKYNKHSDDLELLKQVISDHPDRDKAKKLALAYDLYVNNRHGKLLQAKDVLGSKKTLSKEDFYKEVKKNLDDSKASQEILDTIALDSFMPKQRTNENGVIPYQLHQLELDRIIKNQGKYYPFLKEVNPVSSHLKEAPYKLDELIRFRVPYYVGPLISPNESTKNKQTKKNQNFAWMIRKEQGQITPWNFDQKVDRMASANKFIKRMTTKDTYLLGEDVLPANSLLYQKFTVLNELNNIKINGKRISVPLKEELYNNLFKKNSTVTTNKLKSYLKENYNLINVEIKGLADEKKFNSGLTTYNKLRNLKIFDQQLDDLNYDKDFERIIEWSTIFEDKAIYKDKLKTIKWLSDRQIDKLSKIRMQGWGQLSKKLLSQLTDNNGQTIIEQLWDSQNNFMQIVNQSDFKDAIAVANQNLLVNTSVEDILNEAYTSPANKKAIRQVVKVVDDIVKAASGKVPKQIAIEFTRDADDKAKISQTRANKLRKVYKELSNELASETIRNELERVAKDQKLLKDKYYLYFMQLGRDAYTGEPINIDDLGQYDIDHILPQSFIKDDSLENRVLVKKAVNNGKSDNVPVKLYGNRMAADLGMTIRHMWEKWKDQGLITKTKYNNLIIDPDKINKYESSGFIHRQLVETSQIIKLVSTILQSKYPDTEIIVVKARYNHYLRKHLNLYKSREVNDYHHAIDAYLSAICGNLLYQVYPYLRPFFVYGQYKKFSSDPKKEKIIYDKTRKYNFISQIFENKSNDIISLETKKKVFDKKDIIEKLKHAYNYKYMLVSRETETHDQEMFKMTVYPRLSRDTKKSRNLISKKKDMPTEIYGGYTNNSDAYMVIARINKKKGTEYRVFGVPMRELVNLRKAEKNGRYNAYLKQVLEPEIMYSKNGKKNKTISSFEIVKAKVPYKQVILDGDKKFMLASSTYVQNAKQLTLSQNSMQAITDNCENDTEEEKALEEKALIEAYDEILTNIDKYLPLFDINKFREKLHAGREKFINLSLDVKKDTILQVLNGLHDNAVMPKIKSLGLSTPLGFMQFSSGVPLSENAKLIYQSPTGLFEKRVKISDL

SEQ ID NO: 284 - protein, 1386 aa, Lactobacillus hominis
  Lactobacillus hominis CRBIP 24.179
MTKITEDYIVGLDIGTNSCGWVAMDSKNTILRMHGKTAIGSHLFDAGNSAADRRAFRTTRRRIKRRKWRLKLLEEIFDSHLAKVDPYFFARLKESGLSPLDTRKNVSSIIYPTSLEDKKFYVDNPTIYHLRYKLMTEDRKFDLREVYLAIHHIVKYRGNFLYNTPVKAFEASKIDVKGSLKKLNELYEGLDSEFNVELDSNNALEIENIIRDKKIFKINKVKEINQLLSLKTEDKERTKLMKDVSKQIVNAILGYKTKFETILLKDVSKDEADDWEFKLTDVDADNKFENLIGDLNENEQEILLVIRKLANAITLSNIVEEGKTLSESMKDKYKKHSDDLKLLKQVISDHPDRDKAKKLALAYDLYVNNRHGKILQAKDILEKKKTLSKEDFYKEIKKNLDDSKESQEILDAISLDSFMPKQRTNENGVIPYQLHQLELDKIIENQGKYYPFLKEVNPVSSHLKQAPYKLDELIRFRVPYYVGPLISPNESTKNKQTKKNQNFAWMIRKEQGQITPWNFDQKVDRMASANKFIKRMTTIDTYLLGEDVLPANSLLYQKFTVLNELNNVKINGKRISVPLKQELYNNLFKKNSTVTTNKLKSYLKENYKLIKVEIKGLSDEKKFNSGLTTYNKLKNLKIFDQQIDDPNYNKDFERIIEWSTIFEDKAIYKEKLKTIDWLSDRQIDKLSKIRMQGWGQLSKKLLSQLTDNNGQTIIEQLWDSQNNFMQIVNQADFKDAIAVANQNLLVDTSVEDILNEAYTSPANKKAIRQVVKVVDDIVKATSGKVPKQIAIEFTRDADDNAKISQSRANKLRKVYKEMSNELASETIRNELERVAKDQKLLKDKHYLYFMQLGRDAYTGELIDIDNLEQYDIDHVLPQSFIKDDSLENRVLVKKAVNNGKSDNVPVKLYGNRMATDLGMTIRHMWEKWKEQGLITKTKYNNLIIDPDKINKYESSGFIHRQLVETSQIIKLVSTILQSKYPDTEIIVVKARYNHYLRKRLNLYKSREVNDYHHAIDAYLSAICGNLLYQVYPYLRPFFVYGQYKKFSSEPEKEKIIYDKTRRYNFISQIFENKDNDIISRETKKKVFDKKDIIEKLKRAYNYKYMLVSRETETHDQEMFKMTVYPRLSRDTKKSRNLIPKKKDMPTEIYGGYTNNSDAYMIIARINKKKGPEYRVFGVPMRELVNLRKAEKNGHYKAYLKQVLEPEIMYSKNGKKNKTISSFEIVKAKVPYKQVILDGDKKFMLASSTYVQNAKQLTLSQYSMQAITDNCENDTEEEKALVEAYDEILTNIDKYLPLFDINKFREKLHAGREKFVDLPLAEKKETILQVLNGLHDNAVMPKIKSLGLSTPLGFMQFHTGVSLSENAKLIYQSPTGLFEKRLKISDL

SEQ ID NO: 285 - protein, 1369 aa, Lactobacillus iners
  Lactobacillus iners LactinV 11V1-d
MNNNYYLGLDLGTNSVGWAVTDDHYNIIKFHGKHMWGMRLFEEAETAKDRRLHRQARRRRQRLVERINLLEELFDKEISKVDQGFFARKKESDLHFEDKTTKSEYALFNDKSYTDRDYYKQYPTIFHLIMDLIENDKKRDIRLVYLACHYLIKHRGHFIFDGKNFTVDNSFENLLDKLITYLKDNDDITLSFPKDQLINIFKNSNLNSTEKSDQLKPFFGRTNLEKGIIKLLSGGKQDLSNMFRDETLKNSNYKNLKFSDNRFDDERDGYAADLGDRIDLLILLKQIYDASILESMMSQARVSIDGHKYISSAKVCAYEKHKSDLKRLKSLIKKYLPSEYNNIFRKITEKDNYVAYSKSNITNNKREKALKYVKYVDFTKYLTKKLKTIKTQDAEDDQEIFEIKGELEKQSFLPKQRTLDNSIIPYQLHLMELKKILDNQSKYYDFLLAKDDQEGITVKDKIISLLTFRLPYYIGPVNPAVHGKFAWVKRLANGKVTPWNYKEKIDIDASHEEFIKTKLSKCSFLIGCDVLPKNSLLYQKYMVLSELNTIKFNGVNISEKLKDDIYQNLFKNIQKVTKKRLQNYIKEHENIIGDVIVTGIDNAFKQGLVSYLKFKKIIGDKVDDDRYQKVLEKIIRDITLYDECAGKKIKKEYKDSDLFTEDELNKIVKLTFNDWGRLSAELLDQLEGEDTVSGETGKIIEFMQKHNYNLMQLMSKKFTFKSKIDEINKSYYQHDKFNYKSMIDSLYVSPATKRILWQSLKVVHEISKIMKHDPEKIFIEMARSKEDHPKRKLSRKADLKQVYKDSKKQIISIIGKDKYQDLSNELDNKDDRDLRWDNLYLYYTQLGRSMYSLKPIDISELMNKNLYDQDHIFPKSKKYDDSIENRVLVEKELNVKKSDIYPISDANIIPQKIKGQVESFWKMLYDHKLIGDKKYARLIRSKAFTDDELAGFIARQLVETRQATKETADLLKRLCPKSRIVYAKAQNASIFRQKFDIPKSRTINDLHHAQDAYLNIVVGNIFDTKFTQDPRNFIKNTKDSRNYNLEKIYDYNVERNNYVAWIAPDGETNGTIANVKCNLSTKDFRVTRPSFYKKGALFNQNLSRKGSNLAPIKEHSPKSNPLKYGGYSGKNNSFFVVVAGKDNKGKDIVKLIPVNTLIYNKMLHCDYKAKQELLTSYVANNFAINNFRIVKDDIKMYSLVKIDGAYYYLVGGTDERIEVKNAMQLLLSKDSIKAVKILEKESKDQFANIKNYKDIDIKLGRTFNEVVSKYTNSVFGKSMLISDKYRKDIFKSVEKSILEFNHLDTIGKADNLLKFVTLMRPSGSAHSLKMVGLIERIRKSNVISNFNEFKLINQSVTGLFENEEDLLKL

SEQ ID NO: 286 - protein, 1391 aa, Lactobacillus jensenii
  Lactobacillus jensenii 269-3
MKEIKDYIIGLDIGTNSCGYVVTDKQNNILKLKGKTAIGARLFKEGEAAADRRAFRTTRRRLARRRWRLSLLEEIFDEEMNKVDPSFFRRLKESDYSPKDRRKQFNSIVFESSEADKAFYEKYPTIYHLRNALMHDNQKHDLREIFLAVHHIVKYRGNFLREDSVKAFKAAKFTLQGEDGIGPVDKLNDLLKEIYIEAAPELATDNLSKIEDIIKDKKLYKQDKLKQIANLLPKAVDSKDKAKLNKDIAKQVANALMGYMFRLDTLFSFTDVDVKDYKLKFSDANIDESLDALTSLLTDAQIEFVLELQSIYNTIVLNEIVPDGMSLSESMVKKYDDHKKDLKLYKEYIDSLSDQKKAKQLEAAYALYVNYRKADLLAAKKLFEKKKIGDKKFVDVISNFEVFGKFVSDNLDDSELANKIKARLDLGEFLPKQRTNQNGVIPYQLHQVELTQILEKQGKYYPFLITPNPVESHRNNAPYEISELVSFRVPYYVGPLIDNQSIKDKQNKNKFAWMVRQKQGQITPWNFEEMVDTTESANQFIKRMTRKDTYLLAEDVLPKSSLIYQKFMILDELNRIKIDGKKLTSKLKHDIFEKLFKKQKSINLDNLKNYLLAEGNIPGLIEGLSDGINFNNSFSTYIDYRNIFGDEIDNPNKQADFEKMIEWSTVFEDRKIFKRKLKEITWLTPEQIKQVSSKRYSGWGRLSKKLLTQITDENGVNILQRLWNEPETLTEVLANPVIKRKISEANSLFVQINKVENILDDAYTSPQNKKAIRQVIRVVDDIIAAAHGKKPSQIAIEFARSSQNKAKVPDTRKKQLDKIYNKISSEILDSSIKNELKNLKSNKYLSKDKLFLYFKQMGRDAYTGDKLSLDQLQNYDIDHIFPRSFIKDDSLDNRVLTQKPINAKKSDYGIPALEFGNKYVPDLGITVKEMWKLWQENGLISKSKLINLCTNPKKIGSKRASGFINRQLVETSQVIKLVAIILQAEFPDTEIIEVKALQNTTLRESFHLYKNRSVNDYHHAIDAYLTTIVGNYLYQVYPKLRPYFVYGQFKKFNQEKNIDILKRLKNFNFLRQLIFNTDDNIYISGTKEIVFNKKDIIHKLETAYGYKYMNISRECYQETSSLFNQTLYAHNSSVKNSLIPKKKGLPTEIYGGYSGNKDSFFVLVKIVKKRTNLYRIVGIPTRELAKLNSSNNYNQALNKIVESKLCLKETESFKILIKRLLYGTLIVDNGQKFRIGSFKEKHNVQQLVLQLKSMKYIKFYIDGGQNYFTDVERKKLEKQDRDKCLLYVFDDIMNVVNKRFTLFDMSKYEKDGDSLREKFNCLDFNDKVSILSDLLKAFHANSDRTSITKLKITNLGRHQAGKNGITLTTNAQIIYQSPTGLFERRIKIKDL

SEQ ID NO: 287 - protein, 1395 aa, Lactobacillus jensenii
  Lactobacillus jensenii 27-2-CHN
MKEIKDYIIGLDIGTNSCGYVVTDKQNNILKLKGKTAIGARLFKEGQAAADRRSFRTTRRRLARRHWRLGLLEEIFDPEMEKIDPNFFRRLKESDYSPKDSRKQFNAIVFKSIKADKRFYKKYPTIYHLRNALMHDNQKHDLREIFMAVHHIVKYRGNFLREDSVNAFKAAKFSLRGEDGIGPVDKLNDLLKEIYSEYSPELATNNLSKIEDIIKDKNLYKQDKLKQVATLLIKEADSKDKAKLNKDIAKQVANSFMGYMFRLDTLFSLTDVDVKDYKLKFSDANIDESLDDLTSLLTDAQIEFVLELQSIYNTIVLNEIVPDGMSLSESMIKKYDDHKEDLKIFKEYIDSLSDQKKAKKLLSAYNLYVNYRKSDLVEAKNLFKNKKVGDKNFADVISNFEVFGKFVSDNLDDSELANKIKARLDLGEFLPKQRTNQNGVIPYQLHQVELTQILEKQGKYYPFLITPNPVESHRNNAPYEISELVSFRVPYYVGPLIDNQSIKDKQNKNKFAWMVRQKQGQITPWNLEEMVDTTESANQFIKRMTRKDTYLLAEDVLPKSSLVYQKFMILDELNRIKIDGKKLTSELKHDIFEKLFKKQKSINLDNLKNYLLVEGNIPGLIEGLSDGINFNNSFSTYIDYRNIFGDEIDNPNKQADFEKMIEWSTVFEDRKIFKRKLKEITWLTSEQIKQVSSKRYSGWGRLSKKLLTQITDENGVNILQRLWNEPETLTEVLANPVIKRKIVEANSSFTKAKDMKDILVEAYTSPQNKKAIRQVMRVVDDIIAAAHGKKPSQIAIEFAREDQDNPQMTKSRKAQLDQIYAKISDEFLDDAVKNELKNMKDNKPLAKDKVFLYFKQMGRDAYSGEKLSLDNLQDYDIDHIYPQSFIKDDSFDNRVLVQRAYNNGKSDNVPVLLFGNKIAAGLGITIRQMWKKWLELGLISKRKFNNLITDPEKISRNMASGFVNRQLVETSQVIKLVANILQAKLPDTEIIEVKASYNSILRKEFNLYKSREVNDYHHAIDAYLTTIVGNYLYQVYPKLRPYFVYGQFKKFGKAENQEDDPVKKIKKFNFIYQLIWGKDDAICISHTNQQVFSKKDIIDKLTTAYNFKYMNISHAVYTRNNNMFKQTLFPIIERTTAKTKSLIPKKLDRPTDIYGGYSNNNDAYLALVKVDKKRGSEYRVVGIPMRAAAMLKASKNYDEDLRKVIEPMVMFDKNGKAKRGIEGFRVLVGKMPFKQAVLDGNKKFMLTGTVDTPNLKQLVLSQQNMKYILDYIEDVDCRKHKFGDKVQNPDKCLLEVFDEIIEIVDKYFELFDSRDFREKLRNSRNKFIKLEASKKADTILAILKGLQAKSTRATIKELNISDFGRIITSSISPEAQLIYQSPTGLFERRVKVKDL

SEQ ID NO: 288 - protein, 1375 aa, Lactobacillus johnsonii
MTKIKDDYIVGLDIGTDSCGWVAMNSNNDILKLQGKTAIGSRLFEGGKSAAERRLFRTTHRRIKRRRWRLKLLEEFFDPYMAEVDPYFFARLKESGLSPLDKRKTVSSIVFPTSAEDKKFYDDYPTIYHLRYKLMTEDEKFDLREVYLAIHHIIKYRGNFLYNTSVKDFKASKIDVKSSIEKLNELYENLGLDLNVEFNISNTAEIEKVLKDKQIFKRDKVKKIAELFAIKTDNKEQSKRIKDISKQVANAVLGYKTRFDTIALKEISKDELSDWNFKLSDIDADSKFEALMGNLDENEQAILLTIKELFNEVTLNGIVEDGNTLSESMINKYNDHRDDLKLLKEVIENHIDRKKAKELALAYDLYVNNRHGQLLQAKKKLGKIKPRSKEDFYKVVNKNLDDSRASKEIKKKIELDSFMPKQRTNANGVIPYQLQQLELDKIIENQSKYYPFLKEINPVSSHLKEAPYKLDELIRFRVPYYVGPLISPNESTKDIQTKKNQNFAWMIRKEEGRITPWNFDQKVDRIESANKFIKRMTTKDTYLFGEDVLPANSLLYQKFTVLNELNNIRINGKRISVDLKQEIYENLFKKHTTVTVKKLENYLKENHNLVKVEIKGLADEKKFNSGLTTYNRFKNLNIFDNQIDDLKYRNDFEKIIEWSTIFEDKSIYKEKLRSIDWLNEKQINALSNIRLQGWGRLSKKLLAQLHDHNGQTIIEQLWDSQNNFMQIVTQADFKDAIAKANQNLLVATSVEDILNNAYTSPANKKAIRQVIKVVDDIVKAASGKVPKQIAIEFTRDADENPKRSQTRGSKLQKVYKDLSTELASKTIAEELNEAIKDKKLVQDKYYLYFMQLGRDAYTGEPINIDEIQKYDIDHILPQSFIKDDALDNRVLVSRAVNNGKSDNVPVKLFGNEMAANLGMTIRKMWEEWKNIGLISKTKYNNLLTDPDHINKYKSAGFIRRQLVETSQIIKLVSTILQSRYPNTEIITVKAKYNHYLREKFDLYKSREVNDYHHAIDAYLSAICGNLLYQNYPNLRPFFVYGQYKKFSSDPDKEKAIFNKTRKFSFISQLLKNKSENSKEIAKKLKRAYQFKYMLVSRETETRDQEMFKMTVYPRFSHDTVKAPRNLIPKKMGMSPDIYGGYTNNSDAYMVIVRIDKKKGTEYKILGIPTRELVNLKKAEKEDHYKSYLKEILTPRILYNKNGKRDKKITSFEIVKSKIPYKQVIQDGDKKFMLGSSTYVYNAKQLTLSTESMKAITNNFDKDSDENDALIKAYDEILDKVDKYLPLFDINKFREKLHSGREKFIKLSLEDKKDTILKVLEGLHDNAVMTKIPTIGLSTPLGFMQFPNGVILSENAKLIYQSPTGLFKKSVKISDL

SEQ ID NO: 289 - protein, 1382 aa, Lactobacillus mucosae
  Lactobacillus mucosae LM1
MDIGTNSIGWTAIDDHFSLLRVKGKNAIGVRTFKEGETAADRRGFRTARRRLSRRRWRLQFLDEFFAPYLAEVDPNFLARLKQSDISAKDPAKNQEYMGKLLFPDQEAASDGNGYPTLIQMRKAMPAEKAADFPVFNIYQLRYALMNEKRKFDLREIYLAVHHIVKYRGNFLNNTSVDKFKADQIDFNKSFETLNDLFRQVQPIAPFQIDLTKVDELGKLLLDTKQKKLDRQKAVAKLLPLIEDGTDKEIVKAHQQTAREISKLILGYKAKVGLILQNNLDQTLDMSTENSDDQLMQIAEELDDYQMELINQLSLLYSQIMLNEIVPNGETVSASMLNRYYKHRCQLKELKDYGAAQDKKTREQLDHLYAEYIGQIPKDSKFDFTKDLKKLMDKSDLGQKIKDEIEAGDYLPKQRTSANGVIPHQMHQQELDQIIENQKEYYPWLAEPNPVEKNIKNAKYKLDQLVSFRVPYYVGPMITLADQQKTSKASFAWAVRKKAGKITPWNFYDMIDREKSANNFIKRMTNKDTYLLSEDVLPASSLLYQKFTVLNELNNIRVNGRKLQPALKQAIYTDLFQKRKTVNLKTLTNFLAIHEPTLTKPKIEGLSNGRSFNSSLGTYIDMSKILGDSLDDLNYRDDIEKIIEWSTVFEDSEIYGVKLQEIQWLTNEQREKLVRKRYQGWGRLSKKLLTGITDENGQRIIDLMWDTSKNFMQIVHQPVFEEQIAELNQQLLQDADKAPLEVVDDILADAYTSPQNKKAIRQVVKVVADVVKAVGNAPASISIEFARNEDRNKELKNSRRHSIEKLYHETAEKLVKQTNLLEELGNVKDLNDRYYLYFTQAGRDMYDGTPINIDEISTHYEIDHILPQSFLKDNSLDNRVLVKKSENAAKSDRVPAKLYGAKMRAFWKQLKESQLISNRKYLNLTTDPEQVDKYQMQGFVHRQLVETRQIIKLAANIFGSLYPDSAVIETRAELTKQLREKFSLYKVRDVNDYHHAVDAYLTAFAGHYLYQRYPKLRPMFVYGDYAKIYADDLKRLRSVNLFHDLEKDQYNSGTAVNPETKEKIVDVDWLSDYVSKIQHFKYMLISKAVYTQHGQLYGATILPVAQVDKISAPIGIKDDKPVDIYGAYTNEVAAYMAIVRVNGKKPKYKVVSVPVRMLQRLKMAEQKGHDQYMQTLHDVLLRNFTSLKKNRKTGLKEAVVKDFDVLVPCVRYNQLVIDGDTKFTLGSATYQHNAKQLVLCNHSLETLANNFEYVRKHPDEADERMIMLYDDILDQVNHYFTLYDKNKFREKLNAGRDKYLKLPTFSQFENNKKTAIGKSEAIINILRGLHANAAITNLKCLGVSTPFGQLQSPSGIELSENAKLVYQSPTGLFSREVLLKDL

SEQ ID NO: 290 - protein, 1362 aa, Lactobacillus paracasei
  Lactobacillus paracasei subsp. paracasei 8700:2
MTKLGKPYGIGVDIGSNSIGFAAVDENSHLIRLKGKTVIGARLFEEGKAAAKRRAGRTTRRRLSRNRWRLSFLRDFFESHITPTDPNFFMRQKYSEISPKDKARYKYEKRLFNDRTDAEFYQQYSTMYHLRNRLMTDPSRADVREIYFAIHHILKSRGHFLTPGDAKDFNTNDVALDEIFPALQDAYAQVYPDLGITFDEDKANEFKTILLNEIATSIDTQRALVKLLLAEEDDKDILKQQKQVLTEFAKAVVGLKTKLNLALGTEVDSSEATAWNFSLGQLDDKWAGIESAMTDEGTEILDQIRDLYRARLLNGIVPTGKTLSQAKVDDYTQHHEDLQLFKAYLKQLEDDGTAKAIRQLYDRYIDGDDAAPFLRENFVKALTKDVTAHPNTKSPELLERLAQPDFMLKQRNKANGAIPVQMQQRELDQIIKNQAVYYDWLAAPNPVEKHRKSMPYQLDELLNFRIPYYVGPLVTAKEQKAAQGGVFAWMVRKDPEGNITPYNFDEKVDREASANTFIQRMKTTDTYLIGEDVLPKQSLLYQRYEVLNELNNVRVNNEKLSIEQKQQVIRELFERHNSVTIKQFAENLRAHGDYAHIPEIRGLADEKRFLSSLSTYRQLKSLLPEAIDDPAKQADIENIIAWSTVFEDAAIFKTKLKEISWLGSEAITKLSNIRYRGWGQFSRKFLNGLTLGNGHTIIQELLLSTNNLMQILTDETLQKKMTELNADKLKTANINDAIDNAYTSPSNKKALRQVLRVVDDIKRAADGQDPSWLYVETADGGGTPGKRTRARQHQLQEIYANAAHELIDTAVRGELEDKISDKADFNDRLVLYFMQGGRDIYTGAPLNIDQLSSYDIDHILPQSLIKDNSLDNRVLVHAIINREKNATFASTIYAQKMNATWRQWHEAGLISGRKLRNLQMRPDQIDKYASGFVARQLVETRQIIKLTEQIVAAQYPDTKIIAVKAGLSHQLREELEFPKNRDVNHYHHAFDAFLAARIGTYLLKRFPNLQAFFTYGKFTKADVKKLRGFNFIRDITHAEDKIVAKDTGEVVWDKQRDVDELDRIYNFKRMLITHEVRFETADLFKQTVYGARDSKEAGGSKQLIPKKKGYPVDIYGGYFRENTAYLAVVKVTKKTETIFKVVKIATSQVAALNKARSRSTAEELSVLTELLKPKFSKVGKNGKITDTPFEVVLPRVPREQLFYNAKYGFFMVNSDTMFHNFQEIWVSRSDQKILQQIRKAKIDYPNVDQDLDNLFHNLADQIVKYFDLYSIAGFKEKISQSQNTFNDLAVDDTDQSVGKITVINELLKGAQANGMTGSLKVLKISTPFGFTQDKSGVLTKDSSIIYQSPTGLFERSVRLTDL

SEQ ID NO: 291 - protein, 1382 aa, Lactobacillus pentosus
  Lactobacillus pentosus IG1
MKKIVNYNLGLDIGTSSIGYAAIDDQGRPVRHQNKTVMGVRLFKEGKTAESTRIFRGTRRRLSHRHWRLGYLDRIFDNEIAKVDENFLPRLKASKRARSDEKRSFRGSLLFPETGDDAYYQKYPTIYHLRYALITQKKQFDIRLIYLALHHMIKYRGNFLDTTPVSAFNIHDIDLTDQFASLNDCYQLLDMDFEFQFDLNNIEQVQKLLLDETLSKTKRQAAVSKVLVMSTGNKAFDDQQNGIASEFIKALLGGPFDLSKILNLSVADVKSWKLHMTDKDVDDTLNSLVEELDENHKQIVNLLQMIYSQVMMLGLLNGQQSISASMIERYDDHAKHWAALKKLLPALGEQEQSTIIHAYTAYTGHSRTKQLSRAEFYTKVNSILKKHENIAEATGLIELIDRNEFMPKQRDAVNGVIPHQLHQRELQLIIQNQQKYYPFLAAKAYPDADETMIEQLLSFRVPYYAGPLVDRDFINESSDQEQAMQNTKFSWLKRREAGEITPWNFEQKVDVQETANRFIKRLTTKDTYLMTEDVLPKESLIYQRFEVLNELNAIRINDRRLTAENKQLAFQQLFMAGNTKNVSIKKFRNFVFDSLKFPEKVKITGFAGQHNFLAKLSTYHDFKKIFGERVDHTDLQPDFERIVEWCTIFEDRHIYREKLKEIQWLSQSEIDQLVLIRNHGWGRLSKRLLTGIRDSDGRTVMDQLWFGTDNFMRIISQSDFAAAIANENRTQLNQHGLEDVLDSAFMSPQNKKAIRQVLKVVDDIEQTLGCPPKKVMIEFTRSPDKKKQRTVTRLEKVQQAYKAVADQLAGQSIVSELDQYANTHSKLSDTYYLYFMQLGRDLYSGKPIDIDSPMLDDDHILPRAFMKDNSLDNRALTEKPINNTKAAKFPSKVFGQQKEVTDFWKLLRRCGLMSNIKEKHLYLDPDNVDKWTRRGFIHRQLVETSQVIKIVANILNDRYQQSQTEVLEVPARLGTELRECFGWYKVREVNDYHHVFDAYLAAFIGNYLYRRYPKLQPYFVYGNFAELNKAQLKNIKSFNFLYNITDNKRVVKDIETGQTLWDDQIRQQIQHIYEYKYMLTSHEAFTQHKELYGQTIYPRREFKPGTLKAIKQDQPQELYGGYKNLTAAYMCIVKIQARKRRAAEYRVVRVATESLSALQQAKRLGVQAYERCLRQELVRNNEILRTNADPNSAPREFEVLLDRVLCHQMIISDGQKYLLGSHAYKINCMQLVLSNNSMKILSTSIVKLKQMTNEPLVQVYREILDVVNKYFTLYDVNSFRENLNQFFDKFRTLPITNEYESSKSGKKLIHRGQLETLTLILRGLHANSDKVQYGDQSTLLGGFQTKDGIKLSKDSVIQYTSPAGLNVRTVKLRDLEQKEAQK

SEQ ID NO: 292 - protein, 1361 aa, Lactobacillus pentosus
  Lactobacillus pentosus KCA1
MNEPYGVGLDIGTNSVGWTVVDMNGRVRKVKGKTALGARLFKEGATAEDRRGFRTTRRRLKRVKWRLRLLREFFDQPISKIDPNFFARRKYSDISPRDPNYNGLAKTLFNDRTDKEFYDDYATIYHLRDKLMTSNRKFDIREIYLAIHHIVKYRGNFLRTGPASQYGSASLHLATSFQKLNDLFAQSEETLNLKLVTDEALLQQIQQILVRTDLSRSEQQRQIWPLMAVLTGASAAEKKRQKNVVVELSKALVGLKAKMNVVTLTEVDAAVVKDWTFTMEESQDKLPEIEEQLSEVGQQIMDEVIQLYASVNLAQLIPAGKRFSQHMVEKYKHHEKNLELLKAYIHSQSDSKRGREIRATYDRYIDGVDSKPVTQEMFYKDLMKYVEADATSNHLAAEIKDEIDSEQFMPKLRTKQNGSIPYQVQQYELDQIISHQKKYYPWLGEENPVAERRGKFPYKLDELVGFRVPYYVGPLITKEDQQATSGAGFAWMVRKADGPITPWNFDQKVDRIASATAFIQRMQTTDTYLIGEDVLPARSLIYQRFMVLNELNNMRVEDRKLAPQQKQRLYNQVFKQHQHVSVKNIQQNLMDAGEYRKTPQITGLADPKGFNSSLSTYHDFKKILLEAIADEHKRADIEKIILWSTTFEDSAIFKQKLEEVAWLTDAQRKQLSGLRYRGWGQLSHKLLTAFKDDKGRSIMDGLWETSDNFMQLRKQPAIETQIKEANQANLTDADIQDTINELYTSPQNKKAIREVMLVLDDIKNAMHGQTPSWIFVEAARGGGVAGRRTQSRSSQIVEAYKGTAKEIVSEKVQHELNEKIKAKADFNTRLVLYFLQNGRDLYTNEAINIDRLSEYDIDHILPQSLVKDDSLDNRVLTSARINREKNDTFASEKFGRKMGAQWRELHRNGLMTQRKLKHLLMRPDEISKHATDFINRQLVETRQVIKLVEELISSEYPAASIVAVKANLTHQFRQTFNFPKLREVNDYHHAFDASLTAFIGMYLLKQYPKLERFFVYGKFAKQPINLTRFNIIRKLAVAEKPIANIETGEILWDKTADIKYFEKLYNYKRLLVTHEVRENYGAMFKQTLFKASYNKSKTLVPKKNHMETSVYGGYSNQETAYLAIVRIPFKSGFKFIVVGIPTRMVAKIKHYQSLGATLNQATHKVIEPKFTKISRKTKQTVISDYEVVLPKVYLDQVVRDQVKGQMYRFSLGSDKEYHNVQELYLPLSIQQAFVGHYDESDDQRSNDLVKVYDAALKQLQRYFPLHLSRNFDQVASQAHQSFEGLKNNVQTSDKQLGKKEVLNSLFVGLHANATRSNLSVLGMSKDFGRIKSNGITLTDQAEIIYQSPTGLFERKVALKDL

SEQ ID NO: 293 - protein, 1358 aa, Lactobacillus pentosus
  Lactobacillus pentosus MP-10
MNEPYGVGLDIGTNSVGWTVVDMNGRVRKVKGKTALGARLFKEGATAEDRRGFRTTRRRLKRVKWRLRLLREFFDQPISKIDPNFFARRKYSDISPRDPNYNGLAKTLFNDRTDQEFYHDYPTIYHLRDKLMTSDRKFDIREIYLAIHHIVKYRGNFLRTGPASQYGSASLHLATSFQKLNDLFAQSEESLNFKLVTDEAQLQQIQQILVRTDLSRSEQQRQIWPLMVVLMGATAAEKKRQKDFAKELANALVGLKAKLNVVTLTNVDTTVVKDWTFTLEESQDKLPEIEEQLSEVGQQIMDEVIQLYASVNLAQLIPAGKRFSQHMVEKYNHHEKNLELLKAYIHSQSDSKRGREIRATYDRYIDGVKSKPVTQEMFYKDLMKYVEADATSNHLAAEIKDEIDSEQFMPKLRTKQNGSIPYQVQQYELDQIISHQKKYYPWLGEENPVAERRGKFPYKLDELVGFRVPYYVGPLITKEDQQATSGAGFAWMVRKADGPITPWNFDQKVDRIASATAFIQRMQTTDTYLIGEDVLPARSLIYQRFMVLNELNNMRVEDQKLAPRQKQRLYNQVFKQHQHVSVKNIQQNLMDAGEYRETPKITGLADPKGFNSSLSTYHDFKKILPEAIADEHKRADIEKIILWSTTFEDSAIFKQKLEEVAWLTDAQRKQLSGLRYRGWGQLSHKLLTAFKDDNGRSVMDGLWETSDNFMQLRKQPAIETQIKEANQANLTDADIQDTINELYTSPQNKKAIREVMLVLDDIKNAMHGQTPSWIFIEAARGGGVAGRRTQSRSKQIVEAYKSTAKEIVSEKVQHELNEKIKAKADFNTRLVLYFLQNGRDLYTNEAINIDRLSEYDIDHILPQSLVKDDSLDNRVLTSARINREKNDTFASEKFGRKMGAQWRELHRNGLMTQRKLKHLLMRPDEISKHATDFINRQLVETRQVIKLVEELISSEYPSASIVAVKANLTHQFRQTFNFPKLREVNDYHHAFDASLTAFIGMYLLKQYPKLERFFVYGKFAKQPINLTRFNVIRKLAVAEEPIANIETGEILWDKTADIKCFEKLYNYKRLLVTHEVRENYGAMFDQTIFKATDSRKRLIQKKKGFATETYGGYTGRTLAYLAIVKVVTNKDTQYQVVGIPTTMVTQIQQLEASGLTSKQAVTKAIGAMINENNKKLQSYEVLLPKVRFEQVVRDEVKGHIHRFALGTDTYYHNIQELYLPLTIQRAFLGKRNDTDAQTEQNLLTVFETTLAQVNRYFPLYEMNKFKQILNSAQEKFAALPTKNKTVKNKLVTGKDGVLNNLFIGLHANASLGDLKILGMKIGFGKLQVPGGLKLTDQAEIIYQSPTGLFERKVALKDL

SEQ ID NO: 294 - protein, 1358 aa, Lactobacillus plantarum
MKEPYGVGLDIGTNSVGWTVVDASGHVRKIKGQTGIGVRLFKEGAAAADRRGFRTTRRRLKRVKWRLRLLREFFDQPISKVDINFFARRKYSDVSPRDPNYNGLEKTLFNDRSDQDFYHDYPTIYHLREALMTQHRKFDVREIYLAIHHIVKYRGNFLRNDAATAYRSGTLDLQQHFETLNHLFSQADLELNLNLTTDVALLDSIKQTLVRTDISRSDRQKLIMPLLAVLTGATTAEKKRQKAVVTEFAKALVGNKTKIDVLTLTDIDATEAKDWAFSLEENQDKLPGIEDRFSEVGQQIIDEVIRLYASVNLAQLIPEGKRFSQSMVEKYKRHGEDLKLLKAYIRSQSDAKRGRAIRATYDQYIDGVKSKQVTQEAFQKALGKFVDADVDLNSWAAQIKQAIDSEQFMPKLRTKQNGAIPYQVQQNELDQIISNQKEYYPWLGEENPVIKRRGKFPYKLDELFGFRVPYYVGPLITKEMQAATANAGFAWMVRKADGPITPWNFDDKVDRVASATAFIQRMQTTDTYLIGEEVLPARSLIYQRFMVLNELNNIRVDDGQLTPRQKQRLYNQVFKKHKRVTAKNIQDNLVAAREFPTAPRITGLADPKVFNSSLSTYHDLKQVLPEAMSDVRKQADIEKIILWSTIFEDSTIFKQKLTEISWLTAAQLKQLGQLRYRGWGQLLRKLLTGLKDDNNRSIMDGLWETNANFMQLRSQPAIENQIKSANQANLTTADLQDTINELYTSPQNKKAIREVMVVLADIKDAMHGQTPNWIFVEAARGGGVAGRRTQSRSKQIVAAYQGTAQAIVRDQVQRELKEKIKNKANFNTRLVLYFLQNGRDLYTGDAINIDRLSEYDIDHILPQSLVKDDSLDNRVLTNARINREKNDTFASEKFGKKMGAKWKEMHRMGLMTKRKLDHLLMRPDEISKYATGFINRQLVETRQVIKLVEELINAEYPSTAIVSVKANLTHQFRQTFDFPKIREVNDYHHAFDAALTAFIGTYLLKRYPKLERFFVYGKFAKQPVNLTRFNVIRKLAKTDTPITDIDTGEVLWDKLTDIKYFETLYDYKRLLVTREVSENYGAMFDQTLLKASDNGKRLIRKKQSFDTAIYGGYTGKTLAYMAIVKVSTKKDVQYQVVGVPTTMVTQIEQLEQQGMTNKQAVTKVIEPLIAANNKKMLTYEVLLPKVRFEQVVRDRIKGQTHRFALGTDTYYHNIQELYLPLTLQRAFLGKQNESEVQLNQNLLTVFDATLAQVNRYFPLYEMNKFKKILNSARDQIELLEAKNQFVKNKLVLGKQGILTNMFIGLHANASYGDLKVLGVKIDFGKLQVPGGIKLTGDAEIIYQSPTGLFERKIALKDL

SEQ ID NO: 295 - protein, 1363 aa, Lactobacillus rhamnosus
MTKLNQPYGIGLDIGSNSIGFAVVDANSHLLRLKGETAIGARLFREGQSAADRRGSRTTRRRLSRTRWRLSFLRDFFAPHITKIDPDFFLRQKYSEISPKDKDRFKYEKRLFNDRTDAEFYEDYPSMYHLRLHLMTHTHKADPREIFLAIHHILKSRGHFLTPGAAKDFNTDKVDLEDIFPALTEAYAQVYPDLELTFDLAKADDFKAKLLDEQATPSDTQKALVNLLLSSDGEKEIVKKRKQVLTEFAKAITGLKTKFNLALGTEVDEADASNWQFSMGQLDDKWSNIETSMTDQGTEIFEQIQELYRARLLNGIVPAGMSLSQAKVADYGQHKEDLELFKTYLKKLNDHELAKTIRGLYDRYINGDDAKPFLREDFVKALTKEVTAHPNEVSEQLLNRMGQANFMLKQRTKANGAIPIQLQQRELDQIIANQSKYYDWLAAPNPVEAHRWKMPYQLDELLNFHIPYYVGPLITPKQQAESGENVFAWMVRKDPSGNITPYNFDEKVDREASANTFIQRMKTTDTYLIGEDVLPKQSLLYQKYEVLNELNNVRINNECLGTDQKQRLIREVFERHSSVTIKQVADNLVAHGDFARRPEIRGLADEKRFLSSLSTYHQLKEILHEAIDDPTKLLDIENIITWSTVFEDHTIFETKLAEIEWLDPKKINELSGIRYRGWGQFSRKLLDGLKLGNGHTVIQELMLSNHNLMQILADETLKETMTELNQDKLKTDDIEDVINDAYTSPSNKKALRQVLRVVEDIKHAANGQDPSWLFIETADGTGTAGKRTQSRQKQIQTVYANAAQELIDSAVRGELEDKIADKASFTDRLVLYFMQGGRDIYTGAPLNIDQLSHYDIDHILPQSLIKDDSLDNRVLVNATINREKNNVFASTLFAGKMKATWRKWHEAGLISGRKLRNLMLRPDEIDKFAKGFVARQLVETRQIIKLTEQIAAAQYPNTKIIAVKAGLSHQLREELDFPKNRDVNHYHHAFDAFLAARIGTYLLKRYPKLAPFFTYGEFAKVDVKKFREFNFIGALTHAKKNIIAKDTGEIVWDKERDIRELDRIYNFKRMLITHEVYFETADLFKQTIYAAKDSKERGGSKQLIPKKQGYPTQVYGGYTQESGSYNALVRVAEADTTAYQVIKISAQNASKIASANLKSREKGKQLLNEIVVKQLAKRRKNWKPSANSFKIVIPRFGMGTLFQNAKYGLFMVNSDTYYRNYQELWLSRENQKLLKKLFSIKYEKTQMNHDALQVYKAIIDQVEKFFKLYDINQFRAKLSDAIERFEKLPINTDGNKIGKTETLRQILIGLQANGTRSNVKNLGIKTDLGLLQVGSGIKLDKDTQIVYQSPSGLFKRRIPLADL

SEQ ID NO: 296 - protein, 1361 aa, Lactobacillus rhamnosus
  Lactobacillus rhamnosus HN001
MTKLNQPYGIGLDIGSNSIGFAVVDANSHLLRLKGETAIGARLFREGQSAAERRESRTTRRRLSRTRWRLSFLRDFFAPHITKIDPDFFLRQKYSEISPKDKDRFKYEKRLFNDRTDAEFYEDYPSMYHLRLHLMTHTHKADPREIFLAIHHILKSRGHFLTPGAAKDFNTDKVDLEDIFPALTEAYAQVYPDLELTFDLAKADDFKAKLLDEQATPSDTQKALVNLLLSSDGEKEIVKKRKQVLTEFAKAITGLKTKFNLALGTEVDEADASNWQFSMGQLDDKWSNIETSMTDQGTEIFEQIQEHYRARLLNGIVPAGMSLSQAKVADYGQHKEDLELFKTYLKKLNDHELAKTIRGLYDRYINGDDAKPFLREDFVKALTKEVTAHPNEVSEQLLNRMGQANFMLKQRTKANGAIPVQLQQRELDQIIANQSKYYDWLAKPNPVEKHRASKPYQLDELLTFRIPYYVGPLITPKEQAESRENVFAWMIRKDPSGNITPYNFDEKVDCPASANMFIQRMKNTDTYLIGEDVLPKRSLLYQKYEVLNELNNVSIDGRRLGADQKQRLIREVFERHSSVTIKQVAENLVAHGDFAKRPEIRGLADEKRFLSSLSTYHQLKKILHEAIDDPTKEHDIENIITWSTVFEDAAIFKTELAKISWLDSDTIKALSNIRYRGWGQFSRKLLDGLKLGNGHTVIQELMLSNHNLMQILTDETLKTTMAELNQDKLKADDIEDVINDAYTSPSNKKALRQVLRVVEDIKHAANGQDPSWLYIETADGPGTAGKRTQSRQKQIQTVYANAAQELIDSAVRGELEDKIADKASFTDRLVLYFMQGGRDIYTGAPLNIDQLSHYDIDHILPQSLIKDDSLDNRVLVNATINREKNNVFASTLFASKMAATWRKWHEAGLISGRKLRNLMLRPDEIDKFAHGFVARQLVETRQIIKLTEQIAAAQYPNTKIIAVKAGLSHQLREELDFPKNRDVNHYHHAFDAFLAARIGTYLLKRYPKLAPFFTYGEFAKVDVKKFREFNFIGALTHAKKNIVAKDTGEIVWDKERDIQELDRIYNFKRMLITHEVYFETADLFKQTIYAAKDSKERGGSKQLIPKKQGYPTQVYGGYTRENTAYLAVVKTVEKKADVYRVVRIATSQVAALKEARAQSTVKERELLKKFLTTKFTKIGKNGKKAITPFDIVIPRVPREQLFHNKRYGFFMVNSDTLMHNYQELWMSRSDQQILSKLVKSAKTVENGQVGRLFENIVEQINKYFPLYDINQFRKKLDQSKDIFSKLPLEGNGTTSGKRETIQNILTGAGTGAKNGDLKNLGIKTPFGFLQVPSGIVLDDDTTLIYQSPTGMLNRIVRLSEL

SEQ ID NO: 297 - protein, 1361 aa, Lactobacillus rhamnosus
  Lactobacillus rhamnosus R0011
MTKLNQPYGIGLDIGSNSIGFAVVDANSHLLRLKGETAIGARLFREGQSAAERRESRTTRRRLSRTRWRLSFLRDFFAPHITKIDPDFFLRQKYSEISPKDKDRFKYEKRLFNDRTDAEFYEDYPSMYHLRLHLMTHTHKADPREIFLAIHHILKSRGHFLTPGAAKDFNTDKVDLEDIFPALTEAYAQVYPDLELTFDLAKADDFKAKLLDEQATPSDTQKALVNLLLSSDGEKEIVKKRKQVLTEFAKAITGLKTKFNLALGTEVDEADASNWQFSMGQLDDKWSNIETSMTDQGTEIFEQIQELYRARLLNGIVPAGMSLSQAKVADYGQHKEDLELFKTYLKKLNDHELAKTIRGLYDRYINGDDAKPFLREDFVKALTKEVTAHPNEVSEQLLNRMGQANFMLKQRTKANGAIPVQLQQRELDQIIANQSKYYDWLAKPNPVEKHRASKPYQLDELLTFRIPYYVGPLITPKEQAESRENVFAWMIRKDPSGNITPYNFDEKVDCPASANMFIQRMKNTDTYLIGEDVLPKRSLLYQKYEVLNELNNVSIDGRRLGADQKQRLIREVFERHSSVTIKQVAENLVAHGDFAKRPEIRGLADEKRFLSSLSTYHQLKKILHEAIDDPTKEHDIENIITWSTVFEDAAIFKTELAKISWLDSDTIKALSNIRYRGWGQFSRKLLDGLKLGNGHTVIQELMLSNHNLMQILTDETLKTTMAELNQDKLKADDIEDVINDAYTSPSNKKALRQVLRVVEDIKHAANGQDPSWLYIETADGPGTAGKRTQSRQKQIQTVYANAAQELIDSAVRGELEDKIADKASFTDRLVLYFMQGGRDIYTGAPLNIDQLSHYDIDHILPQSLIKDDSLDNRVLVNATINREKNNVFASTLFASKMAATWRKWHEAGLISGRKLRNLMLRPDEIDKFAHGFVARQLVETRQIIKLTEQIAAAQYPNTKIIAVKAGLSHQLREELDFPKNRDVNHYHHAFDAFLAARIGTYLLKRYPKLAPFFTYGEFAKVDVKKFREFNFIGALTHAKKNIVAKDTGEIVWDKERDIQELDRIYNFKRMLITHEVYFETADLFKQTIYAAKDSKERGGSKQLIPKKQGYPTQVYGGYTRENTAYLAVVKTVEKKADVYRVVRIATSQVAALKEARAQSTVKERELLKKFLTTKFTKIGKNGKKAITPFDIVIPRVPREQLFHNKRYGFFMVNSDTLMHNYQELWMSRSDQQILSKLVKSAKTVENGQVGRLFENIVEQINKYFPLYDINQFRKKLDQSKDIFSKLPLEGNGTTSGKRETIQNILTGAGTGAKNGDLKNLGIKTPFGFLQVPSGIVLDDDTTLIYQSPTGMLNRIVRLSEL

SEQ ID NO: 298 - protein, 1375 aa, Lactobacillus ruminis
  Lactobacillus ruminis ATCC 25644
MRKNQEPYNIGLDIGTSSIGWSIMNDNFDLMRVKGKKGIGVRLYNEGQSAAERRMHRTARRRYGRRKWRLRLLEDFFDEHMAEVDDTFFARLKDSNISPKDDKKYRKSLLFPKSKGVTYQDDGEFYKKYPTMYHLRYALMTEHRKFDLREIYLAFHHMVKYRGNFLYDTSVDSFEAKNLDIKGKFDEINDLLSSYTDFYVDNSNAALVESILLEKNTTRKDKSKKIAKLLHVEDKEKGKNKKAKDLATQISNAVLGLKCNFHLIFELQQKYSFDLCSEKTEENIAKLSEVLDENQKMLLMILKEVQDQVMLNAFVPSGMSLSEAMMQKYDDYGEQLKIYHELEHSVSDDSAAKLRGAYRDYNDNIIKRIDGDNKKDTFYKRVKNILTKISKEYVDQDVLESCGKLKKLIDENKLFIRQRTAANGVLPHQLHQIEMRKIIDNQKEYYPWLAEPNPNEKRRVYSKYKVEELIAFRIPYYVGPLVDPNNADKNKEARFSWMVRKKDGEITPWNFYDKVDWAESANNFIERMKSKDTYLLGEDVVPKESMLYQKYEVLNELNNLRINDSGLSDSFEDVKLKQAIYNDLFKKQKIVKITDLQNYLVQNHKYLVKPKISGLADENRFLSSLSTYSDLKTIFGDKVDDRTYFNDFEKMVEYSTVFEDGHDYNQKLDEYTWLTKEEKYKIGKKRYRGWGKLSKKLLTGLRDKNNHTIMDNLWETNRNFMQIQTADEFSKQIAEENERHLKGSVSDAINDMYTSPANKKAIRQVLRVVDDIQKAMGYAPSSISLEFAREDGPSVRTVSRANRMKSIYEKYASEVSEEVMKDLDGVIKDKKGLNDRLYLYFEQQGKDMYSGHPLDFDKVISGQEYDIDHILPQAVIKDDSLDNRVLTTKALNNDVKSKGVPCRMFNGMHSFWKNLYDKGFISRRKFNNLTTNPENIDKYKMKGFVNRQLVETRQIIKLVANVLNDKYQNDDVDIIEVRAELTHDVRKHFKFYKNRNVNDYHHAFDAYLTSFIGHYLFKKYPNLRPLFDYNDFMKVSDNVFKQLRGNNFLGEFLNKTGDIISTDGNFVLNKEEMINKLNKAYAFKKILVTKEVGQRTGAMFNETRYPAPNSRKAALKYRRMPKPDSLISVKDYKNTDIYGGYSGKNDAYMVIVDMGKQYMVVGVPVRYTEKLDKLRIKHSELYRDELRKVLSRDKTLLDSKGNVKRFDIVLDRVLYGQLIEDGNELFTLGSSKYKRNFRQLFLDKQCIEILDSSATPQPTDEELIWVYDQILDKVDKYFELYDINRQRETLRKGRAAFCSLPNISMKKDDVTKKKILNEILVALHANESESNCEKIGKKVFGRLQVPGGIKLSKEAKLIYQSPTGLFERVVYLKDL

SEQ ID NO: 299 - protein, 1339 aa, Lactobacillus salivarius
  Lactobacillus salivarius SMXD51
MERYHIGLDIGTSSIGWAVIGDDFKIKKKKGKNLIGTRLFNEGATAAERRGFRTQRRRLNRRKWRLKLLEEIFDPYMAEVDEYFFARLKSSNLSPKDSNKKYLGSLLFPDKSDSNFYDKYPTIYHLRRDLMEKDEKFDLREIYLAIHHIVKYRGNFLEKVPAKNYKNSGASIGFLLEEVNSLYKDIIGDESIAILNSEKFEDVEKIILDEETRNLDKQKSVGKLLVEDKKKKNIVTAFSKAIFGYKFNIEDLLLIENDEKNKLTFNDENIDDIFNELSHSLDDKQMDLLTKTREIYFKFKLNMIVPTGYTLSESMIEKYEMHKAHLKMYKEFINTLNTKDRKILKNAYSDYINTEKAKAANAQENFYKTVKKIIKDNNSDTAKKIIVLIDEGNFMPKQRTGENGVIPHQLHQIELDRIIENQAKYYPWLAEANPVEKNRKFAKYKLDELVTFRVPYYVGPLIDKTESNKNEKETKFAWMVRKAKGTITPWNFENLVDRTESANRFIKRMTSKDTYIIGEDVLPASSLLYEKFKVLNELNNIKVNEKKLDIEQKQDIYLNLFTTAKNVTKKSLATYLNCSADSISGLSDGEKFNSSLSSYIDLKAILGNIVDDCNKNEDLEKIIEYSTVFEDGNIYKEKLSEISWLTDEQIEKLSNIHFKGWGRLSKKLLTQITNENGERIIDALWNTSNNFMQIINDESIQAKLAEINGKYAGKSDLEDILSEAYTSPQNKKAIRQVMKVVEDIEKAMQCEPTSISIEFTRKKQKSRLTNTRYKKISDVYEKIADEVISEYELRKLQSELDSNANNMRDRYYLYFMQLGRDMYTGEKINIDELHQRYDIDHILPQSFIKDDSINNRVLTRKDVNNKEKSDKTAADLYAVEMSDFWRKLRKQGLITEQKYKNLLTKSDSIDKYAKKGFIKRQLVETSQVVKLVANILQDKYSDTKIIEVRAKLNSNLREEYKLIKNRAVNDYHHAIDGYLTTFIGQYLYKTYPKLRSYFVYNDFKKLDSNYLKHMKKFNFLWQLQDDKTIDIYDNVNNKFVLNVPEMKKYIQKIYNYKYMLVSKEVTTKNGAFYDQTKYNAKTVNLIPIKKNKPTNIYGGYKGKVSSYMMLVKIRKKKEVIYKFVGVPRLWTDELDRLKDTTERKILLNEIAKNSLSKTEQDFEVILDKVYYGQLIIDGNQKYTLGSSEYKYNAMQLHLSKHALEVLAKENVKDAEITDKDLVSVYEEILSVVNKYFELYDINKFRQKLNEGLEIFRKLPVYNVYESNKIKQVGKFEVLNRILMGLHANAMITDLKVLGIKTKLGQMQVNGGIKLSPDAKLIYQSPTGIFSRAVRVKDLG

SEQ ID NO: 300 - protein, 1331 aa, Lactobacillus sanfranciscensis
MNKQPYNIGLDIGTSSVGWSATELDNRLLHIKGHNGIGVRLFKEGESAADRRGFRTTRRRLARRKWRLRLLNEIFATEIAKVDPSFFARLKQSNVSPKDPNKTMFENILFDDENLDDQKFHHDYKTIYHLRQAIINHPEQKFDIRLIYLAMHHIIKYRGHFLNQANVQDFKGGKIDLEKSFKALNDIFENQGRDLRLVTDKANQYVKVLSDNAKTRSDRKKELSKLLYVPIDKDTDKNSKKVTGEILKAILGNKAKFDVIFGIEVENPKEWVLTFNSDDFDDKIEGLSSQMTDEDSEILLILKELYFALNLSDILNNSVTDKNAKTLSEAMINRYDDHKNQLAMLKKVIDSSDKKHAKELKEAYSAYIDGENNKKISFEDLKKRIQKNLVDSELSQKINDLLDHDYFLPKQRSKENGAIPHQLQQQELDQIIESQKQYYPFLAELNPNEKRSRQAKYKLDELVAFRVPYYVGPMVEVTDSNQENNGKFAWMIRKEQGEITPWNFDEKVDRTETATKFITRMTTTDTYLIGEPVLPKNSLLYQKFVVLNELNNLKINQEIITPGQKQYLYEHVMKKNKRVTLKKIADALVIKGDYPYAPEVKGTTDQKNLNNGLTTYIDLAKIFGNELDDVDREADFEKIIEWSTIFEDQHIFALKLQELKWLTEKQRNQVVKLRYQGWGKLSKELLAGLVDDNGQRIIDLLWSDNQNFMQIVNQKSFKESIADHNGAHLEEKNLKDVINDLYTSPQNKKAIRQVILVVDDIINAVGYEPANIMMEFAREDSNDHRLTNSRSRQLENVYKDITNSWFDNDSVKDELEDKIKNKDKFTDRLYLYFTQGGKDLYTGEPLNIDDLSSYDIDHILPQSFILDNSLDNRVLTSQRNNRVSKEDQLPGELFGTKMHAFWKRLKAAHLISNKKYYNLTLTPNSISKFNNQGRFINRQLVETRQVIKLAAEILHNRYSEEKGTNIVTIKANLTHHMREKFNFYKNRNVNDYHHAFDAYLTAFVGNWLLQQYPKLKPYFVYGDFAKTEINNLKSFNMLYKFEQAHQLNEKDGKIAKDADALLGYMKNVYHFKKMLVTKKLETNHGALFKQTLYPSPAHDIKKRQLIKPKDNRPTDIYGGYTHEERKYMSLVKVIGKKDNEYRMANVPLLKINKNNDIKEILKSQFSNKKFEIVLPKVLKNQLFSENGALFVIGSKGYKYNANQLVLSDLDMKLLNDLSNNKSIDEVTINQLFKNIVDSTNKYMPLYEIKNLNEVVEKFNNLEFNDKKKTITDFLLATHANPTMSNLKNIGLPSYFGRFTSGNAGIKLSENANVIYQSPTGLFSRKVKISDF

SEQ ID NO: 301 - protein, 1419 aa, Lactobacillus sp.
  Lactobacillus sp. 66c
MAKPQNYTIGLDIGTNSVGWTVTDDQNNILRIKSKKAIGARLFEEGKVAAERRSFRTTRRRLSRRKWRIKLLEELFDEEISKVDPNFFARSHESWISPKDKRERYSAIVFPTPEEDKKFHNEYPTIYHLRDRLMKDDQKHDIREIYVAIHHIMKYRGNFLHDESIETYRSGMSSLGGGDERTILNTKILDDLNDAFADNLATQGISVNSASADQINEIVTSGHLNVDSQKAIAKLLLPTTLSSDDKKQDKKIKKLATDAAKNVASAWLGYKANFAAILNIQEVDKDKKKIYSFALQGADEEDKVETLESVLSQDQIEIVDRIIRIRHAIVLGEIIPVGMTLSEAMIEKYDQHAKDLKNLKTVIRNLKDRKNAVKLQAIYDLYVNNRHADTAKAMKLAGVKKRTELLEPEEFNKSIEKLLDDSPVSAEIKKRIAEKDFLPLQRSNSNGVIPNQLHQIELDEIIKKQSKYYPFLGETNEHASADVARKAPTKLDQLLTFRVPYYVGPLITKEEQEEQDGHSFAWMIRKNPKDHEKITPWNFDEKVDRMASATQFIKRMTTKDTYLLGEDVLPSSSLKYQLFTVLNELNNLRINHKKLTREEKEQVIEDLFKKYKTVKADKFKNYWQKGHAGLDVKIQGMADPEKFNSTMSTYIDLQKIFGDQLDDAQRQNDFEKIIEYSTIFEDRKILGEKLRADFVWLSEDQIKRLCRLRLQGWGRLSLKLLTRLTDADGQNVLERLLNSNDNFMQIVKDPVIKAKIEQKNQKLLRADWSENATESILDEAYTSPQNKKAIRQVMRVVHDIVKACDGNLPAKFAIEFARSQDDDPKRTVARADRLQKIYAQISDEVVSQGVKDQLSGMKSLKDRYYLYFMQGGRDAYTGKPLNIDRLSDYDIDHIMPQSFIKDDSLDNRVLVTRAVNNQKSDNVPVLLYGNHLVADLGITIREMWDRWQKSGMISKRKLANLLTDPATLSEYRAEGFINRQLVETSQVIKLTATILQSEFPDSKIIEVPAKYNSILRKQFDLYKSREVNDYHHAIDAYLSTIVGNYLYQVYPNLRRLFVYGEFKKFSHGEEESSHQAVRRVKSMNFLDDLLRGKHGDDIYCRVTGEVIFSRKDIISKLKQAYSFKQMLVTQEVFTKKSALFDQTVYPSPARDSKTRSGLIPRKQGMDTEIYGGYSGNKDAYFVLAQVVKSKGHTLQVVGVPIRALRALANCSNYSEQLLKIVKAQVLFNKKTGKAKKGISDVRILLDKIPYRQPVLDGSAFYMLGSSTYKYNLKQISLSQQSMKYILDYIDDPNFNKHEMTKIDQQNEKECLLSVYDEILDKMDKYLSLYDINGFRKKLHVGRDKFIKLEVEKQAEAIKNVLRGFHANSDMTKLSDLGLSTSLGFMQASDGIKLSDNAVFIYQSPTGLFERRVKVSDLLK

SEQ ID NO: 302 - protein, 1289 aa, Lactobacillus versmoldensis
  Lactobacillus versmoldensis KCTC 3814
MRRRYRRRRNRLNWLDELFADELAKIDPSFLLRMKNSWVSKKESTRKRDPYNLFIDEKYNDVDYFNQYPTIFHLRKELITEDKKVDIRLIYLAIHNIIKYRGNFTLENQNFDISQLSSNFSQQISDFFALFSDFGVIMPEDFDPDKISDILLNPNLSPSGKVSEAIATISPKTNVKAKIKIILLLLVGNNGDLKKLFDLETTEKIAVKLSSRHIDSELPIILSELNEQQENIITIANSIFGSIILKDFLGDETSISAAKVISFEDHKQDLQKLKTMWRETSNKEAVKAGKKAYEDYIGHEDSETFYKKIKKFLEKAQPVDLANKALAEIELENYLPKQRNRNNTVIPYQLNENELIAILDHQEKYYPFLKENRDKILSLLTFRIPYYVGPLQDSNNNRFSWMTRKASGAIRPWNFSEKVNVEQSSNDFIKRMRSTDTYLIGEPVLPKKSLIYQCYEVLSELNNTRVKDGSSNPKRLDVTIKQRIYNEIFKNQKSVSVKVLQNWLIKESYFKSPEISGLADKKKYLSSLSTYIDFKKIFGQRFVDDPVNSPQLEELAEWLTLFEDKKILLIKLQNSKYSYDQATINKLSTMRYQGTGKLSKKLLVDLKTTKKSIGKSGAESLSILDLMWSTKDNFMQIIHDADYTFEQQIKEFNYDTEDELTPLEKVANLHGSPALKRGLNQSIKVVADIVKFMGHDPEKIFIEFTRSDDFSKLTISRYRRIKKQYLEIAKAIKKIPAEFKDIKEYQTQLEENKGKLASERLMLYFLQCGHSLYSNKPIDLNMINSSKYHVDHILPQSYIKDDSLENKALVLASENENKIDNMLISHDIIATNLPRWQALKDQNLMGSKKFADLTRTTVTENQKKGFIQRQLVQTSQIVKNITLILNDLYKNTSCIETRATLSSEFRKAFSNFDETTYHYQFPEFVKNRDVNDFHHAQDAFLACVIGEYQLKKYPKDNLRLVYDQYSKFLDSLKKDTRKKNGRMPRYTQNGFIIGSMFNGKTYVDDNGEIIWDQKIKESIRKTFNYHQFNVVRQTIEQHGKLFNDTIQPHSDRYKLIPLKTNRDPAIYGGYNNDNNAYSVVLDVDGKKKINGIPIRIANQLKSDELDLSSWLENNIKHKKPMTILIDKVPKYQRIINEETGDLLITSANEVINNVQLFLPSMYTALISLLDSTKTEMYSKLLSNYEANILIDIYDYLLTKLKNNYPLYRKEWAKLAEHRDDFIESDLVTQASTLQQLIKFMHADPSNVNLKFGNFKGNRFGRKNGNIKLSKTDFIYESPTGLFKSIKHID

SEQ ID NO: 303 - protein, 1372 aa, Legionella pneumophila
  Legionella pneumophila 130b
MESSQILSPIGIDLGGKFTGVCLSHLEAFAELPNHANTKYSVILIDHNNFQLSQAQRRATRHRVRNKKRNQFVKRVALQLFQHILSRDLNAKEETALCHYLNNRGYTYVDTDLDEYIKDETTINLLKELLPSESEHNFIDWFLQKMQSSEFRKILVSKVEEKKDDKELKNAVKNIKNFITGFEKNSVEGHRHRKVYFENIKSDITKDNQLDSIKKKIPSVCLSNLLGHLSNLQWKNLHRYLAKNPKQFDEQTFGNEFLRMLKNFRHLKGSQESLAVRNLIQQLEQSQDYISILEKTPPEITIPPYEARTNTGMEKDQSLLLNPEKLNNLYPNWRNLIPGIIDAHPFLEKDLEHTKLRDRKRIISPSKQDEKRDSYILQRYLDLNKKIDKFKIKKQLSFLGQGKQLPANLIETQKEMETHFNSSLVSVLIQIASAYNKEREDAAQGIWFDNAFSLCELSNINPPRKQKILPLLVGAILSEDFINNKDKWAKFKNFWNTHKIGRTSLKSKCKEIEEARKNSGNAFKIDYEEALNHPEHSNNKALIKIIQTIPDIIQAIQSHLGHNDSQALIYHNPFSLSQLYTILETKRDGFHKNCVAVTCENYWRSQKTEIDPEISYASRLPADSVRPFDGVLARMMQRLAYEIAMAKWEQIKHIPDNSSLLIPIYLEQNRFEFEESFKKIKGGSSDKTLEQAIEKQNIQWEEKFQRIINASMNICPYKGASIGGQGEIDHIYPRSLSKKHFGVIFNSEANLIYCSSQGNREKKEEHYLLEHLSPLYLKHQFGTDNVSDIKNFISQNVANIKKYISFHLLTPEQQKAARHALFLDYDDEAFKTITKFLMSQQKARVNGTQKFLGKQIMEFLSTLADSKQLQLEFSIKQITAEEVHDHRELLSKQEPKLVKSRQQSFPSHAIDATLTMSIGLKEFPQFSQELDNSWFINHLMPDEVHLNPVRSKEKYNKPNISSTPLFKDSLYAERFIPVWVKGETFAIGFSEKDLFEIKPSNKEKLFTLLKTYSTKNPGESLQELQAKSKAKWLYFPINKTLALEFLHHYFHKEIVTPDDTTVCHFINSLRYYTKKESITVKILKEPMPVLSVKFESSKKNVLGSFKHTIALPATKDWERLFNHPNFLALKANPAPNPKEFNEFIRKYFLSDNNPNSDIPNNGHNIKPQKHKAVRKVFSLPVIPGNAGTMMRIRRKDNKGQPLYQLQTIDDTPSMGIQINEDRLVKQEVLMDAYKTRNLSTIDGINNSEGQAYATFDNWLTLPVSTFKPEIIKLEMKPHSKTRRYIRITQSLADFIKTIDEALMIKPSDSIDDPLNMPNEIVCKNKLFGNELKPRDGKMKIVSTGKIVTYEFESDSTPQWIQTLYVTQLKKQP

SEQ ID NO: 304 - protein, 1372 aa, Legionella pneumophila
MESSQILSPIGIDLGGKFTGVCLSHLEAFAELPNHANTKYSVILIDHNNFQLSQAQRRATRHRVRNKKRNQFVKRVALQLFQHILSRDLNAKEETALCHYLNNRGYTYVDTDLDEYIKDETTINLLKELLPSESEHNFIDWFLQKMQSSEFRKILVSKVEEKKDDKELKNAVKNIKNFITGFEKNSVEGHRHRKVYFENIKSDITKDNQLDSIKKKIPSVCLSNLLGHLSNLQWKNLHRYLAKNPKQFDEQTFGNEFLRMLKNFRHLKGSQESLAVRNLIQQLEQSQDYISILEKTPPEITIPPYEARTNTGMEKDQSLLLNPEKLNNLYPNWRNLIPGIIDAHPFLEKDLEHTKLRDRKRIISPSKQDEKRDSYILQRYLDLNKKIDKFKIKKQLSFLGQGKQLPANLIETQKEMETHFNSSLVSVLIQIASAYNKEREDAAQGIWFDNAFSLCELSNINPPRKQKILPLLVGAILSEDFINNKDKWAKFKIFWNTHKIGRTSLKSKCKEIEEARKNSGNAFKIDYEEALNHPEHSNNKALIKIIQTIPDIIQAIQSHLGHNDSQALIYHNPFSLSQLYTILETKRDGFHKNCVAVTCENYWRSQKTEIDPEISYASRLPADSVRPFDGVLARMMQRLAYEIAMAKWEQIKHIPDNSSLLIPIYLEQNRFEFEESFKKIKGSSSDKTLEQAIEKQNIQWEEKFQRIINASMNICPYKGASIGGQGEIDHIYPRSLSKKHFGVIFNSEVNLIYCSSQGNREKKEEHYLLEHLSPLYLKHQFGTDNVSDIKNFISQNVANIKKYISFHLLTPEQQKAARHALFLDYDDEAFKTITKFLMSQQKARVNGTQKFLGKQIMEFLSTLADSKQLQLEFSIKQITAEEVHDHRELLSKQEPKLVKSRQQSFPSHAIDATLTMSIGLKEFPQFSQELDNSWFINHLMPDEVHLNPVRSKEKYNKPNISSTPLFKDSLYAERFIPVWVKGETFAIGFSEKDLFEIKPSNKEKLFTLLKTYSTKNPGESLQELQAKSKAKWLYFPINKTLALEFLHHYFHKEIVTPDDTTVCHFINSLRYYTKKESITVKILKEPMPVLSVKFESSKKNVLGSFKHTIALPATKDWERLFNHPNFLALKANPAPNPKEFNEFIRKYFLSDNNPNSDIPNNGHNIKPQKHKAVRKVFSLPVIPGNAGTMMRIRRKDNKGQPLYQLQTIDDTPSMGIQINEDRLVKQEVLMDAYKTRNLSTIDGINNSEGQAYATFDNWLTLPVSTFKPEIIKLEMKPHSKTRRYIRITQSLADFIKTIDEALMIKPSDSIDDPLNMPNEIVCKNKLFGNELKPRDGKMKIVSTGKIVTYEFESDSTPQWIQTLYVTQLKKQP

SEQ ID NO: 305 - protein, 1355 aa, Leuconostoc gelidum
  Leuconostoc gelidum KCTC 3527
MTYSIGLDIGTGSVGWAVIGDDYRLKRAKGKNLIGVRLFDSATTAAERRGYRTTRRRLSRRHWRLRLLNDIFASDLAEQDENFLPRLKYSWVNPDDEQNPQLNSDVANGALFGSSETDKAFHKNYPTIYHLRHELMTDTAKHDLREVYLAIHHIVKYRGNFLNTADKINAENSFNVDLFIAALDEYNEFLETPITSIKDAQLFSDKLTDINARNKSVRVENAMSETYDDKSKIFKAILTALVGNTANFQTIFDLSDLEKDEAKNFKFKLDLEDVETKLDVVRAKLSDEQNAFLEAVLIAYDGITLKMILGDYKSISQSMIESYKSHQRDWKYIKNNVRLNEQKIEPDKNSVKFFKLDPKKLIYPSNLAYLQVISSNEDEHRKGLDYFKTAIQDADILQRIENDTFLPRQRTKRNGVLPYQLHLAELEQIIKKQSKYYPFLANIYTQDNKTENKLIGLLKFRVPYYVGPLVEAEKVTGDGKNHWLIKKELQENTPITPFNFDDVVDKDKSGEQFIKRITGTDSYLIGEPTLPENSLLYQKYNVLQELNNVRNERHQRLPIKVKQDIFEHVFKIDKNVNAKKVMAYLKLNGYGDFQIAGLSDTRTGKFNSNLSSYNYFVDLLGREKTEKIREDRLEEIIEIQTVFEDKILVAKRLSNLDFLTPQEKSKLSAKHYTGWGRLSQKLLTTQFIKTALSEAGDIIPQSHSIIDLLYYTDKNLMEILNDKTFNVRNWLTEQNKGTESGNSLYDQIDALAGPKDIKRGITQVFSIIDDIKKAMGSNPETVYLEFARETQTSRLTNSRLNRVQEIYNSPELKTEFAYLAKKLEAETKESIHDDRLYLYYLQEGRDMYTGKEIPFDQISSNYDIDHIIPQAFTKDDSLDNRVLVNRATNARKSNSPTFTNDIIDNRKSWWQSLVKRGLMSKEKFERLTDKRKTFSENQTNHFIARQLVETRQIIKNVADLIKNNYDGTQAVAIRASLTGEMRRYLDWPKNRDMNDYHHAHDALMMATVGKYVDRRGFFDNGSVSDGAGNAYNLYTKDWLVAARVGTRNDSQRVNPYGFIVGSMNSKAVRQQVNKETGEIVWGNENLDYLRHVLSYKKILVTRRLSGSSGRLYAETLFSPNPKAKLIAQKANRSVALYGGFTKAESAYTALVEFNKKGDRSYKLIKVPMAIANRVNDKQITVTAYIASLNLRDFSRVVLEHLPLGTLIRESDGSEFYAASSEYKHNAKELWAPKEILRSSKKLDKATADNLIDIFDFLTNDKTISNFKFYEKDLLHLKNVRDKFVEASDEIKIKVLSDVIYELHNDAGWRDPFKHIQEKPAWTMLQVKGGIKLSEKAAIVYQSPTGLFETITIVGE

SEQ ID NO: 306 - protein, 1337 aa, Listeria innocua
  Listeria innocua ATCC 33091
MKNMKKPYTIGLDIGTNSVGWAVLTDQYDLVKRKMKIAGDSEKKQIKKNFWGVRLFDEGQTAADRRMARTARRRIERRRNRISYLQGIFAEEMSKTDANFFCRLSDSFYVDNEKRNSRHPFFATIEEEVEYHKNYPTIYHLREELVNSSEKADLRLVYLALAHIIKYRGNFLIEGALDTQNTSVDGIYKQFIQTYNQVFASGIEDGSLKKLEDNKDVAKILVEKVTRKEKLERILKLYPGEKSAGMFAQFISLIVGSKGNFQKPFDLIEKSDIECAKDSYEEDLESLLALIGDEYAELFVAAKNAYSAVVLSSIITVAETETNAKLSASMIERFDTHEEDLGELKAFIKLHLPKHYEEIFSNTEKHGYAGYIDGKTKQADFYKYMKMTLENIEGADYFIAKIEKENFLRKQRTFDNGAIPHQLHLEELEAILHQQAKYYPFLKENYDKIKSLVTFRIPYFVGPLANGQSEFAWLTRKADGEIRPWNIEEKVDFGKSAVDFIEKMTNKDTYLPKENVLPKHSLCYQKYLVYNELTKVRYINDQGKTSYFSGQEKEQIFNDLFKQKRKVKKKDLELFLRNMSHVESPTIEGLEDSFNSSYSTYHDLLKVGIKQEILDNPVNTEMLENIVKILTVFEDKRMIKEQLQQFSDVLDGVVLKKLERRHYTGWGRLSAKLLMGIRDKQSHLTILDYLMNDDGLNRNLMQLINDSNLSFKSIIEKEQVTTADKDIQSIVADLAGSPAIKKGILQSLKIVDELVSVMGYPPQTIVVEMARENQTTGKGKNNSRPRYKSLEKAIKEFGSQILKEHPTDNQELRNNRLYLYYLQNGKDMYTGQDLDIHNLSNYDIDHIVPQSFITDNSIDNLVLTSSAGNREKGDDVPPLEIVRKRKVFWEKLYQGNLMSKRKFDYLTKAERGGLTEADKARFIHRQLVETRQITKNVANILHQRFNYEKDDHGNTMKQVRIVTLKSALVSQFRKQFQLYKVRDVNDYHHAHDAYLNGVVANTLLKVYPQLEPEFVYGDYHQFDWFKANKATAKKQFYTNIMLFFAQKDRIIDENGEILWDKKYLDTVKKVMSYRQMNIVKKTEIQKGEFSKATIKPKGNSSKLISRKTNWDPMKYGGLDSPNMAYAVVIEYAKGKNKLVFEKKIIRVTIMERKAFEKDEKAFLEEQGYRQPKVLAKLPKYTLYECEEGRRRMLASANEAQKGNQQVLPNHLVTLLHHVANCEVSDGKSLDYIESNREMFAELLAHVSEFAKRYTLAEANLNKINQLFEQNKEGDIKAIAQSFVDLMAFNAMGAPASFKFFETTIERKRYNNLKELLNSTIIYQSITGLYESRKRLDD

SEQ ID NO: 307 - protein, 1334 aa, Listeria innocua
MKKPYTIGLDIGTNSVGWAVLTDQYDLVKRKMKIAGDSEKKQIKKNFWGVRLFDEGQTAADRRMARTARRRIERRRNRISYLQGIFAEEMSKTDANFFCRLSDSFYVDNEKRNSRHPFFATIEEEVEYHKNYPTIYHLREELVNSSEKADLRLVYLALAHIIKYRGNFLIEGALDTQNTSVDGIYKQFIQTYNQVFASGIEDGSLKKLEDNKDVAKILVEKVTRKEKLERILKLYPGEKSAGMFAQFISLIVGSKGNFQKPFDLIEKSDIECAKDSYEEDLESLLALIGDEYAELFVAAKNAYSAVVLSSIITVAETETNAKLSASMIERFDTHEEDLGELKAFIKLHLPKHYEEIFSNTEKHGYAGYIDGKTKQADFYKYMKMTLENIEGADYFIAKIEKENFLRKQRTFDNGAIPHQLHLEELEAILHQQAKYYPFLKENYDKIKSLVTFRIPYFVGPLANGQSEFAWLTRKADGEIRPWNIEEKVDFGKSAVDFIEKMTNKDTYLPKENVLPKHSLCYQKYLVYNELTKVRYINDQGKTSYFSGQEKEQIFNDLFKQKRKVKKKDLELFLRNMSHVESPTIEGLEDSFNSSYSTYHDLLKVGIKQEILDNPVNTEMLENIVKILTVFEDKRMIKEQLQQFSDVLDGVVLKKLERRHYTGWGRLSAKLLMGIRDKQSHLTILDYLMNDDGLNRNLMQLINDSNLSFKSIIEKEQVTTADKDIQSIVADLAGSPAIKKGILQSLKIVDELVSVMGYPPQTIVVEMARENQTTGKGKNNSRPRYKSLEKAIKEFGSQILKEHPTDNQELRNNRLYLYYLQNGKDMYTGQDLDIHNLSNYDIDHIVPQSFITDNSIDNLVLTSSAGNREKGDDVPPLEIVRKRKVFWEKLYQGNLMSKRKFDYLTKAERGGLTEADKARFIHRQLVETRQITKNVANILHQRFNYEKDDHGNTMKQVRIVTLKSALVSQFRKQFQLYKVRDVNDYHHAHDAYLNGVVANTLLKVYPQLEPEFVYGDYHQFDWFKANKATAKKQFYTNIMLFFAQKDRIIDENGEILWDKKYLDTVKKVMSYRQMNIVKKTEIQKGEFSKATIKPKGNSSKLIPRKTNWDPMKYGGLDSPNMAYAVVIEYAKGKNKLVFEKKIIRVTIMERKAFEKDEKAFLEEQGYRQPKVLAKLPKYTLYECEEGRRRMLASANEAQKGNQQVLPNHLVTLLHHAANCEVSDGKSLDYIESNREMFAELLAHVSEFAKRYTLAEANLNKINQLFEQNKEGDIKAIAQSFVDLMAFNAMGAPASFKFFETTIERKRYNNLKELLNSTIIYQSITGLYESRKRLDD

SEQ ID NO: 308 - protein, 1334 aa, Listeria monocytogenes
MKNPYTIGLDIGTNSVGWAVLTNQYDLVKRKMKVAGNSDKKQIKKNFWGVRLFDDGQTAVDRRMNRTARRRIERRRNRISYLQEIFAVEMANIDANFFCRLNDSFYVDSEKRNSRHPFFATIEEEVAYHKNYRTIYHLREELVNSSEKADLRLVYLALAHIIKYRGNFLIEGALDTKNTSVDGVYEQFIQTYNQVFMSNIEEGTLAKVEENIEVANILAGKFTRREKFERILQLYPGEKSTGMFAQFISLIVGSKGNFQKVFDLIEKTDIECAKDSYEEDLEALLAIIGDEYAELFVAAKNTYNAVVLSSIITVTATETNAKLSASMIERFDAHEKDLGELKAFIKLHLPKQYQEIFNNAAIDGYAGYIDGKTKQVDFYKYLKTILENIEGADYFIAKIEEENFLRKQRTFDNGAIPHQLHLEELEAIIHQQAKYYPFLREDYEKIKSLVTFRIPYFVGPLAKGQSEFAWLTRKADGEIRPWNIEEKVDFGKSAVDFIEKMTNKDTYLPKENVLPKHSLCYQKYMVYNELTKVRYIDDQGKTNYFSGQEKQQIFNDLFKQKRKVKKKDLELFLRNINHIESPTIEGLEDSFNASYATYHDLLKVGMKQEILDNPLNTEMLEDIVKILTVFEDKPMIKEQLQQFSDVLDGGVLKKLERRHYTGWGRLSAKLLVGIREKQSHLTILDYLMNDDGLNRNLMQLINDSNLSFKSIIEKEQVSTTDKDLQSIVADLAGSPAIKKGILQSLKIVDELVSIMGYPPQTIVVEMARENQTTGKGKNNSKPRYKSLEKAIKEFGSKILKEHPTDNQELKNNRLYLYYLQNGKDMYTGQELDIHNLSNYDIDHIVPQSFITDNSIDNLVLTSSAGNREKGGDVPPLEIVRKRKVFWEKLYQGNLMSKRKFDYLTKAERGGLTDADKARFIHRQLVETRQITKNVANILHQRFNNETDNHGNTMEQVRIVTLKSALVSQFRKQFQLYKVREVNDYHHAHDAYLNGVVANTLLKVYPQLEPEFVYGEYHQFDWFKANKATAKKQFYTNIMLFFGQKERIIDENGEILWDKKYLETIKKVLDYRQMNIVKKTEIQKGEFSKATIKPKGNSSKLIPRKENWDPMKYGGLDSPNMAYAVIIEHAKGKKKLIFEKKIIRITIMERKMFEKDEEAFLEEKGYRHPKVLTKLPKYTLYECEKGRRRMLASANEAQKGNQLVLSNHLVSLLYHAKNCEASDGKSLKYIEAHRETFSELLAQVSEFATRYTLADANLSKINNLFEQNKEGDIQAIAQSFVDLMAFNAMGAPASFKFFEATIDRKRYTNLKELLSSTIIYQSITGLYESRKRLDD

SEQ ID NO: 309 - protein, 1334 aa, Listeria monocytogenes
  Listeria monocytogenes FSL J1-194
MKNPYTIGLDIGTNSVGWAVLTDQYDLVKRKMKVAGNSDKKQIKKNFWGVRLFDDGQTAVDRRMNRTARRRIERRRNRISYLQEIFAVEMANIDANFFCRLNDSFYVDSEKRNSRHPFFATIEEEVAYHKNYRTIYHLREELVNSSEKADLRLVYLALAHIIKYRGNFLIEGALDTKNTSVDEVYKQFIQTYNQVFMSNIEEGALAKVEENTEVASILAGKFTRREKFERILRLYPGEKSTGMFAQFISLIVGNKGNFQKVFNLVEKTDIECAKDSYEEDLEALLAIIGDEYAELFVAAKNTYNAVVLSSIITVTATETNAKLSASMIERFDAHEKELGELKAFIKLHLPKQYQEIFNNAEIDGYAGYIDGKTKQVDFYKYLKTTLENVEGADYFITKIEEENFLRKQRTFDNGVIPHQLHLEELEAILHQQAKYYPFLREGYDKIKSLVTFRIPYFVGPLANGQSEFAWLTRKDDGEIRPWNIEEKVDFGKSAVDFIEKMTNKDTYLPKENVLPKHSLCYQKYMVYNELTKIRYIDDQGKTNYFSGREKQQIFNDLFKQKRKVKKKDLELFLRNINHIESPTIEGLEDSFNASYATYHDLLKVGLKQEILDNPLNTEILEDIVKILTVFEDKRMIKEQLEQFSDVLDGVVLKKLERRHYTGWGRLSAKLLVGIRDKQSHLTILDYLMNDDGLNRNLMQLINDSNLSFKSIIEKEQVSTTDKDLQSIVADLAGSPAIKKGILQSLKIVDELVSIMGYPPQTIVVEMARENQTTGKGKNNSKPRYKSLEKAIKDFGSQILKEHPTDNQELKNNRLYLYYLQNGKDIYTGQELDIHNLSNYDIDHIVPQSFITDNSIDNLVLTSSAGNREKGGDVPPLEIVRKRKVFWEKLYQGNLMSKRKFDYLTKAERGGLTEADKARFIHRQLVETRQITKNVANILHQRFNKETDNHGNTMEQVRIVTLKSALVSQFRKQFQLYKVREVNDYHHAHDAYLNGVVANTLLKVYPQLEPEFVYGEYHQFDWFKANKATAKKQFYTNIMLFFAQKERIIDENGEILWDKKYLETIKKVLDYRQINIVKKTEIQKGEFSKATIKPKGNSSKLIPRKENWDPMKYGGLDSPNMAYAVIIEHAKGKKKIVIEKKLIQINIMERKMFEKDEEAFLEEKGYHQPKVLTKLPKYTLYECEKGRRRMLSSANEAQKGNQLVLSNHLVSLLYHAKNCEASDGKSLKYIEAHRETFSELLAQVSEFATKYTLADANLSKINNLFEQNKEGDIKAIAQSFVDLMAFNAMGAPASFKFFEATIDRKRYTNLKELLSSTIIYQSITGLYESRKRLDD

SEQ ID NO: 310 - protein, 1334 aa, Listeria monocytogenes
  Listeria monocytogenes FSL J1-208
MKNPYTIGLDIGTNSVGWAVLTDQYDLVKRKMKVAGNSDKKQIKKNFWGVRLFDEGETAADRRMNRTARRRIERRRNRISYLQEIFALEMANIDANFFCRLNDSFYVDSEKRNSRHPFFATIEEEVAYHKNYRTIYHLREELVNSSEKADLRLVYLALAHIIKYRGNFLIEGALDTKNTSVDGVYKQFIQTYNQVFISNIEEGTLAKMEENTTVADILAGKFTRKEKLERILQLYPGEKSTGMFAQFISLIVGSKGNFQKVFDLVEKTDIECAKDSYEEDLEALLAIIGDEYAELFVAAKNTYNAVVLSSIITVTDTETNAKLSASMIERFDAHEKDLSELKAFIKLHLPKQYEEIFSNVAIDGYAGYIDGKTKQVDFYKYLKTLLENIEGADYFIAKIEEENFLRKQRTFDNGAIPHQLHLEELEAILHQQAKYYPFLKEAYDKIKSLVTFRIPYFVGPLANGQSDFAWLTRKADGEIRPWNIEEKVDFGKSAVDFIEKMTNKDTYLPKENVLPKHSLYYQKYMVYNELTKVRYIDDQGKTNYFSGQEKQQIFNDYFKQKRKVSKKDLEQFLRNMSHIESPTIEGLEDSFNSSYATYHDLLKVGIKQEVLENPLNTEMLEDIVKILTVFEDKRMIKEQLQQFSDVLDGAVLKKLERRHYTGWGRLSAKLLVGIRDKQSHLTILDYLMNDDGLNRNLMQLINDSNLSFKSIIEKEQVSTTDKDLQSIVADLAGSPAIKKGILQSLKIVDELVSIMGYPPQTIVVEMARENQTTVKGKNNSRPRYKSLEKAIKEFGSQILKEHPTDNQELRNNRLYLYYLQNGKDMYTGQELDIHNLSNYDIDHIVPQSFITDNSIDNLVLTSSAGNREKGDDVPPLEIVRKRKVFWEKLFQGNLMSKRKFDYLTKAERGGLTEADKATFIHRQLVETRQITKNVANILHQRFNNETDNHGNNMEQVRIVMLKSALVSQFRKQFQLYKVREVNDYHHAHDAYLNGVVANTLLKVYPQLEPEFVYGEYHQFDWFKANKATAKKQFYTNIMLFFAQKERIIDENGEILWDKKYLETIKKVLDYRQMNIVKKTEIQKGEFSKATIKPKGNSSKLIPRKENWDPMKYGGLDSPNMAYAVIIEHAKGKKKVVFEKKIIRITIMERKAFEKDEKSFLEKQGYRQPKVLTKLPKYTLYECENGRRRMLASANEAQKGNQQVLKGQLITLLHHAKNCEASDGKSLDYIESNREMFGELLAHVSEFAKRYTLADANLSKINQLFEQNKDNDIKVIAQSFVNLMAFNAMGAPASFKFFEATIERKRYTNLKELLSATIIYQSITGLYEARKRLDG

SEQ ID NO: 311 - protein, 1334 aa, Listeria monocytogenes
  Listeria monocytogenes FSL N3-165
MKKPYTIGLDIGTNSVGWAVLTDQYDLVKRKMKISGDSEKKQIKKNFWGVRLFEKGETAAKRRMSRTARRRIERRRNRISYLQEIFAIQMNEVDDNFFNRLKESFYAESDKKYNRHPFFGTVEEEVAYYKDFPTIYHLRKELIDSQKKADLRLVYLALAHIIKYRGHFLIEGALDTKNTSIDEMFKQFLQIYNQVFANDIEEASLKKTEKNQEVAQILAEKFTRKDKLDKILSLYPGEKTTGVFAQFVNIIVGSTGKFKKHFNLHEKKDINCAEDTYDTDLESLLAIIGDEFAEVFVAAKNAYNAVVLSNIITVTDSTTRAKLSASLIERFENHKEDLKKMKRFVRTYLPEKYDEIFDDTEKHGYAGYISGKTKQADFYKYMKATLEKIEGADYFIAKIEEENFLRKQRTFDNGVIPHQLHLEELEAILHQQAKYYPFLREDYEKIKSLVTFRIPYFVGPLAKGQSEFAWLTRKADGEIRPWNIEEKVDFGKSAVDFIEKMTNKDTYLPKENVLPKHSLCYQKYMVYNELTKVRYIDDQGKTNYFSGQEKQQIFNDLFKQKRKVKKKDLELFLRNINQIESPTIEGLEDSFNASYATYHDLLKVGMKQEILDNPLNTEMLEDIVKILTVFEDKRMIKEQLQQFSDVLDGTVLKKLERRHYTGWGRLSAKLLVGIRDKQSHLTILDYLMNDDGLNRNLMQLINDSNLSFKSIIEKEQVSTTDKDLQSIVAELAGSPAIKKGILQSLKIVDELVSVMGYPPQTIVVEMARENQTTNKGKNNSKPRYKSLEKAIKEFGSQILKEHPTDNQELKNNRLYLYYLQNGKDMYTGQELDIHNLSNYDIDHIVPQSFITDNSVDNLVLTSSAGNREKGDNVPPLEIVQKRKIFWEKLYQGNLMSKRKFDYLTKAERGGLTEADKARFIHRQLVETRQITKNVANILHQRFNYKTDGNKDTMETVRIVTLKSALVSQFRKQFQFYKVREVNDYHHAHDAYLNGVVANTLLKVYPQLEPEFVYGEYHQFGWFKANKATAKKQFYTNIMLFFAQKDRIIDENGEILWDKRYLETVKKVLGYRQMNIVKKTEIQKGEFSNVTPNPKGKSNKLIPRKKDWDPIKYGGFDGSKMAYAIIIEYEKQKRKVRIEKKLIQINIMEREAFEKDEKTFLEEKGYHQPKVLIKVPKYTLYECKNGRRRMLGSANEAHKGNQMLLPNHLMALLYHAEKYEAIDGESLAYIEVHRALFDELLAYISEFARKYTLSNDRLDEINMLYERNKDGDVKSIAESFVSLKKFNAFGVHQDFSFFGTKIERKRDRKLNELLNSTIIYQSITGLYESRKRLDN

SEQ ID NO: 312 - protein, 1334 aa, Listeria monocytogenes
  Listeria monocytogenes FSL R2-503
MKNPYTIGLDIGTNSVGWAVLTDQYDLVKRKMKVAGNSDKKQIKKNFWGVRLFDDGQTAVDRRMNRTARRRIERRRNRISYLQEIFAVEMANIDANFFCRLNDSFYVDSEKRNSRHPFFATIEEEVAYHKNYRTIYHLREELVNSSEKADLRLVYLALAHIIKYRGNFLIEGALDTKNTSVDEVYKQFIQTYNQVFMSNIEEGALAKVEENTEVASILAGKFTRREKFERILRLYPGEKSTGMFAQFISLIVGNKGNFQKVFNLVEKTDIECAKDSYEEDLEALLAIIGDEYAELFVAAKNTYNAVVLSSIITVTATETNAKLSASMIERFDAHEKELGELKAFIKLHLPKQYQEIFNNAEIDGYAGYIDGKTKQVDFYKYLKTTLENVEGADYFITKIEEENFLRKQRTFDNGVIPHQLHLEELEAILHQQAKYYPFLREGYDKIKSLVTFRIPYFVGPLANGQSEFAWLTRKDDGEIRPWNIEEKVDFGKSAVDFIEKMTNKDTYLPKENVLPKHSLCYQKYMVYNELTKIRYIDDQGKTNYFSGREKQQIFNDLFKQKRKVKKKDLELFLRNINHIESPTIEGLEDSFNASYATYHDLLKVGLKQEILDNPLNTEILEDIVKILTVFEDKRMIKEQLEQFSDVLDGVVLKKLERRHYTGWGRLSAKLLVGIRDKQSHLTILDYLMNDDGLNRNLMQLINDSNLSFKSIIEKEQVSTTDKDLQSIVADLAGSPAIKKGILQSLKIVDELVSIMGYPPQTIVVEMARENQTTGKGKNNSKPRYKSLEKAIKDFGSQILKEHPTDNQELKNNRLYLYYLQNGKDIYTGQELDIHNLSNYDIDHIVPQSFITDNSIDNLVLTSSAGNREKGGDVPPLEIVRKRKVFWEKLYQGNLMSKRKFDYLTKAERGGLTEADKARFIHRQLVETRQITKNVANILHQRFNKETDNHGNTMEQVRIVTLKSALVSQFRKQFQLYKVREVNDYHHAHDAYLNGVVANTLLKVYPQLEPEFVYGEYHQFDWFKANKATAKKQFYTNIMLFFAQKERIIDENGEILWDKKYLETIKKVLDYRQINIVKKTEIQKGEFSKATIKPKGNSSKLIPRKENWDPVKYGGLDSPNMAYAVIIEHAKGKKKIVIEKKLIQINIMERKMFEKDEEAFLEEKGYHQPKVLTKLPKYTLYECEKGRRRMLSSANEAQKGNQLVLSNHLVSLLYHAKNCEASDGKSLKYIEAHRETFSELLAQVSEFATKYTLADANLSKINNLFEQNKEGDIKAIAQSFVDLMAFNAMGAPASFKFFEATIDRKRYTNLKELLSSTIIYQSITGLYESRKRLDD

SEQ ID NO: 313 - protein, 1334 aa, Listeria monocytogenes
  Listeria monocytogenes serotype 1/2a str. F6854
MKNPYTIGLDIGTNSVGWAVLTNQYDLVKRKMKVAGNSDKKQIKKNFWGVRLFDDGQTAVDRRMNRTARRRIERRRNRISYLQEIFAVEMANIDANFFCRLNDSFYVDSEKRNSRHPFFATIEEEVAYHDNYRTIYHLREKLVNSSEKADLRLVYLALAHIIKYRGNFLIEGALDTKNTSVDEVYKQFIETYNQVFMSNIEEGALAKVEENIEVANILAGKFTRREKFERILQLYPGEKSTGMFAQFISLIVGSKGNFQKVFDLIEKTDIECAKDSYEEDLETLLAIIGDEYAELFVAAKNTYNAVVLSSIITVTDTETNAKLSASMIERFDAHEKDLVELKAFIKLNLPKQYEEIFSNAAIDGYAGYIDGKTKQVDFYKYLKTILENIEGSDYFIAKIEEENFLRKQRTFDNGAIPHQLHLEELEAIIHQQAKYYPFLKEDYDKIKSLVTFRIPYFVGPLANGQSEFAWLTRKADGEIRPWNIEEKVDFGKSAVDFIEKMTNKDTYLPKENVLPKHSLCYQKYMVYNELTKIRYIDDQGKTNYFSGREKQQVFNDLFKQKRKVKKKDLELFLRNINHIESPTIEGLEDSFNASYATYHDLLKVGMKQEILDNPLNTEMLEDIVKILTVFEDKPMIKEQLQQFSDVLDGGVLKKLERRHYTGWGRLSAKLLVGIREKQSHLTILDYLMNDDGLNRNLMQLINDSNLSFKSIIEKEQVSTTDKDLQSIVAELAGSPAIKKGILQSLKIVDELVSIMGYPPQTIVVEMARENQTTGKGKNNSKPRYKSLEKAIKEFGSQILKEHPTDNQELKNNRLYLYYLQNGKDMYTGQELDIHNLSNYDIDHIVPQSFITDNSIDNLVLTSSAGNREKGGDVPPLEIVRKRKVFWEKLYQGNLMSKRKFDYLTKAERGGLTEADKARFIHRQLVETRQITKNVANILYQRFNKETDNHGNTMEQVRIVTLKSALVSQFRKQFQLYKVREVNGYHHAHDAYLNGVVANTLLKVYPQLEPEFVYGEYHQFDWFKANKATAKKQFYTNIMLFFAQKERIIDENGEILWDKKYLETIKKVLDYRQMNIVKKTEIQKGEFSKATIKPKGNSSKLIPRKENWDPMKYGGLDSPNMAYAVIIEHAKGKKKIVIEKKLIQINIMERKMFEKDEEAFLEEKGYRHPKVLTKLPKYTLYECEKGRRRMLASANEAQKGNQLVLSNHLVSLLYHAKNCEASDGKSLKYIEAHRETFSELLAQVSEFATRYTLADANLSKINNLFEQNKEGDIKAIAQSFVDLMAFNAMGAPASFKFFEATIDRKRYTNLKELLSSTIIYQSITGLYESRKRLDD

SEQ ID NO: 314 - protein, 1087 aa, Listeriaceae bacterium
  Listeriaceae bacterium TTU M1-001
MKKLVLGLDIGVASVGWGIIDAENGDVVDTGVRLFSSRDASENESRRTSRQSRRLSRRKKHRRERIKQLLLAHDMDICDIVNENPYELRVKGLNEKLEVSEIYVALTHLAKRRGVSYLDDVVEEGGTIKSEHLNKNMEEIKSGKMPCEIQLERFEKYGQVRGMIEINQDTEESSFLVNIFRTSDYIKEAKTILATQQKFHKQITNEFIDEYIHIMASKRDYFIGPGNEKSRTDYGVYRTNGDTWDNLFEILIGKCSVFPEETRAARSSYVAQEFNLLNDLNNLKISNLESGKLSASQKHDIVEKVKNSKKFGTKDLLKYIASVCECKIEDIGGCRVDKNRKPIMHTFENYRKVHNALNEAGVDLRLSETDYDELMKIMTLNSETLEIKKQCKEKLPQLTEDYLNVCLVLNKKGAFSGWHALSLKAMKLMMPELYGTSKNQMQIIHTMQLGKAYLKPLNQQKYLNSEAILEEIYNPIAARSIRQTIKVTNAILKKYGHLDSVIIEMPRDYQTSEDERKMIEKMQKENEKEKKAALKRAREEYPFPDEAFRNHKELATKLRLWYQQDQFCVYSGRKISVVDLVRNPNQFEIDHIIPQSVSLDDSLNNKVLCFSEENQKKGQQTPFYYHKGKSGNWTYEQYKLFVEKLFDKKKISNKKRELLLFEEDINKWDVRRGFIARNLVDTRYASRVILNSYQQYFGNHEMGTKVKVVRGKFTSQLRKKWRIFKDRNESHSHHAIDALIVAATANLRLWKKNTLGVSDEGKVYDKETGEILPFEKLTESEYNEMMNKEPYLNFKTKLQNIETKVKYSYRVSKKVNRKISDATIYSTRERDGIDYIVGKIKNIYDVKTYKDQFLKRYKKNKEQFLMYQHDPQTFAILENIMATYQDAENPFLAYKKEYGVIRKYSKKGGGSPVTSLKFIDKVLGQKIDLTAKNQAALPKNKKVVLQSITPYRADVYYDEIDKRYHLIGVKYSLFSFSKQGYVINPIAYQKLLEKEQIHSEMKFCFSLYREDIIEFGEDPDSLTRYRFWSKNESGKNKIEVKPIEKPNFEKQTVLTITKKIKILNKYQTDVLGNSFKAQEEKDPRNIE

SEQ ID NO: 315 - protein, 1345 aa, Marinilabilia sp.
  Marinilabilia sp. AK2
MKKILGLDLGTTSIGWAFIKEPEKDVVGSEIVDMGVRIVALSSDEENDFAKGNTISINADRTLKRGARRNLQRFKLRRDALLEIFKEMKLIPSNFKYAEDGPSSTFSTLKLRDKAAKEKIELDDLVKVLLQINKKRGYRSSRKAKSEEDDGSAIDSMGIAKELYENDLTPGQWVFEALQKGRKNVPDFYRSDLQEEFKKIVNYQSEFYPDVLNSSFVEDWMGKASTPTKQYFNKKGVHLAENKGKREERRLQEYNWRAVAVNSKIDLSEIALILSQINSQISNSSGYLGAISDRSKELYFKNQTVGQYLYQQIKINPHTRLKGQVFYRQDYLDEFEKIWSVQSGFHPQLNDALKKEIRDITIFFQRRLKSQKHLISNCEFEDYHKVVPKSHPIFQEFRIWQNLNNLTLIKKDNLNEKSELALEDKIALANELAFKREQSVKDALNILGLKSSEWEFNFTKIEGNRTNHAFFEAFAKIIEIEDGEPLDLGNLKADDILDQFSEAFLRIGIDPGLLQVNNDIEGPNYEKQPYIQFWHLLYSSEDDQKLKQNLIKKFGFKPDHAKILASISLQDDHASLSSRAIKKILPHLQSGLIYDKACTYAGYNHSSSFTKEENEKRELSSELDLLKKNSLRNPVVEKILNQMINVVNAILKDPNLGKPDEIRVEMARELKANAEQRKNMTSNIASATRDHEKYREILKKEFGLKRVTKNDLLRYKLWLETDGISLYTGKPIEASKLFSKEYDIEHIIPKTRLFDDSFSNKTICERQLNIDKANVTAFSFLQNKLSGDEFEQYQSRVKSLFGKLSKAKIQKLLMANDKIPEDFIARQLQETRYISKKAKEILFEITRRVSVTTGTITDKLREDWGLVEIMKELNWEKYDKLGLTYTIEGKHGERLNKIKDWSKRNDHRHHAMDALTVALTKPAYIQYLNNLNAKELNGKKSTEIFAIEQKYLKRENGKLCFIPPVENIRTEAKKHLSKVLISYKAKNKVVTINKNRTNKKAGFNEQIALTPRGQLHKETVYGKAFHYSTKFEKIGASFDVQKINAVAKKEEREALLKRLAENGDDPKKAFTGKNSLSKMPIYLDLKRNIKLPEKVKTVVLEQNYTIRKNIDPDLKLDKVIDVGVKRILENRLKEFGGNAKLALSNLDENPIWLNKEKGITIKRVKISGVSNVESLHVKKDHFGEPILDQVGNEIPVDFVSTGNNHHVAIYEDEKGNLQEEVVSFFEAVVRQNQGLPIINKNHSLGWKFLFTLKQNEYFVFPSDDFDPTDVDLMDEENYHLISPNLFRVQKFTTKDYFFRHHLETTVEDKSELKGVSFKRLGLPGLNCIKKIRINHLGKIIQVGEY

SEQ ID NO: 316 - protein, 1352 aa, Megasphaera sp.
  Megasphaera sp. UPII 135-E
MKKRNREEYYVGLDIGTSSVGWAVATPDYRIPKFRGHKMWGSRLFAEGKRAAERRQFRTNRRRLARRRDRLQILEELFAEEMAKVDNTFFMRLKESKFFLEDKTVKEKHILFSTDKFDADRFYKDNPTIYHVRKRLMEEEPQDIRELFLAVHHILKYRGHFLFAGSLEQNGASIEELVRTLLGKQGLAILDDTIDSNEMVNILKNTGETKSDRKKDVQELWNPLKDKVKKAQAAEMAGLVLGLKSDISKLFANSDYKDLDSSIKNINFSSGDYEEKRDDYANSIGDDIVLLDTMKALYDTLILSQILQGKRSISAAKVEDYNTHKEQLRALKAILKPHKRLYNEMFRENNKKDLSNYVAYISSYSEGKRVNREGFYKYVQAVLKQVDDSDSKQAILEAIRLETFLPLLRVKDNAVIPHQIHQAELEAILETARKKYNFLNDVSDGVSVKDKIIQLFTFRIPYYVGPLNPHSGETVADRKQGTGWVVRKQRGKVYPWNFADMVDVKASAEAFITNLTNKCTYLIGEDVLPKRSLLYSEFMLLNELNMIKYDGHELPVAIKQLYIEQVFKQEHKKQTKGRVLDFLKRNGLITGSATAVITGMDDAIKGDLQSYRDMVRIFGAGFDHSMAERIIRWVTLFGEAKDILENKIREVYGNSISDSQMRAIKKLKYADWGRLSQAFLIAVKGCDKSGVERNIITCLRASSQNLMEILSDQGTYIKQIKAWNHQHTTNMMDTLDYQLVDDLYVAPSVKRSIWQSLCIVEELVKIMGQAPKKIFVEVTRTKQAEKTKKDSRKKRLVELYTAIGKEGAAWKKEIEAHQAGDFRRKKLYLYYTQMGRCMYSNEPIAMDALFTSAYDIDHIYPQSLTKDGSWDNLVLVKSQLNKEKSDQYPLRPAIREKNKAHWQYLCRAGFISEKKYERLMRTTELTAEELSGFIARQLVETSQATKAVTGLLERIYTNTEICFVKAETVSQFRHQHNFIKIRELNNYHHAKDAYLNIVVGNVYHEKFTKNPWEFIARSTERRPYNLNRMYDFDLLKQGRVIWQVPKSLETVQAMMKSNDVRITKKLLVQKGELYDATITKAHKAKEGTYFPLKGADARLRDVHRYGGYEKIKIAYYSVFSCREKASNTIHTLIIPIPVYKAGLLQTEADLTAYAWQTKQKTKPIKDIYSAITPIYKKLCINTVVKIDGFKYFLGGKTGDYMWLDPAIPVVLDEQAAAYLKAISKVGRADDVENTAQAIDLITAEANEAFYDVLLKKMEAKIFAKAYQTIVEKLASETARERFRELSIGAQCSCLLEILNLLANNKTTFTFFKDKMGVTMSRRKQPMDLTKLEECIVYETSITGLYEKAVSLL

SEQ ID NO: 317 - protein, 1080 aa, Methylocystis sp.
  Methylocystis sp. ATCC 49242
MRVLGLDGGIASIGWALIEIFEDHEPSDGRIIDTGAWMFDAPEEKSQTGTKLKSELRRIFRGQRRVIRRRRQRMNEVRRILHRHGLLSSDNRDALKQPGLDPWKIRAEGIDRLLSPIEFAVALGHIARHRGFKSNSKGAKTSDLDAESSRMKKAVGETREKLARFGSPAKLLVEDEGFVLRQTKLKSGALETVRRFRNRDGDYSRSLLRDDLAAEVRALFRAQARLQSTFAKVELEAEFTQAAFFQRPLQDSERLVGPCPFEPAEKRSPKRGYSFELFRFLSRLNHLTLREGSEERTLTVEELRTAAADFGGVAKFTFSTLRKRLALPDIAIFVGIKADDEKKLDVVARSGEAATGTARLRRVVIDALGELAWGALISAPERLDKITEIITFRSDLDRIRAGLIEAGFDTPLIEAIVRAAADGKLDAFTGVGHISAKAARNIIPGLMRGMTYDKACAAAGYDHTASRERDAFDVGMHGKEALKKILQEERISRELVGSPSARKALIEAVKQVKAIIEKYGVPDRIHVELARDVGKSIEERRDIHFGIEKRSRQKDKLRELFGKEVGHLPQDGERGKEELLRFELWNEQMGRCLYTDEYINPKQLVASDNSVQVDHILPWSRFGDDSYLNKTLCTAKANQDKKGRTPYEWFRADKPEAEWDAFVARVESIQFMKGLKKRNYKLKNAEEAAEKFRSRNLNDTRWTCRLLAEALKQLYPKGEKDKDGKERRRVFTRPGALTNRLRRAWSLQRRKKSEKGERIADDRHHALDAIIVAATTESLLIRATREVQDIERKGLHYDLTKNITQPWPGFADEALDAVEKVFVARAERRRARGKAHDATIRHIAVRDDEAKVYERKKVGDIKLGDLIRVKDAERNAPLIENLRKWIEAGSPRDNPPLSPKGDPVSKVRLVTKNKVNITLDTGNPERLATVDRGEMARVDVFRKANRKGKYEYYLVPIYPHEIATMETPPMRAVQGGGDDDKWPEIDSTFEFLWSINQLSLLELTKPDGEVIRSYFRSLDRNTGALTVSGIANSTATRKGIGTRTLIDFKKLHVDRLGQIFEVERELRTWRGETWRGKDCI

SEQ ID NO: 318 - protein, 1082 aa, Methylosinus trichosporium
  Methylosinus trichosporium OB3b
MRVLGLDAGIASLGWALIEIEESNRGELSQGTIIGAGTWMFDAPEEKTQAGAKLKSEQRRTFRGQRRVVRRRRQRMNEVRRILHSHGLLPSSDRDALKQPGLDPWRIRAEALDRLLGPVELAVALGHIARHRGFKSNSKGAKTNDPADDTSKMKRAVNETREKLARFGSAAKMLVEDESFVLRQTPTKNGASEIVRRFRNREGDYSRSLLRDDLAAEMRALFTAQARFQSAIATADLQTAFTKAAFFQRPLQDSEKLVGPCPFEVDEKRAPKRGYSFELFRFLSRLNHVTLRDGKQERTLTRDELALAAADFGAAAKVSFTALRKKLKLPETTVFVGVKADEESKLDVVARSGKAAEGTARLRSVIVDALGELAWGALLCSPEKLDKIAEVISFRSDIGRISEGLAQAGCNAPLVDALTAAASDGRFDPFTGAGHISSKAARNILSGLRQGMTYDKACCAADYDHTASRERGAFDVGGHGREALKRILQEERISRELVGSPTARKALIESIKQVKAIVERYGVPDRIHVELARDVGKSIEEREEITRGIEKRNRQKDKLRGLFEKEVGRPPQDGARGKEELLRFELWSEQMGRCLYTDDYISPSQLVATDDAVQVDHILPWSRFADDSYANKTLCMAKANQDKKGRTPYEWFKAEKTDTEWDAFIVRVEALADMKGFKKRNYKLRNAEEAAAKFRNRNLNDTRWACRLLAEALKQLYPKGEKDKDGKERRRVFSRPGALTDRLRRAWGLQWMKKSTKGDRIPDDRHHALDAIVIAATTESLLQRATREVQEIEDKGLHYDLVKNVTPPWPGFREQAVEAVEKVFVARAERRRARGKAHDATIRHIAVREGEQRVYERRKVAELKLADLDRVKDAERNARLIEKLRNWIEAGSPKDDPPLSPKGDPIFKVRLVTKSKVNIALDTGNPKRPGTVDRGEMARVDVFRKASKKGKYEYYLVPIYPHDIATMKTPPIRAVQAYKPEDEWPEMDSSYEFCWSLVPMTYLQVISSKGEIFEGYYRGMNRSVGAIQLSAHSNSSDVVQGIGARTLTEFKKFNVDRFGRKHEVERELRTWRGETWRGKAYI

SEQ ID NO: 319 - protein, 1123 aa, Mobiluncus curtisii
  Mobiluncus curtisii subsp. holmesii ATCC 35242
MFVYLNSPRGFGPATFLTDLPHFCIIFGNNDFMDNRKYHVGIDVGTNSVGFAAVEVGDSGSPIRFLNTMVVIHDSGVDPEQKKYAITRLASAGTARRTRRLYRTRRQRLRELDDFISNELGYPLVNLENFADPYEPWKVRADLATIKLPADELPEAMSIALRHMARHRGWRSPYQRVEALHLHAEISEEFSALKKRVMEKTGDVFSDDATPAEVLVDLMGRQKIRGADGMLSGKLRQSDNANELRKIASVQGIDDETLNRIIDRVFFSRSPKGKASERVGMDALPGQGSKPRALKAMPSFQKFRIVSVICNLRIKDSGDDNRPLSMEEKEQLIGYLMSSTTDDHVTWTDVAELLHVKRSNLQGTAKEGPDGERPYTRPPVNSAWSKIKDSKIKSLVALWKTGDVDVQSAIVEALSNASVLEDARPGADIVVAYLESLDDKELESLDKVGLPAGRASYSEDSLERLTERMLQDDCDLFEARKREFGVSDDWKPPADPIYAPVGNPGVDRVLKIVNRLLMAAEREWGAPTQINIEHVRSGFSSELMQREFERENERRRAQNEEAVKAILTEKGGNSHVSKYDIIRYYAVKRQNCQCLYCGTPITFSDCELDHIVPRKGVGSTNSRVNLAAACRSCNRDKSNLPFAVWAGKTSNFDVSIDGAVSRVKQWQRSQNEGAREFRAFQNEVISRLLKTTEDPEIDSRSLESVAWMARELHHRVEYYFQSKGAQTQVSVYRGAVTAQARKSSGLEDKVKMIGGGGKTRLDRRHHAMDAATIALMTPGISTTLSEKNNLRDAQKFTGQSETWKDYCGRTETAREHFAVWKSNMERLTDLFNDKLENDAIPVVQPLRLRLSDSKAHDDGIGKLDSKKLGSVWSLADIDRAATPQIWTALTRCDDFDPTKGLPENANRVIRAQGVKYESEDNIPVFPSNVAAIAVRDGYAEIGSTIHHARIYRIDDGKKIFYSMIRVFAVDLLKHQAEDLFTVKLPPSAISIRTCEDSLRRALSNGTAEYLGWLVPGDEIIVDTSDKAFHTGQIGDLLRNFPVNSFRLTGFPSNSRLRLKPVLLAGEGLRDDAEDSIKKILSGQGWRPAINVLFSKGKPRIVRRNSLGIERPSSNNGLPFSWEA

SEQ ID NO: 320 - protein, 1091 aa, Mobiluncus mulieris
  Mobiluncus mulieris 28-1
MDSRKYRVGIDVGTNSVGFAAVEEDDSGSPTRFLNTMVVIHDSGVDPEQKKYAITRLASAGTARRTRRLYRTRRQRLRELDDFISNELGYPLVNLENFADPYEPWKVRADLATTKLPNDELPEAMSIALRHMARHRGWRSPYQRVEALHLHAEISKEFAALKERVVEKTGDVFSDDATPAEVLVDLMGRQKVRGADGVLSGKLRQSDNANELRKIASVQGIDDETLNRIIDRVFSSKSPKGKASERVGMDALPGQGSKPRALKAMPSFQKFRVVSVICNLRIKDSGGDARPLSMEEKEKLIDYLMSSTTDDHVTWTDVADLLHVKRSQLQGTAKEGFDGERPYTRPPVNSTWSKIKDSKIKSLVALWKTGDVDVQSAIVEALSNASVLEDSRPGADIVVAYLESLDDKELESLDKVGLPAGRASYSEDSLERLTERMLRDDCDLFEARKREFNVADDWKPPADPIYAPVGNPGVDRVLKIVNRLLMAAEREWGAPTQINIEHVRSGFSSELMQREFERENERRRAQNEEAVKAILTEKGGNSRVSKYDITRYYAVKRQHCQCLYCGTPITFSDCELDHIVPRKGVGSTNTRVNLAAACRSCNRDKSNLPFAVWAGKASNFDVSIDDAVSRVKQWQRSQNEGVREFRAFQNEVISRLLKTTEDPEIDSRSLESVAWMARELHHRVEYYFQSKGAQTQVSVYRGAVTAQARKSSGLEDKVKMIGGGGKTRLDRRHHAMDAATIALMTPGISTTLSEKNNLRDAQKFTGQSETWKDYCGRTETARKHFAVWKSNMERLTDLFNDKLENDAIPVVQPLRLRLSNSKAHDDGIGKLDSKKLGSVWSLADIDRAATPQIWTALTRCDDFDPTKGLPENANRVIRAQGVKYESEDNIPVFPSNVAAIAVRDGYAEIGSTIHHARIYRIDDGKKTFYSMIRVFAVDLLKHQAEDLFTVKLPPSAISIRTCEDSLRRALSNGTAEYLGWLVPGDEIIVDTSDKAFHTGQIGDLLRNFPVNSFRLTGFPSNSRLRLKPVLLAGEGLRDDAEDSIKKILLGQGWRPAINVLFSKGKPRIVRRNSLGIERPSSNNGLPFSWEA

SEQ ID NO: 321 - protein, 1091 aa, Mobiluncus mulieris
  Mobiluncus mulieris FB024-16
MDSRKYRVGIDVGTNSVGFAAVEEDDSGSPTRFLNTMVVIHDSGVDSEQKKYAITRLASAGTARRTRRLYRTRRQRLRELDDFISNELGYPLVNLENFADPYEPWKVRADLATTKLPNDELPEAMSIALRHMARHRGWRSPYQRVEALHLHAEISKEFAALKERVVEKTGDVFSDDATPAEVLVDLMGRQKVRGADGVLSGKLRQSDNANELRKIASVQGIDDETLNRIIDRVFSSKSPKGKASERVGMDALPGQGSKPRALKAMPSFQKFRVVSVICNLRIKDSGGDARPLSMEEKEKLIDYLMSSTTDDHVTWTDVADLLHVKRSQLQGTAKEGFDGERPYTRPPVNSTWSKIKDSKIKSLVALWKTGDVDVQSAIVEALSNASVLEDSRPGADIVVAYLESLDDKELESLDKVGLPAGRASYSEDSLERLTERMLRDDCDLFEARKREFNVADDWKPPADPIYAPVGNPGVDRVLKIVNRLLMAAEREWGAPTQINIEHVRSGFSSELMQREFERENERRRAQNEEAVKAILTEKGGNSRVSKYDITRYYAVKRQHCQCLYCGTPITFSDCELDHIVPRKGVGSTNTRVNLAAACRSCNRDKSNLPFAVWAGKASNFDVSIDDAVSRVKQWQRSQNEGVREFRAFQNEVISRLLKTTEDPEIDSRSLESVAWMARELHHRVEYYFQSKGAQTQVSVYRGAVTAQARKSSGLEDKVKMIGGGGKTRLDRRHHAMDAATIALMTPGISTTLSEKNNLRDAQKFTGQSETWKDYCGRTETARKHFAVWKSNMERLTDLFNDKLENDAIPVVQPLRLRLSNSKAHDDGIGKLDSKKLGSVWSLADIDRAATPQIWTALTRCDDFDPTKGLPENANRVIRAQGVKYESEDNIPVFPSNVAAIAVRDGYAEIGSTIHHARIYRIDDGKKTFYSMIRVFAVDLLKHQAEDLFTVKLPPSAISIRTCEDSLRRALSNGTAEYLGWLVPGDEIIVDTSDKAFHTGQIGDLLRNFPVNSFRLTGFPSNSRLRLKPVLLAGEGLRDDAEDSIKKILLGQGWRPAINVLFSKGKPRIVRRNSLGIERPSSNNGLPFSWEA

SEQ ID NO: 322 - protein, 1473 aa, Mucilaginibacter paludis
  Mucilaginibacter paludis DSM 18603
MKNILGLDLGTNSIGWALIEKDTDQKNGNILGTGSRIIPMSQDIKDEFGKGNSISQTADRTKFRSVRRLRERHLLRRERLHRVLNVLGFLPKHYADQIDFKKRLGKLVNETEPKLVYDNKNFIFKKSFEAMLSDFNQHQPLLLADGKKVPFDWTIYYLRKKALTEKIEKEELAWLILNFNQKRGYYQLRGEEEEENPNKMVAFHSLKIVEVIADESQKGKAETWYSLILENGWIYRRSSKTPLYDWKGKQRDFIVTTDLNDDGSIKTDKEGLEKRSFRAPVEDDWTLVKKKTEQEINRSHKTVGTYIYENLLQDPKQKIKGKLVRTIEREFYKDELKMILKNQQKFHPELNDEHLYINCVRELYRNNQAHQTILSKKDFVHLFIDDIIFYQRPLRSQKSSISNCTLEFRKYKNENGTDQTDYLKAIPKSHPLFQEFRLWQWIYNLGIYQKEDDTNVTDELIKNIDGYQDLFDFLNNKKEIRQDILIKFLVEQTGLKGKPLSSVVAKYRWNFVEDKIYPCNETGTQIRTRLAKVENTPEDFLTAETEIKLWHIIYSVNDKADYEKALKTFAEKHNLDTHSFVENFKKFPPFKSEYGSFSEKAIKKLLPLIRLGKYWSWENIDKKTQERIEKILTGEFDEAIKSRVRDKAIHLTEEDHFQGLQLWLASYVVYGRHSEADNLDKWHTVADLEDYLAEFRQHSLRNPIVEQVITETLRVVKDIWLQYGQGAKDFFSEIHIELAREMKNTGDERKRLTSLVTDNENTNLRIKVLLSELLNDGNVENVRPYSPMQQEALKIFEDGVLNSDIEIEDDILKISKMAQPTNTELKRYKLWLEQKYRSPYTGQIIPLNRLFTADYEIEHIIPQSRFFDDSFSNKIICESAVNQLKDKQLGLEFIKNHSGTIVKLGMGKTAKILDVESYNEFVKGNYTKNISKRNKLMLEEIPDKMIERQLNDTRYISKFIISALSNIVRSESNDDGFNSKNVLPGNGKITSRLKQDWGMNDIWNELILPRFERMNKITDSAVFTAWNENNQKFLPIVPLEFSKGFQKKRIDHRHHALDALVIAASTREHINLLNNEHAKSDKRFDLNRKLRKFEKVAYNDPKTGKRIEKEVPTIFLKPWETFTVDAKNSLESIIVSFKQNLRVINRATNYSESYNDENGALRLGKDGNPLKEKIKQSKGDSWAIRKPMHKDFVYGKVHLQNVKLPKDKFITAIRKSLDVTFDLKRIETITDTGIQKILKNYLHSKENKVELAFSPEGIEDMNQHIERYNDGKKHQPIHKVRVFEIGSRFSLGESGNKKTKFVEAAKGTNLFFAVYQDDNKGKRNYETIPLNIVIERQKLGLHSVPTEDAKGGKLLFHLSPNDMVYVPTSEELEDNLASVNIKRLNTAQRKRIYKVEKASGVECYFIRQDIAYLIKNYDAKTKIGELESQNKLQTTMTDDRLKITDVCVKLNIDRLGSIAETFLGNQYGASKKT

SEQ ID NO: 323 - protein, 1233 aa, Mycoplasma canis
  Mycoplasma canis PG 14
MEKKRKVTLGFDLGIASVGWAIVDSETNQVYKLGSRLFDAPDTNLERRTQRGTRRLLRRRKYRNQKFYNLVKRTEVFGLSSREAIENRFRELSIKYPNIIELKTKALSQEVCPDEIAWILHDYLKNRGYFYDEKETKEDFDQQTVESMPSYKLNEFYKKYGYFKGALSQPTESEMKDNKDLKEAFFFDFSNKEWLKEINYFFNVQKNILSETFIEEFKKIFSFTRDISKGPGSDNMPSPYGIFGEFGDNGQGGRYEHIWDKNIGKCSIFTNEQRAPKYLPSALIFNFLNELANIRLYSTDKKNIQPLWKLSSVDKLNILLNLFNLPISEKKKKLTSTNINDIVKKESIKSIMISVEDIDMIKDEWAGKEPNVYGVGLSGLNIEESAKENKFKFQDLKILNVLINLLDNVGIKFEFKDRNDIIKNLELLDNLYLFLIYQKESNNKDSSIDLFIAKNESLNIENLKLKLKEFLLGAGNEFENHNSKTHSLSKKAIDEILPKLLDNNEGWNLEAIKNYDEEIKSQIEDNSSLMAKQDKKYLNDNFLKDAILPPNVKVTFQQAILIFNKIIQKFSKDFEIDKVVIELAREMTQDQENDALKGIAKAQKSKKSLVEERLEANNIDKSVFNDKYEKLIYKIFLWISQDFKDPYTGAQISVNEIVNNKVEIDHIIPYSLCFDDSSANKVLVHKQSNQEKSNSLPYEYIKQGHSGWNWDEFTKYVKRVFVNNVDSILSKKERLKKSENLLTASYDGYDKLGFLARNLNDTRYATILFRDQLNNYAEHHLIDNKKMFKVIAMNGAVTSFIRKNMSYDNKLRLKDRSDFSHHAYDAAIIALFSNKTKTLYNLIDPSLNGIISKRSEGYWVIEDRYTGEIKELKKEDWTSIKNNVQARKIAKEIEEYLIDLDDEVFFSRKTKRKTNRQLYNETIYGIATKTDEDGITNYYKKEKFSILDDKDIYLRLLREREKFVINQSNPEVIDQIIEIIESYGKENNIPSRDEAINIKYTKNKINYNLYLKQYMRSLTKSLDQFSEEFINQMIANKTFVLYNPTKNTTRKIKFLRLVNDVKINDIRKNQVINKFNGKNNEPKAFYENINSLGAIVFKNSANNFKTLSINTQIAIFGDKNWDIEDFKTYNMEKIEKYKEIYGIDKTYNFHSFIFPGTILLDKQNKEFYYISSIQTVRDIIEIKFLNKIEFKDENKNQDTSKTPKRLMFGIKSIMNNYEQVDISPFGINKKIFE

SEQ ID NO: 324 - protein, 1233 aa, Mycoplasma canis; identical to SEQ ID NO: 323
  Mycoplasma canis PG 14

SEQ ID NO: 325 - protein, 1233 aa, Mycoplasma canis
  Mycoplasma canis UF31
MEKKRKVTLGFDLGIASIGWAIVDSETNQVYKLGSRLFDAPDTNLERRTQRGTRRLLRRRKYRNQKFYNLVKRTEVFGLSSREAIENRFRELSIKYPNIIELKTKALSQEVCPDEIAWILHDYLKNRGYFYDEKETKEDFDQQTVESMPSYKLNEFYKKYGYFKGALSQPTESEMKDNKDLKEAFFFDFSNKEWLKEINYFFNVQKNILSETFIEEFKKIFSFTRDISKGPGSDNMPSPYGIFGEFGDNGQGGRYEHIWDKNIGKCSIFTNEQRAPKYLPSALIFNFLNELANIRLYSTDKKNIQPLWKLSSIDKLNILLNLFNLPISEKKKKLTNANINDIVKKESTKSIMLSVEDIDMIKDEWAGKEPNVYGVGLSGLNIEESAKENKFKFQDLKILNVLINLLDNVGIKFEFKDRNDIIKNLELLDNLYLFLIYQKESNNKDSSIDLFIAKNELLNIENLKLKLKEFLLGAGNEFENHNSKTHSLSKKAIDAILPKLLDNNEGWNLEAIKNYDEEIKSQIEDNSSLMAKQDKKYLNDNFLKDAILPPNVKVTFQQAILIFNKIIQKFSKDFEIDKVVIELAREMTQDQENDALKGIAKAQKSKKSLVEERLEANNIDKSVFNDKYEKLIYKIFLWISQDFKDPYTGAQISTNEIVNNKVEIDHIIPYSLCFDDSSANKVLVHKQSNQEKSNSLPYEYIKQGHSGWNWDEFTKYVKRVFVNNVDSILSKKERLKKSENLLTTSYDGYDKLGFLARNLNDTRYATILFRDQLNNYAEHHLIDNKKMFKVIAMNGAVTSFIRKNMSYDNKLRLKDRSDFSHHAYDAAIIALFSNKTKTLYNLIDPSLNGIISKRSEGYWVIEDRYTGEIKELKKEDWTSIKNNVQARKIAKEIEEYLIDLDDEVFFSRKTKRKTNRQLYNETIYGIAAKTDEDGITNYYKKEKFSILDDKDIYLRLLREREKFVINQSNPEVIDQIIEIIESYGKENNIPSRDEAINIKYTKNKINYNLYLKQYMRSLTKSLDQFSEEFINQMIANKTFVLYNPTKNTTRKIKFLRLVNDVKINDIRKNQVINKFNGKNNEPKAFYENINSLGAIVFKNSANNFKTLSINTQIAIFGDKNWDIEDFKTYNMEKIEKYKEIYGIDKTYNFHSFIFPGTILLDKQNKEFYYISSIQTVRDIIEIKFLNKIEFKDENKNPDTSKTPKRLMFGIKSIMNNYEQVDISPFGINKKIFE

SEQ ID NO: 326 - protein, 1233 aa, Mycoplasma canis
  Mycoplasma canis UF33
MEKKRKVTLGFDLGIASVGWAIVDSETNQVYKLGSRLFDAPDTNLERRTQRGTRRLLRRRKYRNQKFYNLVKRTEVFGLSSREAIENRFRELSIKYPNIIELKTKALSQEVCPDEIAWILHDYLKNRGYFYDEKETKEDFDQQTVESMPSYKLNEFYKKYGYFKGALSQPTESEMKDNKDLKEAFFFDFSNKEWLKEINYFFNVQKNILSETFIEEFKKIFSFTRDISKGPGSDNMPSPYGIFGEFGDNGQGGRYEHIWDKNIGKCSIFTNEQRAPKYLPSALIFNFLNELANIRLYSTDKKNIQPLWKLSSVDKLNILLNLFNLPISEKKKKLTSTNINDIVKKESIKSIMISVEDIDMIKDEWAGKEPNVYGVGLSGLNIEENAKENKFKFQDLKILNVLINLLDNVGIKFEFKDRNDIIKNLELLDNLYLFLIYQKESNNKDSSIDLFIAKNKSLNIENLKLKLKEFLLGAGNEFENHNSKSHSLSKKAIDAILPKLLDNNEGWNLEAIKNYDEEIKSQIEDNSSLMAKQDKKYLNDNFLKDAILPPNVKVTFQQAILIFNKIIQKFSKDFEIDKVVIELAREMTQDQENDALKGMAKAQKSKKSLVEERLEANNIDKSVFNDKYEKLIYKIFLWISQDFKDPYTGAQISVNEIVNNKVEIDHIIPYSLCFDDSSANKVLVHKQSNQEKSNSLPYEYIKQGHSGWNWDEFTKYVKRVFVNNVDSILSKKERLKKSENLLTTSYDGYDKLGFLARNLNDTRYATILFRDQLNNYAEHHLIDNKKMFKVIAMNGAVTSFIRKNMSYDNKLRLKDRSDFSHHAYDAAIIALFSNKTKTLYNLIDPSLNGIISKRSEGYWVIEDRYTGEIKELKKEDWTSIKNNVQARKIAKEIEEYLIDLDDEVFFSRKTKRKTNRQLYNETIYGIAAKTDEDGITNYYKKEKFSILDDKDIYLRLLREREKFVINQSNPEVIDQIIEIIESYGKENNIPSRDEAINIKYTKNKINYNLYLKQYMRSLTKSLDKFSEEFINQMIANKTFVLYNPTKNTTRKIKFLRLVNDVKINDIRKNQVINKFNGKNNEPKAFYENINSLGAIVFKNSANNFKTLSINTQIAIFGDKNWDIEDFKTYNMEKIEKYKEIYGIDKTYNFHSFIFPGTILLDKQNKEFYYISSIQTVRDIIEIKFLNKIEFKDENKNQDTSKTPKRLMFGIKSIMNNYEQVDISPFGINKKIFE

SEQ ID NO: 327 - protein, 1233 aa, Mycoplasma canis
  Mycoplasma canis UFG1
MEKKRKVTLGFDLGIASVGWAIVDSETNQVYKLGSRLFDAPDTNLERRTQRGTRRLLRRRKYRNQKFYNLVKRTEVFGLSSREAIENRFRELSIKYPNIIELKTKALSQEVCPDEIAWILHDYLKNRGYFYDEKETKEDFDQQTVESMPSYKLNEFYKKYGYFKGALSQPTESEMKDNKDLKEAFFFDFSNKEWLKEINYFFNVQKNILSETFIEEFKKIFSFTRDISKGPGSDNMPSPYGIFGEFGDNGQGGRYEHIWDKNIGKCSIFTNEQRAPKYLPSALIFNFLNELANIRLYSTDKKNIQPLWKLSSVDKLNILLNLFNLPISEKKKKLTSTNINDIVKKESIKSIMLSVEDIDMIKYEWAGKEPNVYGVGLSGLNIEESAKENKFKFQDLKILNVLINLLDNVGIKFEFKDRNDIIKNLELLDNLYLFLIYQKESNNKDSSIDLFIAKNKSLNIENLKLKLKEFLLGAGNEFENHNSKTHSLSKKAIDAILPKLLDNNEGWNLEAIKNYDEEIKSQIEDNSSLMAKQDKKYLNDNFLKDAILPPNVKVTFQQAILIFNKIIQKFSKDFEIDKVVIELAREMTQDQENDALKGIAKAQKSKKSLVEERLEANNIDKSVFDDKYEKLIYKIFLWISQDFKDPYTGAKISANEIVNNKVEIDHIIPYSLCFDDSSANKVLVHKQSNQEKSNSLPYEYIKQGHSGWNWDEFTKYVKRVFVNNVDSILSKKERLKKSENLLTTSYDGYDKLGFLARNLNDTRYATILFRDQLNNYAEHHLIDNKKMFKVIAMNGAVTSFIRKNMSYDNKLRLKDRSDFSHHAYDAAIIALFSNKTKTLYNLIDPSLNGIISKRSEGYWVIEDRYTGEIKELKKEDWTSIKNNVQARKIAKEIEEYLIDLDDEVFFSRKTKRKTNRQLYNETIYGIAAKTDEDGITNYYKKEKFSILDDKDIYLRLLREREKFVINQSNPEVIDQIIEIIESYGKENNIPSRDEAINIKYTKNKINYNLYLKQYMRSLTKSLDQFSEEFINQMIANKTFVLYNPTKNTTRKIKFLRLVNDVKINDIRKNQVINKFNGKNNEPKAFYENINSLGAIVFKNSANNFKTLSINTQIAIFGDKNWDIEDFKTYNMEKIEKYKEIYGIDKTYNFHSFIFPGTILLDKQNKEFYYISSIQTVRDIIEIKFLNKIEFKDENKNQDTSKTPKRLMFGIKSIMNNYEQVDISPFGINKKIFE

SEQ ID NO: 328 - protein, 1233 aa, Mycoplasma canis
  Mycoplasma canis UFG4
MEKKRKVTLGFDLGIASVGWAIVDSETNQVYKLGSRLFDAPDTNLERRTQRGTRRLLRRRKYRNQKFYNLVKRTEVFGLSSREAIENRFRELSIKYPNIIELKTKALSQEVCPDEIAWILHDYLKNRGYFYDEKETKEDFDQQTIESMPSYKLNEFYKKYGYFKGALSQPTESEMKDNKDLKEAFFFDFSNKEWLKEINYFFNVQKNILSETFIEEFKKIFSFTRDISKGPGSDNMPSPYGIFGEFGDNGQGGRYEHIWDKNIGKCSIFTNEQRAPKYLPSALIFNFLNELANIRLYSTDKKNIQPLWKLSSIDKLNILLNLFNLPISEKKKKLTSANINDIVKKESTKSIMLSVEDIDMIKDEWAGKEPNVYGVGLSGLNIEESAKENKFKFQDLKILNVLINLLDNVGIKFEFKDRNDIIKNLELLDNLYLFLIYQKESNNKDSSIDLFIAKNESLNIENLKLKLKEFLLGAGNEFENHNSKTHSLSKKAIDAILPKLLDNNEGWNLEAIKNYDEEIKSQIEDNSFLMAKQDKKYLNDNFLKDAILPPNVKVTFQQAILIFNKIIQKFSKDFEIDKVVIELAREMTQDQENDALKGIAKAQKSKKSLVEERLEANNIDKSVFNEKYEKLIYKIFLWISQDFKDPYTGAKISANEIVDNKVEIDHIIPYSLCFDDSSANKVLVHKQSNQEKSNSLPYEYIKQGHSGWNWDEFTKYVKRVFVNNVDSILSKKERLKKSENLLTTSYDGYDKLGFLARNLNDTRYATILFRDQLNNYAEHHLIDDKKMFKVIAMNGAVTSFIRKNMSYDNKLRLKNRNDFSHHAYDAAIIALFSNKTKTLYNLIDPSLNGIISKRSEGYWVIEDRYTGEIKELKKEDWTSIKNNVQARKIAKEIEEYLIDLDDEVFFSRKTKRKTNRQLYNETIYGIAAKTDEDGITNYYKKEKLSILDDKDIYLRLLREREKFVINQSNPEVIDQIIEIIESYGKENNIPSRDEAINIKYTKNKINYNLYLKQYMRSLTKSLDQFSEEFINQMIANKTFVLYNPTKNTTRKIKFLRLVNDVKINDIRKNQVINKFNGKNNEPKAFYENINSLGAIVFKNSANNFKTLSINTQIAIFGDKNWDIEDFKTYNMEKIEKYKEIYGIDKTYNFHSFIFPGTILLDKQNKEFYYISSIQTVRDIIEIKFLNKIEFKDENKNQDTSKTPKRLMFGIKSIMNNYEQVDISPFGINKKIFE

SEQ ID NO: 329 - protein, 1239 aa, Mycoplasma cynos
MEEKRKVTLGFDLGVASVGWAIVDSETNEVYKLGSRLFDIPDTNIDRRAKRGSRRLVRRRSYRNQKFYNLIKRTKTFGFLDKEAIEKEFVLLSIKYPNIIELKVKGLQEEVSKSEAVWILHDYLKNRGYFYDDKEEKDDLENPSIESMPSYKLYEFYKEYGYFKGALSSPTESEKNKDSDLEKAIFFNFSNKEWTKEINHFFKIQKNIFSEDFKAKFMEFFSFIRDISKGPGSENMPSQYSIFGKYGDDGMGGKYQHIWDKNIGKCSIFKDKVRAPKYLPSALFFNLLNELSNIRLYSVDKREKSVLWRLSSKDKINIILNILQIILFKNDGKISNLDINKIVKNESIKSIILNEIDLDLIKDMWFEKEPNVYGIGLSGLNIEENKKENRFKFQDLKIFSVFIDLLKKSNINIEFNNEKDIIHNLKLLDELYFFLITQKYSRDKYGSIKKFILNNKSFNIDNLDEKLNIFLSISDDEFDNHNSKTHSLSKEAIYFIFPKLLHNNEGWNLEAIKNYDIDVREEISKHSFGIKKQDKKYLDDAFLDDAILPPSVKVTIKQSILIFNKIIKKFSNKFQIDNVVIELAREMTQEKEMDAQKSLNRLKKSRKKIIEERLNANNIDSKMFRDKTGEISPNYIYKIYLWISQNFKDPYTGENISANDILKNNVEIDHIIPYSLCFDDSSSNKVLVFKHSNQSKGNFLPFDMISTFSENSVWNWKEYTQYVEKTFKTNLESILDKKERVKKADNLLTSSYDGYDKLGFLARNLNDTRYATILFRDQLINYSENHLIDSKKMFKVIAMNGGVTSFIRKNMSFDSGLKVKDRSIFSHHAYDAAIIALFSNKTKILYNLINPSLDGIISKRSEGYWVLEDRLTGEIRKLNYNDWQSIKNNVEVKKIAREIESHLSNLDNVVMFSRKSKRKTNKELYNETLYGIATRIDENGIKNYYKKEKFNILEDENIYLRLLNERENFIINRSNPEVIDAIIEIFETIDKNKIPARDVAKNIKYTDNKIKYNLYLKDYMRKLVDEFPDKFRKDFIEQMIAKKIFILFNPIKNTTRKIKSLRSINNNKIEDIRKKQVLEKFNTAKNEPRSFYESLNSLGAIIFKNNLNIYKKMSISSQIATFGDKNWKIDDINTYNKEKLNKYKEIYGIDETYDFYSFIFPGTILLDEKNKEFLYISSIQTLKDKIELKFLDRIEFEKKNVNSNLKPKIKREIISTKKLMSDYKIIKISPLGINKKIFE

SEQ ID NO: 330 - protein, 1269 aa, Mycoplasma gallisepticum
MNNSIKSKPEVTIGLDLGVGSVGWAIVDNETNIIHHLGSRLFSQAKTAEDRRSFRGARRLIRRRKYKLKRFINLIWKYNSYFGFKNKEDILNNYQEQQKLHNTVLNLKLEALNAKIDPKALSWILHDYLKNRGHFYEDNRDFNVYPTEELANYFGEYGYYKGIIDSKEDNDDKLEEGLTKYKFSNQHWLEEIKKVLSNQTGLPEKFKEEYESLFSYVRNYSEGPGSINSVSPYGIYHLDEKEGKVVQKYNNIWDKTIGKCSIFPDEYRAPKNSPIAMIFNEINELSTIRSYSIYLTGWFINQEFKKAYLNKLLDLLIKTNSEKPIDARQFKKLREETIAESIGKETLKDVEREEKLEKEDHKWKLKGLKLNTNGKIQYNDLSSLAKFVHKLKQHLKLDFLLEDQYTTLDKINFLQSLFVYLGKHLRYSNRVDSANLKEFSDSNKLFERVLQEQKDDLFKLFEQTDKDDEKILAQTHSLSTKAMLLAITRMTNLDNDEDNQKNNDKGWNFEAIKNFDQKFIDITKKNNNLSLKQDKRYLDDRFINDAILSPGVKRILREATKVFNAILKQFSEEYDVTKVVIELARELSEEKELENTKNYEKLIKKNSDKISERLEALDIAEDKIEDILKSPTKSYKVLLWLQQDHIDPYSQKEIAFEDILTKTEKTEIDHIIPYSISFDDSSSNKLLVLAESNQAKSNQTPYEFITSGNAGIKWEDYEAYCRKFKDGDTSLLDSTQRSKKFAKMMKTDTSSKYDIGFLARNLNDTRYATIVFRDALKDYANNHLVEDKPMFKVVCINGGVTSFLRKNFDKSWYAKKDRDKNIHHAVDASIISIFSNETKTLFNQLTQFADYKLFKNTDGSWKKIDPKTGVVTEVTDENWKQIRVRNQVSEIAKVINKCIQDSNIERKARYSRKIENKTNISLFNDTVYSAKKVGYEDQIKRKNLKTLDIHESAEENKNSKVKKQFVYRKLVNVSLLNNDKLADLFAEKEDILMYRANPWVINLAEQIFNEYTENKKIKSQNVFEKYMLDLTKEFPEKFSEAFVKSMLRNKTAIIYNVEKKVVHRIKRLKILSSELKENKLSNVIIRSKNESGTKLSYQDTINSIALMIMRSIDPTAKKQYIRVPLNTLNLHLGDQDFDLHNIDAYLKKPKFVKYLKANEIGDEYKPWRVLTSGTLLIHKKDKKLMYISSFQNLKDVIEIKNLIETEYKENDDSDPKKKKKANRFLMTLSTILNDYILLDAKDNFDILGLSKNRIDEILNSKLGLDKITK

SEQ ID NO: 331 - protein, 1224 aa, Mycoplasma gallisepticum
MNNSIKSKPEVTIGLDLGVGSVGWAIVDNETNIIHHLGSRLFSQAKTAEDRRSFRGARRLIRRRKYKLKRFINLIWKYNSYFGFKNKEDILNNYQEQQKLHNTVLNLKLEALNAKIDPKALSWILHDYLKNRGHFYEDNRDFNVYPTEELANYFGEYGYYKGIIDSKEDNDDKLEEGLTKYKFSNQHWLEEIKKVLSNQTGLPEKFKEEYESLFSYVRNYSEGPGSINSVSPYGIYHLDEKEGKVVQKYNNIWDKTIGKCSIFPDEYRAPKNSPIAMIFNEINELSTIRSYSIYLTGWFINQEFKKAYLNKLLDLLIKTNSEKPIDARQFKKLREETIAESIGKETLKDVEREEKLEKEDHKWKLKGLKLNTNGKIQYNDLSSLAKFVHKLKQHLKLDFLLEDQYTTLDKINFLQSLFVYLGKHLRYSNRVDSANLKEFSDSNKLFERVLQEQKDDLFKLFEQTDKDDEKILAQTHSLSTKAMLLAITRMTNLDNDEDNQKNNDKGWNFEAIKNFDQKFIDITKKNNNLSLKQDKRYLDDRFINDAILSPGVKRILREATKVFNAILKQFSEEYDVTKVVIELARELSEEKELENTKNYEKLIKKNSDKISERLEALDIAEDKIEDILKSPTKSYKVLLWLQQDHIDPYSQKEIAFEDILTKTEKTEIDHIIPYSISFDDSSSNKLLVLAESNQAKSNQTPYEFITSGNAGIKWEDYEAYCRKFKDGDTSLLDSTQRSKKFAKMMKTDTSSKYDIGFLARNLNDTRYATIVFRDALKDYANNHLVEDKPMFKVVCINGGVTSFLRKNFDKSWYAKKDRDKNIHHAVDASIISIFSNETKTLFNQLTQFADYKLFKNTDGSWKKIDPKTGVVTEVTDENWKQIRVRNQVSEIAKVINKCIQDSNIERKARYSRKIENKTNISLFNDTVYSAKKVGYEDQIKRKNLKTLDIHESAEENKNSKVKKQFVYRKLVNVSLLNNDKLADLFAEKEDILMYRANPWVINLAEQIFNEYTENKKIKSQNVFEKYMLDLTKEFPEKFSEAFVKSMLRNKTAIIYNVEKKVVHRIKRLKILSSELKENKLSNVIIRSKNESGTKLSYQDTINSIALMIMRSIDPTAKKQYIRVPLNTLNLHLGDQDFDLHNIDAYLKKPKFVKYLKANEIGDEYKPWRVLTSGTLLIHKKDKKLMYISSFQNLKDVIEIKNLIETEYKENDDSDPKKRRKQIGS

SEQ ID NO: 332 - protein, 1269 aa, Mycoplasma gallisepticum
MNNSIKSKPEVTIGLDLGVGSVGWAIVDNETNIIHHLGSRLFSQAKTAEDRRSFRGVRRLIRRRKYKLKRFVNLIWKYNSYFGFKNKEDILNNYQEQQKLHNTVLNLKSEALNAKIDPKALSWILHDYLKNRGHFYEDNRDFNVYPTKELAKYFDKYGYYKGIIDSKEDNDNKLEEELTKYKFSNKHWLEEVKKVLSNQTGLPEKFKEEYESLFSYVRNYSEGPGSINSVSPYGIYHLDEKEGKVVQKYNNIWDKTIGKCNIFPDEYRAPKNSPIAMIFNEINELSTIRSYSIYLTGWFINQEFKKAYLNKLLDLLIKTNGEKPIDARQFKKLREETIAESIGKETLKDVENEEKLEKEDHKWKLKGLKLNTNGKIQYNDLSSLAKFVHKLKQHLKLDFLLEDQYATLDKINFLQSLFVYLGKHLRYSNRVDSANLKEFSDSNKLFERILQKQKDGLFKLFEQTDKDDEKILAQTHSLSTKAMLLAITRMTNLDNDEDNQKNNDKGWNFEAIKNFDQKFIDITKKNNNLSLKQNKRYLDDRFINDAILSPGVKRILREATKVFNAILKQFSEEYDVTKVVIELARELSEEKELENTKNYKKLIKKNGDKISEGLKALGISEDEIKDILKSPTKSYKFLLWLQQDHIDPYSLKEIAFDDIFTKTEKFEIDHIIPYSISFDDSSSNKLLVLAESNQAKSNQTPYEFISSGNAGIKWEDYEAYCRKFKDGDSSLLDSTQRSKKFAKMMKTDTSSKYDIGFLARNLNDTRYATIVFRDALEDYANNHLVEDKPMFKVVCINGSVTSFLRKNFDDSSYAKKDRDKNIHHAVDASIISIFSNETKTLFNQLTQFADYKLFKNTDGSWKKIDPKTGVVTEVTDENWKQIRVRNQVSEIAKVIEKYIQDSNIERKARYSRKIENKTNISLFNDTVYSAKKVGYEDQIKRKNLKTLDIHESAKENKNSKVKRQFVYRKLVNVSLLNNDKLADLFAEKEDILMYRANPWVINLAEQIFNEYTENKKIKSQNVFEKYMLDLTKEFPEKFSEFLVKSMLRNKTAIIYDDKKNIVHRIKRLKMLSSELKENKLSNVIIRSKNQSGTKLSYQDTINSLALMIMRSIDPTAKKQYIRVPLNTLNLHLGDHDFDLHNMDAYLKKPKFVKYLKANEIGDEYKPWRVLTSGTLLIHKKDKKLMYISSFQNLNDVIEIKNLIETEYKENDDSDSKKKKKANRFLMTLSTILNDYILLDAKDNFDILGLSKNRIDEILNSKLGLDKIVK

SEQ ID NO: 333 - protein, 1269 aa, Mycoplasma gallisepticum; identical to SEQ ID NO: 332
  Mycoplasma gallisepticum str. F

SEQ ID NO: 334 - protein, 1270 aa, Mycoplasma gallisepticum
MNNSIKSKPEVTIGLDLGVGSVGWAIVDNETNIIHHLGSRLFSQAKTAEDRRSFRGVRRLIRRRKYKLKRFVNLIWKYNSYFGFKNKEDILNNYQEQQKLHNTVLNLKLEALNAKIDPKALSWILHDYLKNRGHFYEDNRDFNVYPTEELANYFDEFGYYKGIIDSKNDDDDKLEEGLTKYKFSNQHWLEEVKKVLSNQTGLPEKFKEEYESLFSYVRNYSEGPGSINSVSPYGIYHLDEKEGKVVQKYNNIWDKTIGKCSIFPDEYRAPKNSPIAMIFNEINELSTIRSYSIYLTGWFINQEFKKAYLNKLLDLLIKTNSEKPIDARQFKKLREETIAESIGKETLKDVESEEKLEKDDHKWKLKGLKLNTNGKIQYNDLSSLAKFVHKLKQHLKLDFLLEDQYTPLDKINFLQSLYVYLGKHLRYSNRVDSANLKEFSDSSRLFERVLQEQKDGLFKLFEQTDKDDEKILTQTHSLSTKAMLLAITRMTNLDNDEDNQKNNDKGWNFEAIKNFDQKFIDITKTNNNLSLKQDKRYLDDQFINDAILSPGVKRILREATKVFNAILKQFSEEYDVTKVVIELARELSEEKELENTKNYKKLIKKNGDKISEGLKALGIAEDKIEEILKSPTKSYKVLLWLQQDHIDPYSQKEIAFDDILTKTEKTEIDHIIPYSISFDDSSSNKLLVLAESNQAKSNQTPYEFINSGKAEITWEVYEAYCHKFKNGDSSLLDSTQRSKKFAKMMKTDTSSKYDIGFLARNLNDTRYATIVFRDALKDYANNHLVEDKPMFKVVCINGGVTSFLRKNFDPKSWYAKKDRDKNIHHAVDASIISIFSNETKTLFNQLTKFADYKLFKNTDGSWKKIDPKTGVVSEVTDENWKQIRVRNQVSEIAKVIDKYIQDSNIERKARYSRKIENKTNISLFNDTVYSAKKVGYEDQIKRKNLKTLDIHESAEENKNSKVKKQFVYRKLVNVSLLNNDKLADLFAEKEDILMYRANPWVINLAEQIFNEYTENKKIKSQNVFEKYMLDLTKEFPEKFSEAFVKSMIRNKTAIIYNVEKDVVHRIKRLKILSSELKENKWSNVIIRSKNESGTKLSYQDTINSIALMIMRSIDPTAKKQYIRVPLNTLNLHLGDQDFDLHNIDAYLKKPKFVKYLKANEIGDEYKPWRVLTSGTLLIHKKDKKLMYISSFQNLNDLIEIKNLIETEYKENVDSDPKKKKKASQILRSLSVILNDYILLDAKYNFDILGLSKNKIDEILNSKLDLDKIAK

SEQ ID NO: 335 - protein, 1236 aa, Mycoplasma mobile
MYFYKNKENKLNKKVVLGLDLGIASVGWCLTDISQKEDNKFPIILHGVRLFETVDDSDDKLLNETRRKKRGQRRRNRRLFTRKRDFIKYLIDNNIIELEFDKNPKILVRNFIEKYINPFSKNLELKYKSVTNLPIGFHNLRKAAINEKYKLDKSELIVLLYFYLSLRGAFFDNPEDTKSKEMNKNEIEIFDKNESIKNAEFPIDKIIEFYKISGKIRSTINLKFGHQDYLKEIKQVFEKQNIDFMNYEKFAMEEKSFFSRIRNYSEGPGNEKSFSKYGLYANENGNPELIINEKGQKIYTKIFKTLWESKIGKCSYDKKLYRAPKNSFSAKVFDITNKLTDWKHKNEYISERLKRKILLSRFLNKDSKSAVEKILKEENIKFENLSEIAYNKDDNKINLPIINAYHSLTTIFKKHLINFENYLISNENDLSKLMSFYKQQSEKLFVPNEKGSYEINQNNNVLHIFDAISNILNKFSTIQDRIRILEGYFEFSNLKKDVKSSEIYSEIAKLREFSGTSSLSFGAYYKFIPNLISEGSKNYSTISYEEKALQNQKNNFSHSNLFEKTWVEDLIASPTVKRSLRQTMNLLKEIFKYSEKNNLEIEKIVVEVTRSSNNKHERKKIEGINKYRKEKYEELKKVYDLPNENTTLLKKLWLLRQQQGYDAYSLRKIEANDVINKPWNYDIDHIVPRSISFDDSFSNLVIVNKLDNAKKSNDLSAKQFIEKIYGIEKLKEAKENWGNWYLRNANGKAFNDKGKFIKLYTIDNLDEFDNSDFINRNLSDTSYITNALVNHLTFSNSKYKYSVVSVNGKQTSNLRNQIAFVGIKNNKETEREWKRPEGFKSINSNDFLIREEGKNDVKDDVLIKDRSFNGHHAEDAYFITIISQYFRSFKRIERLNVNYRKETRELDDLEKNNIKFKEKASFDNFLLINALDELNEKLNQMRFSRMVITKKNTQLFNETLYSGKYDKGKNTIKKVEKLNLLDNRTDKIKKIEEFFDEDKLKENELTKLHIFNHDKNLYETLKIIWNEVKIEIKNKNLNEKNYFKYFVNKKLQEGKISFNEWVPILDNDFKIIRKIRYIKFSSEEKETDEIIFSQSNFLKIDQRQNFSFHNTLYWVQIWVYKNQKDQYCFISIDARNSKFEKDEIKINYEKLKTQKEKLQIINEEPILKINKGDLFENEEKELFYIVGRDEKPQKLEIKYILGKKIKDQKQIQKPVKKYFPNWKKVNLTYMGEIFKK

SEQ ID NO: 336 - protein, 1265 aa, Mycoplasma ovipneumoniae
  Mycoplasma ovipneumoniae SC01
MHNKKNITIGFDLGIASIGWAIIDSTTSKILDWGTRTFEERKTANERRAFRSTRRNIRRKAYRNQRFINLILKYKDLFELKNISDIQRANKKDTENYEKIISFFTEIYKKCAAKHSNILEVKVKALDSKIEKLDLIWILHDYLENRGFFYDLEEENVADKYEGIEHPSILLYDFFKKNGFFKSNSSIPKDLGGYSFSNLQWVNEIKKLFEVQEINPEFSEKFLNLFTSVRDYAKGPGSEHSASEYGIFQKDEKGKVFKKYDNIWDKTIGKCSFFVEENRSPVNYPSYEIFNLLNQLINLSTDLKTTNKKIWQLSSNDRNELLDELLKVKEKAKIISISLKKNEIKKIILKDFGFEKSDIDDQDTIEGRKIIKEEPTTKLEVTKHLLATIYSHSSDSNWININNILEFLPYLDAICIILDREKSRGQDEVLKKLTEKNIFEVLKIDREKQLDFVKSIFSNTKFNFKKIGNFSLKAIREFLPKMFEQNKNSEYLKWKDEEIRRKWEEQKSKLGKTDKKTKYLNPRIFQDEIISPGTKNTFEQAVLVLNQIIKKYSKENIIDAIIIESPREKNDKKTIEEIKKRNKKGKGKTLEKLFQILNLENKGYKLSDLETKPAKLLDRLRFYHQQDGIDLYTLDKINIDQLINGSQKYEIEHIIPYSMSYDNSQANKILTEKAENLKKGKLIASEYIKRNGDEFYNKYYEKAKELFINKYKKNKKLDSYVDLDEDSAKNRFRFLTLQDYDEFQVEFLARNLNDTRYSTKLFYHALVEHFENNEFFTYIDENSSKHKVKISTIKGHVTKYFRAKPVQKNNGPNENLNNNKPEKIEKNRENNEHHAVDAAIVAIIGNKNPQIANLLTLADNKTDKKFLLHDENYKENIETGELVKIPKFEVDKLAKVEDLKKIIQEKYEEAKKHTAIKFSRKTRTILNGGLSDETLYGFKYDEKEDKYFKIIKKKLVTSKNEELKKYFENPFGKKADGKSEYTVLMAQSHLSEFNKLKEIFEKYNGFSNKTGNAFVEYMNDLALKEPTLKAEIESAKSVEKLLYYNFKPSDQFTYHDNINNKSFKRFYKNIRIIEYKSIPIKFKILSKHDGGKSFKDTLFSLYSLVYKVYENGKESYKSIPVTSQMRNFGIDEFDFLDENLYNKEKLDIYKSDFAKPIPVNCKPVFVLKKGSILKKKSLDIDDFKETKETEEGNYYFISTISKRFNRDTAYGLKPLKLSVVKPVAEPSTNPIFKEYIPIHLDELGNEYPVKIKEHTDDEKLMCTIK

SEQ ID NO: 337 - protein, 1314 aa, Mycoplasma synoviae
MLRLYCANNLVLNNVQNLWKYLLLLIFDKKIIFLFKIKVILIRRYMENNNKEKIVIGFDLGVASVGWSIVNAETKEVIDLGVRLFSEPEKADYRRAKRTTRRLLRRKKFKREKFHKLILKNAEIFGLQSRNEILNVYKDQSSKYRNILKLKINALKEEIKPSELVWILRDYLQNRGYFYKNEKLTDEFVSNSFPSKKLHEHYEKYGFFRGSVKLDNKLDNKKDKAKEKDEEEESDAKKESEELIFSNKQWINEIVKVFENQSYLTESFKEEYLKLFNYVRPFNKGPGSKNSRTAYGVFSTDIDPETNKFKDYSNIWDKTIGKCSLFEEEIRAPKNLPSALIFNLQNEICTIKNEFTEFKNWWLNAEQKSEILKFVFTELFNWKDKKYSDKKFNKNLQDKIKKYLLNFALENFNLNEEILKNRDLENDTVLGLKGVKYYEKSNATADAALEFSSLKPLYVFIKFLKEKKLDLNYLLGLENTEILYFLDSIYLAISYSSDLKERNEWFKKLLKELYPKIKNNNLEIIENVEDIFEITDQEKFESFSKTHSLSREAFNHIIPLLLSNNEGKNYESLKHSNEELKKRTEKAELKAQQNQKYLKDNFLKEALVPLSVKTSVLQAIKIFNQIIKNFGKKYEISQVVIEMARELTKPNLEKLLNNATNSNIKILKEKLDQTEKFDDFTKKKFIDKIENSVVFRNKLFLWFEQDRKDPYTQLDIKINEIEDETEIDHVIPYSKSADDSWFNKLLVKKSTNQLKKNKTVWEYYQNESDPEAKWNKFVAWAKRIYLVQKSDKESKDNSEKNSIFKNKKPNLKFKNITKKLFDPYKDLGFLARNLNDTRYATKVFRDQLNNYSKHHSKDDENKLFKVVCMNGSITSFLRKSMWRKNEEQVYRFNFWKKDRDQFFHHAVDASIIAIFSLLTKTLYNKLRVYESYDVQRREDGVYLINKETGEVKKADKDYWKDQHNFLKIRENAIEIKNVLNNVDFQNQVRYSRKANTKLNTQLFNETLYGVKEFENNFYKLEKVNLFSRKDLRKFILEDLNEESEKNKKNENGSRKRILTEKYIVDEILQILENEEFKDSKSDINALNKYMDSLPSKFSEFFSQDFINKCKKENSLILTFDAIKHNDPKKVIKIKNLKFFREDATLKNKQAVHKDSKNQIKSFYESYKCVGFIWLKNKNDLEESIFVPINSRVIHFGDKDKDIFDFDSYNKEKLLNEINLKRPENKKFNSINEIEFVKFVKPGALLLNFENQQIYYISTLESSSLRAKIKLLNKMDKGKAVSMKKITNPDEYKIIEHVNPLGINLNWTKKLENNN

SEQ ID NO: 338 - protein, 1304 aa, Mycoplasma synoviae
  Mycoplasma synoviae 53
MLNNVQNLWKYLLLLIFDKKIIFLFKIKVILIRRYMENNNKEKIVIGFDLGVASVGWSIVNAETKEVIDLGVRLFSEPEKADYRRAKRTTRRLLRRKKFKREKFHKLILKNAEIFGLQSRNEILNVYKDQSSKYRNILKLKINALKEEIKPSELVWILRDYLQNRGYFYKNEKLTDEFVSNSFPSKKLHEHYEKYGFFRGSVKLDNKLDNKKDKAKEKDEEEESDAKKESEELIFSNKQWINEIVKVFENQSYLTESFKEEYLKLFNYVRPFNKGPGSKNSRTAYGVFSTDIDPETNKFKDYSNIWDKTIGKCSLFEEEIRAPKNLPSALIFNLQNEICTIKNEFTEFKNWWLNAEQKSEILKFVFTELFNWKDKKYSDKKFNKNLQDKIKKYLLNFALENFNLNEEILKNRDLENDTVLGLKGVKYYEKSNATADAALEFSSLKPLYVFIKFLKEKKLDLNYLLGLENTEILYFLDSIYLAISYSSDLKERNEWFKKLLKELYPKIKNNNLEIIENVEDIFEITDQEKFESFSKTHSLSREAFNHIIPLLLSNNEGKNYESLKHSNEELKKRTEKAELKAQQNQKYLKDNFLKEALVPLSVKTSVLQAIKIFNQIIKNFGKKYEISQVVIEMARELTKPNLEKLLNNATNSNIKILKEKLDQTEKFDDFTKKKFIDKIENSVVFRNKLFLWFEQDRKDPYTQLDIKINEIEDETEIDHVIPYSKSADDSWFNKLLVKKSTNQLKKNKTVWEYYQNESDPEAKWNKFVAWAKRIYLVQKSDKESKDNSEKNSIFKNKKPNLKFKNITKKLFDPYKDLGFLARNLNDTRYATKVFRDQLNNYSKHHSKDDENKLFKVVCMNGSITSFLRKSMWRKNEEQVYRFNFWKKDRDQFFHHAVDASIIAIFSLLTKTLYNKLRVYESYDVQRREDGVYLINKETGEVKKADKDYWKDQHNFLKIRENAIEIKNVLNNVDFQNQVRYSRKANTKLNTQLFNETLYGVKEFENNFYKLEKVNLFSRKDLRKFILEDLNEESEKNKKNENGSRKRILTEKYIVDEILQILENEEFKDSKSDINALNKYMDSLPSKFSEFFSQDFINKCKKENSLILTFDAIKHNDPKKVIKIKNLKFFREDATLKNKQAVHKDSKNQIKSFYESYKCVGFIWLKNKNDLEESIFVPINSRVIHFGDKDKDIFDFDSYNKEKLLNEINLKRPENKKFNSINEIEFVKFVKPGALLLNFENQQIYYISTLESSSLRAKIKLLNKMDKGKAVSMKKITNPDEYKIIEHVNPLGINLNWTKKLENNN

SEQ ID NO: 339 - protein, 1401 aa, Myroides injenensis
  Myroides injenensis M09-0166
MKRILGLDLGTTSIGWAYVHEAENVNETSSIQKVGVRVNPLTTEEQTNFEKGKPITTNASRTLARSARRNLQRYKLRRDNLIQILKENNWINNTTSLTETGNHSTFETYELRNKAASEKLTLDQLSRVLLMLNKKRGYKSSRKVNSKEEGQLIDGMEVAKKLYHEQLTPGQLSLQLMNQGVKKLPDYYRSDLNQELESIWNFQQQFYPNILTDKFKEEINGKGLTSTSSAFWNIYNFNTAENKGSRDEKKKQALQWRSEALSKQLSKEIVAYIIADLNGQIYNSSGYLGAISDRSKELYFNNLTVGQYLFKQLKSNPHTSLKNQVFYRQDYLNEFEKIWETQSKFYPKELTAALKREIRDVIIFYQRKLKSQKGLISFCEFEQKQKTINGKTKTIGHRVIPKSSPLFQEFKIWQQLHNVVLRNKKTNEIVSLADEQKVHLFEELNLKGKLKSNQVLKLIENKPKDWELNYTELEGNNTNKALYNAYLDILDIEGYDVRNELKVKLNKDDIELSDLDVNASEIKEMIFSVFKHLGINTEILEFDATLEDKVFEKQASYQLWHLLYSYEEDNSPTGLDRLYNLLHKKFGFKLNHAKLIGNVLFQDDYGSLSSKAIKNIFPYITENNYYTACELAGYKHSKHSLTKEENETRELKNRLTILPKNSLRNPVVEKIINQMINVVNTLIDEENNILIAQGKEPNFQFDEIRIELARELKKNAKEREELTKSINKSKTDHEKIIKILQKEDGIKNPTRNDIVRFKLYSELKNNGYKDLYTNEYIERKDIFTKEYDIEHIIPQSKLFDDSFSNKTLVRRNVNLKKGNQTAYDFILCEYGQEKANEFETRITNLYNLGKDEGISKSKFKKLLMQESEIGNGFIERDLRETQYIAKKAKSLLLEITRNVISTSGSITDRLREDWGLINVMKELNLQKYRDAGLTEFVKMKDGNKKEVIIDWTKRNDHRHHAMDALTIAFTKHNHIQYLNHLNARKNVNNELHNNIIAIEKLETTLVSDERGNKKRIFKEPIANFRTIAKSHLEAILVSHKAKNKVVTKNINKISGKKISQQTLTPRGQLHKETIYGKIRQYVSKQEKVGPKFTIEVIEQVSNPTYRNLLLKRLEENNNDPKKAFGGKNSLNKNPIYINLEKNIKVPEVLKLVWLEDNYTIRKEISPDLKIDKVIDQGVKQILQNRLAQYKGDSKLAFSNLDANPIWLNEDKGIAIKRVTISGIATAQPLHRKKDHLGQPILDHNGQEIPVDFISTGNNHHVAIYEDENGKLQESVVSHFEAVERVNQKLPIIDKTFNQHLGWKFLFTMKQNELFLFPSDDFNPNEIDLFDKQNYTVISKHLFRIQKLSTKDYSFRHHLETNVEEIKDLKTITWRREGLNGIQNIIKVRTNHLGEIIHIGEY

SEQ ID NO: 340 - protein, 1466 aa, Myroides odoratus
  Myroides odoratus DSM 2801
MKNILGLDLGTNSIGWALVKEDFENKQGEILGLGSRIIPMSQDILGEFGRGNSISQTADRTGYRGVRRLRERHLLRRERLHRVLNILGFLPNHYAKEIDFTKRLGKFINHAEPKLSFDKEFIFKDSFNEMLKDFQQNQPGFIINKHGEEALVPYDWTIYYLRKKALTQKIDKEELAWILLNFNQKRGYYQLRGEEEEENTNKLVEFYSLKIIDVIADNEVNKKGEVWYSLHLENGWIYRRSSKISLVDWKDKVRDFIVTTDVNDDGSEKLDKDGVVKRSFRAPSADDWTLLKKKTEQDIDNSNKTVGAYIYENLLLNPKQKIKGKLVRTIERKFYKDELKQILEKQKEFHQELQNEQLLQDCVRELYKYNEQHQQMLESKDFVHLFLNDIIFYQRPLRSQKSLISNCTLEKRVSRDGVVFPIKVISKSNPYYQEFRLLQWLQNLAIYRKDDDVNVTQEFLNSIESWENLLQFLNAKKEIKQEQLIKFLLEQKGLKGNSLKTAILTYRWNYVTDKVYPMNETRSLIQDKLKKVENVATDFLSFDNEMALWHIIYSVNDKIEYEKALAKFASKHNLDEISFVESFKKFPPFKSDYGSFSEKAIKKLLPLMRFGSVWNKNNIVPSVLDRIDKILTGEYDEKIKIRVREKAEQFQLNQIEDFQNLPLWLAQYVVYDRHSEAEIAGKWNSVKDLENYLKEFKQHSLRNPIVEQIITETLRVVKDIWQQYGNGVQNFFDEIHIELGREMKNTADERKRITNSVTENENTNLRIKALLVELKEDTNIENVRPHSPMQQEILKIYEEGVLNAVENIDEDILKISKTAQPSKSELIRYKLWLEQKYQSPYTGEMIPLSRLFTSDYEIEHVIPQSRYFDDSLSNKVICEAAVNKRKDNQLGLEFIKNHHSEKIELGNGRTAQVLEVEAYESFVKKNYDKNRGKRNKLLLEDVPEKMIERQLNDTRYISKFVTHLLSNIVRKDEVNSKDDGINSKNIIPGNGKITSQLKQDWGLNDVWNELILPRFERMNNLTNSTDFTSTNTNGKIIPTVPLEYSKGFSKKRIDHRHHALDALVIALATRDHVNLLNNESALPKKDRTKEEQKSFRFDLQVNLRNKEKYFNVKEGREKEKFTTFKKPWNTLTQDTRDALENMVVSFKQNLRVINKATNYYESYTDENGNLRLDKYGNPKKELISQKGTNWAIRKSLHKETVSGQIHLDRVKVTKGKIVTATRKSLDSSFNEKSIESITDTGIQKILRNYLKAKDNKPDVAFSPEGIEELNKSISVYNEGKNHQPIIKVRIFEQGSKFPVGETGNKIAKFVEAAKGTNLFFGIYQDKTGKRSYDTIPLNLVIERLKQGLSPVPETNEKGHQLLFHLSPNDLVYVPTIDDNEQLDSNRVYKFTDSSDTTCNFIPSNISAIIFNINSKEQEKRGINYPIQNELGVGSPQSKNQKSFDGFMIKEVCIKLKVDRLGNISKT

SEQ ID NO: 341 - protein, 1077 aa, Neisseria bacilliformis
  Neisseria bacilliformis ATCC BAA-1200
MQQKPQRYILGLDLGIASVGWACVWADENEHPTGLLDCGVRTFERAEVPKTGDSLALARRQARSVRRLIRRRAHRLLRLRRLLKREGVLLSADFNENGLVRGLPIDAWALRVAGLDRKLSNKEWAAVLLHLVKHRGYLSQRKNETQSKDKELGRLLAGVNGNREALQNRSDEYRTAAELAVKKFAAENNGSLRNKGGDYSHTFDRKDLQRELHLLFERQRALDNPFTSSEMEAAVDELLMKQRSALQGEAVLKMLGRCTFEPSEYKAAKNTYSAERFVWLTKLNNLRIQYNGEERALSEAERRLLLDEPYQKAKLTYKQVRTILELPESAVFKGLRYGHGEDGLKAESGTLMEMKAYHAVRKALKDAGLEGEWENRIRNPELLDAIGTAFSLYKTDEDIRANLAAFRLSENVLEALLAGLNFDKFVHLSLKALAKILPLMEQGMRYDEACKEAYGDHYGAKEQEDHRLLPPFVADDIRNPVVFRTLTQARKIVNEIVRRYGSPLRVHIETGREVGKSFSDRKEIEKRQEENRKERERAAAHFKELFPNFAGEPKAQDILKLRLYEQQHGKCLYSGKEIDLRRLPEKGYVEIDHALPFSRTWDDSFNNKVLVLGKENQDKRNRTPYEYLDGKGNSGAWRAFAERVSGCRFPYAKKQRLLTQKLDEKTEQGFLERNLNDTRYVARFLCQFIEEKMHLEGAGKKRVFASNGQITALLRGFWGLKKVREENDRHHALDAVVVACSSVSMQQKITRHFRYREELEHIDRETGEVIHGFPQPWEFFRQEVMTRVFSDDPVSELAEKLDSRPEAVHEFVTPLFVSRAPHRKVTGQGHLETIRSAKRLDEKISVVKLPLTQLKTKDIERIVGYPNREPALYDALAARLAAFKDDPAKAFSEPFYKTGKDGKCGVLVKAVRVENVQKSGLLVRKDESGKMQGVADNATMVRVDVFGKNGKNYLVPVYAWQVEKGELPNRAVVAYADEEDWDEMDDSFEFKFSLYPNDLVEVVTKKDKFFGYYSGFNRATGAINIKEHDLSKSKVKNGVYEGIGVKTAQSFQKYQVDTLGKTIRLCKPEKRMGFKKK

SEQ ID NO: 342 - protein, 1082 aa, Neisseria cinerea
  Neisseria cinerea ATCC 14685
MAAFKPNPMNYILGLDIGIASVGWAIVEIDEEENPIRLIDLGVRVFERAEVPKTGDSLAAARRLARSVRRLTRRRAHRLLRARRLLKREGVLQAADFDENGLIKSLPNTPWQLRAAALDRKLTPLEWSAVLLHLIKHRGYLSQRKNEGETADKELGALLKGVADNTHALQTGDFRTPAELALNKFEKESGHIRNQRGDYSHTFNRKDLQAELNLLFEKQKEFGNPHVSDGLKEGIETLLMTQRPALSGDAVQKMLGHCTFEPTEPKAAKNTYTAERFVWLTKLNNLRILEQGSERPLTDTERATLMDEPYRKSKLTYAQARKLLDLDDTAFFKGLRYGKDNAEASTLMEMKAYHAISRALEKEGLKDKKSPLNLSPELQDEIGTAFSLFKTDEDITGRLKDRVQPEILEALLKHISFDKFVQISLKALRRIVPLMEQGNRYDEACTEIYGDHYGKKNTEEKIYLPPIPADEIRNPVVLRALSQARKVINGVVRRYGSPARIHIETAREVGKSFKDRKEIEKRQEENRKDREKSAAKFREYFPNFVGEPKSKDILKLRLYEQQHGKCLYSGKEINLGRLNEKGYVEIDHALPFSRTWDDSFNNKVLALGSENQNKGNQTPYEYFNGKDNSREWQEFKARVETSRFPRSKKQRILLQKFDEDGFKERNLNDTRYINRFLCQFVADHMLLTGKGKRRVFASNGQITNLLRGFWGLRKVRAENDRHHALDAVVVACSTIAMQQKITRFVRYKEMNAFDGKTIDKETGEVLHQKAHFPQPWEFFAQEVMIRVFGKPDGKPEFEEADTPEKLRTLLAEKLSSRPEAVHKYVTPLFISRAPNRKMSGQGHMETVKSAKRLDEGISVLRVPLTQLKLKDLEKMVNREREPKLYEALKARLEAHKDDPAKAFAEPFYKYDKAGNRTQQVKAVRVEQVQKTGVWVHNHNGIADNATIVRVDVFEKGGKYYLVPIYSWQVAKGILPDRAVVQGKDEEDWTVMDDSFEFKFVLYANDLIKLTAKKNEFLGYFVSLNRATGAIDIRTHDTDSTKGKNGIFQSVGVKTALSFQKYQIDELGKEIRPCRLKKRPPVR

SEQ ID NO: 343 - protein, 1081 aa, Neisseria flavescens
  Neisseria flavescens SK114
MTAFKPNPINYILGLDIGIASVGWAMVEIDEEENPIRLIDLGVRVFERAEVPKTGDSLAAARRLARSVRRLTRRRAHRLLRARRLLKREGVLQAADFDENGLIKSLPNTPWQLRAAALDRKLTPLEWSAVLLHLIKHRGYLSQRKNEGETADKELGALLKGVADNAHALQTGDFRTPAELAVNKFEKESGHIRNQRGDYSHTFSRKDLQAELVLLFEKQKEFGNPHISDGLKEGIETLLMAQRPALSGDAVQKMLGYCTFEPTEPKAAKNTYTAERFIWLTKLNNLRILEQGSERPLTDTERATLIDMPYKNKLTYAKARELLGLDDTAFFKGLRYGKDNAESATLMEMKAYHAIRRALEKEGLKDKKSPLSLSPELQDEIGTAFSLFKTDEDITGRLKGCLQPEILDALLKHINFDKFVQISLKALRRIVPLMEQGKRYDEACAETYGDHYGEKNSEEMLYLPPIPADEIRNPVVLRALSQARKVINGVVRRYGSPARIHIETAREVGKSFKDRKEIEKRQEENRKDREKAAAKFREYFPNFVGEPKSKDILKLRLYEQQHGKCLYSGKAIDIRRLNGKGYVEIDHALPFSRTWDDSFNNKVLVLGSENQNKGNRTPYEYLNGKDNSREWLEFKARVETSRFPHSKKQRVLLQKFDEKGFKERNLNDTRYVNRFLCQFVADHMQLTGKGKRRVFASNGQITNLLRGFWGLHKVRAENDRHHALDAVVVACSTVAMQQKITCFVRYKEMNAFDGKTVDKETGEVLHQKTHFPQPWEFFAQEVMIRVFGKPDGKPEFEEADTPEKLRALLAEKLSSRPEAVHEYVTPLFVSRAPNRKMSGAHKDTLRSAKRFVKHNEKISVKRVWLTEIKLADLENMVNYKNGREIELYEALKARLGAYGGNAKQAFDPKDNPFYKKGGQLVKAVRVEKTQESGVLLNKKNAYTIADNGDMVRVDVFCKVDKKGKNQYFIVPIYAWQVAENILPDIDCKGYRIDDSYTFCFSLHKYDLIAFQKDEKSKVEFAYYINCDSSNGRFYLAWHDKGSKEQQFRISTQNLVLMQKYQIDELGKEIRPCRLKKRPPVR

SEQ ID NO: 344 - protein, 1082 aa, Neisseria lactamica
MAAFKPNPMNYILGLDIGIASVGWAMVEIDKEENPIRLIDLGVRVFERAEVPKTGDSLAMARRLARSVRRLTRRRAHRLLRARRLLKREGVLQDADFDENGLVKSLPNTPWQLRAAALDRKLTCLEWSAVLLHLIKHRGYLSQRKNEGETADKELGALLKGVADNAHALQTGDFRTPAELALNKFEKESGHIRNQRGDYSHTFSRKDLQAELNLLFEKQKEFSNPHVSDSLKEGIETLLMAQRPALSGDAVQKMLGHCTFEPAEPKAAKNTYTAERFIWLTKLNNLRILEQGSERPLTDTERATLMDEPYRKSKLTYAQARKLLGLEDTAFFKGLRYGKDNAEAPTLMEMKAYHAISRALEKEGLKDKKSPLNLSTELQDEIGTAFSLFKTDKDITGRLKDRVQPEILEALLKHISFDKFVQISLKALRRIVPLMEQGKRYDEACAEIYGDHYCKKNAEEKIYLPPIPADEIRNPVVLRALSQARKVINCVVRRYGSPARIHIETAREVGKSFKDRKEIEKRQEENRKDREKAAAKFREYFPNFVGEPKSKDILKLRLYEQQHGKCLYSGKEINLVRLNEKGYVEIDHALPFSRTWDDSFNNKVLVLGSENQNKGNQTPYEYFNGKDNSREWQEFKARVETSRFPRSKKQRILLQKFDEEGFKERNLNDTRYVNRFLCQFVADHILLTGKGKRRVFASNGQITNLLRGFWGLRKVRAENDRHHALDAVVVACSTVAMQQKITRFVRYKEMNAFDGKTIDKETGEVLHQKAHFPQPWEFFAQEVMIRVFGKPDGKPEFEEADTPEKLRTLLAEKLSSRPEAVHEYVTPLFVSRAPNRKMSGQGHMETVKSAKRLDEGISVLRVPLTQLKLKGLEKMVNREREPKLYDALKAQLETHKDNPAKAFAEPFYKYDKAGNRTQQVKAVRIEQVQKTGVWVRNHNGIADNATMVRVDVFEKGGKYYLVPIYSWQVAKGILPDRAVVAFKDEEDWTVMDDSFEFRFVLYANDLIKLTAKKNEFLGYFVSLNRATGAIDIRTHDTDSTKGKNGIFQSVGVKTALSFQKNQIDELGKEIRPCRLKKRPPVR

SEQ ID NO: 345 - protein, 1082 aa, Neisseria meningitidis
MAAFKPNPINYILGLDIGIASVGWAMVEIDEDENPICLIDLGVRVFERAEVPKTGDSLAMARRLARSVRRLTRRRAHRLLRARRLLKREGVLQAADFDENGLIKSLPNTPWQLRAAALDRKLTPLEWSAVLLHLIKHRGYLSQRKNEGETADKELGALLKGVADNAHALQTGDFRTPAELALNKFEKESGHIRNQRGDYSHTFSRKDLQAELNLLFEKQKEFGNPHISDGLKEGIETLLMTQRPALSGDAVQKMLGHCTFEPAEPKAAKNTYTAERFIWLTKLNNLRILEQGSERPLTDTERTTLIDEPYRKSKLTYAQARKLLELDNTAFFKGLRYGKDNAEASTLMEMKAYHAISRALEKEGLKDKKSPLNLSPELQDEIGTAFSLFKTDEDITGRLKDRVQPEILEALLKHISFDKFVQISLKALRRIVPLMEQGKRYDEACAEIYGDHYGKKNTEEKIDLPPIPADEIRNPVVLRALSQARKVINGVVRRYGSPARIHIETAREVGKSFKDRKEIEKRQEENRKDREKAATKFREYFPNFVGEPKSKDILKLRLYEQQHGKCLYSGKEINLGRLNEKGYVEIDHALPFSRTWDDSFNNKVLVLGSENQNKGNQTPYEYFNGKDNSREWQEFKARVETSRFPRSKKQRILLQKFDEEGFKERNLNDTRYVNRFLCQFVADHMLLTGKGKRRVFASNGQITNLLRGFWGLRKVRAENDRHHALDAVVVACSTVAMQQKITRFVRYKEMNAFDGKTIDKETGEVLHQKTHFPQPWEFFAQEVMIRVFGKPDGKPEFEEADTPEKLRTLLAEKLSSRPEAVHEYVTPLFVSRAPNRKMSGQGHMETVKSAKRLDEGVSVLRVPLTQLKLKDLEKMVNREREPKLYEALKARLEAHKDDPAKAFAEPFYKYDKAGNRTQQVKAVRVEQVQKTGVWVRNHNGIADNATMVRVDVFEKGDKYYLVPIYSWQVAKGILPDRAVVQGKDEEDWQLIDDSFNFKFSLHPNDLVEVITKKARMFGYFASCHRGTGNINIRIHDLDHKIGKNGILEGIGVKTALSFQKYQIDELGKEIRPCRLKKRPPVR

SEQ ID NO: 346 - protein, 1082 aa, Neisseria meningitidis
  Neisseria meningitidis 2007056
MAAFKPNPINYILGLDIGIASVGWAMVEIDEDENPICLIDLGVRVFERAEVPKTGDSLAMARRLARSVRRLTRRRAHRLLRARRLLKREGVLQAADFDENGLIKSLPNTPWQLRAAALDRKLTPLEWSAVLLHLIKHRGYLSQRKNEGETADKELGALLKGVADNAHALQTGDFRTPAELALNKFEKESGHIRNQRGDYSHTFSRKDLQAELILLFEKQKEFGNPHVSGGLKEGIETLLMTQRPALSGDAVQKMLGHCTFEPAEPKAAKNTYTAERFIWLTKLNNLRILEQGSERPLTDTERATLMDEPYRKSKLTYAQARKLLGLEDTAFFKGLRYGKDNAEASTLMEMKAYHAISRALEKEGLKDKKSPLNLSPELQDEIGTAFSLFKTDEDITGRLKDRIQPEILEALLKHISFDKFVQISLKALRRIVPLMEQGKRYDEACAEIYGDHYGKKNTEEKIYLPPIPADEIRNPVVLRALSQARKVINGVVRRYGSPARIHIETAREVGKSFKDRKEIEKRQEENRKDREKAAAKFREYFPNFVGEPKSKDILKLRLYEQQHGKCLYSGKEINLGRLNEKGYVEIDHALPFSRTWDDSFNNKVLVLGSENQNKGNQTPYEYFNGKDNSREWQEFKARVETSRFPRSKKQRILLQKFDEDGFKERNLNDTRYVNRFLCQFVADRMRLTGKGKKRVFASNGQITNLLRGFWGLRKVRAENDRHHALDAVVVACSTVAMQQKITRFVRYKEMNAFDGKTIDKETGEVLHQKTHFPQPWEFFAQEVMIRVFGKPDGKPEFEEADTPEKLRTLLAEKLSSRPEAVHEYVTPLFVSRAPNRKMSGQGHMETVKSAKRLDEGVSVLRVPLTQLKLKDLEKMVNREREPKLYEALKARLEAHKDDPAKAFAEPFYKYDKAGNRTQQVKAVRVEQVQKTGVWVRNHNGIADNATMVRVDVFEKGDKYYLVPIYSWQVAKGILPDRAVVQGKDEEDWQLIDDSFNFKFSLHPNDLVEVITKKARMFGYFASCHRGTGNINIRIHDLDHKIGKNGILEGIGVKTALSFQKYQIDELGEEIRPCRLKKRPPVR

SEQ ID NO: 347 - protein, 1082 aa, Neisseria meningitidis
  Neisseria meningitidis 63049
MAAFKPNPINYILGLDIGIASVGWAMVEIDEEENPIRLIDLSVRVFERAEVPKTGDSLAMARRLARSVRRLTRRRAHRLLRARRLLKREGVLQAADFDENGLIKSLPNTPWQLRAAALDRKLTPLEWSAVLLHLIKHRGYLSQRKNEGETADKELGALLKGVADNAHALQTGDFRTPAELALNKFEKESGHIRNQRGDYSHTFSRKDLQAELILLFEKQKEFGNPHVSGGLKEGIETLLMTQRPALSGDAVQKMLGHCTFEPAEPKAAKNTYTAERFVWLTKLNNLRILEQGSERPLTDTERATLMDEPYRKSKLTYAQARKLLGLEDTAFFKGLRYGKDNAEASTLMEMKAYHAISRALEKEGLKDKKSPLRLSPELQDEIGTAFSLFKTDEDITGRLKDRVQPEILEALLKHISFDKFVQISLKALRRIVPLMEQGKRYDEACAEIYGDHYGKKNAEEKIYLPPIPADEIRNPVVLRALSQARKVINGVVRRYGSPARIHIETAREVGKSFKDRKEIEKRQEENRKDREKAAAKFREYFPNFVGEPKSKDILKLRLYEQQHGKCLYSGKEINLGRLNEKGYVEIDHALPFSRTWDDSFNNKVLVLGSENQNKGNQTPYEYFNGKDNSREWQEFKARVETSRFPRSKKQRILLQKFDEDGFKERNLNDTRYVNRFLCQFVADRMRLTGKGKKRVFASNGQITNLLRGFWGLRKVRAENDRHHALDAVVVACSTVAMQQKITRFVRYKEMNAFDGKTIDKETGEVLHQKTHFPQPWEFFAQEVMIRVFGKPDGKPEFEEADTPEKLRTLLAEKLSSRPEAVHEYVTPLFVSRAPNRKMSGQGHMETVKSAKRLDEGVSVLRVPLTQLKLKDLEKMVNREREPKLYEALKARLEAHKDDPAKAFAEPFYKYDKAGNRTQQVKAVRVEQVQKTGVWVRNHNGIADNATMVRVDVFEKGDKYYLVPIYSWQVAKGILPDRAVVQGKDEEDWQLIDDSFNFKFSLHPNDLVEVITKKARMFGYFASCHRGTGNINIRIHDLDHKIGKNGILEGIGVKTALSFQKYQIDELGKEIRPCRLKKRPPVR

SEQ ID NO: 348 - protein, 1082 aa, Neisseria meningitidis
MAAFKPNSINYILGLDIGIASVGWAMVEIDEEENPIRLIDLGVRVFERAEVPKTGDSLAMARRLARSVRRLTRRRAHRLLRTRRLLKREGVLQAANFDENGLIKSLPNTPWQLRAAALDRKLTPLEWSAVLLHLIKHRGYLSQRKNEGETADKELGALLKGVAGNAHALQTGDFRTPAELALNKFEKESGHIRNQRSDYSHTFSRKDLQAELILLFEKQKEFGNPHVSGGLKEGIETLLMTQRPALSGDAVQKMLGHCTFEPAEPKAAKNTYTAERFIWLTKLNNLRILEQGSERPLTDTERATLMDEPYRKSKLTYAQARKLLGLEDTAFFKGLRYGKDNAEASTLMEMKAYHAISRALEKEGLKDKKSPLNLSPELQDEIGTAFSLFKTDEDITGRLKDRIQPEILEALLKHISFDKFVQISLKALRRIVPLMEQGKRYDEACAEIYGDHYGKKNTEEKIYLPPIPADEIRNPVVLRALSQARKVINGVVRRYGSPARIHIETAREVGKSFKDRKEIEKRQEENRKDREKAAAKFREYFPNFVGEPKSKDILKLRLYEQQHGKCLYSGKEINLGRLNEKGYVEIDHALPFSRTWDDSFNNKVLVLGSENQNKGNQTPYEYFNGKDNSREWQEFKARVETSRFPRSKKQRILLQKFDEDGFKERNLNDTRYVNRFLCQFVADRMRLTGKGKKRVFASNGQITNLLRGFWGLRKVRAENDRHHALDAVVVACSTVAMQQKITRFVRYKEMNAFDGKTIDKETGEVLHQKTHFPQPWEFFAQEVMIRVFGKPDGKPEFEEADTLEKLRTLLAEKLSSRPEAVHEYVTPLFVSRAPNRKMSGQGHMETVKSAKRLDEGVSVLRVPLTQLKLKDLEKMVNREREPKLYEALKARLEAHKDDPAKAFAEPFYKYDKAGNRTQQVKAVRVEQVQKTGVWVRNHNGIADNATMVRVDVFEKGDKYYLVPIYSWQVAKGILPDRAVVQGKDEEDWQLIDDSFNFKFSLHPNDLVEVITKKARMFGYFASCHRGTGNINIRIHDLDHKIGKNGILEGIGVKTALSFQKYQIDELGKEIRPCRLKKRPPVR

SEQ ID NO: 349 - protein, 1082 aa, Neisseria meningitidis
  Neisseria meningitidis 92045
MAAFKPNPINYILGLDIGIASVGWAMVEIDEEENPIRLIDLGVRVFERAEVPKTGDSLAMARRLARSVRRLTRRRAHRLLRARRLLKREGVLQAADFDENGLIKSLPNTPWQLRAAALDRKLTPLEWSAVLLHLIKHRGYLSQRKNEGETADKELGALLKGVADNAHALQTGDFRTPAELALNKFEKECGHIRNQRGDYSHTFSRKDLQAELNLLFEKQKEFGNPHVSGGLKEGIETLLMTQRPALSGDAVQKMLGHCTFEPAEPKAAKNTYTAERFIWLTKLNNLRILEQGSERPLTDTERATLMDEPYRKSKLTYAQARKLLGLEDTAFFKGLRYGKDNAEASTLMEMKAYHAISRALEKEGLKDKKSPLNLSPELQDEIGTAFSLFKTDEDITGRLKDRIQPEILEALLKHISFDKFVQISLKALRRIVPLMEQGKRYDEACAEIYGDHYGKKNTEEKIYLPPIPADEIRNPVVLRALSQARKVINGVVRRYGSPARIHIETAREVGKSFKDRKEIEKRQEENRKDREKAAAKFREYFPNFVGEPKSKDILKLRLYEQQHGKCLYSGKEINLVRLNEKGYVEIDHALPFSRTWDDSFNNKVLVLGSENQNKGNQTPYEYFNGKDNSREWQEFKARVETSRFPRSKKQRILLQKFDEEGFKERNLNDTRYVNRFLCQFVADHILLTGKGKRRVFASNGQITNLLRGFWGLRKVRAENDRHHALDAVVVACSTVAMQQKITRFVRYKEMNAFDGKTIDKETGEVLHQKTHFPQPWEFFAQEVMIRVFGKPDGKPEFEEADTPEKLRTLLAEKLSSRPEAVHEYVTPLFVSRAPNRKMSGQGHMETVKSAKRLDEGVSVLRVPLTQLKLKDLEKMVNREREPKLYEALKARLEAHKDDPAKAFAEPFYKYDKAGNRTQQVKAVRVEQVQKTGVWVRNHNGIADNATMVRVDVFEKGGKYYLVPIYSWQVAKGILPDRAVVQGKDEEDWQLIDDSFNFKFSLHPNDLVEVITKKARMFGYFASCHRGTGNINIRIHDLDHKIGKNGILEGIGVKTALSFQKYQIDELGKEIRPCRLKKRPPVR

SEQ ID NO: 350 - protein, 1081 aa, Neisseria meningitidis
  Neisseria meningitidis 93003
MAAFKPNPINYILGLDIGIASVGWAMVEIDEEENPIRLIDLGVRVFERAEVPKTGDSLAMARRLARSVRRLTRRRAHRLLRARRLLKREGVLQAADFDENGLIKSLPNTPWQLRAAALDRKLTPLEWSAVLLHLIKHRGYLSQRKNEGETADKELGALLKGVADNAHALQTGDFRTPAELALNKFEKESGHIRNQRGDYSHTFSRKDLQAELILLFEKQKEFGNPHVSGGLKEGIETLLMTQRPALSGDAVQKMLGHCTFEPAEPKAAKNTYTAERFIWLTKLNNLRILEQGSERPLTDTERATLMDEPYRKSKLTYAQARKLLGLEDTAFFKGLRYGKDNAEASTLMEMKAYHAISRALEKEGLKDKKSPLNLSPELQDEIGTAFSLFKTDEDITGRLKDRVQPEILEALLKHISFDKFVQISLKALRRIVPLMEQGKRYDEACAEIYGDHYGKKNTEEEIYLPPITADEIRNPVVLRALSQARKVINAVVRRYGSPARIHIETAREVGKSFKDRKEIEKRQEENRKDREKAAAKFREYFPNFVGEPKSKDILKLRLYEQQHGKCLYSGKEINLVRLNEKGYVEIDHALPFSRTWDDSFNNKVLVLGSENQNKGNQTPYEYFNGKENSREWQEFKARVETSRFPRSKKQRILLQKFDEDGFKERNLNDTRYVNRFLCQFVADRMRLTGKGKKRVFASNGQITNLLRGFWGLHKVRAENDRHHALDAVVVACSTIAMQQKITRFVRYKEMNAFDGKTIDKETGEVLHQKAHFPQPWEFFAQEVMIRVFGKPDGKPEFEEADTPEKLRTLLAEKLSSRPEAVHEYVTPLFVSRAPNRKMSGQGHMETVKSAKRLDEGISVLRVPLTQLKLKDLEKMVNRAREPKLYEALKARLEAHKDDPAKAFAEPFYKYDKAGNRTQQVKAVRVEQVQKTGVWVRNHNGIADNATMVRVDVFEKAGKYYLVPIYSWQVAKGILPDRAVVAYADEEDWTVIDESFRFKFVLYSNDLIKVQLKKDSFLGYFSGLDRATGAISLREHDLEKSKGKDGMHRIGVKTALSFQKYQIDEMGKEIRPCRLKKRPPVR

SEQ ID NO: 351 - protein, 1081 aa, Neisseria meningitidis
  Neisseria meningitidis 93004
MAAFKPNPINYILGLDIGIASVGWAMVEIDEDENPICLIDLGVRVFERAEVPKTGDSLAMARRLARSVRRLTRRRAHRLLRARRLLKREGVLQAADFDENGLIKSLPNTPWQLRAAALDRKLTPLEWSAVLLHLIKHRGYLSQRKNEGETADKELGALLKGVADNAHALQTGDFRTPAKLALNKFEKESGHIRNQRGDYSHTFSRKDLQAELNLLFEKQKEFGNPHISDGLKEGIETLLMTQRPALSGDAVQKMLGHCTFEPTEPKAAKNTYTAERFVWLTKLNNLRILEQGSEQPLTDTQRAKLMDEPYRKSKLTYAQARKLLGLEDTAFFKGLRYGKDNAEASTLMEMKAYHAISRALEKEGLKDKKSPLNLSPELQDEIGTAFSLFKTDEDITGRLKDRVQPEILEALLKHISFDKFVQISLKALRRIVPLMEQGKRYNEACAEIYGDHYGKKNTEEKIYLPPIPADEIRNPVVLRALSQARKVINGVVRRYGSPARIHIETAREVGKSFKDRKEIEKRQEENRKDREKAAAKFQEYFPNFVGEPKSKDILKLRLYEQQHGKCLYSGKEINLGRLNEKGYVEIDHALPFSRTWDDSFNNKVLVLGSENQNKGNQTPYEYFNGKDNSREWQEFKARVETSRFPRSKKQRILLQKFDEDGFKERNLNDTRYVNRFLCQFVADRMRLTGKGKKRVFASNGQITNLLRGFWGLRKVRAENDRHHALDAVVVACSTVAMQQKITRFVRYKEMNAFDGKTIDKETGEVLHQKTHFPQPWEFFAQEVMIRVFGKPDGKPEFEEADTPEKLRTLLAEKLSSRPEAVHEYVTPLFVSRAPNRKMSGQGHMETVKSAKRLDEGVSVLRVPLTQLKLKDLEKMVNREREPKLYEALKARLEAHKDDPAKAFAEPFYKYDKAGNRTQQVKAVRVEQVQKTGVWVRNHNGIADNATMVRVDVFEKGDKYYLVPIYSWQVAKGILPDRAVVAYADEEDWTVIDESFRFKFVLYSNDLIKVQLKKDSFLGYFSGLDRATGAISLREHDLEKSKGKDGMHRIGVKTALSFQKYQIDEMGKEIRPCRLKKRPPVR

SEQ ID NO: 352 - protein, 1082 aa, Neisseria meningitidis
  Neisseria meningitidis 96023
MAAFKPNPINYILGLDIGIASVGWAMVEIDEDENPICLIDLGVRVFERAEVPKTGDSLAMARRLARSVRRLTRRRAHRLLRARRLLKREGVLQAADFDENGLIKSLPNTPWQLRAAALDRKLTPLEWSAVLLHLIKHRGYLSQRKNEGETADKELGALLKGVADNAHALQTGDFRTPAELALNKFEKESGHIRNQRGDYSHTFSRKDLQAELILLFEKQKEFGNPHVSGGLKEGIETLLMTQRPALSSDAVQKMLGHCTFEPAEPKAAKNTYTAERFIWLTKLNNLRILEQGSERPLTDTERATLMDEPYRKSKLTYAQARKLLGLEDTAFFKGLRYGKDNAEASTLMEMKAYHAISRALEKEGLKDKKSPLNLSPELQDEIGTAFSLFKTDEDITGRLKDRIQPEILEALLKHISFDKFVQISLKALRRIVPLMEQGKRYDEACAEIYGDHYGKKNTEEKIYLPPIPADEIRNPVVLRALSQARKVINGVVRRYGSPARIHIETAREVGKSFKDRKEIEKRQEENRKDREKAAAKFREYFPNFVGEPKSKDILKLRLYEQQHGKCLYSGKEINLGRLNEKGYVEIDHALPFSRTWDDSFNNKVLVLGSENQNKGNQTPYEYFNGKDNSREWQEFKARVETSRFPRSKKQRILLQKFDEDGFKERNLNDTRYVNRFLYQFVADRMRLTGKGKKRVFASNGQITNLLRGFWGLRKVRAENDRHHALDAVVVACSTVAMQQKITRFVRYKEMNAFDGKTIDKETGEVLHQKTHFPQPWEFFAQEVMIRVFGKPDGKPEFEEADTPEKLRTLLAEKLSSRPEAVHEYVTPLFVSRAPNRKMSGQGHMETVKSAKRLDEGVSVLRVPLTQLKLKDLEKMVNREREPKLYEALKARLEAHKDDPAKAFAEPFYKYDKAGNRTQQVKAVRVEQVQKTGVWVRNHNGIADNATMVRVDVFEKGDKYYLVPIYSWQVAKGILPDRAVVQGKDEEDWQLIDDSFNFKFSLHPNDLVEVITKKARMFGYFASCHRGTGNINIRIHDLDHKIGKNGILEGIGVKTALSFQKYQIDELGKEIRPCRLKKRPPVR

SEQ ID NO: 353 - protein, 1081 aa, Neisseria meningitidis
  Neisseria meningitidis 98008
MAAFKPNPINYILGLDIGIASVGWAMVEIDEDENPICLIDLGVRVFERAEVPKTGDSLAAARRLARSVRRLTRRRAHRLLRARRLLKREGVLQAADFDENGLIKSLPNTPWQLRSAALDRKLTPLEWSAVLLHLIKHRGYLSQRKNEGETADKELGALLKGVANNAHALQTGDFRTPAELALNKFEKESGHIRNQRGDYSHTFSRKDLQAELILLFEKQKEFGNPHVSGGLKEGIETLLMTQRPALSGDAVQKMLGHCTFEPAEPKAAKNTYTAERFIWLTKLNNLRILEQGSERPLTDTERATLMDEPYRKSKLTYAQARKLLGLEDTAFFKGLRYGKDNAEASTLMEMKAYHAISRALEKEGLKDKKSPLNLSPELQDEIGTAFSLFKTDEDITGRLKDRIQPEILEALLKHISFDKFVQISLKALRRIVPLMEQGKRYDEACAEIYGDHYGKKNTEEKIYLPPIPADEIRNPVVLRALSQARKVINGVVRRYGSPARIHIETAREVGKSFKDRKEIEKRQEENRKDREKAAAKFREYFPNFVGEPKSKDILKLRLYEQQHGKCLYSGKEINLGRLNEKGYVEIDHALPFSRTWDDSFNNKVLVLGSENQNKGNQTPYEYFNGKDNSREWQEFKARVETSRFPRSKKQRILLQKFDEDGFKERNLNDTRYVNRFLCQFVADRMRLTGKGKKRVFASNGQITNLLRGFWGLRKVRAENDRHHALDAVVVACSTVAMQQKITRFVRYKEMNAFDGKTIDKETGEVLHQKTHFPQPWEFFAQEVMIRVFGKPDGKPEFEEADTPEKLRTLLAEKLSSRPEAVHEYVTPLFVSRAPNRKMSGQGHMETVKSAKRLDEGVSVLRVPLTQLKLKDLEKMVNREREPKLYEALKARLEAHKDDPAKAFAEPFYKYDKAGNRTQQVKAVRVEQVQKTGVWVRNHNGIADNATMVRVDVFEKAGKYYLVPIYSWQVAKGILPDRAVVAYADEEGWTVIDESFRFKFVLYSNDLIKVQLKKDSFLGYFSGLDRATGAISLREHDLEKSKGKDGMHRIGVKTALSFQKYQIDEMGKEIRLCRLKKRPPVR

SEQ ID NO: 354 - protein, 1082 aa, Neisseria meningitidis
MAAFKPNPINYILGLDIGIASVGWAMVEIDEEENPIRLIDLGVRVFERAEVPKTGDSLAMVRRLARSVRRLTRRRAHRLLRARRLLKREGVLQAADFDENGLIKSLPNTPWQLRAAALDRKLTPLEWSAVLLHLIKHRGYLSQRKNEGETADKELGALLKGVADNAHALQTGDFRTPAELALNKFEKESGHIRNQRGDYSHTFSRKDLQAELILLFEKQKEFGNPHISGGLKEGIETLLMTQRPALSGDAVQKMLGHCTFEPAEPKAAKNTYTAERFIWLTKLNNLRILEQGSERPLTDTERATLMDEPYRKSKLTYAQARKLLGLEDTAFFKGLRYGKDNAEASTLMEMKAYHAISRALEKEGLKDKKSPLNLSPELQDEIGTAFSLFKTDEDITGRLKDRIQPEILEALLKHISFDKFVQISLKALRRIVPLMEQGKRYDEACAEIYGDHYGKKNTEEKIYLPPIPADEIRNPVVLRALSQARKVINGVVRRYGSPARIHIETAREVGKSFKDRKEIEKRQEENRKDREKAAAKFREYFPNFVGEPKSKDILKLRLYEQQHGKCLYSGKEINLGRLNEKGYVEIDHALPFSRTWDDSFNNKVLVLGSENQNKGNQTPYEYFNGKDNSREWQEFKARVETSRFPRSKKQRILLQKFDEDGFKERNLNDTRYVNRFLCQFVADRMRLTGKGKKRVFASNGQITNLLRGFWGLRKVRAENDRHHALDAVVVACSTVAMQQKITRFVRYKEMNAFDGKTIDKETGEVLHQKTHFPQPWEFFAQEVMIRVFGKPDGKPEFEEADTPEKLRTLLAEKLSSRPEAVHEYVTPLFVSRAPNRKMSGQGHMETVKSAKRLDEGVSVLRVPLTQLKLKDLEKMVNREREPKLYEALKARLEAHKDDPAKAFAEPFYKYDKAGNRTQQVKAVRVEQVQKTGVWVRNHNGIADNATMVRVDVFEKGDKYYLVPIYSWQVAKGILPDRAVVQGKDEEDWQLIDDSFNFKFSLHPNDLVEVITKKARMFGYFASCHRGTGNINIRIHDLDHKIGKNGILEGIGVKTALSFQKYQIDELGKEIRPCRLKKRPPVR

SEQ ID NO: 355 - protein, 1082 aa, Neisseria meningitidis
  Neisseria meningitidis alpha275
MAAFKPNPINYILGLDIGIASVGWAMVEIDEDENPICLIDLGVRVFERAEVPKTGDSLAAARRLARSVRRLTRRRAHRLLRARRLLKREGVLQAADFDENGLIKSLPNTPWQLRAAALDRKLTPLEWSAVLLHLIKHRGYLSQRKNEGETADKELGALLKGVADNAHALQTGDFRTPAELALNKFEKESGHIRNQRGDYSHTFSRKDLQAELILLFEKQKEFGNPHVSGGLKEGIETLLMTQRPALSGDAVQKMLGHCTFEPAEPKAAKNTYTAERFIWLTKLNNLRILEQGSERPLTDTERATLMDEPYRKSKLTYAQARKLLGLEDTAFFKGLRYGKDNAEASTLMEMKAYHAISRALEKEGLKDKKSPLNLSPELQDEIGTAFSLFKTDEDITGRLKDRVQPEILEALLKHISFDKFVQISLKALRRIVPLMEQGKRYDEACAEIYGDHYGKKNTEEKIYLPPIPADEIRNPVVLRALSQARKVINGVVRRYGSPARIHIETAREVGKSFKDRKEIEKRQEENRKDREKAAAKFREYFPNFVGEPKSKDILKLRLYEQQHGKCLYSGKEINLGRLNEKGYVEIDHALPFSRTWDDSFNNKVLVLGSENQNKGNQTPYEYFNGKDNSREWQEFKARVETSRFPRSKKQRILLQKFDEDGFKERNLNDTRYVNRFLCQFVADRMRLTGKGKKRVFASNGQITNLLRGFWGLRKVRAENDRHHALDAVVVACSTVAMQQKITRFVRYKEMNAFDGKTIDKETGEVLHQKTHFPQPWEFFAQEVMIRVFGKPDGKPEFEEADTPEKLRTLLAEKLSSRPEAVHEYVTPLFVSRAPNRKMSGQGHMETVKSAKRLDEGVSVLRVPLTQLKLKDLEKMVNREREPKLYEALKARLEAHKDDPAKAFAEPFYKYDKAGNRTQQVKAVRVEQVQKTGVWVRNHNGIADNATMVRVDVFEKGDKYYLVPIYSWQVAKGILPDRAVVQGKDEEDWQLIDDSFNFKFSLHPNDLVEVITKKARMFGYFASCHRGTGNINIRIHDLDHKIGKNGILEGIGVKTALSFQKYQIDELGKEIRPCRLKKRPPVR

SEQ ID NO: 356 - protein, 1082 aa, Neisseria meningitidis
  Neisseria meningitidis ATCC 13091
MAAFKPNPINYILGLDIGIASVGWAMVEIDEEENPIRLIDLGVRVFERAEVPKTGDSLAMARRLARSVRRLTRRRAHRLLRTRRLLKREGVLQAANFDENGLIKSLPNTLWQLRAAALDRKLTPLEWSAVLLHLIKHRGYLSQRKNEGETADKELGALLKGVAGNAHALQTGDFRTPAELALNKFEKESGHIRNQRGDYSHTFSRKDLQAELNLLFEKQKEFGNPHISDGLKEGIETLLMTQRPALSGDAVQKMLGHCTFEPTEPKAAKNTYTTERFIWLTKLNNLRILEQGSERPLTDTERATLMDEPYRKSKLTYAQARKLLELDDIAFFKGLRYGKDNAEASTLMEMKAYHAISRALEKEGLKDKKSPLNLSPELQDEIGTAFSLFKTDEDITGRLKDRIQPEILEALLKHINFDKFVQISLKALRRIVPLMEQGKRYDEACAEIYGDHYGKKNTEEKIDLPPIPADEIHNPVVLRALSQARKVINGVVRRYGSPARIHIETAREVGKSFKDRKEIEKRQEENRKDREKAAAKFREYFPNFVGEPKSKDILKLRLYEQQHGKCLYSGKEINLGRLNEKGYVEIDHALPFSRTWDDSFNNKVLVLGSENQNKGNQTPYEYFNGKDNSREWQEFKARVETSRFPRSKKQRILLQKFDEDGFKERNLNDTRYVNRFLCQFVADRMRLTGKGKKRVFASNGQITNLLRGFWGLRKVRAENDRHHALDAVVVACSTVAMQQKITRFVRYKEMNAFDGKTIDKETGEVLHQKTHFPQPWEFFAQEVMIRVFGKPDGKPEFEEADTPEKLRTLLTEKLSSRPEAVHEYVTPLFVSRAPNRKMSGQGHMETVKSAKRLDEGISVLRVPLTQLKLKDLEKMVNREREPKLYEALKARLEAHKDDPAKAFAEPFYKYDKAGNRTQQVKAMRVEQVQKTGVWVRNHNGIADNATMVRVDVFEKGDKYYLVPIYSWQVAKGILPDRAVVQGKDEEDWQLIDDSFNFKFSLHPNDLVEVITKKARMFGYFASCHRGTGNINIRIHDLDHKIGKNGILEGIGVKTALSFQKYQIDELGKEIRPCRLKKRPPVR

SEQ ID NO: 357 - protein, 1081 aa, Neisseria meningitidis
  Neisseria meningitidis N1568
MAAFKPNPINYILGLDIGIASVGWAMVEIDEEENPIRLIDLGVRVFERAEVPKTGDSLAMARRLARSVRRLTRRRAHRLLRARRLLKREGVLQAADFDENGLIKSLPNTPWQLRAAALDRKLTPLEWSAVLLHLIKHRGYLSQRKNEGETADKELGALLKGVADNAHALQTGDFRTPAELALNKFEKECGHIRNQRGDYSHTFSRKDLQAELNLLFEKQKEFGNPHVSGGLKEGIETLLMTQRPALSGDAVQKMLGHCTFEPAEPKAAKNTYTAERFIWLTKLNNLRILEQGSERPLTDTERATLMDEPYRKSKLTYAQARKLLSLEDTAFFKGLRYGKDNAEASTLMEMKAYHTISRALEKEGLKDKKSPLNLSPELQDEIGTAFSLFKTDEDITGRLKDRIQPEILEALLKHISFDKFVQISLKALRRIVPLMEQGKRYDEACAEIYGDHYGKKNTEEKIYLPPIPADEIRNPVVLRALSQARKVINGVVRRYGSPARIHIETAREVGKSFKDRKEIEKRQEENRKDREKAAAKFREYFPNFVGEPKSKDILKLRLYEQQHGKCLYSGKEINLGRLNEKGYVEIDHALPFSRTWDDSFNNKVLVLGSENQNKGNQTPYEYFNGKDNSREWQEFKARVETSRFPRSKKQRILLQKFDEDGFKERNLNDTRYVNRFLCQFVADRMRLTGKGKKRVFASNGQITNLLRGFWGLRKVRAENDRHHALDAVVVACSTVAMQQKITRFVRYKEMNAFDGKTIDKETGEVLHQKTHFPQPWEFFAQEVMIRVFGKPDGKPEFEEADTPEKLRTLLAEKLSSRPEAVHEYVTPLFVSRAPNRKMSGQGHMETVKSAKRLDEGVSVLRVPLTQLKLKDLEKMVNREREPKLYEALKARLEAHKDDPAKAFAEPFYKYDKAGNRTQQVKAVRVEQVQKTGVWVRNHNGIADNATMVRVDVFEKGDKYYLVPIYSWQVAKGILPDRAVVAYADEEDWTVIDESFRFKFVLYSNDLIKVQLKKDSFLGYFSGLDRATGAISLREHDLEKSKGKDGMHRIGVKTALSFQKYQIDEMGKEIRPCRLKKRPPVR

SEQ ID NO: 358 - protein, 1081 aa, Neisseria meningitidis
  Neisseria meningitidis NM140
MAAFKPNPINYILGLDIGIASVGWAMVEIDEDENPICLIDLGVRVFERAEVPKTGDSLAAARRLARSVRRLTRRRAHRLLRARRLLKREGVLQAADFDENGLIKSLPNTPWQLRSAALDRKLTPLEWSAVLLHLIKHRGYLSQRKNEGETADKELGALLKGVADNAHALQTGDFRTPAELALNKFEKESGHIRNRRGDYSHTFSRKDLQAELDLLFEKQKEFGNPHISDDLKEGIETLLMTQRPALSGDAVQKMLGHCTFEPTEPKAAKNTYTAERFVWLTKLNNLRILEQGSERPLTDTERATLMDEPYRKSKLTYAQARKLLELDDTAFFKGLRYGKDNAEASTLMEMKAYHAISRALEKEGLKDKKSPLNLSPELQDEIGTAFSLFKTDEDITGRLKDRVQPEILEVLLKHISFDKFVQISLKALRRIVPLMEQGKRYDEACAEIYGDHDGKKNTEEKIYLPPIPADEIRNPVVLRALSQARKVINAVVRRYGSPARIHIETAREVGKSFKDRKEIEKRQEENRKDREKAAAKFREYFPNFVGEPKSKDILKLRLYEQQHGKCLYSGKEINLGRLNEKGYVEIDHALPFSRTWDDSFNNKVLVLGSENQNKGNQTPYEYFNGKDNSREWQEFKARVETSRFPRSKKQRILLQKFDEEGFKERNLNDTRYVNRFLCQFVADHMLLTGKGKRRVFASNGQITNLLRGFWGLRKVRAENNRHHALDAVVVACSTVAMQQKITRFVRYKEMNAFDGKTIDKETGEVLHQKTHFPQPWEFFAQEVMIRVFGKPDGKPEFEEADTPEKLRTLLAEKLSSRPEAVHEYVTPLFVSRAPNRKMSGQGHMETVKSAKRLDEGVSVLRVPLTQLKLKDLEKMVNREREPKLYEALKARLEAHKDDPAKAFAEPFYKYDKAGNRTQQVKAVRVEQVQKTGVWVRNHNGIADNATMVRVDVFEKAGKYYLVPIYSWQVAKGILPDRAVVAYADEEGWTVIDESFRFKFVLYSNDLIKVQLKKDSFLGYFSGLDRATGAISLREHDLEKSKGKDGMHRIGVKTALSFQKYQIDEMGKEIRLCRLKKRPPVR

SEQ ID NO: 359 - protein, 1082 aa, Neisseria meningitidis
  Neisseria meningitidis NM220
MAAFKPNPINYILGLDIGIASVGWAMVEIDEEENPIRLIDLGVRVFERAEVPKTGDSLAMARRLARSVRRLTRRRAHRLLRARRLLKREGVLQAADFDENGLIKSLPNTPWQLRAAALDRKLTPLEWSAVLLHLIKHRGYLSQRKNEGETADKELGALLKGVANNAHALQTGDFRTPAELALNKFEKESGHIRNQRGDYSHTFSRKDLQAELILLFEKQKEFGNPHVSGGLKEGIETLLMTQRPALSGDAVQKMLGHCTFEPAEPKAAKNTYTAERFIWLTKLNNLRILEQGSERPLTDTERATLMDEPYRKSKLTYAQARKLLGLEDTAFFKGLRYGKDNAEASTLMEMKAYHAISRALEKEGLKDKKSPLNLSSELQDEIGTAFSLFKTDEDITGRLKDRVQPEILEALLKHISFDKFVQISLKALRRIVPLMEQGKRYDEACAEIYGDHYGKKNTEEKIYLPPIPADEIRNPVVLRALSQARKVINGVVRRYGSPARIHIETAREVGKSFKDRKEIEKRQEENRKDREKAAAKFREYFPNFVGEPKSKDILKLRLYEQQHGKCLYSGKEINLVRLNEKGYVEIDHALPFSRTWDDSFNNKVLVLGSENQNKGNQTPYEYFNGKDNSREWQEFKARVETSRFPRSKKQRILLQKFDEDGFKECNLNDTRYVNRFLCQFVADHILLTGKGKRRVFASNGQITNLLRGFWGLRKVRAENDRHHALDAVVVACSTVAMQQKITRFVRYKEMNAFDGKTIDKETGKVLHQKTHFPQPWEFFAQEVMIRVFGKPDGKPEFEEADTPEKLRTLLAEKLSSRPEAVHEYVTPLFVSRAPNRKMSGAHKDTLRSAKRFVKHNEKISVKRVWLTEIKLADLENMVNYKNGREIELYEALKARLEAYGGNAKQAFDPKDNPFYKKGGQLVKAVRVEKTQESGVLLNKKNAYTIADNGDMVRVDVFCKVDKKGKNQYFIVPIYAWQVAENILPDIDCKGYRIDDSYTFCFSLHKYDLIAFQKDEKSKVEFAYYINCDSSNGRFYLAWHDKGSKEQQFRISTQNLVLIQKYQVNELGKEIRPCRLKKRPPVR

SEQ ID NO: 360 - protein, 1082 aa, Neisseria meningitidis
  Neisseria meningitidis NM233
MAAFKPNPINYILGLDIGIASVGWAMVEIDEEENPIRLIDLGVRVFERAEVPKTGDSLAMARRLARSVRRLTRRRAHRLLRARRLLKREGVLQAADFDENGLIKSLPNTPWQLRAAALDRKLTPLEWSAVLLHLIKHRGYLSQRKNEGETADKELGALLKGVANNAHALQTGDFRTPAELALNKFEKESGHIRNQRGDYSHTFSRKDLQAELILLFEKQKEFGNPHVSGGLKEGIETLLMTQRPALSGDAVQKMLGHCTFEPAEPKAAKNTYTAERFIWLTKLNNLRILEQGSERPLTDTERATLMDEPYRKSKLTYAQARKLLGLEDTAFFKGLRYGKDNAEASTLMEMKAYHAISRALEKEGLKDKKSPLNLSSELQDEIGTAFSLFKTDEDITGRLKDRVQPEILEALLKHISFDKFVQISLKALRRIVPLMEQGKRYDEACAEIYGDHYGKKNTEEKIYLPPIPADKIRNPVVLRALSQARKVINGVVRRYGSPARIHIETAREVGKSFKDRKEIEKRQEENRKDREKAAAKFREYFPNFVGEPKSKDILKLRLYEQQHGKCLYSGKEINLVRLNEKGYVEIDHALPFSRTWDDSFNNKVLVLGSENQNKGNQTPYEYFNGKDNSREWQEFKARVETSRFPRSKKQRILLQKFDEDGFKECNLNDTRYVNRFLCQFVADHILLTGKGKRRVFASNGQITNLLRGFWGLRKVRAENDRHHALDAVVVACSTVAMQQKITRFVRYKEMNAFDGKTIDKETGKVLHQKTHFPQPWEFFAQEVMIRVFGKPDGKPEFEEADTPEKLRTLLAEKLSSRPEAVHEYVTPLFVSRAPNRKMSGAHKDTLRSAKRFVKHNEKISVKRVWLTEIKLADLENMVNYKNGREIELYEALKARLEAYGGNAKQAFDPKDNPFYKKGGQLVKAVRVEKTQESGVLLNKKNAYTIADNGDMVRVDVFCKVDKKGKNQYFIVPIYAWQVAENILPDIDCKGYRIDDSYTFCFSLHKYDLIAFQKDEKSKVEFAYYINCDSSNGRFYLAWHDKGSKEQQFRISTQNLVLIQKYQVNELGKEIRPCRLKKRPPVR

SEQ ID NO: 361 - protein, 1082 aa, Neisseria meningitidis
MAAFKPNPINYILGLDIGIASVGWAMVEIDEDENPICLIDLGVRVFERAEVPKTGDSLAMARRLARSVRRLTRRRAHRLLRARRLLKREGVLQAADFDENGLIKSLPNTPWQLRAAALDRKLTPLEWSAVLLHLIKHRGYLSQRKNEGETADKELGALLKGVADNAHALQTGDFRTPAELALNKFEKESGHIRNQRGDYSHTFSRKDLQAELILLFEKQKEFGNPHVSGGLKEGIETLLMTQRPALSSDAVQKMLGHCTFEPAEPKAAKNTYTAERFIWLTKLNNLRILEQGSERPLTDTERATLMDEPYRKSKLTYAQARKLLGLEDTAFFKGLRYGKDNAEASTLMEMKAYHAISRALEKEGLKDKKSPLNLSPELQDEIGTAFSLFKTDEDITGRLKDRIQPEILEALLKHISFDKFVQISLKALRRIVPLMEQGKRYDEACAEIYGDHYGKKNTEEKIYLPPIPADEIRNPVVLRALSQARKVINGVVRRYGSPARIHIETAREVGKSFKDRKEIEKRQEENRKDREKAAAKFREYFPNFVGEPKSKDILKLRLYEQQHGKCLYSGKEINLGRLNEKGYVEIDHALPFSRTWDDSFNNKVLVLGSENQNKGNQTPYEYFNGKDNSREWQEFKARVETSRFPRSKKQRILLQKFDEDGFKERNLNDTRYVNRFLCQFVADRMRLTGKGKKRVFASNGQITNLLRGFWGLRKVRAENDRHHALDAVVVACSTVAMQQKITRFVRYKEMNAFDGKTIDKETGEVLHQKTHFPQPWEFFAQEVMIRVFGKPDGKPEFEEADTPEKLRTLLAEKLSSRPEAVHEYVTPLFVSRAPNRKMSGQGHMETVKSAKRLDEGVSVLRVPLTQLKLKDLEKMVNREREPKLYEALKARLEAHKDDPAKAFAEPFYKYDKAGNRTQQVKAVRVEQVQKTGVWVRNHNGIADNATMVRVDVFEKGDKYYLVPIYSWQVAKGILPDRAVVQGKDEEDWQLIDDSFNFKFSLHPNDLVEVITKKARMFGYFASCHRGTGNINIRIHDLDHKIGKNGILEGIGVKTALSFQKYQIDELGKEIRPCRLKKRPPVR

SEQ ID NO: 362 - protein, 1082 aa, Neisseria meningitidis
MAAFKPNPINYILGLDIGIASVGWAMVEIDEDENPICLIDLGVRVFERAEVPKTGDSLAMARRLARSVRRLTRRRAHRLLRARRLLKREGVLQAADFDENGLIKSLPNTPWQLRAAALDRKLTPLEWSAVLLHLIKHRGYLSQRKNEGETADKELGALLKGVADNAHALQTGDFRTPAELALNKFEKESGHIRNQRGDYSHTFSRKDLQAELILLFEKQKEFGNPHVSGGLKEGIETLLMTQRPALSGDAVQKMLGHCTFEPAEPKAAKNTYTAERFIWLTKLNNLRILEQGSERPLTDTERATLMDEPYRKSKLTYAQARKLLGLEDTAFFKGLRYGKDNAEASTLMEMKAYHAISRALEKEGLKDKKSPLNLSPELQDEIGTAFSLFKTDEDITGRLKDRIQPEILEALLKHISFDKFVQISLKALRRIVPLMEQGKRYDEACAEIYGDHYGKKNTEEKIYLPPIPADEIRNPVVLRALSQARKVINGVVRRYGSPARIHIETAREVGKSFKDRKEIEKRQEENRKDREKAAAKFREYFPNFVGEPKSKDILKLRLYEQQHGKCLYSGKEINLGRLNEKGYVEIDHALPFSRTWDDSFNNKVLVLGSENQNKGNQTPYEYFNGKDNSREWQEFKARVETSRFPRSKKQRILLQKFDEDGFKERNLNDTRYVNRFLCQFVADRMRLTGKGKKRVFASNGQITNLLRGFWGLRKVRAENDRHHALDAVVVACSTVAMQQKITRFVRYKEMNAFDGKTIDKETGEVLHQKTHFPQPWEFFAQEVMIRVFGKPDGKPEFEEADTPEKLRTLLAEKLSSRPEAVHEYVTPLFVSRAPNRKMSGQGHMETVKSAKRLDEGVSVLRVPLTQLKLKDLEKMVNREREPKLYEALKARLEAHKDDPAKAFAEPFYKYDKAGNRTQQVKAVRVEQVQKTGVWVRNHNGIADNATMVRVDVFEKGDKYYLVPIYSWQVAKGILPDRAVVQGKDEEDWQLIDDSFNFKFSLHPNDLVEVITKKARMFGYFASCHRGTGNINIRIHDLDHKIGKNGILEGIGVKTALSFQKYQIDELGKEIRPCRLKKRPPVR

SEQ ID NO: 363 - protein, 1089 aa, Neisseria sp.
  Neisseria sp. oral taxon 014 str. F0314
MTAFKPNPLNYILGLDIGIASVGWAMVEIDDKENPVRLIDLGVRVFERAEMPKTGDSLAAARRLARSVRRLTRRRAHRLLRARRLLKHEGVLKPEDFDENGLVKPLPYIPKQPRNTPWQLRAAALDRKLTPLEWAAVLLHLVKHRGYLSQRKNEGETDDKELGALLKGVADNTHALQAGNFRTPAELALNKFEKESGHIRNQRGDYSHTFSRKDLQAELVLLFEKQKEFGNPYVSDDLKNGIENLLMTQRPALSGDAIQKMLGHCTFEPAEPKAAKNTYTAERFIWLTKLNNLRILNQGNERPLTDAERTTLMDEPYKKSKLTYAQARKLLDLDDTAFFKGLRYGKDNAESATLMEMKAYHAISRALEKEGLKDKKSPLSLSPELQDEIGTAFSLFKTDEEITGRLKGCLQPEILDALLKHISFDKFVQISLKALRRIVPLMEQGKRYDEACAEIYGDHHGRRNSEETLYLPPIPADEIRNPVVLRALSQARKVINGVGRRYGSPARIHIETAREVGKSFKDRKEIEKRQEENRKDREKAAAEFQEYFPNFVGEPKSKDILKLRLYRQQNCKCLYSGKEINLGRLNEKGYVEIDHALPFSRTWDDSFNNKVLVLGSENQNKGNRTPYEYLNGKDNSREWQEFKARVETSRFPHSKKQRILLQKFDEEGFKERNLNDTRYVNRFLCKFVADHMQLTGKGKRRVFASNGQITNLLRGFWGLRKVRAENDRHHALDAVVVACSTVAMQQRITRFVRYKEMNAFDGKTVDKETGEVLHQKTHFPQPWEFFAQEVMIRVFGKPDGKPELEEADTPEKLRALLAEKLSSRPEAVHEYVAPLFVSRAPNRKMSGQGHMETIKSPKRLDEGISVVRVPLTQLKLKDLEKMVNREREPKLYEALKARLEAHKDDPAKAFAEPFYKQDKAGNRTQQVKAVRIEQVQKTGVWVRNQNGIADNATMVRVDVFEKGGKYYLVPIYSWQVAKGILPDKAIIAFKDEEEWQLIDDSFNFKFPLHPNDLVEVITKKARIFGYFASCHRGTGNINIRIHDLDNKVGKNGILEGIGVKTALSFQKYQIDELGKEIRPCRLKKRPPVR

SEQ ID NO: 364 - protein, 1097 aa, Neisseria wadsworthii
  Neisseria wadsworthii 9715
MKKQPQRYILGLDLGIASVGWALILVDGAENPVGLLDCGVRTFERAEVPKTGDSLALARRQARSVRRLIRRRAHRLLRLRRLLKREGILSAADFNSDGLPNLPIDAWQLRVAGLERKLTNQEWAAVLLHLVKHRGYLSQRKSETQTENKELGRLLAGVAENSKLLSESSEQYRTPAELAVKLFAEQSGHLRNKGGEYTHTFNRLDLQKELHLLFERQYALGNPFASAELQSKVDELLMTQRSALQGEAVLKMLGKCTFEPSEYKAAKNTYSAERFIWLTKLNNLRILYNGEERALDEGDRKKLLDEPYKKAKLTYKQVRSILNLPESAVFKGLRYGKDSDGLKAENGTLMEMKAYHKIRTILDKAGLKGEWENRIRNPEILDKIGTAFSLYKTDEDIQAALADLRLPENVLDALLAGLNFDKFIQLSLKALRNILPLMERGIRYDEACKEVYGDHRALAESKNQVLLPPIPADEIRNPVVLRTLTQARKVINAIIRRYGSPQRVHIETARELGKSKQERDKIDRKNKENQNDRNRLASDIRKHFNFEPTPKDILKLRLYEQQHGKCLYSDLREEKGECLYTGNVIELHRLFEDGYVEIDHALPLSRTWDNSLNNKVLVLKSSNQNKGNKTPYEWLDGANNSRRWREFQARVQGCHFPYVKKQRIQTAKLDSKAEQGFLERNLNDTRYISKFMCQFITANLRLAETSNALMEEVAGENPYWKERKRQRVFAPSGSIIALLRGLWGLKKVREDNDRHHALDAIVVACSTVSMQQKITKAMQRRETLETVDSETGEVKTRIPQPWDFFRQEVMIRVFSDSPREELAEKLNSRPEALHDFVSPLFVSRAPNRKMTGQGHLETVKSAKRLSENISVVRKPLTALKLKDIENIVGYPDREPALYQALRERLLAHKDDPVKAFADKPFYKPAKDGGQGSLVKAVRIIENTKHGLKIRNGITDTNGDMVRTDVYQKTDKKGKRQYFIVPVYAWQVEKNELPTVDCKGYEIDDNYEFCFSLYKYDLIEIQNPNDINQELRAYYINCDSSDGRFWLAYHDKSAKEQQFRISTQNQPIIKKYQVDTLGKEIRLCKAEKRTALNGKKKK

SEQ ID NO: 365 - protein, 1426 aa, Niabella soli
  Niabella soli DSM 19437
MPRKNILGLDLGTTSIGFAKIIEDDDYQCSSVELIGVRVNPLTTDEQTNFEKGKPVSVNADRTLKRGMRRNLDRYQLRRDYLIEILRTHHIITADTKLAEDGKNTTHTTYALRALAATAEIPLEAFVRVLLAINKKRGYKSSRKAKNEDEGQLIDGMAIARRLYEESLTPGQFSYQLLKEGKKYLPDFYRSDLNTELNKVWNFQKQFYPEILTDEFKRHLEGKGQRATAVAFWGQHGFSMAENKGSREEKKLHAYKWRSEAAHKQLTKEEVAFVITEINNDLNKSSGYLGAISDRSKELFFNKQTVGQYLHQQLKENPHTRLKGQVFYRQDYLDEFETIWEMQAKFYSALTLELKEEVRDVVIFYQRKLKSQMGLISLCEFESKEIEIEKNGEKAKKRIGLRVAPKSSPLFQEFKIWQVLNNLEFRNKKTKEVFVPEMAAKQQLFDELNIKGNLLASEAIKILGYKTKDWEANYHTLEGNRTNKSLYDAWLKILELEGYDENLLKLSGSDDIDVSKIEKPALEIRQMVLAVFEVLGISGAILDFDAEADGKAFEQQPAYQLWHLLYSAEDDGKKYSQEDIFTYGHDNIGLKKKLCEKFGFRPEHTKILVNVVFSDDYGNLSSKAMRRIYPFIKELTYDKACAEAGYRHSAASLTKEEIAARPLQNRLDLLKKNELRSPVVEKILNQMVNVVNTLVDDENQNRKARGLSEDFHFDEIRIELARELKKNAKERAEMTTNINTAKQSHEKIIRILQTEFGVPNPSRNDIVRYKLYEELKNNGYKDLYTNTYISRDILFSKQIDVDHIIPQMSLFDDSFSNKTVVFRKDNQDKGNKTAYDYILGKYGEQALEEYISRITSLFELGKKNKEEGIGKAKFQKLQKRLVDIGDGFIERDLRESQYIAKKANNMLYAICRSVVSTSGEITARLREDWDLVNVMQEINLPKFRALGLTEMVEKKDGAQKERITDWTKRNDHRHHAMDALAIAFTRHSHIQYLNHLNARKDEANKWHPVVSKIEEKETVLIYDDLGNRKRKFKAPMPNFREVVKEHLENVLISHKAKNKVVTKNKNKIKTVRGEKVKTELTPRGQLHKETIYGRYRYYESKEEKIGPKFDAEMIGMVTNPQYKKLLLERLAANGNDPKKAFWGKNALNKNPLYVDEARQELLPEKILLRWLNDDYSIRKDVTPENLKDIKTIEKILDKGVKKILLKRLADFGNDPKKAFSDLDKNPIWQNEAKRIAIKRVTISGIKNAAPLHHKKDHLGNDILDEKGKQIPSSFVSTGNNHHVAIYRDAEGNLQERVVSLFDAVQLVNGGEPVIDKEYNKGIGWQFLFTMKQNEMFVFPDEKTGFNPREVDLLSSGNRKLISPNLFRVQKLASKNYFFRHHLETSVEEKKELKNIAYKPQLGLNALSNIVKVRINHIGEIVSVGEY

SEQ ID NO: 366 - protein, 1132 aa, Nitratifractor salsuginis
MKKILGVDLGITSFGYAILQETGKDLYRCLDNSVVMRNNPYDEKSGESSQSIRSTQKSMRRLIEKRKKRIRCVAQTMERYGILDYSETMKINDPKNNPIKNRWQLRAVDAWKRPLSPQELFAIFAHMAKHRGYKSIATEDLIYELELELGLNDPEKESEKKADERRQVYNALRHLEELRKKYGGETIAQTIHRAVEAGDLRSYRNHDDYEKMIRREDIEEEIEKVLLRQAELGALGLPEEQVSELIDELKACITDQEMPTIDESLFGKCTFYKDELAAPAYSYLYDLYRLYKKLADLNIDGYEVTQEDREKVIEWVEKKIAQGKNLKKITHKDLRKILGLAPEQKIFGVEDERIVKGKKEPRTFVPFFFLADIAKFKELFASIQKHPDALQIFRELAEILQRSKTPQEALDRLRALMAGKGIDTDDRELLELFKNKRSGTRELSHRYILEALPLFLEGYDEKEVQRILGFDDREDYSRYPKSLRHLHLREGNLFEKEENPINNHAVKSLASWALGLIADLSWRYGPFDEIILETTRDALPEKIRKEIDKAMREREKALDKIIGKYKKEFPSIDKRLARKIQLWERQKGLDLYSGKVINLSQLLDGSADIEHIVPQSLGGLSTDYNTIVTLKSVNAAKGNRLPGDWLAGNPDYRERIGMLSEKGLIDWKKRKNLLAQSLDEIYTENTHSKGIRATSYLEALVAQVLKRYYPFPDPELRKNGIGVRMIPGKVTSKTRSLLGIKSKSRETNFHHAEDALILSTLTRGWQNRLHRMLRDNYGKSEAELKELWKKYMPHIEGLTLADYIDEAFRRFMSKGEESLFYRDMFDTIRSISYWVDKKPLSASSHKETVYSSRHEVPTLRKNILEAFDSLNVIKDRHKLTTEEFMKRYDKEIRQKLWLHRIGNTNDESYRAVEERATQIAQILTRYQLMDAQNDKEIDEKFQQALKELITSPIEVTGKLLRKMRFVYDKLNAMQIDRGLVETDKNMLGIHISKGPNEKLIFRRMDVNNAHELQKERSGILCYLNEMLFIFNKKGLIHYGCLRSYLEKGQGSKYIALFNPRFPANPKAQPSKFTSDSKIKQVGIGSATGIIKAHLDLDGHVRSYEVFGTLPEGSIEWFKEESGYGRVEDDPHH

SEQ ID NO: 367 - protein, 1166 aa, Nitrobacter hamburgensis
MHVEIDFPHFSRGDSHLAMNKNEILRGSSVLYRLGLDLGSNSLGWFVTHLEKRGDRHEPVALGPGGVRIFPDGRDPQSGTSNAVDRRMARGARKRRDRFVERRKELIAALIKYNLLPDDARERRALEVLDPYALRKTALTDTLPAHHVGRALFHLNQRRGFQSNRKTDSKQSEDGAIKQAASRLATDKGNETLGVFFADMHLRKSYEDRQTAIRAELVRLGKDHLTGNARKKIWAKVRKRLFGDEVLPRADAPHGVRARATITGTKASYDYYPTRDMLRDEFNAIWAGQSAHHATITDEARTEIEHIIFYQRPLKPAIVGKCTLDPATRPFKEDPEGYRAPWSHPLAQRFRILSEARNLEIRDTGKGSRRLTKEQSDLVVAALLANREVKFDKLRTLLKLPAEARFNLESDRRAALDGDQTAARLSDKKGFNKAWRGFPPERQIAIVARLEETEDENELIAWLEKECALDGAAAARVANTTLPDGHCRLGLRAIKKIVPIMQDGLDEDGVAGAGYHIAAKRAGYDHAKLPTGEQLGRLPYYGQWLQDAVVGSGDARDQKEKQYGQFPNPTVHIGLGQLRRVVNDLIDKYGPPTEISIEFTRALKLSEQQKAERQREQRRNQDKNKARAEELAKFGRPANPRNLLKMRLWEELAHDPLDRKCVYTGEQISIERLLSDEVDIDHILPVAMTLDDSPANKIICMRYANRHKRKQTPSEAFGSSPTLQGHRYNWDDIAARATGLPRNKRWRFDANAREEFDKRGGFLARQLNETGWLARLAKQYLGAVTDPNQIWVVPGRLTSMLRGKWGLNGLLPSDNYAGVQDKAEEFLASTDDMEFSGVKNRADHRHHAIDGLVTALTDRSLLWKMANAYDEEHEKFVIEPPWPTMRDDLKAALEKMVVSHKPDHGIEGKLHEDSAYGFVKPLDATGLKEEEAGNLVYRKAIESLNENEVDRIRDIQLRTIVRDHVNVEKTKGVALADALRQLQAPSDDYPQFKHGLRHVRILKKEKGDYLVPIANRASGVAYKAYSAGENFCVEVFETAGGKWDGEAVRRFDANKKNAGPKIAHAPQWRDANEGAKLVMRIHKGDLIRLDHEGRARIMVVHRLDAAAGRFKLADHNETGNLDKRHATNNDIDPFRWLMASYNTLKKLAAVPVRVDELGRVWRVMPN

SEQ ID NO: 368 - protein, 1044 aa, Nitrosomonas sp.
  Nitrosomonas sp. AL212
MLHKMRYRLALDLGSTSLGWAMVRLNANQQPCAVIKAGVRIFSNGRNPKDGSSLAVTRREARSMRRRRDRLLKRKARMMRTLIEYGFFPANETQRKALENLNPYALRAKGLDEALTPSEFARALFHINQRRGFKSNRKTDKKDSDSGALKTAIKQLHSVLDPQGNDGKPRTVGELLYKRFTDLSKLPKDRTVRARYRQDKIVKDDGKTKIDKYYDLYIDRAMIEQEFDALWKKQSELNPILFTENARADLKDVLLYQRSLKPVKPGRCTFMSEEERAPLALPSTQRFRMYQEVNNLRILREGLKEESLTLQQRDDLINALEKNNRRTFTQIKKLLGVGGSVQFNFEDPKREELKGNTTSAILGKSEHFGEAWFAFNEAKQDAIVLQLIKEENEAKLVRWLQDETGIDEKRAEVIANAGLPEGYGSLCIEALARILPELRRDVVTYDKAVQAAGFEHHSKLNRNEEIPDITFKIESIDRNSGEIKQFHLHKELPYYGEYLQRHVGFGSGKPEDSIEKRYGKIANPTVHIGLNQVRVVVNALIKRYGHPSEIIVEVARDLKQSKDRRDEENKRQAENQKRNERLRKDIADILGISEERVRRDDIEKMILWEELSFDPADRRCPYSGVQVSTVMLLSDEVEVEHILPFSQTLDDSLNNKTVALRQANRIKGNRTPWEAFGTSNISGFDYSGILTRAELMPKAKRYRFAEDGYQRWLKDDAGFLARALNDTRHLSKIAREYMSLICPNTRVIPGQMTAMLRRNFGLNDVLGLNGEKNRNDHRHHAVDACVIAVTDQGLLQRFAAASASARERQLNRLVENMPLPWESYREHVRRAIDGIWVSHRPDHSHEGAMHNDTAYGLRGNGRVSFHKMVEGKREYIEDNLKVIEITDTKAIDRHGLLPTGKPRPYKGYKGDSNYCIEIVRNEKGRWEGEIISTFDAYQLVRKYGIVQLRYPVLSVSGKPLVMRLIRNDFVRLEHEGITRTLRVCKMREDGQVALADVTEANVDARTRTKEICYVFKTGGSLQKAKARRITISPIGELRDPGFKE

SEQ ID NO: 369 - protein, 1498 aa, Odoribacter laneus
  Odoribacter laneus YIT 12061
METTLGIDLGTNSIGLALVDQEEHQILYSGVRIFPEGINKDTIGLGEKEESRNATRRAKRQMRRQYFRKKLRKAKLLELLIAYDMCPLKPEDVRRWKNWDKQQKSTVRQFPDTPAFREWLKQNPYELRKQAVTEDVTRPELGRILYQMIQRRGFLSSRKGKEEGKIFTGKDRMVGIDETRKNLQKQTLGAYLYDIAPKNGEKYRFRTERVRARYTLRDMYIREFEIIWQRQAGHLGLAHEQATRKKNIFLEGSATNVRNSKLITHLQAKYGRGHVLIEDTRITVTFQLPLKEVLGGKIEIEEEQLKFKSNESVLFWQRPLRSQKSLLSKCVFEGRNFYDPVHQKWIIAGPTPAPLSHPEFEEFRAYQFINNIIYGKNEHLTAIQREAVFELMCTESKDFNFEKIPKHLKLFEKFNFDDTTKVPACTTISQLRKLFPHPVWEEKREEIWHCFYFYDDNTLLFEKLQKDYALQTNDLEKIKKIRLSESYGNVSLKAIRRINPYLKKGYAYSTAVLLGGIRNSFGKRFEYFKEYEPEIEKAVCRILKEKNAEGEVIRKIKDYLVHNRFGFAKNDRAFQKLYHHSQAITTQAQKERLPETGNLRNPIVQQGLNELRRTVNKLLATCREKYGPSFKFDHIHVEMGRELRSSKTEREKQSRQIRENEKKNEAAKVKLAEYGLKAYRDNIQKYLLYKEIEEKGGTVCCPYTGKTLNISHTLGSDNSVQIEHIIPYSISLDDSLANKTLCDATFNREKGELTPYDFYQKDPSPEKWGASSWEEIEDRAFRLLPYAKAQRFIRRKPQESNEFISRQLNDTRYISKKAVEYLSAICSDVKAFPGQLTAELRHLWGLNNILQSAPDITFPLPVSATENHREYYVITNEQNEVIRLFPKQGETPRTEKGELLLTGEVERKVFRCKGMQEFQTDVSDGKYWRRIKLSSSVTWSPLFAPKPISADGQIVLKGRIEKGVFVCNQLKQKLKTGLPDGSYWISLPVISQTFKEGESVNNSKLTSQQVQLFGRVREGIFRCHNYQCPASGADGNFWCTLDTDTAQPAFTPIKNAPPGVGGGQIILTGDVDDKGIFHADDDLHYELPASLPKGKYYGIFTVESCDPTLIPIELSAPKTSKGENLIEGNIWVDEHTGEVRFDPKKNREDQRHHAIDAIVIALSSQSLFQRLSTYNARRENKKRGLDSTEHFPSPWPGFAQDVRQSVVPLLVSYKQNPKTLCKISKTLYKDGKKIHSCGNAVRGQLHKETVYGQRTAPGATEKSYHIRKDIRELKTSKHIGKVVDITIRQMLLKHLQENYHIDITQEFNIPSNAFFKEGVYRIFLPNKHGEPVPIKKIRMKEELGNAERLKDNINQYVNPRNNHHVMIYQDADGNLKEEIVSFWSVIERQNQGQPIYQLPREGRNIVSILQINDTFLIGLKEEEPEVYRNDLSTLSKHLYRVQKLSGMYYTFRHHLASTLNNEREEFRIQSLEAWKRANPVKVQIDEIGRITFLNGPLC

SEQ ID NO: 370 - protein, 1389 aa, Oenococcus kitaharae
  Oenococcus kitaharae DSM 17330
MARDYSVGLDIGTSSVGWAAIDNKYHLIRAKSKNLIGVRLFDSAVTAEKRRGYRTTRRRLSRRHWRLRLLNDIFAGPLTDFGDENFLARLKYSWVHPQDQSNQAHFAAGLLFDSKEQDKDFYRKYPTIYHLRLALMNDDQKHDLREVYLAIHHLVKYRGHFLIEGDVKADSAFDVHTFADAIQRYAESNNSDENLLGKIDEKKLSAALTDKHGSKSQRAETAETAFDILDLQSKKQIQAILKSVVGNQANLMAIFGLDSSAISKDEQKNYKFSFDDADIDEKIADSEALLSDTEFEFLCDLKAAFDGLTLKMLLGDDKTVSAAMVRRFNEHQKDWEYIKSHIRNAKNAGNGLYEKSKKFDGINAAYLALQSDNEDDRKKAKKIFQDEISSADIPDDVKADFLKKIDDDQFLPIQRTKNNGTIPHQLHRNELEQIIEKQGIYYPFLKDTYQENSHELNKITALINFRVPYYVGPLVEEEQKIADDGKNIPDPTNHWMVRKSNDTITPWNLSQVVDLDKSGRRFIERLTGTDTYLIGEPTLPKNSLLYQKFDVLQELNNIRVSGRRLDIRAKQDAFEHLFKVQKTVSATNLKDFLVQAGYISEDTQIEGLADVNGKNFNNALTTYNYLVSVLGREFVENPSNEELLEEITELQTVFEDKKVLRRQLDQLDGLSDHNREKLSRKHYTGWGRISKKLLTTKIVQNADKIDNQTFDVPRMNQSIIDTLYNTKMNLMEIINNAEDDFGVRAWIDKQNTTDGDEQDVYSLIDELAGPKEIKRGIVQSFRILDDITKAVGYAPKRVYLEFARKTQESHLTNSRKNQLSTLLKNAGLSELVTQVSQYDAAALQNDRLYLYFLQQGKDMYSGEKLNLDNLSNYDIDHIIPQAYTKDNSLDNRVLVSNITNRRKSDSSNYLPALIDKMRPFWSVLSKQGLLSKHKFANLTRTRDFDDMEKERFIARSLVETRQIIKNVASLIDSHFGGETKAVAIRSSLTADMRRYVDIPKNRDINDYHHAFDALLFSTVGQYTENSGLMKKGQLSDSAGNQYNRYIKEWIHAARLNAQSQRVNPFGFVVGSMRNAAPGKLNPETGEITPEENADWSIADLDYLHKVMNFRKITVTRRLKDQKGQLYDESRYPSVLHDAKSKASINFDKHKPVDLYGGFSSAKPAYAALIKFKNKFRLVNVLRQWTYSDKNSEDYILEQIRGKYPKAEMVLSHIPYGQLVKKDGALVTISSATELHNFEQLWLPLADYKLINTLLKTKEDNLVDILHNRLDLPEMTIESAFYKAFDSILSFAFNRYALHQNALVKLQAHRDDFNALNYEDKQQTLERILDALHASPASSDLKKINLSSGFGRLFSPSHFTLADTDEFIFQSVTGLFSTQKTVAQLYQETK

SEQ ID NO: 371 - protein, 1389 aa, Oenococcus kitaharae; identical to SEQ ID NO: 370
  Oenococcus kitaharae DSM 17330

SEQ ID NO: 372 - protein, 1399 aa, Olsenella uli
MNLRNTTDEYNIGLDMGTNSVGWAVTDKAGAIAHFKGKPTLGSRLFDAAQTAAGARIHRSQRRRYVRRRWRLDLLQSLFQDEVSKVDSEFFCRLRQSRLYVGDREKGHADYTWPIFNDSDFNEVDYYKRFPTIYHLRKWLMETDEKADIRLIYLATHNIVKHRGNFLRENNKSLSSRDANPAQAVKSLRLALNDWCSERDYECAWKGEEDDGAIDEAILNVLADGEKGRSDQAKEIAKLTGVDCGDAKQSKQCNEAIAKAIVGLKVEMKNIFGEFPAEKTSYIYLSSDEDVEAVRESCPDDSGELFQALCKLYSAYILQELLSYADPSGQTISANMVAKYKQYGRDLRLLKELTRTYAPQKYDLFFRGETYAGSSDYVVDEARGYTRYNLGTTKANYDDFQKSVKELFKGTDALQDERYQEMMVAFGEQKFLRRLKTSDNGSIYYQLHLEELHTILENQGKHYPFLLSEEDKIESLVSFRIPYYVGPLTRKNAAIGHDGKERFAWSSRKDGMEHAVITPWNWEEIIDRDKSAEDFIMRMTGDCTYLQGEPVLPKCSLLYEEFCALNEFNGAHWTVDGDDERRFDAAQRERIMCDLFRRTRSVTYNKVSDWLERKYNFTGARVRGGQGEHGFESKLGSYIFFCKDVFKTDGLDEADYTMIEQIILWSTLFEDRDILKRKIEEAYGGDRLTSEQIKVICKKRFTGWGRLSKRLLTDIKVNTDTGRKSIMDVLREGNPNNGQRSRTMVFMEVLRDEDLGFQKAIDGLNRDYFREHNNGLMDVNDLPGSPAIRRSINQAVRIVDEIASIARKEPTNIFIEVTREEDDPRKKGKRTKRRYDAIKSALEKFKKDDPSLWKELCEKAPGDMDERLSLYFMQRGKCMYSGRPIKIEELHTGKYEVDHIIPRSYIKDDSFENKVLVYREENQHKTDALLIDSSIRQKMGGYWRMLHDAKLVGDKKFRNLFRNHIDDKAMKGFVARQIVETSQMVKLVQTLFEARYPNTRIVPVKAGISHDLREAAGLVKCREANDFHHAHDAFLACRIGLFIQKRHPSVYDNPIGLARIMRDYARMQAREYKKSHCLAHTQGFIVNSFLSSGFDEETGEIFKDDWDAKAEVEGIRRVLNCRQCFISRMPVEGDTRYGGRYWGETIYSPKGKHKHEIPLKQGLDPNLYGGYSDLLYSYFLIYEASDVSSGERVLRFIGIPTSIAARMANQKRLEEYVSRLALQENLEHVRMVRKIMKKQLIEVDNCRLLVTAADAVTNATELAFSLDEMKIISTCAKCINGADPSAIDKIGNAQDSFFDNLKRRGSDRCALLFSQLKLDKLSQNFYMISSDDKSKILISILDRIRAKSNSVDLSLVGGAKHAAQMKFDFNAKLNNPASSFVLIDQSVTGMFERRTRIGL

SEQ ID NO: 373 - protein, 1535 aa, Ornithobacterium rhinotracheale
MNTILGLDLGTNSIGWALIKVLNDKTRLPLEIIDLGVVVIPTDQRTLDKFSKGESISKTAERTKQKGVRKLYERKKLRRERLHRVLNILGFLPEHYSKKIDFKKHLGQFFGNSQPKISYVENDHGKHEFIFMDSYREMLKEFSKHNIKNVPYDWTIYYLRKKALSQKISKEELAWVILNFNKKRGYYQFRDDNADENKENKIEKYYALKVTNVKKEDAQNYTITLENGWIYKNKSKISLLDWVGSTKEFISTEKFDNKGNIIKKKNGEDDRTLKLVDSEKDWIAIKKSTEDRIENYGKTVGTYLYEHLLKDPNQKLNGELINIIDRKFYKNELKQILEKQKEFHPELLNEDLFQKSIIELYPKNSTRQKELKNKDLCYLLIDDVIYYQRDLKKKNSTINKCSFESREYYLNGEKQIQKINCIAKSKPLYQEFRTLQFIKNLKVYEIIDGLEKDITSKLLPDFETKEHFFEWLNDKEKIDQLQLLSYKCFDLHDNVKNDLIAKGIKRPTEKAIRTELLEKYRWNYSKDNDRNFLLNETRFKILKYLKKVDKKLTLTNEQIESLWLLLYSAKDERELKNGLQKFSEKNKLPKKFSDIFISFPPFKKEYGAYSEKALKKLLSLVRFGKYWSFNKIDNNIQNKIMNILNGEVDDSISDRVREKTILLQDKNDFQDLPLWLASYVAYNRFSEVSEIKYWDSPDKIEFLKQHSIGNPIVEKIINETLKLIKDIWVIHGKSCKNFFSEIHIELSREIKSSSKKRAQITNNNTKNQKLNNLIKSLLIEMASDTKYENVTPYSPSQQEILKIYDEGIYSKEENSEKIKEINKIRNNNKISKSDITKYKLWLEQGYISPYTGKIIPLTKLFTAKYQKEHIIPQTKFFDDSFNNKVICEAEVNKLKDNSLAMNFIKAKGGKAVKLSDGETVTILNQEEYKQLVRTSFKKNSIKLRNLLLEEIPDTFTKRQLNDTKYISKLVLSLLSNIVREKGELESTAKRIVSTNGQITSILRNDWGLNNIWNKLITPRFERLNNINKNKIYGNWENKKGKNVFQINYLNDNLSTLNTKRIDHRHHALDALIVACTTRNHINFLNNQYAKSRNQRHDLRAKLKRRETITTEGSKKQVFKDFIKPWESFTQDALKKLETTIVNFKVNKRIINKTINWYKKWEKQKDGTYKKIQKKQTKGDAWAIRKPLHIDTIYGIVCKKLPLKSALENYKNIIDENLKHKIKELKEVNKFDNNQIINFFKECNFIFEDNNIQKVEVYDFKDNRDKTILSSSRQLIDESFTPKKIGKVLDPTIRNILLKHLNSTKYNNKFDSDGNPIKPEKLAFSPEGLKDLNKNIKHLNNNKEHQPIKRVKLFETLGNKIKVGYTQQKNKKFAETATGTNLFLGIYSDNNKRDFKTIPLILAIQREKEGLNPCPDTDEKGNQLLFSLSPNELVFVPNNEERKNPNLVDFENLSKDQIDRIYKFVSCTGSEAYFVPSRTAKPIIENENGTNNKSQRIIEFNEKTSIKNEKNEPVLIKTICWKIEVNRLGKIIKVIK

SEQ ID NO: 374 - protein, 1443 aa, Parabacteroides johnsonii
  Parabacteroides johnsonii DSM 18315
MIKLLYLEKLKQYTMKKILGLDLGTSSIGWALVNEAENSDEVSSIIKLGVRVNPLTVDEMQNFEKGKSITTNADRTLKRSMRRNLQRYKLRRDALIELLKKVGFITDKTILSEQGNRTTFETYRLRAKAAEEEISLKELARVLLMINKKRGYKSSRKAKGEEEGALIDGMEIAKKLYDEDLTPGQLCLQLLESGKKFFPDFYRSDLQEEFNKIWDFQKQFNLFSFCDVAKEEVKGKNKSQTWAILAKYFVETKKVNVWNEHEAQTENREEVYKLVGLKRTVKGEELKKENYRWRVQALTEQLDLEKIAVVLQEINGQISASSGYLGAISDRSKVLYFNRQTVGQYQMAELNKNPNMSLRNMVFYRQDYLDEFNVIWEKQAEFHKELTPELKKEIRDIIIFYQRRLKSQKGLISFCEFENREVVVEKEGKKQTKIIGCKVIPRSHPLFQEFKIWQTLNNIEVFVGEKKGKRKKSNVSSDLFGDTEDALITEGRRFLYQEEKKILAKELSIKKGLTKAEILRLLFENPQELDINFKQIDGNQTGFALFSAYSNMIEKYGYEPLDFKKPAEDLISQLKTVFTDLGWNTDLLFIDLDKENKEWEKQPYFRLWHLLYSFEGDNTPTGNGKLIEKIMQLCGIEKEYAIELANVSLQDDYGSLSAKAIKKILLYLKEGNQYDMACEYAGYRHSKSSLTKEEIENKVLKDKLEILPKNSLRNPVVEKILNQMVNVINTVMEVYGRPDEIRVELARELKKSAKEREELTKAVAKNTREHEEIRKVLQSEFGMINVSRNDIIRYKLYEELKDNGYKTLYSNQYIPREKLFSKEIDIEHIIPQSRLFDDSLSNKTLEYKSINIEKGNKTAYDFVKEKYGEEGLQQYLNRCENLCKDKKAKLRKLKMELNEIPDGFIDRDLRNTQYIAKKALSMLTEICRRVVATTGSITDKLREDWQLVDVMKELNLPKYEALGLVEVYEDKDGRKIKRIKDWTKRNDHRHHAMDALTVAFTKDVFIQYFNNKNAAWESDSKEHTNIVGIKTRYFESGKAVPPIPLGQFRVEAKCHLENLLVSIKAKNKVVTTNVNCIKKKGGTYKNTQQTPRGQLHLETIYGSHNQYVTKIEKVNASFDAVKIATVSKQDYRNALLKRLEVFGNDPKKAFTGKNSLEKNPIYLDRAQTIQVPDKVQTVELETAYTIRKPVDPTLNVDKVVDKKIRLILEQRLKEYGGDAKKAFVNLDENPIWLNEEKGISIKRVTIRGISKAQALHDKKDKDGNFILDETGKRIPVDFVNTGNNHHVAIYRKPVLDKKGQVIFDDEGNPMYELDEDVVPFFEAVTRANLGIPIIDKDYKKSEGWQFLFSMKQNEYFVFPNEKTGFNPKEVDLLDPDNYAMISPNLFRVQKIGLNDYTFRHHLETTIQNDLKFITWIRCGKSGIKDIVKVRINHIGQIVSVGEY

SEQ ID NO: 375 - protein, 1424 aa, Parabacteroides sp.
  Parabacteroides sp. D13
MKRILGLDLGTNSIGWALVNEAETDEEVSSIIRLGVRVNPLTVDETQNFEKGKSITTNAERTLKRSMRRNLQRYKLRRDALVEFLKELGFITDETILSEQGNRTTFETCRLRAKAAEEEISLEELSRVLLMINKKRGYKSSRKVKKEEDGVLIDGMEIAKKLYEEDLTPGQLCSQLLESGKKVLPDFYRSDLQEELDRIWSVQKQFHPDVFCDAAKEEIKGKNRSQTWAILANYFVWKEEVVGWNDREAKNETIEKECKLVGLKRTTKGYELKKENYRWRAQALTEQLGLEEIAVVLQEINGQINASSGYLGAISDRSKVLYFNHQTVGQYQMAELDKNPHASLRNMVFYRQDYLDEFDRIWEKQAEFHKELTAELKKEIRDMIIFYQRRLKSQKGLISFCEFERLEIVVEKDGKKQTKVIGCKVIPRSHPLFQEFKVWQTLNDIKVLGREKKRNALSASESRALYPEEKEILARELAIKENMKKADVLKLLFENPQELDLNFKQIDGNRTGFSLFSAYSKMIEKYGYEPLDFKKPADEIIGQLRTIFTDLGWNTNLFTIDLTKEGKELEMQPYFRLWHLLYSFEGDNTSTGNGKLIEKIMQLCGVEKEYAVELASLSFQDDYGSLSAKAIKRILPYLKEGNLYDVACEYAGYRHSKSSLTKEEIENKVLKGKLEVLPKNSLRNPVVEKILSQMVNVINTIIDTYGKPDEIRVELARELKKSAKEREELTKAIAKSTREHEEIRKLLQDEFGMMNVSRNDIIRYKLYEELKDNGYKTLYSNQYIPKEKIFSKEIDIEHIIPQSRLFDDSLSNKTLEYKAINIEKGNKTAYDFVKEKYGEEGLQQYINRCESLFNDKKAKLRKLKMEQKDIPDGFIDRDLRNTQYIAKKALAMLNEICRRVVATTGSITDQLREDWQLVDVMKELNLPKYEALGFVETYEDKDGRKIKRIKDWTKRNDHRHHAMDALTVAFTKDAFIQYFNNKNAAQDSGNRNHTNIIGIKTRYFDKGRALPPIPLEQFRIEAKQHLEKLLVSIKAKNKVVTVNVNRTKKRKGENTKIQQTPRGQLHLETVYGSHKQYVTKIEKVNASFDAAKIATVSKRAYRNALLKRLETFGNDPKKAFTGKNALEKNPLYADKYQTIRVPEKVQTVEFETIYTIRKPVDPALNVDKVVDVKVRAILERRLKEYGGDPKKAFVNFWENPIWLNKEKGISIKRVSIRGINNAQSIHVKKDKNGNPIWDENGKQIPVDFVNTGNNHHVAIYRKPVLDKKGQVTFDEDGNLMYELDEVVVPFFEAVTRANLGLPIIDKDYRKSEGWQFLFSMKQNEYFVFPNEKTGFNPKEVDLLNPDNYAMISPNLFRVQTMSKVMYGNNVVRDYKFRHHLETTVKDMKELKDIAYKQYKTLSFGNSVVKIRINHIGQIVSVGEY

SEQ ID NO: 376 - protein, 1428 aa, Parasutterella excrementihominis
  Parasutterella excrementihominis YIT 11859
MGKTHIIGVGLDLGGTYTGTFITSHPSDEAEHRDHSSAFTVVNSEKLSFSSKSRTAVRHRVRSYKGFDLRRRLLLLVAEYQLLQKKQTLAPEERENLRIALSGYLKRRGYARTEAETDTSVLESLDPSVFSSAPSFTNFFNDSEPLNIQWEAIANSPETTKALNKELSGQKEADFKKYIKTSFPEYSAKEILANYVEGRRAILDASKYIANLQSLGHKHRSKYLSDILQDMKRDSRITRLSEAFGSTDNLWRIIGNISNLQERAVRWYFNDAKFEQGQEQLDAVKLKNVLVRALKYLRSDDKEWSASQKQIIQSLEQSGDVLDVLAGLDPDRTIPPYEDQNNRRPPEDQTLYLNPKALSSEYGEKWKSWANKFAGAYPLLTEDLTEILKNTDRKSRIKIRSDVLPDSDYRLAYILQRAFDRSIALDECSIRRTAEDFENGVVIKNEKLEDVLSGHQLEEFLEFANRYYQETAKAKNGLWFPENALLERADLHPPMKNKILNVIVGQALGVSPAEGTDFIEEIWNSKVKGRSTVRSICNAIENERKTYGPYFSEDYKFVKTALKEGKTEKELSKKFAAVIKVLKMVSEVVPFIGKELRLSDEAQSKFDNLYSLAQLYNLIETERNGFSKVSLAAHLENAWRMTMTDGSAQCCRLPADCVRPFDGFIRKAIDRNSWEVAKRIAEEVKKSVDFTNGTVKIPVAIEANSFNFTASLTDLKYIQLKEQKLKKKLEDIQRNEENQEKRWLSKEERIRADSHGICAYTGRPLDDVGEIDHIIPRSLTLKKSESIYNSEVNLIFVSAQGNQEKKNNIYLLSNLAKNYLAAVFGTSDLSQITNEIESTVLQLKAAGRLGYFDLLSEKERACARHALFLNSDSEARRAVIDVLGSRRKASVNGTQAWFVRSIFSKVRQALAAWTQETGNELIFDAISVPAADSSEMRKRFAEYRPEFRKPKVQPVASHSIDAMCIYLAACSDPFKTKRMGSQLAIYEPINFDNLFTGSCQVIQNTPRNFSDKTNIANSPIFKETIYAERFLDIIVSRGEIFIGYPSNMPFEEKPNRISIGGKDPFSILSVLGAYLDKAPSSEKEKLTIYRVVKNKAFELFSKVAGSKFTAEEDKAAKILEALHFVTVKQDVAATVSDLIKSKKELSKDSIENLAKQKGCLKKVEYSSKEFKFKGSLIIPAAVEWGKVLWNVFKENTAEELKDENALRKALEAAWPSSFGTRNLHSKAKRVFSLPVVATQSGAVRIRRKTAFGDFVYQSQDTNNLYSSFPVKNGKLDWSSPIIHPALQNRNLTAYGYRFVDHDRSISMSEFREVYNKDDLMRIELAQGTSSRRYLRVEMPGEKFLAWFGENSISLGSSFKFSVSEVFDNKIYTENAEFTKFLPKPREDNKHNGTIFFELVGPRVIFNYIVGGAASSLKEIFSEAGKERS

SEQ ID NO: 377 - protein, 1037 aa, Parvibaculum lavamentivorans
MERIFGFDIGTTSIGFSVIDYSSTQSAGNIQRLGVRIFPEARDPDGTPLNQQRRQKRMMRRQLRRRRIRRKALNETLHEAGFLPAYGSADWPVVMADEPYELRRRGLEEGLSAYEFGRAIYHLAQHRHFKGRELEESDTPDPDVDDEKEAANERAATLKALKNEQTTLGAWLARRPPSDRKRGIHAHRNVVAEEFERLWEVQSKFHPALKSEEMRARISDTIFAQRPVFWRKNTLGECRFMPGEPLCPKGSWLSQQRRMLEKLNNLAIAGGNARPLDAEERDAILSKLQQQASMSWPGVRSALKALYKQRGEPGAEKSLKFNLELGGESKLLGNALEAKLADMFGPDWPAHPRKQEIRHAVHERLWAADYGETPDKKRVIILSEKDRKAHREAAANSFVADFGITGEQAAQLQALKLPTGWEPYSIPALNLFLAELEKGERFGALVNGPDWEGWRRTNFPHRNQPTGEILDKLPSPASKEERERISQLRNPTVVRTQNELRKVVNNLIGLYGKPDRIRIEVGRDVGKSKREREEIQSGIRRNEKQRKKATEDLIKNGIANPSRDDVEKWILWKEGQERCPYTGDQIGFNALFREGRYEVEHIWPRSRSFDNSPRNKTLCRKDVNIEKGNRMPFEAFGHDEDRWSAIQIRLQGMVSAKGGTGMSPGKVKRFLAKTMPEDFAARQLNDTRYAAKQILAQLKRLWPDMGPEAPVKVEAVTGQVTAQLRKLWTLNNILADDGEKTRADHRHHAIDALTVACTHPGMTNKLSRYWQLRDDPRAEKPALTPPWDTIRADAEKAVSEIVVSHRVRKKVSGPLHKETTYGDTGTDIKTKSGTYRQFVTRKKIESLSKGELDEIRDPRIKEIVAAHVAGRGGDPKKAFPPYPCVSPGGPEIRKVRLTSKQQLNLMAQTGNGYADLGSNHHIAIYRLPDGKADFEIVSLFDASRRLAQRNPIVQRTRADGASFVMSLAAGEAIMIPEGSKKGIWIVQGVWASGQVVLERDTDADHSTTTRPMPNPILKDDAKKVSIDPIGRVRPSND

SEQ ID NO: 378 - protein, 1058 aa, Pasteurella multocida
  Pasteurella multocida subsp. gallicida X73
MQTTNLSYILGLDLGIASVGWAVVEINENEDPIGLIDVGVRIFERAEVPKTGESLALSRRLARSTRRLIRRRAHRLLLAKRFLKREGILSTTDLEKGLPNQAWELRVAGLERRLSAIEWGAVLLHLIKHRGYLSKRKNESQTNNKELGALLSGVAQNHQLLQSDDYRTPAELALKKFAKEEGHIRNQRGAYTHTFNRLDLLAELNLLFAQQHQFGNPHCKEHIQQYMTELLMWQKPALSGEAILKMLGKCTHEKNEFKAAKHTYSAERFVWLTKLNNLRILEDGAERALNEEERQLLINHPYEKSKLTYAQVRKLLGLSEQAIFKHLRYSKESAESATFMELKAWHAIRKALENQGLKDTWQDLAKKPDLLDEIGTAFSLYKTDEDIQQYLEGKLPDSVINALLVSLNFDKFIELSLKSLRKILPLMEQGKRYDQACHEIYGHHYGEKNQQISQLLPVIPTQEIRNPVVLRTLSQARKVINAIIRQYGSPARVHIETGRELGKSFKERREIQKQQEDNRTKRESAVQKFKELFSDFSSEPKSKDILKFRLYEQQHGKCLYSGKEINIHRLNEKGYVEIDHALPFSRTWDDSFNNKVLVLASENQNKGNQTPYEWLQGKINSERWKNFVALVLGSQCSAAKKQRLLTQVIDDNKFIDRNLNDTRYIARFLSNYIQENLLLVGKNKKNVFTPNGQITALLRSRWGLIKVRENNDRHHALDAIVVACATPSMQQKITRFIRFKEVHPYKIENRYEMVDQESGEIISPHFPEPWAYFRQEVNIRVFDNHPDTVLKEMLPDRPQANHQFVQPLFVSRAPTRKMSGQGHMETIKSAKRLAEGISVLRIPLTQLKPNLLENMVNKEREPALYVGLKARLAEFNQDPAKAFATPFYKQGGQQVKAIRVELVQKSGVLVRQGNGVADNAPGSIVRTDVFIKNNKFFLVPIYTWQVAKGILPNKAIVAHKNEDEWEEMDEGAKFKFSIFPNDLIELRTKTECFLGYYIGPDRHNGSISLREHDSEISKGNAGVYRVGVKLALSLEKYHIDELGKNRRICRPHQRRPVR

SEQ ID NO: 379 - protein, 1056 aa, Pasteurella multocida
  Pasteurella multocida subsp. multocida str. P52VAC
MQTTNLSYILGLDLGIASVGWAVVEINENEDPIGLIDVGVRIFERAEVPKTGESLALSRRLARSTRRLIRRRARRLLLAKRFLKREGILSTTDLEKGLPNQAWELRVAGLERRLSAIEWGAVLLHLIKHRGYLSKRKNESQTNNKELGALLSGVAQNHQLLQSDDYRTPAELALKKFAKEEGHIRNQRGAYTHTFNRLDLLAELNLLFAQQHQFGNPHCKEHIQQYMTELLMWQKPALSGEAILKMLGKCTHEKNEFKAAKHTYSAERFVWLTKLNNLRILEDGAERALNEEERQLLINHPYEKSKLTYAQVRKLLGLSEQAIFKHLRYSKENAESATFMELKAWHAIRKALENQGLKDTWQDLAKKPDLLDEIGTAFSLYKTDEDIQQYLTNKVPNSVINALLVFLNFDKFIELALKSLRKILPLMEQGKRYDQACREIYGHHYGEANQKTSQLLPAIPAQEIRNPVVLRTLSQARKVINAIIRQYGSPARVHIETGRELGKSFKERREIQKQQEDNRTKRESAVQKFKELFSDFSSEPKSKDILKFRLYEQQHGKCLYSGKEINIHRLNEKGYVEIDHALPFSRTWDDSFNNKVLVLASENQNKGNQTPYEWLQGKINSERWKNFVALVLGSQCSAAKKQRLLTQVIDDNKFIDRNLNDTRYIARFLSNYIQENLLLVGKNKKNVFTPNGQITALLRSRWGLIKIRENNDRHHALDAIVVACATPSMQQKITRFIRFKEVHPYKIENRYEMVDQESGEIISPHFPEPWAYFRQEVNIRVFDNHPDTVLKEMLPDRPQANHQFVQPLFVSRAPTRKMSGQGHMETIKSAKRLAEGISVLRIPLTQLKPNLLENMVNKEREPALYAGLKARLAEFNQDPAKAFTTPFYKQGGQQVKAIRVEQVQKSGVLVRENNGVADNASIVRTDVFIKNNKFFLVPIYTWQVAKGILPNKAIVAHKNEDEWEEMDEGAKFKFSLFPNDLVELKTKKEYFFGYYIGLDRATGNISLKEHDGEISKGKDGVYRVGVKLALSFEKYQVDELGKNRQICRPQQRQPVR

SEQ ID NO: 380 - protein, 1056 aa, Pasteurella multocida
MQTTNLSYILGLDLGIASVGWAVVEINENEDPIGLIDVGVRIFERAEVPKTGESLALSRRLARSTRRLIRRRAHRLLLAKRFLKREGILSTIDLEKGLPNQAWELRVAGLERRLSAIEWGAVLLHLIKHRGYLSKRKNESQTNNKELGALLSGVAQNHQLLQSDDYRTPAELALKKFAKEEGHIRNQRGAYTHTFNRLDLLAELNLLFAQQHQFGNPHCKEHIQQYMTELLMWQKPALSGEAILKMLGKCTHEKNEFKAAKHTYSAERFVWLTKLNNLRILEDGAERALNEEERQLLINHPYEKSKLTYAQVRKLLGLSEQAIFKHLRYSKENAESATFMELKAWHAIRKALENQGLKDTWQDLAKKPDLLDEIGTAFSLYKTDEDIQQYLTNKVPNSVINALLVSLNFDKFIELSLKSLRKILPLMEQGKRYDQACREIYGHHYGEANQKTSQLLPAIPAQEIRNPVVLRTLSQARKVINAIIRQYGSPARVHIETGRELGKSFKERREIQKQQEDNRTKRESAVQKFKELFSDFSSEPKSKDILKFRLYEQQHGKCLYSGKEINIHRLNEKGYVEIDHALPFSRTWDDSFNNKVLVLASENQNKGNQTPYEWLQGKINSERWKNFVALVLGSQCSAAKKQRLLTQVIDDNKFIDRNLNDTRYIARFLSNYIQENLLLVGKNKKNVFTPNGQITALLRSRWGLIKARENNNRHHALDAIVVACATPSMQQKITRFIRFKEVHPYKIENRYEMVDQESGEIISPHFPEPWAYFRQEVNIRVFDNHPDTVLKEMLPDRPQANHQFVQPLFVSRAPTRKMSGQGHMETIKSAKRLAEGISVLRIPLTQLKPNLLENMVNKEREPALYAGLKARLAEFNQDPAKAFATPFYKQGGQQVKAIRVEQVQKSGVLVRENNGVADNASIVRTDVFIKNNKFFLVPIYTWQVAKGILPNKAIVAHKNEDEWEEMDEGAKFKFSLFPNDLVELKTKKEYFFGYYIGLDRATGNISLKEHDGEISKGKDGVYRVGVKLALSFEKYQVDELGKNRQICRPQQRQPVR

SEQ ID NO: 381 - protein, 1364 aa, Pediococcus acidilactici
  Pediococcus acidilactici DSM 20284
MGDRKYNLGLDIGTSSIGFAAVDENNQPIRVKGKTAIGVRLFEEGKTAADRRGFRTTRRRLSRRRWRINLLNEIFDAHLAEVDPTFLARLKESNRSNLDPKKSFQGSLLFPERKDYQFYEEYPTIYHLRKALMEKDRKFDFREIYLAVHHIIKYRGNFLNGTPMRSFKVENIELDTLFDQLNQLYAEIVPDNELAFDLAQVADVKDVLSSTTIYKMDKKKQLVKMMLLPASNKALQSENKKIVTQFVNAILNYKFKLDVLLQVETDADWSLKLNDEGADDKLEEFTGDLDENRLEIIDLLQRLHNWFSLNEITKDGNSLSAAMVEKYENHHHHLGLLKKVIENHPDAKKAKALKETYTAYVGKTDDKTQNQDDFYKAVEKNLDDSPDAKEIKRLIQLDQFMPKQRTGQNGAIPHQLHQQELDQIIEKQSKYYPFLAEPNPNVKRRKDAPYKLDELIAFKIPYYVGPLVTPEEQAQNGENVFAWMKRKAAGPITPWNFDEKVDRMESANRFIRRMTTKDTYLFGEDVLPAESMIYQKFVVLNELNNLKINGRHLSLKDKQDVYNDLFKQQKTVSIKALQNYYVTKKKAATAPTVGGLADPKKFLSSLSTYIDFKNMFGERVNDPQFQEDLEQIVEWSTIFEDRGIFKAKLQALGWLSEKQIQQLVAKRYKGWGRLSKKLLTGLKNAEGYSILDEMWRSTGNFMQIQSRPEFAALIQQANEKQFEGNDPDNVWENIENILGDAYTSPQNKKAIRQVVKVVQDIEKAVGNPPEKIAIEFTREAAANPQRTQSRLRTLEKLYESAEEVVDAGLTAELAEFKENKHVLSDKYYLYFTQLGRDVYTGDTISLDKLNDYDVDHILPQSFIKDDSLDNRVLTIRAVNNGKSDNVPAKMFGKKMGSFWRYLLDNGMISKRKYNNLITDPDNISKYAQKGFINRQLVETSQVIKLTANILNGIYDKDTEIIEVPAKMNSQMRKMFDLVKVREVNDYHHAFDAYLTIFIGNYLYKCYPKLQPYFVYDNFKKFGNKEDIGHKRFNFLGKIEREKKVVAPETGEILWSNVAPNETIKQIKKVYDYKFMIVSREITTRRAELFNQTVYPKNYHGKLIPIKEDRPTDLYGGYSGNTDAYLAIVALEDKKKGKYFKVVGIPTRVAAKLEKLKQQDSQQYLQALHKVIAPQFTKSTKKGIKKTEFEIVLDKVHYRQLVQDGPVKMMLGSSTYKYNAKQLVLSEKALQVIADDRKFDETQKDDNLIAVYDEILSIVNQSFDLYDINGFRKKLNDNRDQFIDLPAETKYEGRKVVAHGKREMILEILKGLHANAAFGNLKPIGFSTAFGQLQVPNGIILSKNAILIHQSPSGLFERKIKLSDL

SEQ ID NO: 382 - protein, 1366 aa, Pediococcus acidilactici
  Pediococcus acidilactici MA18/5M
MGDRKYNLGLDIGTSSIGFAAVDENNQPIRVKGKTAIGVRLFEEGKTAADRRGFRTTRRRLSRRRWRINLLNEIFDAHLAEVDPTFLARLKESNRSNLDPKKSFQGSLLFPERKDYQFYEEYPTIYHLRKALMEEDRKFDIREIYLAVHHIIKYRGNFLNGTPMRSFKVENIELDTLFDQLNQLYAEIVPDNELAFDLAQVADVKDVLSSTTIYKMDKKKQLVKMMLLPASNKALQSENKKIVTQFVNAILNYKFKLDVLLQVETDADWSLKLNDEGADDKLEEFTGDLDENRLEIIDLLQRLHNWFSLNEITKDGNSLSAAMVEKYENHHHHLGLLKKVIENHPDAKKAKALKETYTAYVGKTDDKTQNQDDFYKAVEKNLDDSPDAKEIKRLIQLDQFMPKQRTGQNGAIPHQLHQQELDQIIEKQSKYYPFLAEPNPNVKRRKDAPYKLDELIAFKIPYYVGPLVTPEEQAQNKENVFAWMKRKAAGPITPWNFDEKVDRMESANRFIRRMTTKDTYLFGEDVLPAESMIYQKFVVLNELNNLKINGRHLSLKDKQDVYNDLFKQQKTVSIKALQNYYVTKKKAATAPTVGGLADPKKFLSSLSTYIDFKNMFGERVNDPQFQEDLEQIVEWSTIFEDRGIFKAKLQALGWLSEKQIQQLVAKRYKGWGRLSKKLLTGLKNAEGYSILDEMWRSTENFMQIQTRPEFAALIQQANEKQFEGNDPNNVWENIESILGDAYTSPQNKKAIRQVVKVVQDIEKAVGNPPEKIAIEFTREAAANPQRTQSRLRTLEKLYESAEEVVDAGLTAELAEFKENKHVLSDKYYLYFTQLGRDVYTGDTISLDKLNDYDVDHILPQSFIKDDSLDNRVLTIRAVNNGKSDNVPAKMFGKKMGSFWRYLLDNGMISKRKYNNLITDPDNISKYAQKGFINRQLVETSQVIKLTANILNGIYDKDTEIIEVPAKMNSQMRKMFDLVKVREVNDYHHAFDAYLTIFIGKYLYKCYPKLRPYFVYGKFKKFGDNEDIEVGDGRFNFLNRIERLKNVTDPETGEILWSNVAPNETIKQIKKVYNYKFMLVSRETTTRRAELFNQTVYPKNYRGKLIPIKEDRPTDLYGGYSGNTDAYLAIVALEDKKKGKYFKVVGIPTRAAAKLEKLKQQDSQQYLQALHKVIAPQFTKSTKKGIKKTEFEIVLDKVHYRQLVQDGPVKMMLGSSTYKYNAKQLVLSEKALQVIADDRKFDETQKDDNLIAVYDEILSIVNQSFDLYDINGFRKKLNDNRDQFIDLPAETKYEGRKVVAHGKREMILEILKGLHANAAFGNLKPIGFSTAFGQLQVPNGIILSKNAILIHQSPSGLFERKIKLSDL

SEQ ID NO: 383 - protein, 1364 aa, Peptoniphilus duerdenii
  Peptoniphilus duerdenii ATCC BAA-1640
MKNLKEYYIGLDIGTASVGWAVTDESYNIPKFNGKKMWGVRLFDDAKTAEERRTQRGSRRRLNRRKERINLLQDLFATEISKVDPNFFLRLDNSDLYREDKDEKLKSKYTLFNDKDFKDRDYHKKYPTIHHLIMDLIEDEGKKDIRLLYLACHYLLKNRGHFIFEGQKFDTKNSFDKSINDLKIHLRDEYNIDLEFNNEDLIEIITDTTLNKTNKKKELKNIVGDTKFLKAISAIMIGSSQKLVDLFEDGEFEETTVKSVDFSTTAFDDKYSEYEEALGDTISLLNILKSIYDSSILENLLKDADKSKDGNKYISKAFVKKFNKHGKDLKTLKRIIKKYLPSEYANIFRNKSINDNYVAYTKSNITSNKRTKASKFTKQEDFYKFIKKHLDTIKETKLNSSENEDLKLIDEMLTDIEFKTFIPKLKSSDNGVIPYQLKLMELKKILDNQSKYYDFLNESDEYGTVKDKVESIMEFRIPYYVGPLNPDSKYAWIKRENTKITPWNFKDIVDLDSSREEFIDRLIGRCTYLKEEKVLPKASLIYNEFMVLNELNNLKLNEFLITEEMKKAIFEELFKTKKKVTLKAVSNLLKKEFNLTGDILLSGTDGDFKQGLNSYIDFKNIIGDKVDRDDYRIKIEEIIKLIVLYEDDKTYLKKKIKSAYKNDFTDDEIKKIAALNYKDWGRLSKRFLTGIEGVDKTTGEKGSIIYFMREYNLNLMELMSGHYTFTEEVEKLNPVENRELCYEMVDELYLSPSVKRMLWQSLRVVDEIKRIIGKDPKKIFIEMARAKEAKNSRKESRKNKLLEFYKFGKKAFINEIGEERYNYLLNEINSEEESKFRWDNLYLYYTQLGRCMYSLEPIDLADLKSNNIYDQDHIYPKSKIYDDSLENRVLVKKNLNHEKGNQYPIPEKVLNKNAYGFWKILFDKGLIGQKKYTRLTRRTPFEERELAEFIERQIVETRQATKETANLLKNICQDSEIVYSKAENASRFRQEFDIIKCRTVNDLHHMHDAYLNIVVGNVYNTKFTKNPLNFIKDKDNVRSYNLENMFKYDVVRGSYTAWIADDSEGNVKAATIKKVKRELEGKNYRFTRMSYIGTGGLYDQNLMRKGKGQIPQKENTNKSNIEKYGGYNKASSAYFALIESDGKAGRERTLETIPIMVYNQEKYGNTEAVDKYLKDNLELQDPKILKDKIKINSLIKLDGFLYNIKGKTGDSLSIAGSVQLIVNKEEQKLIKKMDKFLVKKKDNKDIKVTSFDNIKEEELIKLYKTLSDKLNNGIYSNKRNNQAKNISEALDKFKEISIEEKIDVLNQIILLFQSYNNGCNLKSIGLSAKTGVVFIPKKLNYKECKLINQSITGLFENEVDLLNL

SEQ ID NO: 384 - protein, 1087 aa, Phascolarctobacterium succinatutens
  Phascolarctobacterium succinatutens YIT 12067
MLRMKYAIGLDIGIASVGYAVLALDHEENPWGIIRLGSRIFDVAENPKDGASLALPRREARSVRRRLRRHHHRLERIKNLLINTEFITKDELLHLYDGNLSDVYELRVKALDYSVTNAELTRILLHLAQRRGFKSNRKSDANDKEAGQLLEAVSANAKRMQENHYRTVGEMFYKDDLFSKYKRNKGGTYLTTVHRDMIAAEARTILEKQFALGNNICTQDFIDKYLSILLSQRQFDEGPGEPSPYAGNQIANMIGKCTFEPNEYRAAKASYSFERFNLLQKVNHLRLLLEGKSIALDNEQRKKIIALAHDKADLRYSHIRKALGLDEKVLFNTITYNDDVSVIEKKTKFNFLQAYHQIKKVLAEDMQKLTTEQLDNIGQILSTYKSDNKRTEELSALGLEKKIIDALLGINGLSKFAHLSLKALRKINPYLEEGKIYNEACTAAGYDFKAHANTQKTELLPAYKEEMDDITSPVARRAIAQSIKVINAIIREQKGSPLYINIELAREMAKGFDERTQIDKANKENQAKNERIMERIRTEFHKANPTGMDLIKLKLWEEQDGRSPYSQKAISINRLFEPGYVDIDHIVPYSISFDDSFKNKVLVFSDENRDKGNRLPIAYLQSKFGAKAAENFMIWVQSNIKDYKKRQKLLKREITEEDINKFKERNLQDTKTISRFLYNYINDYLLFAPSDTGKKKRVTAVNGTITAYLRKRWGINKIRANGDKHHAVDAVVIACTTDKMIKDLSSFSRYHELEYTHTDTESFLVNSLTGEILKRFPYPWEDFRPELMARLSDNPADALRKLNLIFYHGIDLSTIKPIFVSRMPRHKVTGAAHKATIKSARCLDNGIVICKTSLQNLKLDKEGEIANYYAPESDTILYNALKERLRSYDNKPAKAFAEPFYKPKADGTPGPLVKKVKVYEKSTLNVAVQQNTAVADNDSMVRVDVFHVKGNGYYLVPIYIADTLKKELPNKAIVAYKPYADWPVMDDSNFIFSLYPNDLIKFEHKNSVKFAKVNKESTLNDFYSTKSEIVYFKGCNINTGAITIINHENTYVVSSLGVKTLPSLEKYQADVLGNYTKVKKEVRKPFR

SEQ ID NO: 385 - protein, 1333 aa, Planococcus antarcticus
  Planococcus antarcticus DSM 14505
MKNYTIGLDIGVASVGWVCIDENYKILNYNNRHAFGVHEFESAESAAGRRLKRGMRRRYNRRKKRLQLLQSLFDSYITDSGFFSKTDSQHFWKNNNEFENRSLTEVLSSLRISSRKYPTIYHLRSDLIESNKKMDLRLVYLALHNLVKYRGHFLQEGNWSEAASAEGMDDQLLELVTRYAELENLSPLDLSESQWKAAETLLLNRNLTKTDQSKELTAMFGKEYEPFCKLVAGLGVSLHQLFPSSEQALAYKETKTKVQLSNENVEEVMELLLEEESALLEAVQPFYQQVVLYELLKGETYVAKAKVSAFKQYQKDMASLKNLLDKTFGEKVYRSYFISDKNSQREYQKSHKVEVLCKLDQFNKEAKFAETFYKDLKKLLEDKSKTSIGTTEKDEMLRIIKAIDSNQFLQKQKGIQNAAIPHQNSLYEAEKILRNQQAHYPFITTEWIEKVKQILAFRIPYYIGPLVKDTTQSPFSWVERKGDAPITPWNFDEQIDKAASAEAFISRMRKTCTYLKGQEVLPKSSLTYERFEVLNELNGIQLRTTGAESDFRHRLSYEMKCWIIDNVFKQYKTVSTKRLLQELKKSPYADELYDEHTGEIKEVFGTQKENAFATSLSGYISMKSILGAVVDDNPAMTEELIYWIAVFEDREILHLKIQEKYPSITDVQRQKLALVKLPGWGRFSRLLIDGLPLDEQGQSVLDHMEQYSSVFMEVLKNKGFGLEKKIQKMNQHQVDGTKKIRYEDIEELAGSPALKRGIWRSVKIVEELVSIFGEPANIVLEVAREDGEKKRTKSRKDQWEELTKTTLKNDPDLKSFIGEIKSQGDQRFNEQRFWLYVTQQGKCLYTGKALDIQNLSMYEVDHILPQNFVKDDSLDNLALVMPEANQRKNQVGQNKMPLEIIEANQQYAMRTLWERLHELKLISSGKLGRLKKPSFDEVDKDKFIARQLVETRQIIKHVRDLLDERFSKSDIHLVKAGIVSKFRRFSEIPKIRDYNNKHHAMDALFAAALIQSILGKYGKNFLAFDLSKKDRQKQWRSVKGSNKEFFLFKNFGNLRLQSPVTGEEVSGVEYMKHVYFELPWQTTKMTQTGDGMFYKESIFSPKVKQAKYVSPKTEKFVHDEVKNHSICLVEFTFMKKEKEVQETKFIDLKVIEHHQFLKEPESQLAKFLAEKETNSPIIHARIIRTIPKYQKIWIEHFPYYFISTRELHNARQFEISYELMEKVKQLSERSSVEELKIVFGLLIDQMNDNYPIYTKSSIQDRVQKFVDTQLYDFKSFEIGFEELKKAVAANAQRSDTFGSRISKKPKPEEVAIGYESITGLKYRKPRSVVGTKR

SEQ ID NO: 386 - protein, 1197 aa, Porphyromonas sp.
  Porphyromonas sp. oral taxon 279 str. F0450
MLMSKHVLGLDLGVGSIGWCLIALDAQGDPAEILGMGSRVVPLNNATKAIEAFNAGAAFTASQERTARRTMRRGFARYQLRRYRLRRELEKVGMLPDAALIQLPLLELWELRERAATAGRRLTLPELGRVLCHINQKRGYRHVKSDAAAIVGDEGEKKKDSNSAYLAGIRANDEKLQAEHKTVGQYFAEQLRQNQSESPTGGISYRIKDQIFSRQCYIDEYDQIMAVQRVHYPDILTDEFIRMLRDEVIFMQRPLKSCKHLVSLCEFEKQERVMRVQQDDGKGGWQLVERRVKFGPKVAPKSSPLFQLCCIYEAVNNIRLTRPNGSPCDITPEERAKIVAHLQSSASLSFAALKKLLKEKALIADQLTSKSGLKGNSTRVALASALQPYPQYHHLLDMELETRMMTVQLTDEETGEVTEREVAVVTDSYVRKPLYRLWHILYSIEEREAMRRALITQLGMKEEDLDGGLLDQLYRLDFVKPGYGNKSAKFICKLLPQLQQGLGYSEACAAVGYRHSNSPTSEEITERTLLEKIPLLQRNELRQPLVEKILNQMINLVNALKAEYGIDEVRVELARELKMSREERERMARNNKDREERNKGVAAKIRECGLYPTKPRIQKYMLWKEAGRQCLYCGRSIEEEQCLREGGMEVEHIIPKSVLYDDSYGNKTCACRRCNKEKGNRTALEYIRAKGREAEYMKRINDLLKEKKISYSKHQRLRWLKEDIPSDFLERQLRLTQYISRQAMAILQQGIRRVSASEGGVTARLRSLWGYGKILHTLNLDRYDSMGETERVSREGEATEELHITNWSKRMDHRHHAIDALVVACTRQSYIQRLNRLSSEFGREDKKKEDQEAQEQQATETGRLSNLERWLTQRPHFSVRTVSDKVAEILISYRPGQRVVTRGRNIYRKKMADGREVSCVQRGVLVPRGELMEASFYGKILSQGRVRIVKRYPLHDLKGEVVDPHLRELITTYNQELKSREKGAPIPPLCLDKDKKQEVRSVRCYAKTLSLDKAIPMCFDEKGEPTAFVKSASNHHLALYRTPKGKLVESIVTFWDAVDRARYGIPLVITHPREVMEQVLQRGDIPEQVLSLLPPSDWVFVDSLQQDEMVVIGLSDEELQRALEAQNYRKISEHLYRVQKMSSSYYVFRYHLETSVADDKNTSGRIPKFHRVQSLKAYEERNIRKVRVDLLGRISLL

SEQ ID NO: 387 - protein, 1485 aa, Prevotella bivia
  Prevotella bivia JCVIHMP010
MKNILGLDLGTNSIGWAKISIDDNGKYIKDSIKLGSRIIPMSQDVLSNFSKGVTLSQTSERTSFRGARRLRERTLLRRERLHRILHLLGFLPKHYEKAIGWDRNDNKTYGKFINHAEPKLAWCKDNNGKMRFLFMDSFHDMLSEFSEKHPELLANGKKIPLDWTIYYLRKKALYKAITKEELAWILLNFNQKRGYYQLRGEEDRDSEANKKEYLELKVIGVEATGEKKGNDIWYNIHLENGWIYRRSSKNPLNDWLGKVKSFIVTTDLDADGNPKKDKDGNIKRSFRAPSEGDWTLIKKRTESLLENSGQTVGQFIYNHILEEPSAKIRGNFIRTIERKYYKDELKAILEKQKEFHHELSSESLLTECAKELYKRNIAHQEVLLKKGIIHLLLNDILFYQRPLKIKKSLIDNCPYENYKYVDKKSGDIKVKSIKCIAKSNPFFQEFRLWQFVSNLRLYRKSDDKDVTSEHLVTTDDYANLFTYLNNRKDIKQSVLLKEYFKIKKVKTINGAEYPVRWNYIDDDNKTYPCNETRYDILHALSKTELKSEWLTPERTYRLWHLLYSIESKEETKKALNKLNLSDDFTEAFLTIKPFKKEYGSYSEKAIKKLLSLMRMGYLWSEDEAIKQVGAEIEKTIEGELPDYVLQRLEKSQHNYNKISDFSGLPLWLASYIIYGRHSEAKEIIHWDNPESMMAYIKDFRQHSMRNPIVEQCVLETLRTVHDIWKEIGHIDEIHIELGREMKSTSEQRKAITQNVLHNQNTNIRIKLLLQELKNDNNITGVRPYSPMQQEILRIYEEGALQGLTKEDKDYNDILKISQTAQPTSNELTRYKLWLEQKYRSPYTGKAISLSKLFTSAYQIEHVIPQSRYFDDSLSNKVICESEVNTLKKAMLGMEFIKTCGGQKVHCTLLGDVEIYNEEDYKAFVNEHYSNNRTKRNKLLMEDIPQEFINRQLNDSRYISKMVKQLLSAIVRGQEEVEATSKFVIPCTGGITDRLKKDWGLNDIWNNLVSPRFQRMNALTGSEYFGHWENKEGKRVFQTTMPIQLQQGFSKKRIDHRHHAMDALVIACASRNIISYLNNETAQDTERRRDLRQKLCDKGGSVRKPWDSFTQDTQYALKDIIVTFKNYVRIINKATNYYEHYKTDGKKGMISQKGDELWAIRKPMHKETVFGKVNLRRPKRVSLSKAIDSVDIICNRKLKKYIKARLNEGLQKKQILNIFKELNNVWEGIDVNKIDIWEMSNDKEPMVATRKQLDTSFDEKKIRSISDTGIQKILLNYLITKNNNPELAFTPEGIQEMNSNISEYNDHKKHQPIYKVRVTEPLGAKYPIGTMGNNPKKFVEAQAGTNLYFAIYEDKEGKRNYDTIPLNIAAERLNQQLSPVPETNENNTPLKFYLSPNDLVYVPSEEERHSGNNIQLDKNRIYKMVSSTSKRCFFIHHRVAISLVDKKEFSAQNKMERSIDNEQVMIKSVCWKLITDRLGNIIKVIK

SEQ ID NO: 388 - protein, 1457 aa, Prevotella buccae
  Prevotella buccae ATCC 33574
MKTILGLDLGTNSIGWAKVSVDDYGNYLHDIKLGSRIIPMSQDVLGNFDSGVTVSQTAQRTEFRSKRRLVQRNLQRRERLHRVLHVLDFLPAHYDAAIGWDRTEAVTYGKFLNHAEPKLAWEELGNGKRRFLFMDSFHEMVADFARCQPALVADGKKIPLDWTIYYLRKKALTQAITKEELAWILLNFNQKRGYYQLRGEEEEENPTKQEEYYELKVVSVEATDSRKGNDTWYNVHLENGWIYRRSSKISLDDWVGKVKQFIVTTEYEKDGATLKTDKEGYVKRSFRAPNENDWGLRKKRTETLLEMSGKTVGAFIYDHLLQEPADKIRGNFIRTIERHYYKAELEAILAEQCKYHIELRDKEMLEACARELYLNNLPHQRSLMKKDMTYLLLYDLIFYQRPLKSKKALIANCPYEYYEYVDKETGEIKRQNIKCIAKSNPYFQEFRLWQFVLNLRLFDRVEDKEVTANYLPTADDHARLFTYLNDRKEINQETLLKDYFKLKKVKIGNEKEYPIRWNYIEDKEKKYPCNETRYELLMALDRAGIEHKWLDDNNLEYRLWHLLYSVEVKSESETALRKLKNDDAFVNSFLKVKPFKKEYGAYSEKAIKRLLAVMRKGFLWNEQDICDETRKRIEIIIKGDVDEKVKERMGHAAYSFDRVSDFQGLPEWLACYVVYGRHSEAMDIQHWDSPERLMAYINNFKQYSLRNPIVEQCILETLRTVHDIWKETGQIDEIHVELGREMKSTSEERARRTQNVLRNENTNLRIKSLLIELKNDTDICNVHPYSPMQQEILRIYEEGALQELNREDEDFEEISKISQMSQPSGKELNRYKLWLEQKYRSPYTGKAISLAKLFTPAYQIEHVIPQSRYFDDSFTNKVICEAEVNTLKSNLLGYEFIKKHGGEIIHCTTLGDVRIFSESEYKAFVMDHYANNKSKKDKLLMEDIPQEFLSRQMNDSRYISKVVKTLLSNIVRMADESEATSKSVIVCTGGVTDRLKKDWGLNDVWNSIVYSRFERLNRLTGTEAFGHWENKDGKRVFQTSMPLELQRGFRKKRIDHRHHAMDALVIACASRNIVNYLNNESANNPKKREDLRRQLCDKNRVIRKPWETFTQDAYNALENVVVSFKNYVRVINKATNRYEHYDENGKKRFVQQKGSELWAIRKPMHKETYYGHVNLRRKELVTLQKALDDIPSICDKKLRDYISALVEKHFNKRQLLAHFKSTDYYWQKQYVNKVYVWTFSDDIKPLVATRKLLDTSFDAKRIGTITDTGIQKILRNYLEAKGGNATLAFTPEGIAEMNQNISKYNDGKPHQPILKVRITEPMGAKYRVGQTGNKMAKYVEAQSGTNLYFAIYEDSEGKRSYTTVPLDEVAERLKQRLSPVPEKDENDVPLKFYLSPNDLVYVPTEEELQLRECKLNKDRIYKMVSSTGNECHFIPYYVANVIYNKGGFNMQMHRPQS

SEQ ID NO: 389 - protein, 1218 aa, Prevotella buccalis
  Prevotella buccalis ATCC 35310
MNKRILGLDTGTNSLGWAVVDWDEHAQSYELIKYGDVIFQEGVKIEKGIESSKAAERSGYKAIRKQYFRRRLRKIQVLKVLVKYHLCPYLSDDDLRQWHLQKQYPKSDELMLWQRTSDEEGKNPYYDRHRCLHEKLDLTVEADRYTLGRALYHLTQRRGFLSNRLDTSADNKEDGVVKSGISQLSTEMEEAGCEYLGDYFYKLYHEQGNKVRIRQRYTDRKKHYQHEFDAICEKQELSSELIEDLQRAIFFQLPLKSQRHGVGRCTFERGKPRCADSHPDYEEFRMLCFVNNIQVKGPHDLELRPLTYEEREKIEHLFFRKSKPNFDFEDIAKELAGKKNYAWIHDKEERAYKFNYRMTQGVPGCPTTAQLKSIFGDDWKTGIAETYTLIQKKNGSKSLQEMVDDVWNVLYSFSSVEKLKEFAHHKLQLDEENAEKFAKIKLSHSFAALSLKAIRKFLPFLRKGMYYTHASFFANIPTIVGKEIWNNEQSRKYIMENVGELVFNYQPKHRDVQGTIEMLIKDFLANNFELPAGATDKLYHPSMIETYPHALRNEFGILQLGSPRTNAIRNPMAMRSLHVLRRVVNQLLKESIIDENTEVHVEYARELNDANKRRAIADRQKEQDKQHKKYGDEIRKLYKEETGKDIEPTQTDVLKFQLWEEQNHYCLYTGEQIGITDFIGSNPKFDIEHTIPQSVGGDSTQMNLTLCDNRFNREVKKAKLPTELANHEEILTRIEPWKNKYEQLVKERDKQRTFAGMDKAVKDIRIQKRHKLQMEIDYWRGKYERFTMTEVPEGFSRRQGTGIGLISRYAGLYLKSLFHQADSRNKSNVYVVKGVATAEFRKMWGLQSEYEKKCRDNHSHHCMDAITIACIGKREYDLMAEYYHMEETFRQGRGSKPKFSKPWATFTEDVLNIYKNLLVVHDTPNNMPKHTKKYVQTSKGKVLAQGDTARGSLHLDTYYGAIERDGEIRYVVRRPLSSFTNPKELENIVDETVKRTIKEAIADKNFKQAIAEPIYMNEDKGILIKKVRCFANSVKQPINIRQHRDLSKKEYKQQYHVMNENNYLLAIYEGLVKNKVVREFEIVSYIEAAKYYKRSQDRNIFSSIVPTHSTKYGLPLKTKLLMGQQVLMFEENPDEIQVDNTKDLVKRLYKVVGIEKDGRIKFKHHQEARKEGLTIYSTPYKNNDDYVPIFRQSIKNINILVDGIDFNIDILGKVTLKE

SEQ ID NO: 390 - protein, 1422 aa, Prevotella denticola
  Prevotella denticola CRIS 18C-A
MTQKVLGLDLGTNSIGSSVRNLDLSDDLKGQLEFFSSDIFRSSVNKESNGREYSLAAQRSAHSRSRGLNEARRRKLWATLDLLIKYGFCPMSPESLMRWRTYDKQRGLFREYPIDDKNFNAWILLDFDGDGKPDYSSPYQLRRELVIRQFDFDQPIERYKLGRALYHIAQHRGFKSSKGETLSQQETNSKQSLTDDTADVAGEMKASEEKLSKGLSTYMKENNLLTVGAAFAQLEDEGVRVRNNNDYRAIRSQFQREIETIFKFQQGLSVENELYERLVSEKKNIGTIFYKRPLRSQRGNVGKCTLERTKPRCAIGHPLFEKFRAWTLINNIKVRMSEEEQAEQLPMKLRFELYNDCFLAFVRAEFKFEDIRKYLEKRLGVHFSYNDKTINYKDSTSVAGCPITARFRKLLGEDWESFHVDGQKQRQAHGKNNASFHTVSYSTNDIWHFCYDAEEPEAVLSFAQDNLKWEKKKAEELVRIWSAIPQGYAMLSQKAIRNINKMLILGLKYSDAVLLAKVPEIVEITDGEILSVTEDYHRVEAQVGYEKQINNIVNALIAKYKSASEEYRFADHNYEYQLDKSDEKDIIKQIESNIGTRKWSLLDADEQTDILQKVRDKYQNFFRSHERKFVESPKLGECFEEYLMKKFPMVEGERWKKLYHPSQIAIYRPVPANKDRSALRLGNPDIGAIKNPTVLRVLNTLRKRVNQLLDDGIISPDETRVVVETARELNDANRKWALDTYNRIRHDENEKIKKILAEFYPKRDNISTVDIDKARYVIDQREMDYFTEAKTYHKDIKKYKLWLEQGGQCMYTGRTINLSNLFDPNSFDVEHTIPESISFDSSDMNLTLCDAHYNRFIKKNHIPADLPNYDKSVVIDGKEYSPIKPRLQRWADRVERLNRNVEYWRGQARRAQNKDRKDQCMREMHLWKMELEYWTKKLERFTITEVTDEFKNSQLVDTRVITRHAVLYLKSIFPHVDVQRGDVTAKFRKILGIQSVDEKKDRSLHSHHAIDATTLTIIPGAAKRERMLELFAKIEEVNKMLSFSGNEDRTGLKQELDGLKNQLNKEVKACRIGHNVSEIGTFINDNIIINHHVKNQALTPVRRRLRKRGHIVGGMDNPRWQTGDALRGEIHKASYYGAITQYAKDKEGKVLMKEGRPQINPTIKFVIRRELKYKKSSTDSGFASWDDLGKAIVDKELFALMKGQFPEGTSFKDACEQGIYMIKKGKNGEVDTKLYRIRHIRCKTKQKNALKIKEQAYKSEKEYKRYFYAAVGDLYAMCCYTNGKTREFKIYSLYDISCHRKVGVEDIPEFITDKKGNRLMLDYKLHTGDMILLYKENPEELYDLDNVSLSKLLYKINGFENDGLRIRMVNHLVAKEAMGESVKDYAKLPDIIRCGVKTIKFLVMGENRDFVIKNGKISFNHR

SEQ ID NO: 391 - protein, 1375 aa, Prevotella histicola
  Prevotella histicola F0411
MKKILGLDLGTTSIGWALVYESENTDEKSSIVRLGVRVNPLSVDEKGNFEKGKAITTNADRQQTHGARINLQRYKLRRENLKDCLQKQGWIGTEALCEEGKTSTFETYMLRAKAAEEEISLHELCRVLFMMNKKRGYKSNRKANNKEDGKLFDGMTVAKKLYEEHLTPAEYSFQLLSSGKKFKQEYYRSDLKEEFDRIWNEQQKYYPEILTDDFKQQLQGKSKGNTSKIFLGKYGIYSADLKGLDRKLQPLKWRVEALKQQVDKEVLAFVISDLNGQIASTSGLLGAISDRSKELYFNKQTVGQYLWTSLKETPHVSIKNKPFYRQDYLDEFEKIWETQATYHKELTPELKQEIRDIIIFYQRPLKSKKGLISVCELEQRKVKVTIDGKEKEISIGPKVAPKSSPMFQEFRIWQNLNNILLIDKGNNSIHPLYEEEKNLLYEELSVKEKLSKAEALKVLNKNSKQWDLNYKEIEGNRTQAVLYDCYNRIIVMTGHEEYNFKKLKASEIRSYVKTTFTGLGFNTDILEFDSSLTGHELEKQPMYQLWHLLYSYESDNSRTGNDALLRKLETAFGFPKEYAAVLSDVVFEDSYGNLSVKAMRKILPHLQAGLNYSQACEEAGYKHSRRSLTKNELDQKEYKEKLELLPKNSLHNPVVEKILNQMINVINAVIDEYGKPDEIRIELARELKIGAAERENMTRSINQGNAENKRIREILEKEFALSYISRNDIIKYKLYEELKSNGFKTLYSDTYISKDKLFSKDFDIEHIIPKARLFDDSLSNKTIEARDVNIAKSNKTAFDFISEKYDQQGIEAYKKKLDILLQDGSISKAKYNRLLMKEADIPSGFIDRDLRDTQYIAKKAYEILSDLVRNVTPTTGAVTSRLREDWQLVDVMKELNFEKYQKLGLVEVIEDRDGRKIKRIKDWTKRNDHRHHAMDALTIAFTKPSYIQYLNNLNARSDKNSSIYGIENKELHREDNKLRFNAPLPINEFRAEARRHLKSILVSVKAKNKVMTQNVNVIKTKHGVIKKVQLTPRGELHNATFYGTKKRPIIKMVKVGAALDEVTIKKVSSSFIREALLDRLHEYNGDAKKAFTGRNSIDKNPIYIDEEHKKTVPALVKTIEWEMYHPTRKLISPDLKIDKVIDKGIREILKTRLAKFNGDAQKAFSNLDENPIYKDEAKKITLKRVSLEGVSSVIPLHTLKDREGKLVVGKDGKPVLGDYVQTSNNHHIAFYMDENGNLQDNVVSFFEAAERKSQGVPVIDKNYNHDKGWNFLFTMKQNEYFVFPNEVTGFNPSEVDLMDEANYSIISPNLYRVQKMSKASGRDYWFRHHLEAMLNDDPKLRNSMFKRITSLKALEGIVKVRINCIGKIVAVGEYD

SEQ ID NO: 392 - protein, 1380 aa, Prevotella intermedia
MKRILGLDLGTTSIGWALVNEAENNNEASSIVRLGVRVNPLTVDEKSNFEKGKAITTNADRQLRHGARINLQRYKLRRQNLHDCLQKQGWLGTEAMYEEGKASTFETYKLRAKAAEEEISLHEFARVLFMLNKKRGYKSNRKANNKEDGQLFDGMTIAKKLYEEHLTPAEYSLQLLNKGKKFTQGYYRSDLNAELERIWDEQKKYYPEILTDEFKQQLEGKTKTNTSKIFLAKYGIYSADLKGLDRKFQPLKWRVEALQQQVDKEVLAFVISDLKGQIANTSGLLGAISDRSKELYFNKQTVGQYLWASLEENPHISIKNKPFYRQDYLDEFEKIWETQAAFHKQLTPELKQEIRDIIIFYQRPLKSKKSLISVCELEQRKVKATIDGKEKEITIGPKVAPKSSPVFQEFRIWQNLNNVLLIDNDTNEKRPLDEVERNLLYKELSIKAKLSKTEALKILNKKGKQWDLNYRELEGNRTQAILFDCYNRIITLTGHEECDFKKIKASEIRHYVSTIFKNLGFSTEILDFDPSLKKHELEKQPMYQLWHLLYSYESDNSRTGNESLLRKLETTFGFPEEYATVLCDVVFEEDYGNLSVKAMREILPYLQAGNDYSQACAYAGYNHSRHSLTKEELDQKVYKERLELLPKNSLRNPVVEKILNQMINVINAIIDEYGKPDEIRIEMARELKSSAADRKKTTHAISQGNAENQRIREILEKEFSLSYISRNDIIKYKLYEELEPNYYKTLYSDTYITKDKLFSKDFDIEHIIPKARLFDDSFSNKTLEARNINLEKSNKTAFDFIKEKYGEDGAEAYKKKLDMLLENDAISRPKYNNLLRAEADIPSDFINRDLRNTQYIAKKACEILGELVKTVTPTTGKITNRLREDWQLVDVMKELNFEKYEKLGLTEIVEDRDGRKIKRIKDWTKRNDHRHHAMDALAIAFTKPSFIQYLNNLNARSNKGDSIYAIENKELHYEEGKLRFNAPIPVNEFRAEAKRHLSAILVSIKAKNKVMTQNVNKIKTKHGIIKKIQLTPRGPLHNETIYGTKMRPIIKMVKVGAALDEATINKVSSPAIREALLKRLNEYSGNAKKAFTGKNTLEKNPIYLNAGRTKTVPSLVKTVEWESFHPTRKLIDKDLNVDKVVDKGIREILKARLEEFNGDAKKAFSNLEENPIYLDEAKKIALKRVSIEGVLSAIPLHTLKNQAGKPITGKDGKPVLGNYVQTSNNHHIAFYYDEDGNLQDNAVSFFEAAERKSQGIPVIDKDYNRDKGWRFLFTMKQNEYFVFPNEATGFIPSEVDLTDEANYGIISPNLYRVQKVSRIDKGTSASRDYWFRHHLETILNDDAKLKNLAFKRIRGLLELKDIIKVRINSTGKIVAVGEYD

SEQ ID NO: 393 - protein, 1425 aa, Prevotella micans
  Prevotella micans F0438
MIQKIFGLDLGTNSIGSSVRNLELGENLTEQLEFFSSDIFGSSVSKNSNGREYSLAGNRSAHRRSRGLNEARRRKLWATLDLLIEHGLCPMSPDSLMQWRTYDKQKGLYRQYPIEDKDFNAWIMLDFNGDGKPDYSSPYQLRRELVVRQFDFDQPIERYKLGRALYHIAQHRGFKSSKGETIADQEKNEKKPIAEEGADIANEMKASETKLSKGLVAYMQENHLKTVGEAFAKLEDERVRIRNNESYRAIRSQYQDEIKEIFTYQKKLSVESELYERLTSEKKGVGTIFYKRPLRSQRGNVGKCTLERNKPRCPIGRPEFEEFRAWTLINNIKIRETAGEPYKQLPIKLRQELLKDCFLSKVKADFKFEDIRKYIEKRLGLSFSNDDKTINYKDSVSIAACPVTVRMKKLLGENWANCRIDGEKRRQAHGKNNNNEHIVSYTEEDIWHVCYNAEDPEEVSNFARKALHWDENKIKELVRLWTSIPQGYAMLSLKAIRNINRMLLLGLKYSDAVLLAKLPDIVPVSDEDILAITKEFLQLEDKLNQEKQINNIVNSLIANYKSKLEENRFADHNYQYQLGEGDDEDINTQIKSHIGAKLWVQIGADEQTKIFQAVRSKYQDFFKSYKRKFVESPKLGELLVAFLTEKFPNVKSKQWERLYHPSQIAIYRPIPVDNDRSKLRLGNPNIGAIKNPTVMRVLNTLRRRVNQLLDDGVISPDETRVVVETARELNDANTKWALDRYNRIRRDENEKIRKILKELNPTTNSISEQDIDKARYIFEQCETDFYTDGKVPYYNKDIKKYKLWLEQGGQCLYTGQTINLTNLFNPNAFDMEHTIPKSISFDNSDQNLTLCESYYNRFIKKNNIPTDMPNYDKDVTINGKEYTAIKPRLQRWKERVDRLSRNVDFWKGQARRAQDKDRKDECIREKHLWDMELAYWKGKLERFTMTDVTDGFKNSQLVDTRVITRHAVLYLKSIFNHVEVQRGETTAEFRKILGLQSIDEKKDRSLHSHHAIDATMLTVIPSAAKRDRMLELFYKIEETKKALKNYNDNNKTGLNLELKGLEEKLDKEKKDCRVGRRVNDLDRFINENIIVSHHTKDQALTPAHRRLRKRGKIVGGKEHPRWQTGDSLRGEIHKASYYGAITQFAKDANGKVLMKDGQAQIDPTIYYVIRRELKYKRSTQDSGFTNWEDLEKVIVDTDLFGLMKGQFPEGTSFKDACEQGFYMIKKGKNGEGDVKTHRIRHVRCKAVKTALRIKEQTYKSSKDYKQFFYAAVGDLYVMCYYTDGKKRDFKIYSLYDISNHRKSGTEDIPKFITDKKGNHLPLDYKLRTGDMVLLYKDNPEELKDLDQVNLKRRLYKVNRFESEGLIILLTHHLSTTTERGCSIGKIENYQNLPTAIRCGIKTIKFLIMGKHRDFVIRNGNIEFKH

SEQ ID NO: 394 - protein, 1506 aa, Prevotella nigrescens
  Prevotella nigrescens ATCC 33563
MKTILGLDLGPNSIGWAKVEVDDEGNYLRNIKLGSRIIPMTQDMLGDFDKGVKVSQTAIRTDFRGNRRLIERHLLRRERLHRVLHALKFLPKHYEDAIGWDRNEPATYGKFVNNSEPKLAWERQEDGSMRFLFMESFNEMVADFAQNQPSLVSDGKKIPLDWTIYYLRKKALTRPIKKEELAWILLNFNQKRGYYQLRGEEEEDNLTKRKEYYKLKVVGVEADGAPKGGKTWYNIHLENGWTARCQSKIPLDDWVGKVKEYIVTTEYEDDGKTPKCDKEGKVKRSFKSPEKDDWQLIKTRTEKFIDDSNKTVGAFIYDYLLEKPFDKIRGKYIRTIERKYYKNELREILREQTKYHEGLHSLEALKICAEELYKNNQQHQEYLLKKDMTFLLLNDLIFYQRPLKSKKSLIADCPYEVYKYDDKLTGKKGQKKIKCIAKSNPYYQEFRLWQFIANLRLFSVTDGKEVTAEYLKTEEDYVRLFSFLNDRKDIKQETFLRSFLKLKKESIGSEKIYPIRWNYIEDANKSYPCNATRHELLLAFDRADIPRELLDVEEREYRLWHLLYSIEAKEETESALRKLKANKAFGDLNIDDAFVNSFLKIKPFEKEYGAYSEKAIKKLLAVMRRGSLWKEADICEATKQNIAKILQNDIDEKLKKKIEAAVSSFNKLSDFQGLPTWLACYVVYGRHSEAAQIQCWQSPEDLKTYINKFKQHSLRNPIVEQCLLETLRTVYDIWKDAGQIDEIHIELGRNMKSTAEQRARKTKDILRNENTNLRIKNLLVELKNDDKIENVRPYSPSQQEILRIYEEGALQELSKEDEMFEDISKISKMAQPSPTELSRYKLWLEQKYRSPYTGRVIPLSKLFTTAYQIEHIIPQSRYFDDSFNNKVICESEVNSLKDNMLGYEFIKECGGRIVHCTLLGDVKIFTKEEYKDFVTKHYIDNTYKRDKLLLEDIPQEFSARQLNDSRYISKMVQTVLSNIVRAENEQEATSKFVVSCNGAITNRLKKDWGLNDVWSSIVCPRFKRLNEITKTNAFGHWEDKAGKHVFQTTVPLELQRGFSKKRIDHRHHAMDALVIACASRNIVNYLNNESANSPEKREDLRKKLCDEKRKIRKPWKTFTQDAREALSDVVVSFKNYVRVINKATNYYEHYSSSGNKVMISQKGNDMWAIRKPLHKESVFGRVNLCRKVIVSLKKALENIPAICDKTLRDYINALVEKHFNTRQLLAHFKSINYRLNRQCVEKVEVWQFSDEKIEMVARRKSLDTSFDDKQISSITDTGIQKILLNYLQTKDGNAEIAFTPEGIEEMNKNISLYNDGKAHQPILKVRVATPKGMKYPVGQTGNKATKFVVAEKGTNLYFAIYENELGVRSYDTIPLNIVVERLKEGLSPVPQANEADIPLKFYLSPNDLVYVPTKENEDELCRDRIYKFVDSSGTTANFVPHTSANTIYNVDKEYAEKCCNGAVFLNEYGLGSPQSKNQRALTGEMIKEICWKLKVDRLGNIIKVIK

SEQ ID NO: 395 - protein, 1380 aa, Prevotella nigrescens
  Prevotella nigrescens F0103
MKRILGLDLGTTSIGWALVNEAESNNEASSIVRLGVRVNPLTVDEKSNFEKGKAITTNADRQLRHGARINLQRYKLRRQNLHDCLQKQGWLGTEAMYEEGKASTFETYKLRAKAAEEEISLHEFARVLFMLNKKRGYKSNRKANNKEDGQLFDGMTIAKKLYEEHLTPAEYSLQLLNKGKKFTQGYYRSDLNAELERIWDEQKKYYPEILTDEFKQQLEGKTKTNTSKIFLAKYGIYSADLKGLDRKLQPLKWRVEALKQQVDKEVLAFVISDLKGQIANTSGLLGAISDRSKELYFNKQTVGQYLWASLEENPHISIKNKPFYRQDYLDEFEKIWETQATFHKQLTPELKQEIRDIIIFYQRPLKSKKSLISVCELEQRKVKATIDGKEKEITIGPKVAPKSSPVFQEFRIWQNLNNVLLIDNDTNEKRPLDEDERYLLYKELSIKAKLSKTEALKILNKKGKQWDLNYKELEGNRTQAILFDCYNRIITLTGHEECDFKKIKASEIRHYVSTIFKNLGFSTEILDFDPSLEKHELEKQPMYQLWHLLYSYESDNSRTGNESLLRKLETTFGFPEEYATVLCDVVFEEDYGNLSVKAMRKILPYLQAGNDYSQACAYAGYNHSRHSLTKEELDQKVYKERLELLPKNSLRNPVVEKILNQMINVINAIIDEYGKPDEIRIEMARELKSSAADRKKTTHAINQGNDENQCIREILEKEFALSYISRNDIIKYKLYEELKPNGFKTLYSDTYIPKDKLFSKDFDIEHIIPKARLFDDSYSNKTLEARDINLAKSNKTAFDFVKEKYGEQGAEAYKKKLDMLLGNNVISKPKYNKLLMTEADIPSDFINRDLRNTQYIARKACEILGELVRTVTPTTGKITNRLREDWQLVDVMKELNFEKYEKLGLTEIVEDRDGRKIKRIKDWTKRNDHRHHAMDALAIAFTKPSYIQYLNNLNARSNKGDSIYAIENKELHYEEGKLRFNAPIPVNVFRAEAKRHLSAILVSIKAKNKVMTQNVNKIKTKHGIIKKIQLTPRGPLHNETIYGTKMRPIIKKVKVGAALDEATINKVSSPAIREVLLKRLNEYSGNAKKAFTGKNTLDKNPIYLNAERTKTVPASVKTVEWENYHPIRKPITPDLKVDKVIDKGIGEILKARLEEFNGDAKKAFSNLEENPIYLDQTKKIALKRVSIEGVLSTIPLHTLKNQAGKPIMGKDGKPVLGNYVQTSNNHHIAFYYDEDGNLQDNAVSFFEAAERKSQGISVIDKDYNRDKGWRFLFTMKQNEYFVFPNEATGFIPSEVDLTDEANYGIISPNLYRVQKMSRIEKGTSVSRDYWFRHHLETILNDDSRLKNSAFKRINSLKPLEGIIKVRINSIGKIVAVGEYD

SEQ ID NO: 396 - protein, 1391 aa, Prevotella oralis
  Prevotella oralis ATCC 33269
MKKILGLDLGTTSIGWALVNEKENNEELSSIIRLGVRVNPLTVDEKSNFEKGKDITTNADRTKCRSARRNLQRFKLRREALADCLKRHGLMTDETPLCETNNSIIFKTYSNRAKAVCEKIALDDFVRVLFMINKKRGYKSSRKLNTDDEGTLVDGMDVAKLLYNEQITPGEYLLRLFKKGKKTRPDFYLSDLKAELERIWDFQRTFYPEILCNALKEDLKGKSRTQSSAIFYAKYKVSTAKIAGKDKRLQELTWRTDALRKQLTIDEVAYVICSINGEVNGSSQRLSMISDRSKLLYFNHQTIGQYLMQRLEENPNAGLKNIIFYRQDYEDEFNDIWNSQATYHKELTPELKKEVKDIIFYQRGLKSCKWLINYCELEHEEIEVKTPEGKLRKITIGSKTCPKSSPLFQEFKIWQVLNNLQVSPLNSRRKAKRKKDEEPSLFSDEDMNTACRYLNEEEKLTLFKELSIKKELKKKDALKLLFENYKELDLNYKVISGNVTMANLYRAFQDIISLTGNGEFDFQAMPAEEAEKTVEEIFGGLGYKTAFLHFDASLHDKEFERQPAYRLWHLLYSYAGDQSKTGIEALVKRIQELCGFEPEYARILANISFIPDYGNLSSKAMRKILPYMQDGYEYSEACSKAGYRHSASSLTKEEINKKNYKTHLDEIKRNSLRNPIVEKILNQMVNVVNSVIDTYSNIDEIRIEMARELKKSKPEREDMSFAISKATKETERIKGILEQEFKIQHVTRNDIIRYRLYEELKPNGYKTLYSNTYIPREDLFSKKFDIEHIIPKARLFDDSYSNKTLELRDINIEKGNQTAYDFVLSKYGEEGLYKYEQRVEEFKKNNEQAGTKCRKLLMREADIPSDFLNRDLNDSQYIAKKAHELLREIVPTVTATTGSITNRLREDWKLVNVMKELNWEKYDKLGLTEEYKDKDGNTVRHIKDWTKRNDHRHHAMDALTIAFTKPSFIQYLNNLNARSNRGGSIYGIEQKELERENNKLVFIPPIDPKIFRKQAKEHLSNILISIKAKNKVVTKNVNKTKSKSGTNRKVQLTPRGQLHLETVYGKIRTYKTEEIKVGTKLTEELIAKVADKKIREALMQRLSEYGGNIKKAFQNISKHPIWLNGSHTKHVPEKVKIVFFEDVFTIRKAITPDIKIDKVIDSKIRRILQERLNEFGGEASKAFSNLDENPIWFNRDKGIAIKSVKIRGIAKGTAIRVKKDIHGKTIIGNNGYPVANDYVNTGNNHHVAIFRDKDGNLQEHIVSFYEATARAIQNLPIVDRNYNSEKDWKFLFSMKQNEYFVFPNPNTGFNPSEISLKDEKNYALISPNLFRVQKLSHYYYVFRHHLETNVDTNLQLKDITWKRITAVNNLTGAVKVRIDHLGRIVDVGEYK

SEQ ID NO: 397 - protein, 1204 aa, Prevotella ruminicola
MERILGIDTGTNSLGWAIVDKDENQYHLVAKGTNIFSEGVKIEKGIESSKAAERTEHRSVRKHYWRRKIRKIRLLTILSDNDLCPRLKHEQLRQWRLKKVYPTDDTFMEWQRTEDKAQVNPYKFRYICLTQKLDLSDITQRFILGRALYHLNQRRGFLSNRKEATKESEGTVKEGISSLSKDMKDSGCEYLGEYFYQLYQQGKKIRNHYTARKEHYLKEFKAICSKQELDDALIEKLEKAIFDQRPLKSQKGQVGTCTFEKGKSRCPSSHPLYEDFRMYSFINNIKVQVDTLYDKGERSLTDEEKQLIIPLFKRKSKRTFPFEDIAKKIAGKNNYCYIKSNEEKAYKFNYQMDTQVSGSPVNAQLEEIFGEDWLSSVCEVYTLANNKSRFQIMNDVWHVLFFYDDEDKLKEFAKDRLQLDDELAEKFSKISIPNDYAALSLKAIRKIMPYLRDYGLIYSEAVFLANLVDVLPQHVWGIKEMREAAIENVIDVMHSYDKNNIDGITLEGCVKTFLKERYQVSDDNLKKLYHPSMLDPYPRQRPNDEGVFQLGSPRISSVKNPMAMHSLFRLRKVVNLMLKKGYITPDTKVHIEFSRDLNDANKRWAIQTWQRENEKERERCRKEIEKYIASPSDTDILKYQLWEEQNHKCLYTGDEIRITDFLGDNPKYDIEHTIPRSAGGDSTKMNLTLCSSRFNRDEKKTKLPAELVNHDEILERISNWKEKYEDIDKQIRKISTKGATSKEDKDSKIRRRHYLILQRDYWRGKYQRFTMTEVPEGFSRRQGTDISVISRYARMYLKSVFKQVYIVKGIATSDFRKMWGIQDEYAKKERVNHVHHCIDAITIACIGKAEYDKLADYRHQYDDYLFQGKTKPTFDKPWPSFVIDIKHIQDELLIAHYAKDNLEKFTKKNLRGKDGRIIRDKFGNKLQMKGDTSRNSLHNDKFYGAINHEGEIKYVYRTNIEALDAKSIGNIVDPTVRSIIESAIAIHGSLKAAINKGIWMNEEKHIPIKKVRVFRNDVKKPIELKDQRDLSDKDYKQHYYVTNDGNYMMLIFSKLNNKGREIRQHVVINSLEATEVIKSHKRSQVGKVVWESYYSKEGFDLIYKLKSGTMILLYENNRDEVWDLDIRNLQKRLYIITKMKYDGRIYMMHHQEAREKKDLEEKSGSFKINEDYRPLIVNSYNQFNALVQDLDFEINDLGEIRRLI

SEQ ID NO: 398 - protein, 1424 aa, Prevotella sp.
  Prevotella sp. C561
MTQKVLGLDLGTNSIGSAVRNLDLSDDLQWQLEFFSSDIFRSSVNKESNGREYSLAAQRSAHRRSRGLNEVRRRRLWATLNLLIKHGFCPMSSESLMRWCTYDKRKGLFREYPIDDKDFNAWILLDFNGDGRPDYSSPYQLRRELVTRQFDFEQPIERYKLGRALYHIAQHRGFKSSKGETLSQQETNSKPSSTDEIPDVAGAMKASEEKLSKGLSTYMKEHNLLTVGAAFAQLEDEGVRVRNNNDYRAIRSQFQHEIETIFKFQQGLSVESELYERLISEKKNVGTIFYKRPLRSQRGNVGKCTLERSKPRCAIGHPLFEKFRAWTLINNIKVRMSVDTLDEQLPMKLRLDLYNECFLAFVRTEFKFEDIRKYLEKRLGIHFSYNDKTINYKDSTSVAGCPITARFRKMLGEEWESFRVEGQKERQAHSKNNISFHRVSYSIEDIWHFCYDAEEPEAVLAFAQETLRLERKKAEELVRIWSAMPQGYAMLSQKAIRNINKILMLGLKYSDAVILAKVPELVDVSDEELLSIAKDYYLVEAQVNYDKRINSIVNGLIAKYKSVSEEYRFADHNYEYLLDESDEKDIIRQIENSLGARRWSLMDANEQTDILQKVRDRYQDFFRSHERKFVESPKLGESFENYLTKKFPMVEREQWKKLYHPSQITIYRPVSVGKDRSVLRLGNPDIGAIKNPTVLRVLNTLRRRVNQLLDDGVISPDETRVVVETARELNDANRKWALDTYNRIRHDENEKIKKILEEFYPKRDGISTDDIDKARYVIDQREVDYFTGSKTYNKDIKKYKFWLEQGGQCMYTGRTINLSNLFDPNAFDIEHTIPESLSFDSSDMNLTLCDAHYNRFIKKNHIPTDMPNYDKAITIDGKEYPAITSQLQRWVERVERLNRNVEYWKGQARRAQNKDRKDQCMREMHLWKMELEYWKKKLERFTVTEVTDGFKNSQLVDTRVITRHAVLYLKSIFPHVDVQRGDVTAKFRKILGIQSVDEKKDRSLHSHHAIDATTLTIIPVSAKRDRMLELFAKIEEINKMLSFSGSEDRTGLIQELEGLKNKLQMEVKVCRIGHNVSEIGTFINDNIIVNHHIKNQALTPVRRRLRKKGYIVGGVDNPRWQTGDALRGEIHKASYYGAITQFAKDDEGKVLMKEGRPQVNPTIKFVIRRELKYKKSAADSGFASWDDLGKAIVDKELFALMKGQFPAETSFKDACEQGIYMIKKGKNGMPDIKLHHIRHVRCEAPQSGLKIKEQTYKSEKEYKRYFYAAVGDLYAMCCYTNGKIREFRIYSLYDVSCHRKSDIEDIPEFITDKKGNRLMLDYKLRTGDMILLYKDNPAELYDLDNVNLSRRLYKINRFESQSNLVLMTHHLSTSKERGRSLGKTVDYQNLPESIRSSVKSLNFLIMGENRDFVIKNGKIIFNHR

SEQ ID NO: 399 - protein, 1483 aa, Prevotella sp.
  Prevotella sp. MSX73
MKTILGLDLGTNSIGWAKVSVDDYGNYLHDIKLGSRIIPMSQDVLGNFDSGVTVSQTAQRTEFRSKRRLVQRNLQRRERLHRVLHVLDFLPAHYDAAIGWDRTEAVTYGKFLNHAEPKLAWEELGNGKRRFLFMDSFHEMVADFARCQPALVADGKKIPLDWTIYYLRKKALTQAITKEELAWILLNFNQKRGYYQLRGEEEEENPTKQEEYYELKVVSVEATDSRKGNDTWYNVHLENGWIYRRSSKISLDDWVGKVKQFIVTTEYEKDGTTLKTDKEGNVKRSFRAPNENDWGLRKKRTETLLEMSGKTVGAFIYDHLLQEPADKIRGNFIRTIERHYYKAELEAILAEQCKYHIELRDKEMLEACARELYLNNLPHQRSLMKKDMTYLLLYDLIFYQRPLKSKKALIANCPYEYYEYVDKETGEIKRQNIKCIAKSNPYFQEFRLWQFVLNLRLFDRVEDKEVTANYLPTADDHARLFTYLNDRKEINQETLLKDYFKLKKVKIGNEKEYPIRWNYIEDKEKKYPCNETRYELLMALDRAGIEHKWLDDNNLEYRLWHLLYSVEVKSESETALRKLKNDDAFVNSFLKVKPFKKEYGAYSEKAIKRLLAVMRKGFLWNEQDICDETRKRIEIIIKGDVDEKVKERMGHAAYSFDRVSDFQGLPEWLACYVVYGRHSEAMDIQRWDSPERLMAYINNFKQYSLRNPIVEQCILETLRTVHDIWKETGQIDEIHVELGREMKSTSEERARRTQNVLRNENTNLRIKSLLIELKNDTDICNVHPYSPMQQEILRIYEEGALQELNREDEDFEEISKISQMSQPSGKELNRYKLWLEQKYRSPYTGKAISLAKLFTPAYQIEHVIPQSRYFDDSFTNKVICEAEVNTLKSNLLGYEFIKKHGGEIIHCTTLGDVRIFSESEYKAFVMDHYANNKSKKDKLLMEDIPQEFLSRQMNDSRYISKVVKTLLSNIVRMADESEATSKSVIVCTGGVTDRLKKDWGLNDVWNSIVYSRFERLNRLTGTEAFGHWENKDGKRVFQTSMPLELQRGFRKKRIDHRHHAMDALVIACASRNIVNYLNNESANNPKKREDLRRQLCDKNRVIRKPWETFTQDAYNALENVVVSFKNYVRVINKATNRYEHYDENGKKRFVQQKGSELWAIRKPMHKETYYGHVNLRRKELVTLQKALDDIPSICDKKLRDYISALVEKHFNKRQLLAHFKSTDYYWQKQYVNKVYVWTFSDDIKPLVATRKLLDTSFDAKRIGTITDTGIQKILRNYLEAKGGNATLAFTPEGIVEMNQNISKYNDGKPHQPILKVRITEPMGAKYRVGQTENKMAKYVEAQSGTNLYFAIYEDSEGKRSYTTVPLDEVAERLKQRLSPVPEKDENDVPLKFYLSPNDLVYVPTEEELQLRECKLNKDRIYKMVSSTGSECHFIPYYVANVIYNKVEFEAKNKIGRALTGEMIKAVCWKLEIDRLGNILKVIK

SEQ ID NO: 400 - protein, 1375 aa, Prevotella sp.
  Prevotella sp. oral taxon 306 str. F0472
MKKILGLDLGTTSIGWALVNESENKDEQSSIVRLGVRVIPLTVDEKGNFEKGKAITTNADRQQVHAARINLQRYKLRRENLRDCLQKQGWIGSEPMCEDGKSSTFETYKLRAKAAVEEVSLHEFARVLFMLNKKRGYKSNRKANDKEEGKLFDGMTIAKKLYEEHLTPAEYSLQLLNTGRKFTPEYYRSDLIEEFEKIWNEQQKYYPEILTDEFKQQLEGKAKSNTSKLFLGKYGIYSADTKGLDRRLQPLKWRVEAMKQQVDKDVLAFVISDLKGQIANTSGLLGAISDRSKELYFSKQTIGQYLWASLQENPHISIKNQPFYRQDYLDEFEKIWETQATYHKELTSELKQEIRDIIIFYQRPLKSKKNLIAVCELEQRKVKVTVDGKEKEITIGPKIAPKSSPMFQEFRIWQNLNNILLLDHETNSKRPLYEEERNLLYEELSVKEKLSKTEALKVLGKKSKQWDLNYKELEGNRTQAVLYDCYNRIIVMSGHEECNFKKLKASDIRHYVKMIFKNLAFNTDILCFDSSLKGHELERQPMCQLWHLLYSYEGDNSRTGNDALLRKLETSFGFPKEYAAVLADVIFEDSYGNLSVKAMRNILPHLQAGKDYSQACEEAGYKHSRRSLTKEELNQKVYKEKLELLPKNSLHNPVVEKILNQMVNVINAVIEEYGKPDEIRIELARDLKIGAAERENMTRSINQGNAENKRIREILEKEFALSYLSRNDIIKYKLYEELKSNGFKTLYSDTYISKDKLFSKDFDIEHIIPKARLFDDSLSNKTIEARDVNIAKSNKTAFDFILERYGEQGVKTYKTKLLRLLEDGAISNKKYNNLLKTEADIPSGFIDRDLRNTQYIAKKAYEILSELVKIVTPTTGSVTNRLREDWQLVDVMKELNFEKYQKLGLADVIEDRDGRKVKRIKDWTKRNDHRHHAMDALTIAFTKPSYIQYLNNLNARSDKSSSIYGIEVKELHREEGKFRFNAPLPINEFRAEAKRHLKSVLVSIKAKKKVMTQNVNKIKTKHGIIKKVQLTPRGELHNATYYGTKKRPLVRMVKVGAALDEATIKRVCSPAIRAALLKRLNAYNGDAKEAFTGRNSIDKNPIYLDIEQTKLVPVLVKTIEWGMYHPIRKRITPDLKIDKVIDKGIREKLKARLAEFNGDAQKAFSNLDENPIYMDEAKRITLKRVSIEGVLSAIPLHTLKDKAGKPVIGSDGKPVFGDYVQTSNNHHIAFYIDDKGNLQDNPVSFFEAAERKSQGVPVIDRRYNCDKGWHFVFTMKQNEYFVFPNEATGFIPSEVDLLDEANYCIISPNLYRVQKLSKASGRDYWFRHHLETMLNDDLRLKNSTFKRIQSLKGLEDIVKVRINSIGKIVAVGKYD

SEQ ID NO: 401 - protein, 1216 aa, Prevotella stercorea
  Prevotella stercorea DSM 18206
MTKILGIDTGTNSLGWAIVDKTADNYNLLDKGVNIFQEGVKIEKGIESSKAAERTEHRATRVRYYRIKLRKIRLLRILSDNHLCPPLSQEELSTWRLKKVYPKNELFMQWQRTDDDTEKTPYAYRHKCIHEKLDLSDVTDRYILGRAFYHIIQRRGFLSNRKEQGGEDSGKVKEGISTLTHEMNEAGYEYLGDYFYALYNKGEKIRKHYTARNEHFLSEFKAICEKQDLEKELGSEVVRNIEKAIFDQRPLKSQKGQVGKCVFEKNKTKCPSSHPMYEEFRMLTFINNIKIKTPNDDVLRPLNTGEREKIMPLFFRKSKKQFDFEDITKKLAPKKMYGFYKKEEDAEMPFLFNYPMDTSVSGCPVTAALKDVFGDDWITAICETYTLGEGKSRFDIVNDIWHALYFYSDKDKLAEFAINRLQLSEDEAKIFSEISLPADYASLSLKAICKILPYLRRGLIYSHAVFLGNLCEVMPKYEWSIKEMRETIIDNIIMEMDKCDTKDKRTFEVCIKDYLKGQYNVSDNSLKKLYHPSMIETYPRVQYTNEHGVYQLGSPRIDSVRNPMAMRSMFRLRKLVNRLLVEGKIDQNTEVHIEFARELNDANKRNAIALFVKENQSANDEARKQIITLFKKETGTDIEPTDKDILKYVLWEEQNHICLYTGKQIRISDFIGANPKFDIEHTIPRSVGGDSTKMNLTLCDSRFNREVKKTKLPVELPNHDEIMERIKEWKKNYELLDIQIRKNKKLSKGATTKEQKDTIIRKRHLLELRRDYWRGKYERFTMESVPEGFSRRQGTDISVISKYARLYLKSLFNRVYTVKGIATSDFRKIWGIQDIYSKKERINHVHHCIDAIVIACIGLDEYNKLGAYYHDEENNKWYGMSKASFKKPWATFVEDIKKIQDEILVYHYTPDNMPKQGRRRIKIDGKKILCKGDAARGSLHNDTYYGAIENDGAVKYVKRIDLASLEEKDVKNIVDDTVRSIIEAAIKEKGFKDAMASTIWMNEEKRVPIKKVRCFTPSITKPLNIRKQRDVSIKEYKQQYHVANDSNYLLALYIGTDNKGKEKREFEIVNILQAAQYYRTSNDKEVVDRHIVPIKSEHDYPFAYTLKIGTMVLLYEKSPNEVWDATIKERNRRLYKVTGLSTMRMKGRNGEYAYATVKLIHNEEARPSKDIKAKNGEYEQGEEFRPAIIMLHTQLNALVQGYDFEINELGEIRRLR

SEQ ID NO: 402 - protein, 1234 aa, Prevotella tannerae
  Prevotella tannerae ATCC 51259
MPNFWSIFTENLQTYLMKTRILGLDTGTNSLGWAVVDRDENNQYTPICRGDLIFTEGVKQEKGIEFSLAAERTSYRASRRHYFRRRLRKVEVLKVLVKHKLCPPLSDEALNRWHTKKEYPLDEDFILWQRTNEADNKNPYHDRHICLHRKLNLKDSQTDRYTLGRALYHLTQRRGFLSNRLDQNEEAEETGKVKSAISELSKEMKEAGCEFLGDYFYLLYRTEGNRVRIRSRYTDREKHYLQEFKEICRVQELDEDLAKALEKTIFFQRPLKSQRQGVGKCTMEKGHSRCAVSHPLYEEYRLLCYLNNIRIKTPSDDRLRPLNAEEREKITPLFYKEKNFDFEKIAKKLAGKTPFGWIRDAEDWPYQFNYRMTQEAPACPTTAQLIKVFGEDWKAALAETYTMSAKQDGTLKTEDEICTDIWNVLYSFSSKEKLKEFGLKKLQLDEVQAKAFSEIRLTRDFASLSLKAIRKILFFLRTGEDYSKAIFLANIPTIVGEEIWNDIERRSRLLYKVDLALRPQEERDAEEHRTIAERIKAAVAAEVPDAPIDLLYHPSMIEAYPDAKRNERFDCYQLGSPKTNAVRNPMAMRSLHMVRKVINHLLRKHIIDEKTEIHIEYARELNDANKRQAIADWQRELSKRHTAYAQNIRQLYKAETGLVIEPTKADILKYQLWEEQQHVCLYTGKKIGIADFLGANPKFDIEHTIPRSRGGDSTQENLTLCESKFNRDIKRDKLPTELANYEEILARIEHWKKQCYALKLKRDGIRTHSGLEKSIKDSRIRRRHLVGLEYGYLKGKYDRFTMKEVPEGFSRRQGAGIGLISKYAGLFLKSLFKDPKNPNRSNVYVVKGAITAEFRKLWGLQQADEAKSRENHTHHCIDAYTIACIGPCEYAALAAYYRSDEEFKYGRRREKPQFEKPWPTFTEDLLKLQEELLIVHQTTDKLGKRDRRKVKTPRGKFLTGGDSARGRLHQETYYGAINYDGNIKYVVRKPLDSLTEKDLDKIVDETVMGIVKGAVEAKGSLKEALADGIYMNKEKGILIKRVRIFSDVSEPINLKQLRDVSTKEYKRHIHLRKDENYLFAIYEGIDKKKNKKQTETATVDYLDAAKFYKDSKRRDKANSLVGDYSKKNKLPLKCILKKRQMVLFYEHSPEEIRFKDKKDLSRRLYIVTSIAKDGRVKFLHHQAATATGIQSSPSPFTNDGEHQPYYRLSASNIKVLVAGIDFDINILGEITPKL

SEQ ID NO: 403 - protein, 1487 aa, Prevotella timonensis
  Prevotella timonensis CRIS 5C-B1
MKNILGLDLGSNSVGWALVKVEENGNPIGSIKMGSRIIPMSQDILGSFEKGDTVSQTAQRTLYRGKRRLIERHVLRRERLCRVLHIMNFLPAHFDRLLGWDKTDNKTYGKFIDDSEPKLAWRQNKNEMGKMEFVFMDSFHEMLSDFAKHQPQLIANGKKVPLDWTIYYLRKKALTQLISKEELAWILLNFNKKRGYYQLRGEEEEEQPTKKEEYKVLKVISVDADEGQKGNGIWYNIHLEDGGIYKKKSDIPLYDWVGKTLQLIVVTTYEKDGKTPKIFDSGKQNPSYRLPKEDDWGLVKKRTESQLQSSGKTVGAFIYDNILSKPDDKIRGNLVRTIERKYYKKELIEILQQQAKYHDELHNQNLLESCAKELYAHNDVHYNEVIKSNMINLLVNDIIFYQRPLKSKKSLIANCKYESYEYVDKETGEIKEMPIKCIAKSNPYYQEFRLWQFIHNLRLSDVVTREDVTAQYLSTPQDYCNLFTYLNDRKEIKQDILLKDFFKIKKVQIDKEKVFPIEWNYIKDATKSYPCNETRYELLSALKRAGMDKQWLDDTPNMQYRLWHLLYSVEEKEESAKALRKLYDDDKFVTSFLKIKPFNKCYGAYSEKAIKRLLTLMRMGKAWNEQAIDAKTLKCIQQIITDNVDSKLKEKIDDSRYVLHHVSDFQGLPTYLASYVIYGRHSEVTDIQCWDSPEDLLKFIRDFKQHSLRNPIVEQVILETLRVVYDIWKAEKHIDEIHVEVAREMKLTAQQRNEANLRNLNNEATNLRIKYLLEELKNDTFIKDVRPLSPIHQEKMRIYEQAVLGNLNKQDKDYDDIIKISKKEHPTNAELIRYKLWLEQRYCSPYTGKAISLSKLFTTAYEIEHIIPQSRYFDNSFNNKVICEAEVNKAKGNMLGYEFIKKQGGQKIYCTQLGKAVTILKEEAYKQFVNEHYAHNKRKRDNLLAENIPESFSSRQLNDTRYITKTIMSLLSNVVRQQSEEEATAKNLLPSSGSVTDRLKNDWGLKDVWNTIVTPRFERLNKLSGTNDFGEMKEENGNRYFQTNVPLEYEKGFKKKRIDHRHHAMDALVIACTTRNMVNYISNANANSPKQREDLRQLLCDKNRIINKPWDTFTQDALKALNDIVVSFKNNVRIINRATNRYQRYDKNGKKIIFSQKGDDMWAIRKSMHKETVFGRVNLIRKEVLPIAKALDNISAICNAQLRAYVNDLVDKHFNKKQLVAHFKSLNYKWNRQDVSKVEVWISSDNKTPMVAVRKPLDTSFDKKKIASITDTGIQTILLNYLESKGGDASVAFAPEGIQEMNSNIELYNNGKAHKPIKNVRLSEPLGAKYQVGERGAKTKKYVEADKGTNLFFAIYEDEEGKRYYYSVPLREAIERQKQKLSPVPEYNEKGVALKFYLSPNDLVYVPTEEERTMGTCHIDKARIYKMVSSTGCSCYFVPSTFAKVIVDKVELQSLNKMEKAITDECIKEVCWKLKVDRLGNIINVIK

SEQ ID NO: 404 - protein, 1218 aa, Prevotella timonensis
  Prevotella timonensis CRIS 5C-B1
MNKRILGLDTGTNSLGWAVVDWDEHAQSYELIKYGDVIFQEGVKIEKGIESSKAAERSGYKAIRKQYFRRRLRKIQVLKVLVKYHLCPYLSDDDLRQWHLQKQYPKSDELMLWQRTSDEEGKNPYYDRHRCLHEKLDLTVEADRYTLGRALYHLTQRRGFLSNRLDTSADNKEDGVVKSGISQLSTEMEEAGCEYLGDYFYKLYDAQGNKVRIRQRYTDRNKHYQHEFDAICEKQELSSELIEDLQRAIFFQLPLKSQRHGVGRCTFERGKPRCADSHPDYEEFRMLCFVNNIQVKGPHDLELRPLTYEEREKIEPLFFRKSKPNFDFEDIAKALAGKKNYAWIHDKEERAYKFNYRMTQGVPGCPTIAQLKSIFGDDWKTGIAETYTLIQKKNGSKSLQEMVDDVWNVLYSFSSVEKLKEFAHHKLQLDEESAEKFAKIKLSHSFAALSLKAIRKFLPFLRKGMYYTHASFFANIPTIVGKEIWNKEQNRKYIMENVGELVFNYQPKHREVQGTIEMLIKDFLANNFELPAGATDKLYHPSMIETYPNAQRNEFGILQLGSPRTNAIRNPMAMRSLHILRRVVNQLLKESIIDENTEVHVEYARELNDANKRRAIADRQKEQDKQHKKYGDEIRKLYKEETGKDIEPTQTDVLKFQLWEEQNHHCLYTGEQIGITDFIGSNPKFDIEHTIPQSVGGDSTQMNLTLCDNRFNREVKKAKLPTELANHEEILTRIEPWKNKYEQLVKERDKQRTFAGMDKAVKDIRIQKRHKLQMEIDYWRGKYERFTMTEVPEGFSRRQGTGIGLISRYAGLYLKSLFHQADSRNKSNVYVVKGVATAEFRKMWGLQSEYEKKCRDNHSHHCMDAITIACIGKREYDLMAEYYRMEETFKQGRGSKPKFSKPWATFTEDVLNIYKNLLVVHDTPNNMPKHTKKYVQTSIGKVLAQGDTARGSLHLDTYYGAIERDGEIRYVVRRPLSSFTKPEELENIVDETVKRTIKEAIADKNFKQAIAEPIYMNEEKGILIKKVRCFAKSVKQPINIRQHRDLSKKEYKQQYHVMNENNYLLAIYEGLVKNKVVREFEIVSYIEAAKYYKRSQDRNIFSSIVPTHSTKYGLPLKTKLLMGQLVLMFEENPDEIQVDNTKDLVKRLYKVVGIEKDGRIKFKYHQEARKEGLPIFSTPYKNNDDYAPIFRQSINNINILVDGIDFTIDILGKVTLKE

SEQ ID NO: 405 - protein, 1496 aa, Prevotella veroralis
  Prevotella veroralis F0319
MKTILGLDLGTNSIGWAKVCVDDNGNYLRDIKLGSRIIPMSQDVLGNFDKGVTESQTSVRTGFRGVRRIRERSLLRRERLHRVLHVLGYLPPHYDSAIGWNKNEPSTYGKFLNHGEPKLAWEHKEDGSMRFLFMESFHEMMADFAKSQPSLVSDGKKIPLDWTIYYLRKKALSQPIRKEELAWLLLNFNQKRGYYQLRGEEDDDNPTKCEEYYELKVVGIEADEEGKNGNTWYNVKLENGWIYRRQSKIPLDDWIGKVREFIVTTEYEKDGITLKKDKNGDVKRSFRSPSEDDWGLRKKRTEKLLDSSKMTVGAFVYDHLLAEPSDKIRGKFIRTIERKYYKKELYAILCEQSKYHEELRSGDYLNKCAEELYKNNQPHRNSLLTKDLAYLLLEDLIFYQRPLKTKKSLIAECPYEAYKYVDKETGEIKRQGIKCIAKSNPYYQEFRLWQFISNLRLFNKADDKEVTADYLPTQDDYVRLFAYLNDRKEINQETLLKEFFKLKKITVNSEKVFPIRWNYIEDKEKKYPCNETRHELLLALDRARIDHSWLEKPGQEYRLWHLLYSVESKEETKEALRKLKDDDAFVESFLKVKPFKREYGAYSEKAIKKLLAVMRMGSLWRETDICDTTKGNITKILQGEIDEKLKEKISASVSSYNQLSDFQGLPVWLACYVVYGRHSEAAEIQHWKTPESLLAYINGFKQHSLRNPIVEQCILETLRTVHDIWKEVGHIDEIHVELGRNMKSTADQRARISENVLRNENTNLRIKSLLLELKNDPNIKDVRPYSPMQQEKLRIYEEGVLQELTKDDKDFTEITKISTMAQPSAKELQRYKLWLEQKYRSPYTGKSISLTKLFTSAYQIEHVIPQSRYFDDSFSNKVICESEVNSLKDNMLGYEFIKNHGGEIIHCTMLGDVKVLSESEYKAFVNDHYAHNKRKRENLLLEDIPQEFLNRQMNDSRYISKVVKALLSNIVRAEGEEEATSKFVVSCSGGITDRLKKDWGLNDVWNKIVYPRFERLNRLTGTEAFGQWENKDGKRVFQTAVPLELQRGFNKKRIDHRHHAMDALVIACTSRNIINYLNNESANNPKKREDLRQKLCDKNRTIRKPWETFTQDATAALEDVIVSFKNYVRIINKATNYYERYDVEGKKVIAEQRGDDMWAIRKPMHEATYYGRVNLRRKKKVNLRVALENISSICDNKLRIYINGLVEKGFNTKQILDKFKNTNDHFSMQKIDKVEIWQFTNEEEKLVATRKPLDTSFDTKKIASITDTGIQTILLNYLETKGGDSTIAFTPEGIVEMNQNISKYNNGKEHMPILKVRLYTKLGKKIPVGQTGCKAKQFVIAEAGTNLYFAIYEDEEGKRSYRTIPLNEVVERLKQGLSPVPEKNDKDVHLKFYLSPNDLVYVPIEDEHESLAKDHIYKFVDSSGTTANFIPHRSANVIFELNKKDAEKFCSGSIIQNEYGVGSSQSKNQKAITGEMIKAVCRKLEVDRLGNVIKVI

SEQ ID NO: 406 - protein, 1062 aa, Ralstonia syzygii
  Ralstonia syzygii R24
MAEKQHRWGLDIGTNSIGWAVIALIEGRPAGLVATGSRIFSDGRNPKDGSSLAVERRGPRQMRRRRDRYLRRRDRFMQALINVGLMPGDAAARKALVTENPYVLRQRGLDQALTLPEFGRALFHLNQRRGFQSNRKTDRATAKESGKVKNAIAAFRAGMGNARTVGEALARRLEDGRPVRARMVGQGKDEHYELYIAREWIAQEFDALWASQQRFHAEVLADAARDRLRAILLFQRKLLPVPVGKCFLEPNQPRVAAALPSAQRFRLMQELNHLRVMTLADKRERPLSFQERNDLLAQLVARPKCGFDMLRKIVFGANKEAYRFTIESERRKELKGCDTAAKLAKVNALGTRWQALSLDEQDRLVCLLLDGENDAVLADALREHYGLTDAQIDTLLGLSFEDGHMRLGRSALLRVLDALESGRDEQGLPLSYDKAVVAAGYPAHTADLENGERDALPYYGELLWRYTQDAPTAKNDAERKFGKIANPTVHIGLNQLRKLVNALIQRYGKPAQIVVELARNLKAGLEEKERIKKQQTANLERNERIRQKLQDAGVPDNRENRLRMRLFEELGQGNGLGTPCIYSGRQISLQRLFSNDVQVDHILPFSKTLDDSFANKVLAQHDANRYKGNRGPFEAFGANRDGYAWDDIRARAAVLPRNKRNRFAETAMQDWLHNETDFLARQLTDTAYLSRVARQYLTAICSKDDVYVSPGRLTAMLRAKWGLNRVLDGVMEEQGRPAVKNRDDHRHHAIDAVVIGATDRAMLQQVATLAARAREQDAERLIGDMPTPWPNFLEDVRAAVARCVVSHKPDHGPEGGLHNDTAYGIVAGPFEDGRYRVRHRVSLFDLKPGDLSNVRCDAPLQAELEPIFEQDDARAREVALTALAERYRQRKVWLEELMSVLPIRPRGEDGKTLPDSAPYKAYKGDSNYCYELFINERGRWDGELISTFRANQAAYRRFRNDPARFRRYTAGGRPLLMRLCINDYIAVGTAAERTIFRVVKMSENKITLAEHFEGGTLKQRDADKDDPFKYLTKSPGALRDLGARRIFVDLIGRVLDPGIKGD

SEQ ID NO: 407 - protein, 1066 aa, Rhodopseudomonas palustris
MSERVVRRILGIDLGIASCGWGVVDISGAGGGIIATGVRCFDAPLIDKTGEPKSATRRTARGQRRIVRRRRQRMNGVRRLLCEFGLLPDPRPDALNQAMRRISTASAAAQVTPWTLRAAAHQRLLSNEELAVVLGHIARHRGFRSNAKNEAGANAADETSKMKKAMEATREGLAKYHAFGDMIANDPKFANRKRNRDKDYSHTAKRSDLEDEVRAILRAQLRFGSAAATETLAQTFADVAFFQRPLQDSEDRVGDCPFEPGQKRAARRAPSFELFRFLSRLANLKLAVGRSPERRLTAEEIALAAKGFGETKKTITFKSLREALDLDPNARFSGIGKDKEASLDVVARTGGAAYGTKTLKDALGDAPWRSLSRTPETLDRIAEILSFREDITSIRNGLEDLGLDSLVVEALMQAAANGDFKEFTRAGHISARAARNIIPGLREGLVYSEACARVGYDHAARLSVPLDQVGSPVTRKALSEALKQVRAVAREYGPIDYFHIELARSVGKSAEERKQLTDGIEARNVEKAKRRKQAEEHLGRAPSDDELLRYELAKEQNFKCIYSGDAIDPAGVAANDTRYQVDHILPWSRFGDDSYLNKTLCTARSNQNKRGRTPFEWFEADKTDVEWMEYVARVENLQEVKGRKKRNYSIKDAAAIEDKFKARNLTDTQWATRLLADELSRMFPPRECERAICGRADGGNDGLTIVEERRVFTRPGAITSKLRRAWGLEGLKKQDGKRVEDDRHHAVDALVLAATTESLLQRLTVEVQRREREGRPDDIFHCAEPWRGFRADVRRTVYGSETMPGIFVSRAERRRARGKAHDATIKQIREIEGERLVFERKPVEKLTDKDLEKIPIPKPYGQVSDPKRLRDELVESLRAWIAAGKPKDRPPLSPKGDVIRKVRIQTNDKVSVEINGGTVDRGDMARVDVFRKKNKKAVWEYYVVPIYPHQIVALNDPPDRAVIAYAEDKDWKEIDSSYEFLWSLFGLSYVEISKANGECIDGYFRGLHRGTGAASVCKHISLGKDATVSGIGLKTLASFKKFTIDRLGRKFEIPREVRTWRGEACT

SEQ ID NO: 408 - protein, 1064 aa, Rhodopseudomonas palustris
MSECVTRRILGIDLGIASCGWGVIEVGEASGSIIASGVRCFDAPLIDKTGEPKSATRRTARGQRRIIRRRRQRMNAVRRLLAEFGVLTGRSPDALHQALLRLSQSVAGSQVTPWTLRAAAHERKLTNDELAVVLGHIARHRGFRSNSKNDGGANAADETSKMKKAMETTREGLARYHSFGAMIASDPKFADRKRNRDKDYSHTAKRSDLEDEVRTIFRSQTRFGSLVASEKLSQAFADAAFFQRPLQDSEDMVGSCPFEPGQKRTARRAPSFELFRFLSRLANLKLTVGRAPERRLTPDEIALAAKGFGETKKSITFKSLREALDLDPNARFSGVAKEKESTLDVAARTGGAAYGTKTLKDALGDAPWRSLSRMPEKLDRIAEILSFREDMKAIRNGLEEVGLDGLVVDALMQATANGDFKDFTRAAHISALAARNIIPGLREGLVYSDACTRVGYDHAARPAVPLSQIGSPVTRKALSEALKQVRAVAREYGPIDYFHIELARSIGKSAEERKKLTDGIEARNVEKEKRRKEAAEHLGRAPSDDELLRYELAKEQNFKCIYSGDPIDPAGISANDTRYQVDHILPWSRFGDDSYVNKTLCTARSNQNKRGRTPFEWFDADKTEAEWMEYSARVEDLKEVKGRKKRNYSIKDAASVEDKFKARNLTDTQWATRLLADELKRMFPPRECERVVTVRADGGNDGLSIVEERRVFTRPGAITSKLRRAWGLEGLKKQDGKRVEDDRHHAVDALVLAATTESLLNRLTVEVQQREREGRQDDIFHCSQPWPGFRVDVQRTVYGSETMPGIFVSRAERRRARGKAHDATVKQIRDIDGERIVFERKPIEKLTDKDLERIPVPEPYGKAADPKKLRDELVENLRAWIAAGKPKDKPPRSPKGDIIRKVRIETKDKVAVEINGGTVDRGDMARVDVFRKKNKKGVWEFYVIPIYPHQIVASALPPNRAVIAYKAESEWTAIDGCFEFAWSLNPMSYLELVKSNGELIEGYFRSMDRTTGAINLSPMSTNSETIRSIGVKTLSSFRKFTVDRLGRKFEIPREVRTWRGEACT

SEQ ID NO: 409 - protein, 1173 aa, Rhodospirillum rubrum
  Rhodospirillum rubrum ATCC 11170
MRPIEPWILGLDIGTDSLGWAVFSCEEKGPPTAKELLGGGVRLFDSGRDAKDHTSRQAERGAFRRARRQTRTWPWRRDRLIALFQAAGLTPPAAETRQIALALRREAVSRPLAPDALWAALLHLAHHRGFRSNRIDKRERAAAKALAKAKPAKATAKATAPAKEADDEAGFWEGAEAALRQRMAASGAPTVGALLADDLDRGQPVRMRYNQSDRDGVVAPTRALIAEELAEIVARQSSAYPGLDWPAVTRLVLDQRPLRSKGAGPCAFLPGEDRALRALPTVQDFIIRQTLANLRLPSTSADEPRPLTDEEHAKALALLSTARFVEWPALRRALGLKRGVKFTAETERNGAKQAARGTAGNLTEAILAPLIPGWSGWDLDRKDRVFSDLWAARQDRSALLALIGDPRGPTRVTEDETAEAVADAIQIVLPTGRASLSAKAARAIAQAMAPGIGYDEAVTLALGLHHSHRPRQERLARLPYYAAALPDVGLDGDPVGPPPAEDDGAAAEAYYGRIGNISVHIALNETRKIVNALLHRHGPILRLVMVETTRELKAGADERKRMIAEQAERERENAEIDVELRKSDRWMANARERRQRVRLARRQNNLCPYTSTPIGHADLLGDAYDIDHVIPLARGGRDSLDNMVLCQSDANKTKGDKTPWEAFHDKPGWIAQRDDFLARLDPQTAKALAWRFADDAGERVARKSAEDEDQGFLPRQLTDTGYIARVALRYLSLVTNEPNAVVATNGRLTGLLRLAWDITPGPAPRDLLPTPRDALRDDTAARRFLDGLTPPPLAKAVEGAVQARLAALGRSRVADAGLADALGLTLASLGGGGKNRADHRHHFIDAAMIAVTTRGLINQINQASGAGRILDLRKWPRTNFEPPYPTFRAEVMKQWDHIHPSIRPAHRDGGSLHAATVFGVRNRPDARVLVQRKPVEKLFLDANAKPLPADKIAEIIDGFASPRMAKRFKALLARYQAAHPEVPPALAALAVARDPAFGPRGMTANTVIAGRSDGDGEDAGLITPFRANPKAAVRTMGNAVYEVWEIQVKGRPRWTHRVLTRFDRTQPAPPPPPENARLVMRLRRGDLVYWPLESGDRLFLVKKMAVDGRLALWPARLATGKATALYAQLSCPNINLNGDQGYCVQSAEGIRKEKIRTTSCTALGRLRLSKKAT

SEQ ID NO: 410 - protein, 1059 aa, Rhodovulum sp.
  Rhodovulum sp. PH10
MGIRFAFDLGTNSIGWAVWRTGPGVFGEDTAASLDGSGVLIFKDGRNPKDGQSLATMRRVPRQSRKRRDRFVLRRRDLLAALRKAGLFPVDVEEGRRLAATDPYHLRAKALDESLTPHEMGRVIFHLNQRRGFRSNRKADRQDREKGKIAEGSKRLAETLAATNCRTLGEFLWSRHRGTPRTRSPTRIRMEGEGAKALYAFYPTREMVRAEFERLWTAQSRFAPDLLTPERHEEIAGILFRQRDLAPPKIGCCTFEPSERRLPRALPSVEARGIYERLAHLRITTGPVSDRGLTRPERDVLASALLAGKSLTFKAVRKTLKILPHALVNFEEAGEKGLDGALTAKLLSKPDHYGAAWHGLSFAEKDTFVGKLLDEADEERLIRRLVTENRLSEDAARRCASIPLADGYGRLGRTANTEILAALVEETDETGTVVTYAEAVRRAGERTGRNWHHSDERDGVILDRLPYYGEILQRHVVPGSGEPEEKNEAARWGRLANPTVHIGLNQLRKVVNRLIAAHGRPDQIVVELARELKLNREQKERLDRENRKNREENERRTAILAEHGQRDTAENKIRLRLFEEQARANAGIALCPYTGRAIGIAELFTSEVEIDHILPVSLTLDDSLANRVLCRREANREKRRQTPFQAFGATPAWNDIVARAAKLPPNKRWRFDPAALERFEREGGFLGRQLNETKYLSRLAKIYLGKICDPDRVYVTPGTLTGLLRARWGLNSILSDSNFKNRSDHRHHAVDAVVIGVLTRGMIQRIAHDAARAEDQDLDRVFRDVPVPFEDFRDHVRERVSTITVAVKPEHGKGGALHEDTSYGLVPDTDPNAALGNLVVRKPIRSLTAGEVDRVRDRALRARLGALAAPFRDESGRVRDAKGLAQALEAFGAENGIRRVRILKPDASVVTIADRRTGVPYRAVAPGENHHVDIVQMRDGSWRGFAASVFEVNRPGWRPEWEVKKLGGKLVMRLHKGDMVELSDKDGQRRVKVVQQIEISANRVRLSPHNDGGKLQDRHADADDPFRWDLATIPLLKDRGCVAVRVDPIGVVTLRRSNV

SEQ ID NO: 411 - protein, 1405 aa, Riemerella anatipestifer
MKTILGLDLGTNSIGWALVKEAENSNEKSEIIKLGVRVNPLTVDEKTNFEAGRPLSTNADRTAKRSARRNLQRYKLRRKNLIDLLIKNQLIDKDTPLTEIGKNTTHQTLELRAKAARERIELEDLARVFLAINKKRGYRSSRKVNNEEEGQAVDGMAVAKKLYDENLTPGQYAYELLSKGKKYVPDFYRSDLQAEFNAIWEYQKQFYADILDDELYNALKGQGQQNSRKRFLAIKGVYTAENKGKRDDVKLRHYKWRSEAISKKINIEEVAYVLVEINNDLNKSSGYLGAISDRSKELYFNKETVGENLWKQIQKNPHTSLKNQVFYRQDYLDEFEQIWETQAQFHPQLTLALKEQIRDVIIFYQRKLKSQKGLLSFCQFESWEIERKDENGNVILNKTTQLPKRQTVGRRVAPKSSPLFQEFKIWQNINNLEVTKISEGASKNKKETETLSDDERKLLFEELNLRGNLSQKEVLQILGLKDKEYKTNFSEGLEGNRTNAALFNIYQQIAENEGYGFDWSKKSAQEIKEELKAVFPQIGIQADILDFNANLDGKEFENQASYQLWHLLYSAEEDDKINEEDQIIYGNSAVSLKKKLCEKFGFTPEYAKWIANVSLQDDYGNLSTKAMRKIIPYLIDGNDYSEACALAGYNHSNSLTKEENDNRELLDKLELLPKNSLRNPVVEKILNQMVNVVNQVIETYGKPDEVRIELARELKKSAEKRAEMTKSINEATRRNEDIKKLITKDFGIPNPTKSDVVRYRLWEELAPLAYKDVFTGKQIKKEDLFSSKIDIEHIIPKALLFDDSFSNKTLVFRETNLKKADRTAYDFIESDYNATLDDYIQRVETLYNNTKGTISKGKRNKLLMAQKNLPDGFIERDLRNSQYIAKKAKAMLYQVFKDVNVTSGSITDRLREDWDLINVMKELNFPKYKALGLTEIEERYDIGQEKTKRVEVITDWTKRNDHRHHAMNALTVAFTTSSHIQYLNYLNARKNESHKEHKNIKGIENKITHKQKDKRKFIPPMPNFREEAKKHIETILVSIKNKNKVYTKNINKTKKKSGHNTKEQLTPRGQLHKETVYGKSKRPMSKPTKINKNFSLEQAQLIINVQEKELVLRHLAQFDNNPAVAFDTKTLKKMPLLKNGEPLKEVLCFEEIFTIRKDITPDLKIEKVVDEKIKAILEQRKKDFGGNAKEAFSDLDKNPIWLNKKKGICIKRVTITGVSNAEALHHQKDHLGREILDDNGNPIPADFVSTGNNHHLAVYLDSEGKLQDNIVSFYEAVVRTSQGLPVVDKGLNKDLGWKFLFSLKQNEMFVFPNDDFDINDFDLLDDKKAELISKHLYRVQKISKVSAGNSFVRDIVFRHHLETTVKEVKELKDISYIQLKSLEGLRNIKKVRINHIGKIVQVGEY

SEQ ID NO: 412 - protein, 1400 aa, Riemerella anatipestifer
MKTILGLDLGTNSIGWALVKETENSNEKSEIIKLGVRVNPLTVDEKTNFEAGRPLSTNADRTAKRSARRNLQRYKLRRKNLIDLLIKHRLIDKDTPLTEIGKNTTHQTLELRAKAARERIELEDLARVFLAINKKRGYRSSRKVNNEEEGQVVDGMAVAKKLYDENLTPGQYAYELLSKGKKYVPDFYRSDLQAEFDSIWEYQKQFYADILDDELYNALKGQGQQNSRKRFLAIKGVYTAENKGKRDEVKLQHYKWRSEAITQKLSIEEVAYVLVEINNDLNKSSGYLGAISDRSKELYFNKETVGENLWKQIQKNPHTSLKNQVFYRQDYLDEFEQIWETQAQFHPQLTLALKEQIRDVVIFYQRKLKSQKGLLSFCQFESWEIERKDENGNVILNKTTQLPKRQTVGRRVAPKSSPLFQEFKIWQNINNLEIAKISDGNSKNKKETEALSDDERKLLFEELNLRGNLSQKEVLQILGLKDKEYKTNFPEGLEGNRTNAALFNIYQQIAENEGYGDWTKKSAQEIKEELKAVFPQIGIQADILDFNAELDGKEFENQASYQLWHLLYSAEEDDKINEEDQIIYGNSAVSLKKKLCEKFGFTPEYAKWIANVSLQDDYGNLSTKAMRKIIPYLIDGNDYSEACALAGYNHSNSLTKEENDNRERLNKLELLPKNSLRNPVVEKILNQMVNVVNQVIETYGKPDEVRIELARELKKSAEERAEMTKGINEATRRNEDIKKLITKNFGIPNPTKNDVVRYRLWEELAPLAYKDVFTGRQIKKEDLFSSKIDIEHIIPKALLFDDSFSNKTLAFRETNLKKADRTAYGFIESDYNATLDDYIQRVETLYNNAKGTISKGKRNKLLMAQKNLPDGFIERDLRNSQYIAKKAKSMIEKVFNDVNVTSGSITDRLREDWDLINVMKELNFPKYKALGLTEIEERYDIGQEKTKKVEVITDWTKRNDHRHHAMDALTVAFTTKSHVQYLNNLNTIHSLKGDEVDLELSKLYGLKNTITEVVNKKRKFIPPMPNFREEAKKHIETILVSIKNKNKVYTKNINKTKKESGYHTKEQLTPRGQLHKETVYGKSKRPMNKPTKINKNFSLEQAQLIINVQEKELVLRHLAQFDNNPAVAFDTKTLKKMPLLKNGEPLKEVLCFEEIFTIRKDITPDLKIEKVVDEKIKAILEQRKKDFGGNAKEAFSDLDKNPIWLNKEKGICIKRVTITGVSNAEALHHQKDHLGREILDDNGNPIPADFVSTGNNHHVAIYEDEKGKLQEKVVSLYEAVARANQGLPVVDKGLNEDLGWKFLFTMKQNEMFVFPNDDFDVNDIDLLDENNAKIISQHLFRVQKLATKNYMFRHHLETNVQEVKELNDIAYKSIRSTEPLKNIKKVRINHIGKIVQVGEY

SEQ ID NO: 413 - protein, 1140 aa, Roseburia intestinalis
  Roseburia intestinalis L1-82
MRENGSDERRRNMDEKMDYRIGLDIGIASVGWAVLQNNSDDEPVRIVDLGVRIFDTAEIPKTGESLAGPRRAARTTRRRLRRRKHRLDRIKWLFENQGLINIDDFLKRYNMAGLPDVYQLRYEALDRKLTDEELAQVLLHIAKHRGFRSTRKAETAAKENGAVLKATDENQKRMQEKGYRTVGEMIYLDEAFRTGCSWSEKGYILTPRNKAENYQHTMLRAMLVEEVKEIFSSQRRLGNEKATEELEEKYLEIMTSQRSFDLGPGMQPDGKPSPYAMEGFSDRVGKCTFLGDQGELRGAKGTYTAEYFVALQKINHTKLVNQDGETRNFTEEERRALTLLLFTQKEVKYAAVRKKLGLPEDILFYNLNYKKAATKEEQQKENQNTEKAKFIGMPYYHDYKKCLEERVKYLTENEVRDLFDEIGMILTCYKNDDSRTERLAKLGLVPIEMEGLLAYTPTKFQHLSMKAMRNIIPFLEKGMTYDKACEEAGYDFKADSKGTKQKLLTGENVNQTINEITNPVVKRSVSQTVKVINAIIRTYGSPQAINIELAREMSKTFEERRKIKGDMEKRQKNNEDVKKQIQELGKLSPTGQDILKYRLWQEQQGICMYSGKTIPLEELFKPGYDIDHILPYSITFDDSFRNKVLVTSQENRQKGNRTPYEYMGNDEQRWNEFETRVKTTIRDYKKQQKLLKKHFSEEERSEFKERNLTDTKYITTVIYNMIRQNLEMAPLNRPEKKKQVRAVNGAITAYLRKRWGLPQKNRETDTHHAMDAVVIACCTDGMIQKISRYTKVRERCYSKGTEFVDAETGEIFRPEDYSRAEWDEIFGVHIPKPWETFRAELDVRMGDDPKGFLDTHSDVALELDYPEYIYENLRPIFVSRMPNHKVTGAAHADTIRSPRHFKDEGIVLTKTALTDLKLDKDGEIDGYYNPQSDLLLYEALKKQLLLYGNDAKKAFAQDFHKPKADGTEGPVVRKVKIQKKQTMGVFVDSGNGIAENGGMVRIDVFRVNGKYYFVPVYTADVVKKVLPNRASTAHKPYGEWKVMEDKDFLFSLYSRDLIHIKSKKDIPIKMVNGGMEGIKETYAYYIGADISAANIQGIAHDSRYKFRGLGIQSLDVLEKCQIDVLGHVSVVRSEKRMGFS

SEQ ID NO: 414 - protein, 1128 aa, Roseburia intestinalis
  Roseburia intestinalis M50/1
MDEKMDYRIGLDIGIASVGWAVLQNNSDDEPVRIVDLGVRIFDTAEIPKTGESLAGPRRAARTTRRRLRRRKHRLDRIKWLFENQGLINIDDFLKRYNMAGLPDVYQLRYEALDRKLTDEELAQVLLHIAKHRGFRSTRKAETAAKENGAVLKATDENQKRMQEKGYRTVGEMIYLDEAFRIGCSWSEKGYILTPRNKAENYQHTMLRAMLVEEVKEIFSSQRRLGNKKATEELEEKYLEIMTSQRSFDLGPGMQPDGKPSPYAMEGFSDRVGKCTFLGDQGELRGAKGTYTAEYFVALQKINHTKLVNQDGETRNFTEEERRALTLLLFTQKEVKYAAVRKKLGLPEDILFYNLNYKKAATKEEQQKENQNTEKAKFIGMPYYHDYKKCLEERVKYLTENEVRDLFDEIGMILTCYKNDDSRTERLAKLGLVPIEMEGLLAYTPTKFQHLSMKAMRNIIPFLEKGMTYDKACEEAGYDFKADSKGTKQKLLTGENVNQTINEITNPVVKRSVSQTVKVINAIIRTYGSPQAINIELAREMSKTFEERRKIKGDMEKRQKNNEDVKKQIQELGKLSPTGQDILKYRLWQEQQGICMYSGKTIPLEELFKPGYDIDHILPYSITFDDSFRNKVLVTSQENRQKGNRTPYEYMGNDEQRWNEFETRVKTTIRDYKKQQKLLKKHFSEEERSEFKERNLTDTKYITTVIYNMIRQNLEMAPLNRPEKKKQVRAVNGAITAYLRKRWGLPQKNRETDTHHAMDAVVIACCTDGMIQKISRYTKVRERCYSKGTEFVDAETGEIFRPEDYSRAEWDEIFGVHIPKPWETFRAELDVRMGDDPKGFLDTHSDVALELDYPEYIYENLRPIFVSRMPNHKVTGAAHADTIRSPRHFKDEGIVLTKTALTDLKLDKDGEIDGYYNPQSDLLLYEALKKQLLLYGNDAKKAFAQDFHKPKADGTEGPVVRKVKIQKKQTMGVFVDSGNGIAENGGMVRIDVFRVNGKYYFVPVYTADVVKKVLPNRASTANKPYSEWRTMEDKDFLFSLYSRDLVHIKSKKGIPIKNVDGSLGESKEVYAYYIGADISGAKIEGKAHDSRYTFRGIGVQKLELIEKCQVDILGHISTVKNEKRMGFS

SEQ ID NO: 415 - protein, 1152 aa, Roseburia inulinivorans
  Roseburia inulinivorans DSM 16841
MNAEHGKEGLLIMEENFQYRIGLDIGITSVGWAVLQNNSQDEPVRITDLGVRIFDVAENPKNGDALAAPRRDARTTRRRLRRRRHRLERIKFLLQENGLIEMDSFMERYYKGNLPDVYQLRYEGLDRKLKDEELAQVLIHIAKHRGFRSTRKAETKEKEGGAVLKATTENQKIMQEKGYRTVGEMLYLDEAFHTECLWNEKGYVLTPRNRPDDYKHTILRSMLVEEVHAIFAAQRAHGNQKATEGLEEAYVEIMTSQRSFDMGPGLQPDGKPSPYAMEGFGDRVGKCTFEKDEYRAPKATYTAELFVALQKINHTKLIDEFGTGRFFSEEERKTIIGLLLSSKELKYGTIRKKLNIDPSLKFNSLNYSAKKEGETEEERVLDTEKAKFASMFWTYEYSKCLKDRTEEMPVGEKADLFDRIGEILTAYKNDDSRSSRLKELGLSGEEIDGLLDLSPAKYQRVSLKAMRKMQPYLEDGLIYDKACEAAGYDFRALNDGNKKHLLKGEEINAIVNDITNPVVKRSVSQTIKVINAIIQKYGSPQAVNIELAREMSKNFQDRTNLEKEMKKRQQENERAKQQIIELGKQNPTGQDILKYRLWNDQGGYCLYSGKKIPLEELFDGGYDIDHILPYSITFDDSYRNKVLVTAQENRQKGNRTPYEYFGADEKRWEDYEASVRLLVRDYKKQQKLLKKNFTEEERKEFKERNLNDTKYITRVVYNMIRQNLELEPFNHPEKKKQVWAVNGAVTSYLRKRWGLMQKDRSTDRHHAMDAVVIACCTDGMIHKISRYMQGRELAYSRNFKFPDEETGEILNRDNFTREQWDEKFGVKVPLPWNSFRDELDIRLLNEDPKNFLLTHADVQRELDYPGWMYGEEESPIEEGRYINYIRPLFVSRMPNHKVTGSAHDATIRSARDYETRGVVITKVPLTDLKLNKDNEIEGYYDKDSDRLLYQALVRQLLLHGNDGKKAFAEDFHKPKADGTEGPVVRKVKIEKKQTSGVMVRGGTGIAANGEMVRIDVFRENGKYYFVPVYTADVVRKVLPNRAATHTKPYSEWRVMDDANFVFSLYSRDLIHVKSKKDIKTNLVNGGLLLQKEIFAYYTGADIATASIAGFANDSNFKFRGLGIQSLEIFEKCQVDILGNISVVRHENRQEFH

SEQ ID NO: 416 - protein, 1156 aa, Ruminococcus albus
  Ruminococcus albus 8
MGNYYLGLDVGIGSIGWAVINIEKKRIEDFNVRIFKSGEIQEKNRNSRASQQCRRSRGLRRLYRRKSHRKLRLKNYLSIIGLTTSEKIDYYYETADNNVIQLRNKGLSEKLTPEEIAACLIHICNNRGYKDFYEVNVEDIEDPDERNEYKEEHDSIVLISNLMNEGGYCTPAEMICNCREFDEPNSVYRKFHNSAASKNHYLITRHMLVKEVDLILENQSKYYGILDDKTIAKIKDIIFAQRDFEIGPGKNERFRRFTGYLDSIGKCQFFKDQERGSRFTVIADIYAFVNVLSQYTYTNNRGESVFDTSFANDLINSALKNGSMDKRELKAIAKSYHIDISDKNSDTSLTKCFKYIKVVKPLFEKYGYDWDKLIENYTDTDNNVLNRIGIVLSQAQTPKRRREKLKALNIGLDDGLINELTKLKLSGTANVSYKYMQGSIEAFCEGDLYGKYQAKFNKEIPDIDENAKPQKLPPFKNEDDCEFFKNPVVFRSINETRKLINAIIDKYGYPAAVNIETADELNKTFEDRAIDTKRNNDNQKENDRIVKEIIECIKCDEVHARHLIEKYKLWEAQEGKCLYSGETITKEDMLRDKDKLFEVDHIVPYSLILDNTINNKALVYAEENQKKGQRTPLMYMNEAQAADYRVRVNTMFKSKKCSKKKYQYLMLPDLNDQELLGGWRSRNLNDTRYICKYLVNYLRKNLRFDRSYESSDEDDLKIRDHYRVFPVKSRFTSMFRRWWLNEKTWGRYDKAELKKLTYLDHAADAIIIANCRPEYVVLAGEKLKLNKMYHQAGKRITPEYEQSKKACIDNLYKLFRMDRRTAEKLLSGHGRLTPIIPNLSEEVDKRLWDKNIYEQFWKDDKDKKSCEELYRENVASLYKGDPKFASSLSMPVISLKPDHKYRGTITGEEAIRVKEIDGKLIKLKRKSISEITAESINSIYTDDKILIDSLKTIFEQADYKDVGDYLKKTNQHFFTTSSGKRVNKVTVIEKVPSRWLRKEIDDNNFSLLNDSSYYCIELYKDSKGDNNLQGIAMSDIVHDRKTKKLYLKPDFNYPDDYYTHVMYIFPGDYLRIKSTSKKSGEQLKFEGYFISVKNVNENSFRFISDNKPCAKDKRVSITKKDIVIKLAVDLMGKVQGENNGKGISCGEPLSLLKEKN

SEQ ID NO: 417 - protein, 1341 aa, Ruminococcus lactaris
  Ruminococcus lactaris ATCC 29176
MGKGYYVGLDMGTGSVGWAVTDESYQILRRHGKAMWGVRLFESAKTAEERRMFRTGRRRLDRRGWRIEILQEIFAEEISRVDPGFFLRMKESKYYPEDKRDIQGNCPELPYTLFVDKTFTDKDFHKKYPTIYHLRKMLMETEDTPDMRLVYLALHHMMKHRGHFLLSGDISQVTEFKNTFNQFIENIRNEEMDFEIELDESAVQMIEETLKDKNLTRSAKKSKLVKGLNAKNVRDKAFLTLLSGGTVKLSDLFGMEELNEGERPKISFADNGYEEYAAVVEMELGELYYIVESAKAVYDWAILSDILGGSTSVSDAKVRAYEKHKADLKYLKAVVKEYFPKEVYNAVFVESSDKLNNYPAYIGMTKKNGKKVSLEGKRCSREEFMDFLKKNIVVKLPDEEAKMYLQSELEKDSFLPKQVNKDNGVIPYQVHKYELKKILDNLGDKIPFLKENAEKIEKLFSFRIPYYVGPLRTGNGENSKFAWAERKSTEKIYPWNFENVIDVEQSAENFIRRMTNKCTYLIGEDVLPKDSLLYSKFMVLNELNNLRLDGQKISVELKQKIYRDVFCRSRKVTQKKLKSYLIREGIAGKNVELTGIDGDFKGSLTAYHDFKEKLIDVELTQKEKEEIILNIVLFGDDKKLLKQRLKKKFPQLTEKQINTVTALSYKGWGRLSKKLLEEVTVPAPETGEVWNIITALWETNDNFMQLLSKEYQFSDRIEEFNEEKADPEVSYQTIEDLYVSPAVKRQIWQTLQIIQEIEKVMGEKPKRVFVEMAREKQENKRTESRKKTLSDLYTKCKKEEPEWIEALCTSLEKHEEHQLRSDKLYLYYTQKGRCMYSGEPIDLEDLWDNTKYDIDHIYPQSKTMDDSLKNRVLVKKEYNAKKSDTYPIAADIQKKMMPFWKSLLTGGFIPKEKYDRLVRNNPLDANELAGFIERQIVETRQSTKAVAEILKKILPDTEIVYVKAKTVSKFRQDFDFIKVRDMNDLHHAKDAYLNIVVGNVYFVKFTKNAAWFVKENPGRTYNLEKMFIWDVARDGEIAWKAGKSGSIVQVRAMMEKNHILVTRRSYEVKGGLFDQQILKKGKGQVPVKESDERLRDIGKYGGYNKAAGVYFMLVSSKDKKGKEQRTIEFVPIYLKDRVEKDMESARNYLMEERGLREPKILIKKIKIDTLFKVDGFYMWLSGRTSNQLIFKGANQLILSKEDMKTLKKVVKYIQRQKEDKNVKISMRDGITEEELLKLYETFLDKIRHSIYGARLSSQEKTLVNGKEKFIDLSVEAKCQVLYEILHLFQCQSGAANLKMIGGPASAGILVMNNNISKCKNISIVNQSPTGIYEKEIDLLRV

SEQ ID NO: 418 - protein, 1471 aa, Scardovia wiggsiae
  Scardovia wiggsiae F0424
MGYKAPRNDKGEIDYGVGLDLGNGSVGWVAMDKDYHLIRARGHELIGARLFDPANSAENRRESRTTRRRLSRRRWRLRMLDSLFASELAKIDPNFLARRKYSWVHPKDEQNHENWYGSIIFGSKEQDKQFYKDYPTIYHLRKKLTEDTERHDIREIYVAIHHIVKYRGHFLREGEINSENLFDPEGFVELIKDVIKLNNSYDESTPIFEASPADVSEALLNEHTSRSGRIEDTLDKLDFSVSRVDKHELKGMRDAAKAVIGAIVGNTADFSKIFNLDNLDKDSKDNLKLKFADSNFDEKYGGVVGSGLLDETQIELVDRIHAVYDAVALKGILGDAHTISEAKVESYEKHRKNWKLIKEELRTKENKDEVDLWYGDLSGRQYKNPPDPEKGPDEGSKKDSPIRDSDQKQNLIKKANDYFTELIDDSQLSEEQKNCLKNDINNGQLFPVQRSSDNGVIPYQIHLNELRRIIENQKQYYPFLAETFIRKTAEGKSYEENKIVALLKFRVPYYVGPLVSKEDMEEHSSGNSAYHWMARNPGRGEAITPWNFDEVVDKDESGARFISRLTGTDTYLLGEPTLPQHSLLYEEYMVLSELNNVRLNVRQGNHWSDKNRQRLSYKQKEFLIENLFKEHKTVTRKRAEDCLSSMGCGEVQLFGLSDEKKFASSLSSYITLKKILGKAFVDDSGNSAILERIIEVQTVFEDREPLTHQLSLIDSLTVEQRKQLAKIHYTGWGKLSRKLLTSKKGSYKIHSQNEIMRTQHSIIDIMRGDSLNLIEIIRDKKIGIGEWIDNENLDRETGESDVSRLESVFEGIVMSPRVKRGVVQAVRVIDDLAKAIGNPPQRIFIEMADEVQASQRTVSRLSRLKALYGSPSLQKEFNDLKDLRKSLNETKDADLQEDRLYLYYIQLGKDLYTGKEISIDSLSSAYDIDHIVPQALTQDDSIDNRVLVSRKENARKTDSYLYTPDLIKNMRPLWGKLLAAGLMSQKKYDALTRVDDFKDREKQRFVQRSLVETRQIMKNVSTILRTYYGEDTNVVTLKSSITHDMRKYLGFPYKNRDINDYHHAQDALCISAAGQFMLNRHFVSGGEVTDGASNAYNMYLAEYLQEFRDAKARGERKRSTAFGFVVGSMSSKDDEKRTDHRTGEIVWSETNAEYLRKVMNYKKMLITQKVGDVKTRALYDETRYGHKESSAKSIKFDNLRRDTSLYGGFSGASTAYMMLVEYKKKNKLVSITAQEASLLAVADQKNDTVSVMDGILASHGLSGAKILLPKIVTGQLLDYSDALVTLQSASELNTARQMWLPRNDYNDIDIILKSKDIEDAAHKLGYDSDTVHVLRRIQKLFEAVFRVAESQFPLHQLSKDQQEEILRDPQNYGFGSAVKLLGGLLKALHANAENTNLAGLVKVLHGDKEYSDDGKAKEFKKFGFSPRWRRISNPTGFTLSDSDTFIYQSPSGIFEQRVTVKELKEKADKQK

SEQ ID NO: 419 - protein, 1178 aa, Scardovia inopinata
  Scardovia inopinata F0304
MGKRHNSNMAKKKISYRIGIDVGLNSTGLAAIEVDDDGAPIRILNTMSVIHDGGVDPDAAKVRGTRLAISGIARRTRRMRRRRAKRLDRLEQILEKYGYTDTEPVLEEPYGPWICRAELADGFINDDEQRRMMIGIAIRHIARHRGWRNPYQNVRALLNIDDSDLSEEYKNLKEKVQDQINDGKDLPNFTPSQLVRDYLDNFSGQPAARIRTGKAGPRGNRRDAVGILPQRMRQSDYAYELQRIFDMQKIGRDEAQELLMAVFEAKSPKGSAEKRIGKDPLTGKKRALKASLAFQKYRIVATITNLRIKTGTGSERMLSPTELNDIYTYLLRVQDDNHLPTWEDICEEVLHIGRYQLAGIGKTFEGGERISNMPPVIQTSLAIHGLSEGTLAEKLTKWWDKADDDSRESMIKLLSNTVDIDRVNEVDENFASALDFIDSLDDEELTKLDKIALPRGRAAYSEEALNKLTADMLNTGDDLFSARQRIYHVNNSWRPPQPPIGEPLGNPAVDRVLKITNRYLMNCLNRWGQPRRVTIEHTRSGFTSVKQATEHQKISDKRAEYRRDIVKQLEEAGVESVHEYDIRRWEAVQRQNGQCLYCGRDITFKTCEMDHIVPRKGPGSTNTRTNFAAVCPECNRMKSNIPFASWAETKEAKDRGVSLDKAIKQVRFFNFTKNEYSPQAQRNFKKSMIERLKQKTSDEPLDNRSIESVSWMADELYKRIDWYFNHEQYETSKKAINDDKDNLSGTQVVVYPGSITAEARNAAGLGGNIHFIGGRYKTRLDRRHHAVDACVIAMMEPGIARILTERNQLRQAQRLTARIEDDEVNWKDYPTENTAGYNKYQAWSDRMHALLEYMNNALDYDKIPVVRWERLQLGNRSAHEDTIHPLKKLPLSHEISAIDINHASTPALYEALVSLPDFSEQDGLPADPSRQINVNGERYSGDDLVSFFNSNAAQIAIQGGSAELGTAFHHARIYRCWTVGKNGKKKIFFGMIRVYQHDLLHAKNEDLFTYPLKRSSVSMRYAKKEVVHAILSGNAEYVGYLCVGDELVLDLKGDKSNDEGGSRLSGQVGEFVQKFEEDSKVNSQIVNRWTVDGFPDEAKLRLRPSMFAGEGLKNMKSELVENAAIKNILSKTGWRVSVDVISKKSPVVLRRNAFGEPRWKTNAGLPVSYRWQDTETKE

SEQ ID NO: 420 - protein, 1063 aa, Simonsiella muelleri
  Simonsiella muelleri ATCC 29453
MEKFHYVLGLDLGIASVGWAAIEIDKETETSIGLLDCGVRTFERAEVPKTGDSLAKARREARSTRRLIRRRSHRLLRLKRLLKREIFRQPETFKDLPINAWQLRVKGLDSRLNEYEWAAVLLHLVKHRGYLSQRKSEMSETDSKSEMGRLLAGVAENHQLLQQEQYRTPAELALKKFVKHFRNKGGDYAHTFNRLDLQAELHLLFQKQRELGNPFTSPELERQVDDLLMTQRSALQGDAILKMLGHCGFEPEQFKAAKNTFSAERFIWLTKLNNLRIQDQGKERALTADERTKLLDEPYKKSKLTYAQVRKLLSLPQTAIFKGLRYDLEHDKKAENSTLMEMKSYHNIRQTLEKSGLKTEWQSIATQPEILDAIGTAFSIYKTDEDISHELKTCRLPENVLNELLKNINFDGFIQLSLTALRKILPLMEQGYRYDEACTQIYGNHHSGSLQQESKQFLPHIPIDDVRNPVVFRTLTQARKVVNAIIRRYGSPARVHIEMARELGKSKSDRDRIEKQQQKNKKERENAVAKFKEDFPDFVGEPRGKDILKMRLYEQQHGKCLYSGHDIDINRLNEKGYVEIDHALPFSRTWDDSQNNKVLVLGSENQNKRNQTPDEYLDGANNSQRWLEFQARVQTCHFSYGKKQRIQLAKLDDETEKGFLERNLNDTRYIARFMCQFVQENLYLTGKGKRLVFASNGGMTATLRNLWGLRKVREDNDRHHALDAIVVACSTASMQQKITKAFQRHESIEYVDTETGEVKFRIPQPWDFFRQEVMIRVFSDQPCEDLVEKLSARPEALHDNVTPLFVSRAPNRKMSGQGHLETIKSAKRLSEENSMVKKPLTTLKLKDIPEIVGYPSREPQLYAALKTRLETHDDDPIKAFAKPFYKPNKNGELGALVRSVRVKGVQNTGVMVHDGKGIADNATMVRVDVYTKAGKNYLVPVYVWQVAQGILPNRAVTSGKSEADWDLIDESFEFKFSLSRGDLVEMISNKGRIFGYYNGLDRANGSIGIREHDLEKSKGKDGVHRVGVKTATAFNKYHVDPLGKEIHRCSSEPRPTLKIKSKK

SEQ ID NO: 421 - protein, 1327 aa, Solobacterium moorei
  Solobacterium moorei F0204
MEGQMKNNGNNLQQGNYYLGLDVGTSSVGWAVTDTDYNVLKFRGKSMWGARLFDEASTAEERRTHRGNRRRLARRKYRLLLLEQLFEKEIRKIDDNFFVRLHESNLWADDKSKPSKFLLFNDTNFTDKDYLKKYPTIYHLRSDLIHNSTEHDIRLVFLALHHLIKYRGHFIYDNSANGDVKTLDEAVSDFEEYLNENDIEFNIENKKEFINVLSDKHLTKKEKKISLKKLYGDITDSENINISVLIEMLSGSSISLSNLFKDIEFDGKQNLSLDSDIEETLNDVVDILGDNIDLLIHAKEVYDIAVLTSSLGKHKYLCDAKVELFEKNKKDLMILKKYIKKNHPEDYKKIFSSPTEKKNYAAYSQTNSKNVCSQEEFCLFIKPYIRDMVKSENEDEVRIAKEVEDKSFLTKLKGTNNSVVPYQIHERELNQILKNIVAYLPFMNDEQEDISVVDKIKLIFKFKIPYYVGPLNTKSTRSWVYRSDEKIYPWNFSNVIDLDKTAHEFMNRLIGRCTYTNDPVLPMDSLLYSKYNVLNEINPIKVNGKAIPVEVKQAIYTDLFENSKKKVTRKSIYIYLLKNGYIEKEDIVSGIDIEIKSKLKSHHDFTQIVQENKCTPEEIERIIKGILVYSDDKSMLRRWLKNNIKGLSENDVKYLAKLNYKEWGRLSKTLLTDIYTINPEDGEACSILDIMWNTNATLMEILSNEKYQFKQNIENYKAENYDEKQNLHEELDDMYISPAARRSIWQALRIVDEIVDIKKSAPKKIFIEMAREKKSAMKKKRTESRKDTLLELYKSCKSQADGFYDEELFEKLSNESNSRLRRDQLYLYYTQMGRSMYTGKRIDFDKLINDKNTYDIDHIYPRSKIKDDSITNRVLVEKDINGEKTDIYPISEDIRQKMQPFWKILKEKGLINEEKYKRLTRNYELTDEELSSFVARQLVETQQSTKALATLLKKEYPSAKIVYSKAGNVSEFRNRKDKELPKFREINDLHHAKDAYLNIVVGNVYDTKFTEKFFNNIRNENYSLKRVFDFSVPGAWDAKGSTFNTIKKYMAKNNPIIAFAPYEVKGELFDQQIVPKGKGQFPIKQGKDIEKYGGYNKLSSAFLFAVEYKGKKARERSLETVYIKDVELYLQDPIKYCESVLGLKEPQIIKPKILMGSLFSINNKKLVVTGRSGKQYVCHHIYQLSINDEDSQYLKNIAKYLQEEPDGNIERQNILNITSVNNIKLFDVLCTKFNSNTYEIILNSLKNDVNEGREKFSELDILEQCNILLQLLKAFKCNRESSNLEKLNNKKQAGVIVIPHLFTKCSVFKVIHQSITGLFEKEMDLLK

SEQ ID NO: 422 - protein, 1179 aa, Sphaerochaeta globosa
MSKKVSRRYEEQAQEICQRLGSRPYSIGLDLGVGSIGVAVAAYDPIKKQPSDLVFVSSRIFIPSTGAAERRQKRGQRNSLRHRANRLKFLWKLLAERNLMLSYSEQDVPDPARLRFEDAVVRANPYELRLKGLNEQLTLSELGYALYHIANHRGSSSVRTFLDEEKSSDDKKLEEQQAMTEQLAKEKGISTFIEVLTAFNTNGLIGYRNSESVKSKGVPVPTRDIISNEIDVLLQTQKQFYQEILSDEYCDRIVSAILFENEKIVPEAGCCPYFPDEKKLPRCHFLNEERRLWEAINNARIKMPMQEGAAKRYQSASFSDEQRHILFHIARSGTDITPKLVQKEFPALKTSIIVLQGKEKAIQKIAGFRFRRLEEKSFWKRLSEEQKDDFFSAWTNTPDDKRLSKYLMKHLLLTENEVVDALKTVSLIGDYGPIGKTATQLLMKHLEDGLTYTEALERGMETGEFQELSVWEQQSLLPYYGQILTGSTQALMGKYWHSAFKEKRDSEGFFKPNTNSDEEKYGRIANPVVHQTLNELRKLMNELITILGAKPQEITVELARELKVGAEKREDIIKQQTKQEKEAVLAYSKYCEPNNLDKRYIERFRLLEDQAFVCPYCLEHISVADIAAGRADVDHIFPRDDTADNSYGNKVVAHRQCNDIKGKRTPYAAFSNTSAWGPIMHYLDETPGMWRKRRKFETNEEEYAKYLQSKGFVSRFESDNSYIAKAAKEYLRCLFNPNNVTAVGSLKGMETSILRKAWNLQGIDDLLGSRHWSKDADTSPTMRKNRDDNRHHGLDAIVALYCSRSLVQMINTMSEQGKRAVEIEAMIPIPGYASEPNLSFEAQRELFRKKILEFMDLHAFVSMKTDNDANGALLKDTVYSILGADTQGEDLVFVVKKKIKDIGVKIGDYEEVASAIRGRITDKQPKWYPMEMKDKIEQLQSKNEAALQKYKESLVQAAAVLEESNRKLIESGKKPIQLSEKTISKKALELVGGYYYLISNNKRTKTFVVKEPSNEVKGFAFDTGSNLCLDFYHDAQGKLCGEIIRKIQAMNPSYKPAYMKQGYSLYVRLYQGDVCELRASDLTEAESNLAKTTHVRLPNAKPGRTFVIIITFTEMGSGYQIYFSNLAKSKKGQDTSFTLTTIKNYDVRKVQLSSAGLVRYVSPLLVDKIEKDEVALCGE

SEQ ID NO: 423 - protein, 1426 aa, Sphingobacterium spiritivorum
  Sphingobacterium spiritivorum ATCC 33861
MKHILGLDLGTNSIGWALIKQDFENKQGEILGMGSRIIPMSQDILGDFGKGNSVSQTAERTKYRSVRRLRERFLLRRERLHRILNVLGFLPEHYASQIDFTKRFGKFKEETEPKLVYSNEGFIFKKSFEEMLSDFKTHQPQLLEDNKKIPYDWTIYYLRKKALSRKIEKEELAWILLNFNQKRGYYQLRGEEEEENPNKLIEFYSLKIVDVLADEPQKGKSDIWYSLILENGWIYRRSSKTPLFDWKEKTRDFIVTIDLNDDGSVKTDKEGNEKRSFRAPGENDWTLVKKKTEQEIDSSRKTVGTYIYETLLKNPKQKIKGKLVRTIERKFYKTELKQILEKQKEFHPELRQDDLYSDCVRELYKNNEAHQLTLSKKDFVHLFMEDIIFYQRPLGSQKSSISNCTLEFRKYKDENGTEHTQYLKAIPKSNPYYQEFRIWQWMYNLNIYKKEDDTNVTKDFLNTKADFESLFEFLNNRKEVDQKALLKHFKLNDKTHRWNYVEDKKYPCNETKTMILSRLDKVENISDDFLTREMEQKIWHIIYSVNDKVEYEKALKSFAGKNNLEDNSFFEAFKKFPPFKSEYGAFSEKAIKKLLPLMRMGKFWNYNNISEQSKSRIQKIITGEYDENIKDKVREKAIHLTTETDFQGLQLWLVQYIVYGRHSEAAMLGKWNSADDLEEFLKEFKQHSLRNPIVEQVITETLRVVKDIWQKYGNGAKDFFREIHIELGREMKLPAEERERLTRQISENENTNFRIKALLAEMMDDNSVENVRPFSPMQQEILKIYEEGVLNSDIEIEDDILKISKTAQPSSSDLKRYKLWLEQKYKSPYTGQIIPLNKLFTPEYEIEHIIPQSRYFDDSFTNKIICESAVNKLKDNYIGLEFIKKLGGSIVECGNGKSVAILKHDAYEDFIKKHYANNRSKRNKLLLEDIPEKMIERQMNDTRYISKYISGVLSNIVRVEDGTDEGVNSKNIVPGNGKITTQLKQDWGLNDVWNDLILPRFERMNHLTNSTDFTAWNENHQKFLPTVPVEFSKGFSKKRIDHRHHALDALVIACATKDHVNLLNNQSAKSDTKRYDLKKKLMKFEKVAYNHPQTGERIEREAPKQFLKPWETFTIDAKNHLETIIVSFKQNLRVINKATNYYEKYVEKEGTKVKERVEQKGTNWAIRKPMHKETVSGKIDLPRIKVPKGKILTATRKSLDTSFNLKTIGSITDTGIQKILKNYLQYKDNNPELAFSPEGIEDMNKNIEKFNNGKAHQSISKVRVFELGSKFPLGQSGNKKEKYVEAAKGTNLFFAIYQDKNGKRSYETIPLNEVIERQKQGLSVVDLKGVDDFYLSPNDLVYVPSEDELENISMIDFNKMSSERIYKVVSFTGNQIFFVRQDIATSVVNKAEFSTLNKMERAIDGTMIKETCVKLQIDRLGNISKI

SEQ ID NO: 424 - protein, 1110 aa, Sphingobium sp.
  Sphingobium sp. AP49
MAEGKKRIWRLGADLGANSLGWAAIELSAPVNGKPIAILAAGSRIFSDGRDPKSGASLAVDRRDARAMRRRRDRFKQRQKALIKYLIADGLFPADEAARNAMAAIDPYAVRARALDEALSLPELGRALFHLNQRRGFKSNRKADRKADDDAGKIAIGIDRTRDAIAEDEADAGAEPGSWTFGKWLHERRLKGQSVRTRLRPESGEDAKGDGYDFYPDRALMEEEFDAIWAAQAPHHPDVLTNDVHDRLHEIIFYQRPLKAPQVGMCSLIPGDRRLPKAHPLFQRRRLLEELNALMIVRPGEVAQRLTREERDILLLKLKDKNKVSFATLRKALKLDPDARFNKESEDRTDLKGDEVAAVMGSKTRFGNLWVHLSIEAQWDVLARLDAVESDAEDAAFCAWLVETYALTPEQARAVANAPLPPGYGRFGETATRKLIEALRDGKKDDRVLVYSEAVTEAGLGHHSDRRTGEVFEDAKGRPQLPYYGVALERHIMPGTGDPSDPEEMRVGRLTNPTVHIGLNQLRRILNVLIRAYGPPAEIAIELARELKLTDEDKKRINRENNDNRIAAERRSEKLLAIGQADSGANRALLKLWEELNPANVLDRRCIYSGRQISIDMLFSAAVEVDHILPFAATLDDSNGNKIVCLREANREKRKRSPHDAWGHSARWDEIAARAAQLPRNKRWRFEPDAMDKFRDEGGFQARHLVDTQYLARLSREYLATLYPEKGEGSGHIWVSPGRLTEMVRRKLGLNDLLPDHNFGGGADQAKNRLDHRHHAIDAVVVAIVDRGMLNAIARASGQEGAEGRERIIIPEPWDGFRDALRETVNRITVSHRTDHGTASKAGLPKGKDATAGRLHNDTAYGFTGDTDAKGNSIVVRRVPLSSFKKLADLDRIRDADLKAALYQHLNGLEGKAFEKALAEFHKLEWHNFGGVRRVRVTEPLTVIPIKDRNGRIYKGYKGDSNYRYDVWELPDGKWVTNWKNEAGEAMSSVISMFDAHQSSEPPRPHPAARKILSLHQNDLLAIEREGEDRKLMRVVKFGQSGQITLAEHQQAGDLKKRDAVSNDDDPFKYFAPTSGGLKKVKARQVRIDEIGRVLDPGFPARTARRKTRG

SEQ ID NO: 425 - protein, 1090 aa, Sphingomonas sp.
  Sphingomonas sp. S17
MDWRLGLDLGANSLGWAALRLDRAGDPIGILAMGSRIFSDGRDPKSGASLAVDRRAARAMRRRRDRFKQRQAALLKYLIRDGLFPADQADRQRLADEDPYALRARALDEELSLFEIGRALFHLNQRRGFQSNRKADRGQDDEAGKIAVGVDRLNQQMEEQGARTLGEFLHQRRRAATDANHIPSVRTRLRPETGEGAKGDGYDFYPSRALIAEEFEEIWAAQAPHYPDTLTQQVHDRLYEIIFHQRPLRAPQVGQCTLVAGETRLPKAHPLFQKRRLLEEINALMIVRPGEIAQRLTPEERDTLYLKLKDKRTVSFATLRKTLKLDSAARFNKESENRTELKGDEVAAELGAKTRLGTRWQHLSGDQQWEVVHRLMALESQADEAAFRDWISQTYDLLPEQAAAVLGARLPQGHGRFGPTATTTLIDSLLHDRTEDGRVVVYSEAVQRSGLGHHSDLRHDRDDEDVTELPYYGVALERHIMPGTAEPTDPEEMRIGRLTNPTVHIGLNQLRHVVNRLIRAYGPPKEIAIELARELKLSEDEKKKRNSENRDNRLAAEGRSKKLEEIRQRDTGANRALLKLWEELNPGNVLDRRCIYTGEQISIDMLFSDRVEVDHILPFAQTLDDSNGNKLLCLREANREKRRRSPYEAWGHTDRWPDIAERASRLPKPKRWRFEPDAMQRFATEDGFLARHLVDTQYLGRLAREYLSWLYPGRGEGSGHVWVSPGRLTEMVRRKLGLNDLLPDHNFGGGADQPKNRLDHRHHAIDALVVAIVDRGMLQAIARASGQDGSEGRERIHIPAPWDGFRDDLRVAVNGIIVSHRPDHGTVAKAGLARGRDQTAGRLHNDTAYGLTGETDAKGNSIVVRRIPLSAIKKPADIARVRDPLLRNALAEFTKGLDGKAFEARIGRFHELGPLLYRGIRRVRVVETLTVIPIRDAEGRAYKGYKGDSNYRYDVWEMPDGKWRCQVVSMFDAHQSTEQARPHPAARKILSLQRNDILAIERTEGDRELVRVVKFSEKQFAVAPPHEGGSLKTRDGNADDPFRYLYPSPNTLKGWRARQVRIDELGRVLDPGFPARKSVRRTRPRAAPVD

SEQ ID NO: 426 - protein, 1084 aa, Sporolactobacillus vineae
  Sporolactobacillus vineae DSM 21990 = SL153
MKYSIGLDIGISSVGWSVINLDRERIELMGARLFDAAENPKNGSSLAAPRRDARSARRRLRRRRYRVGRVRHFIIDRGLVTRGQADQLFDWKDGDLDIWLVRVNALERLLTDREFARVLIHIAKNRGYRSNRKSEAKSGENGQVLSAIKANKELMEEKGYQTVAEMLVNEPETFAGRKRNRGGEYTHVIARSELEHEIRLIFTKQRAFGNRFATEENENTYVKIWAAQRPVATKDDILKKIGDCTFEKGEKRAPKASYAFQYFRALDKLNRLRILSVREPSRNLTDDERNLIVPALFNHDKQKYSDLRKILQLRDDQKFNELFYDPGKSLKENENKTFLSLAEQYKIRKVIRDVQGKDGLLQYRPLDIDTIAYALTVFKDDQDTRDYLSNTFVNGNGKQVLNLANRAFDAELIDGLLSLSFAKFGHLSLKALHKLIPHMEQGLSYYDACKKVGYHDNEQVGKSKQHLLPVIPADEIRNPVVVRSLSQTRKVINAIIKRYGSPTFMYIELAREMGRPYNERRDLEKQYNKNRTVNDSAIEQIHELYPEIGAPRGHDILKYKLWQQQDCKCAYSLEKIPAEKIFEPGYAEVDHIIPYSRSFDDSNSNKVLVLSRMNQEKKNRTPYEWFGGDEHRWNKFESYVNALKVNRKKKSLLTKKNMDTEEEDTFKSRHLNDTRYITRFIKSFVEDNLLFREIEGAKQHVFTVNGAYTSLMRKRWGFNKNREESDLHHSVDAVIIAVSQPFRNEVSRYFKHREISLPQLLKRTWDYFPEPWEGFVKELRARTLQDPEKLKLALESLDLDSYDPEFIDEVKPIFISRMPKRSIKGQIHDETLRRNRGKTKDGFVKIVTRTRLENIKFDKNGDFPMYGRESDPKTYQAIKQRYLENNKDKKKAFIEPLYKPAKNPNNASLIRSVKIEDKANQIVPLRDEAVAYNASIVRTEVYRNKETGKFYLAPVYVSDVFAGREPRRFIRANVPYEQWVNITDKFTFLFNLYPNDVIYIKMKKVKTTKSNINKTISWQESYFYFKGTDIHTGAITIIDHMNSFTDRVGTQGLQLFEKYQVDPLGNLSRVHGETQYGVPALSHS

SEQ ID NO: 427 - protein, 1053 aa, Staphylococcus aureus; identical to SEQ ID NO: 28
  Staphylococcus aureus subsp. aureus

SEQ ID NO: 428 - protein, 1054 aa, Staphylococcus lugdunensis
  Staphylococcus lugdunensis M23590
MNQKFILGLDIGITSVGYGLIDYETKNIIDAGVRLFPEANVENNEGRRSKRGSRRLKRRRIHRLERVKKLLEDYNLLDQSQIPQSTNPYAIRVKGLSEALSKDELVIALLHIAKRRGIHKIDVIDSNDDVGNELSTKEQLNKNSKLLKDKFVCQIQLERMNEGQVRGEKNRFKTADIIKEIIQLLNVQKNFHQLDENFINKYIELVEMRREYFEGPGKGSPYGWEGDPKAWYETLMGHCTYFPDELRSVKYAYSADLFNALNDLNNLVIQRDGLSKLEYHEKYHIIENVFKQKKKPTLKQIANEINVNPEDIKGYRITKSGKPQFTEFKLYHDLKSVLFDQSILENEDVLDQIAEILTIYQDKDSIKSKLTELDILLNEEDKENIAQLTGYTGTHRLSLKCIRLVLEEQWYSSRNQMEIFTHLNIKPKKINLTAANKIPKAMIDEFILSPVVKRTFGQAINLINKIIEKYGVPEDIIIELARENNSKDKQKFINEMQKKNENTRKRINEIIGKYGNQNAKRLVEKIRLHDEQEGKCLYSLESIPLEDLLNNPNHYEVDHIIPRSVSFDNSYHNKVLVKQSENSKKSNLTPYQYFNSGKSKLSYNQFKQHILNLSKSQDRISKKKKEYLLEERDINKFEVQKEFINRNLVDTRYATRELTNYLKAYFSANNMNVKVKTINGSFTDYLRKVWKFKKERNHGYKHHAEDALIIANADFLFKENKKLKAVNSVLEKPEIESKQLDIQVDSEDNYSEMFIIPKQVQDIKDFRNFKYSHRVDKKPNRQLINDTLYSTRKKDNSTYIVQTIKDIYAKDNTTLKKQFDKSPEKFLMYQHDPRTFEKLEVIMKQYANEKNPLAKYHEETGEYLTKYSKKNNGPIVKSLKYIGNKLGSHLDVTHQFKSSTKKLVKLSIKPYRFDVYLTDKGYKFITISYLDVLKKDNYYYIPEQKYDKLKLGKAIDKNAKFIASFYKNDLIKLDGEIYKIIGVNSDTRNMIELDLPDIRYKEYCELNNIKGEPRIKKTIGKKVNSIEKLTTDVLGNVFTNTQYTKPQLLFKRGN

SEQ ID NO: 429 - protein, 1334 aa, Staphylococcus pseudintermedius
MGRKPYILSLDIGTGSVGYACMDKGFNVLKYHDKDALGVYLFDGALTAQERRQFRTSRRRKNRRIKRLGLLQELLAPLVQNPNFYQFQRQFAWKNDNMDFKNKSLSEVLSFLGYESKKYPTIYHLQEALLLKDEKFDPELIYMALYHLVKYRGHFLFDHLKIENLTNNDNMHDFVELIETYENLNNIKLNLDYEKTKVIYEILKDNEMTKNDRAKRVKNMEKKLEQFSIMLLGLKFNEGKLFNHADNAEELKGANQSHTFADNYEENLTPFLTVEQSEFIERANKIYLSLTLQDILKGKKSMAMSKVAAYDKFRNELKQVKDIVYKADSTRTQFKKIFVSSKKSLKQYDATPNDQTFSSLCLFDQYLIRPKKQYSLLIKELKKIIPQDSELYFEAENDTLLKVLNTTDNASIPMQINLYEAETILRNQQKYHAEITDEMIEKVLSLIQFRIPYYVGPLVNDHTASKFGWMERKSNESIKPWNFDEVVDRSKSATQFIRRMTNKCSYLINEDVLPKNSLLYQEMEVLNELNATQIRLQTDPKNRKYRMMPQIKLFAVEHIFKKYKTVSHSKFLEIMLNSNHRENFMNHGEKLSIFGTQDDKKFASKLSSYQDMTKIFGDIEGKRAQIEEIIQWITIFEDKKILVQKLKECYPELTSKQINQLKKLNYSGWGRLSEKLLTHAYQGHSIIELLRHSDENFMEILTNDVYGFQNFIKEENQVQSNKIQHQDIANLTTSPALKKGIWSTIKLVRELTSIFGEPEKIIMEFATEDQQKGKKQKSRKQLWDDNIKKNKLKSVDEYKYIIDVANKLNNEQLQQEKLWLYLSQNGKCMYSGQSIDLDALLSPNATKHYEVDHIFPRSFIKDDSIDNKVLVIKKMNQTKGDQVPLQFIQQPYERIAYWKSLNKAGLISDSKLHKLMKPEFTAMDKEGFIQRQLVETRQISVHVRDFLKEEYPNTKVIPMKAKMVSEFRKKFDIPKIRQMNDAHHAIDAYLNGVVYHGAQLAYPNVDLFDFNFKWEKVREKWKALGEFNTKQKSRELFFFKKLEKMEVSQGERLISKIKLDMNHFKINYSRKLANIPQQFYNQTAVSPKTAELKYESNKSNEVVYKGLTPYQTYVVAIKSVNKKGKEKMEYQMIDHYVFDFYKFQNGNEKELALYLAQRENKDEVLDAQIVYSLNKGDLLYINNHPCYFVSRKEVINAKQFELTVEQQLSLYNVMNNKETNVEKLLIEYDFIAEKVINEYHHYLNSKLKEKRVRTFFSESNQTHEDFIKALDELFKVVTASATRSDKIGSRKNSMTHRAFLGKGKDVKIAYTSISGLKTTKPKSLFKLAESRNEL

SEQ ID NO: 430 - protein, 1334 aa, Staphylococcus pseudintermedius; identical to SEQ ID NO: 429
  Staphylococcus pseudintermedius ED99

SEQ ID NO: 431 - protein, 1112 aa, Staphylococcus simulans
  Staphylococcus simulans ACS-120-V-Sch1
MLVGLKFKQSILFENMENAEDIKESATGSDAISLSDDYYENLSEFLTDEQLNFIESANTFFMGIMLDRILKGATSISAAKVRDYKIFKSQLKLIKDIVYQNKYDKYHEFFVTSKEDMRAYQENPDAKNFGKLSKFDQYLIHSKDQYAKLMKDLKGLVPKEYTEVLNLIDEQKFLVVQNTTDNASIPYQNNVFEAENILRNQQKYYPEITEEMIGKVINLISFRIPYYVGPLTNKNGQSDFAWMIRKSDEQTLPWNFDKVIDKSKSAEKFIRRMTSKCTYLLEEDVLPKHSLLYQEMEVLNELNNVQLRGENEPKHRIHRLDPKVKQFIYHNLFQKKKNVTHKDLITLLQNSEHRNTLNKTSGQKLKVFGTQNDSKFASKLSTYNDMKAILGSVENKRQMIEELVLWITIFEDKAILKQKIGEKYPNITEKQLNQIVKLNYSGWGRLSEKLLTKEVNGRSLIDLMYSTENNFMEIITDKTLGFDCFIKNSNKVKNAKISYKDVAELRTSPALKKGIWNAIKMVREISNLFGAPEKIIIEFATEDQAKGKRQKSRSELWDDLVKKNNLKRNKEFEGLFEELKAYPDLDFSNPKLWLYIHQNGKCMYTKKPIDLERLMSDTNNQLYEIDHILPRTFVKDDSINNKVLVIQSANQKKSGDKMPLEIFDNHVLVPFWKMLYENDLISSSKLSKLMKKEFNDLDKEGFIQRQLVETRQIISHVSDFLTEEYPSTTVVPMKANVVSELRRKFDIPKIRQLNDWHHAVDAYLNGFVYQAARVFYPKVNLFEFNFKWEKVREKWRQLGEFTENNKKREFFLFKRMENYVNEYGEGMISKLIFDLDNFKFNYSRKVESTESAFYKQSAFSPKNTTAQYDSDKNKTAIYKEMKNKRGIVVSYTYVKKDQELIGYGVFNETVFEYVNNADVDMNTRALKIVRKAFPKLDIKKAQYLFSINKGDALLVNGHPFLFVSAYERINGKQLEFDIAMQRKIKQALSPYNNMTEQEKVEFYNQFAEKVIEEFRNSIGLQSRDRKVNLIKNLFNNTEKSNDSMTQSILEVLKMTKVSAERSKELKIRWNGQTPNTFIDTKNNAEIQYKSITGLKTTKPKSIFKLAESKNEL

SEQ ID NO: 432 - protein, 1370 aa, Streptococcus agalactiae
  Streptococcus agalactiae 2603V/R
MNKPYSIGLDIGTNSVGWSIITDDYKVPAKKMRVLGNTDKEYIKKNLIGALLFDGGNTAADRRLKRTARRRYTRRRNRILYLQEIFAEEMSKVDDSFFHRLEDSFLVEEDKRGSKYPIFATLQEEKDYHEKFSTIYHLRKELADKKEKADLRLIYIALAHIIKFRGHFLIEDDSFDVRNTDISKQYQDFLEIFNTTFENNDLLSQNVDVEAILTDKISKSAKKDRILAQYPNQKSTGIFAEFLKLIVGNQADFKKYFNLEDKTPLQFAKDSYDEDLENLLGQIGDEFADLFSAAKKLYDSVLLSGILTVIDLSTKAPLSASMIQRYDEHREDLKQLKQFVKASLPEKYQEIFADSSKDGYAGYIEGKTNQEAFYKYLSKLLTKQEDSENFLEKIKNEDFLRKQRTFDNGSIPHQVHLTELKAIIRRQSEYYPFLKENQDRIEKILTFRIPYYIGPLAREKSDFAWMTRKTDDSIRPWNFEDLVDKEKSAEAFIHRMTNNDFYLPEEKVLPKHSLIYEKFTVYNELTKVRYKNEQGETYFFDSNIKQEIFDGVFKEHRKVSKKKLLDFLAKEYEEFRIVDVIGLDKENKAFNASLGTYHDLEKILDKDFLDNPDNESILEDIVQTLTLFEDREMIKKRLENYKDLFTESQLKKLYRRHYTGWGRLSAKLINGIRDKESQKTILDYLIDDGRSNRNFMQLINDDGLSFKSIISKAQAGSHSDNLKEVVGELAGSPAIKKGILQSLKIVDELVKVMGYEPEQIVVEMARENQTTNQGRRNSRQRYKLLDDGVKNLASDLNGNILKEYPTDNQALQNERLFLYYLQNGRDMYTGEALDIDNLSQYDIDHIIPQAFIKDDSIDNRVLVSSAKNRGKSDDVPSLEIVKDCKVFWKKLLDAKLMSQRKYDNLTKAERGGLTSDDKARFIQRQLVETRQITKHVARILDERFNNELDSKGRRIRKVKIVTLKSNLVSNFRKEFGFYKIREVNNYHHAHDAYLNAVVAKAILTKYPQLEPEFVYGDYPKYNSYKTRKSATEKLFFYSNIMNFFKTKVTLADGTVVVKDDIEVNNDTGEIVWDKKKHFATVRKVLSYPQNNIVKKTEIQTGGFSKESILAHGNSDKLIPRKTKDIYLDPKKYGGFDSPIVAYSVLVVADIKKGKAQKLKTVTELLGITIMERSRFEKNPSAFLESKGYLNIRADKLIILPKYSLFELENGRRRLLASAGELQKGNELALPTQFMKFLYLASRYNESKGKPEEIEKKQEFVNQHVSYFDDILQLINDFSKRVILADANLEKINKLYQDNKENISVDELANNIINLFTFTSLGAPAAFKFFDKIVDRKRYTSTKEVLNSTLIHQSITGLYETRIDLGKLGED

SEQ ID NO: 433 - protein, 1377 aa, Streptococcus agalactiae
  Streptococcus agalactiae 515
MNKPYSIGLDIGTNSVGWSIITDDYKVPAKKMRVLGNTDKEYIKKNLIGALLFDGGNTAADRRLKRTARRRYTRRRNRILYLQEIFAEEMSKVDDSFFHRLEDSFLVEEDKRGSKYPIFATMQEEKYYHEKFPTIYHLRKELADKKEKADLRLVYLALAHIIKFRGHFLIEDDRFDVRNTDIQKQYQAFLEIFDTTFENNHLLSQNVDVEAILTDKISKSAKKDRILAQYPNQKSTGIFAEFLKLIVGNQADFKKHFNLEDKTPLQFAKDSYDEDLENLLGQIGDEFADLFSVAKKLYDSVLLSGILTVTDLSTKAPLSASMIQRYDEHHEDLKHLKQFVKASLPENYREVFADSSKDGYAGYIEGKTNQEAFYKYLLKLLTKQEGSEYFLEKIKNEDFLRKQRTFDNGSIPHQVHLTELRAIIRRQSEYYPFLKENQDRIEKILTFRIPYYVGPLAREKSDFAWMTRKTDDSIRPWNFEDLVDKEKSAEAFIHRMTNNDLYLPEEKVLPKHSLIYEKFTVYNELTKVRFLAEGFKDFQFLNRKQKETIFNSLFKEKRKVTEKDIISFLNKVDGYEGIAIKGIEKQFNASLSTYHDLKKILGKDFLDNTDNELILEDIVQTLTLFEDREMIKKCLDIYKDFFTESQLKKLYRRHYTGWGRLSAKLINGIRNKENQKTILDYLIDDGSANRNFMQLINDDDLSFKPIIDKARTGSHSDNLKEVVGELAGSPAIKKGILQSLKIVDELVKVMGYEPEQIVVEMARENQTTAKGLSRSRQRLTTLRESLANLKSNILEEKKPKYVKDQVENHHLSDDRLFLYYLQNGRDMYTKKALDIDNLSQYDIDHIIPQAFIKDDSIDNRVLVSSAKNRGKSDDVPSIEIVKARKMFWKNLLDAKLMSQRKYDNLTKAERGGLTSDDKARFIQRQLVETRQITKHVARILDERFNNEVDNGKKICKVKIVTLKSNLVSNFRKEFGFYKIREVNDYHHAHDAYLNAVVAKAILTKYPQLEPEFVYGMYRQKKLSKIVHEDKEEKYSEATRKMFFYSNLMNMFKRVVRLADGSIVVRPVIETGRYMGKTAWDKKKHFATVRKVLSYPQNNIVKKTEIQTGGFSKESILAHGNSDKLIPRKTKDIYLDPKKYGGFDSPIVAYSVLVVADIKKGKAQKLKTVTELLGITIMERSRFEKNPSAFLESKGYLNIRDDKLMILPKYSLFELENGRRRLLASAGELQKGNELALPTQFMKFLYLASRYNESKGKPEEIEKKQEFVNQHVSYFDDILQLINDFSKRVILADANLEKINKLYQDNKENIPVDELANNIINLFTFTSLGAPAAFKFFDKIVDRKRYTSTKEVLNSTLIHQSITGLYETRIDLGKLGED

SEQ ID NO: 434 - protein, 1370 aa, Streptococcus agalactiae; identical to SEQ ID NO: 432

SEQ ID NO: 435 - protein, 1378 aa, Streptococcus agalactiae
  Streptococcus agalactiae ATCC 13813
MNKPYSIGLDIGTNSVGWSIITDDYKVPAKKMRVLGNTDKEYIKKNLIGALLFDGGNTAADRRLKRTARRRYTRRRNRILYLQEIFAEEMSKVDDSFFHRLEDSFLVEEDKRGSKYPIFATMQEEKYYHEKFPTIYHLRKELADKKEKADLRLIYLALAHIIKFRGHFLIEDDRFDVRNTDIQKQYQAFLEIFDTTFENNDLLSQNVDVEAILTDKISKSAKKDRILARYPNQKSTGIFAEFLKLIVGNQADFKKHFNLEDKTPLQFAKDSYDEDLENLLGQIGDEFADLFSAAKKLYDSVLLSGILTVIDLSTKAPLSASMIQRYDEHHEDLKHLKQFVKASLPENYREVFADSSKDGYAGYIEGKTSQEAFYKYLLKLLTKQEGSEYLLEKIKNEDFLRKQRTFDNGSIPHQVHLTELRAIIRRQSEYYPFLKENLDRIEKILTFRIPYYVGPLAREKSDFAWMTRKTDDSIRPWNFEDLVDKEKSAEAFIHRMTNNDLYLPEEKVLPKHSLIYEKFTVYNELTKVRFLAEGFKDFQFLNRKQKETIFNSLFKEKRKVTEKDIISFLNKVDGYEGIAIKGIEKQFNASLSTYHDLKKILGKDFLDNTDNELILEDIIQTLTLFEDREMIKKRLDIYKDFFTESQLKKLYRRHYTGWGRLSAKLINGIRNKENQKTILDYLIDDGSANRNFMQLIKDAGLSFKPIIDKARTGSHSDNLKEVVGELAGSPAIKKGILQSLKIVDELVKVMGYEPEQIVVEMARENQTTAKGLSRSRQRLTTLRESLGNLKSNILEEKKPKYVKDQVENHHLSDDRLFLYYLQNGKDMYTDDELDIDNLSQYDIDHIIPQAFIKDDSIDNRVLVSSAKNRGKSDDVPSIEIVKARKMFWKNLLDAKLMSQRKYDNLTKAERGGLTSDDKARFIQRQLVETRQITKHVARILDERFNNELDSKGRRIRKVKIVTLKSNLVSNFRKEFGFYKIREVNNYHHAHDAYLNAVVAKAILTKYPQLEPEFVYGLYRRKKLSKIVREDKEEKYSEATRKMFFYSNLMNMFKRVVRLADGSIVVRPVIETGRYMGKTAWDKKKHFATVRKVLSYPQNNIVKKTEIQTGGFSKESILAHGNSDKLIPRKTKDIYLDPKKYGGFDSPIVAYSVLVVADIKKGKAQKLKTVTELLGITIMERSRFEKNTSAFLESKGYLNIRDDKLMILPKYSLFELENGRRRLLASAGELQKGNELALPTQFMKFLYLASRYNESKGKPEEIEKKQEFVNQHVSYFDDILQLINDFSNRVILADANLEKINKLYQDNKENIPVDELANNIINLFTFTSLGAPAAFKFFDKIVDRKRYTSTKEVLNSTLIHQSITGLYETRIDLGKLGEG

SEQ ID NO: 436 - protein, 1370 aa, Streptococcus agalactiae
  Streptococcus agalactiae CJB111
  MOD_RES (117)..(117): Any amino acid
MNKPYSIGLDIGTNSVGWSIITDDYKVPAKKMRVLGNTDKEYIKKNLIGALLFDGGNTAADRRLKRTARRRYTRRRNRILYLQEIFAEEMSKVDDSFFHRLEDSFLVEEDKRGSKYXIFATLQEEKDYHEKFSTIYHLRKELADKKEKADLRLIYIALAHIIKFRGHFLIEDDSFDVRNTDISKQYQDFLEIFNTTFENNDLLSQNVDVEAILTDKISKSAKKDRILAQYPNQKSTGIFAEFLKLIVGNQADFKKYFNLEDKTPLQFAKDSYDEDLENLLGQIGDEFADLFSAAKKLYDSVLLSGILTVIDLSTKAPLSASMIQRYDEHREDLKQLKQFVKASLPEKYQEIFADSSKDGYAGYIEGKTNQEAFYKYLSKLLTKQEDSENFLEKIKNEDFLRKQRTFDNGSIPHQVHLTELKAIIRRQSEYYPFLKENQDRIEKILTFRIPYYIGPLAREKSDFAWMTRKTDDSIRPWNFEDLVDKEKSAEAFIHRMTNNDFYLPEEKVLPKHSLIYEKFTVYNELTKVRYKNEQGETYFFDSNIKQEIFDGVFKEHRKVSKKKLLDFLAKEYEEFRIVDVIGLDKENKAFNASLGTYHDLEKILDKDFLDNPDNESILEDIVQTLTLFEDREMIKKRLENYKDLFTESQLKKLYRRHYTGWGRLSAKLINGIRDKESQKTILDYLIDDGRSNRNFMQLINDDGLSFKSIISKAQAGSHSDNLKEVVGELAGSPAIKKGILQSLKIVDELVKVMGYEPEQIVVEMARENQTTNQGRRNSRQRYKLLDDGVKNLASDLNGNILKEYPTDNQALQNERLFLYYLQNGRDMYTGEALDIDNLSQYDIDHIIPQAFIKDDSIDNRVLVSSAKNRGKSDDVPSLEIVKDCKVFWKKLLDAKLMSQRKYDNLTKAERGGLTSDDKARFIQRQLVETRQITKHVARILDERFNNELDSKGRRIRKVKIVTLKSNLVSNFRKEFGFYKIREVNNYHHAHDAYLNAVVAKAILTKYPQLEPEFVYGDYPKYNSYKTRKSATEKLFFYSNIMNFFKTKVTLADGTVVVKDDIEVNNDTGEIVWDKKKHFATVRKVLSYPQNNIVKKTEIQTGGFSKESILAHGNSDKLIPRKTKDIYLDPKKYGGFDSPIVAYSVLVVADIKKGKAQKLKTVTELLGITIMERSRFEKNPSAFLESKGYLNIRADKLIILPKYSLFELENGRRRLLASAGELQKGNELALPTQFMKFLYLASRYNESKGKPEEIEKKQEFVNQHVSYFDDILQLINDFSKRVILADANLEKINKLYQDNKENISVDELANNIINLFTFTSLGAPAAFKFFDKIVDRKRYTSTKEVLNSTLIHQSITGLYETRIDLGKLGED

SEQ ID NO: 437 - protein, 1370 aa, Streptococcus agalactiae
  Streptococcus agalactiae COH1
MNKPYSIGLDIGTNSVGYSVVTDDYKVPAKKMRVLGNTDKEYIKKNLIGALLFDGGNTASDRRLKRTARRRYTRRRNRILYLQEIFAEEMSKVDDSFFHRLEDSFLVEDDKRGSKYPIFATMQEEKDYHEKFPTIYHLRKELADKKEKANLRLVYLALAHIIKFRGHFLIEDDSFDVRNTDIQRQYQAFLEIFDTTFENNHLLSQNIDVEGILTDKISKSAKKDRILAQYPNQKSTGIFAEFLKLIVGNQADFKKHFNLEDKTPLQFAKDSYDEDLENLLGQIGDEFADLFSVAKKLYDSVLLSGILTVTDLSTKAPLSASMIQRYDEHREDLKQLKQFVKASLPEKYQEIFTDSSKDGYAGYIEGKTNQGAFYKYLSKLLTKQEGSEYFLEKIKNEDFLRKQRTFDNGSIPHQVHLTELKAIIRRQSEYYPFLKENLDRIEKILTFRIPYYVGPLAREKSDFAWMTRKTDDSIRPWNFEELVDKEASAEAFIHRMTNNDLYLPEEKVLPKHSLIYEKFTVYNELTKVRYKNEQGETYFFDSNIKQEIFDGVFKEHRKVSKKKLLDFLAKEYEEFRIVDVIGLDKENKAFNASLGTYHDLKKILDKDFLDNPDNESILEDIVQTLTLFEDREMIKKRLENYKDLFTESQLKKLYRRHYTGWGRLSAKLINGIRDKESQKTILDYLISDGRANRNFMQLIHDDGLSFKPIIDKAQAGSHSDNLKEVVGELAGSPAIKKGILQSLKIVDELVKVMGYEPEQVVVEMARENQTTNQGRRNTRQRYKLLEEGVKNLASDLNGNILKEYPTDNQALQNERLFLYYLQNGRDMYTGEALDIDNLSQYDIDHIVPQAFIKDDSIDNRVLVSSAKNRGKSDNVPSIDIVKARKAFWKKLLDAKLMSQRKYDNLTKAERGGLTSDDKARFIQRQLVETRQITKHVARILDERFNNELDSKGRRIRKVKIVTLKSNLVSNFRKEFGFYKIREVNDYHHAHDAYLNAVVAKAILTKYPQLEPEFVYGDYPKYNSYKTRKSATEKLFFYSNIMNFFKTKVTLADGTVVVKDDIEVNNDTGEIVWDKKKHFATVRKVLSYPQVNIVKKTEIQTGGFSKESILAHGNSDKLIPRKTKDIYLDPKKYGGFDSPIVAYSVLVVADIKKGKAQKLKTVTELLGITIMERFRFEKNPSAFLESKGYLNIRDDKLMILPKYSLFELENGRRRLLASAGELQKGNELALPTQYMKFLYLASRYNELKGKPEEIEQKQEFVVQHVSYFDDILQIINDFSNRVILADANLEKINKLYQDNKENISVDELANNIINLFTFTSLGAPAAFKFFDKIVDRKRYTSTKEVLNSTLIHQSITGLYETRIDLGKLGED

SEQ ID NO: 438 - protein, 1370 aa, Streptococcus agalactiae
  Streptococcus agalactiae FSL S3-026
MNKPYSIGLDIGTNSVGWSIITDDYKVPAKKMRVLGNTDKEYIKKNLIGALLFDGGNTAADRRLKRTARRRYTRRRNRILYLQEIFAEEMSKVDDSFFHRLEDSFLVEEDKRGSKYPIFATMQEEKYYHEKFPTIYHLRKELADKKEKADLRLIYLALAHIIKFRGHFLIEDDRFDVRNTDIQKQYQAFLEIFDTTFENNDLLSQNVDVEAILTDKISKSAKKDRILARYPNQKSTGIFAEFLKLIVGNQADFKKHFNLEDKTPLQFAKDSYDEDLENLLGQIGDEFADLFSAAKKLYDSVLLSGILTVTDLSTKAPLSASMIQRYDEHREDLKQLKQFVKASLPEKYQEIFADSSKDGYAGYIEGKTNQEAFYKYLSKLLTKQEGSEYLLEKIKNEDFLRKQRTFDNGSIPHQVHLTELRAIIRRQSEYYPFLKENLDRIEKILTFRIPYYVGPLAREKSDFAWMTRKTDDSIRPWNFEDLVDKEKSAEAFIHRMTNNDLYLPEEKVLPKHSLIYEKFTVYNELTKVRFLAEGFKDFQFLNRKQKETIFNSLFKEKRKVTEKDIISFLNKVDGYEGIAIKGIEKQFNASLSTYHDLKKILGKDFLDNTDNELILEDIVQTLTLFEDREMIRKRLDIYKDFFTESQLKKLYRRHYTGWGRLSAKLINGIRNKENQKTILDYLIDDGSANRNFMQLIKDAGLSFKPIIDKARTGSHSDNLKEVVGELAGSPAIKKGILQSLKIVDELVKVMGYEPEQIVVEMARENQTTAKGLSRLRQRLTTLRESLANLKSNILEEKKPKYVKDQVENHHLSDDRLFLYYLQNGKDMYTDDELDIDNLSQYDIDHIIPQAFIKDDSIDNRVLVSSAKNRGKSDDVPSVEIVKDCKVFWKKLLDAKLMSQRKYDNLTKAERGGLTSDDKARFIQRQLVETRQITKHVARILDERFNNELDSKGRRIRKVKIVTLKSNLVSNFRKEFGFYKIREVNNYHHAHDAYLNAVVAKAILTKYPQLEPEFVYGDYPKYNSYKTRKSATEKLFFYSNIMNFFKTKVTLADGTVVVKDDIEVNNDTGEIVWDKKKHFATVRKVLSYPQVNIVKKTEIQTGGFSKESILAHGNSDKLIPRKTKDIYLDPKKYGGFDSPIVAYSVLVVADIKKGKAQKLKTVTELLGITIMERSRFEKNPSAFLESKGYLNIRDDKLMILPKYSLFELENGRRRLLASADELQKGNELALPTQFMKFLYLASRYNELKGKPEEIEQKQEFVVQHVSYFDDILQIINDFSNRVILADANLEKINKLYQDNKENIPVDELANNIINLFTFTSLGAPAAFKFFDKIVDRKRYTSTKEVLNSTLIHQSITGLYETRIDLGKLGED

SEQ ID NO: 439 - protein, 1370 aa, Streptococcus agalactiae
  Streptococcus agalactiae GB00112
MNKPYSIGLDIGTNSVGYSVVTDDYKVPAKKMRVLGNTDKEYIKKNLIGALLFDGGNTASDRRLKRTARRRYTRRRNRILYLQEIFAEEMSKVDDSFFHRLEDSFLVEDDKRGSKYPIFATMQEEKDYHEKFPTIYHLRKELADKKEKADLRLVYLALAHIIKFRGHFLIEDDSFDVRNTDIQRQYQAFLEIFDTTFENNHLLSQNIDVEGILTDKISKSAKKDRILAQYPNQKSTGIFAEFLKLIVGNQADFKKHFNLEDKTPLQFAKDSYDEDLENLLGQIGDEFADLFSVAKKLYDSVLLSGILTVTDLSTKAPLSASMIQRYDEHREDLKQLKQFVKASLPEKYQEIFTDSSKDGYAGYIEGKTNQGAFYKYLSKLLTKQEGSEYFLEKIKNEDFLRKQRTFDNGSIPHQVHLTELKAIIRRQSEYYPFLKENLDRIEKILTFRIPYYVGPLAREKSDFAWMTRKTDDSIRPWNFEELVDKEASAEAFIHRMTNNDLYLPEEKVLPKHSLIYEKFTVYNELTKVRYKNEQGETYFFDSNIKQEIFDGVFKEHRKVSKKKLLDFLAKEYEEFRIVDVIGLDKENKAFNASLGTYHDLKKILDKDFLDNPDNESILEDIVQTLTLFEDREMIKKRLENYKDLFTESQLKKLYRRHYTGWGRLSAKLINGIRDKESQKTILDYLISDGRANRNFMQLIHDDGLSFKPIIDKAQAGSHSDNLKEVVGELAGSPAIKKGILQSLKIVDELVKVMGYEPEQVVVEMARENQTTNQGRRNTRQRYKLLEEGVKNLASDLNGNILKEYPTDNQALQNERLFLYYLQNGRDMYTGEALDIDNLSQYDIDHIVPQAFIKDDSIDNRVLVSSAKNRGKSDNVPSIDIVKARKAFWKKLLDAKLMSQRKYDNLTKAERGGLTSDDKARFIQRQLVETRQITKHVARILDERFNNELDSKGRRIRKVKIVTLKSNLVSNFRKEFGFYKIREVNDYHHAHDAYLNAVVAKAILTKYPQLEPEFVYGDYPKYNSYKTRKSATEKLFFYSNIMNFFKTKVTLADGTVVVKDDIEVNNDTGEIVWDKKKHFATVRKVLSYPQVNIVKKTEIQTGGFSKESILAHGNSDKLIPRKTKDIYLDPKKYGGFDSPIVAYSVLVVADIKKGKAQKLKTVTELLGITIMERFRFEKNPSAFLESKGYLNIRDDKLMILPKYSLFELENGRRRLLASAGELQKGNELALPTQYMKFLYLASRYNELKGKPEEIEQKQEFVVQHVSYFDDILQIINDFSNRVILADANLEKINKLYQDNKENISVDELANNIINLFTFTSLGAPAAFKFFDKIVDRKRYTSTKEVLNSTLIHQSITGLYETRIDLGKLGED

SEQ ID NO: 440 - protein, 1370 aa, Streptococcus agalactiae
  Streptococcus agalactiae H36B
  MOD_RES (9)..(9): Any amino acid
MNKPYSIGXDIGTNSVGWSIITDDYKVPAKKMRVLGNTDKEYIKKNLIGALLFDGGNTAADRRLKRTARRRYTRRRNRILYLQEIFAEEMSKVDDSFFHRLEDSFLVEEDKRGSKYPIFATLQEEKDYHEKFSTIYHLRKELADKKEKADLRLIYIALAHIIKFRGHFLIEDDSFDVRNTDISKQYQDFLEIFNTTFENNDLLSQNVDVEAILTDKISKSAKKDRILAQYPNQKSTGIFAEFLKLIVGNQADFKKYFNLEDKTPLQFAKDSYDEDLENLLGQIGDEFADLFSAAKKLYDSVLLSGILTVIDLSTKAPLSASMIQRYDEHREDLKQLKQFVKASLPEKYQEIFADSSKDGYAGYIEGKTNQEAFYKYLSKLLTKQEDSENFLEKIKNEDFLRKQRTFDNGSIPHQVHLTELKAIIRRQSEYYPFLKENQDRIEKILTFRIPYYIGPLAREKSDFAWMTRKTDDSIRPWNFEDLVDKEKSAEAFIHRMTNNDFYLPEEKVLPKHSLIYEKFTVYNELTKVRYKNEQGETYFFDSNIKQEIFDGVFKEHRKVSKKKLLDFLAKEYEEFRIVDVIGLDKENKAFNASLGTYHDLEKILDKDFLDNPDNESILEDIVQTLTLFEDREMIKKRLENYKDLFTESQLKKLYRRHYTGWGRLSAKLINGIRDKESQKTILDYLIDDGRSNRNFMQLINDDGLSFKSIISKAQAGSHSDNLKEVVGELAGSPAIKKGILQSLKIVDELVKVMGYEPEQIVVEMARENQTTNQGRRNSRQRYKLLDDGVKNLASDLNGNILKEYPTDNQALQNERLFLYYLQNGRDMYTGEALDIDNLSQYDIDHIIPQAFIKDDSIDNRVLVSSAKNRGKSDDVPSLEIVKDCKVFWKKLLDAKLMSQRKYDNLTKAERGGLTSDDKARFIQRQLVETRQITKHVARILDERFNNELDSKGRRIRKVKIVTLKSNLVSNFRKEFGFYKIREVNNYHHAHDAYLNAVVAKAILTKYPQLEPEFVYGDYPKYNSYKTRKSATEKLFFYSNIMNFFKTKVTLADGTVVVKDDIEVNNDTGEIVWDKKKHFATVRKVLSYPQNNIVKKTEIQTGGFSKESILAHGNSDKLIPRKTKDIYLDPKKYGGFDSPIVAYSVLVVADIKKGKAQKLKTVTELLGITIMERSRFEKNPSAFLESKGYLNIRADKLIILPKYSLFELENGRRRLLASAGELQKGNELALPTQFMKFLYLASRYNESKGKPEEIEKKQEFVNQHVSYFDDILQLINDFSKRVILADANLEKINKLYQDNKENISVDELANNIINLFTFTSLGAPAAFKFFDKIVDRKRYTSTKEVLNSTLIHQSITGLYETRIDLGKLGED

SEQ ID NO: 441 - protein, 1377 aa, Streptococcus agalactiae
MNKPYSIGLDIGTNSVGWSIITDDYKVPAKKMRVLGNTDKEYIKKNLIGALLFDGGNTAADRRLKRTARRRYTRRRNRILYLQEIFAEEMSKVDDSFFHRLEDSFLVEEDKRGSKYPIFATMQEEKYYHEKFPTIYHLRKELADKKEKADLRLVYLALAHIIKFRGHFLIEDDRFDVRNTDIQKQYQAFLEIFDTTFENNHLLSQNVDVEAILTDKISKSAKKDRILAQYPNQKSTGIFAEFLKLIVGNQADFKKHFNLEDKTPLQFAKDSYDEDLENLLGQIGDEFADLFSVAKKLYDSVLLSGILTVTDLSTKAPLSASMIQRYDEHHEDLKHLKQFVKASLPENYREVFADSSKDGYAGYIEGKTNQEAFYKYLLKLLTKQEGSEYFLEKIKNEDFLRKQRTFDNGSIPHQVHLTELRAIIRRQSEYYPFLKENQDRIEKILTFRIPYYVGPLAREKSDFAWMTRKTDDSIRPWNFEDLVDKEKSAEAFIHRMTNNDLYLPEEKVLPKHSLIYEKFTVYNELTKVRFLAEGFKDFQFLNRKQKETIFNSLFKEKRKVTEKDIISFLNKVDGYEGIAIKGIEKQFNASLSTYHDLKKILGKDFLDNTDNELILEDIVQTLTLFEDREMIKKCLDIYKDFFTESQLKKLYRRHYTGWGRLSAKLINGIRNKENQKTILDYLIDDGSANRNFMQLINDDDLSFKPIIDKARTGSHSDNLKEVVGELAGSPAIKKGILQSLKIVDELVKVMGYEPEQIVVEMARENQTTAKGLSRSRQRLTTLRESLANLKSNILEEKKPKYVKDQVENHHLSDDRLFLYYLQNGRDMYTKKALDIDNLSQYDIDHIIPQAFIKDDSIDNRVLVSSAKNRGKSDDVPSIEIVKARKMFWKNLLDAKLMSQRKYDNLTKAERGGLTSDDKARFIQRQLVETRQITKHVARILDERFNNEVDNGKKICKVKIVTLKSNLVSNFRKEFGFYKIREVNDYHHAHDAYLNAVVAKAILTKYPQLEPEFVYGMYRQKKLSKIVHEDKEEKYSEATRKMFFYSNLMNMFKRVVRLADGSIVVRPVIETGRYMRKTAWDKKKHFATVRKVLSYPQNNIVKKTEIQTGGFSKESILAHGNSDKLIPRKTKDIYLDPKKYGGFDSPIVAYSVLVVADIKKGKAQKLKTVTELLGITIMERSRFEKNPSAFLESKGYLNIRDDKLMILPKYSLFELENGRRRLLASAGELQKGNELALPTQFMKFLYLASRYNESKGKPEEIEKKQEFVNQHVSYFDDILQLINDFSKRVILADANLEKINKLYQDNKENIPVDELANNIINLFTFTSLGAPAAFKFFDKIVDRKRYTSTKEVLNSTLIHQSITGLYETRIDLGKLGED

SEQ ID NO: 442 - protein, 1370 aa, Streptococcus agalactiae
MNKPYSIGLDIGTNSVGWSIITDDYKVPAKKMRVLGNTDKEYIKKNLIGALLFDGGNTAADRRLKRTARRRYTRRRNRILYLQEIFAEEMSKVDDSFFHRLEDSFLVEEDKRGSKYPIFATMQEEKDYHEKFPTIYHLRKELADKKEKADLRLVYLALAHIIKFRGHFLIEDDRFDVRNTDIQKQYQAFLEIFDTSFENNHLLSQNVDVEAILTDKISKSAKKDRILAQYPNQKSTGIFAEFLKLIVGNQADFKKHFNLEDKTPLQFAKDSYDEDLENLLGQIGDEFADLFSAAKKLYDSVLLSGILTVTDLSTKAPLSASMIQRYDEHREDLKQLKQFVKASLPEKYQEIFADSSKDGYAGYIEGKTNQEAFYKYLSKLLTKQEDSEYFLEKIKNEDFLRKQRTFDNGSIPHQVHLTELKAIIRRQSEYYPFLKENQDKIEKILTFRIPYYVGPLARGNSDFAWMTRKTDDSIRPWNFEDLVDKEKSAEAFIHRMTNNDLYLPEEKVLPKHSLIYEKFTVYNELTKVRYKNEQGETYFFDSNVKQEIFDGVFKEHRKVSKKQLLDFLAKEFEEFRIVDVTGLDKENKAFNASLGTYHDLKKILDKDFLDNPDNESILEDIVQTITLFEDREMIKKRLENYKDLFTESQLKKLYRRHYTGWGRLSAKLINGIRDRESQKTILDYLISDGRANRNFMQLINDDGLSFKSIISKAQSGSHSDNLKEVVGELAGSPAIKKGILQSLKIVDELVKVMGYEPEQIVVEMARENQTTNQGRRNSRQRYKLLEDGVKNLASDLNGDILKEYPTDNQALQNERLFLYYLQNGRDMYTGEALDIDNLSQYDIDHIVPQAFIKDDSIDNRVLVSSAKNRGKSDDVPSIDIVKARKAFWKKLLDAKLISQRKYDNLTKAERGGLTPDDKAGFIQRQLVETRQITKHVARILDERFNNKVDDNNKPIRKVKIVTLKSNLVSNFRKEFGFYKIREVNNYHHAHDAYLNAVVAKAILTKYPQLEPEFVYGDYPKYNSYKTRKSATEKLFFYSNIMNFFKTKVTLADETVVVKDDIEVNNETGEIAWDKKKHFATVRKVLSYPQVNIVKKTEVQTGGFSKESILAHSNSDKLIPRKTKDIYLDPKKYGGFDSPIVAYSVLVLADIKKGKAQKLKTVKELIGITIMERERFEKNPSAFLESKGYLNIRTDKLIILPKYSLFELENGRRRLLASAGELQKGNELALPTQYMKFLYLASRYNESKGKPEEIEKKQEFVNQHVSYFDDILQLINDFSKRVILADANLEKINKLYSDNKDNTPVDELAKNIINLFTFTSLGAPAAFKFFDKSVDRKRYTSTKEVLDSTLIHQSITGLYETRIDLGKLGED

SEQ ID NO: 443 - protein, 1370 aa, Streptococcus agalactiae
  Streptococcus agalactiae STIR-CD-17
MNKPYSIGLDIGTNSVGWSIITDDYKVPAKKMRVLGNTDKEYIKKNLIGALLFDGGNTAADRRLKRTARRRYTRRRNRILYLQEIFAEEMSKVDDSFFHRLEDSFLVEEDKRGSKYPIFATMQEEKDYHEKFPTIYHLRKELADKKEKADLRLVYLALAHIIKFRGHFLIEDDRFDVRNTDIQKQYQAFLEIFDTSFENNHLLSQNVDVEAILTDKISKSAKKDRILAQYPNQKSTGIFAEFLKLIVGNQADFKKHFNLEDKTPLQFAKDSYDEDLENLLGQIGDEFADLFSAAKKLYDSVLLSGILTVTDLSTKAPLSAYMIQRYDEHREDLKQLKQFVKASLPEKYQEIFADSSKDGYAGYIEGKTNQEAFYKYLSKLLTKQEDSEYFLEKIKNEDFLRKQRTFDNGSIPHQVHLTELKAIIRRQSEYYPFLKENQDKIEKILTFRIPYYVGPLARGNSDFAWMTRKTDDSIRPWNFEDLVDKEKSAEAFIHRMTNNDLYLPEEKVLPKHSLIYEKFTVYNELTKVRYKNEQGETYFFDSNVKQEIFDGVFKEHRKVSKKQLLDFLAKEFEEFRIVDVTGLDKENKAFNASLGTYHDLKKILDKDFLDNPDNESILEDIVQTITLFEDREMIKKRLENYKDLFTESQLKKLYRRHYTGWGRLSAKLINGIRDRESQKTILDYLISDGRANRNFMQLINDDGLSFKSIISKAQSGSHSDNLKEVVGELAGSPAIKKGILQSLKIVDELVKVMGYEPEQIVVEMARENQTTNQGRRNSRQRYKLLEDGVKNLASDLNGDILKEYPTDNQALQNERLFLYYLQNGRDMYTGEALDIDNLSQYDIDHIVPQAFIKDDSIDNRVLVSSAKNRGKSDDVPSIDIVKARKAFWKKLLDAKLISQRKYDNLTKAERGGLTPDDKAGFIQRQLVETRQITKHVARILDERFNNKVDDNNKPIRKVKIVTLKSNLVSNFRKEFGFYKIREVNNYHHAHDAYLNAVVAKAILTKYPQLEPEFVYGDYPKYNSYKTRKSATEKLFFYSNIMNFFKTKVTLADETVVVKDDIEVNNETGEIAWDKKKHFATVRKVLSYPQVNIVKKTEVQTGGFSKESILAHSNSDKLIPRKTKDIYLDPKKYGGFDSPIVAYSVLVLADIKKGKAQKLKTVKELIGITIMERERFEKNPSAFLESKGYLNIRTDKLIILPKYSLFELENGRRRLLASAGELQKGNELALPTQYMKFLYLASRYNESKGKPEEIEKKQEFVNQHISYFDDILQLINDFSKRVILADANLEKINKLYSDNKDNTPVDELAKNIINLFTFTSLGAPAAFKFFDKSVDRKRYTSTKEVLDSTLIHQSITGLYETRIDLGKLGED

SEQ ID NO: 444 - protein, 1125 aa, Streptococcus anginosus
  Streptococcus anginosus 1_2_62CV
MNGLVLGLDIGIASVGVGILNKETGEIIHANSRIFPAATADSNVERRGFRQGRRLGRRKKHRSARLNNLFEEFGFITDFSAIPLNLNPYALRVKGLSEELTNEELFIALKNIIKRRGISYLDDASEDGETASNEYGKAVEENRKLLADKTPGQIQLERFEKYGQVRGDFTVVENGENHRLINVFSTSAYKKEAERILRRQQEFNVRISDEFIEAYLTILTGKRKYYHGPGNEKSRTDYGRFRTDGTTLDNIFGILIGKCTFYPDEYRAAKASYTAQEFNLLNDLNNLTVPTETKKLSPEQKRQIVEYARTAKTLGTPTLLKYIAKLVDGSIDDIKGYRIDKSDKPEMHTFDAYRKMRTLDLVNIDALSRETLDDLAHILTLNTESEGILEALNSKMPSTFTKEQIDELIQFRKKNSAVFGKGWHNFSLKLMNELISELYETSEEQMTILTRLGKQRSREISKRTKYIDEKELTEEIYNPVVAKSVRQAIKIINEATKRYGIFDNIVIEMARENNEEDAKKDYIKRQKANQDEKNASMEKAAFQYNGKKELPDSIFHGHKELATKIRLWHQQGERCLYTGKNISIRDLIHNPHQYEIDHILPLSLSFDDGLANKVLVLATANQEKGQRTPFQAIDSMDDAWSYREFKQYVRNSKSLSNKKKDYLLTEEDISKIEVKQKFIERNLVDTRYSSRVVLNTLQEFYKTNDFDTKISVVRGQFTSQLRRKWKIEKSRDTYHHHAVDALIIAASSQLRLWKKQNNPLISYKEGQFVDPETGEILSLTDDEYKELVFRPPYDYFVDTLKSKSFEDSILFSYQVDSKYNRKISDATIYGTRKAQLGKDKQEETYVLGKIKDIYSQKGYEDFIKRYNKDETQFLIYHKDPQTFEKVIEEILKTYPDKELNEKGKEIPCNPFEKYRQENGPIRKYSKKGKGPEIKSLKYYDNKLGNHIDITPVNSQNQVVLQSLKPWRTDVYFNPRTSKYELMGLKYSDLRFEKGSGSYGISPEKYNKVKAKEGVNEDSEFKFTLYKNDLILIKDTETGEQQLFRYGSRNDTSKHYVELKPYEKAKFEGNQQLMNLLGTVAKGGQCLKGINKPNLSIYKVKTDVLGNKYFIKKEGDQPQLNFKKKF

SEQ ID NO: 445 - protein, 1345 aa, Streptococcus anginosus
  Streptococcus anginosus F0211
MDQKYSIGLDIGTNSVGWAVVTDDYKVPAKKMKVLGNTDKQSIKKNLLGALLFDSGETAEATRLKRTARRRYTRRRNRLRYLQEIFAEEMNKVDENFFQRLDDSFLVDEDKRGERHPIFGNIAAEVKYHDDFPTIYHLRKHLADISQKADLRLVYLALAHMIKFRGHFLIEGQLKAENTNVQALFKDFVEVYDKTVEESHLSEMTVDALSILTEKVSKSRRLENLIAHYPAEKKNTLFGNLIALSLGLQPNFKTNFQLSEDAKLQFSKDTYEEDLEGLLGEIGDEYADLFASAKNLYDAILLSGILTVDDNSTKAPLSASMVKRYEEHQKDLKKLKDFIKVNAPDQYNAIFKDKNKKGYAGYIENGVKQDEFYKYLKGILLQINGSGDFLDKIDREDFLRKQRTFDNGSIPHQIHLQEMHAILRRQEEHYPFLKENQDKIEKILTFRIPYYVGPLARKGSRFAWAEYKADEKITPWNFDDILDKEKSAEKFITRMTLNDLYLPEEKVLPKHSLLYETFTVYNELTKVKYVNEQGEAKFFDANMKQEIFDHVFKENRKVTKDKLLNYLNKEFEEFRIVNLTGLDKENKAFNSSLGTYHDLRKILDKSFLDDKANEKTIEDIIQTLTLFEDREMIRQRLQKYSDIFTKAQLKKLERRHYTGWGRLSYKLINGIRNKENKKTILDYLIDDGYANRNFMQLINDDALSFKEEIARAQIIGDVDDIANVVHDLPGSPAIKKGILQSVKIVDELVKVMGHNPANIIIEMARENQMTDKGRRNSQQRLKLLQDSLKNLDNPVNIKNVENQQLQNDRLFLYYIQNGKDMYTGETLDINNLSQYDIDHIIPQAFIKDNSLDNRVLTRSDKNRGKSDDVPSIEVVHEMKSFWSKLLSVKLITQRKFDNLTKAERGGLTEEDKAGFIKRQLVETRQITKHVAQILDERFNTEFDGNKRRIRNVKIITLKSNLVSNFRKEFELYKVREINDYHHAHDAYLNAVVGNALLLKYPQLEPEFVYGEYPKYNSYRSRKSATEKFLFYSNILRFFKKEDIQTNEDGEIAWNKEKHIKILRKVLSYPQVNIVKKTEEQTGGFSKESILPKGESDKLIPRKTKNSYWNPKKYGGFDSPVVAYSILVFADVEKGKSKKLRKVQDMVGITIMEKKRFEKHPVDFLEQRGYRNVRLEKIIKLPKYSLFELENKRRRLLASARELQKGNELVIPQRFTTLLYHSYQIEKNYEPEHREYVEKHKDEFKELLEYISVFSRKYVLADNNLTKIEMLFSKNKDAEVSSLAKSFISLLTFTAFGAPAAFNFFGENIDRKRYTSVTECLNATLIHQSITGLYETRIDLSKLGED

SEQ ID NO: 446 - protein, 1386 aa, Streptococcus anginosus
  Streptococcus anginosus SK1138
MNQKYSIGLDIGTNSVGWAVITDDYKVPAKKMKVLGNTDKQSIKKNLLGALLFDSGETAEATRLKRTARRRYTRRRNRLRYLQEIFAEEMMQVDESFFQRLDDSFLVDEDKRGERHPIFGNIAAEVKYHDEFPTIYHLRKHLADISQKADLRLVYLALAHMIKFRGHFLIEGQLKAENTNVQALFKDFVEVYDKTVEESHLSEITVDALSILTEKVSKSRRLENLIAHYPAEKKNTLFGNLIALFLGLQPNFKTNFQLSEDAKLQFSKDTYEEDLEGLLGEVGDEYADLFASAKNLYDAILLSGILTVDDNSTKAPLSASMVKRYEEHQKDLKKFEDFIKVNALDQYNAIFKDKNKKGYAGYIESGVKQDEFYKYLKGILLQINGSGDFLDKIDREDFLRKQRTFDNGSIPHQIHLQEMHAILRRQGEHYPFLKENQDKIEKILTFRIPYYVGPLARKGSRFAWAEYKADEKITPWNFDDILDKEKSAEKFITRMTLNDLYLPEEKVLPKHSLLYETFTVYNELTKVKYVNEQGEAKFFDANMKQEIFDHVFKENRKVTKDKLLNYLNKEFEEFRIVNLTGLDKENKVFNSSLGTYHDLRKILNKSFLDNKENAQIIEDIIQTLTLFEDREMIRQRLQKYSDIFTKAQLKKLERRHYTGWGRLSYKLINGIRNKENKKTILDYLIDDGYANRNFMQLINDDALSFKEEIAKAQIIGDVDDIANVVHDLPGSPAIKKGILQSVKIVDELVKVMGHNPANIIIEMARENQTTDRGRRNSQQRLKLLQDSLKNLDNPVNIKNVENQQLQNDRLFLYYIQNGKDMYTGETLDINNLSQYDIDHIIPQAYIKDDSFDNRVLTSSSENRGKSDNVPSIEVVCARKADWMRLRKAGLISQRKFDNLTKAERGGLTENDKAGFIKRQLVETRQITKHVAQVLDARFNAKHDENKKVIRDVKIITLKSNLVSQFRKDFKFYKVREINDYHHAHDAYLNAVIGTALLKKYPKLASEFVYGEFKKYDVRKFIAKSDKEIGKATAKYFFYSNLMNFFKKEVKFADGTVVERPDIETSEDGEIAWNKQTDFKIVRKVLSYPQVNIVKKTEVQTHGLDRGKPRGLFNANPSPKPKPDSSENLVGVKRNLDPKKYGGYAGISNSYAVLVKAIIEKGVKKKETMVLEFQGISILDRITFEKDKRAFLLGKGYKDIKKIIELPKYSLFELKDGSRRMLASILSTNNKRGEIHKGNELFVPQKFTTLLYHAKRINNPINKDHIEYVKKHRDDFKELLNYVLEFNEKYVGATKNGERLKEAVADFDSKSNEEICTSFLGAVNSKNAGLFELTSLGSASDFEFLGVKIPRYRDYTPSSLLKDSTLIHQSITGLYETRIDLSKLGED

SEQ ID NO: 447 - protein, 1396 aa, Streptococcus anginosus
  Streptococcus anginosus SK52 = DSM 20563
MTKPYSIGLDIGTNSVGWAVITDDYKVPAKKMKVLGNTNRDYIKKNLLGALLFDGGETAEGRRLKRTARRRYTRRKNRLRYLQEIFAEEMMQVDESFFQRLDDSFLVEEDKQGSKYPIFGTLKEEKEYHKKFKTIYHLREELANSKEKADLRLVYLALAHMIKFRGHFLYEGDLKAENTDVQALFKDFVEEYDKTIEESHLSEITVDALSILTEKVSKSSRLENLIAHYPTEKKNTLFGNLIALSLGLQANFKTNFQLSEDAKLQFSKDTYEEDLEGLLGEVGDEYADLFVSAKNLYDAILLSGILTVDDNSTKAPLSASMVKRYKEHKEELAAFKRFIKEKLPKKYEEIFKDDTKNGYAGYVGADKKLRKRSGKLATEEEFYKYVKGILNKVEGADYFLDKIDREDFLRKQRTFDNGSIPHQIHLQEMHAILRRQGEHYPFLKENQDKIEKILTFRIPYYVGPLARKGSRFAWAEYKADEKITPWNFDDILDKEKSAEKFITRMTLNDLYLPEEKVLPKHSPLYETFTVYNELTKVKYVNEQGEAKFFDTNMKQEIFDHVFKENRKVTKDKLLNYLNKEFEEFRIVNLTGLDKENKAFNASLGTYHDLRKILDKSFLDDKVNEKIIEDIIQTLTLFEDREMIRQRLQKYSDIFTTQQLKELERRHYTGWGRLSYKLINGIRNKENKKTILDYLIDDGYANRNFMQLINDDALSFKEEIARAQIIGDVDDIANVVHDLPGSPAIKKGILQSVKIVDELVKVMGHNPTNIIIEMARENQTTDKGRRNSQQRLKLLQDSLKNLDNPVNIKNVENQQLQNDRLFLYYIQNGKDMYTGETLDINNLSQYDIDHIIPQAFIKDNSLDNRVLTRSDKNRGKSDDVPSIEVVHEMKSFWSKLLSVKLITQRKFDNLTKAERGGLTENDKAGFIKRQLVETRQITKHVAQVLDARFNAKHDENKKVIRDVKIITLKSNLVSQFRKDFKFYKVREINDYHHAHDAYLNAVIGTALLKKYPKLASEFVYGEFKKYDVRKFIAKSDKEIGKATAKYFFYSNLMNFFKKEVKFADGTVVERPDIETSEDGEIAWNKQTDFKIVRKVLSYPQVNIVKKTEVQTHGLDRGKPRGLFNANPSPKPKPDSSENLVGIKRNLDPKKYGGYAGISNSYAVLVKAIIEKGVKKKETMVLEFQGISILDRITFEKDKRAFLLGKGYKDIKKIIELPKYSLFELKDGSRRMLASILSTNNKRGEIHKGNELFVPQKFTTLLYHAKRINNPINKDHIEYVKKHRDDFKELLNYVLEFNEKYVGATKNGERLKEAVADFDSKSNEEICTSFLGAVNSKNAGLFELTSLGSASDFEFLGVKIPRYRDYTPSSLLKDSILIHQSITGLYETRIDLSKLGED

SEQ ID NO: 448 - protein, 1373 aa, Streptococcus bovis
  Streptococcus bovis ATCC 700338
MTKKNYSIGLDIGTNSVGWAVITDDYKVPAKKMKVLGNTDKKYIKKNLLGALLFDSGETAEATRLKRTARRRYTRRKNRLRYLQEIFAEEMTKVDESFFQRLDESFLRWDDDNKKLGRYPIFGNKADVVKYHQEFPTIYHLRKHLADSSEKADLRLVYLALAHMIKFRGHFLIEGELNAENTDVQKIFADFVGVYDRTFDDSHLSEITVDAASILTEKISKSRRLENLIKYYPTEKKNTLFGNLIALALGLQPNFKMNFKLSEDAKLQFSKDSYEEDLGELLGKIGDDYADLFTSAKNLYDAILLSGILIVDDNSTKAPLSASMIKRYVEHQEDLEKLKEFIKANKSELYHDIFKDKNKNGYAGYIENGVKQDEFYKYLKNTLSKIAGSDYFLDKIEREDFLRKQRTFDNGSIPHQIHLQEMHAILRRQGDYYPFLKENQDRIEKILTFRIPYYVGPLARKDSRFSWAEYHSDEKITPWNFDKVIDKEKSAEKFITRMTLNDLYLPEEKVLPKHSHVYETYAVYNELTKIKYVNEQGKDSFFDSNMKQEIFDHVFKENRKVTKEKLLNYLNKEFPEYRIKDLIGLDKENKSFNASLGTYHDLKKILDKAFLDDKVNEEVIEDIIKTLTLFEDKDMIHERLQKYSDIFTADQLKKLERRHYTGWGRLSYKLINGIRNKENNKTILDYLIDDGSANRNFMQLINDDTLPFKQIIQKSQVVGDVDDIEAVVHDLPGSPAIKKGILQSVKIVDELVKVMGDNPDNIVIEMARENQTTNRGRSQSQQRLKKLQNSLKELGSNILNEEKPSYIEDKVENSHLQNDQLFLYYIQNGKDMYTGDELDIDHLSDYDIDHIIPQAFIKDDSIDNRVLTSSAKNRGKSDDVPSLDIVRARKAEWVRLYKSGLISKRKFDNLTKAERGGLTEADKAGFIKRQLVETRQITKHVAQILDARFNTESDENDKVIRDVKVITLKSNLVSQFRKDFEFYKVREINDYHHAHDAYLNAVVGTALLKKYPKLASEFVYGEYKKYDIRKFITNSSDKATAKYFFYSNLMNFFKRVIRYSNGKVIVRPVVEYSKDTEDIAWDKKSNFRTICKVLSYPQVNIVKKVETQTGGFSKESILPKGDSDKLIPRKTKKAYWDTKKYGGFDSPTVAYSVFVVADVEKGKAKKLKTVKELVGISIMERSFFEENPVEFLENKGYHNIREDKLIKLPKYSLFEFEGGKRRLLASASELQKGNEMVIPGHLVKLLYHAQRINSFNSTKYLDYVSAHKKEFEKVLSCVEDFANLYVDVEKNLSKIRAVADSMDNFSIEEISNSFINLLTLTALGAPADFNFLGEKIPRKRYTSTKECLNATLIHQSITGLYETRIDLSKIGEE

SEQ ID NO: 449 - protein, 1375 aa, Streptococcus canis
  Streptococcus canis FSL Z3-227
MEKKYSIGLDIGTNSVGWAVITDDYKVPSKKFKVLGNTNRKSIKKNLMGALLFDSGETAEATRLKRTARRRYTRRKNRIRYLQEIFANEMAKLDDSFFQRLEESFLVEEDKKNERHPIFGNLADEVAYHRNYPTIYHLRKKLADSPEKADLRLIYLALAHIIKFRGHFLIEGKLNAENSDVAKLFYQLIQTYNQLFEESPLDEIEVDAKGILSARLSKSKRLEKLIAVFPNEKKNGLFGNIIALALGLTPNFKSNFDLTEDAKLQLSKDTYDDDLDELLGQIGDQYADLFSAAKNLSDAILLSDILRSNSEVTKAPLSASMVKRYDEHHQDLALLKTLVRQQFPEKYAEIFKDDTKNGYAGYVGIGIKHRKRTTKLATQEEFYKFIKPILEKMDGAEELLAKLNRDDLLRKQRTFDNGSIPHQIHLKELHAILRRQEEFYPFLKENREKIEKILTFRIPYYVGPLARGNSRFAWLTRKSEEAITPWNFEEVVDKGASAQSFIERMTNFDEQLPNKKVLPKHSLLYEYFTVYNELTKVKYVTERMRKPEFLSGEQKKAIVDLLFKTNRKVTVKQLKEDYFKKIECFDSVEIIGVEDRFNASLGTYHDLLKIIKDKDFLDNEENEDILEDIVLTLTLFEDREMIEERLKTYAHLFDDKVMKQLKRRHYTGWGRLSRKMINGIRDKQSGKTILDFLKSDGFSNRNFMQLIHDDSLTFKEEIEKAQVSGQGDSLHEQIADLAGSPAIKKGILQTVKIVDELVKVMGHKPENIVIEMARENQTTTKGLQQSRERKKRIEEGIKELESQILKENPVENTQLQNEKLYLYYLQNGRDMYVDQELDINRLSDYDVDHIVPQSFIKDDSIDNKVLTRSVENRGKSDNVPSEEVVKKMKNYWRQLLNAKLITQRKFDNLTKAERGGLSEADKAGFIKRQLVETRQITKHVARILDSRMNTKRDKNDKPIREVKVITLKSKLVSDFRKDFQLYKVRDINNYHHAHDAYLNAVVGTALIKKYPKLESEFVYGDYKVYDVRKMIAKSEQEIGKATAKRFFYSNIMNFFKTEVKLANGEIRKRPLIETNGETGEVVWNKEKDFATVRKVLAMPQVNIVKKTEVQTGGFSKESILSKRESAKLIPRKKGWDTRKYGGFGSPTVAYSILVVAKVEKGKAKKLKSVKVLVGITIMEKGSYEKDPIGFLEAKGYKDIKKELIFKLPKYSLFELENGRRRMLASATELQKANELVLPQHLVRLLYYTQNISATTGSNNLGYIEQHREEFKEIFEKIIDFSEKYILKNKVNSNLKSSFDEQFAVSDSILLSNSFVSLLKYTSFGASGGFTFLDLDVKQGRLRYQTVTEVLDATLIYQSITGLYETRTDLSQLGGD

SEQ ID NO: 450 - protein, 1345 aa, Streptococcus constellatus
  Streptococcus constellatus subsp. constellatus SK53
MGKPYSIGLDIGTNSVGWAVVTDDYKVPAKKMKVLGNTDKQSIKKNLLGALLFDSGETAEATRLKRTARRRYTRRKNRLRYLQEIFTGEMNKVDENFFQRLDDSFLVDEDKRGEHHPIFGNIAAEVKYHDDFPTIYHLRRHLADTSKKADLRLVYLALAHMIKFRGHFLYEGDLKAENTDVQALFKDFVEEYDKTIEESHLSEITVDALSILTEKVSKSSRLENLIAHYPTEKKNTLFGNLIALSLDLHPNFKTNFQLSEDAKLQFSKDTYEEDLEGFLGEVGDEYADLFASAKNLYDAILLSGILTVDDNSTKAPLSASMVKRYEEHQKDLKKLKDFIKVNAPDQYNAIFKDKNKKGYASYIESGVKQDEFYKYLKGILLKINGSGDFLDKIDREDFLRKQRTFDNGSIPHQIHLQEMHAILRRQGEHYPFLKENQDKIEKILTFRIPYYVGPLARKGSRFAWAEYKADEKITPWNFDDILDKEKSAEKFITRMTLNDLYLPEEKVLPKHSPLYEAFTVYNELTKVKYVNEQGEAKFFDTNMKQEIFDHVFKENRKVTKDKLLNYLNKEFEEFRIVNLTGLDKENKAFNSSLGTYHDLRKILDKSFLDDKANEKTIEDIIQTLTLFEDREMIRQRLQKYSDIFTKAQLKKLERRHYTGWGRLSYKLINGIRNKENKKTILDYLIDDGYANRNFMQLINDDALSFKEEIARAQIIDDVDDIANVVHDLPGSPAIKKGILQSVKIVDELVKVMGHNPANIIIEMARENQTTDKGRRNSQQRLKLLQDSLKNLDNPVNIKNVENQQLQNDRLFLYYIQNGKDMYTGETLDINNLSQYDIDHIIPQAFIKDNSLDNRVLTRSDKNRGKSDDVPSIEVVHEMKSFWSKLLSVKLITQRKFDNLTKAERGGLTEEDKAGFIKRQLVETRQITKHVAQILDERFNTEFDGNKRRIRNVKIITLKSNLVSNFRKEFELYKVREINDYHHAHDAYLNAVVGNALLLKYPQLEPEFVYGEYPKYNSYRSRKSATEKFLFYSNILRFFKKEDIQTNEDGEIAWNKEKHIKILRKVLSYPQVNIVKKTEEQTGGFSKESILPKGESDKLIPRKTKNSYWDPKKYGGFDSPVVAYSILVFADVEKGKSKKLRKVQDMVGITIMEKKRFEKNPVDFLEQRGYRNVRLEKIIKLPKYSLFELENKRRRLLASAKELQKGNELVIPQRFTTLLYHSYRIEKDYEPEHREYVEKHKDEFKELLEYISVFSRKYVLADNNLTKIEMLFSKNKDAEVSSLAKSFISLLTFTAFGAPAAFNFFGENIDRKRYTSVTECLNATLIHQSITGLYETRIDLSKLGED

SEQ ID NO: 451 - protein, 1371 aa, Streptococcus dysgalactiae
MDKKYSIGLDIGTNSVGWAVITDDYKVPSKKFKVLGNTDRHSIKKNLIGALLFDSGETAEATRLKRTARRRYTRRKNRIRYLQEIFSSEMSKVDDSFFHRLEESFLVEEDKKHERHPIFGNIVDEVAYHEKYPTIYHLRKKLADSTDKADLRLIYLALAHMIKFRGHFLIEGDLNPDNSDMDKLFIQLVQTYNQLFEENPINASRVDAKAILSARLSKSRRLENLIAQLPGEKRNGLFGNLIALSLGLTPNFKSNFDLAEDAKLQLSKDTYDDDLDNLLAQIGDQYADLFLAAKNLSDAILLSDILRVNSEITKAPLSASMIKRYDEHHQDLTLLKALVRQQLPEKYKEIFFDQSKNGYAGYIDGGASQEEFYKFIKPILEKMDGTEELLAKLNREDLLRKQRTFDNGSIPHQIHLGELHAILRRQEDFYPFLKDNREKIEKILTFRIPYYVGPLARGNSRFAWMTRKSEETITPWNFEEVVDKGASAQSFIERMTNFDKNLPNEKVLPKHSLLYEYFTVYNELTKVKYVTEGMRKPEFLSGKQKEAIVDLLFKTNRKVTVKQLKEDYFKKIECFDSVEISGVEDRFNASLGTYHDLLKIIKDKDFLDNEENEDILEDIVLTLTLFEDKEMIEERLKKYANLFDDKVMKQLKRRHYTGWGRLSRKLINGIRDKQSGKTILDFLKSDGFANRNFMQLINDDSLTFKEAIQKAQVSGQGHSLHEQIANLAGSPAIKKGILQSVKVVDELVKVMGHKPENIVIEMARENQTTQKGQKNSRERMKRIEEGIKELGSQILKEHPVENTQLQNEKLYLYYLQNGRDMYVDQELDINRLSDYDVDHIVPQSFIKDDSIDNKVLTRSDKNRGKSDNVPSEEVVKKMKNYWRQLLNAKLITQRKFDNLTKAERGGLSELDKAGFIKRQLVETRQITKHVAQILDSRMNTKYDENDKLIREVKVITLKSKLVSDFRKDFQFYKVREINNYHHAHDAYLNAVVGTALIKKYPKLESEFVYGDYKVYDVRKMIAKSEQEIGKATAKRFFYSNIMNFFKTEITLANGEIRKRPLIETNEETGEIVWDKGRDFATVRKVLSMPQVNIVKKTEVQTGALTNESIYARGSFDKLISRKHRFESSKYGGFGSPTVTYSVLVVAKSKVQDGKVKKIKTGKELIGITLLDKLVFEKNPLKFIEDKGYGNVQIDKCIKLPKYSLFEFENGTRRMLASVMANNNSRGDLQKANEMFLPAKLVTLLYHAHKIESSKELEHEAYILDHYNDLYQLLSYIERFASLYVDVEKNISKVKELFSNIESYSISEICSSVINLLTLTASGAPADFKFLGTTIPRKRYGSPQSILSSTLIHQSITGLYETRIDLSQLGGD

SEQ ID NO: 452 - protein, 1371 aa, Streptococcus dysgalactiae
MDKKYSIGLDIGTNSVGWAVITDDYKVPSKKFKVLGNTDRHSIKKNLIGALLFDSGETAEATRLKRTARRRYTRRKNRIRYLQEIFSSEMSKVDDSFFHRLEESFLVEEDKKHERHPIFGNIVDEVAYHEKYPTIYHLRKKLADSTDKADLRLIYLALAHMIKFRGHFLIEGDLNPDNSDVDKLFIQLVQTYNQLFEEKPINASGVDAKAILSARLSKSKRLENLIAQLPGEKKNGLFGNLIALSLGLTPNFKSNFDLAEDAKLQLSKDTYDDDLDNLLAQIGNQYADLFLAAKNLSDAILLSDILRVNSEITKAPLSASMIKRYDEHHQDLTLLKALVRQQLPEKYKEIFFDQSKNGYAGYIDGGASQEEFYKFIKPILEKMDGTEELLAKLNREDLLRKQRTFDNGSIPHQIHLGELHAILRRQEDFYPFLKDNREKIEKILTFRIPYYVGPLARGNSRFAWMTRKSEETITPWNFEEVVDKGASAQSFIERMTNFDKNLPNEKVLPKHSLLYEYFTVYNELTKVKYVTEGMRKPEFLSGKQKEAIVDLLFKTNRKVTVKQLKEDYFKKIECFDSVEISGVEDRFNASLGTYHDLLKIIKDKDFLDNEENEDILEDIVLTLTLFEDKEMIEERLKKYANLFDDKVMKQLKRRHYTGWGRLSRKLINGIRDKQSGKTILDFLKSDGFANRNFMQLINDDSLTFKEAIQKAQVSGQGHSLHEQIANLAGSPAIKKGILQSVKVVDELVKVMGHKPENIVIEMARENQTTQKGQKNSRERMKRIEEGIKELGSQILKEHPVENTQLQNEKLYLYYLQNGRDMYVDQELDINRLSDYDVDHIVPQSFIKDDSIDNKVLTRSDKNRGKSDNVPSEEVVKKMKNYWRQLLNAKLITQRKFDNLTKAERGGLSELDKAGFIKRQLVETRQITKHVAQILDSRMNTKYDENDKLIREVKVITLKSKLVSDFRKDFQFYKVREINNYHHAHDAYLNAVVGTALIKKYPKLESEFVYGDYKVYDVRKMIAKSEQEIGKATAKRFFYSNIMNFFKTEITLANGEIRKRPLIETNEETGEIVWDKGRDFATVRKVLSMPQVNIVKKTEVQTGALTNESIYARGSFDKLISRKHRFESSKYGGFGSPTVTYSVLVVAKSKVQDGKVKKIKTGKELIGITLLDKLVFEKNPLKFIEDKGYGNVQIDKCIKLPKYSLFEFENGTRRMLASVMANNNSRGDLQKANEMFLPAKLVTLLYHAHKIESSKELEHEAYILDHYNDLYQLLSYIERFASLYVDVEKNISKVKELFSNIESYSISEICSSVINLLTLTASGAPADFKFLGTTIPRKRYGSPQSILSSTLIHQSITGLYETRIDLSQLGGD

SEQ ID NO: 453 - protein, 1371 aa, Streptococcus dysgalactiae
MDKKYSIGLDIGTNSVGWAVITDDYKVPSKKFKVLGNTDRHSIKKNLIGALLFDSGETAEATRLKRTARRRYTRRKNRIRYLQEIFSSEMSKVDDSFFHRLEESFLVEEDKKHERHPIFGNIVDEVAYHEKYPTIYHLRKKLADSTDKADLRLIYLALAHMIKFRGHFLIEGDLNPDNSDMDKLFIQLVQTYNQLFEENPINASRVDAKAILSARLSKSRRLENLIAQLPGEKRNGLFGNLIALSLGLTPNFKSNFDLAEDAKLQLSKDTYDDDLDNLLAQIGDQYADLFLAAKNLSDAILLSDILRVNSEITKAPLSASMIKRYDEHHQDLTLLKALVRQQLPEKYKEIFFDQSKNGYAGYIDGGASQEEFYKFIKPILEKMDGTEELLAKLNREDLLRKQRTFDNGSIPHQIHLGELHAILRRQEDFYPFLKDNREKIEKILTFRIPYYVGPLARGNSRFAWMTRKSEETITPWNFEEVVDKGASAQSFIERMTNFDKNLPNEKVLPKHSLLYEYFTVYNELTKVKYVTEGMRKPEFLSGKQKEAIVDLLFKTNRKVTVKQLKEDYFKKIECFDSVEISGVEDRFNASLGTYHDLLKIIKDKDFLDNEENEDILEDIVLTLTLFEDKEMIEERLKKYANLFDDKVMKQLKRRHYTGWGRLSRKLINGIRDKQSGKTILDFLKSDGFANRNFMQLINDDSLTFKEAIQKAQVSGQGHSLHEQIANLAGSPAIKKGILQSVKVVDELVKVMGHKPENIVIEMARENQTTQKGQKNSRERMKRIEEGIKELGSQILKEHPVENTQLQNEKLYLYYLQNGRDMYVDQELDINRLSDYDVDHIVPQSFIKDDSIDNKILTRSDKNRGKSDNVPSEEVVKKMKNYWRQLLNAKLITQRKFDNLTKAERGGLSELDKAGFIKRQLVETRQITKHVAQILDSRMNTKYDENDKLIREVKVITLKSKLVSDFRKDFQFYKVREINNYHHAHDAYLNAVVGTALIKKYTKLESEFVYGDYKVYDVRKMIAKSEQEIGKATAKRFFYSNIMNFFKTEITLANGEIRKRPLIETNEETGEIVWDKGRDFATVRKVLSMPQVNIVKKTEVQTGALTNESIYARGSFDKLISRKHRFESSKYGGFGSPTVTYSVLVVAKSKVQDGKVKKIKTGKELIGMTLLDKLVFEKNPLKFIEDKGYGNVQIDKCIKLPKYSLFEFENGTRRMLASVMANNNSRGDLQKANEMFLPAKLVTLLYHAHKIESSKELEHEAYILDHYNDLYQLLSYIERFASLYVDVEKNISKVKELFSNIESYSISEICSSVINLLTLTASGAPADFKFLGTTIPRKRYGSPQSILSSTLIHQSITGLYETRIDLSQLGGD

SEQ ID NO: 454 - protein, 1371 aa, Streptococcus dysgalactiae
MDKKYSIGLDIGTNSVGWAVITDDYKVPSKKFKVLGNTDRHSIKKNLIGALLFDSGETAEATRLKRTARRRYTRRKNRIRYLQEIFSSEMSKVDDSFFHRLEESFLVEEDKKHERHPIFGNIVDEVAYHEKYPTIYHLRKKLADSTDKADLRLIYLALAHMIKFRGHFLIEGDLNPDNSDMDKLFIQLVQTYNQLFEENPINASRVDAKAILSARLSKSRRLENLIAQLPGEKRNGLFGNLIALSLGLTPNFKSNFDLAEDAKLQLSKDTYDDDLDNLLAQIGDQYADLFLAAKNLSDAILLSDILRVNSEITKAPLSASMIKRYDEHHQDLTLLKALVRQQLPEKYKEIFFDQSKNGYAGYIDGGASQEEFYKFIKPILEKMDGTEELLAKLNREDLLRKQRTFDNGSIPHQIHLGELHAILRRQEDFYPFLKDNREKIEKILTFRIPYYVGPLARGNSRFAWMTRKSEETITPWNFEEVVDKGASAQSFIERMTNFDKNLPNEKVLPKHSLLYEYFTVYNELTKVKYVTEGMRKPEFLSGKQKEAIVDLLFKTNRKVTVKQLKEDYFKKIECFDSVEISGVEDRFNASLGTYHDLLKIIKDKDFLDNEENEDILEDIVLTLTLFEDKEMIEERLKTYAHLFDDKVMKQLKRRHYTGWGRLSRKLINGIRDKQSGKTILDFLKSDGFANRNFIQLIHDDSLTFKEAIQKAQVSGQGHSLHEQIANLAGSPAIKKGILQSVKVVDELVKVMGHKPENIVIEMARENQTTQKGQKNSRERMKRIEEGIKELGSQILKEHPVENTQLQNEKLYLYYLQNGRDMYVDQELDINRLSDYDVDHIVPQSFIKDDSIDNKVLTRSDKNRGKSDDVPSEEVVKKMKNYWRQLLNAKLITQRKFDNLTKAERGGLSELDKAGFIKRQLVETRQITKHVAQILDSRMNTKYDENDKLIREVKVITLKSKLVSDFRKDFQFYKVREINNYHHAHDAYLNAVVGTALIKKYPKLESEFVYGDYKVYDVRKMIAKSEQEIGKATAKRFFYSNIMNFFKTEITLANGEIRKRPLIETNEETGEIVWNKGRDFATVRKVLSMPQVNIVKKTEVQTGALTNESIYARGSFDKLISRKHRFESSKYGGFGSPTVTYSVLVVAKSKVQDGKVKKIKTGKELIGITLLDKLVFEKNPLKFIEDKGYGNVQIDKCIKLPKYSLFEFENGTRRMLASVMANNNSRGDLQKANEMFLPAKLVTLLYHAHKIESSKELEHEAYILDHYNDLYQLLSYIERFASLYVDVEKNISKVKELFSNIESYSISEICSSVINLLTLTASGAPADFKFLGTTIPRKRYGSPQSILSSTLIHQSITGLYETRIDLSQLGGD

SEQ ID NO: 455 - protein, 1348 aa, Streptococcus equi
MKKPYTIALDIGTNSVGWVVVTDDYRVPTKKMKVLGNTERKTIKKNLIGALLFDSGDTAEGTRLKRTARRRYTRRKNRLRYLKEIFTEEMAKVDDGFFQRLEDSFYVLEDKEGNKHPIFANLADEVAYHKKYPTIYHLRKELVDNPQKADLRLIYLAVAHIIKFRGHFLIEGTLSSKNNNLQKSFDHLVDTYNLLFEEQRLLTEGINAKELLSAALSKSKRLENLISLIPGQKKTGIFGNIIALSLGLTPNFKANFGLSKDVKLQLAKDTYADDLDSLLAQIGDQYADLFLAAKNLSDAILLSDILTESDEITRAPLSASMVKRYREHHKDLVTLKTLIKDQLPEKYQEIFLDKTKNGYAGYIEGQVSQEEFYKYLKPILARLDGSEPLLLKIDREDFLRKQRTFDNGSIPHQIHLEELHAILRRQEVFYPFLKDNRKKIESLLTFRIPYYVGPLARGHSRFAWVKRKFDGAIRPWNFEEIVDEEASAQIFIEKMTKNDLYLPNEKVLPKHSLLYETFTVYNELTKVKYATEGMTRPQFLSADQKQAIVDLLFKTNRKVTVKQLKENYFKKIECWDSVEITGVEDSFNASLGTYHDLLKIIQDKDFLDNPDNQKIIEDIILTLTLFEDKKMISKRLDQYAHLFDKVVLNKLERHHYTGWGRLSGKLINGIRDKQSGKTILDFLKADGFANRNFMQLIHDSELSFIDEIAKAQVIGKTEYSKDLVGNLAGSPAIKKGISQTIKIVDELVKIMGYLPQQIVIEMARENQTTAQGIKNARQRMRKLEETAKKLGSNILKEHPVDNSQLQNDKRYLYYLQNGKDMYTGDDLDIDYLSSYDIDHIIPQSFIKNNSIDNKVLTSQGANRGKLDNVPSEAIVRKMKGYWQSLLRAGAISKQKFDNLTKAERGGLTQVDKAGFIQRQLVETRQITKHVAQILDSRFNTEFDDHNKRIRKVHIITLKSKLVSDFRKEFGLYKIRDINHYHHAHDAYLNAVVAKAILGKYPQLAPEFVYGDYPKYNSFKERQKATQKMLFYSNILKFFKDQESLHVNSDGEEIWNANKHLPIIKNVLSIPQVNIVKKTEVQTGGFYKESILSKGNSDKLIPRKNNWDTRKYGGFDSPTVAYSVLVIAKMEKGKAKVLKPVKEMVGITIMERTAFEENPVVFLEARGYREIQEHLIIKLPKYSLFELENGRRRLLASASELQKGNELFLPVDYMTFLYLAAHYHELTGSSEDVLRKKYFVDRHLHYFDDIIQMINDFAERHILASSNLEKINHTYHNNSDLPVNERAENIINVFTFVALGAPAAFKFFDATIDRKRYTSTKEVLNATLIHQSVTGLYETRIDLSQLGEN

SEQ ID NO: 456 - protein, 1377 aa, Streptococcus equinus
  Streptococcus equinus ATCC 9812
MEKTYSIGLDIGTNSVGWAVITDDYKVPAKKMKVLGNTDKKYIKKNLLGALLFDSGETAEATRLKRAARRRYTRRKNRLRYLQEIFAKEMAKVDESFFQRLEESFLTDDDKTFDSHPIFGNKAEEDTYHQEFPTIYHLRKHLADSPEKVDLRLVYLALAHMIKFRGHFLIEGQLNAENTDVQKIFADFVGVYDRTFDDSHLSEITVDAASILTEKISKSRRLENLIKQYPTEKKNTLFGNLVALALGLQPNFKTNFKLSEDAKLQFSKDTYDEDLEELLGKIGDDYADLFTAAKNLYDAILLSGILTVDDNSTKAPLSASMIKRYEEHHEDLEKLKTFIKVNNFDKYHEIFKDKSKNGYAGYIENGVKQDIFYKHLKSIISEKNGGQYFLDKIEREDFLRKQRTFDNGSIPYQIHLQEMRTILRRQGEYYPFLKENQAKIEKILTFRIPYYVGPLARKNSRFAWAKYHSDEPITPWNFDEVVDKEKSAEKFITRMTLNDLYLPEEKVLPKHSYVYETFAVYNELTKIKYVNEQGKSFFFDANMKQEIFDHVFKENRKVTKAKLLSYLNNEFEEFRINDLIGLDKDSKSFNASLGTYHDLKKILDKSFLDDKTNEQIIEDIVLTLTLFEDRDMIHERLQKYSDIFTSQQLKKLERRHYTGWGRLSYKLINGIRNKENNKTILDFLIDDGDANRNFMQLINDDSLSFKTTIQEAQVVGDVDDIEAVVHDLPGSPAIKKGILQSVKIVDELVKVMGHNPQNIVIEMARENQITGYGRNRSNQRLKRLQDSLKEFGSDILSKKKPSYVDSKVENSHLQNDRLFLYYIQNGKDMYTGEELDIDHLSDYDIDHIIPQAFIKDNSIDNRVLTSSAKNRGKSDDVPSIEIVRNRKSYWYKLYKSGLISKRKFDNLTKAERGGLTETDKAGFIKRQLVETRQITKHVAQILDARFNTKCDENDKVIRDVKVITLKSSLVSQFRKEFKFYKVREINDYHHAHDAYLNAVVGTALLKKYPKLAPEFVYGEYKKYDVRKLVAKSSDNHSELGKATAKYFFYSNLMNFFKTEVKYADGRVFERPDIETNADGEVVWNKQRDFNIVRKVLSYPQVNIVKKVEVQTGGFSKESILPKGDSDKLIPRKTKKLQWETQKYGGFDSPTVAYSVLVVADVEKGKTRKLKTVKELVGISIMERSSFEENPVSFLEKKGYHNVQEDKLIKLPKYSLFEFEGGRRRLLASATELQKGNEVVLPQYMVNLLYHSQHVNNSHKPEHLNYVKQHKDEFKDIFNLIISIARINILKPKVVDNLINEFTEYGQEDISSLSESFINLLKFISFGAPGAFKFLKLDVKQSNLRYKSTTEALSATLIHQSVTGLYETRIDLSKLGEE

SEQ ID NO: 457 - protein, 1370 aa, Streptococcus gallolyticus
MTKKNYSIGLDIGTNSVGWAVITDDYKVPAKKMKVLGNTDKKYIKKNLLGALLFDSGETAEATRLKRTARRRYTRRKNRLRYLQEIFAEEMTKVDESFFYRLDESFLTTDEKDFERHPIFGNKAEEDAYHQKFPTIYHLRNYLADSSEKADLRLVYLALAHMIKYRGHFLIEGKLNAENTDVQKLFTDFVGVYDRTFDDSHLSEITVDVASTLTEKISKSRRLENLIKYYPTEKKNTLFGNLIALALGLQPNFKMNFKLSEDAKLQFSKDTYEEDLEELLGKIGDDYADLFTSAKNLYDAILLSGILTVDDNSTKAPLSASMIKRYVEHHEDLEKLKEFIKANKSELYHDIFKDKNKNGYAGYIENGVKQDEFYKYLKNTLSKIDGSDYFLDKIEREDFLRKQRTFDNGSIPHQIHLQEMHAILRRQGDYYPFLKEKQDRIEKILTFRIPYYVGPLVRKDSRFAWAEYRSDEKITPWNFDKVIDKEKSAEKFITRMTLNDLYLPEEKVLPKHSHVYETYAVYNELTKIKYVNEQGKESFFDSNMKQEIFDHVFKENRKVTKEKLLNYLNKEFPEYRIKDLIGLDKENKSFNASLGTYHDLKKILDKAFLDDKVNEEVIEDIIKTLTLFEDKDMIHERLQKYSDIFTANQLKKLERRHYTGWGRLSYKLINGIRNKENNKTILDYLIDDGSANRNFMQLINDDTLPFKQIIQKSQVVGDVDDIEAVVHDLPGSPAIKKGILQSVKIVDELVKVMGDNPDNIVIEMARENQTTNRGRSQSQQRLKKLQSSLKELGSNILNEEKPSYIEDKVENSHLQNDQLFLYYIQNGKDMYTGDELDIDHLSDYDIDHIIPQAFIKDDSIDNRVLTSSAKNRGKSDDVPSLDIVRARKAEWVRLYKSGLISKRKFDNLTKAERGGLTEADKAGFIKRQLVETRQITKHVAQILDARFNTEHDENDKVIRDVKVITLKSNLVSQFRKDFEFYKVREINDYHHAHDAYLNAVVGTALLKKYPKLASEFVYGEYKKYDIRKFITNSSDKATAKYFFYSNLMNFFKTKVKYADGTVFERPIIETNADGEIAWNKQIDFEKVRKVLSYPQVNIVKKVETQTGGFSKESILPKGDSDKLIPRKTKKVYWDTKKYGGFDSPTVAYSVFVVADVEKGKAKKLKTVKELVGISIMERSFFEENPVEFLENKGYHNIREDKLIKLPKYSLFEFEGGRRRLLASASELQKGNEMVLPGYLVELLYHAHRADNFNSTEYLNYVSEHKKEFEKVLSCVEDFANLYVDVEKNLSKIRAVADSMDNFSIEEISNSFINLLTLTALGAPADFNFLGEKIPRKRYTSTKECLTATLIHQSITGLYETRIDLSKLGEE

SEQ ID NO: 458 - protein, 1370 aa, Streptococcus gallolyticus; identical to SEQ ID NO: 457
  Streptococcus gallolyticus subsp. gallolyticus TX20005

SEQ ID NO: 459 - protein, 1371 aa, Streptococcus gallolyticus
MTEKNYSIGLDIGTNSVGWAVITDDYKVPAKKMKVLGNTDKKYIKKNLLGALLFDNGETAEATRLKRTARRRYTRRKNRLRYLQEIFAEEMAKVDESFFYRLDESFLTTDDKDFERHPIFGNKADEIKYHQEFPTIYHLRKHLADSHEKADLRLIYLALAHMIKFRGHFLIEGELNAENTDVQKLFEAFVEVYDRTFDDSNLSEITVDASSILTEKFSKSRRLENLIKHYPTEKKNTLFGNLVALALGLQPNFKTSFKLSEDAKLQFSKDTYEEDLEELIGKIGDEYADLFTSAKNLYDAILLSGILTVADNTTKAPLSASMIKRYNEHQVDLKKLKEFIKNNASDKYDEIFNDKDKNGYAGYIENGVKQDEFYKYLKTTLSKIDGSDYFLDKIEREDFLRKQRTFDNGSIPHQIHLQEMHAILRRQGEHYAFLKENQAKIEKILTFRIPYYVGPLARKNSRFAWAEYHSDEKITPWNFDEIIDKEKSAEKFITRMTLNDLYLPEEKVLPKHSLVYETYTVYNELTKVKYVNEQGKSNFFDANMKQEIFEHVFKENRKVTKDKFLNYLNKEFPEYRIQDLIGLDKENKSFNASLGTYHDLKKILDKSFLDDKTNETIIEDIIQTLTLFEDRDMIRQRLQKYSDIFTPQQLKKLERRHYTGWGRLSYKLINGIRNKENGKSILDYLIDDGYANRNFMQLISDDTLPFKQIIKDAQIIGDIDDVTSVVRELPGSPAIKKGILQSVKIVDELVKVMGHNPDNIVIEMARENQTTNRGRNQSQQRLKKLQDSLKELGSNILNEEKPSYIEGKVENNHLQDDRLFLYYIQNGKDMYTGDELDIDHLSDYDIDHIIPQAFIKDDSIDNRVLTSSAKNRGKSDDVPSLDIVHDRKADWIRLYKSGLISKRKFDNLTKAERGGLTENDKAGFIKRQLVETRQITKHVAQILDSRFNTERDENDKVIRNVKVITLKSNLVSQFRKDFKFYKVREINDYHHAHDAYLNAVVGTALLKKYPKLAPEFVYGEYKKYDIRKFITSSGDKATAKYFFYSNLMNFFKRVIRYSNGKVVVRPVIECSKDTGEIAWNKQTDFEKVRRVLSYPQVNIVKKVETQTGGFSKESILPKGNSDKLIPRKTKKFRWDTPKYGGFDSPNIAYSVFVIADVEKGKAKKLKTVKELVGISIMERSSFEENPVVFLEKKGYQNVQEDNLIKLPKYSLFEFEGGRRRLLASASELQKGNEVVLSRHLVELLYHAHRVNSFNNSEHLKYVSEHKKEFGEVLSCVENFAKSYVDVEKNLGKIRAVADKIDTFSIEDISISFVNLLTLTALGAPADFNFLGEKIPRKRYTSTKECLNATLIHQSITGLYETRIDLSKLGEE

SEQ ID NO: 460 - protein, 1130 aa, Streptococcus gallolyticus
MTNGKILGLDIGIASVGVGIIEAKTGKVVHANSRLFSAANAENNAERRGFRGSRRLNRRKKHRVKRVRDLFEKYEIVTDFRNLNLNPYELRVKGLTEQLTNEELFAALRTISKRRGISYLDDAEDDSTGSTDYAKSIDENRRLLKTKTPGQIQLERLEKYGQLRGNFTVYDENGEAHRLINVFSTSDYEKEARKILETQADYNKKITAEFIDDYVEILTQKRKYYHGPGNEKSRTDYGRFRTDGTTLENIFGILIGKCSFYPDEYRASKASYTAQEYNFLNDLNNLKVPTETGKLSTEQKEALVEFAKSTATLGPAKLLKEIAKILDCKVDEIKGYREDDKGKPDLHTFEPYRKLKFNLDSVNIDDLSREVLDKLADILTLNTEREGIEDAIRHNLPNQFTEGQISEIIKVRKSQSTAFNKGWHSFSAKLMNELIPELYATSDEQMTILTRLEKFKVNKKSSKNTKTIDEKEVTDEIYNPVVAKSVRQTIKIINAAVKKYGDFDKIVIEMPRDKNADDEKKFIDKRNKENKKEKDDALKRAAYLYNGTDKLPDEVFHGNKQLETKIRLWYQQGERCLYSGKPIPIQELVHNSNNFEIDHILPLSLSFDDSLANKVLVYAWTNQEKGQKTPYQVIDSMDAAWSFREMKDYVLKQKGLGKKKRDYLLTTENIDKIEVKKKFIERNLVDTRYASRVVLNSLQSALRELGKDTKISVIRGQFTSQLRRKWKIDKSRETYHHHAVDALIIAASSQLKLWEKQDNPMFVDYGNNQVVDKQTGEILSVSDDEYKELVFQPPYQGFVNMISSKGFEDEILFSYQVDSKYNRKVSDATIYSTRKAKIGKDKKEETYVLGKIKDIYSQNGFDTFIKKYNKDKTQFLMYQKDPLTWENVIEVILRDYPTTKKSEDGKNDVKCNPFEEYRRENGLVCKYSKKGKGTPIKSLKYYDKKLGNCIDITPEGSKNEVVLQSLNPWRADVYFNPETLKYELLGLKYSDLSFEKGTGKYHISQEKYDVIKEKEGIGKKSEFKFTLYRNDLILIKDTASGEQEIYRFLSRTMPNVKHYAELKPYDKEKFDNVQELVEALGEADKVGRCIKGLNKSNLSIYKVRTDVLGNKYFVKKEGDKPKLDFKNNKK

SEQ ID NO: 461 - protein, 1136 aa, Streptococcus gordonii
MNGLVLGLDIGIASVGVGILEKDTGKIIHASSRLFPAATADNNVERRSNRQGRRLNRRKKHRSVRLQDLFEGYGLLTDFSKVSMNLNPYQLRVQGMENQLTNEELFVALKNIVKRRGISYLDDASEDGGTVSSDYGKAVEENRKLLAEKTPGQIQLERFEKYGQLRGDFTVEENGEKHRLINVFSTSAYRKEAERILRKQQEFNSKITDEFIEDYLIILTGKRKYYHGPGNEKSRTDYGRFRTDGTTLDNIFGILIGKCTFYTEEYRASKASYTAQEFNLLNDLNNLTVPTETKKLSEEQKKLIIEYAKSAKTLGASTLLKYIAKMIDASVDQIRGYRVDVNNKPEMHTFEVYRKMQSLETIKVEELPRKVLDELAHILTLNTEREGIEEAINSKLKDIFNRDQVLELVQFRKNNSSLFSKGWHNFSIKLMMELIPELYETSEEQMTILTRLGKQRSKETSKRTKYIDEKELTEEIYNPVVAKSVRQAIKIINEATKKYGIFDNIVIEMARENNEEDAKKDYIKRQKANQDEKNAAMEKAAFQYNGKKELPDNIFHGHKELTTKIRLWHQQGEKCLYTGKNIPISDLIHNQYKYEIDHILPLSLSFDDSLSNKVLVLATANQEKGQRTPFQALDSMDDAWSYREFKSYVKDSKLLSNKKKDYLLTEEDISKIEVKQKFIERNLVDTRYSSRVVLNALQDFYKSHQLDTTISVVRGQFTSQLRRKWGIEKSRETYHHHAVDALIIAASSQLRLWKKHSNPLIAYKEGQFVDSETGEIVSLSDEEYKELVFKAPYDHFVDTLRSKKFEDSILFSYQVDSKYNRKISDATIYATRKAKLDKEKKEYTYTLGKIKDIYALGTKTPSKTGFYKFLDLYKTDKSQFLMYQKDRKTWDEVIEKIIEQYRPFKEYDKNGKEVDFNPFEKYRIGNGPIRKYSKKGNGPEIKSLKYYDILLGKHKNITPDGSRNTVALLSLNPWRTDVYYNSETKKYEFLGLKYADLCFEEGGAYGISEVKYKKIREKEGIGKNSEFKFTLYKNDLILIKDTETNCQQFFRFWSRTGKDNPKSFEKHKIELKPYEKAKFEKGEELKVLGKVPPSSNQFQKNMQIENLSIYKVKTDILGNKHFIKKEGDEPKLKFKK

SEQ ID NO: 462 - protein, 1129 aa, Streptococcus infantarius
  Streptococcus infantarius subsp. infantarius ATCC BAA-102
MSNGKILGLDIGVASVGVGIIDSKTGNVIHANSRLFSAANAENNAERRGFRGARRLTRRKKHRVKRVRDLFEKYDISTDFRNLNLNPYELRVKGLTEQLTNEELFAALRTIAKRRGISYLDDAEDDSTGSSDYAKSIDENRRLLKTKTPGQIQLERLEKYGQLRGNFTVYDENGEAHRLINVFSTSDYKNEARKILETQSNYNKQITDEFIEDYIEILTQKRKYYHGPGNEKSRTDYGRFRTDGTTLENIFGILIGKCSFYPEEYRASKASYTAQEFNFLNDLNNLKVPTETGKLSTEQKEYLVDFAKKSKALGASKLLKEIAKIVDCSVDDIKGYRVDNKDKPDLHTFEPYRKLKFNLSSIDIDELSRETLDKLADILTLNTEREGIEDAIKRNLPSQFTEEQISEIVQIRKNQSSAFNKGWHSFSAKLMNELIPELYVTSEEQMTILTRLEKFKVNKKSSKNTKTIDEKEITDEIYNPVVAKSVRQTIKIINAAVKKYGDFDKIVIEMPRDKNAEDEKKFIDKKQKENKKEKDDSLKRAAFLYNGTDNLPDGVFHGNKELKTKIRLWYQQGERCLYSGKLISIHDLVHNSNKFEIDHILPLSLSFDDSLANKVLVYAWTNQEKGQKTPYQVIDSMDTAWSFREMKDYVLKQKGLGKKKCEYLLTTENIDKIEVKKKFIERNLVDTRYASRVVLNSLQTALKELGKDTKVSVVRGQFTSQLRRKWNIDKSRETYHHHAVDALIIAASSQLKLWQKQENPMFESYGENQVVNKETGEILSISDDKYKELVFQPPYQGFVNTISSKGFEDEILFSYQVDSKFNRKVSDATIYSTRKAKLGKDKKDETYVLGKIKDIYSQDGFDTFIKRYKKDKTQFLMYQKDPLTWENVIEVILRDYPSEKLSEDGKKTVKCNPFEEYRRENGLICKYSKKGNGTPIKSLKYYDKKLGNCIDITPEKSKNRVVLRQISPWRADIYFNLETLKYELMGLKYSDLSFEKGTGKYHISQEKYDAIREKEGIGKKSEFKFTLYRNDLILIKDTLNNCERMLRFGSKNDTSKHYVELKPLEKGTFDSEEEILPVLGKVAKSGQFIKGLNKPNISIYKVRTDVLGNKFFIKKEGDKPKLDFKNNNK

SEQ ID NO: 463 - protein, 1375 aa, Streptococcus infantarius
MEKSYSIGLDIGTNSVGWAVITDDYKVPAKKMKVLGNTDKKYIKKNLLGALLFDSGETAEVTRLKRTARRRYTRRKNRLRYLQEIFAKEMTKVDESFFQRLEESFLTDDDKTFDSHPIFGNKAEEDAYHQKFPTIYHLRKYLADSQEKADLRLVYLALAHMIKYRGHFLIEGELNAENTDVQKLFNVFVETYDKIVDESHLSEIEVDASSILTEKVSKSRRLENLIKQYPTEKKNTLFGNLIALALGLQPNFKTNFKLSEDAKLQFSKDTYEEDLEELLGKVGDDYADLFISAKNLYDAILLSGILTVDDNSTKAPLSASMIKRYVEHHEDLEKLKEFIKINKLKLYHDIFKDKTKNGYAGYIDNGVKQDEFYKYLKTILTKIDDSDYFLDKIERDDFLRKQRTFDNGSIPHQIHLQEMHSILRRQGDYYPFLKENQAKIEKILTFRIPYYVGPLARKDSRFAWANYHSDEPITPWNFDEVVDKEKSAEKFITRMTLNDLYLPEEKVLPKHSHVYETFTVYNELTKIKYVNEQGESFFFDANMKQEIFDHVFKENRKVTKAKLLSYLNNEFEEFRINDLIGLDKDSKSFNASLGTYHDLKKILDKSFLDDKTNGQIIEDIVLTLTLFEDRDMIHERLQKYSDFFTSQQLKKLERRHYTGWGRLSYKLINGIRNKENNKTILDFLIDDGHANRNFMQLINDESLSFKTIIQEAQVVGDVDDIEAVVHDLPGSPAIKKGILQSVKIVDELVKVMGDNPDNIVIEMARENQTTGYGRNKSNQRLKRLQDSLKEFGSDILSKKKPSYVDSKVENSHLQNDRLFLYYIQNGKDMYTGEELDIDRLSDYDIDHIIPQAFIKDNSIDNKVLTSSAKNRGKSDDVPSIEIVRNRRSYWYKLYKSGLISKRKFDNLTKAERGGLTEADKAGFIKRQLVETRQITKHVAQILDARFNTKRDENDKVIRDVKVITLKSNLVSQFRKEFKFYKVREINDYHHAHDAYLNAVVGTALLKKYPKLTPEFVYGEYKKYDVRKLIAKSSDDYSEMGKATAKYFFYSNLMNFFKTEVKYADGRVFERPDIETNADGEVVWNKQKDFDIVRKVLSYPQVNIVKKVEAQTGGFSKESILSKGDSDKLIPRKTKKVYWNTKKYGGFDSPTVAYSVLVVADIEKGKAKKLKTVKELVGISIMERSFFEENPVSFLEKKGYHNVQEDKLIKLPKYSLFEFEGGRRRLLASATELQKGNEVMLPAHLVELLYHAHRIDSFNSTEHLKYVSEHKKEFEKVLSCVENFSNLYVDVEKNLSKVRAAAESMTNFSLEEISASFINLLTLTALGAPADFNFLGEKIPRKRYTSTKECLSATLIHQSVTGLYETRIDLSKLGEE

SEQ ID NO: 464 - protein, 1368 aa, Streptococcus iniae
  Streptococcus iniae 9117
MRKPYSIGLDIGTNSVGWAVITDDYKVPSKKMRIQGTTDRTSIKKNLIGALLFDNGETAEATRLKRTTRRRYTRRKYRIKELQKIFSSEMNELDIAFFPRLSESFLVSDDKEFENHPIFGNLKDEITYHNDYPTIYHLRQTLADSDQKADLRLIYLALAHIIKFRGHFLIEGNLDSENTDVHVLFLNLVNIYNNLFEEDIVETASIDAEKILTSKTSKSRRLENLIAEIPNQKRNMLFGNLVSLALGLTPNFKTNFELLEDAKLQISKDSYEEDLDNLLAQIGDQYADLFIAAKKLSDAILLSDIITVKGASTKAPLSASMVQRYEEHQQDLALLKNLVKKQIPEKYKEIFDNKEKNGYAGYIDGKTSQEEFYKYIKPILLKLDGTEKLISKLEREDFLRKQRTFDNGSIPHQIHLNELKAIIRRQEKFYPFLKENQKKIEKLFTFKIPYYVGPLANGQSSFAWLKRQSNESITPWNFEEVVDQEASARAFIERMTNFDTYLPEEKVLPKHSPLYEMFMVYNELTKVKYQTEGMKRPVFLSSEDKEEIVNLLFKKERKVTVKQLKEEYFSKMKCFHTVTILGVEDRFNASLGTYHDLLKIFKDKAFLDDEANQDILEEIVWTLTLFEDQAMIERRLVKYADVFEKSVLKKLKKRHYTGWGRLSQKLINGIKDKQTGKTILGFLKDDGVANRNFMQLINDSSLDFAKIIKNEQEKTIKNESLEETIANLAGSPAIKKGILQSIKIVDEIVKIMGQNPDNIVIEMARENQSTMQGIKNSRQRLRKLEEVHKNTGSKILKEYNVSNTQLQSDRLYLYLLQDGKDMYTGKELDYDNLSQYDIDHIIPQSFIKDNSIDNTVLTTQASNRGKSDNVPNIETVNKMKSFWYKQLKSGAISQRKFDHLTKAERGALSDFDKAGFIKRQLVETRQITKHVAQILDSRFNSNLTEDSKSNRNVKIITLKSKMVSDFRKDFGFYKLREVNDYHHAQDAYLNAVVGTALLKKYPKLEAEFVYGDYKHYDLAKLMIQPDSSLGKATTRMFFYSNLMNFFKKEIKLADDTIFTRPQIEVNTETGEIVWDKVKDMQTIRKVMSYPQVNIVMKTEVQTGGFSKESIWPKGDSDKLIARKKSWDPKKYGGFDSPIIAYSVLVVAKIAKGKTQKLKTIKELVGIKIMEQDEFEKDPIAFLEKKGYQDIQTSSIIKLPKYSLFELENGRKRLLASAKELQKGNELALPNKYVKFLYLASHYTKFTGKEEDREKKRSYVESHLYYFDEIMQIIVEYSNRYILADSNLIKIQNLYKEKDNFSIEEQAINMLNLFTFTDLGAPSAFKFFNGDIDRKRYSSTNEIINSTLIYQSPTGLYETRIDLSKLGGK

SEQ ID NO: 465 - protein, 1338 aa, Streptococcus macacae
  Streptococcus macacae NCTC 11558
MTKPYSIGLDIGTNSVGWAVVTDGYKVPAKKMKVLGNTDKSHIKKNLLGALLFDSGNTAKDRRLKRTARRRYTRRRNRILYLQEIFAEEMAKADESFFQRLNESFLTNDDKEFDSHPIFGNKAEEEAHHHKFPTIFHLRKHLADSTEKSDLRLIYLALAHMIKFRGHFLIEGQLKAENTNVQTLFDDFVEVYDKTVEESHLSEISVSSILTEKISKSRRLENLIKYYPTEKKNTLFGNLIALSLGLQPNFKTNFKLSEDAKLQFSKDTYEEDLGELLGKIGDNYADLFISAKNLYDAILLSGILTIDDNTTKAPLSASMIKRYEEHQEDLAQLKKFIRQNLPDQYSEVFSDKTKDGYAGYIDGKTNQEAFYKYIKNMLSKTEGADYFLDKIDREDFLRKQRTFDNGSVPHQIHLQEMHAILRRQGEYYPFLKENQDKIEKILTFRIPYYVGPLARKGSRFAWAEYKADKKVTPWNFDDILDKEKSAEEFITRMTLNDLYLPEEKVLPKHSLVYETFNVYNELTKVKYVNEQGKAIFFDANMKQEIFDHVFKENRKVTKDKLLNYLNKEFEEFRIVNLTGLDKENKAFNSSLGTYHDLRKILDKSFLDDKVNEKIIEDIIQTLTLFEDREMIRQRLQKYSDIFTTQQLKKLERRHYTGWGRLSAKLINGIRDKQSNKTILGYLIDDGYSNRNFMQLINDDSLPFKEEIARAQVIGETDDLNQLVSDIAGSPAIKKGILQSLKIVDELVKVMGHNPANIVIEMARENQTTAKGRRSSQQRYKRLEEAIKNLDHDLNHKILKEHPTDNQALQNDRLFLYYLQNGRDMYTEDPLDINRLSDYDIDHIIPQSFIKDDSIDNKVLVSSAKNRGKSDNVPSEDVVNRMRPFWNKLLSCGLISQRKYSNLTKKELKPDDKAGFIKRQLVETRQITKHVAQILDARFNTKRDENKKVIRDVKIITLKSNLVSQFRKDFKFYKVREINDYHHAHDAYLNAVIGKALLDVYPQLEPEFVYGEYPHFHGYKENKATAKKFFYSNIMNFFKKDDIRTDENGEIVWKKDEHISNIKRVLSYPQVNIVKKVEIQTVGQNGGLFDDNPKSPLEVTPSKLVPLKKELNPKKYGGYQKPTTAYPVLLITDTKQLIPISVMNKKQFEQNPVKFLRDRGYQQVGKNDFIKLPKYTLVDIGDGIKRLWASSKEIHKGNQLVVSKKSQILLYHAHHLDSDLSNDYLQNHNQQFDVLFNEIISFSKKCKLGKEHIQKIENVYSNKKNSASIEELAESFIKLLGFTQLGATSPFNFLGVKLNQKQYKGKKDYILPCTEGTLIRQSITGLYETRVDLSKIGED

SEQ ID NO: 466 - protein, 1130 aa, Streptococcus macedonicus
MTNGKILGLDIGIASVGVGIIEAKTGKVVHANSRLFSAANAENNAERRGFRGSRRLNRRKKHRVKRVRDLFEKYGIVTDFRNLNLNPYELRVKGLTEQLTNEELFAALRTISKRRGISYLDDAEDDSTGSTDYAKSIDENRRLLKTKTPGQIQLERLEKYGQLRGNFTVYDENGEAHRLINVFSTSDYEKEARKILETQADYNKKITAEFIDDYVEILTQKRKYYHGPGNEKSRTDYGRFRTDGTTLENIFGILIGKCNFYPDEYRASKASYTAQEYNFLNDLNNLKVPTETGKLSTEQKESLVEFAKNTAILGPAKLLKEIAKILDCKVDEIKGYREDDKGKPDLHTFEPYRKLKFNLDSVNIDYLSREVLDKLADILTLNTEREGIEDAIKRNLPNQFTEEQISEIINVRKSQSTAFNKGWHSFSAKLMNELIPELYATSDEQMTILTRLEKFKVKKKSSKNIKTIDEKEITDEIYNPVVAKSVRQTIKIINAAVKKYGDFDKIVIEMPRDKNADDEKKFINKRNKENKKEKDDALKRAAYLYNGTDKLPDEVFHGNKQLETKIRLWYQQGERCLYSGKPIPIQELVHNSNNFEIDHILPLSLSFDDSLANKVLVYSWTNQEKGQKTPYQVIDSMDAAWSFREMKEYVLKQKGLGKKKRDYLLTTENIDKIEVKKKFIERNLVDTRYASRVVLNSLQSALRELGKDTKVSVVRGQFTSQLRRKWKIDKSRETYHHHAVDALIIAASSQLKLWEKQDNPMFVDYGNNQVVDKQTGEILSVSDNEYKELVFQPPYQGFVNTISSKGFEDEILFSYQVDSKYNRKVSDATIYSTRKAKIGKDKKEETYVLGKIKDIYSQNGFDTFVKKYNKDKTQFLMYQKDPLTWENVIEVILGDYPTTKKSEDGKNDVKCNPFEEYRRENGLICKYSKKGKGTPIKSLKYYDKKLGNCIDITPEESRNKVILQSINPWRADVYFNPETLKYELMGLKYSDLSFEKGTGNYHISQEKYDAIKEKEGIGKKSEFKFTLYRNDLILIKDIASGEQEIYRFLSRTMPNVNHYVELKPYDKEKFDNVQELVEALGEADKVGRCIKSLNKPNISIYKVRTDVLGNKYFVKKEGDKPKLDFKNNKK

SEQ ID NO: 467 - protein, 1134 aa, Streptococcus mitis
  Streptococcus mitis ATCC 6249
MNGLVLGLDIGIASEGVGILEKNSGKIIHANSRLFPAATADNNVERRKNRQARRLNRRKKHRGVRFQDLFEDYGLLTDFSKVSINLNPYRLRVDGLNQQLTNEELFIALKNIVKRRGISYLDDASEDGGAVSSDYGKAVEENRKLLAEQTPGQIQLERFEKYGQVRGDFTVVENGEKLRLINVFSTSAYKKEAERILRKQQEFNNQITDEFIEDYLKILTGKRKYYHGPGNEKSRTDYGRFRTDGTTLDNIFGILIGKCTFYPEEYRASKASYTAQEFNLLNDLNNLTVPTETKKLSEEQKKVIVEYAKEAKTLGASTLLKYIAKMIDASVDQIRGYRVDVNNKPEMHTFEVYRKMQSLETISVGELSRNVLDELAHILTLNTEREGMEEAINTKLKDSFSQDQVLELVQFRKNNSSLFSKGWHNFSLKLMMELIPELYETSEEQMTILTRLGKQKSKETSKRTKYIDEKELTEEIYNPVVAKSVRQAIKIINEATKKHGIFDNIVIEMARENNEEDAKKDYIKRQKANQDEKNAAMEKAAFQYNGKKELPDNIFHGHKELATKIRLWHQQGEKCLYTGKTIPISDLIYNQYKYEIDHILPLSLSFDDSLSNKVLALATANQEKGQRTPFQALDSMDDAWSYREFKSYVKDLKSLSNKKKDYLLTEEDISKIEVKQKFIERNLVDTRYSSRVVLNALQDFYKSHQFDTTISVVRGQFTSQLRRKWGLEKSRETYHHHAVDALIIAASSQLRLWKKQNNPLITYKEGQFVDSQTGEIISLTDDEYKELVFKAPYDHFVDTLSSKTFEDSILFSYQVDSKFNRKISDATIYATRKAKLDKEKKEYTYTLGKIKDIYSLGTKTPSKTGFYKFLDLYNKDKSQFLMFQKDRKTWDEVIEKIMEQYRPFKEYDKTGKLVDFNPFEKYRQENEPIRKYSKKGNGPEIKSLKYYDILLGKHKNITPEGSRNTVALLSLNPWRTDVYYNMETKKYEFLGLKYADLPFEEGGAYGISTETYNELREKEGIGKNSEFKFTLYKNDLILIKDTETNCQQIFRFWSRTGKDNPKSFEKHKIELKPYEKARFEKGEELEVLGKVPPSSNQLQKNMQIENLSIYKVKTDVLGNKHFIKKEGDKPKLKF

SEQ ID NO: 468 - protein, 1392 aa, Streptococcus mitis
  Streptococcus mitis SK321
MNNNNYSIGLDIGTNSVGWAVITDDYKVPSKKMKVLGNTDKHFIKKNLIGALLFDEGATAEDRRFKRTARRRYTRRKNRLRYLQEIFSEEMSKVDSSFFHRLDDSFLVPEDKRGSKYPIFATLAEEKEYHKKFPTIYHLRKHLADSKEKTDLRLIYLALAHMIKYRGHFLYEESFDIKNNDIQKIFSEFISIYDNTFEGSSLSGQNAQVEAIFTDKISKSAKRERILKLFAYEKSTDLFSEFLKLIVGNQADFKKHFDLEEKAPLQFSKDTYDEDLENLLGQIGDDFADLFLVAKKLYDAILLSGILTVTDSSTKAPLSASMIERYENHQKDLAALKQFIQNNLQEKYDEVFSDQSKDGYARYINGKTTQEAFYKYIKNLLSKFEGSDYFLDKIEREDFLRKQRTFDNGSIPHQIHLQEMNAIIRRQGEHYPFLKEYKEKIETILTFRIPYYVGPLARGNRNFAWLTRNSDQAIRPWNFEEIVDQASSAEEFINKMTNYDLYLPEEKVLPKHSLLYETFAVYNELTKVKFISEGLRDYQFLDSGQKKQIVNQLFKEKRKVTEKDIIQYLHNVDGYDGIELKGIEKQFNASLSTYHDLLKIIKDKEFMDDPKNEEILENIVHTLTIFEDREMIKQRLAQYASIFDKKVIKALTRRHYTGWGKLSAKLINGICDKKTGKTILDYLIDDGYSNRNFMQLINDDGLSFKDIIQKAQVVGKTNDVKQVVQELPGSPAIKKGILQSIKLVDELVKVMGHAPESIVIEIARENQTTARGKKNSQQRYKRIEDALKNLAPGLDSNILKEHPTDNIQLQNDRLFLYYLQNGKDMYTGEALDINQLSSYDIDHIVPQAFIKDDSLDNRVLTSSKDNRGKSDNVPSLEVVQKRKAFWQQLLDSKLISEHKFNNLTKAERGGLDERDKVGFIRRQLVETRQITKHVAQILDARFNTEVNEKDKKNRTVKIITLKSNLVSNFRKEFKLYKVREINDYHHAHDAYLNAVVAKAILKKYPKLEPGFVYGDYQKYDIKRYISRSKDPKEVEKATEKYFFYSNLLNFFKEEVHYADGTIVKRENIEYSKDTGEIAWNKEKDFATIKKVLSLPQVNIVKKTEIQTHGLDRGKPRGLFNSNPSPKPSEDRKENLVPIKQGLDPRKYGGYAGISNSYAVLVKAIIEKGAKKQQKTVLEFQGISILDKINFEKNKENYLLEKGYIKILSTITLPKYSLFEFPDGTRRRLASILSTNNKRGEIHKGNELVIPEKYTTLLYHAKNINKTLEPEHLEYVEKHRNDFAKLLEYVLNFNDKYVGALKNGERIRQAFIDWETVDIEKLCFSFIGPRNSKNAGLFELTSQGSASDFEFLGVKIPRYRDYTPSSLLNATLIHQSITGLYETRIDLSKLGED

SEQ ID NO: 469 - protein, 1345 aa, Streptococcus mutans
  Streptococcus mutans 11SSST2
MKKPYSIGLDIGTNSVGWAVVTDDYKVPAKKMKVLGNTDKSHIKKNLLGALLFDSGNTAADRRLKRTARRRYTRRRNRILYLQEIFAEEMSKVDDSFFHRLEDSFLVTEDKRGERHPIFGNLEEEVKYHENFPTIYHLRQYLADNPEKVDLRLVYLALAHIIKFRGHFLIEGKFDTRNNDVQRLFQEFLAVYDNTFENSSLQEQNVQVEEILTDKISKSAKKDRVLKLFPNEKSNGRFAEFLKLIVGNQADFKKHFELEEKAPLQFSKDTYEEELEVLLTQIGDNYAELFLSAKKLYDSILLSGILTVTDVSTKAPLSASMIQRYNEHQMDLAQLKQFIRQKLSDKYNEVFSDVSKDGYAGYIDGKTNQEAFYKYLKGLLNKIEGSGYFLDKIEREDFLRKQRTFDNGSIPHQIHLQEMRAIIRRQAEFYPFLADNQDRIEKILTFRIPYYVGPLARGKSDFAWLSRKSADKITPWNFDEIVDKESSAEAFINRMTNYDLYLPNQKVLPKHSLLYEKFTVYNELTKVKYKTEQGKTAFFDANMKQEIFDGVFKVYRKVTKDKLMDFLEKEFDEFRIVDLTGLDKENKAFNASYGTYHDLRKILDKDFLDNSKNEKILEDIVLTLTLFEDREMIRKRLENYSDLLTKEQVKKLERRHYTGWGRLSAELIHGIRNKESRKTLLDYLIDDGNSNRNFMQLINDDALSFKEEIAKAQVIGETDNLNQVVSDIAGSPAIKKGILQSLKIVDELVKIMGHQPENIVVEMARENQFTNQGRRNSQQRLKGLTDSIKEFGSQILKEHPVENSQLQNDRLFLYYLQNGRDMYTGEELDIDYLSQYDIDHIIPQAFIKDNSIDNRVLTSSKENRGKSDDVPSKDVVRKMKPYWSKLLSAKLITQRKFDNLTKAERGGLTDDDKAGFIKRQLVETRQITKHVARILDERFNTETDENNKKIRQVKIVTLKSNLVSNFRKEFELYKVREINDYHHAHDAYLNAVIGKALLGVYPQLEPEFVYGDYPHFHGHEENKATAKKFFYSNIMNFFKKDDVRTDKNGEIIWKKDEHISNIKKVLSYPQVNIVKKVEEQTGGFSKESILPKGNSDKLIPRKTKKFYWDTKKYGGFDSPIVAYSILVIADIEKGKSKKLKTVKALVGVTIMEKMTFERDPVAFLERKGYRNVQEENIIKLPKYSLFKLENGRKRLLASARELQKGNEIVLPNHLGTLLYHAKNIHKVDEPKHLDYVDKHKDEFKELLDVVSNFSKKYTLAEGNLEKIKELYAQNNGEDLKELSSSFINLLTFTAIGAPAAFKFFDKNIDRKRYTSTTEILNATLIHQSITGLYETRIDLSKLGGD

SEQ ID NO: 470 - protein, 1345 aa, Streptococcus mutans; identical to SEQ ID NO: 469
  Streptococcus mutans 11SSST2

SEQ ID NO: 471 - protein, 1345 aa, Streptococcus mutans
  Streptococcus mutans 11VS1
MKKPYSIGLDIGTNSVGWAVVTDDYKVPAKKMKVLGNTDKSHIKKNLLGALLFDSGNTAEDRRLKRTARRRYTRRRNRILYLQEIFSEEMGKVDDSFFHRLEDSFLVTEDKRGERHPIFGNLEEEVKYHENFPTIYHLRQYLADNPEKVDLRLVYLALAHIIKFRGHFLIEGKFDTRNNDVQRLFQEFLAVYDNTFENSSLQEQNVQVEEILTDKISKSAKKDRVLKLFPNEKSNGRFAEFLKLIVGNQADFKKHFELEEKAPLQFSKDTYEEELEVLLAQIGDNYAELFLSAKKLYDSILLSGILTVTDVSTKAPLSASMIQRYNEHQMDLAQLKQFIRQKLSDKYNEVFSDVSKDGYAGYIDGKTNQEAFYKYLKGLLNKIEGSGYFLDKIEREDFLRKQRTFDNGSIPHQIHLQEMRAIIRRQAEFYPFLADNQDRIEKILTFRIPYYVGPLARGKSDFAWLSRKSADKITPWNFDEIVDKESSAEAFINRMTNYDLYLPNQKVLPKHSLLYEKFTVYNELTKVKYKTEQGKTAFFDANMKQEIFDGVFKVYRKVTKDKLMDFLEKEFDEFRIVDLTGLDKENKVFNASYGTYHDLCKILDKDFLDNSKNEKILEDIVLTLTLFEDREMIRKRLENYSDLLTKEQVKKLERRHYTGWGRLSAELIHGIRNKESRKTILDYLIDDGNSNRNFMQLINDDALSFKEEIAKAQVIGETDNLNQVVSDIAGSPAIKKGILQSLKIVDELVKIMGHQPENIVVEMARENQFTKQGRRNSQQRLKGLTDSIKEFGSQILKEHPVENSQLQNDRLFLYYLQNGRDMYTGEELDIDYLSQYDIDHIIPQAFIKDNSIDNRVLTSSKENRGKSDDVPSKDVVRKMKSYWSKLLSAKLITQRKFDNLTKAERGGLTDDDKAGFIKRQLVETRQITKHVARILDERFYTETDENNKKIRQVKIVTLKSNLVSNFRKEFELYKVREINDYHHAHDAYLNAVIGKALLGVYPQLEPEFVYGDYPHFHGHKENKATAKKFFYSNIMNFFKKDDVRTDKNGEIIWKKDEHISNIKKVLSYPQVNIVKKVEEQTGGFSKESILPKGNSDKLIPRKTKKFYWDTKKYGGFDSPIVAYSILVIADIEKGKSKKLKTVKALVGVTIMEKMTFERDPVAFLERKGYRNVQEENIIKLPKYSLFKLENGRKRLLASARELQKGNEIVLPNHLGTLLYHAKNIHKVDEPKHLDYVDKHKDEFKELLDVVSNFSKKYTLAEGNLEKIKELYAQNNGEDLKELASSFINLLTFTAIGAPATFKFFDKNIDRKRYTSTTEILNATLIHQSITGLYETRIDLSKLGGD

SEQ ID NO: 472 - protein, 1345 aa, Streptococcus mutans
  Streptococcus mutans 14D
MKKPYSIGLDIGTNSVGWAVVTDDYKVPAKKMKVLGNTDKSHIKKNLLGALLFDSGNTAADRRLKRTARRRYTRRRNRILYLQEIFAEEMSKVDDSFFHRLEDSFLVTEDKRGERHPIFGNLEEEVKYHENFPTIYHLRQYLADNPEKVDLRLVYLALAHIIKFRGHFLIEGKFDTRNNDVQRLFQEFLAVYDNTFENSSLQEQNVQVEEILTDKISKSAKKDRVLKLFPNEKSNGRFAEFLKLIVGNQADFKKHFELEEKAPLQFSKDTYEEELEVLLAQIGDNYAELFLSAKKLYDSILLSGILTVTDVSTKAPLSASMIQRYNEHQMDLAQLKQFIRQKLSDKYNEVFSDVSKDGYAGYIDGKTNQEAFYKYLKGLLNKIEGSGYFLDKIEREDFLRKQRTFDNGSIPHQIHLQEMRAIIRRQAEFYPFLADNQDRIEKILTFRIPYYVGPLARGKSDFAWLSRKSADKITPWNFDEIVDKESSAEAFINRMTNYDLYLPNQKVLPKHSLLYEKFTVYNELTKVKYKTEQGKTAFFDANMKQEIFDGVFKVYRKVTKDKLMDFLEKEFDEFRIVDLTGLDKENKAFNASYGTYHDLRKILDKDFLDNSKNEKILEDIVLTLTLFEDREMIRKRLENYSDLLTKEQVKKLERRHYTGWGRLSAELIHGIRNKESRKTILDYLIDDGNSNRNFMQLINDDALSFKEEIAKAQVIGETDNLNQVVSDIAGSPAIKKGILQSLKIVDELVKIMGHQPENIVVEMARENQFTNQGRRNSQQRLKGLTDSIKEFGSQILKEHPVEHSQLQNDRLFLYYLQNGRDMYTGEELDIDYLSQYDIDHIIPQAFIKDNSIDNRVLTSSKENRGKSDDVPSKNVVRKMKSYWSKLLSAKLITQRKFDNLTKAERGGLTDDDKAGFIKRQLVETRQITKHVARILDERFHTETDENNKKIRQVKIVTLKSNLVSNFRKEFELYKVREINDYHHAHDAYLNAVIGKALLGVYPQLEPEFVYGDYPHFHGHKENKATAKKFFYSNIMNFFKKDDVRTDKNGEIIWKKDEHISNIKKVLSYPQVNIVKKVEEQTGGFSKESILPKGNSDKLIPRKTKKFYWDTKKYGGFDSPIVAYSILVIADIEKGKSKKLKTVKALVGVTIMEKMTFERDPVAFLERKGYRNVQEENIIKLPKYSLFKLENGRKRLLASARELQKGNEIVLPNHLGTLLYHAKNIHKVDEPKHLDYVDKHKDEFKELLDVVSNFSKKYTLAEGNLEKIKELYAQNNGEDLKELASSFINLLTFTAIGAPATFKFFDKNIDRKRYTSTTEILNATLIHQSITGLYETRIDLSKLGGD

SEQ ID NO: 473 - protein, 1355 aa, Streptococcus mutans
  Streptococcus mutans 15VF2
MKKSYSIGLDIGTNSVGWAVVTDDYKVPAKKMKVLGNTDKSHIKKNLLGALLFDSGNTAEDRRLKRTARRRYTRRRNRILYLQEIFSEEMGKVDDSFFHRLDESFLTDDDKNFDSHPIFGNKAEEDAYHQKFPTIYHLRKHLADSTEKADLRLVYLALAHMIKFRGHFLIEGELNAENTDVQKLFADFVGVYDRTFDDSHLSEITVDASSILTEKISKSRRLEKLINNYPKEKKNTLFGNLIALSLGLQPNFKTNFKLSEDAKLQFSKDTYEEDLEELLGKIGDDYADLFTLAKNLYDAILLSGILTADDSSTKAPLSASMIKRYAEHHEDLEKLKEFIKANKPELYHDIFKDETKNGYAGYIENGVKQDEFYKYLKNTLSKIAGSDYFLDKIEREDFLRKQRTFDNGSIPHQIHLQEMHAILRRQGDYYPFLKENQDRIEKILTFRIPYYVGPLARKNSRFAWAEYHSDEAVMPWNFDQVIDKESSAQAFIEHMTNNDLYLPNEKVLPKHSPLYEKYTVYNELTKIKYVTEIGEAKFFDANLKQEIFDGLFKHERKVTKKKLRTFLDKNFDEFRIVDIQGLDKETETFNASYATYQDLLKVIKDKVFMDNPENAEILENIVLTLTLFEDREMIKQRLAKYADVFDKKVIDQLARRHYTGWGRLSAKLLNGIRDKQSCKTIMDYLIDDAQSNRNLMQLITDDNLTFKDDIVKAQYVDNSDDLHQVVQSLAGSPAIKKGILQSLKIVDELVKVMGKEPEQIVVEMARENQTTAKGRRNSQQRYKRLKEAIKSLDRDLNHKILKEHPTDNQALQNNRLFLYYLQNGRDMYTGESLDINRLSDYDIDHVIPQAFIKDNSIDNRVLTSSKANRGKSDDVPSEDVVNRMRPFWNKLLSSGLISQRKYNNLTKKELTPDDKAGFIKRQLVETRQITKHVARMLDERFNKEFDDNNKRIRRVKIVTLKSNLVSSFRKEFELYKVREINDYHHAHDAYLNAVVVKALLVKYPKLEPEFVYGEYPKYNSYRERKTATQKMFFYSNIMNMFKSKVKLADDQIVERPMIEVNDETGEIAWDKTKHITTVKKVLSYPQVNIVKKVEEQTIGQNGGLFDDNPKSPLEVIPSKLVPLKKALNPEKYGGYQKPTTAYPILLIVDTKQLIPISVMDKKRFEQNPVKFLKDKGYQQIEKNNFVKLPKYTLVDIGNGIKRLWASSKEVHKGNQLVVSKKSQDLLYHAHHLDNDYSNEYVKNHYQQFDILFNEITSFSKKCKLGKEHIQKIEEAYSKERDSASIEELADGFIKLLGFTQLGATSPFSFLGIKLNQKQYTGKKDYLLPCMEATLIHQSITGLYETRIDLNKLGGD

SEQ ID NO: 474 - protein, 1355 aa, Streptococcus mutans; identical to SEQ ID NO: 473
  Streptococcus mutans 15VF2

SEQ ID NO: 475 - protein, 1345 aa, Streptococcus mutans
  Streptococcus mutans 1SM1
MKKPYSIGLDIGTNSVGWAVVTDDYKVPAKKMKVLGNTDKSHIKKNLLGALLFDSGNTAEDRRLKRTARRRYTRRRNRILYLQEIFSEEMGKVDDSFFHRLEDSFLVTEDKRGERHPIFGNLEEEVKYHENFPTIYHLRQYLADNPEKVDLRLVYLALAHIIKFRGHFLIEGKFDTRNNDVQRLFQEFLAVYDNTFENSSLQEQNVQVEEILTDKISKSAKKDRVLKLFPNEKSNGRFAEFLKLIVGNQADFKKHFELEEKAPLQFSKDTYEEDLEELLGKIGDDYADLFTLAKNLYDAILLSGILTADDSSTKAPLSASMIQRYNEHQMDLAQLKQFIRQKLSDKYNEVFSDVSKDGYAGYIDGKTNQEAFYKYLKGLLNKIEGSGYFLDKIEREDFLRKQRTFDNGSIPHQIHLQEMRAIIRRQAEFYPFLADNQDRIEKILTFRIPYYVGPLARGKSDFAWLSRKSADKITPWNFDEIVDKESSAEAFINRMTNYDLYLPNQKVLPKHSLLYEKFTVYNELTKVKYKTEQGKTAFFDANMKQEIFDGVFKVYRKVTKDKLMDFLEKEFDEFRIVDLTGLDKENKVFNASYGTYHDLCKILDKDFLDNSKNEKILEDIVLTLTLFEDREMIRKRLENYSDLLTKEQVKKLERRHYTGWGRLSAELIHGIRNKESRKTILDYLIDDGNSNRNFMQLINDDALSFKEEIAKAQVIGETDNLNQVVSDIAGSPAIKKGILQSLKIVDELVKIMGHQPENIVVEMARENQFTNQGRRNSQQRLKGLTDSIKEFGSQILKEHPVENSQLQNDRLFLYYLQNGRDMYTGEELDIDYLSQYDIDHIIPQAFIKDNSIDNRVLTSSKENRGKSDDVPSKDVVRKMKSYWSKLLSAKLITQRKFDNLTKAERGGLTDDDKAGFIKRQLVETRQITKHVARILDERFYTETDENNKKIRQVKIVTLKSNLVSNFRKEFELYKVREINDYHHAHDAYLNAVIGKALLGVYPQLEPEFVYGDYPHFHGHKENKATAKKFFYSNIMNFFKKDDVRTDKNGEIIWKKDEHISNIKKVLSYPQVNIVKKVEEQTGGFSKESILPKGNSDKLIPRKTKKFYWDTKKYGGFDSPIVAYSILVIADIEKGKSKKLKTVKALVGVTIMEKMTFERDPVAFLERKGYRNVQEENIIKLPKYSLFKLENGRKRLLASARELQKGNEIVLPNHLGTLLYHAKNIHKVDEPKHLDYVDKHKDEFKELLDVVSNFSKKYTLAEGNLEKIKELYAQNNGEDLKELASSFINLLTFTAIGAPATFKFFDKNIDRKRYTSTTEILNATLIHQSITGLYETRIDLSKLGGD

SEQ ID NO: 476 - protein, 1345 aa, Streptococcus mutans; identical to SEQ ID NO: 475
  Streptococcus mutans 1SM1

SEQ ID NO: 477 - protein, 1350 aa, Streptococcus mutans
  Streptococcus mutans 24
MKKPYSIGLDIGTNSVGWAVVTDDYKVPAKKMKVLGNTDKSHIEKNLLGALLFDSGNTAEDRRLKRTARRRYTRRRNRILYLQEIFSEEMGKVDDSFFHRLEDSFLVTEDKRGERHPIFGNLEEEVKYHENFPTIYHLRQYLADNPEKVDLRLVYLALAHIIKFRGHFLIEGKFDTRNNDVQRLFQEFLAVYDNTFENSSLQEQNVQVEEILTDKISKSAKKDRVLKLFPNEKSNGRFAEFLKLIVGNQADFKKHFELEEKAPLQFSKDTYEEELEVLLAQIGDNYAELFLSAKKLYDSILLSGILTVTDVSTKAPLSASMIQRYNEHQMDLTQLKQFIRQKLSDKYNEVFSDVSKDGYAGYIDGKTNQEAFYKYLKGLLNKIEGSGYFLDKIEREDFLRKQRTFDNGSIPHQIHLQEMRAIIRRQAEFYPFLADNQDRIEKILTFRIPYYVGPLARGKSDFAWLSRKSADKITPWNFDEIVDKESSAEAFINRMTNYDLYLPNQKVLPKHSLLYEKFTVYNELTKVKYKTEQGKTAFFDANMKQEIFDGVFKVYRKVTKDKLMDFLEKEFDEFRIVDLTGLDKENKAFNASYGTYHDLRKILDKDFLDNSKNEKILEDIVLTLTLFEDREMIRKRLKNYSDLLTKEQLKKLERRHYTGWGRLSAELIHGIRNKESRKTILDYLIDDGNSNRNFMQLINDDALSFKEEIAKAQVIGETDNLNQVVSDIAGSPAIKKGILQSLKIVDELVKIMGHQPENIVVEMARENQFTNQGRQNSQQRLKGLTDSIKEFGSQILKEHPVENSQLQNDRLFLYYLQNGRDMYTGEELDIDYLSQYDIDHIIPQAFIKDNSIDNRVLTSSKENRGKSDDVPSEDVVNRMRPFWNKLLSSGLISQRKYNNLTKKELTLDDKAGFIKRQLVETRQITKHVARMLDERFNKEFDDNNKRICKVKIVTLKSNLVSSFRKEFELYKVREINDYHHAHDAYLNAVVVKALLVKYSKLEPEFVYGEYPKYNSYRERKTATQKMFFYSNIMNMFKSKVKLADDQIVERPMIEVNDETGEIAWDKTKHITTVKKVLSYPQVNIVKKVEEQTIGQNGGLFDDNPKSPLEVIPSKLVPLKKALNPEKYGGYQKPTTAYPILLIVDTKQLIPISVMDKKRFEQNPVKFLKDKGYQQIEKNNFVKLPKYTLVDIGNGIKRLWASSKEVHKGNQLVVSKKSQDLLYHAHHLDNDYSNEYVKNHYQQFDILFNEITSFSKKCKLGKEHIQKIEEAYSKERDSASIEELADGFIKLLGFTQLGATSPFSFLGIKLNQKQYTGKKDYLLPCMEATLIHQSITGLYETRIDLSKLGGD

SEQ ID NO: 478 - protein, 1350 aa, Streptococcus mutans; identical to SEQ ID NO: 477
  Streptococcus mutans 24

SEQ ID NO: 479 - protein, 1345 aa, Streptococcus mutans; identical to SEQ ID NO: 472
  Streptococcus mutans 2VS1

SEQ ID NO: 480 - protein, 1345 aa, Streptococcus mutans; identical to SEQ ID NO: 472
  Streptococcus mutans 2VS1

SEQ ID NO: 481 - protein, 1345 aa, Streptococcus mutans; identical to SEQ ID NO: 471
  Streptococcus mutans 3SN1

SEQ ID NO: 482 - protein, 1345 aa, Streptococcus mutans; identical to SEQ ID NO: 471
  Streptococcus mutans 3SN1

SEQ ID NO: 483 - protein, 1345 aa, Streptococcus mutans
  Streptococcus mutans 4SM1
MKKPYSIGLDIGTNSVGWAVVTDDYKVPAKKMKVLGNTDKSHIKKNLLGALLFDSGNTAEDRRLKRTARRRYTRRRNRILYLQEIFSEEMGKVDDSFFHRLEDSFLVTEDKRGERHPIFGNLEEEVKYHENFPTIYHLRQYLADNPEKVDLRLVYLALAHIIKFRGHFLIEGKFDTRNNDVQRLFQEFLAVYDNTFENSSLQEQNVQVEEILTDKISKSAKKDRVLKLFPNEKSNGRFAEFLKLIVGNQADFKKHFELEEKAPLQFSKDTYEEDLEELLGKIGDDYADLFTLAKNLYDAILLSGILTADDSSTKAPLSASMIQRYNEHQMDLAQLKQFIRQKLSDKYNEVFSDVSKDGYAGYIDGKTNQEAFYKYLKGLLNKIEGSGYFLDKIEREDFLRKQRTFDNGSIPHQIHLQEMRAIIRRQAEFYPFLADNQDRIEKILTFRIPYYVGPLARGKSDFAWLSRKSADKITPWNFDEIVDKESSAEAFINRMTNYDLYLPNQKVLPKHSLLYEKFTVYNELTKVKYKTEQGKTAFFDANMKQEIFDGVFKVYRKVTKDKLMDFLEKEFDEFRIVDLTGLDKENKVFNASYGTYHDLCKILDKDFLDNSKNEKILEDIVLTLTLFEDREMIRKRLENYSDLLTKEQVKKLERRHYTGWGRLSAELIHGIRNKESRKTILDYLIDDGNSNRNFMQLINDDALSFKEEIAKAQVIGETDNLNQVVSDIAGSPAIKKGILQSLKIVDELVKIMGHQPENIVVEMARENQFTNQGRRNSQQRLKGLTDSIKEFGSQILKEHPVENSQLQNDRLFLYYLQNGRDMYTGEELDIDYLSQYDIDHIIPQAFIKDNSIDNRVLTSSKENRGKSDDVPSKDVVRKMKPYWSKLLSAKLITQRKFDNLTKAERGGLTDDDKAGFIKRQLVETRQITKHVARILDERFNTETDENNKKIRQVKIVTLKSNLVSNFRKEFELYKVREINDYHHAHDAYLNAVIGKALLGVYPQLEPEFVYGDYPHFHGHEENKATAKKFFYSNIMNFFKKDDVRTDKNGEIIWKKDEHISNIKKVLSYPQVNIVKKVEEQTGGFSKESILPKGNSDKLIPRKTKKFYWDTKKYGGFDSPIVAYSILVIADIEKGKSKKLKTVKALVGVTIMEKMTFERDPVAFLERKGYRNVQEENIIKLPKYSLFKLENGRKRLLASARELQKGNEIVLPNHLGTLLYHAKNIHKVDEPKHLDYVDKHKDEFKELLDVVSNFSKKYTLAEGNLEKIKELYAQNNGEDLKELASSFINLLTFTAIGAPATFKFFDKNIDRKRYTSTTEILNATLIHQSITGLYETRIDLSKLGGD

SEQ ID NO: 484 - protein, 1345 aa, Streptococcus mutans; identical to SEQ ID NO: 483
  Streptococcus mutans 4SM1

SEQ ID NO: 485 - protein, 1345 aa, Streptococcus mutans
  Streptococcus mutans 4VF1
MKKPYSIGLDIGTNSVGWAVVTDDYKVPAKKMKVLGNTDKSHIKKNLLGALLFDSGNTAEDRRLKRTARRRYTRRRNRILYLQEIFSEEMGKVDDSFFHRLEDSFLVTEDKRGERHPIFGNLEEEVKYHENFPTIYHLRQYLADNPEKVDLRLVYLALAHIIKFRGHFLIEGKFDTRNNDVQRLFQEFLAVYDNTFENSSLQEQNVQVEEILTDKISKSAKKDRVLKLFPNEKSNGRFAEFLKLIVGNQADFKKHFELEEKAPLQFSKDTYEEELEVLLAQIGDNYAELFLSAKKLYDSILLSGILTVTDVSTKAPLSASMIQRYNEHQMDLAQLKQFIRQKLSDKYNEVFSDVSKDGYAGYIDGKTNQEAFYKYLKGLLNKIEGSGYFLDKIEREDFLRKQRTFDNGSIPHQIHLQEMRAIIRRQAEFYPFLADNQDRIEKILTFRIPYYVGPLARGKSDFAWLSRKSADKITPWNFDEIVDKESSAEAFINRMTNYDLYLPNQKVLPKHSLLYEKFTVYNELTKVKYKTEQGKTAFFDANMKQEIFDGVFKVYRKVTKDKLMDFLEKEFDEFRIVDLTGLDKENKVFNASYGTYHDLCKILDKDFLDNSKNEKILEDIVLTLTLFEDREMIRKRLENYSDLLTKEQVKKLERRHYTGWGRLSAELIHGIRNKESRKTILDYLIDDGNSNRNFMQLINDDALSFKEEIAKAQVIGETDNLNQVVSDIAGSPAIKKGILQSLKIVDELVKIMGHQPENIVVEMARENQFTKQGRRNSQQRLKGLTDSIKEFGSQILKEHPVENSQLQNDRLFLYYLQNGRDMYTGEELDIDYLSQYDIDHIIPQAFIKDNSIDNRVLTSSKENRGKSDDVPSKDVVRKMKSYWSKLLSAKLITQRKFDNLTKAERGGLTDDDKAGFIKRQLVETRQITKHVARILDERFYTETDENNKKIRQVKIVTLKSNLVSNFRKEFELYKVREINDYHHAHDAYLNAVIGKALLGVYPQLEPEFVYGDYPHFHGHKENKATAKKFFYSNIMNFFKKDDVRTDRNGEIIWKKDEHISNIKKVLSYPQVNIVKKVEEQTGGFSKESILPKGNSDKLIPRKTKKFYWDTKKYGGFDSPIVAYSILVIADIEKGKSKKLKTVKALVGVTIMEKMTFERDPVAFLERKGYRNVQEENIIKLPKYSLFKLENGRKRLLASARELQKGNEIVLPNHLGTLLYHAKNIHKVDEPKHLDYVDKHKDEFKELLDVVSNFSKKYTLAEGNLEKIKELYAQNNGEDLKELASSFINLLTFTAIGAPATFKFFDKNIDRKRYTSTTEILNATLIHQSITGLYETRIDLSKLGGD

SEQ ID NO: 486 - protein, 1345 aa, Streptococcus mutans; identical to SEQ ID NO: 485
  Streptococcus mutans 4VF1

SEQ ID NO: 487 - protein, 1345 aa, Streptococcus mutans
  Streptococcus mutans 5SM3
MKKPYSIGLDIGTNSVGWAVVTDDYKVPAKKMKVLGNTDKSHIEKNLLGALLFDSGNTAEDRRLKRTARRRYTRRRNRILYLQEIFSEEMGKVDDSFFHRLEDFFLVTEDKRGERHPIFGNLEEEVKYHENFPTIYHLRQYLADNPEKVDLRLVYLALAHIIKFRGHFLIEGKFDTRNNDVQRLFQEFLAVYDNTFENSSLQEQNVQVEEILTDKISKSAKKDRVLKLFPNEKSNGRFAEFLKLIVGNQADFKKHFELEEKAPLQFSKDTYEEELEVLLAQIGDNYAELFLSAKKLYDSILLSGILTADDSSTKAPLSASMIQRYNEHQMDLAQLKQFIRQKLSDKYNEVFSDVSKDGYAGYIDGKTNQEAFYKYLKGLLNKIEGSGYFLDKIEREDFLRKQRTFDNGSIPHQIHLQEMRAIIRRQSEFYPFLADNQDRIEKILTFRIPYYVGPLARGKSDFAWLSRKSADKITPWNFDEIVDKESSAEAFINRMTNYDLYLPNQKVLPKHSLLYEKFTVYNELTKVKYKTEQGETAFFDANMKQEIFDGVFKVYRKVTKDKLMDFLEKEFDEFRIVDLTGLDKENKAFNASYGTYHDLRKILDKDFLDNSKNEKILEDIVLTLTLFEDREMIRKRLKNYSDLLTKEQLKKLERRHYTGWGRLSAELIHGIRNKESRKTILDYLIDDGNSNRNFMQLINDDALSFKEEIAKAQVIGETDNLNQVVSDIAGSPAIKKGILQSLKIVDELVKIMGHQPENIVVEMARENQFTNQGRRNSQQRLKGLTDSIKEFGSQILKEHPVENSQLQNDRLFLYYLQNGRDMYTGEELDIDYLSQYDIDHIIPQAFIKDNSIDNRVLTSSKENRGKSDDVPSKDVVRKMKPYWSKLLSAKLITQRKFDNLTKAERGGLTDDDKAGFIKRQLVETRQITKHVARILDERFNTETDENNKKIRQVKIVTLKSNLVSNFRKEFELYKVREINDYHHAHDAYLNAVIGKALLGVYPQLEPEFVYGDYPHFHGHEENKATAKKFFYSNIMNFFKKDDVRTDKNGEIIWKKDEHISNIKKVLSYPQVNIVKKVEEQTGGFSKESILPKGNSDKLIPRKTKKFYWDTKKYGGFDSPIVAYSILVIADIEKGKSKKLKTVKALVGVTIMEKMTFERDPVAFLERKGYRNVQEENIIKLPKYSLFKLENGRKRLLASARELQKGNEIVLPNHLGTLLYHAKNIHKVDEPKHLDYVDKHKDEFKELLDVVSNFSKKYTLAEGNLEKIKELYAQNNGEDLKELASSFINLLTFTAIGAPATFKFFDKNIDRKRYTSTTEILNATLIHQSITGLYETRIDLSKLGGD

SEQ ID NO: 488 - protein, 1345 aa, Streptococcus mutans; identical to SEQ ID NO: 487
  Streptococcus mutans 5SM3

SEQ ID NO: 489 - protein, 1359 aa, Streptococcus mutans
  Streptococcus mutans 66-2A
MKKPYSIGLDIGTNSVGWAVVTDDYKVPAKKMKVLGNTDKSHIKKNLLGALLFDSGNTAEDRRLKRTARRRYTRRRNRILYLQEIFAEEMMQVDESFFQRLDDSFLVEEDKRGSRYPIFGTLKEEKKYHKEFKTIYHLREKLANSTEKADLRLVYLSLAHMIKFRGHFLIEGQLKAENTNVQALFKDFVEVYDKTVEESHLSEMTVDALSILTEKVSKSRRLENLVECYPTEKKNTLFGNLIALSLGLQPNFKTNFQLSEDAKLQFSKDTYEEDLEGLLGEIGDEYADLFASAKNLYDAILLSGILAVDDNTTKAPLSASMVKRYKEHKEELAAFKRFIKEKLPKKYEEIFKDDTKNGYAGYVGADKKLRKRSGKLATEEEFYKYVKGILNKVEGADVWLDKIDREDFLRKQRTFDNGSIPHQIHLQEMHAILRRQGEHYPFLKENQDKIEKILTFRIPYYVGPLVRKGSRFAWAEYKADEKITPWNFDDILDKEKSAEKFITRMTLNDLYLPEEKVLPKHSLLYETFTVYNELTKVKYVNEQGEAKFFDANMKQEIFDHVFKENRKVTKDKLLNYLNKEFEEFRIVNLTGLDKENKVFNSSLGTYHDLRKILNKSFLDNKENEQIIEDIIQTLTLFEDREMIRQRLQKYSDIFTKAQLKKLERRHYTGWGRLSYKLINGIRDKQSNKTILGYLIDDGYSNRNFMQLINDDALSFKEEIAKAQVIGEMDGLNQVVSDIAGSPAIKKGILQSLKIVDELVKVMGHNPANIVIEMARENQTTAKGRRSSQKRYKRLEEAIKNLDHDLNHKILKEHPTDNQALQNDRLFLYYLQNGRDMYTEDPLDINRLSDYDIDHIIPQAFIKDNSIDNRVLTRSDKNRGKSDDVPSEEVVHKMKPFWSKLLSAKLITQRKFDNLTKAERGGLTDDDKAGFIKRQLVETRQITKHVARILDERFNTETDENNKKIRQVKIVTLKSNLVSNFRKEFELYKVREINDYHHAHDAYLNAVIGKALLGVYPQLEPEFVYGDYPHFHGHKENKATAKKFFYSNIMNFFKKGDVRTDKNGEIIWKKDEHISNIKKVLSYPQVNIVKKVEEQTGGFSKESILPKGNSDKLIPRKTKKFYWDTKKYGGFDSPIVAYSILVIADIEKGKSKKLKTVKALVGVTIMEKMTFERDPVAFLERKGYRNVQEENIIKLPKYSLFKLENGRKRLLASARELQKGNEIVLPNHLETLLYHAKNIHKVDEPKHLDYVDKHKDEFKELLDVVSNFSKKYTLAEGNLEKIKELYAQNNGEDLKELASSFINLLTFTAIGAPAAFKFFDKNIDRKRYTSTTEILNATLIHQSITGLYETRIDLNKLGGD

SEQ ID NO: 490 - protein, 1359 aa, Streptococcus mutans; identical to SEQ ID NO: 489
  Streptococcus mutans 66-2A

SEQ ID NO: 491 - protein, 1345 aa, Streptococcus mutans
  Streptococcus mutans 8ID3
MKKPYSIGLDIGTNSVGWAVVTDDYKVPAKKMKVLGNTDKSHIEKNLLGALLFDSGNTAEDRRLKRTARRRYTRRRNRILYLQEIFSEEMGKVDDSFFHRLEDSFLVTEDKRGERHPIFGNLEEEVKYHENFPTIYHLRQYLADNPEKVDLRLVYLALAHIIKFRGHFLIEGKFDTRNNDVQRLFQEFLAVYDNTFENSSLQEQNVQVEEILTDKISKSAKKDRVLKLFPNEKSNGRFAEFLKLIVGNQADFKKHFELEEKAPLQFSKDTYEEELEVLLAQIGDNYAELFLSAKKLYDSILLSGILTVTDVGTKAPLSASMIQRYNEHQMDLAQLKQFIRQKLSDKYNEVFSDVSKDGYAGYIDGKTNQEAFYKYLKGLLNKIEGSGYFLDKIEREDFLRKQRTFDNGSIPHQIHLQEMRAIIRRQAEFYPFLADNQDRIEKLLTFRIPYYVGPLARGKSDFAWLSRKSADKITPWNFDEIVDKESSAEAFINRMTNYDLYLPNQKVLPKHSLLYEKFTVYNELIKVKYKTEQGKTAFFDANMKQEIFDGVFKVYRKVTKDKLMDFLEKEFDEFRIVDLTGLDKENKVFNASYGTYHDLCKILDKDFLDNSKNEKILEDIVLTLTLFEDREMIRKRLENYSDLLTKEQVKKLERRHYTGWGRLSAELIHGIRNKESRKTILDYLIDDGNSNRNFMQLINDDALSFKEEIAKAQVIGETDNLNQVVSDIAGSPAIKKGILQSLKIVDELVKIMGHQPENIVVEMARENQFTNQGRRNSQQRLKGLTDSIKEFGSQILKEHPVENSQLQNDRLFLYYLQNGRDMYTGEELDIDYLSQYDIDHIIPQAFIKDNSIDNRVLTSSKENRGKSDDVPSKDVVRKMKSYWSKLLSAKLITQRKFDNLTKAERGGLTDDDKAGFIKRQLVETRQITKHVARILDERFNTETDENNKKIRQVKIVTLKSNLVSNFRKEFELYKVREINDYHHAHDAYLNAVIGKALLGVYPQLEPEFVYGDYPHFHGHKENKATAKKFFYSNIMNFFKKDDVRTDKNGEIIWKKDEHISNIKKVLSYPQVNIVKKVEEQTGGFSKESILPKGNSDKLIPRKTKKFYWDTKKYGGFDSPIVAYSILVIADIEKGKSKKLKTVKALVGVTIMEKMTFERDPVAFLERKGYRNVQEENIIKLPKYSLFKLENGRKRLLASARELQKGNEIVLPNHLGTLLYHAKNIHKVDEPKHLDYVDKHKDEFKELLDVVSNFSKKYTLAEGNLEKIKELYAQNNGEDLKELASSFINLLTFTAIGAPATFKFFDKNIDRKRYTSTTEILNATLIHQSITGLYETRIDLNKLGGD

SEQ ID NO: 492 - protein, 1345 aa, Streptococcus mutans; identical to SEQ ID NO: 491
  Streptococcus mutans 8ID3

SEQ ID NO: 493 - protein, 1345 aa, Streptococcus mutans
  Streptococcus mutans A19
MKKPYSIGLDIGTNSVGWSVVTDDYKVPAKKMKVLGNTDKSHIEKNLLGALLFDSGNTAEDRRLKRTARRRYTRRRNRILYLQEIFSEEMGKVDDSFFHRLEDSFLVTEDKRGERHPIFGNLEEEVKYHENFPTIYHLRQYLADNPEKVDLRLVYLALAHIIKFRGHFLIEGKFDTRNNDVQRLFQEFLAVYDNTFENSSLQEQNVQVEEILTDKISKSAKKDRVLKLFPNEKSNGRFAEFLKLIVGNQADFKKHFELEEKAPLQFSKDTYEEELEVLLAQIGDNYAELFLSAKKLYDSILLSGILTVTDVGTKAPLSASMIQRYNEHQMDLAQLKQFIRQKLSDKYNEVFSDVSKDGYAGYIDGKTNQEAFYKYLKGLLNKIEGSGYFLDKIEREDFLRKQRTFDNGSIPHQIHLQEMRAIIRRQAEFYPFLADNQDRIEKLLTFRIPYYVGPLARGKSDFAWLSRKSADKITPWNFDEIVDKESSAEAFINRMTNYDLYLPNQKVLPKHSLLYEKFTVYNELTKVKYKTEQGKTAFFDANMKQEIFDGVFKVYRKVTKDKLMDFLEKEFDEFRIVDLTGLDKENKVFNASYGTYHDLCKILDKDFLDNSKNEKILEDIVLTLTLFEDREMIRKRLENYSDLLTKEQVKKLERRHYTGWGRLSAELIHGIRNKESRKTILDYLIDDGNSNRNFMQLINDDALSFKEEIAKAQVIGETDNLNQVVSDIAGSPAIKKGILQSLKIVDELVKIMGHQPENIVVEMARENQFTNQGRRNSQQRLKGLTDSIKEFGSQILKEHPVENSQLQNDRLFLYYLQNGRDMYTGEELDIDYLSQYDIDHIIPQAFIKDNSIDNRVLTSSKENRGKSDDVPSKDVVRKMKSYWSKLLSAKLITQRKFDNLTKAERGGLTDDDKAGFIKRQLVETRQITKHVARILDERFNTETDENNKKIRQVKIVTLKSNLVSNFRKEFELYKVREINDYHHAHDAYLNAVIGKALLGVYPQLEPEFVYGDYPHFHGHKENKATAKKFFYSNIMNFFKKDDVRIDKNGEIIWKKDEHISNIKKVLSYPQVNIVKKVEEQTGGFSKESILPKGNSDKLIPRKTKKFYWDTKKYGGFDSPIVAYSILVIADIEKGKSKKLKTVKALVGVTIMEKMTFERDPVAFLERKGYRNVQEENIIKLPKYSLFKLENGRKRLLASARELQKGNEIVLPNHLGTLLYHAKNIHKVDEPKHLDYVDKHKDEFKELLDVVSNFSKKYTLAEGNLEKIKELYAQNNGEDLKELASSFINLLTFTAIGAPATFKFFDKNIDRKRYTSTTEILNATLIHQSITGLYETRIDLSKLGGD

SEQ ID NO: 494 - protein, 1345 aa, Streptococcus mutans; identical to SEQ ID NO: 493
  Streptococcus mutans A19

SEQ ID NO: 495 - protein, 1345 aa, Streptococcus mutans; identical to SEQ ID NO: 472
  Streptococcus mutans B

SEQ ID NO: 496 - protein, 1345 aa, Streptococcus mutans; identical to SEQ ID NO: 472
  Streptococcus mutans G123

SEQ ID NO: 497 - protein, 1345 aa, Streptococcus mutans
MKKPYSIGLDIGTNSVGWAVVTDDYKVPAKKMKVLGNTDKSHIKKNLLGALLFDSGNTAEDRRLKRTARRRYTRRRNRILYLQEIFSEEMGKVDDSFFHRLDESFLTDDDKNFDSHPIFGNKAEEDAYHQKFPTIYHLRKHLADSTEKADLRLVYLALAHMIKFRGHFLIEGELNAENTDVQKLFADFVGVYDRTFDDSHLSEITVDASSILTEKISKSRRLEKLINNYPKEKKNTLFGNLIALSLGLQPNFKTNFKLSEDAKLQFSKDTYEEELEVLLAQIGDNYAELFLSAKKLYDSILLSGILTVTDVSTKAPLSASMIQRYNEHQMDLAQLKQFIRQKLSDKYNEVFSDVSKDGYAGYIDGKTNQEAFYKYLKGLLNKIEGSGYFLDKIEREDFLRKQRTFDNGSIPHQIHLQEMRAIIRRQAEFYPFLADNQDRIEKILTFRIPYYVGPLARGKSDFAWLSRKSADKITPWNFDEIVDKESSVEAFINRMTNYDLYLPNQKVLPKHSLLYEKFTVYNELTKVKYKTEQGKTAFFDANMKQEIFDGVFKVYRKVTKDKLMDFLEKEFDEFRIVDLTGLDKENKAFNASYGTYHDLRKILDKDFLDNSKNEKILEDIVLTLTLFEDREMIRKRLKNYSDLLTKEQLKKLERRHYTGWGRLSAELIHGIRNKESRKTILDYLIDDGNSNRNFMQLINDDALSFKEEIAKAQVIGETDNLNQVVSDIAGSPAIKKGILQSLKIVDELVKIMGHQPENIVVEMARENQFTNQGRRNSQQRLKGLTDSIKEFGSQILKEHPVENSQLQNDRLFLYYLQNGRDMYTGEELDIDYLSQYDIDHIIPQAFIKDNSIDNRVLTSSKENRGKSDDVPSKDVVRKMKSYWSKLLSAKLITQRKFDNLTKGERGGLTDDDKAGFIKRQLVETRQITKHVARILDERFNTETDENNKKIRQVKIVTLKSNLVSNFRKEFELYKVREINDYHHAHDAYLNAVIGKALLGVYPQLEPEFVYGDYPHFHGHKENKATAKKFFYSNIMNFFKKDDVRTDKNGEIIWKKDEYISNIKKVLSYPQVNIVKKVEEQTGGFSKESILPKGDSDKLIPRKTKKFYWDTKKYGGFDSPIVAYSILVIADIEKGKSKKLKTVKALVGVTIMEKMTFERDPVAFLERKGYRNVQEENIIKLPKYSLFKLENGRKRLLASARELQKGNEIVLPNHLGTLLYHAKNIHKVDEPKHLDYVDKHKDEFKELLDVVSNFSKKYTLAEGNLEKIKELYAQNNGEDLKELASSFINLLTFTAIGAPATFKFFDKNIDRKRYTSTTEILNATLIHQSITGLYETRIDLSKLGGD

SEQ ID NO: 498 - protein, 1345 aa, Streptococcus mutans
MKKPYSIGLDIGTNSVGWAVVTDDYKVPDKKMKVLGNTDKSHIKKNLLGALLFDSGNTAEDRRLKRTARRRYTRRRNRILYLQEIFSEEMGKVDDSFFHRLEDSFLVTEDKRGERHPIFGNLEEEVKYHENFPTIYHLRQYLADNPEKTDLRLVYLALAHIIKFRGHFLIEGKFDTRNNDVQRLFQEFLAVYDNTFENSSLQEQNVQVEEILTDKISKSAKKDRVLKLFPNEKSNGRFAEFLKLIVGNQADFKKHFELEEKAPLQFSKDIYEEELEVLLAQIGDNYAELFLSAKKLYDSILLSGILTVTDVSTKAPLSASMIQRYNEHQMDLAQLKQFIRQKLSDKYNEVFSDVSKDGYAGYIDGKTNQEAFYKYLKGLLNKIEGSGYFLDKIEREDFLRKQRTFDNGSIPHQIHLQEMRAIIRRQAEFYPFLADNQDRIEKILTFRIPYYVGPLARGKSDFAWLSRKSADKITPWNFDEIVDKESSVEAFINRMTNYDLYLPNQKVLPKHSLLYEKFTVYNELTKVKYKTEQGKTAFFDANMKQEIFDGVFKVYRKVTKDKLMDFLEKEFDEFRIVDLTGLDKENKAFNASYGTYHDLRKILDKDFLDNSKNEKILEDIVLTLTLFEDREMIRKRLKNYSDLLTKEQLKKLERRHYTGWGRLSAELIHGIRNKESRKTILDYLIDDGNSNRNFMQLINDDALSFKEEIAKAQVIGETDNLNQVVSDIAGSPAIKKGILQSLKIVDELVKIMGHQPENIVVEMARENQFTNQGRRNSQQRLKGLTDSIKEFGSQILKEHPVENSQLQNDRLFLYYLQNGRDMYTGEELDIDYLSQYDIDHIIPQAFIKDNSIDNRVLTSSKENRGKSDDVPSKDVVRKMKSYWSKLLSAKLITQRKFDNLTKAERGGLTDDDKAGFIKRQLVETRQITKHVARILDERFYTETDENNKKIRQVKIVTLKSNLVSNFRKEFELYKVREINDYHHAHDAYLNAVIGKALLGVYPQLEPEFVYGDYPHFHGHKENKATAKKFFYSNIMNFFKKDDVRTDKNGEIIWKKDEHISNIKKVLSYPQVNIVKKVEEQTGGFSKESILPKGNSDKLIPRKTKKFYWDTKKYGGFDSPIVAYSILVIADIEKGKSKKLKTVKALVGVTIMEKMTFERDPVAFLERKGYRNVQEENIIKLPKYSLFKLENGRKRLLASARELQKGNEIVLPNHLGTLLYHAKNIHKVDEPKHLDYVDKHKDEFKELLDVVSNFSKKYTLAEGNLEKIKELYAQNNGEDLKELASSFINLLTFTAIGAPATFKFFDKNIDRKRYTSTTEILNATLIHQSITGLYETRIDLSKLGGD

SEQ ID NO: 499 - protein, 1345 aa, Streptococcus mutans
  Streptococcus mutans M21
MKKPYSIGLDIGTNSVGWAVVTDDYKVPAKKMKVLGNTDKSHIKKNLLGALLFDSGNTAEDRRLKRTARRRYTRRRNRILYLQEIFSEEMGKVDDSFFHRLEDSFLVTEDKRGERHPIFGNLEEEVKYHENFPTIYHLRQYLADNPEKTDLRLVYLALAHIIKFRGHFLIEGKFDTRNNDVQRLFQEFLAVYDNTFENSSLQEQNVQVEEILTDKISKSAKKDRVLKLFPNEKSNGRFAEFLKLIVGNQADFKKHFELEEKAPLQFSKDIYEEELEVLLAQIGDNYAELFLSAKKLYDSILLSGILTVTDVSTKAPLSASMIQRYNEHQMDLAQLKQFIRQKLSDKYNEVFSDVSKDGYAGYIDGKTNQEAFYKYLKGLLNKIEGSGYFLDKIEREDFLRKQRTFDNGSIPHQIHLQEMRAIIRRQAEFYPFLADNQDRIEKILTFRIPYYVGPLARGKSDFAWLSRKSADKITPWNFDEIVDKESSVEAFINRMTNYDLYLPNQKVLPKHSLLYEKFTVYNELTKVKYKTEQGKTAFFDANMKQEIFDGVFKVYRKVTKDKLMDFLEKEFDEFRIVDLTGLDKENKAFNASYGTYHDLRKILDKDFLDNSKNEKILEDIVLTLTLFEDREMIRKRLKNYSDLLTKEQLKKLERRHYTGWGRLSAELIHGIRNKESRKTILDYLIDDGNSNRNFMQLINDDALSFKEEIAKAQVIGETDNLNQVVSDIAGSPAIKKGILQSLKIVDELVKIMGHQPENIVVEMARENQFTNQGRRNSQQRLKGLTDSIKEFGSQILKEHPVENSQLQNDRLFLYYLQNGRDMYTGEELDIDYLSQYDIDHIIPQAFIKDNSIDNRVLTSSKENRGKSDDVPSKNVVRKMKSYWSKLLSAKLITQRKFDNLTKAERGGLTDDDKAGFIKRQLVETRQITKHVARILDERFHTETDENNKKIRQVKIVTLKSNLVSNFRKEFELYKVREINDYHHAHDAYLNAVIGKALLGVYPQLEPEFVYGDYPHFHGHKENKATAKKFFYSNIMNFFKKDDVRTDKNGEIIWKKDEHISNIKKVLSYPQVNIVKKVEEQTGGFSKESILPKGNSDKLIPRKTKKFYWDTKKYGGFDSPIVAYSILVIADIEKGKSKKLKTVKALVGVTIMEKMTFERDPVAFLERKGYRNVQEENIIKLPKYSLFKLENGRKRLLASARELQKGNEIVLPNHLGTLLYHAKNIHKVDEPKHLDYVDKHKDEFKELLDVVSNFSKKYTLAEGNLEKIKELYAQNNGEDLKELASSFINLLTFTAIGAPATFKFFDKNIDRKRYTSTTEILNATLIHQSITGLYETRIDLSKLGGD

SEQ ID NO: 500 - protein, 1345 aa, Streptococcus mutans; identical to SEQ ID NO: 499
  Streptococcus mutans M21

SEQ ID NO: 501 - protein, 1345 aa, Streptococcus mutans
  Streptococcus mutans M230
MKKPYSIGLDIGTNSVGWAVVTDDYKVPAKKMKVLGNTDKSHIKKNLLGALLFDSGNTAEDRRLKRTARRRYTRRRNRILYLQEIFSEEMGKVDDSFFHRLEDSFLVTEDKRGERHPIFGNLEEEVKYHENFPTIYHLRQYLADNPEKVDLRLVYLALAHIIKFRGHFLIEGKFDTRNNDVQRLFQEFLAVYDNTFENSSLQEQNVQVEEILTDKISKSAKKDRVLKLFPNEKSNGRFAEFLKLIVGNQADFKKHFELEEKAPLQFSKDTYEEELEVLLAQIGDNYAELFLSAKKLYDSILLSGILTVTDVSTKAPLSASMIQRYNEHQMDLAQLKQFIRQKLSDKYNEVFSDVSKDGYAGYIDGKTNQEAFYKYLKGLLNKIEGSGYFLDKIEREDFLRKQRTFDNGSIPHQIHLQEMRAIIRRQAEFYPFLADNQDRIEKILTFRIPYYVGPLARGKSDFAWLSRKSADKITPWNFDEIVDKESSAEAFINRMTNYDLYLPNQKVLPKHSLLYEKFTVYNELTKVKYKTEQGKTAFFDANMKQEIFDGVFKVYRKVTKDKLMDFLEKEFDEFRIVDLTGLDKENKVFNASYGTYHDLCKILDKDFLDNSKNEKILEDIVLTLTLFEDREMIRKRLENYSDLLTKEQVKKLERRHYTGWGRLSAELIHGIRNKESRKTILDYLIDDGNSNRNFMQLINDDALSFKEEIAKAQVIGETDNLNQVVSDIAGSPAIKKGILQSLKIVDELVKIMGHQPENIVVEMARENQFTNQGRQNSQQRLKGLTDSIKEFGSQILKEHPVENSQLQNDRLFLYYLQNGRDMYTGEELDIDYLSQYDIDHIIPQAFIKDNSIDNRVLTSSKENRGKSDDVPSEDVVRKMKSYWSKLLSAKLITQRKFDNLTKAERGGLTDDDKAGFIKRQLVETRQITKHVARILDERFYTETDENNKKIRQVKIVTLKSNLVSNFRKEFELYKVREINDYHHAHDAYLNAVIGKALLGVYPQLEPEFVYGDYPHFHGHKENKATAKKFFYSNIMNFFKKDDVRTDKNGEIIWKKDEHISNIKKVLSYPQVNIVKKVEEQTGGFSKESILPKGNSDKLIPRKTKKFYWDTKKYGGFDSPIVAYSILVIADIEKGKSKKLKTVKALVGVTIMEKMTFERDPVAFLERKGYRNVQEENIIKLPKYSLFKLENGRKRLLASARELQKGNEIVLPNHLGTLLYHAKNIHKVDEPKHLDYVDKHKDEFKELLDVVSNFSKKYTLAEGNLEKIKELYAQNNGEDLKELASSFINLLTFTAIGAPATFKFFDKNIDRKRYTSTTEILNATLIHQSITGLYETRIDLSKLGGD

SEQ ID NO: 502 - protein, 1345 aa, Streptococcus mutans; identical to SEQ ID NO: 501
  Streptococcus mutans M230

SEQ ID NO: 503 - protein, 1345 aa, Streptococcus mutans
  Streptococcus mutans M2A
MKKPYSIGLDIGTNSVGWAVVTDDYKVPAKKMKVLGNTDKSHIKKNLLGALLFDSGNTAEDRRLKRTARRRYTRRRNRILYLQEIFSEEMGKVDDSFFHRLEDSFLVTEDKRGERHPIFGNLEEEVKYHENFPTIYHLRQYLADNPEKTDLRLVYLALAHIIKFRGHFLIEGKFDTRNNDVQRLFQEFLAVYDNTFENSSLQEQNVQVEEILTDKISKSAKKDRVLKLFPNEKSNGRFAEFLKLIVGNQADFKKHFELEEKAPLQFSKDIYEEELEVLLAQIGDNYAELFLSAKKLYDSILLSGILTVTDVSTKAPLSASMIQRYNEHQMDLAQLKQFIRQKLSDKYNEVFSDVSKDGYAGYIDGKTNQEAFYKYLKGLLNKIEGSGYFLDKIEREDFLRKQRTFDNGSIPHQIHLQEMRAIIRRQAEFYPFLADNQDRIEKILTFRIPYYVGPLARGKSDFAWLSRKSADKITPWNFDEIVDKESSVEAFINRMTNYDLYLPNQKVLPKHSLLYEKFTVYNELTKVKYKTEQGKTAFFDANMKQEIFDGVFKVYRKVTKDKLMDFLEKEFDEFRIVDLTGLDKENKAFNASYGTYHDLRKILDKDFLDNSKNEKILEDIVLTLTLFEDREMIRKRLKNYSDLLTKEQLKKLERRHYTGWGRLSAELIHGIRNKESRKTILDYLIDDGNSNRNFMQLINDDALSFKEEIAKAQVIGETDNLNQVVSDIAGSPAIKKGILQSLKIVDELVKIMGHQPENIVVEMARENQFTNQGRRNSQQRLKGLTDSIKEFGSQILKEHPVENSQLQNDRLFLYYLQNGRDMYTGEELDIDYLSQYDIDHIIPQAFIKDNSIDNRVLTSSKENRGKSDDVPSKDVVRKMKSYWSKLLSAKLITQRKFDNLTKAERGGLTDDDKAGFIKRQLVETRQITKHVARILDERFNTETDENNKKIRQVKIVTLKSNLVSNFRKEFELYKVREINDYHHAHDAYLNAVIGKALLGVYPQLEPEFVYGDYPHFHGHKENKATAKKFFYSNIMNFFKKDDVRTDKNGEIIWKKDEHISNIKKVLSYPQVNIVKKVEEQTGGFSKESILPKGNSYKLIPRKTKKFYWDTKKYGGFDSPIVAYSILVIADIEKGKSKKLKTVKALVGVTIMEKMTFERDPVAFLERKGYRNVQEENIIKLPKYSLFKLENGRKRLLASARELQKGNEIVLPNHLGTLLYHAKNIHKVDEPKHLDYVDKHKDEFKELLDVVSNFSKKYTLAEGNLEKIKELYAQNNGEDLKELASSFINLLTFTAIGAPAAFKFFDKNIDRKRYTSTTEILNATLIHQSITGLYETRIDLSKLGGD

SEQ ID NO: 504 - protein, 1345 aa, Streptococcus mutans; identical to SEQ ID NO: 503
  Streptococcus mutans M2A

SEQ ID NO: 505 - protein, 1345 aa, Streptococcus mutans
  Streptococcus mutans N29
MKKPYSIGLDIGTNSVGWAVVTDDYKVPAKKMKVLGNTDKSHIKKNLLGALLFDSGNTAADRRLKRTARRRYTRRRNRILYLQEIFAEEMSKVDDSFFHRLEDSFLVTEDKRGERHPIFGNLEEEVKYHENFPTIYHLRQYLADNPEKVDLRLVYLALAHIIKFRGHFLIEGKFDTRNNDVQRLFQEFLAVYDNTFENSSLQEQNVQVEEILTDKISKSAKKDRVLKLFPNEKSNGRFAEFLKLIVGNQADFKKHFELEEKAPLQFSKDTYEEELEVLLAQIGDNYAELFLSAKKLYDSILLSGILTVTDVSTKAPLSASMIQRYNEHQMDLAQLKQFIRQKLSDKYNEVFSDVSKDGYAGYIDGKTNQEAFYKYLKGLLNKIEGSGYFLDKIEREDFLRKQRTFDNGSIPHQIHLQEMRAIIRRQAEFYPFLADNQDRIEKILTFRIPYYVGPLARGKSDFAWLSRKSADKITPWNFDEIVDKESSAEAFINRMTNYDLYLPNQKVLPKHSLLYEKFTVYNELTKVKYKTEQGKTAFFDANMKQEIFDGVFKVYRKVTKDKLMDFLEKEFDEFRIVDLTGLDKENKAFNASYGTYHDLRKILDKDFLDNSKNEKILEDIVLTLTLFEDREMIRKRLENYSDLLTKEQVKKLERRHYTGWGRLSAELIHGIRNKESRKTILDYLIDDGNSNRNFMQLINDDALSFKEEIAKAQVIGETDNLNQVVSDIAGSPAIKKGILQSLKIVDELVKIMGHQPENIVVEMARENQFTNQGRRNSQQRLKGLTDSIKEFGSQILKEHPVENSQLQNDRLFLYYLQNGRDMYTGEELDIDYLSQYDIDHIIPQAFIKDNSIDNRVLTSSKENRGKSDDVPSKNVVRKMKSYWSKLLSAKLITQRKFDNLTKAERGGLTDDDKAGFIKRQLVETRQITKHVARILDERFHTETDENNKKIRQVKIVTLKSNLVSNFRKEFELYKVREINDYHHAHDAYLNAVIGKALLGVYPQLEPEFVYGDYPHFHGHKENKATAKKFFYSNIMNFFKKDDVRTDKNGEIIWKKDEHISNIKKVLSYPQVNIVKKVEEQTGGFSKESILPKGNSDKLIPRKTKKFYWDTKKYGGFDSPIVAYSILVIADIEKGKSKKLKTVKALVGVTIMEKMTFERDPVAFLERKGYRNVQEENIIKLPKYSLFKLENGRKRLLASARELQKGNEIVLPNHLGTLLYHAKNIHKVDEPKHLDYVDKHKDEFKELLDVVSNFSKKYTLAEGNLEKIKELYAQNNGEDLKELSSSFINLLTFTAIGAPAAFKFFDKNIDRKRYTSTTEILNATLIHQSITGLYETRIDLSKLGGD

SEQ ID NO: 506 - protein, 1345 aa, Streptococcus mutans; identical to SEQ ID NO: 505
  Streptococcus mutans N29

SEQ ID NO: 507 - protein, 1345 aa, Streptococcus mutans
  Streptococcus mutans N3209
MKKPYSIGLDIGTNSVGWAVVTDDYKVPAKKMKVLGNTDKSHIKKNLLGALLFDSGNTAEDRRLKRTTRRRYTRRRNRILYLQEIFSEEMGKVDDSFFHRLEDSFLVTEDKRGERHPIFGNLEEEVKYHENFPTIYHLRQYLADNPEKTDLRLVYLALAHIIKFRGHFLIEGKFDTRNNDVQRLFQEFLAVYDNTFENSSLQEQNVQVEEILTDKISKSAKKDRVLKLFPNEKSNGCFAEFLKLIVGNQADFKKHFELEEKAPLQFSKDTYEEELEVLLAQIGDNYAELFLSAKKLYDSILLSGILTVTDVSTKAPLSASMIQRYNEHQMDLTQLKQFIRQKLSDKYNEVFSDVSKDGYAGYIDGKTNQEAFYKYLKGLLNKIEGSGYFLDKIEREDFLRKQRTFDNGSIPHQIHLQEMRAIIRRQAEFYPFLADNQDRIEKLLTFRIPYYVGPLASGKSDFAWLSRKSADKITPWNFDEIVDKESSAEAFINRMTNYDLYLPNQKVLPKHSLLYEKFTVYNELTKVKYKTEQGKTAFFDANMKQEIFDGVFKVYRKVTKDKLMDFLEKEFDEFRIVDLTGLDKENKVFNASYGTYHDLCKILDKDFLDNSKNEKILEDIVLTLTLFEDREMIRKRLENYSDLLTKEQVKKLERRHYTGWGRLSAELIHGIRNKESRKTILDYLIDDGNSNRNFMQLINDDALSFKEEIAKAQVIGETDNLNQVVSDIAGSPAIKKGILQSLKIVDELVKIMGHQPENIVVEMARENQFTNQGRRNSQQRLKGLTDSIKEFGSQILKEHPVENSQLQNDRLFLYYLQNGRDMYTGEELDIDYLSQYDIDHIIPQAFIKDNSIDNRVLTSSKENRGKSDDVPSKDVVRKMKSYWSKLLSAKLITQRKFDNLTKAERGGLTDDDKAGFIKRQLVETRQITKHVARILDERFNTETDENNKKIRQVKIVTLKSNLVSNFRKEFELYKVREINDYHHAHDAYLNAVIGKALLGVYPQLEPEFVYGDYPHFHGHKENKATAKKFFYSNIMNFFKKDDVRTDKNGEIIWKKDEHISNIKKVLSYPQVNIVKKVEEQTGGFSKESILPKGNSDKLIPRKTKKFYWDTKKYGGFDSPIVAYSILVIADIEKGKSKKLKTVKALVGVTIMEKMTFERDPVAFLERKGYRNVQEENIIKLPKYSLFKLENGRKRLLASARELQKGNEIVLPNHLGTLLYHAKNIHKVDEPKHLDYVDKHKDEFKELLDVVSNFSKKYTLAEGNLEKIKELYAQNNGEDLKELASSFINLLTFTAIGAPATFKFFDKNIDRKRYTSTTEILNATLIHQSITGLYETRIDLSKLGGD

SEQ ID NO: 508 - protein, 1345 aa, Streptococcus mutans; identical to SEQ ID NO: 507
  Streptococcus mutans N3209

SEQ ID NO: 509 - protein, 1345 aa, Streptococcus mutans
  Streptococcus mutans N66
MKKPYSIGLDIGTNSVGWAVVTDDYKVPAKKMKVLGNTDKSHIKKNLLGALLFDSGNTAEDRRLKRTARRRYTRRRNRILYLQEIFSEEMGKVDDSFFHRLEDSFLVTEDKRGERHPIFGNLEEEVKYHENFPTIYHLRQYLADNPEKTDLRLVYLALAHIIKFRGHFLIEGKFDTRNNDVQRLFQEFLAVYDNTFENSSLQEQNVQVEEILTDKISKSAKKDRVLKLFPNEKSNGRFAEFLKLIVGNQADFKKHFELEEKAPLQFSKDIYEEELEVLLAQIGDNYAELFLSAKKLYDSILLSGILTVTDVSTKAPLSASMIQRYNEHQMDLAQLKQFIRQKLSDKYNEVFSDVSKDGYAGYIDGKTNQEAFYKYLKGLLNKIEGSGYFLDKIEREDFLRKQRTFDNGSIPHQIHLQEMRAIIRRQAEFYPFLADNQDRIEKILTFRIPYYVGPLARGKSDFAWLSRKSADKITPWNFDEIVDKESSAEAFINRMTNYDLYLPNQKVLPKHSLLYEKFTVYNELTKVKYKTEQGKTAFFDANMKQEIFDGVFKVYRKVTKDKLMDFLEKEFDEFRIVDLTGLDKENKAFNASYGTYHDLRKILDKDFLDNSKNEKILEDIVLTLTLFEDREMIRKRLKNYSDLLTKEQLKKLERRHYTGWGRLSAELIHGIRNKESRKTILDYLIDDGNSNRNFMQLINDDALSFKEEIAKAQVIGETDNLNQVVSDIAGSLAIKKGILQSLKIVDELVKIMGHQPENIVVEMARENQFTNQGRRNSQQRLKGLTDSIKEFGSQILKEHPVENSQLQNDRLFLYYLQNGRDMYTGEELDIDYLSQYDIDHIIPQAFIKDNSIDNRVLTSSKENRGKSDDVPSKDVVRKMKSYWSKLLSAKLITQRKFDNLTKGERGGLTDDDKAGFIKRQLVETRQITKHVARILDERFNTETDENNKKIRQVKIVTLKSNLVSNFRKEFELYKVREINDYHHAHDAYLNAVIGKALLGVYPQLEPEFVYGDYPHFHGHKENKATAKKFFYSNIMNFFKKDDVRTDKNGEIIWKKDEYISNIKKVLSYPQVNIVKKVEEQTGGFFKESILPKGDSDKLIPRKTKKFYWDTKKYGGFDSPIVAYSILVIADIEKGKSKKLKTVKALVGVTIMEKMTFERDPVAFLERKGYRNVQEENIIKLPKYSLFKLENGRKRLLASARELQKGNEIVLPNHLGTLLYHAKNIHKVDEPKHLDYVDKHKDEFKELLDVVSNFSKKYTLAEGNLEKIKELYAQNNGEDLKELASSFINLLTFTAIGAPATFKFFDKNIDRKRYTSTTEILNATLIHQSITGLYETRIDLSKLGGD

SEQ ID NO: 510 - protein, 1345 aa, Streptococcus mutans; identical to SEQ ID NO: 509
  Streptococcus mutans N66

SEQ ID NO: 511 - protein, 1350 aa, Streptococcus mutans
  Streptococcus mutans NFSM1
MKKPYSIGLDIGTNSVGWAVVTDDYKVPAKKMTVLGNTDKSHIKKNLLGALLFDSGNTAADRRLKRTARRRYTRRRNRILYLQEIFAEEMSKVDDSFFHRLEDSFLVTEDKRGERHPIFGNLEEEVKYHENFPTIYHLRQYLADNPEKVDLRLVYLALAHIIKFRGHFLIEGKFDTRNNDVQRLFQEFLAVYDNTFENSSLQEQNVQVEEILTDKISKSAKKDRVLKLFPNEKSNGRFAEFLKLIVGNQADFKKHFELEEKTPLQFSKDTYEEELEVLLAQIGDNYAELFLSAKKLYDSILLSGILTVTDVSTKAPLSASMIQRYNEHQMDLAQLKQFIRQKLSDKYNEVFSDVSKDGYAGYIDGKTNQEAFYKYLKGLLNKIEGSGYFLDKIEREDFLRKQRTFDNGSIPHQIHLQEMRAIIRRQAEFYPFLADNQDRIEKILTFRIPYYVGPLARGKSDFAWLSRKSADKITPWNFDEIVDKESSAEAFINRMTNYDLYLPNQKVLPKHSLLYEKFTVYNELTKVKYKTEQGKTAFFDANMKQEIFDGVFKVYRKVTKDKLMDFLEKEFDEFRIVDLTGLDKENKAFNASYGTYHDLRKILDKDFLDNSKNEKILEDIVLTLTLFEDREMIRKRLENYSDLLTKEQVKKLERRHYTGWGRLSAELIHGIRNKESRKTILDYLIDDGNSNRNFMQLINDDALSFKEEIAKAQVIGETDNLNQVVSDIAGSPAIKKGILQSLKIVDELVKIMGHQPENIVVEMARENQFTNQGRRNSQQRLKGLTDSIKEFGSQILKEHPVENSQLQNDRLFLYYLQNGRDMYTGEELDIDYLSQYDIDHIIPQAFIKDNSIDNRVLTSSKENRGKSDDVPSEDVVNRMRPFWNKLLSSGLISQRKYNNLTKKELTPDDKAGFIKRQLVETRQITKHVARMLDERFNKEFDDNNKRIRRVKIVTLKSNLVSSFRKEFELYKVREINDYHHAHDAYLNAVVVKALLVKYPKLEPEFVYGEYPKYNSYRERKTATQKMFFYSNIMNMFKSKVKLADDQIVERPMIEVNDETGEIAWDKTKHITTVKKVLSYPQVNIVKKVEEQTIGQNGGLFDDNPKSPLEVIPSKLVPLKKALNPEKYGGYQKPTTAYPILLIVDTKQLIPISVMDKKRFEQNPVKFLKDKGYQQIEKNNFVKLPKYTLVDIGNGIKRLWASSKEVHKGNQLVVSKKSQDLLYHAHHLDNDYSNEYVKNHYQQFDILFNEITSFSKKCKLGKEHIQKIEEAYSKERDSASIEELADGFIKLLGFTQLGATSPFSFLGIKLNQKQYTGKKDYLLPCMEATLIHQSITGLYETRIDLSKLGGD

SEQ ID NO: 512 - protein, 1350 aa, Streptococcus mutans; identical to SEQ ID NO: 511
  Streptococcus mutans NFSM1

SEQ ID NO: 513 - protein, 1345 aa, Streptococcus mutans; identical to SEQ ID NO: 485
  Streptococcus mutans NLML1

SEQ ID NO: 514 - protein, 1338 aa, Streptococcus mutans
  Streptococcus mutans NLML4
MDLIGTNSVGWAVVTDDYKVPAKKMKVLGNTDKSHIKKNLLGALLFDSGNTAADRRLKRTARRRYTRRRNRILYLQEIFAEEMSKVDDSFFHRLEDSFLVTEDKRGERHPIFGNLEEEVKYHENFPTIYHLRQYLADNPEKVDLRLVYLALAHIIKFRGHFLIEGKFDTRNNDVQRLFQEFLAVYDNTFENSSLQEQNVQVEEILTDKISKSAKKDRVLKLFPNEKSNGRFAEFLKLIVGNQADFKKHFELEEKAPLQFSKDTYEEELEVLLAQIGDNYAELFLSAKKLYDSILLSGILTVTDVSTKAPLSASMIQRYNEHQMDLAQLKQFIRQKLSDKYNEVFSDVSKDGYAGYIDGKTNQEAFYKYLKGLLNKIEGSGYFLDKIEREDFLRKQRTFDNGSIPHQIHLQEMRAIIRRQAEFYPFLADNQDRIEKILTFRIPYYVGPLARGKSDFAWLSRKSADKITPWNFDEIVDKESSAEAFINRMTNYDLYLPNQKVLPKHSLLYEKFTVYNELTKVKYKTEQGKTAFFDANMKQEIFDGVFKVYRKVTKDKLMDFLEKEFDEFRIVDLTGLDKENKAFNASYGTYHDLRKILDKDFLDNSKNEKILEDIVLTLTLFEDREMIRKRLENYSDLLTKEQVKKLERRHYTGWGRLSAELIHGIRNKESRKTILDYLIDDGNSNRNFMQLINDDALSFKEEIAKAQVIGETDNLNQVVSDIAGSPAIKKGILQSLKIVDELVKIMGHQPENIVVEMARENQFTNQGRRNSQQRLKGLTDSIKEFGSQILKEHPVEHSQLQNDRLFLYYLQNGRDMYTGEELDIDYLSQYDIDHIIPQAFIKDNSIDNRVLTSSKENRGKSDDVPSKNVVRKMKSYWSKLLSAKLITQRKFDNLTKAERGGLTDDDKAGFIKRQLVETRQITKHVARILDERFHTETDENNKKIRQVKIVTLKSNLVSNFRKEFELYKVREINDYHHAHDAYLNAVIGKALLGVYPQLEPEFVYGDYPHFHGHKENKATAKKFFYSNIMNFFKKDDVRTDKNGEIIWKKDEHISNIKKVLSYPQVNIVKKVEEQTGGFSKESILPKGNSDKLIPRKTKKFYWDTKKYGGFDSPIVAYSILVIADIEKGKSKKLKTVKALVGVTIMEKMTFERDPVAFLERKGYRNVQEENIIKLPKYSLFKLENGRKRLLASARELQKGNEIVLPNHLGTLLYHAKNIHKVDEPKHLDYVDKHKDEFKELLDVVSNFSKKYTLAEGNLEKIKELYAQNNGEDLKELASSFINLLTFTAIGAPATFKFFDKNIDRKRYTSTTEILNATLIHQSITGLYETRIDLSKLGGD

SEQ ID NO: 515 - protein, 1338 aa, Streptococcus mutans; identical to SEQ ID NO: 514
  Streptococcus mutans NLML4

SEQ ID NO: 516 - protein, 1128 aa, Streptococcus mutans
  Streptococcus mutans NLML5
MANSKILGLDIGIASVGVGIIDKETGKIIHVNSRIFPAATADSNVERRGFRQGRRLVRRKKHRKVRLADLFLDSNLLTDFSKVSLNLNPYQLRVKGLNEELSNEELFIALKSIVSRRGISYLDDASEDSGANSSEYGKAVEENRKLLEDRTPGQIQLERFEKYGKVRGDFTVVENGENHRLINVFSTSAYKKEAERILRRQQEFNIRIADEFIEAYLTILTGKRKYYHGPGNEKSRTDYGRFRTDGTTLDNIFGILIGKCTFYPDEYRAAKASYTAQEFNLLNDLNNLTVPTETKKLSEEQKRQIIEHAKTVKTLGAPTLLKYIAKLVGCSADDIKGYRIDKSDKPEIHTFEAYRKMRTMELIKVADLSRESLDALAHILTLNTEREGIEEAIRDRFTNKEFNQEQINELVLFRKNNSSLFGKGWHNFSLKLMKELIPELYETSEEQMTILTRLGKQRVKKSSNRTNYIDEKELTEEIYNPVVAKSVRQAIKIINLATKKYGVFDNIVIEMARESNEDDEKKAIQNAQKANEDEKEAALLKAAHQFNGKEELPDSIFHGHKELLTKIRLWHQQGEKCLYTGKTIFINDLIHNPYKYEIDHILPLSLSFDDSLANKVLVLSTANQEKGQRTPFQSLDSMDGAWTYREFKAYVKGLKTLSNKKKDYLLNEEDINKNEVKQKFIERNLVDTRYSSRVVLNTLQDFYKKREFDTKISVVRGQFTSQIRRKWRIEKTRETYHHHAVDALIIAASSQLNLWKKQNNPLISYKEDQFVDPETGEILSLSDDEYKELVFKAPYDHFVDTLKSKKFEDSILFSYQVDSKYNRKISDATIYGTRKARLGKDSQEETYVLGKIKDIYSQKGYEDFIKKYKKDKTQFLMYHKDPQTFEKVIEEILKTYSDKELNEKGKEVPCNPFEKYRQENGPVRKYSKKGNGPEIKSIKYYDNKLGNHIDITPNNSHHQVVLQSLKPWRTDVYFNPKSGKYELMGLKYSDLRFEKVSGDYGISVKKYNEIKSKEGVDENSEFKFTLYKNDLILIKDTESGEQELFRFLSRTMPNQKHYVELKPYDKSKFEGHQKLMDIFGEVAKGGQCLKGLNKSNISIYKVKTDVLGNKYFIKKEGDQPQLNFKKKI

SEQ ID NO: 517 - protein, 1128 aa, Streptococcus mutans; identical to SEQ ID NO: 516
  Streptococcus mutans NLML5

SEQ ID NO: 518 - protein, 1125 aa, Streptococcus mutans
  Streptococcus mutans NLML8
MTNGKILGLDIGIASVGVGIINAKTGNVEHASSRIFPAANADNNVERRSARGGRRLIRRKKHRLKRVEDLFEKYNIDTDFSNLNLNPYQLRVKGLNEQLSNEELFAILKNIAKRRGISYLDDAEDDSVGSSDYAKAIDENRKLLKKQTPGEIQLKRLEKYGQLRGNFTIQDENGEYHRLINVFSTSDYVKEARRILETQSYYNKFITESFVEDYIKILQGKRKYYVGPGNEKSRTDYGIYRTDGETLDNLFGILIGKCGFYPEEYRAAKASYTAQEYNFLNDLNNLTVPTETKKLSTEQKYQLVDFAKTASTLEAAKLLKEIAKLVGCQVEEIKGYRLDNKDKPDLHTFEPFRKLKSNLTTIAVENLSITTLDTLAHILTLNTEREGIEEAIQKELPNIFSDEQITGIIAVRKKNSQIFGKGWHSFSIKLMKELIPELYETSEEQMTILIRLKKVKTNSKITNRTKYINEQEVTDEIYNPVVSKSIRQTVKIINAAIKKYGAFDQIVIEMPRESNEEDERKFIADLQKSNAKEKDDAMKQAALLYNGKAELPHGVFHGHKELATKIRLWYQQGERCLYSGKHIDIHDLIHNQHMFEIDHVLPLSLSFDDSLANKVLVYSWANQEKGQRTPFQALPQMASAWSFRELRDYISKQKGISKKKRDYLLTEQDINKVEVKQKFIERNLVDTRYVSRVVLNTLQDALKVMNKETKISVIRGQFTSQLRRQWRIDKSRETYHHHAVDALIIAASSQLRLWKKQNNPMFAEDKHGQKINLDTGEVLSDDAYKELVYQAPYQGFVNTISSKSFEDEILFSYQVDSKVNRKISDATIYATRQAQLGKDKKEETYVLGKIKDIYSQAGYDAFRKKYDKDKAVFLMYQKDPETWEKVIEVILRDYKELDDKGKEIGNPFERYKVKHGFVRKYSRKNKGTEIKSLKYYDNKLGNHIDITPNNSKHSVVLQSINPWRADLYFNPETTKYELMGLKYADLSFEKGTGKYSISREKYDEIKEREGISSKSEFKFTLYKNDLILVKDIGNHKELIARFNSKNDTSKHYVELKPWNKAKFDSEEELIPAFGKVAKSGQFIKGLNKPDLSIYKVKTDILGHKYYIKKEGDKPKLNFENKIKNK

SEQ ID NO: 519 - protein, 1125 aa, Streptococcus mutans; identical to SEQ ID NO: 518
  Streptococcus mutans NLML8

SEQ ID NO: 520 - protein, 1345 aa, Streptococcus mutans
  Streptococcus mutans NLML9
MKKPYSIGLDIGTNSVGWAVVTDDYKVSAKKMKVLGNTDKSHIKKNLLGALLFDSGNTAEDRRLKRTARRRYTRRRNRILYLQEIFAEEMSKVDDSFFHRLEDSFLVTEDKRGERHPIFGNLEEEVKYHENFPTIYHLRQYLADNPEKVDLRLVYLALAHIIKFRGHFLIEGKFDTRNNDVQRLFQEFLAVYDNTFENSSLQEQNVQVEEILTDKISKSAKKDRVLKLFPNEKSNGRFAEFLKLIVGNQADFKKHFELEEKAPLQFSKDTYEEELEVLLAQIGDNYAELFLSAKKLYDSILLSGILTVTDVSTKAPLSASMIQRYNEHQMDLAQLKQFIRQKLSDKYNEVFSDVSKDGYAGYIDGKTNQEAFYKYLKGLLNKIEGSGYFLDKIEREDFLRKQRTFDNGSIPHQIHLQEMRAIIRRQAEFYPFLADNQDRIEKILTFRIPYYVGPLARGKSDFAWLSRKSADKITPWNFDEIVDKESSAEAFINRMTNYDLYLPNQKVLPKHSLLYEKFTVYNELTKVKYKTEQGKTAFFDANMKQEIFDGVFKVYRKVTKDKLMDFLEKEFDEFRIVDLTGLDKENKAFNASYGTYHDLRKILDKDFLDNSKNEKILEDIVLTLTLFEDREMIRKRLENYSDLLTKEQVKKLERRHYTGWGRLSAELIHGIRNKESRKTILDYLIDDGNSNRNFMQLINDDALSFKEEIAKAQVIGETDNLNQVVSDIAGSPAIKKGILQSLKIVDELVKIMGHQPENIVVEMARENQFTNQGRRNSQQRLKGLTDSIKEFGSQILKEHPVEHSQLQNDRLFLYYLQNGRDMYTGEELDIDYLSQYDIDHIIPQAFIKDNSIDNRVLTSSKENRGKSDDVPSKNVVRKMKSYWSKLLSAKLITQRKFDNLTKAERGGLTDDDKAGFIKRQLVETRQITKHVARILDERFHTETDENNKKIRQVKIVTLKSNLVSNFRKEFELYKVREINDYHHTHDAYLNAVIGKALLGVYPQLEPEFVYGDYPHFHGHKENKATAKKFFYSNIMNFFKKDDVRTDKNGEIIWKKDEHISNIKKVLSYPQVNIVKKVEEQTGGFSKESILPKGNSDKLIPRKTKKFYWDTKKYGGFDSPIVAYSILVIADIEKGKSKKLKTVKALVGVTIMEKMTFERDPVAFLERKGYRNVQEENIIKLPKYSLFKLENGRKRLLASARELQKGNEIVLPNHLGTLLYHAKNIHKVDEPKHLDYVDKHKDEFKELLDVVSNFSKKYTLAEGNLEKIKELYAQNNGEDLKELASSFINLLTFTAIGAPATFKFFDKNIDRKRYTSTTEILNATLIHQSITGLYETRIDLSKLGGD

SEQ ID NO: 521 - protein, 1345 aa, Streptococcus mutans; identical to SEQ ID NO: 520
  Streptococcus mutans NLML9

SEQ ID NO: 522 - protein, 1355 aa, Streptococcus mutans
  Streptococcus mutans NMT4863
MKKPYSIGLDIGTNSVGWAVVTDDYKVPAKKMKVLGNTDKSHIKKNLLGALLFDSGNTAEDRRLKRTARRRYTRRRNRILYLQEIFAEEMSKVDDSFFHRLDESFLTDDDKNFDSHPIFGNKAEEDAYHQKFPTIYHLRKHLADSTEKADLRLVYLALAHMIKFRGHFLIEGELNAENTDVQKLFADFVGVYDRTFDDSHLSEITVDASSILTEKISKSRRLEKLINNYPKEKKNTLFGNLIALSLGLQPNFKTNFKLSEDAKLQFSKDTYEEDLEELLGKIGDDYADLFTLAKNLYDAILLSGILTADDSSTKAPLSASMIKRYAEHHEDLEKLKEFIKANKPELYHDIFKDETKNGYAGYIENGVKQDEFYKYLKNTLSKITGSDYFLDQIEREDFLRKQRTFDNGSIPHQIHLQEMHAILRRQGDYYPFLKENQDRIEKILTFRIPYYVGPLARKNSRFAWAEYHSDEAVTPWNFDQVIDKESSAQAFIEHMTNNDLYLPNEKVLPKHSPLYEKYTVYNELTKIKYVTEIGEAKFFDANLKQEIFDGLFKHERKVTKKKLRTFLDKNFDEFRIVDIQGLDKETETFNASYATYQDLLKVIKDKVFMDNPENAEILENIVLTLTLFEDREMIKQRLAKYADVFDKKVIDQLARRHYTGWGRLSAKLLNGIRDKQSCKTIMDYLIDDAQSNRNLMQLITDDNLTFKDDIVKAQYVDNSDDLHQVVQSLAGSPAIKKGILQSLKIVDELVKVMGKEPEQIVVEMARENQTTAKGRRNSQQRYKRLKEAIKSLDRDLNHKILKEHPTDNQALQNNRLFLYYLQNGRDMYTGESLDINRLSDYDIDHVIPQAFIKDNSIDNRVLTSSKANRGKSDDVPSEDVVNRMRPFWNKLLSSGLISQRKYNNLTKKELTLDDKAGFIKRQLVETRQITKHVARMLDERFNKEFDDNNKRIRRVKIVTLKSNLVSSFRKEFELYKVREINDYHHAHDAYLNAVVVKALLVKYPKLEPEFVYGEYPKYNSYRERKTATQKMFFYSNIMNMFKSKVKLADDQIVERPMIEVNDETGEIAWDKTKHITTVKKVLSYPQVNIVKKVEEQTIGQNGGLFDDNPKSPLEVIPSKLVPLKKALNPEKYGGYQKPTTAYPILLIVDTKQLIPISVMDKKRFEQNPVKFLKDKGYQQIEKNNFVKLPKYTLVDIGNGIKRLWASSKEVHKGNQLVVSKKSQDLLYHAHHLDNDYSNEYVKNHYQQFDILFNEITSFSKKCKLGKEHIQKIEEAYSKERDFASIEELADGFIKLLGFTQLGATSPFSFLGIKLNQKQYTGKKDYLLPCMEATLIHQSITGLYETRIDLSKLGGD

SEQ ID NO: 523 - protein, 1355 aa, Streptococcus mutans; identical to SEQ ID NO: 522
  Streptococcus mutans NMT4863

SEQ ID NO: 524 - protein, 1345 aa, Streptococcus mutans
MKKPYSIGLDIGTNSVGWAVVTDDYKVPAKKMKVLGNTDKSHIKKNLLGALLFDSGNTAADRRLKRTARRRYTRRRNRILYLQEIFAEEMSKVDDSFFHRLEDSFLVTEDKRGERHPIFGNLEEEVKYHENFPTIYHLRQYLADNPEKVDLRLVYLALAHIIKFRGHFLIEGKFDTRNNDVQRLFQEFLAVYDNTFENSSLQEQNVQVEEILTDKISKSAKKDRVLKLFPNEKSNGRFAEFLKLIVGNQADFKKHFELEEKAPLQFSKDTYEEELEVLLAQIGDNYAELFLSAKKLYDSILLSGILTVTDVSTKAPLSASMIQRYNEHQMDLAQLKQFIRQKLSDKYNEVFSDVSKDGYAGYIDGKTNQEAFYKYLKGLLNKIEGSGYFLDKIEREDFLRKQRTFDNGSIPHQIHLQEMRAIIRRQAEFYPFLADNQDRIEKILTFRIPYYVGPLARGKSDFAWLSRKSADKITPWNFDEIVDKESSAEAFINRMTNYDLYLPNQKVLPKHSLLYEKFTVYNELTKVKYKTEQGKTAFFDANMKQEIFDGVFKVYRKVTKDKLMDFLEKEFDEFRIVDLTGLDKENKAFNASYGTYHDLRKILDKDFLDNSKNEKILEDIVLTLTLFEDREMIRKRLENYSDLLTKEQVKKLERRHYTGWGRLSAELIHGIRNKESRKTILDYLIDDGNSNRNFMQLINDDALSFKEEIAKAQVIGETDNLNQVVSDIAGSPAIKKGILQSLKIVDELVKIMGHQPENIVVEMARENQFTNQGRRNSQQRLKGLTDSIKEFGSQILKEHPVKHSQLQNDRLFLYYLQNGRDMYTGEELDIDYLSQYDIDHIIPQAFIKDNSIDNRVLTSSKENRGKSDDVPSKNVVRKMKSYWSKLLSAKLITQRKFDNLTKAERGGLTDDDKAGFIKRQLVETRQITKHVARILDERFHTETDENNKKIRQVKIVTLKSNLVSNFRKEFELYKVREINDYHHAHDAYLNAVIGKALLGVYPQLEPEFVYGDYPHFHGHKENKATAKKFFYSNIMNFFKKDDVRTDKNGEIIWKKDEHISNIKKVLSYPQVNIVKKVEEQTGGFSKESILPKGNSDKLIPRKTKKFYWDTKKYGGFDSPIVAYSILVIADIEKGKSKKLKTVKALVGVTIMEKMTFERDPVAFLERKGYRNVQEENIIKLPKYSLFKLENGRKRLLASARELQKGNEIVLPNHLGTLLYHAKNIHKVDEPKHLDYVDKHKDEFKELLDVVSNFSKKYTLAEGNLEKIKELYAQNNGEDLKELASSFINLLTFTAIGAPATFKFFDKNIDRKRYTSTTEILNATLIHQSITGLYETRIDLSKLGGD

SEQ ID NO: 525 - protein, 1345 aa, Streptococcus mutans; identical to SEQ ID NO: 471
  Streptococcus mutans NV1996

SEQ ID NO: 526 - protein, 1345 aa, Streptococcus mutans
  Streptococcus mutans NVAB
MKKPYSIGLDIGTNSVGWAVVTDDYKVPAKKMKVLGNTDKSHIKKNLLGALLFDSGNTAADRRLKRTARRRYTRRRNRILYLQEIFAEEMSKVDDSFFHRLEDSFLVTEDKRGERHPIFGNLEEEVKYHENFPTIYHLRQYLADNPEKVDLRLVYLALAHIIKFRGHFLIEGKFDTRNNDVQRLFQEFLAVYDNTFENSSLQEQNVQVEEILTDKISKSAKKDRVLKLFPNEKSNGRFAEFLKLIVGNQADFKKHFELEEKAPLQFSKDTYEEELEVLLAQIGDNYAELFLSAKKLYDSILLSGILTVTDVSTKAPLSASMIQRYNEHQMDLAQLKQFIRQKLSDKYNEVFSDVSKDGYAGYIDGKTNQEAFYKYLKGLLNKIEGSGYFLDKIEREDFLRKQRTFDNGSIPHQIHLQEMRAIIRRQAEFYPFLADNQDRIEKILTFRIPYYVGPLARGKSDFAWLSRKSADKITPWNFDEIVDKESSAEAFINRMTNYDLYLPNQKVLPKHSLLYEKFTVYNELTKVKYKTEQGKTAFFDANMKQEIFDGVFKVYRKVTKDKLMDFLEKEFDEFRIVDLTGLDKENKVFNASYGTYHDLCKILDKDFLDNSKNEKILEDIVLTLTLFEDREMIRKRLENYSDLLTKEQVKKLERRHYTGWGRLSAELIHGIRNKESRKTILDYLIDDGNSNRNFMQLINDDALSFKEEIAKAQVIGETDNLNQVVSDIAGSPAIKKGILQSLKIVDELVKIMGHQPENIVVEMARENQFTKQGRRNSQQRLKGLTDSIKEFGSQILKEHPVENSQLQNDRLFLYYLQNGRDMYTGEELDIDYLSQYDIDHIIPQAFIKDNSIDNRVLTSSKENRGKSDDVPSKDVVRKMKSYWSKLLSAKLITQRKFDNLTKAERGGLTDDDKAGFIKRQLVETRQITKHVARILDERFYTETDENNKKIRQVKIVTLKSNLVSNFRKEFELYKVREINDYHHAHDAYLNAVIGKALLGVYPQLEPEFVYGDYPHFHGHKENKATAKKFFYSNIMNFFKKDDVRTDKNGEIIWKKDEHISNIKKVLSYPQVNIVKKVEEQTGGFSKESILPKGNSDKLIPRKTKKFYWDTKKYGGFDSPIVAYSILVIADIEKGKSKKLKTVKALVGVTIMEKMTFERDPVAFLERKGYRNVQEENIIKLPKYSLFKLENGRKRLLASARELQKGNEIVLPNHLGTLLYHAKNIHKVDEPKHLDYVDKHKDEFKELLDVVSNFSKKYTLAEGNLEKIKELYAQNNGEDLKELASSFINLLTFTAIGAPATFKFFDKNIDRKRYTSTTEILNATLIHQSITGLYETRIDLSKLGGD

SEQ ID NO: 527 - protein, 1345 aa, Streptococcus mutans; identical to SEQ ID NO: 526
  Streptococcus mutans NVAB

SEQ ID NO: 528 - protein, 1345 aa, Streptococcus mutans
  Streptococcus mutans R221
MKKPYSIGLDIGTNSVGWAVVTDDYKVPAKKMKVLGNTDKSHIKKNLLGALLFDSGNTAEDRRLKRTARRRYTRRRNRILYLQEIFSEEMGKVDDSFFHRLEDSFLVTEDKRGERHPIFGNLEEEVKYHENFPTIYHLRQYLADNPEKTDLRLVYLALAHIIKFRGHFLIEGKFDTRNNDVQRLFQEFLAVYDNTFENSSLQEQNVQVEEILTDKISKSAKKDRVLKLFPNEKSNGRFAEFLKLIVGNQADFKKHFELEEKAPLQFSKDIYEEELEVLLAQIGDNYAELFLSAKKLYDSILLSGILTVTDVSTKAPLSASMIQRYNEHQMDLAQLKQFIRQKLSDKYNEVFSDVSKDGYAGYIDGKTNQEAFYKYLKGLLNKIEGSGYFLDKIEREDFLRKQRTFDNGSIPHQIHLQEMRAIIRRQAEFYPFLADNQDRIEKILTFRIPYYVGPLARGKSDFAWLSRKSADKITPWNFDEIVDKESSVEAFINRMTNYDLYLPNQKVLPKHSLLYEKFTVYNELTKVKYKTEQGKTAFFDANMKQEIFDGVFKVYRKVTKDKLMDFLEKEFDEFRIVDLTGLDKENKAFNASYGTYHDLRKILDKDFLDNSKNEKILEDIVLTLTLFEDREMIRKRLKNYSDLLTKEQLKKLERRHYTGWGRLSAELIHGIRNKESRKTILDYLIDDGNSNRNFMQLINDDALSFKEEIAKAQVIGETDNLNQVVSDIAGSPAIKKGILQSLKIVDELVKIMGHQPENIVVEMARENQFTNQGRRNSQQRLKGLTDSIKEFGSQILKEHPVENSQLQNDRLFLYYLQNGRDMYTGEELDIDYLSQYDIDHIIPQAFIKDNSIDNRVLTSSKENRGKSDDVPSKDVVRKMKSYWSKLLSAKLITQRKFDNLTKAERGGLTDDDKAGFIKRQLVETRQITKHVARILDERFNTETDENNKKIRQVKIVTLKSNLVSNFRKEFELYKVREINDYHHAHDAYLNAVIGKALLGVYPQLEPEFVYGDYPHFHGHKENKATAKKFFYSNIMNFFKKDDVRTDKNGEIIWKKDEHISNIKKVLSYPQVNIVKKVEEQTGGFSKESILPKGNSDKLIPRKTKKFYWDTKKYGGFDSPIVAYSILVIADIEKGKSKKLKTVKALVGVTIMEKMTFERDPVAFLERKGYRNVQEENIIKLPKYSLFKLENGRKRLLASARELQKGNEIVLPNHLGTLLYHAKNIHKVDEPKHLDYVDKHKDEFKELLDVVSNFSKKYTLAEGNLEKIKELYAQNNGEDLKELASSFINLLTFTAIGAPATFKFFDKNIDRKRYTSTTEILNATLIHQSITGLYETRIDLNKLGGD

SEQ ID NO: 529 - protein, 1345 aa, Streptococcus mutans; identical to SEQ ID NO: 528
  Streptococcus mutans R221

SEQ ID NO: 530 - protein, 1345 aa, Streptococcus mutans
  Streptococcus mutans S1B
MKKPYSIGLDIGTNSVGWAVVTDDYKVPAKKMKVLGNTDKSHIKKNLLGALLFDSGNTAEDRRLKRTARRRYTRRRNRILYLQEIFSEEMGKVDDSFFHRLDESFLTDDDKNFDSYPIFGNKAEEDAYHQKFPTIYHLRKHLADSTEKADLRLVYLALAHMIKFRGHFLIEGELNAENTDVQKLFADFVGVYDRTFDDSHLSEITVDASSILTEKISKSRRLEKLINNYPKEKKNTLFRNLVALSLGLQPNFKTNFKLSEDAKLQFSKDTYEEDLEELLGKIGDDYADLFTLAKNLYDAILLSGILTADDSSTKAPLSASMIKRYAEHHEDLEKLKEFIKANKPELYHDIFKDETKNGYAGYIENGVKQDEFYKYLKNTLSKIAGSDYFLDKIEREDFLRKQRTFDNGSIPHQIHLQEMHAILRRQGDYYPFLKENQDRIEKILTFRIPYYVGPLARGKSDFAWLSRKSADKITPWNFDEIVDKESSVEAFINRMTNYDLYLPNQKVLPKHSLLYEKFTVYNELTKVKYKTEQGKTAFFDANMKQEIFDGVFKVYRKVTKDKLMDFLEKEFDEFRIVDLTGLDKENKAFNASYGTYHDLRKILDKDFLDNSKNEKILEDIVLTLTLFEDREMIRKRLKNYSDLLTKEQLKKLERRHYTGWGRLSAELIHGIRNKESRKTILDYLIDDGNSNRNFMQLINDDALSFKEEIAKAQVIGETDNLNQVVSDIAGSPAIKKGILQSLKIVDELVKIMGHQPENIVVEMARENQFTNQGRRNSQQRLKGLTDSIKEFGSQILKEHPVENSQLQNDRLFLYYLQNGRDMYTGEELDIDYLSQYDIDHIIPQAFIKDNSIDNRVLTSSKENRGKSDDVPSKDVVRKMKSYWSKLLSAKLITQRKFDNLTKGERGGLTDDDKAGFIKRQLVETRQITKHVARILDERFNTETDENNKKIRQVKIVTLKSNLVSNFRKEFELYKVREINDYHHAHDAYLNAVIGKALLGVYPQLEPEFVYGDYPHFHGHKENKATAKKFFYSNIMNFFKKDDVRTDKNGEIIWKKDEYISNIKKVLSYPQVNIVKKVEEQTGGFSKESILPKGDSDKLIPRKTKKFYWDTKKYGGFDSPIVAYSILVIADIEKGKSKKLKTVKALVGVTIMEKMTFERDPVAFLERKGYRNVQEENIIKLPKYSLFKLENGRKRLLASARELQKGNEIVLPNHLGTLLYHAKNIHKVDEPKHLDYVDKHKDEFKELLDVVSNFSKKYTLAEGNLEKIKELYAQNNGEDLKELASSFINLLTFTAIGAPATFKFFDKNIDRKRYTSTTEILNATLIHQSITGLYETRIDLSKLGGD

SEQ ID NO: 531 - protein, 1345 aa, Streptococcus mutans; identical to SEQ ID NO: 530
  Streptococcus mutans S1B

SEQ ID NO: 532 - protein, 1345 aa, Streptococcus mutans; identical to SEQ ID NO: 471
  Streptococcus mutans SF1

SEQ ID NO: 533 - protein, 1345 aa, Streptococcus mutans
  Streptococcus mutans SF14
MKKPYSIGLDIGTNSVGWAVVTDDYKVPAKKMKVLGNTDKSHIKKNLLGALLFDSGNTAEDRRLKRTARRRYTRRRNRILYLQEIFSEEMGKVNDSFFHRLEDSFLVTEDKRGERHPIFGNLEEEVKYHENFPTIYHLRQYLADNPEKVDLRLVYLALAHIIKFRGHFLIEGKFDTRNNDVQRLFQEFLAVYDNTFENSSLQEQNVQVEEILTDKISKSAKKDRVLKLFPNEKSNGRFAEFLKLIVGNQADFKKHFELEEKAPLQFSKDTYEEELEVLLAQIGDNYAELFLSAKKLYDSILLSGILTVTDVSTKAPLSASMIQRYNEHQMDLAQLKQFIRQKLSDKYNEVFSDVSKDGYAGYIDGKTNQEAFYKYLKGLLNKIEGSGYFLDKIEREDFLRKQRTFDNGSIPHQIHLQEMRAIIRRQAEFYPFLADNQDRIEKILTFRIPYYVGPLARGKSDFAWLSRKSADKITPWNFDEIVDKESSAEAFINRMTNYDLYLPNQKVLPKHSLLYEKFTVYNELTKVKYKTEQGKTAFFDANMKQEIFDGVFKVYRKVTKDKLMDFLEKEFDEFRIVDLTGLDKENKVFNASYGTYHDLCKILDKDFLDNSKNEKILEDIVLTLTLFEDREMIRKRLENYSDLLTKEQVKKLERRHYTGWGRLSAELIHGIRNKESRKTILDYLIDDGNSNRNFMQLINDDALSFKEEIAKAQVIGETDNLNQVVSDIAGSPAIKKGILQSLKIVDELVKIMGHQPENIVVEMARENQFTKQGRRNSQQRLKGLTDSIKEFGSQILKEHPVENSQLQNDRLFLYYLQNGRDMYTGEELDIDYLSQYDIDHIIPQAFIKDNSIDNRVLTSSKENRGKSDDVPSKDVVRKMKSYWSKLLSAKLITQRKFDNLTKAERGGLTDDDKAGFIKRQLVETRQITKHVARILDERFYTETDENNKKIRQVKIVTLKSNLVSNFRKEFELYKVREINDYHHAHDAYLNAVIGKALLGVYPQLEPEFVYGDYPHFHGHKENKATAKKFFYSNIMNFFKKDDVRTDKNGEIIWKKDEYISNIKKVLSYPQVNIVKKVEEQTGGFSKESILPKGNSDKLIPRKTKKFYWDTKKYGGFDSPIVAYSILVIADIEKGKSKKLKTVKALVGVTIMEKMTFERDPIAFLERKGYRNVQEENIIKLPKYSLFKLENGRKRLLASARELQKGNEIVLPNHLGTLLYHAKNIHKVDEPKHLDYVDKHKDEFKELLDVVSNFSKKYTLAEGNLEKIKELYAQNNGEDLKELASSFINLLTFTAIGAPAAFKFFDKNIDRKRYTSTTEILNATLIHQSITGLYETRIDLSKLGGD

SEQ ID NO: 534 - protein, 1345 aa, Streptococcus mutans; identical to SEQ ID NO: 533
  Streptococcus mutans SF14

SEQ ID NO: 535 - protein, 1345 aa, Streptococcus mutans
  Streptococcus mutans SM1
MKKPYSIGLDIGTNSVGWAVVTDDYKVPAKKMKVLGNTDKSHIKKNLLGALLFDSGNTAEDRRLKRTARRRYTRRRNRILYLQEIFSEEMGKVDDSFFHRLEDSFLVTEDKRGERHPIFGNLEEEVKYHENFPTIYHLRQYLADNPEKVDLRLVYLALAHIIKFRGHFLIEGKFDTRNNDVQKLFQEFLAVYDNTFENSSLQEQNVQVEEILTDKISKSAKKDRVLKLFPNEKSNGRFAEFLKLIVGNQADFKKHFELEEKAPLQLSKDTYEEELEVLLAQIGDNYAELFLSAKKLYDSILLSGILTVTDVSTKAPLSASMIQRYNEHQMDLAQLKQFIRQKLSDKYNEVFSDVSKDGYAGYIDGKTNQEAFYKYLKGLLNKIEGSGYFLDKIEREDFLRKQRTFDNGSIPHQIHLQEMRAIIRRQAEFYPFLADNQDRIEKILTFRIPYYVGPLARGKSDFAWLSRKSADKITPWNFDEIVDKESSVEAFINRMTNYDLYLPNQKVLPKHSLLYEKFTVYNELTKVKYKTEQGKTAFFDANMKQEIFDGVFKVYRKVTKDKLMDFLEKEFDEFRIVDLTGLDKENKAFNASYGTYHDLRKILDKDFLDNSKNEKILEDIVLTLTLFEDREMIRKRLENYSDLLTKEQVKKLERRHYTGWGRLSAELIHGIRNKESRKTLLDYLIDDGNSNRNFMQLINDDALSFKEEIAKAQVIGETDNLNQVVSDIAGSPAIKKGILQSLKIVDELVKIMGHQPENIVVEMARENQFTNQGRRNSQQRLKGLTDSIKEFGSQILKEHPVENSQLQNDRLFLYYLQNGRDMYTGEELDIDYLSQYDIDHIIPQAFIKDNSIDNRVLTSSKENRGKSDDVPSKDVVRKMKSYWSKLLSAKLITQRKFDNLTKAERGGLTDDDKAGFIKRQLVETRQITKHVARILDERFNTETDENNKKIRQVKIVTLKSNLVSNFRKEFELYKVREINDYHHAHDAYLNAVIGKALLGVYPQLEPEFVYGDYPHFHGHKENKATAKKFFYSNIMNFFKKDDVRTDKNGEIIWKKDEYISNIKKVLSYPQVNIVKKVEEQTGGFSKESILPKGNSDKLIPRKTKKFYWDTKKYGGFDSPIVAYSILVIADIEKGKSKKLKTVKALVGVTIMEKMTFERDPIAFLERKGYRNVQEENIIKLPKYSLFKLENGRKRLLASARELQKGNEIVLPNHLGTLLYHAKNIHKVDEPKHLDYVDKHKDEFKELLDVVSNFSKKYTLAEGNLEKIKELYAQNNGEDLKELASSFINLLTFTAIGAPATFKFFDKNIDRKRYTSTTEILNATLIHQSITGLYETRIDLSKLGGD

SEQ ID NO: 536 - protein, 1345 aa, Streptococcus mutans; identical to SEQ ID NO: 535
  Streptococcus mutans SM1

SEQ ID NO: 537 - protein, 1345 aa, Streptococcus mutans
  Streptococcus mutans SM4
MKKPYSIGLDIGTNSVGWAVVTDDYKVPAKKMKVLGNTDKSHIKKNLLGALLFDSGNTAEDRRLKRTARRRYTRRRNRILYLQEIFSEEMDKVDDSFFHRLEDSFLVTEDKRGERHPIFGNLEEEVKYHENFPTIYHLRQYLADNPEKVDLRLVYLALAHIIKFRGHFLIEGKFDTRNNDVQRLFQEFLAVYDNTFENSSLQEQNVQVEEILTDKISKSAKKDRVLKLFPNEKSNGRFAEFLKLIVGNQADFKKHFELEEKAPLQFSKDTYEEELEVLLAQIGDNYAELFLSAKKLYDSILLSGILTVTDVSTKAPLSASMIQRYNEHQMDLAQLKQFIRQKLSDKYNEVFSDVSKDGYAGYIDGKTNQEAFYKYLKGLLNKIEGSGYFLDKIEREDFLRKQRTFDNGSIPHQIHLQEMRAIIRRQAEFYPFLADNQDRIEKILTFRIPYYVGPLARGKSDFAWLSRKSADKITPWNFDEIVDKESSAEAFINRMTNYDLYLPNQKVLPKHSLLYEKFTVYNELTKVKYKTEQGKTAFFDANMKQEIFDGVFKVYRKVTKDKLMDFLEKEFDEFRIVDLTGLDKENKVFNASYGTYHDLCKILDKDFLDNSKNEKILEDIVLTLTLFEDREMIRKRLENYSDLLTKEQVKKLERRHYTGWGRLSAELIHGIRNKESRKTILDYLIDDGNSNRNFMQLINDDALSFKEEIAKAQVIGETDNLNQVVSDIAGSPAIKKGILQSLKIVDELVKIMGHQPENIVVEMARENQFTKQGRRNSQQRLKGLTDSIKEFGSQILKEHPVENSQLQNDRLFLYYLQNGRDMYTGEELDIDYLSQYDIDHIIPQAFIKDNSIDNRVLTSSKENRGKSDDVPSKDVVRKMKSYWSKLLSAKLITQRKFDNLTKAERGGLTDDDKAGFIKRQLVETRQITKHVARILDERFYTETDENNKKIRQVKIVTLKSNLVSNFRKEFELYKVREINDYHHAHDAYLNAVIGKALLGVYPQLEPEFVYGDYPHFHGHKENKATAKKFFYSNIMNFFKKDDVRTDKNGEIIWKKDEHISNIKKVLSYPQVNIVKKVEEQTGGFSKESILPKGNSDKLIPRKTKKFYWDTKKYGGFDSPIVAYSILVIADIEKGKSKKLKTVKALVGVTIMEKMTFERDPVAFLERKGYRNVQEENIIKLPKYSLFKLENGRKRLLASARELQKGNEIVLPNHLGTLLYHAKNIHKVDEPKHLDYVDKHKDEFKELLDVVSNFSKKYTLAEGNLEKIKELYAQNNGEDLKELASSFINLLTFTAIGAPATFKFFDKNIDRKRYTSTTEILNATLIHQSITGLYETRIDLSKLGGD

SEQ ID NO: 538 - protein, 1345 aa, Streptococcus mutans; identical to SEQ ID NO: 537
  Streptococcus mutans SM4

SEQ ID NO: 539 - protein, 1345 aa, Streptococcus mutans
  Streptococcus mutans SM6
MKKPYSIGLDIGTNSVGWAVVTDDYKVPAKKMKVLGNTDKSHIKKNLLGALLFDSGNTAEDRRLKRTARRRYTRRRNRILYLQEIFSEEMGKVDDSFFHRLEDSFLVTEDKRGERHPIFGNLEEEVKYHENFPTIYHLRQYLADNPEKTDLRLVYLALAHIIKFGGHFLIEGKFDTRNNDVQRLFQEFLAVYDNTFENSSLQEQNVQVEEILTDKISKSAKKDRVLKLFPNEKSNGRFAEFLKLIVGNQADFKKHFELEEKAPLQFSKDIYEEELEVLLAQIGDNYAELFLSAKKLYDSILLSGILTVTDVSTKAPLSASMIQRYNEHQMDLAQLKQFIRQKLSDKYNEVFSDVSKDGYAGYIDGKTNQEAFYKYLKGLLNKIEGSGYFLDKIEREDFLRKQRTFDNGSIPHQIHLQEMRAIIRRQAEFYPFLADNQDRIEKILTFRIPYYVGPLARGKSDFAWLSRKSADKITPWNFDEIVDKESSVEAFINRMTNYDLYLPNQKVLPKHSLLYEKFTVYNELTKVKYKTEQGKTAFFDANMKQEIFDGVFKVYRKVTKDKLMDFLEKEFDEFRIVDLTGLDKENKAFNASYGTYHDLRKILDKDFLDNSKNEKILEDIVLTLTLFEDREMIRKRLKNYSDLLTKEQLKKLERRHYTGWGRLSAELIHGIRNKESRKTILDYLIDDGNSNRNFMQLINDDALSFKEEIAKAQVIGETDNLNQVVSDIAGSPAIKKGILQSLKIVDELVKIMGHQPENIVVEMARENQFTNQGRRNSQQRLKGLTDSIKEFGSQILKEHPVENSQLQNDRLFLYYLQNGRDMYTGEELDIDYLSQYDIDHIIPQAFIKDNSIDNRVLTSSKENRGKSDDVPSKNVVRKMKSYWSKLLSAKLITQRKFDNLTKAERGGLTDDDKAGFIKRQLVETRQITKHVARILDERFHTETDENNKKIRQVKIVTLKSNLVSNFRKEFELYKVREINDYHHAHDAYLNAVIGKALLGVYPQLEPEFVYGDYPHFHGHKENKATAKKFFYSNIMNFFKKDDVRTDKNGEIIWKKDEHISNIKKVLSYPQVNIVKKVEEQTGGFSKESILPKGNSDKLIPRKTKKFYWDTKKYGGFDSPIVAYSILVIADIEKGKSKKLKTVKALVGVTIMEKMTFERDPVAFLERKGYRNVQEENIIKLPKYSLFKLENGRKRLLASARELQKGNEIVLPNHLGTLLYHAKNIHKVDEPKHLDYVDKHKDEFKELLDVVSNFSKKYTLAEGNLEKIKELYAQNNGEDLKELASSFINLLTFTAIGAPATFKFFDKNIDRKRYTSTTEILNATLIHQSITGLYETRIDLSKLGGD

SEQ ID NO: 540 - protein, 1345 aa, Streptococcus mutans; identical to SEQ ID NO: 539
  Streptococcus mutans SM6

SEQ ID NO: 541 - protein, 1134 aa, Streptococcus mutans
  Streptococcus mutans ST1
MANGKILGLDIGIASVGVGIIDKETGKIIHVNSRIFPAATADSNVERRGFRQGRRLVRRKKHRKVRLADLFLDSNLLTDFSKVSLNLNPYQLRVKGLNEELSNEELFIALKSIVSRRGISYLDDASEDSGANSSEYGKAVEENRKLLEDRTPGQIQLERFEKYGKVRGDFTVVENGENHRLINVFSTSAYKKEAERILRRQQEFNMRIADEFIEAYLTILTGKRKYYHGPGNEKSRTDYGRFRTDGTTLDNIFGILIGKCTFYPDEYRAAKASYTAQEFNLLNDLNNLTVPTETKKLSEEQKRQIIEHAKTVKTLGAPTLLKYIVKLVGCSADDIKGYRIDKSDKPEIHTFEAYRKMRTMELIKVDDLSRESLDALAHILTLNTEREGIEEAIRDRFTNKEFNQEQINELVLFRKNNSSLFGKGWHNFSLKLMKELIPELYETSEEQMTILTRLGKQRVKKSSNRTNYIDEKELTEEIYNPVVAKSVRQAIKIINLATKKYGVFDNIVIEMARESNEDDEKKAIQNAQKANEDEKKAALLKAAHQFNGKEELPDSIFHGHKELLTKIRLWHQQGEKCLYTGKTIFINDLIHNPYKYEIDHILPLSLSFDDSLANKVLVLSTANQEKGQRTPFQSLDSMDGAWTYREFKSYVKGLKTLSNKKKDYLLTEENIDKIEVKQKFIERNLVDTRYSSRVVLNALQDFYKERKFDTKISVVRGQFTSQLRRKWRIEKTRETYHHHAVDALIIAASSQLNLWKKQNNPLISYKEDQFVDPETGEILSLSDDEYKKLVFKAPYEHFVDTLKSKKFEDSILFSYQVDSKYNRKISGATICGTRKAQLGKDTQEETYVLGKIKDIYSQKGYEDFIKKYKKDKTQFLMYHKDPQTFEKVIEEILKTYPDKELNEKGKEVSCNPFEKYRQENGPVRKYSKKGNGPEIKSLKYYDEVLGKNIDITPKNSLNKVVLRSLNPWRTDVYFNHETRKYEFLGLKYSDLRYLKGEHRYGILIGDYKKIKDKEGIEKESEFKFTLYKNDLILIKDTAKGKEELFRFWSRTGKDNAKTFEKNKIELKPYSKSQFEKGEDTNVLGKLYASSNQLQKSFGTLENLSIYKVRTDVLGNKYFIKKEGDKPQLNFKKKL

SEQ ID NO: 542 - protein, 1134 aa, Streptococcus mutans; identical to SEQ ID NO: 541
  Streptococcus mutans ST1

SEQ ID NO: 543 - protein, 1350 aa, Streptococcus mutans
  Streptococcus mutans ST6
MKKPYSIGLDIGTNSVGWAVVTDDYKVPAKKMKVLGNTDKSHIEKNLLGALLFDSGNTAEDRRLKRTARRRYTRRRNRILYLQEIFSEEMGKVDDSFFHRLEDSFLVTEDKRGERHPIFGNLEEEVKYHENFPTIYHLRQYLADNPEKVDLRLVYLALAHIIKFRGHFLIEGKFDTRNNDVQRLFQEFLAVYDNTFENSSLQEQNVQVEEILTDKISKSAKKDRVLKLFPNEKSNGRFAEFLKLIVGNQADFKKHFELEEKAPLQFSKDTYEEELEVLLAQIGDNYAELFLSAKKLYDSILLSGILTVTDVSTKAPLSASMIQRYNEHQMDLTQLKQFIRQKLSDKYNEVFSDVSKDGYAGYIDGKTNQEAFYKYLKGLLNKIEGSGYFLDKIEREDFLRKQRTFDNGSIPHQIHLQEMRAIIRRQAEFYSFLADNQDRIEKILTFRIPYYVGPLARGKSDFAWLSRKSADKITPWNFDEIVDKESSAEAFINRMTNYDLYLPNQKVLPKHSLLYEKFTVYNELTKVKYKTEQGKTAFFDANMKQEIFDGVFKVYRKVTKDKLMDFLEKEFDEFRIVDLTGLDKENKAFNASYGTYHDLRKILDKDFLDNSKNEKILEDIVLTLTLFEDREMIRKRLENYSDLLTKEQVKKLERRHYTGWGRLSAELIHGIRNKESRKTILDYLIDDGNSNRNFMQLINDDALSFKEEIAKAQVIGETDNLNQVVSDIAGSPAIKKGILQSLKIVDELVKIMGHQPENIVVEMARENQFTNQGRRNSQQRLKGLTDSIKEFGSQILKEHPVENSQLQNDRLFLYYLQNGRDMYTGEELDIDYLSQYDIDHIIPQAFIKDNSIDNRVLTSSKENRGKSDDVPSEDVVNRMRPFWNKLLSSGLISQRKYNNLTKKELTLDDKAGFIKRQLVETRQITKHVARMLDERFNKEFDDNNKRIRKVKIVTLKSNLVSSFRKEFELYKVREINDYHHAHDAYLNAVVVKALLVKYSKLEPEFVYGEYPKYNSYRERKTATQKMFFYSNIMNMFKSKVKLADDQIVERPMIEVNDETGEIAWDKTKHITTVKKVLSYPQVNIVKKVEEQTIGQNGGLFDDNPKSPLEVIPSKLVPLKKALNPEKYGGYQKPTTAYPILLIVDTKQLIPISVMDKKRFEQNPVKFLKDKGYQQIEKNNFVKLPKYTLVDIGNGIKRLWASSKEVHKGNQLVVSKKSQDLLYHAHHLDNDYSNEYVKNHYQQFDILFNEITSFSKKCKLGKEHIQKIEEAYSKERDSASIEELADGFIKLLGFTQLGATSPFSFLGIKLNQKQYTGKKDYLLPCMEATLIHQSITGLYETRIDLSKLGGD

SEQ ID NO: 544 - protein, 1350 aa, Streptococcus mutans; identical to SEQ ID NO: 543
  Streptococcus mutans ST6

SEQ ID NO: 545 - protein, 1125 aa, Streptococcus mutans
  Streptococcus mutans U2A
MTNGKILGLDIGIASVGVGIINAKTGNVEHASSRIFPAANADNNVERRSARGGRRLIRRKKHRLKRVEDLFEKYNIDTDFSNLNLNPYQLRVKGLNEQLSNEELFAILKNIAKRRGISYLDDAEDDSVGSSDYAKAIDENRKLLKKQTPGEIQLKRLEKYGQLRGNFTIQDENGEYHRLINVFSTSDYVKEARRILETQSYYNKFITESFVEDYIKILQGKRKYYVGPGNEKSRTDYGIYRTDGETLDNLFGILIGKCGFYPEEYRAAKASYTAQEYNFLNDLNNLTVPTETKKLSTEQKYQLVDFAKTASTLGAAKLLKEIAKLVGCQVEEIKGYRLDNKDKPDLHTFEPFRKLKSNLTTIAVENLSITTLDTLAHILTLNTEREGIEEAIQKELPNIFSDEQITEIIAVRKKNSQIFGKGWHSFSIKLMKELIPELYETSEEQMTILTRLKKVKTNSKITNRTKYINEEEITDEIYNPVVSKSIRQTVKIINATIKKYGAFDQIIIEMPRESNEEDERKFIADLQKSNAKEKDDAMKQAALLYNGKDELPHDVFHGHKELATKIRLWYQQGERCLYSGKHIDIHDLIHNQHMFEIDHVLPLSLSFDDSLANKVLVYSWANQEKGQRTPFQALPQMASAWSFRELRDYISKQKGISKKKRDYLLTEQDINKVEVKQKFIERNLVDTRYVSRVVLNTLQDALKVMNKETKISVIRGQFTSQLRRQWRIDKSRETYHHHAVDALIIAASSQLRLWKKQNNPMFAEDKHGQKINLDTGEVLSDDAYKELVYQAPYQGFVNTISSKSFEDEILFSYQVDSKVNRKISDATIYATRQAQLGKDKKEETYVLGKIKDIYSQAGYDAFRKKYDKDKAVFLMYQKDPETWEKVIEVILRDYKELDDKGKEIGNPFERYKVKHGFVRKYSRKNKGTEIKSLKYYDNKLGNHIDITPNNSKHSVVLQSINPWRADLYFNPETTKYELMGLKYADLSFEKGTGKYSISREKYDEIKEREGISSKSEFKFTLYKNDLILVKDIGNHKELIARFNSKNDTSKHYVELKPWNKAKFDSEEELIPAFGKVAKSGQFIKGLNKPDLSIYKVKTDILGHKYYIKKEGDKPKLNFENKIKNK

SEQ ID NO: 546 - protein, 1125 aa, Streptococcus mutans; identical to SEQ ID NO: 545
  Streptococcus mutans U2A

SEQ ID NO: 547 - protein, 1345 aa, Streptococcus mutans
  Streptococcus mutans UA159
MKKPYSIGLDIGTNSVGWAVVTDDYKVPAKKMKVLGNTDKSHIEKNLLGALLFDSGNTAEDRRLKRTARRRYTRRRNRILYLQEIFSEEMGKVDDSFFHRLEDSFLVTEDKRGERHPIFGNLEEEVKYHENFPTIYHLRQYLADNPEKVDLRLVYLALAHIIKFRGHFLIEGKFDTRNNDVQRLFQEFLAVYDNTFENSSLQEQNVQVEEILTDKISKSAKKDRVLKLFPNEKSNGRFAEFLKLIVGNQADFKKHFELEEKAPLQFSKDTYEEELEVLLAQIGDNYAELFLSAKKLYDSILLSGILTVTDVGTKAPLSASMIQRYNEHQMDLAQLKQFIRQKLSDKYNEVFSDVSKDGYAGYIDGKTNQEAFYKYLKGLLNKIEGSGYFLDKIEREDFLRKQRTFDNGSIPHQIHLQEMRAIIRRQAEFYPFLADNQDRIEKLLTFRIPYYVGPLARGKSDFAWLSRKSADKITPWNFDEIVDKESSAEAFINRMTNYDLYLPNQKVLPKHSLLYEKFTVYNELTKVKYKTEQGKTAFFDANMKQEIFDGVFKVYRKVTKDKLMDFLEKEFDEFRIVDLTGLDKENKVFNASYGTYHDLCKILDKDFLDNSKNEKILEDIVLTLTLFEDREMIRKRLENYSDLLTKEQVKKLERRHYTGWGRLSAELIHGIRNKESRKTILDYLIDDGNSNRNFMQLINDDALSFKEEIAKAQVIGETDNLNQVVSDIAGSPAIKKGILQSLKIVDELVKIMGHQPENIVVEMARENQFTNQGRRNSQQRLKGLTDSIKEFGSQILKEHPVENSQLQNDRLFLYYLQNGRDMYTGEELDIDYLSQYDIDHIIPQAFIKDNSIDNRVLTSSKENRGKSDDVPSKDVVRKMKSYWSKLLSAKLITQRKFDNLTKAERGGLTDDDKAGFIKRQLVETRQITKHVARILDERFNTETDENNKKIRQVKIVTLKSNLVSNFRKEFELYKVREINDYHHAHDAYLNAVIGKALLGVYPQLEPEFVYGDYPHFHGHKENKATAKKFFYSNIMNFFKKDDVRTDKNGEIIWKKDEHISNIKKVLSYPQVNIVKKVEEQTGGFSKESILPKGNSDKLIPRKTKKFYWDTKKYGGFDSPIVAYSILVIADIEKGKSKKLKTVKALVGVTIMEKMTFERDPVAFLERKGYRNVQEENIIKLPKYSLFKLENGRKRLLASARELQKGNEIVLPNHLGTLLYHAKNIHKVDEPKHLDYVDKHKDEFKELLDVVSNFSKKYTLAEGNLEKIKELYAQNNGEDLKELASSFINLLTFTAIGAPATFKFFDKNIDRKRYTSTTEILNATLIHQSITGLYETRIDLNKLGGD

SEQ ID NO: 548 - protein, 1345 aa, Streptococcus mutans; identical to SEQ ID NO: 472
  Streptococcus mutans W6

SEQ ID NO: 549 - protein, 1121 aa, Streptococcus oralis
  Streptococcus oralis SK1074
MNGLVLGLDIGIASVGVGILEKNSGKIIHANSRLFPAATADNNVERRKNRQARRLNRRKKHRGVRFQDLFEDYGLLTDFSKVSINLNPYRLRVDGLNQQLTNEELFIALKNIVKRRGISYLDDASEDGGAVSSDYGKAVEENRKLLAEQTPGQIQLERFEKYGQVRGDFTVVENGEKCRLINVFSTSAYRKEAEKILRKQQEFNNQITDEFIEDYLKILTGKRKYYHGPGNEKSRTDYGRFRTDGTTLDNIFGVLIGKCTFYPNEYRASKSSYTAQEFNLLNDLNNLTVPTETKKLSEEQKKVIVEYAKEAKTLGASTLLKYIVKMIDASVDQISGYRVDVNNKPEMHTFEVYRKMQSLETISVGELSRNVLDELAHILTLNTEREGIEEAINSKLMGVFSQDQVLELVQFRKNNSSLFSKGWHNFSLKLMMELIPELYETSEEQMTILTRLGKQKSKETSKRTKYIDEKELTEEIYNPVVAKSVRQAIKIINEATKKHGIFDNIVIEMARENNEEDAKKDYIKRQKANQDEKNAAMEKAAFQYNGKKELPGNIFNGHKELATKIRLWHQQGEKCLYTGKTIPISDLIHNQYKYEIDHILPLSLSFDDSLSNKVLVHATANQEKGQRTPFQALDSMDDAWSYREFKSYVKDLKSLSNKKKDYLLTEEDISKIEVKQKFIERNLVDTRYSSRVVLNALQDFYKSHQFDTTISVVRGQFTSQLRRKWGLEKSRETYHHHAVDALIIAASSQLRLWKKQNNPLITYKEGQFVDSQTGEIISLTDDEYKELVFKAPYDHFVDTLHSKTFEDGILFSYQVDSKYNRKISDATIYATRKAKLDKDKSEETYVLGKIKDIYSQAGYDAFIKIYNKDKRKFLMYHKDPQTFEKVIEEILRTYPSKERNDKNKEVPCNPFEKYRQENGPIRKYSKKGNGPEIKCLKYYDNKLGNYIDISPDGSDNQVVLQSLKPWRTDVYFNHQTKEYELMGLKYSDLSFEKGSGKYSISNEKYNSIKRIEGVNEQSEFKFTLYKNDLILIKDSENNEQKLFRFNSRNDTAKHYVELKPYDKARFDGQQELITILGNVAKGGQCLKGLNKSNISIFKVKTDVLGKKHIIKKEGDEPKLKF

SEQ ID NO: 550 - protein, 1373 aa, Streptococcus oralis
  Streptococcus oralis SK304
MENKNYSIGLDIGTNSVGWAVITDDYKVPSKKMKVLGNTDKRFIKKNLIGALLFDEGTTAEARRLKRTARRRYTRRKNRLRYLQEIFAEEMSKVDSSFFHRLDDSFLIPEDKKGSKYPIFATLIEEKEYHKQFPTIYHLRKQLADSKEKTDLRLIYLALAHMIKYRGHFLYEDTFDIKNNDIQKIFNEFISIYNNTFEGNSLSGQNVQVEAIFTDKISKSAKRERVLKLFPDEKSTGLFSEFLKLIVGNQADFKKHFDLEEKAPLQFSRDTYDEDLENLLGQIGDDFADLFVAAKKLYDAILLSGILTVTDPSTKAPLSASMIERYENHQKDLATLKQFIKTNLPEKYDEVFSDQSKDGYAGYIDGKTTQESFYKYIKNLLSKFEGADYFLEKIEREDFLRKQRTFDNGSIPHQIHLQEMNAILRRQGEHYPFLKENKEKIEKILTFRIPYYVGPLARGNRDFAWLTRNSDQAIRPWNFEEIVDKASSAESFINKMTNYDLYLPEEKVLPKHSLLYETFAVYNELTKVKFIAEGLRDYQFLDSRQKKDIFYTLFKAEDKRKVTEKDIIQYLHTVDGYDGIELKGIEKQFNASLSTYHDLLKIIKDKEFMDDPNNEEILENIVHTLTIFEDREMIKQRLAQYDSLFDEKVIKALTRRHYTGWGKLSSKLINGIRDKQTGKTILDYLMDDGYNNRNFMQLINDDELSFKEIIKKAQVVGKTDDVKQVVQELPGSPAIKKGILQSIKLVDELVKVMGHEPESIVIEMARENQTTARGKKNSQQRYKRIEDSLKILASGLNAKILKEHPTDNIQLQNDRLFLYYLQNGRDMYTGKPLDINQLSSYDIDHIVPQAFIKDDSLDNRVLTSLKDNRGKSDNVPSLEVVEKMKTFWQQLLDSKLISYRKFNNLTKAERGGLDERDKVGFIKRQLVETRQITKHVAQILDARYNTEVNEKDKKNRTVKIITLKSNLVSNFRKEFRLYKIREINDYHHAHDAYLNAVVAKAILKKYPKLEPEFVYGDYQKYDLKRYISRSKDPKEIEKATEKYFFYSNLLNFFKEEVHYADGTIVKRENIEYSKDTGEIAWNKEKDFATIKKVLSLPQVNIVKKREVQTGGFSKESILPKGNSDKLIPRKTKDILWDTTKYGGFDSPVIAYSILLIADIEKGKAKRLKTVKTLVGITIMEKATFEKSPIAFLENKGYHNVRKENILCLPKYSLFELKNGRRRMLASAKELQKGNEIVLPVHLTTLLYHAKNIHRLDEPEHLEYIQKHRNEFKGLLNLVSEFSQKYVLADANLEKIKNLYADNEQADIEILANSFINLLTFTALGAPAAFKFFGKDVDRKRYTTVSEILNATLIHQSITGLYETRIDLSKLGED

SEQ ID NO: 551 - protein, 1134 aa, Streptococcus oralis
  Streptococcus oralis SK313
MNGLVLGLDIGIASVGVGILEKNSGKIVHASSRIFPAATADNNVERRKNRQARRLHRRKKHRGARLKDLFEYYGLLTDFSKVSINLNPYRLRVDGLDQQLTNEELFIALKNIVKRRGISYLDDASEDGGTVSSDYGKAVEENRKLLAEQTPGQIQLERFEKYGQLRGDFTVVENSEKCRLINVFSTSAYKKEAERILRKQQEFNNQITDEFIEDYLKILTGKRKYYHGPGNEKSRTDYGRFRTDGATLDNIFGILIGKCTFYPNEYRASKASYTAQEFNLLNDLNNLTVPTETKKLSEEQKKTIIEYAKSAKTLGASTLLKYIAKMIDASVDQIRGYRVDVNNKPEMHTFEVYRKMQSLETISVGELSRNILDELAHILTLNTEREGIEEAINTKLRDSFSQDQVLELVQFRKNNSSLFSKGWHNFSLKLMMELIPELYETSEEQMTILTRLGKQKSKETSKRTKYIDEKEVTEEIYNPVVAKSVRQAIKIINEATKKHGIFDNIVIEMARENNEEDAKKDYIKRQKANQDEKYAAMEKAAFQYNGKKELPDNIFHGHKELATKIRLWHQQGEKCLYTGKSIPISDLIHNQYKYEIDHILPLSLSFDDSLSNKVLVLATANQEKGQRTPFQALDSMDDAWSYREFKSYVKESKLLGNKKKEYLLTEEDISKIEVKQKFIERNLVDTRYSSRVVLNALQDFYKNHNFDTTISVVRGQFTSQLRRKWGLEKSRETYHHHAVDALIIAASSQLRLWKKQNNPLIAYKEGQFVDSQTGEIISLTDDEYKELVFKAPYDHFVDTLSSKTFEDSILFSYQVDSKFNRKISDATIYATRKAKLDKEKKEYTYTLGKIKDIYSLGTKTPSKTGFYKFLDLYNKDKSQFLMFQKDRKTWDEVIEKIMEQYRPFKEYDKAGKLVDFNPFEKYRQENGPIRKYSKKGNGPEIKSLKYYDILLGKHKNITPEGSRNTVALLSLNPWRTDVYYNMETKKYEFLGLKYADLPFEEGGAYGISTETYNELREKEGIGKNSEFKFTLYKNDLILIKDTETNCQQFFRFWSRTGKDNPKSFEKHKIELKPYEKAKFEKGEELEVLGKVPPSSNQFQKNMQIENLSIYKVKTDVLGNKHFIKKEGDKPKLKF

SEQ ID NO: 552 - protein, 1371 aa, Streptococcus oralis
  Streptococcus oralis SK610
MENKNYSIGLDIGTNSVGWSVITDDYKVPSKKMKVLGNTDKRFIKKNLIGALLFDEGTTAEARRLKRTARRRYTRRKNRLRYLQEIFAEEMSKVDSSFFHRLDDSFLIPEDKRGSKYPIFATLAEEKEYHKQFPTIYHLRKQLADSKEKTDLRLIYLALAHMIKYRGHFLYEDTFDIKNNDIQKIFSEFISIYDNTFEGSSLSGQNAQVEAIFTDKISKSAKRERVLKLFPDEKSTGLFSEFLKLIVGNQADFKKHFDLGEKAPLQFSKDTYDEDLENLLGQIGDDFADLFLVAKKLYDAILLSGILTVTDPSTKAPLSASMIERYENHQKDLAVLKQFIKNNLPEKYDEVFSDQSKDGYAGYIDGKTTQEAFYKYIKNLLSKFEGTDYFLEKIEREDFLRKQRTFDNGSIPHQIHLQEMNAILRRQGEHYPFLKDNKEKIEKILTFRIPYYVGPLARGNRDFAWLTRNSDEAIRPWNFEEIVDKASSAEDFINKMTNYDLYLPEEKVLPKHSLLYETFAVYNELTKVKFIAEGLRDYQFLDSGQKKQIVTQLFKEKRKVTEKDIIQFLHNVDGYDGIELKGIEKQFNASLSTYHDLLKIIKDKEFMDDSKNEEILENIVHTLTIFEDREMIKQRLAQYDSLFDEKVIKALIRRHYTGWGKLSAKLIDGICDKQTGNTILDYLIDDGKNNRNFMQLINDDGLSFKEITQKAQVVGKTDDVKQVVQELPGSPAIKKGILQSIKIVDELVKVMGHTPESIVIEMARENQTTARGKKNSQQRYKRIEDALKNLASGLDSNILKEHPTNNIQLQNDRLFLYYLQNGRDMYTGKPLDINQLSSYDIDHIVPQAFIKDDSLDNRVLTSLKDNRGKSDNVPSIEVVQKRKAFWQQLLDSKLISERKFNNLTKAERGGLDERDKVGFIKRQLVETRQITKHVAQILDARFNKEVNEKDKKNRTVKIITLKSNLVSNFRKEFRLYKVREINDYHHAHDAYLNAVVAKAILKKYPKLEPEFVYGDYQKYDLKRYISRSRNPKEVEKATEKYFFYSNLLNFFKEEVHYADGTIVKRENIEYSKDTGEIAWNKEKDFATIKKVLSYPQVNIVKKREVQTGGFSKESILPKGNSDKLIPRKTKDILWETTKYGGFDSPVIAYSILLIADIEKGKAKKLKTVKTLVGITIMEKAAFEENPITFLENKGYHNVRKENILCLPKYSLFELENGRRRLLASAKELQKGNEIVLPVYLTTLLYHSKNVHKLDEPEHLEYIQKHRNEFKDLLNLVSEFSQKYVLADANLEKIQNLYADNEQADIEILANSFINLLTFTALGAPAAFKFFGKDIDRKRYTTVSEILNATLIHQSITGLYETRIDLSKLGED

SEQ ID NO: 553 - protein, 1140 aa, Streptococcus parasanguinis
  Streptococcus parasanguinis F0449
MNGLVLGLDIGIASVGVGILKKDIGEIIHTNSRLFSAATADSNIERRGHRGGKRLTRRKKHRSIRLHDLFEDFGLLTDFSKVSINLNPYQLRVQGLDNQLTNEELFIALKNIVKRRGISYLDDASEDGGTVSSDYGKAVEENRKLLAEQTPGQIQLDRFEKYGQVRGDFNVVENGEKRRLINVFTTSAYSKEAERILRKQQEFNKKITDEFIEDYLTILTGKRKYYHGPGNEKSRTDYGRYTTKKDPEGKYITLDNIFGILIGKCTFYPDEYRASKASYTAQEFNLLNDLNNLTVPTETKKLSEEQKKTIIKYAKTAKTLGASTLLKYIAKLIGASVDQIHGYRIDPNKKPEMHTFETYRKMQSLETISVEELPRKVLDELAHILTLNTEREGIEEAINATLKDTFSQDQVLELVQFRKNNSSLFSKGWHSFSLKLMMELIPELYETSEEQMTILTRLGKQKSKETSKRTKYIDEKELTEEIYNPVVAKSVRQAIKIINEATKKYGIFDNIVIEMARENNEEDAKKEYIKRQKANLDEKNAAMEKAAFQYNGKKELPDNVFHGHKELATKIRLWHQQGEKCLYTGKNIPISDLIQNQYKYEIDHILPLSLSFDDSLSNKVLVLATANQEKGQRTPFQALDSMDDAWSYREFKSYVKDSKLLGNKKKEYLLTEEDISKIEVKQKFIERNLVDTRYSSRVVLNALQDFYKEHQFDTTISVVRGQFTSQLRRKWGLEKSRETYHHHAVDALIIAASSQLRLWKKQNNPLISYTEGQFVDQVTGEIISLSDDEYKELVFKAPYDHFVDTLKSKKFEDSILFSYQVDSKYNRKISDATIYATRKAKLDKENKEYTYTLGKIKDIYALGTKSPSKTGFYKFLDLYNKDKSQFLMFQKDRKTWDEVIEKIIEQYRPFKEYDENGKEVDFNPFEKYRIENGPIRKYSKKGNGPEIKSLKYYDNLLGKFVDITPSESKNPVALLSLNPWRTDVYYNTETSKYEFLGLKYADLCFEKGGAYGISEVKYNKIREKEGIGKESEFKFTLYKNDLILIKDTETNCQQIFRFWSRTGKDNPKSFEKHKIELKPYEKARFEKGEELEVLGKVPPSSNQLQKNMQIENLSIYKVKTDVLGNKHFIKKEGEEPKLKF

SEQ ID NO: 554 - protein, 1130 aa, Streptococcus pasteurianus
MTNGKILGLDIGIASVGVGIIEAKTGKVVHANSRLFSAANAENNAERRGFRGSRRLNRRKKHRVKRVRDLFEKYGIVTDFRNLNLNPYELRVKGLTEQLKNEELFAALRTISKRRGISYLDDAEDDSTGSTDYAKSIDENRRLLKNKTPGQIQLERLEKYGQLRGNFTVYDENGEAHRLINVFSTSDYEKEARKILETQADYNKKITAEFIDDYVEILTQKRKYYHGPGNEKSRTDYGRFRTDGTTLENIFGILIGKCNFYPDEYRASKASYTAQEYNFLNDLNNLKVSTETGKLSTEQKESLVEFAKNTATLGPAKLLKEIAKILDCKVDEIKGYREDDKGKPDLHTFEPYRKLKFNLESINIDDLSREVIDKLADILTLNTEREGIEDAIKRNLPNQFTEEQISEIIKVRKSQSTAFNKGWHSFSAKLMNELIPELYATSDEQMTILTRLEKFKVNKKSSKNTKTIDEKEVTDEIYNPVVAKSVRQTIKIINAAVKKYGDFDKIVIEMPRDKNADDEKKFIDKRNKENKKEKDDALKRAAYLYNSSDKLPDEVFHGNKQLETKIRLWYQQGERCLYSGKPISIQELVHNSNNFEIDHILPLSLSFDDSLANKVLVYAWTNQEKGQKTPYQVIDSMDAAWSFREMKDYVLKQKGLGKKKRDYLLTTENIDKIEVKKKFIERNLVDTRYASRVVLNSLQSALRELGKDTKVSVVRGQFTSQLRRKWKIDKSRETYHHHAVDALIIAASSQLKLWEKQDNPMFVDYGKNQVVDKQTGEILSVSDDEYKELVFQPPYQGFVNTISSKGFEDEILFSYQVDSKYNRKVSDATIYSTRKAKIGKDKKEETYVLGKIKDIYSQNGFDTFIKKYNKDKTQFLMYQKDSLTWENVIEVILRDYPTTKKSEDGKNDVKCNPFEEYRRENGLICKYSKKGKGTPIKSLKYYDKKLGNCIDITPEESRNKVILQSINPWRADVYFNPETLKYELMGLKYSDLSFEKGTGNYHISQEKYDAIKEKEGIGKKSEFKFTLYRNDLILIKDIASGEQEIYRFLSRTMPNVNHYVELKPYDKEKFDNVQELVEALGEADKVGRCIKGLNKPNISIYKVRTDVLGNKYFVKKKGDKPKLDFKNNKK

SEQ ID NO: 555 - protein, 1374 aa, Streptococcus pseudoporcinus
  Streptococcus pseudoporcinus LQ 940-04
MKKRYSYSIGLDIGTNSVGWAVINEDYKVPAKKMTVFGNTDRKTIKKNLLGTVLFDSGETAQARRLKRTNRRRYTRRRYRLCQLQNIFATEMVKVDDTFFQRLSESFFYYQDKAFDKHPIFGNSKEERAYHKTYPTIYHLRKDLADRDQKADLRLIYLALSHIIKFRGHFLIEGKLNSENTDVQKLFIALVTVYNLLFEEEPIAGETCDAKALLTAKTSKSKRLESLISEFPGQKKNGLFGNLLALALGLRPNFKSNFGLSEDAKLQITKDTYEEELDNLLAEIGDHYADLFLAAKNLSDAILLSDILTLSDENTRAPLSASMIKRYEEHQEDLALLKKLVKEQMPEKYWEIFSNAKKNGYAGYIEGKVSQEDFYRYIKPILSRLKGGDEFLAKIDRDDFLRKQRTFDNGSIPHQIHLKELHAILRRQEKYYPFLAEQKEKIEQLLCFRIPYYVGPLAKGGNSSFAWLKRRSDEPITPWNFKDVVDEEASAQAFIEGMTNYDTYLPEEKVLPKHSPLYEMFTVYNELTKVKYIAENMTKPLYLSAEQKEAIIDHLFKQTRKVTVKDLKEKYFSQIEGLENVDVTGVEGAFNASLGTYNDLLKIIKDKAFLDDEANAEILEEIVLILTLFQDEKLIEKRLAKYANLFEKSVLKKLRKRHYRGWGRLSRQLIDGMKDKASGKTILDFLKADDFANRNFIQLINDSSLDFEKLIDDAQKKAIKRESLTEAVANLAGSPAIKKGILQSLKVVDEIVKVMGHNPDNIVIEMSRENQTTAQGLKNARQRLKKIKEVHKKTGSRILEDNSERITNLTLQDNRLYLYLLQDGKDMYTGQDLDINNLSQYDIDHIIPQSFIKDNSIDNLVLTTQKANRGKSDNVPSIEVVRDMKDRVWRRQLANGAISRQKFDHLTKAERGGLADSDKARFLRRQLVETRQITKHVAQLLDSRFNSKSNQNKKLARNVKIITLKSKIVSDFRKDFGLYKLREVNNYHHAHDAYLNAVVGTALLKKYPKLEAEFVYGDYKHFDLVKLISKSDPSLGKATAKVFFYSNIMNFFKEELSLADGTLMKRPVIETNTETGEVVWDKVKDFKTIRKVLSYPQVNIVKKTEIQSGAFSKESVLSKGNSDKLIERKKGWDPKKYGGFDSPNTAYSIFVVAKVAKRKAQKLKTVKEIVGITIMEQAEYEKDNIAFLEKKGYQDIQEKLLIKLPKYSLFELENGRRRLLASANEFQKGNELALSGKYMKFLYLASRYDKLSSKIESEQQKKLFVEQHLHYFDEILDIVVKHATCYIKAENNLKKIISLYKKKEAYSINEQALNMLNLFIFTSLGAPSTFVFFDETIDRKRYTTSSDVLNGILIQQSITGLYETRIDLSRFGGD

SEQ ID NO: 556 - protein, 1368 aa, Streptococcus pyogenes
  Streptococcus pyogenes MGAS10270
MDKKYSIGLDIGTNSVGWAVITDDYKVPSKKFKVLGNTDRHSIKKNLIGALLFDSGETAEATRLKRTARRRYTRRKNRICYLQEIFSNEMAKVDDSFFHRLEESFLVEEDKKHERHPIFGNIVDEVAYHEKYPTIYHLRKKLVDSTDKADLRLIYLALAHMIKFRGHFLIEGDLNPDNSDVDKLFIQLVQTYNQLFEENPINASGVDAKAILSARLSKSRRLENLIAQLPGEKKNGLFGNLIALSLGLTPNFKSNFDLAEDAKLQLSKDTYDDDLDNLLAQIGDQYADLFLAAKNLSDAILLSDILRLNSEITKAPLSASMIKRYDEHHQDLTLLKALVRQQLPEKYKEIFFDQSKNGYAGYIDGGASQEEFYKFIKPILEKMDGTEELLAKLNREDLLRKQRTFDNGSIPHQIHLGELHAILRRQEDFYPFLKDNREKIEKILTFRIPYYVGPLARGNSRFAWMTRKSEETITPWNFEEVVDKGASAQSFIERMTNFDKNLPNEKVLPKHSLLYEYFTVYNELTKVKYVTEGMRKPAFLSGEQKKAIVDLLFKTNRKVTVKQLKEDYFKKIECFDSVEISGVEDRFNASLGTYHDLLKIIKDKDFLDNEENEDILEDIVLTLTLFEDREMIEERLKTYAHLFDDKVMKQLKRRRYTGWGRLSRKLINGIRDKQSGKTILDFLKSDGFANRNFMQLIHDDSLTFKEDIQKAQVSGQGDSLHEHIANLAGSPAIKKGILQTVKVVDELVKVMGRHKPENIVIEMARENQTTQKGQKNSRERMKRIEEGIKELGSQILKEHPVENTQLQNEKLYLYYLQNGRDMYVDQELDINRLSDYDVDHIVPQSFIKDDSIDNKVLTRSDKNRGKSDNVPSEEVVKKMKNYWRQLLNAKLITQRKFDNLTKAERGGLSELDKAGFIKRQLVETRQITKHVAQILDSRMNTKYDENDKLIREVKVITLKSKLVSDFRKDFQFYKVREINNYHHAHDAYLNAVVGTALIKKYPKLESEFVYGDYKVYDVRKMIAKSEQEIGKATAKYFFYSNIMNFFKTEITLANGEIRKRPLIETNGETGEIVWDKGRDFATVRKVLSMPQVNIVKKTEVQTGGFSKESILPKRNSDKLIARKKDWDPKKYGGFDSPTVAYSVLVVAKVEKGKSKKLKSVKELLGLTIMERSSFEKNPIDFLEAKGYKEVKKDLIIKLPKYSLFELENGRKRMLASAGELQKGNELALPSKYVNFLYLASHYEKLKGSPEDNEQKQLFVEQHKHYLDEIIEQISEFSKRVILADANLDKVLSAYNKHRDKPIREQAENIIHLFTLTNLGAPAAFKYFDTTIDRKRYTSTKEVLDATLIHQSITGLYETRIDLSQLGGD

SEQ ID NO: 557 - protein, 1371 aa, Streptococcus pyogenes
MDKKYSIGLDIGTNSVGWAVITDDYKVPSKKFKVLGNTDRHSIKKNLIGALLFDSGETAEATRLKRTARRRYTRRKNRICYLQEIFSNEMAKVDDSFFHRLEESFLVEEDKKHERHPIFGNIVDEVAYHEKYPTIYHLRKKLADSTDKADLRLIYLALAHMIKFRGHFLIEGDLNPDNSDVDKLFIQLVQTYNQLFEENPINASRVDAKAILSARLSKSRRLENLIAQLPGEKKNGLFGNLIALSLGLTPNFKSNFDLAEDAKLQLSKDTYDDDLDNLLAQIGDQYADLFLAAKNLSDATLLSDILRVNSEITKAPLSASMIKRYDEHHQDLTLLKALVRQQLPEKYKEIFFDQSKNGYAGYIDGGASQEEFYKFIKPILEKMDGTEELLAKLNREDLLRKQRTFDNGSIPHQIHLGELHAILRRQEDFYPFLKDNREKIEKILTFRIPYYVGPLARGNSRFAWMTRKSEETITPWNFEEVVDKGASAQSFIERMTNFDKNLPNEKVLPKHSLLYEYFTVYNELTKVKYVTEGMRKPAFLSGEQKKAIVDLLFKTNRKVTVKQLKEDYFKKIECFDSVEISGVEDRFNASLGTYHDLLKIIKDKDFLDNEENEDILEDIVLTLTLFEDKEMIEERLKTYAHLFDDKVMKQLKRRHYTGWGRLSRKLINGIRDKQSGKTILDFLKSDGFANRNFIQLIHDDSLTFKEAIQKAQVSGQGHSLHEQIANLAGSPAIKKGILQSVKVVDELVKVMGHKPENIVIEMARENQTTQKGQKNSRERMKRIEEGIKELGSQILKEHPVENTQLQNEKLYLYYLQNGRDMYVDQELDINRLSDYDVDHIVPQSFIKDDSIDNKVLTRSDKNRGKSDDVPSEEVVKKMKNYWRQLLNAKLITQRKFDNLTKAERGGLSELDKAGFIKRQLVETRQITKHVAQILDSRMNTKYDENDKLIREVKVITLKSKLVSDFRKDFQFYKVREINNYHHAHDAYLNAVVGTALIKKYPKLESEFVYGDYKVYDVRKMIAKSEQEIGKATAKRFFYSNIMNFFKTEITLANGEIRKRPLIETNEETGEIVWDKGRDFATVRKVLSMPQVNIVKKTEVQTGALTNESIYARGSFDKLISRKHRFESSKYGGFGSPTVTYSVLVVAKSKVQDGKVKKIKTGKELIGITLLDKLVFEKNPLKFIEDKGYGNVQIDKCIKLPKYSLFEFENGTRRMLASVMANNNSRGDLQKANEMFLPAKLVTLLYHAHKIESSKELEHEAYILDHYNDLYQLLSYIERFASLYVDVEKNISKVKELFSNIESYSISEICSSVINLLTLTASGAPADFKFLGTTIPRKRYGSPQSILSSTLIHQSITGLYETRIDLSQLGSD

SEQ ID NO: 558 - protein, 1367 aa, Streptococcus pyogenes
MDKKYSIGLDIGTNSVGWAVITDDYKVPSKKFKVLGNTDRHSIKKNLIGALLFGSGETAEATRLKRTARRRYTRRKNRICYLQEIFSNEMAKVDDSFFHRLEESFLVEEDKKHERHPIFGNIVDEVAYHEKYPTIYHLRKKLADSTDKADLRLIYLALAHMIKFRGHFLIEGDLNPDNSDVDKLFIQLVQIYNQLFEENPINASRVDAKAILSARLSKSRRLENLIAQLPGEKRNGLFGNLIALSLGLTPNFKSNFDLAEDAKLQLSKDTYDDDLDNLLAQIGDQYADLFLAAKNLSDAILLSDILRVNSEITKAPLSASMIKRYDEHHQDLTLLKALVRQQLPEKYKEIFFDQSKNGYAGYIDGGASQEEFYKFIKPILEKMDGTEELLVKLNREDLLRKQRTFDNGSIPHQIHLGELHAILRRQEDFYPFLKDNREKIEKILTFRIPYYVGPLARGNSRFAWMTRKSEETITPWNFEEVVDKGASAQSFIERMTNFDKNLPNEKVLPKHSLLYEYFTVYNELTKVKYVTEGMRKPAFLSGEQKKAIVDLLFKTNRKVTVKQLKEDYFKKIECFDSVEISGVEDRFNASLGAYHDLLKIIKDKDFLDNEENEDILEDIVLTLTLFEDRGMIEERLKTYAHLFDDKVMKQLKRRRYTGWGRLSRKLINGIRDKQSGKTILDFLKSDGFANRNFMQLIHDDSLTFKEDIQKAQVSGQGHSLHEQIANLAGSPAIKKGILQTVKIVDELVKVMGHKPENIVIEMARENQTTQKGQKNSRERMKRIEEGIKELGSQILKEHPVENTQLQNEKLYLYYLQNGRDMYVDQELDINRLSDYDVDHIVPQSFIKDDSIDNKVLTRSDKNRGKSDNVPSEEVVKKMKNYWRQLLNAKLITQRKFDNLTKAERGGLSELDKAGFIKRQLVETRQITKHVAQILDSRMNTKYDENDKLIREVKVITLKSKLVSDFRKDFQFYKVREINNYHHAHDAYLNAVVGTALIKKYPKLESEFVYGDYKVYDVRKMIAKSEQEIGKATAKYFFYSNIMNFFKTEITLANGEIRKRPLIETNGETGEIVWDKGRDFATVRKVLSMPQVNIVKKTEVQTGGFSKESILPKRNSDKLIARKKDWDPKKYGGFDSPTVAYSVLVVAKVEKGKSKKLKSVKELLGITIMERSSFEKNPIDFLEAKGYKEVKKDLIIKLPKYSLFELENGRKRMLASAGELQKGNELALPSKYVNFLYLASHYEKLKGSPEDNEQKQLFVEQHKHYLDEIIEQISEFSKRVILADANLDKVLSAYNKHRDKPIREQAENIIHLFTLTNLGAPAAFKYFDTTIDRKRYTSTKEVLDATLIHQSITGLYETRIDLSQLGGD

SEQ ID NO: 559 - protein, 1368 aa, Streptococcus sp.
MDKKYSIGLDIGTNSVGWAVITDDYKVPSKKFKVLGNTDRHSIKKNLIGALLFDSGEIAEATRLKRTARRRYTRRKNRICYLQEIFSNEMAKVDDSFFHRLEESFLVEEDKKHERHPIFGNIVDEVAYHEKYPTIYHLRKKLVDSTDKADLRLIYLALAHMIKFRGHFLIEGDLNPDNSDVDKLFIQLVQTYNQLFEENPINASGVDAKAILSARLSKSRRLENLIAQLPGEKKNGLFGNLIALSLGLTPNFKSNFDLAEDAKLQLSKDTYDDDLDNLLAQIGDQYADLFLAAKNLSDAILLSDILRLNSEITKAPLSASMIKRYDEHHQDLTLLKALVRQQLPEKYKEIFFDQSKNGYAGYIDGGASQEEFYKFIKPILEKMDGTEELLAKLNREDLLRKQRTFDNGSIPHQIHLGELHAILRRQEDFYPFLKDNREKIEKILTFRIPYYVGPLARGNSRFAWMTRKSEETITPWNFEEVVDKGASAQSFIERMTNFDKNLPNEKVLPKHSLLYEYFTVYNELTKVKYVTEGMRKPAFLSGEQKKAIVDLLFKTNRKVTVKQLKEDYFKKIECFDSVEISGVEDRFNASLGTYHDLLKIIKDKDFLDNEENEDILEDIVLTLTLFEDREMIEERLKTYAHLFDDKVMKQLKRRRYTGWGRLSRKLINGIRDKQSGKTILDFLKSDGFANRNFMQLIHDDSLTFKEDIQKAQVSGQGDSLHEHIANLAGSPAIKKGILQTVKVVDELVKVMGRHKPENIVIEMARENQTTQKGQKNSRERMKRIEEGIKELGSQILKEHPVENTQLQNEKLYLYYLQNGRDMYVDQELDINRLSDYDVDHIVPQSFIKDDSIDNKVLTRSDKNRGKSDNVPSEEVVKKMKNYWRQLLNAKLITQRKFDNLTKAERGGLSELDKAGFIKRQLVETRQITKHVAQILDSRMNTKYDENDKLIREVKVITLKSKLVSDFRKDFQFYKVREINNYHHAHDAYLNAVVGTALIKKYPKLESEFVYGDYKVYDVRKMLAKSEQEIGKATAKYFFYSNIMNFFKTEITLANGEIRKRPLIETNGETGEIVWDKGRDFATVRKVLSMPQVNIVKKTEVQTGGFSKESILPKRNSDKLIARKKDWDPKKYGGFDSPTVAYSVLVVAKVEKGKSKKLKSVKELLGITIMERSSFEKNPIDFLEAKGYKEVRKDLIIKLPKYSLFELENGRKRMLASAGELQKGNELALPSKYVNFLYLASHYEKLKGSPEDNEQKQLFVEQHKHYLDEIIEQISEFSKRVILADANLDKVLSAYNKHRDKPIREQAENIIHLFTLTNLGAPTAFKYFDTTIDRKRYTSTKEVLDATFIHQSITGLYETRIDLSQLGGD

SEQ ID NO: 560 - protein, 1368 aa, Streptococcus pyogenes
MDKKYSIGLDIGTNSVGWAVITDDYKVPSKKLKGLGNTDRHGIKKNLIGALLFDSGETAEATRLKRTARRRYTRRKNRICYLQEIFSNEMAKVDDSFFHRLEESFLVEEDKKHERHPIFGNIVDEVAYHEKYPTIYHLRKKLADSTDKVDLRLIYLALAHMIKFRGHFLIEGDLNPDNSDVDKLFIQLVQTYNQLFEENPINASRVDAKAILSARLSKSRRLENLIAQLPGEKKNGLFGNLIALSLGLTPNFKSNFDLAEDAKLQLSKDTYDDDLDNLLAQIGDQYADLFLAAKNLSDATLLSDILRVNSEITKAPLSASMIKRYDEHHQDLTLLKALVRQQLPEKYKEIFFDQSKNGYAGYIDGGASQEEFYKFIKPILEKMDGTEELLAKLNREDLLRKQRTFDNGSIPYQIHLGELHAILRRQEDFYPFLKDNREKIEKILTFRIPYYVGPLARGNSRFAWMTRKSEETITPWNFEEVVDKGASAQSFIERMTNFDKNLPNEKVLPKHSLLYEYFTVYNELTKVKYVTEGMRKPAFLSGEQKKAIVDLLFKTNRKVTVKQLKEDYFKKIECFDSVEISGVEDRFNASLGTYHDLLKIIKDKDFLDNEENEDILEDIVLTLTLFEDREMIEERLKTYAHLFDDKVMKQLKRRRYTGWGRLSRKLINGIRDKQSGKTILDFLKSDGFANRNFMQLIHDDSLTFKEDIQKAQVSGQGDSLHEHIANLAGSPAIKKGILQTVKVVDELVKVMGRHKPENIVIEMARENQTTQKGQKNSRERMKRIEEGIKELGSDILKEYPVENTQLQNEKLYLYYLQNGRDMYVDQELDINRLSDYDVDHIVPQSFLKDDSIDNKVLTRSDKNRGKSDNVPSEEVVKKMKNYWRQLLNAKLITQRKFDNLTKAERGGLSELDKVGFIKRQLVETRQITKHVAQILDSRMNTKYDENDKLIREVRVITLKSKLVSDFRKDFQFYKVREINNYHHAHDAYLNAVVGTALIKKYPKLESEFVYGDYKVYDVRKMIAKSEQEIGKATAKYFFYSNIMNFFKTEITLANGEIRKRPLIETNGETGEIVWDKGRDFATVRKVLSMPQVNIVKKTEVQTGGFSKESILPKRNSDKLIARKKDWDPKKYGGFDSPTVAYSVLVVAKVEKGKSKKLKSVKELLGITIMERSSFEKDPIDFLEAKGYKEVRKDLIIKLPKYSLFELENGRKRMLASAGELQKGNELALPSKYVNFLYLASHYEKLKGSPEDNEQKQLFVEQHKHYLDEIIEQISEFSKRVILADANLDKVLSAYNKHRDKPIREQAENIIHLFTLTNLGAPAAFKYFDTTIDRKRYTSTKEVLDATLIHQSITGLYETRIDLSQLGGD

SEQ ID NO: 561 - protein, 1368 aa, Streptococcus pyogenes
MDKKYSIGLDIGTNSVGWAVITDDYKVPSKKFKVLGNTDRHSIKKNLIGALLFDSGETAEATRLKRTARRRYTRRKNRICYLQEIFSNEMAKVDDSFFHRLEESFLVEEDKKHERHPIFGNIVDEVAYHEKYPTIYHLRKKLVDSTDKADLRLIYLALAHMIKFRGHFLIEGDLNPDNSDVDKLFIQLVQTYNQLFEENPINASGVDAKAILSARLSKSRRLENLIAQLPGEKKNGLFGNLIALSLGLTPNFKSNFDLAEDAKLQLSKDTYDDDLDNLLAQIGDQYADLFLAAKNLSDAILLSDILRVNTEITKAPLSASMIKRYDEHHQDLTLLKALVRQQLPEKYKEIFFDQSKNGYAGYIDGGASQEEFYKFIKPILEKMDGTEELLVKLNREDLLRKQRTFDNGSIPHQIHLGELHAILRRQEDFYPFLKDNREKIEKILTFRIPYYVGPLARGNSRFAWMTRKSEETITPWNFEEVVDKGASAQSFIERMTNFDKNLPNEKVLPKHSLLYEYFTVYNELTKVKYVTEGMRKPAFLSGEQKKAIVDLLFKTNRKVTVKQLKEDYFKKIECFDSVEISGVEDRFNASLGTYHDLLKIIKDKDFLDNEENEDILEDIVLTLTLFEDREMIEERLKTYAHLFDDKVMKQLKRRRYTGWGRLSRKLINGIRDKQSGKTILDFLKSDGFANRNFMQLIHDDSLTFKEDIQKAQVSGQGDSLHEHIANLAGSPAIKKGILQTVKVVDELVKVMGRHKPENIVIEMARENQTTQKGQKNSRERMKRIEEGIKELGSQILKEHPVENTQLQNEKLYLYYLQNGRDMYVDQELDINRLSDYDVDHIVPQSFLKDDSIDNKVLTRSDKNRGKSDNVPSEEVVKKMKNYWRQLLNAKLITQRKFDNLTKAERGGLSELDKAGFIKRQLVETRQITKHVAQILDSRMNTKYDENDKLIREVKVITLKSKLVSDFRKDFQFYKVREINNYHHAHDAYLNAVVGTALIKKYPKLESEFVYGDYKVYDVRKMIAKSEQEIGKATAKYFFYSNIMNFFKTEITLANGEIRKRPLIETNGETGEIVWDKGRDFATVRKVLSMPQVNIVKKTEVQTGGFSKESILPKRNSDKLIARKKDWDPKKYGGFDSPTVAYSVLVVAKVEKGKSKKLKSVKELLGITIMERSSFEKNPIDFLEAKGYKEVKKDLIIKLPKYSLFELENGRKRMLASAGELQKGNELALPSKYVNFLYLASHYEKLKGSPEDNEQKQLFVEQHKHYLDEIIEQISEFSKRVILADANLDKVLSAYNKHRDKPIREQAENIIHLFTLTNLGAPAAFKYFDTTIDRKRYTSTKEVLDATLIHQSITGLYETRIDLSQLGGD

SEQ ID NO: 562 - protein, 1368 aa, Streptococcus pyogenes
MDKKYSIGLDIGTNSVGWAVITDDYKVPSKKFKVLGNTDRHSIKKNLIGALLFDSGETAEATRLKRTARRRYTRRKNRICYLQEIFSNEMAKVDDSFFHRLEESFLVEEDKKHERHPIFGNIVDEVAYHEKYPTIYHLRKKLVDSTDKADLRLIYLALAHMIKFRGHFLIEGDLNPDNSDVDKLFIQLVQTYNQLFEENPINASGVDAKAILSARLSKSRRLENLIAQLPGEKKNGLFGNLIALSLGLTPNFKSNFDLAEDAKLQLSKDTYDDDLDNLLAQIGDQYADLFLAAKNLSDAILLSDILRLNSEITKAPLSASMIKRYDEHHQDLTLLKALVRQQLPEKYKEIFFDQSKNGYAGYIDGGASQEEFYKFIKPILEKMDGTEELLAKLNREDLLRKQRTFDNGSIPHQIHLGELHAILRRQEDFYPFLKDNREKIEKILTFRIPYYVGPLARGNSRFAWMTRKSEETITPWNFEEVVDKGASAQSFIERMTNFDKNLPNEKVLPKHSLLYEYFTVYNELTKVKYVTEGMRKPAFLSGEQKKAIVDLLFKTNRKVTVKQLKEDYFKKIECFDSVEISGVEDRFNASLGTYHDLLKIIKDKDFLDNEENEDILEDIVLTLTLFEDREMIEERLKTYAHLFDDKVMKQLKRRRYTGWGRLSRKLINGIRDKQSGKTILDFLKSDGFANRNFMQLIHDDSLTFKEDIQKAQVSGQGDSLHEHIANLAGSPAIKKGILQTVKVVDELVKVMGRHKPENIVIEMARENQTTQKGQKNSRERMKRIEEGIKELGSQILKEHPVENTQLQNEKLYLYYLQNGRDMYVDQELDINRLSDYDVDHIVPQSFIKDDSIDNKVLTRSDKNRGKSNNVPSEEVVKKMKNYWRQLLNAKLITQRKFDNLTKAERGGLSELDKAGFIKRQLVETRQITKHVAQILDSRMNTKYDENDKLIREVKVITLKSKLVSDFRKDFQFYKVREINNYHHAHDAYLNAVVGTALIKKYPKLESEFVYGDYKVYDVRKMIAKSEQEIGKATAKYFFYSNIMNFFKTEITLANGEIRKRPLIETNGETGEIVWDKGRDFATVRKVLSMPQVNIVKKTEVQTGGFSKESILPKRNSDKLIARKKDWDPKKYGGFDSPTVAYSVLVVAKVEKGKSKKLKSVKELLGITIMERSSFEKNPIDFLEAKGYKEVRKDLIVKLPKYSLFELENGRKRMLASAGELQKGNELALPSKYVNFLYLASHYEKLKGSPEDNEQKQLFVEQHKHYLDEIIEQISEFSKRVILADANLDKVLSAYNKHRDKPIREQAENIIHLFTLTNLGAPAAFKYFDTTIDRKRYTSTKEVLDATFIHQSITGLYETRIDLSQLGGD

SEQ ID NO: 563 - protein, 1368 aa, Streptococcus pyogenes
MDKKYSIGLDIGTNSVGWAVITDDYKVPSKKFKVLGNTDRHSIKKNLIGALLFDSGEIAEATRLKRTARRRYTRRKNRICYLQEIFSNEMAKVDDSFFHRLEESFLVEEDKKHERHPIFGNIVDEVAYHEKYPTIYHLRKKLVDSTDKADLRLIYLALAHMIKFRGHFLIEGDLNPDNSDVDKLFIQLVQTYNQLFEENPINASGVDAKAILSARLSKSRRLENLIAQLPGEKKNGLFGNLIALSLGLTPNFKSNFDLAEDAKLQLSKDTYDDDLDNLLAQIGDQYADLFLAAKNLSDAILLSDILRLNSEITKAPLSASMIKRYDEHHQDLTLLKALVRQQLPEKYKEIFFDQSKNGYAGYIDGGASQEEFYKFIKPILEKMDGTEELLAKLNREDLLRKQRTFDNGSIPHQIHLGELHAILRRQEDFYPFLKDNREKIEKILTFRIPYYVGPLARGNSRFAWMTRKSEETITPWNFEEVVDKGASAQSFIERMTNFDKNLPNEKVLPKHSLLYEYFTVYNELTKVKYVTEGMRKPAFLSGEQKKAIVDLLFKTNRKVTVKQLKEDYFKKIECFDSVEISGVEDRFNASLGTYHDLLKIIKDKDFLDNEENEDILEDIVLTLTLFEDREMIEERLKTYAHLFDDKVMKQLKRRRYTVWGRLSRKLINGIRDKQSGKTILDFLKSDGFANRNFMQLIHDDSLTFKEDIQKAQVSGQGDSLHEHIANLAGSPAIKKGILQTVKVVDELVKVMGRHKPENIVIEMARENQTTQKGQKNSRERMKRIEEGIKELGSQILKEHPVENTQLQNEKLYLYYLQNGRDMYVDQELDINRLSDYDVDHIVPQSFIKDDSIDNKVLTRSDKNRGKSDNVPSEEVVKKMKNYWRQLLNAKLITQRKFDNLTKAERGGLSELDKAGFIKRQLVETRQITKHVAQILDSRMNTKYDENDKLIREVKVITLKSKLVSDFRKDFQFYKVREINNYHHAHDAYLNAVVGTALIKKYPKLESEFVYGDYKVYDVRKMLAKSEQEIGKATAKYFFYSNIMNFFKTEITLANGEIRKRPLIETNGETGEIVWDKGRDFATVRKVLSMPQVNIVKKTEVQTGGFSKESILPKRNSDKLIARKKDWDPKKYGGFDSPTVAYSVLVVAKVEKGKSKKLKSVKELLGITIMERSSFEKNPIDFLEAKGYKEVRKDLIIKLPKYSLFELENGRKRMLASAGELQKGNELALPSKYVNFLYLASHYEKLKGSPEDNEQKQLFVEQHKHYLDEIIEQISEFSKRVILADANLDKVLSAYNKHRDKPIREQAENIIHLFTLTNLGAPTAFKYFDTTIDRKRYTSTKEVLDATFIHQSITGLYETRIDLSQLGGD

SEQ ID NO: 564 - protein, 1368 aa, Streptococcus pyogenes
MDKKYSIGLDIGTNSVGWAVITDDYKVPSKKFKVLGNTDRHSIKKNLIGALLFDSGETAEATRLKRTARRRYTRRKNRICYLQEIFSNEIAKVDDSFFHRLEESFLVEEDKKHERHPIFGNIVDEVAYHEKYPTIYHLRKKLADSTDKADLRLIYLALAHMIKFRGHFLIEGDLNPDNSDVDKLFIQLVQTYNQLFEENPINASRVDAKAILSARLSKSRRLENLIAQLPGEKRNGLFGNLIALSLGLTPNFKSNFDLAEDAKLQLSKDTYDDDLDNLLAQIGDQYADLFLAAKNLSDAILLSDILRVNTEITKAPLSASMIKRYDEHHQDLTLLKALVRQQLPEKYKEIFFDQSKNGYAGYIDGGASQEEFYKFIKPILEKMDGTEELLAKLNREDLLRKQRTFDNGSIPHQIHLGELHAILRRQEDFYPFLKDNREKIEKILTFRIPYYVGPLARGNSRFAWMTRKSEETITPWNFEEVVDKGASAQSFIERMTNFDKNLPNEKVLPKHSLLYEYFTVYNELTKVKYVTEGMRKPAFLSGEQKKAIVDLLFKTNRKVTVKQLKEDYFKKIECFDSVEISGVEDRFNASLGTYHDLLKIIKDKDFLDNEENEDILEDIVLTLTLFEDREMIEERLKTYAHLFDDKVMKQLKRRRYTGWGRLSRKLINGIRDKQSGKTILDFLKSDGFANRNFMQLIHDDSLTFKEDLQKAQVSGQGDSLHEHIANLAGSPAIKKGILQTVKVVDELVKVMGRHKPENIVIEMARENQTTQKGQKNSRERMKRIEEGIKELGSDILKEYPVETTQLQNEKLYLYYLQNGRDMYVDQELDINRLSDYDVDHIVPQSFLKDDSIDNKVLTRSDKNRGKSDNVPSEEVVKKMKNYWKQLLNAKLITQRKFDNLTKAERGGLSELDKAGFIKRQLVETRQITKHVAQILDSRMNTKYDENDKLIREVRVITLKSKLVSDFRKDFQFYKVREINNYHHAHDAYLNAVVGTALIKKYPKLESEFVYGDYKVYDIRKMIAKSEQEIGKATAKYFFYSNIMNFFKTEITLANGEIRKRPLIETNGETGEIVWDKGRDFATVRKVLSMPQVNIVKKTEVQTGGFSKESILPKRNSDKLIARKKDWDPKKYGGFDSPTVAYSVLVVAKVEKGKSKKLKSVKELVGITIMERSSFEKDPVDFLEAKGYKEVRKDLIIKLPKYSLFELENGRKRMLASAGELQKGNELALPSKYVNFLYLASHYEKLKGSPEDNEQKQLFVEQHKHYLDEIIEQISEFSKRVILADANLDKVLSAYNKHRDKPIREQAENIIHLFTLTNLGAPAAFKCFDTTIGRNRYKSIKEVLDATLIHQSITGLYETRIDLSQLGGD

SEQ ID NO: 565 - protein, 1368 aa, Streptococcus pyogenes [sequence omitted]

SEQ ID NO: 566 - protein, 1368 aa, Streptococcus pyogenes; identical to SEQ ID NO: 560

SEQ ID NO: 567 - protein, 1370 aa, Streptococcus ratti
  Streptococcus ratti FA-1 = DSM 20564
MKKPYSIGLDIGTNSVGWAVITDDYKVPAKKMKVLGNTDKNYIKKNLLGALLFDSGNTAEDRRLKRTARRRYTRRRNRLLYLQDIFSDEMNKVDESFFHRLEDSFLVSEDKRGDHHPIFGNVVDEVKYHEQFPTIYHLRKYLADTPEKADLRLVYLALAHMIKFRGHFLIDDPKLDVKNTDSQELFSQFLTAYDVTQEDSHLADVKINISDIITEKMNKSRKVEALLFHFPSQKKNSFFGNLVSLVFGLLPNFKTNFNLAEDAKLQLSKDSYDEDLENLLGQIGDEYTDVFVAARKLYDSILLSGILTVNDLSTKAILSASMVRRYEEHNKDLAKLKAFVKANFTHDVFKEVFSDASKNGYAGYIEGKTSQEDFYKYVKNLIGKVDGSADFIEKIDREDFLRKQRTFDNGSIPHQVHLAEMKAILRRQGEYYPFLKEHAEKIQQILTFRIPYYVGPLDRHGHSDFAWASFNSEEKVTPWNFEEIIDKNKSAQAFIERMTNQDLYLPNEKVLPKHSPLYEKYTVYNELTKIKYVTETGTAKFFDANLKQEIFDGLFKKERKVTKRKLLTFLEKNFDEFRIVDIQGLDKETETFNASYGIYQDLLKIIKDKAFMDDSENADILEDIVLTLTLFEDREMIKQRLAKYADLFDKKVIDNLARRRYTGWGRLSAKLLNGIRDKRSRKTIMDYLVDDGRSNRNLMQLITDDNLTFKDEIAKAQYSDNSDDLHQVVQDLAGSPAIKKGILQSVKIVDELVKVMGYEPEQIVVEMARENQTTAKGRRNSQQRYKRLEEAIKNLDRDLNYKILKEHPTDNQALQNDRLFLYYLQNGRDMYTGESLDINRLSDYDIDHIIPQAFIKDNSIDNRVLVSSAKNRGKSDDVPSEDVVNRMRPFWNKLLNCGLISQRKYSNLTKKELTPNDKAGFIKRQLVETRQITKHVARILDEHFNKEFDEDKKRIRKVKVVTLKSNLVSNFRKEFELYKVREINDYHHAHDAYLNAVVAKALLMKYPKLEPEFVYGEYPKYNSYRERKTATQRMFFYSNIMNMFKSKVKLADERIIERPMIEVNDETGEIAWDKTKHIATVKKVLSYPQINIVKKVEEQTGGLTNETIYPRGSFDKLLNRKNTLEASKYGGFGSPTVAYCVLVVADSKNENGKVKKLKLGSELLGITILEKNDFENNSLDFLSRKGYQGVQEKKIIKLPKYSLFEFQDGSRRMLSSVMANDNKRGDLQKANEMILPAYLVKLLYHAKHINSVGEPAHKNYINEHCSEFQDLLNYIRQFADKFVDVDKNLSKIRSLSKSMAEYSVSEICSSFVNLLTLTALGAPADFKFFGTTIPRKRYGSPQSILSATLIHQSITGLYETRIDLSKLGED

SEQ ID NO: 568 - protein, 1127 aa, Streptococcus salivarius
MSDLVLGLDIGIGSVGVGILNKVTGEIIHKNSRIFPAAQAENNVERRINRQGRRLTRRKKHRRVRLNHLFEESGLITDFTNVSINLNPYQLRVKGLTDELSNEELFIALKNMVKHRGISYLDDASDDGNSSVGDYAQIVKENSKQLETKTPGQIQLERYQKYGQLRGDFTVEEDGKKHRLINVFPTSAYRAEALRILQTQQEFNPQITDEFINSYLQILTGKRKYYHGPGNEKSRTDYGRYTTKKDSEDEYITLDNIFGILIGKCTFYPEEYRAAKASYTAQEFNLLNDLNNLTVPTETKKLSEEQKNQIITNVKNEKAMGPAKLFKYIAKLLSCDVADIKGYRIDKSDKAEIHTFEAYRKMKTLATIDIEQMERENLDKLAYVLTLNTEKEGIQEALEHEFADGTFSQEQIDELVQFRKANSSIFGKGWHSFSVKLMMELIPELYATSEEQMTILTRLGKQKTTSSSNKTKYIDEKQLTEEIYNPVAAKSVRQAIKIVNAAIKEYGDFDNIVIEMARETNEDDEKKAIQKIQKANKDEKDAAMLKAANQYNGKAELPHSVFHGHKQLATKIRLWHQQGERCLYTGKTISIHDLINNSNQFEIDHILPLSITFDDSLANKVLVYATANQEKGQRTPYQALDSMDDAWSFRELKAFVRDSKALSNKKKEYLLTEEDISKFDVRKKFIERNLVDTRYASRVVLNALQEHFRVHKTDTKVSVVRGQFTSQLRRHWGIEKTRDTYHHHAVDALIIAASSQLNLWKKQKNTLVSYSEDQLLDIETGELISDDEYKESVFKAPYQHFVDTLKSKEFEDSILFSYQVDSKFNRKISDATIYATRQAKVGKDKKDETYVLGKIKDIYSQTGYDAFIKIYKKDKSKFLMYRHDPQTFEKVIEPILENYPNKELNEKGKEVPCNPFLKYKEDHGYIRKYSKKGNGPEIKSLKYYDSKLGNHIDITPKNSNNKVVLQSVSPWRADVYFNKTTGKYEILGLKYADLKFEKGTGTYKISEEKYNDIKIKEGVDSDSEFKFTLYKNDLLLIKDTETKEQQLFRFLSRTMPNVKHYVELKPYDKQKFDDNEELIKILGIVAKGGQCKKGVSKPNISIYKIRTDVLGNQHIIKNEGDKPKLDF

SEQ ID NO: 569 - protein, 1385 aa, Streptococcus salivarius
  Streptococcus salivarius K12
MTKPYSIGLDIGTNSVGWAVITDDYKVPSKKMKVLGNTSKKYIKKNLLGALLFDSGITAEGRRLKRTARRRYTRRRNRILYLQEIFSTEMATLDDAFFQRLDDSFLVPDDKRDSKYPIFGNLVEEKVYHDEFPTIYHLRKHLADSSKKADLRLVYLALAHMIKYRGHFLIEGDFNSKNNDLQKNFQDFLDTYNAIFESDLSLENSKQLEEIVKDKISKSAKKDRILKLFPGEKNSGIFSEFLKLIVGNQADFRKYFNLDEKTSLQFSKESYDEDLETLLGHIGDDYSDVFLKAKKLYDAILLSGILTVTDNGTEAPLSSAMIMRYKEHEEDLALLKAYIRNISLETYNEVFKDNTKNGYAGYIDGKTSQEDFYVYLKRLLAGLEGADYFLEKIDREDFLRKQRTFDNGSIPYQIYLQEMRAILDKQAKFYPFLAKNKERIEKILTFRIPYYVGPLARGNSDFAWSIRKRNEKITPWNFEDVIDKESSAEAFINRMTSFDLYLPEEKVLPKHSLLYENFTVYNELTKVRFIAEGMRDYQFLDSKQKKDIVRLYFKGKRKVTDKDIIEYLHAIDGYDGIELKGIEKQFNSSLSTYHDLLNIINDKEFLDDSSNETIIEEIIHTLTMFEDREMIKQRLSKFDNIFDKSVLKKLSRRHYTGWGKLSAKLINGIRDEKSGNTILDYLIDDGVSNRNFMQLIHDDALSFKKKIKKAQIIGDKDNIKQVVKSLPGSPAIKKGILQSIKIVDELVKVMGREPESIVVEMARENQYTNQGKSNSQQRLKRLEESLKGLGSKILKENVPTRLSKIDNNALQNDRLYLYYLQNGKDMYTGEELDIDRLSNYDIDHIIPQAFLKDDSIDNKVLVSSASNRGKSDDVPSLEVVKKRKTLWYQLLKSKLISQRKFDNLTKAERGGLSQEEKAGFIQRQLVETRQITKHVARLLDERFNNKKDENNRTLRTVKIITLKSSLVSQFRKDFELYKVREINDFHHAHDAYLNAVVASALLKKYPKLEPEFVYGDYPKYNSFRERKSATEKVYFYSNIMNIFKKSIPLADGTVIDRPLIEVNEETGESVWNKVADLNTVRKVLSYSQVNIVKKVEEQNHGLDRGKPKGLFNANLSSKPKPNSKENLVGAKEYLDPKKYGGYAGISNSFAILVKGTIEKGAKKKITNVLEFQGISILDRIYYRKDKLNFLLEKGYKDIELIIELPKYSLFELSDGSRRMLASILSTNNKRGEIHKGNQIFISQKFVKLLYHAKRISSTFNENHRKYVENHKKEFEELFYYILEFNENYVGAKKNGELLKSAFQSWQNHSIDELCSSFIGPTGSERKGLFELTSRGGAADFEFLGVKIPRYRDYTPSSLLKDATLIHQSVTGLYETRIDLGKLGED

SEQ ID NO: 570 - protein, 1135 aa, Streptococcus salivarius
  Streptococcus salivarius PS4
MSDLVLGLDIGIGSVGVGILNKVTGEIIHKNSRIFPAAQAENNLERRTNRQGRRLTRRKKHRRVRLNHLFEESGLITDFTKVSINLNPYQLRVKGLTAELSNEELFIALKNMVKHRGISYLDDASDDGNSSVGDYAQIVKENSKQLETKTPGQIQLERYQKYGQLRGDFTVEEDGRKHRLINVFPTSAYHAEALRILQTQQEFNPQITDEFINSYLEILTGKRKYYHGPGNEKSRTDYGKYTTKKDAQGQYITLNNIFGILIGKCTFYPEEYRAAKASYTAQEFNLLNDLNNLTVPTETKKLSEEQKYQIITYVKNEKAMGPAKLFKYIAKLLACDIADIKGYRIDKSDKAEIHTFEAYRKMKTLETIDIEQIEREKLDKLAYVLTLNTEREGIQEALDHEFADGTFSQEQVDELVQFRKANSSIFGKGWHSFSVKLMMELIPELYATSEEQMTILTRLGKQKTTSSSNKTKYIDEKQLTEEIYNPVVAKSVRQAIKIVNAAIKKYGDFDNIVIEMARETNEDDEKKAIQKIQKANKAEKDAAMRKAANQYNGKAELPHSVFHGHKQLATKIRLWHQQGERCLYTGKTISIHDLINNPNQFEIDHILPLSITFDDSLANKVLVYATANQEKGQRTPYQALDSMDDAWSFRELKAFVRESKALSNKKKEYLLTEEDISKFDVRKKFIERNLVDTRYASRVVLNALQEHFKAHKIDTKVSVVRGQFTSQLRRHWGIDKTRDTYHHHAVDALIIAASSQLNLWKKQKNTLVSYSEDQLLDIETGELISDDEYKESVFKAPYQHFVDTLKSKEFEDSILFSYQVDSKFNRKISDATIYATRQAKVGKDKKDETYVLGKIKDIYALGTKTPSKTGFYKFLDLYNKDKSQFLVYQKDRKTWDEVIEKIMEQYRPFKESDKNGKEVDFNPFEKYRIENGPIRKYSRKGNGPEIKSLKYYASKLGNHIDITPKDSNNKVVLQSVSPWRADVYFNKTTGSYEILGLKYADLQFEKGTGTYRISEEKYNDIKKKEGVDSDSEFKFTLYKNDLLLIKDTETKEQRLFRFLSRSMPNKKHYVELKPYSKDKFEKNESLIEILGSADKSGRCIKGLAKSNLSIFKVRTDVLGNQHIIKNEGDKPKLDF

SEQ ID NO: 571 - protein, 1377 aa, Streptococcus sanguinis
  Streptococcus sanguinis SK115
MKKPYSIGLDIGTNSVGWAVITDDYKVPSKKMKVLGNTDKHFIKKNLIGALLFDEGTTAEDRRLKRTSRRRYTRRKNRLRYLQEIFSEEISKLDSSFFHRLDDSFLVPEDKRGSKYPIFATLEEEKEYHKKFPTIYHLRKHLADSKEKTDLRLIYLALAHMIKYRGHFLYEESFDIKNNDIQKIFNEFISIYDNTFEGSSLSGQNAQVEAIFTDKISKSTKRERVLKLFSDEKSTGLFSEFLKLIVGNQADFKKHFDLEEKAPLQFSKDTYDEDLENLLGQIGDGFADLFLVAKKLYDAILLSGILTVTDPSTKAPLSASMIERYENHQEDLAALKQFIKNNLSEKYAEVFSDQSKDGYAGFIDGKTTQEAFYKYIKNLLSKLEGADYFLNKIEREDFLRKQRTFDNGSIPHQIHLQEMNAILRRQGEHYLFLKENREKIEKILAFRIPYYVGPLARGNRDFAWLTRNSDQAIRPWNFEEVVDKASSAEDFINKMTNYDLYLPEEKVLPKHSLLYETFAVYNELTKVKFIAEGLRDYQFLDSGQKKQIVNQLFKDKRKVTEKDIIHYLHNVDGYDGIELKGIEKQFNASLSTYHDLLKIIKDKEFMDNPKNGEILENIIHTLTIFEDREMIKQRLAQYDTLFDEKVIKALTRRHYTGWGKLSAKLINGIRDKQTGKTILEYLIDDGDCNRNFMQLINDDGLSFKEIIQKAQVVGKTDDVKQVVQEIPGSPAIKKGILQSIKIVDELVKVMGHNPESIVIEMARENQTTAKGKKNSQQRYKRIEDALKNLAPGLDSNILKENPTDNIQLQNDRLFLYYLQNGKDMYTGKAIDINQLSNYDIDHIIPQAFIKDDSLDNRVLTSSKDNRGKSDNVPSIEVVQKRKAFWQQLLDSKLISERKFNNLTKAKRGGLDERDKVGFIKRQLVETRQITKHVAQLLDTRFNTEVNEENQKIRTVKIITLKSNLVSNFRKEFGLYKVREINDYHHAHDAYLNAVVAKAILKKYPKLEPEFVYGDYQKYDLKRYILKSKASNTIDKATEKYFFYSNLLNFFKEKVRYADGTIKKRENIEYSNDTGEIAWNKEKDFATIKKVLSLPQVNIVKKTEEQTVGQNGGLFDNNIVSKKKVVDASKLIPIKSSLSPEKYGGYARPTIAYSVLVIADIEKGKGKAKKLKRIKEIVGITIQDKKKFESNPVTYLEECGYKNINSNLIIKLPKYSLFEFNDGQRRLLASSIELQKGNELILPYHLTALLYHAQRINKISEPIHKQYVEAHQNEFKELLTTIISLSKKYIQKPNVELLLQQAFDQADKDIYQLSESFISLLKLTSFGAPGAFKFLGVEISQSSVRYKPNSQFLDTTLIHQSITGLYETRIDLSKLGED

SEQ ID NO: 572 - protein, 1392 aa, Streptococcus sanguinis
  Streptococcus sanguinis SK330
MENKNYSIGLDIGTNSVGWAVITDDYKVPSKKMKVFGNTDKHFIKKNLIGALLFDEGATAEDRRLKRTARRRYTRRKNRLRYLQEIFSEEISKLDSSFFHRLDDSFLVPKDKRGSKYPIFATLEEEKEYHKKFPTIYHLRKHLADSKEKTDLRLIYLALAHMIKYRGHFLYEESFDIKNNDIQKIFNEFISIYDNTFEGSSLSGQNAQVEAIFTDKISKSAKRERVLKLFSDEKSTSLFSEFLKLIVGNQADFKKHFDLEEKAPLQFSKDTYDEDLENLLGQIGDGFTDLFLVAKKLYDAILLSGILTVTDPSTKAPLSASMIERYESHQKDLAALKQFIKNNLPKRYNEVFSDQSKDGYAGYIDGKTTQEAFYKYIKNLLSKFEGADYFLDKIEREDFLRKQRTFDNGSIPHQIHLQEMNAILRRQGEHYPFLKENREKIEKILTFRIPYYVGPLARGNRDFAWLTRNSDQAIRPWNFEEIVDKASSAEEFINKMTNYDLYLPEEKVLPKHSLLYETFAVYNELTKVKFIAEGLRDYQFLDSGQKKQIVNQLFKEKRKVTEKDIIHYLHNVDGYDGIELKGIEKQFNASLSTYHDLLKIIKDKEFMDDPKNEEILENIVHTLTIFEDREMIKQRLAQYDSIFDEKVIKALTRRHYTGWGKLSAKLINGICDKQTGDTILDYLIDDGKINRNFMQLINDDGLSFKEIIQKAQVVGKTDDVKQVVQELPGSPAIKKGILQSIKIVDELVKVMGYAPESIVIEMARENQTTARGKKNSQQRYKRIEDSLKNLAPGLDSNILKENPTDNIQLQNDRLFLYYLQNGKDMYTGKPLDIDQLSSYDIDHIIPQAFIKDDSIDNRVLTSSKDNRGKSDNVPSLEVVQKRKAFWQQLLDSKLISERKFNNLTKAERGGLDERDKVGFIRRQLVETRQITKHVAQILDASFNTEVNEKNQKIRTVKIITLKSNLVSNFRKEFELYKVREINDYHHAHDAYLNAVVAKAILKKYPKLEPEFVYGDYQKYDLKRYISRFKPSKEIEKATEKYFFYSNLLNFFKEEVHYADGIIVKRENIEYSKDTGEIAWNKEKDFATIKKVLSYPQVNIVKKTEIQTHGLDRGKPKGLFNSNPSPKPSEDSKENLVPIKQGLDPRKYGGYAGISNSYAVLVKAIVEKGAKKQQKTILEFQGISILDKINFENNKENYLLKKRYIEILSTITLPKYSLFEFPDGTRRRLASILSTNNKRGEIHKGNELVLPGKYTTLLYHAKNINKKLEPEHLEYVEKHRNDFAKLLECVLNFNDKYVGALKNGERIRQAFTDWETVDIEKLCFSFIGPENSKNAGLFELTSQGSASDFEFLGVKIPRYRDYAPSSLLKATLIHQSITGLYETRIDLSKLGED

SEQ ID NO: 573 - protein, 1370 aa, Streptococcus sanguinis
  Streptococcus sanguinis SK353
MKKPYSIGLDIGTNSVGWAVVTDDYKVPAKKMRVFGDTDRSHIKKNLLGTLLFDDGNTAESRRLKRTARRRYTRRRNRILYLQEIFTESMNEIDESFFHRLDDSFLVPEDKRGSKYPIFATLQEEKEYHKQFPTIYHLRKQLADSKEKSDVRLIYLALAHMIKYRGHFLYEETFDIKNNDIQKIFNEFINIYDNTFEGSSLSGQNAQVEAIFTDKISKSAKRERVLKLFPDEKSTGLFSEFLKLIVGNQADFKKHFDLEEKAPLQFSKDTYDEELENLLGQIGDDFADLFLIAKKLYDAILLSGILTVTDPSTKAPLSASMIERYENHQKDLAALKQFIKNNLPEKYVEVFSDQSKDGYAGYIDGKTTQEAFYKYIKNLLSKFEGADYFLDKIEREDFLRKQRTFDNGSIPHQIHLQEMNAILRRQGEHYPFLKENREKIEKILTFRIPYYVGPLARDNRDFSWLTRNSDEPIRPWNFEEVVDKARSAEDFIHRMTNYDLYLPEEKVLPKHSLLYETFAVYNELTKVKFIAEGLRDYQFLDSGQKKQIVNQLFKEKRKVTEKDIIHYLHNVDGYDGIELKGIEKQFNANLSTYHDLLKITKDKEFMDDPKNEEILENIVHTLTIFEDREMIKQRLAQYDTLFDEKVIKALTRRHYTGWGKLSAKLINGIRDKQSGKTILDYLIDDDKINRNFMQLINDDGLSFKEIIQKAQVVGKTDDVKQVVQELPGSPAIKKGILQSIKIVDELVKVMGYALESIVIEMARENQTTARGKKNSQQRYKRIEDALKNLAPGLDSNILKENPTDNIQLKNDRLFLYYLQNGKDMYTGKPLDINQLSSYDIDHIIPQAFIKDDSIDNRVLTSSKDNRGKSDNVPSLEVVQKRKAFWQQLLDSKLISERKFNNLTKAERGGLDERDKVGFIRRQLVETQQITKNVAQILDARFNTEVKEKNQKIRTVKIITLKSNLVSNFRKEFGLYKVREINNYHHAHDAYLNAVVAKAILKKYPKLEPEFVYGDYQKYDLKKYISRFKPSKEIEKATEKYFFYSNLLNFFKEEVLYADGTIRKRENIEYSKDTGEIAWDKEKDFATIKKVLSYPQVNIVKKREVQTGGFSKESILPKGNSDKLIPRKTKDILWDTTKYGGFDSPVIAYSILLIADIEKGKAKKLKTVKTLVGITIMEKAAFEENPITFLENKGYHNVRKENILCLPKYSLFELENGRRRLLASAKELQKGNEIVLPVCLTTLLYHSKNLHKLDEPEHLEYIQKHRNEFKDLLNLVSEFSQKYILAEANLEKIKDLYADNEQADIEILANSFINLLTFTALGAPAAFKFFGKDVDRKRYTTVSEILNATLIHQSITGLYETRIDLSKLGEE

SEQ ID NO: 574 - protein, 1421 aa, Streptococcus sanguinis
  Streptococcus sanguinis SK49
MTKFNKNYSIGLDIGVSSVGYAVVTEDYRVPAFKFKVLGNTEKEKIKKNLIGSTTFVSAQPAKGTRVFRVNRRRIDRRNHRITYLRDIFQKEIEKVDKNFYRRLDESFRVLGDKSEDLQIKQPFFGDKELETAYHKKYPTIYHLRKHLADADKNSPVADIREVYMAISHILKYRGHFLTLDKINPNNINMQNSWIDFIESCQEVFDLEISDESKNIADIFKSSENRQEKVKKILPYFQQELLKKDKSIFKQLLQLLFGLKTKFKDCFELEEEPDLNFSKENYDENLENFLGSLEEDFSDVFAKLKVLRDTILLSGMLTYTGATHARFSATMVERYEEHRKDLQRFKFFIKQNLSEQDYLDIFGRKTQNGFDVDKETKGYVGYITNKMVLTNPQKQKTIQQNFYDYISGKITGIEGAEYFLNKISDGTFLRKLRTSDNGAIPNQIHAYELEKIIERQGKDYPFLLENKDKLLSILTFKIPYYVGPLAKGSNSRFAWIKRATSSDILDDNDEDTRNGKIRPWNYQKLINMDETRDAFITNLIGNDIILLNEKVLPKRSLIYEEVMLQNELTRVKYKDKYGKAHFFDSELRQNIINGLFKNNSKRVNAKSLIKYLSDNHKDLNAIEIVSGVEKGKSFNSTLKTYNDLKTIFSEELLDSEIYQKELEEIIKVITVFDDKKSIKNYLTKFFGHLEILDEEKINQLSKLRYSGWGRYSAKLLLDIRDEDTGFNLLQFLRNDEENRNLTKLISDNTLSFEPKIKDIQSKSTIEDDIFDEIKKLAGSPAIKRGILNSIKIVDELVQIIGYPPHNIVIEMARENMTTEEGQKKAKTRKTKLESALKNIENSLLENGKVPHSDEQLQSEKLYLYYLQNGKDMYTLDKTGSPAPLYLDQLDQYEVDHIIPYSFLPIDSIDNKVLTHRENNQQKLNNIPDKETVANMKPFWEKLYNAKLISQTKYQRLTTSERTPDGVLTESMKAGFIERQLVETRQIIKHVARILDNRFSDTKIITLKSQLITNFRNTFHIAKIRELNDYHHAHDAYLAVVVGQTLLKVYPKLAPELIYGHHAHFNRHEENKATLRKHLYSNIMRFFNNPDSKVSKDIWDCNRDLPIIKDVIYNSQINFVKRTMIKKGAFYNQNPVGKFNKQLAANNRYPLKTKALCLDTSIYGGYGPMNSALSIIIIAERFNEKKGKIETVKEFHDIFIIDYEKFNNNPFQFLNDTSENGFLKKNNINRVLGFYRIPKYSLMQKIDGTRMLFESKSNLHKATQFKLTKTQNELFFHMKRLLTKSNLMDLKSKSAIKESQNFILKHKEEFDNISNQLSAFSQKMLGNTTSLKNLIKGYNERKIKEIDIRDETIKYFYDNFIKMFSFVKSGAPKDINDFFDNKCTVARMRPKPDKKLLNATLIHQSITGLYETRIDLSKLGED

SEQ ID NO: 575 - protein, 1026 aa, Streptococcus sp.
  Streptococcus sp. BS35b
MNGLVLGLDIGIASVGVGILEKNSGKIIHANSRLFPAATADNNVERRKNRQARRLNRRKKHRGVRFQDLFEDYGLLTDFSKVSINLNPYRLRVDGLNQQLTNEELFIALKNIVKRRGISYLDDASEDGGAVSSDYGKAVEENRKLLAEQTPGQIQLERFEKYGQVRGDFTVVENGEKRRLINVFSTSAYRKEAEKILRKQQEFNNQITDEFIEDYLKILTGKRKYYHGPGNEKSRTDYGRFRTDGTTLDNIFGVLIGKCTFYPNEYRASKSSYTAQEFNLLNDLNNLTVPTETKKLSEEQKKVIVEYAKEAKTLGASTLLKYIVKMIDASVDQISGYRVDVNNKPEMHTFEVYRKMQSLETISVGELSRNVLDELAHILTLNTEREGIEEAINSKLMGVFSQDQVLELVQFRKNNSSLFSKGWHNFSLKLMMELIPELYETSEEQMTILTRLGKQKSKETSKRTKYIDEKELTEEIYNPVVAKSVRQAIKIINEATKKHGIFDNIVIEMARENNEEDAKKDYIKRQKANQDEKNAAMEKAAFQYNGKKELPGNIFNGHKELATKIRLWHQQGEKCLYTGKTIPISDLIHNQYKYEIDHILPLSLSFDDSLSNKVLVHATANQEKGQRTPFQALDSMDDAWSYREFKSYVKDLKSLSNKKKDYLLTEEDISKIEVKQKFIERNLVDTRYSSRVVLNALQDFYKSHQFDTTISVVRGQFTSQLRRKWGLEKSRETYHHHAVDALIIAASSQLRLWKKQNNPLITYKEGQFIDSQTGEIISLTDDEYKELVFKAPYDHFVDTLHSKTFEDGILFSYQVDSKYNRKISDATIYATRKAKLDKDKSEETYVLGKIKDIYSQAGYDAFIKIYNKDKRKFLMYHKDPQTFEKVIEEILRTYPSKERNDKNKEVPCNPFEKYRQENGPIRKYSKKGNGPEIKCLKYYDNKLGNYIDISPDGSDNQVVLQSLKPWRTDVYFNHQTKKYELMGLKYSDLSFEKGSGKYSISNEKYNSIKRIEGVNEQSEFKFTLYK

SEQ ID NO: 576 - protein, 1139 aa, Streptococcus sp.
  Streptococcus sp. C150
MSDLVLGLDIGIGSVGVGILNKVTGEIIHKNSRIFPAAQAENNLERRTNRQGRRLTRRKKHRRVRLNHLFEESGLITDFTKVSINLNPYQLRVKGLTAELSNEELFIALKNMVKHRGISYLDDASDDGNSSVGDYAQIVKENSKQLETKTPGQIQLERYQKYGQLRGDFTVEEDGRKHRLINVFPTSAYHAEALRILQTQQEFNPQITDEFINSYLEILTGKRKYYHGPGNEKSRTDYGKYTTKKDAQGQYITLNNIFGILIGKCTFYPEEYRAAKASYTAQEFNLLNDLNNLTVPTETKKLSEEQKYQIITYVKNEKAMGPAKLFKYIAKLLSCDVADIKGYRIDKSDKAEIHTFEAYRKMKTLETLDVKKMAREELDKLAYVLTLNTEREGIQEALDHEFADGTFSQEQVDELVQFRKANSSIFGKGWHSFSVKLMMELIPELYATSEEQMTILTRLGKQKTTSSSNKTKYIDEKQLTEEIYNPVVAKSVRQAIKIVNAAIKKYGDFDNIVIEMARETNEDDEKKAIQKIQKANKAEKDAAMRKAANQYNGKAELPHSVFHGHKQLATKIRLWHQQGERCLYTGKTISIHDLINNPNQFEIDHILPLSITFDDSLANKVLVYATANQEKGQRTPYQALDSMDDAWSFRELKAFVRESKALSNKKKEYLLTEEDISKFDVRKKFIERNLVDTRYASRVVLNALQEHFRTHKIDTKVSVVRGQFTSQLRRHWGIEKTRDTYHHHAVDALIIAASSQLNLWKKQKNTLVSYSEDQLLDIETGELISDDEYKESVFKAPYQHFVDTLKSKEFEDSILFSYQVDSKFNRKISDATIYATRKAKLDKEKKEYTYTLGKIKDIYALGTKTPSKTGFYKFLDLYKKDKSQFLMYQKDRRTWDEVIEKILEQYRPFKEKDKNGKEVDFNPFEKYRIENGPIRKYSRKGNGPEIKSLKYYDNLLGRFVDITPSESKNPVALLSLNPWRTDVYYNTETRKYEFLGLKYADLCFEKGGSYGISKVKYNKIREKEGIGKNSEFKFTLYKNDLILIKDTETNRQQIFRFWSRTGKDNPKSFEKHKLELKPYEKTRFEKGEELKVLGKVPPSSNRLQKNMQIENLSIYKVRTDVLGNQHIIKNEGDKPKLDF

SEQ ID NO: 577 - protein, 1377 aa, Streptococcus sp.
  Streptococcus sp. C300
MNNKPYSIGLDIGTNSVGWSVITDDYKVPSKKMKVLGNTDKRFIKKNLIGALLFDEGTTAEARRLKRTARRRYTRRKNRLRYLQEIFAEEMSKVDSSFFHRLDDSFLIPEDKRGSKYPIFATLVEEKEYHKQFPTIYHLRKQLADSKEKADLRLIYLVLAHMIKYRGHFLYEEAFDIKNNDIQKIFNEFISIYDNTFEGSSLSGQNAQVETIFTDKISKSAKRERVLKLFPDEKSTGLFSEFLKLIVGNQADFKKHFDLEEKAPLQFSKDTYDEDLENLLEQIGDDFADLFVAAKKLYDAILLSGILTVTDPSTKAPLSASMIERYENHQKDLAVLKQFIKTNLPEKYVEVFSDQSKDGYAGYIDGKTTQEAFYKYIKNLLSKFDGADYFLDKIEREVFLRKQRTFDNGSIPHQIHLQEMNTILRRQGEHYPFLKENKEKIEKILTFRIPYHVGPLARGNRDFAWLTRNSDQAIRPWNFEEIVDKASSAEDFINKMTNYDLYLPEEKVLPKHSLLYETFAVYNELTKVKFIAEGMRDYQFLDSGQKKKIINQLFKKKRKVTEDDIIDCLQKIDNYDGIELKGIEKQFNASLSTYHDILKIIRDKEFMDDPKNGDILENVIHTLTIFEDREMIKQRLAQYNSIFDEKVIKALSRKHYTGWGKLSAKLIDGIRDKQTGKTILDYLMDDGKSNRNFMQLIKDDELSFTEIIQKAQVVGDTDNLRQVVQNLPGSPAIKKGILQSIKIVDELVKVMGHAPESIVIEMARENQTTARGKKNSQQRYKRIEDSLKNLASGLDSNILKENPTDNIQLQNDRLFLYYLQNGKDMYTGEALNINQLSSYDIDHIIPQAFIKDDSLDNRVLTSSKDNRGKSDNVPSLEVVEKMKAFWQQLLDSKLISERKYNNLTKAERERGGLNELDKVGFIKRQLVETRQITKHVAQILDARFNKEVTEKNKKNRNVKIITLKSNMVSNFRKEFGLYKVREINDYHHAHDAYLNAVVAKAILKKYPKLEPEFVYGDYQKYDLKRYISRSKDPKEVEKATEKYFFYSNLLNFFKEEVHYADGTIVKRENIEYSKDTGEIAWNKEKDFATIKKVLSLPQVNIVKKTEEQTVGQNGGLFDNNIVSKKKVVDASKLIPIKSGLSPEKYGGYARPTIAYSVLVTYKQNNKIKNTMVGIPVLTKLEFERDPNLYLRNLGINNVSHVIKLVKYTVLEFKHKYGTYRRFIVSNQELKRANQIFVTTKQMKLISQYTTLDKNEHDSLLKNNQQLIQSIWNQFLEFMLATDLVNKKQYDELILTNNQTIEECRNIMNRVITTLSFTNINAGQKKIIFDDTLSLPIKRWQFTDSDKMVKKIIESTLIHQSITGLYETRIDLSKLGED

SEQ ID NO: 578 - protein, 1371 aa, Streptococcus sp.
  Streptococcus sp. F0441
MENKNYSIGLDIGTNSVGWSVITDDYKVPSKKMKVLGNTDKHFIKKNLIGALLFDEGTTAEARRLKRTARRRYTRRKNRLRYLQEIFSEEIGKVDSSFFHRLDDSFLIPEDKRGSKYPIFATLAEEKKYHKQFPTIYHLRKQLADSKEKTDLRLIYLALAHMIKYRGHFLYEEAFDIKNNDIQKIFNEFISIYNNTFEGNSLSGQNVQVEAIFTDKISKSAKRERVLKLFPDEKSTGLFSEFLKLIVGNQADFKKHFDLEEKAPLQFSRDTYDEDLENLLGQIGDDFADLFLVAKKLYDAILLSGILTVTNPSTKAPLSASMIERYENHQKDLASLKQFIKNNLPEKYDEVFSDQSEDGYAGYIDGKTTQETFYKYIKNLLSKFEGADYFLDKIEREDFLRKQRTFDNGSIPHQIHLQEMNAILRRQGEHYPFLKENKEKIEKILTFRIPYYVGPLARGNRDFAWLTRNSDQAIRPWNFEEIVDKASSAEDFINKMTNYDLYLPEEKVLPKHSLLYETFAVYNELTKVKFIAEGLRDYQFLDSGQKKQIVTQLFKEKRKVTEKDIIQFLHNVDGYDGIELKGIEKQFNASLSTYHDLLKIIKDKAFMDDAKNEAILENIVHTLTIFEDREMIKQRLAQYDSLFDEKVIKALTRRHYTGWGKLSAKLINGISDKQTGNTILDYLIDDGEINRNFMQLINDDGLSFKEIIQKAQVVGKTNDVKQVVQELPGSPAIKKGILQSIKIVDELVKVMGHAPESIVIEMARENQTTARGKKNSQQRYKRIEDSLKILASGLNSKILKEHPTDNIQLQNDRLFLYYLQNGKDMYTGEALDINQLSSCDIDHIIPQAFIKDDSLDNRVLTSSKDNRGKSDNVPSLEVVDKMKVFWQQLLDSKLISYRKFNNLTKAERGGLNELDKVGFIKRQLVETRQITKHVAQILDARFNKEVTEKDKKNRTVKIITLKSNLVSNFRKEFELYKVREINDYHHAHDAYLNAVVAKAILKKYPKLEPEFVYGDYQKYDLKRYISRSKDPKEIEKATEKYFFYSNLLNFFKEEVHYADGTIVKRENIEYSKDTGEIAWNKEKDFATIKKVLSLPQVNIVKKREVQTGGFSKESILPKGNSDKLIPRKTKDILWDTTKYGGFDSPVIAYSILLIADIEKGKAKKLKTVKTLVGITIMEKDAFEKNPIAFLENKGYHNVCKENILCLPKYSLFELENGRRRLLASAKELQKCNEIVLPVYLTTLLYHSKNVHKLDEPGHLEYIQKHRNEFKDLLNLVSEFSQKYVLADANLEKIKNLYADNEQADIEILANSFINLLTFTALGAPAAFKFFGKDVDRKRYTTVSEILNATLIHQSITGLYETRIDLSKLGED

SEQ ID NO: 579 - protein, 1121 aa, Streptococcus sp.
  Streptococcus sp. GMD6S
MNGLVLGLDIGIASVGVGILEKNSGKIIHANSRLFPAATADNNVERRKNRQARRLHRRKKHRGVRFQDLFEDYGLLTDFSKVSINLNPYRLRVDGLNQQLTNEELFIALKNIVKRRGISYLDDASEDGGTVSSDYGKAVEENRKLLAEQTPGQIQLERFEKYGQVRGDFTVVENGEKRRLINVFSTSAYRKEAERILRKQQEFNSKITDEFIEDCLKILTGKRKYYHGPGNEKSRTDYGRFRTDGTTLDNIFGILIGKCTFYPDEYRASKASYTAQEFNLLNDLNNLTVPTETKKLSEEQKKVIVEYAKEAKTLGASTLLKYIAKMIDASVDQIRGYRVDVNNKPEIHTFEAYRKMQSLETISVGELSRNVLDELAHILTLNTEREGIEEAINTKLKDSFSQDQVLELVQFRKNNSSLFSKGWHNFSLKLMMELIPELYETSEEQMTILTRLGKQKSKEISKRTKYIDEKELTEEIYNPVVAKSVRQAIKIINEATKKHGIFDNIVIEMARENNEEDAKKDYIKRQKANQDEKNAAMEKAAFQYNGKKELPDSIFHGQKELATKIRLWHQQGEKCLYTGKNIPISDLIHNQYKYEIDHILPLSLSFDDSLSNKVLVLATANQEKGQRTPFQALDSMDDAWSYREFKSYVKESKLLGNKKKEYLLTEEDISKIEVKQKFIERNLIDTRYSSRVVLNALQDFYKAHKFDTTISVVRGQFTSQLRRKWGLEKSRETYHHHAVDALIIAASSQLRLWKKQNNPLIAYKEGQFVDSETGEIISLSDDEYKELVFKAPYDHFVDTLSSKTFEDSILFSYQVDSKFNRKISDATIYATRKAKLDKEKSEETYVLGKIKDIYSQAGYDAFIKIYNKDKSKFLMYHKDPQTFEKVIEEILRTYPSKELNDKNKEIPCNPFEKYRQENGPIRKYSKKSNGPEIKSLKYYDNKLGNHIDITPESSDNQVVLQSLKPWRTDVYFNHQTKKYELMGLKYSDLSFEKGSGKYSISNQKYNSIKRIEGIDEQSEFKFTLYKNDLILIKDSENNEQKLFRFNSRNDTAKHYIELKPYDKAKFDGEQELITILGNVAKGGRCLKGLNKSNISIFKVKTDVLGKKHIIKKEGDEPKLKF

SEQ ID NO: 580 - protein, 1375 aa, Streptococcus sp.
  Streptococcus sp. M334
MSNKSYSIGLDIGTNSVGWAVITDDYKVPSKKMKVLGNTDKHFIKKNLIGALLFDEGTTAEDRRLKRTARRRYTRRKNRLRYLQEIFSQEISKVDSSFFHRLDDFFLVPEDKRGSKYPIFATLVEEKEYHKKFPTIYHLRKHLADSKEKTDLRLIYLALAHMIKYRGHFLYEESFDIKNNDIQKIFSEFISIYDNTFEGKSLSGQNAQVEAIFTDKISKSTKRERVLKLFPDEKSTGLFSEFLKLIVGNQADFKKHFDLEEKAPLQFSKDTYDEDLENLLGQIGDDFADLFLVAKKLYDAILLSGILTVKDLSTKAPLSASMIERYENHQKDLAALKQFIQNNLQEKYDEVFSDQSKDGYAGYIDGKTTQEAFYKYIKNLLSKFEGADYFLDKIEREDFLKKQRTFDNGSIPHQIHLQEMNAIIRRQGEHYPFLQENKEKIEKILTFRIPYYVGPLARGNGDFAWLTRNSDQAIRPWNFEEIVDQASSAEDFINKMTNYDLYLPEEKVLPKHSLLYETFAVYNELTKVKFIAEGLTRYQFLDKKQKKDIFDTFFKAENKRKVTEKDIIHYLHNVDGYDGIELKGIEKQFNASLSTYHDLLKIIKDKAFMDDSKNEEILENIIHTLTIFEDREMIKQRLAQYDSLFDEKVIKALTRRHYTGWGKLSAKLINGIRDKKSGKTILDYLIDDGEINRNFMQLIHDDGLSFKEIIQKAQVFGKTNDVKQVVQELPGSPAIKKGILQSIKIVDELVKVMGHAPESIVIEMARENQTTARGKKNSQQRYKRIEDSLKNLASGLDSNILKENPTDNIQLQNDRLFLYYLQNGRDMYTGKPLEINQLSNYDIDHIIPQAFIKDDSLDNRVLTSSKDNRGKSDNVPSLEVVEKMKAFWQQLLDSKLISERKFNNLTKAERERGGLNELDKVGFIKRQLVETRQITKHVAQFLDARFNKEVTEKDKKNRNVKIITLKSNLVSNFRKEFGLYKVREINDYHHAHDAYLNAVLAKAILKKYPKLEPEFVYGDYQKYDLQRYISKSREPKEVEKATQKYFFYSNLLNFFKEEVHYADGTIVKRENIEYSKDTGEIAWNKEKDFATVKKVLSLPQVNIVKKTEVQTGGFSKESILPKGNSDKLIPRKTKEILWDTTKYGGFDSPVIAYSILLIADIEKGKAKKLKTVKTLVGITIMEKATFEKNPITFLENKGYHNVRKENILCLPKYSLFELESGRRRMLASAKELQKGNEIVLPVYLTTLLYHSKNVHKLDEPEHLEYIQKHRYEFKDLLNLVSEFSQKYVLADANLEKIKNLYADNEQADIEILANSFINLLTFTALGAPAAFKFLGKDVDRKRYTTVSEILNATLIHQSITGLYETRIDLSKLGED

SEQ ID NO: 581 - protein, 1371 aa, Streptococcus sp.
  Streptococcus sp. oral taxon 056 str. F0418
MNNNNYSIGLDIGTNSVGWAVITDDYKVPSKKMRVLGNTDKRFIKKNLIGALLFDEGTTAEDRRLKRTARRRYTRRKNRLRYLQEIFAEEMSKVDSSFFHRLDDSFLVPEDKSGSKYPIFATLAEEKEYHKKFPTIYHLRKHLADSKEKADLRLIYLALAHITKYRGHFLYEEAFDIKNNDIQKIFNEFINIYDNTFEGSSLSGQNAQVEAIFTGKISKSVKREHVLKLFPDEKSTGLFSEFLKLIVGNQADFKKHFDLEEKASLQFSKDTYDEDLENLLGQIGDDFADLFLVAKKLYDAILLSGILTVTDPSTKAPLSASMIERYENHQEDLAALKQFIKNNLPEKYAEVFSDQSKDGYAGYIDGKTTQEAFYKYIKNLLSKFEGADYFLDKIEREDFLRKQRTFDNGSIPHQIHLQEMNAILRRQGEHYPLLKENKEKIEKILTFRIPYYVGPLARGNRDFAWLTRNSDQAIRPWNFEEIVDKASSAESFINKMTNYDLYLPEEKVLPKHSLLYETFAVYNELTKVKFIAEGLRDYQFFDSGQKKQIVNQLFKEKRKVTEKDIIHYLHNVDGYDGIELKGIEKQFNASLSTYHDLLKIIKDKEFMDNHKNQEILENIVHTLTIFEDREMIKQRLAQYDSIFDEKVIKALTRRHYTGWGKLSAKLINGICDKKTGKTILDYLIDDGYNNRNFMQLINDDGLSFKEIIQKAQVVGKTDDLTQVVRELSGSPAIKKGILQSIKIVDELVKIMGYAPESIVIEMARENQTTAKGKKNSQQRYKRIEDALKNLAPGLDSTISKENPTDNIQLQNDRLFLYYLQNGKDMYTGEALDINQLSSYDIDHIIPQAFIKDDSLDNRVLTSSKDNRGKSDNVPSLEVVKKRKAFWQQLLDSKLISERKFNNLTKAERGGLDERDKVGFIKRQLVETRQITKHVARILDARFNTEVSEKNQKIRSVKIITLKSNLVSNFRKEFKLYKVREINDYHHAHDAYLNAVVAKAILKKYPKLEPEFVYGDYQKYDLKRYISKSKDPKEVEKATEKYFFYSNLLNFFKEEVHYADGTIVKRENIEYSKDTGEIAWNKEKDFVTIKKVLSYPQVNIVKKREVQTGGFSKESILPKGNSDKLIPRKTKDILWDTTKYGGFDSPVIAYSILLIADIEKGKAKKLKTVKTLVGITIMEKAAFEKNPITFLENKGYHNVRKENILCLPKYSLFELENGRRRLLASAKELQKGNEIVLPVYLTTLLYHSKNVHKLDEPEHLEYIQKHRYEFKDLLNLVSEFSQKYVLAEANLEKIKSLYVDNEQADIEILANSFINLLTFTALGAPAAFKFFGKDVDRKRYTTVSEILNATLIHQSITGLYETRIDLSKLGED

SEQ ID NO: 582 - protein, 1420 aa, Streptococcus sp.
  Streptococcus sp. oral taxon 071 str. 73H25AP
MAKFNKNYSIGLDIGVSSVGYAVVTEDYRVPAFKFKVLGNTEKEKIKKNLIGSTTFVPAQSAQGTRVFRVNRRRIDRRNHRIAYLRDIFQKEIEKIDKNFYRRLDESFRVLGDKSEDIQIKQPFFGNKELETAYHKKYPTIYHLRKHLADADKNSPVADIREVYMVLSHILKYRGHFLTLGKIDPNNINMQNSWIDFIESCQDAFDLEISDESKTIAAIFKSSENRQEKVKQILSYFQQELLKKDKSIFKQLLQLLFGLKTKFKDCFELEEEPDLNFSKENYDENLENLLGALEEDFSDVFAKLKILRDTILLSSMLTYTGATHARFSATMVERYEEHRKDLQRFKSFVKQNLSEQDYLDIFGRKTPTGFDVDKETKGYVGYISNKMVLTNPQKQKTIQQNFYDYISGKITGIEGAECFLNKISDGTFLRKLRTTDNGAIPNQIHAYELEKIIERQGRDYPFLLENKDKLLSILTFKIPYYVGPLAKGNNSRFAWIKRTTSQDVLDDNDEDTRNGKIRPWNYHKLINMDETRDAFIINLIGNDIILLNEKVLPKRSLIYEEVMLQNELTRVKYKDKYGKIHFFNSELRQEIINNLFKTNSKRVSSAMLLSYLENFTNLQAVEIVSGIEKGKSLNSTLKTYNDLKTIFSEELLDSEIYQKELEEIIKVITVFDDKKSIKNYLTKYFGHLEFLNEEKINQLSKLRYTGWGRYSGKLLLGIRDEDTGFNLMQFLRNDDENRNLTQLISDTTLSFDSAIKAIQSKSTVEDDVFEEIKNLAGSPAIKRGILNSIKIVDELVQIIGYPPQNIIIEMARENMTTEEGQKKAKTRKSKLESALKNIEDSVLESGKVPHSDEQLQSEKLYLYYLQNGKDMYSLDKTGSPTPLYRDQLDQYEVDHIIPYSFLPIDSIDNKVLTHRENNQRKLNNIPDKETVANMKPFWEKLYNAKLISQTKYQRLTTSERTPDGVLTESMKAGFIERQLVETRQIIKHVARILDNRFSDTKIITLKSQLVTNFRNTFHIAKIRELNDYHHAHDAYLAVVVGQTLLKAYPKLAPELIYGHHAHFNRHEENKATLRKHLYSNIMRFFNNPDSKVSKDIWDCNRDLPIVKDVIYNSQINFVKRTMIKKGAFYNQNPVGKLNKQIAANNRYPLKTKVSSLDTSIYGGYGPMNSALSIIIIAERFNEKKGKIETVKEFHDIFIIDYEKFNNNPFQFLNNVSEEGFLKKNDLNRVLAFYRISKYSLMQKIDGTRMLFESKSNLHKVTQFKLTKTQNELFFHMKRLLTKSNLMDLKSESAIKESQNFIQTHQNEFDNIADRLSNYSQKMLGETKSLQTLINGYNERPIKQIDNNEETIRYYYDNFIKMFSFVKSGAPKDIINFFNDKYTVPRMRPKPDRKMLDATLIHQSITGLYETRIDLSKLGED

SEQ ID NO: 583 - protein, 1122 aa, Streptococcus suis
  Streptococcus suis 89/1591
MSNGKILGLDIGIASVGVGVIDAQTGEIIHASSRIFPSANAANNAERRTFRGSRRLIRRKKHRIKRLDDLFNDFHINLDGEMSTDNPYVLRVKGLSQKLTVEELYISIKNIMKRRGISYLDDAESDNEAGRSDYAKAIERNRQLLTSKTPGEIQLERLEKYGQLRGNFTIIDEEGQSQQIINVFSTSDYVKEVEKILDCQKMYHKFISDEFCDKLIELLREKRKYYVGPGNEKSRTDYGIYRTDGTTLENLFGILIGKCTFYPDQYRSSRASYTAQEFNFLNDLNNLTVPTETKKLSQEQKEFLVNYAKETSVLGAGKILQQIAKLADCKVEDIRGYRLDNKDKPELHTFETYRAMKGLVPLVDIGVLSREQLDILADILTLNTDFEGIREALKKQLPNVFDEKQVKGLASFRKSKSQLFAKGWHNLSQKIMLEVIPELYATSDEQMTILTRLGKFEKSSVAEYPSSINVDEITDEIYNPVVAKSIRQTIKIINASIKKWGEFDQIVIEMPRDRNEDEEKKRIADGQKANAKEKADSILRAAELYCAGKVLPDYVYNGHNQLATKIRLWYQQGERCIYTGQPISIHDLIHNQNQYEIDHILPLSLTFDDSLSNKVLVLATANQEKAQRTPYNYLKSATSAWSYREFKDYVTKRKGIGKKKCEYLTFEEDINGFEVRSKFIQRNLVDTRYASKVILNALQDYFKISGIQTKVSVVRGQFTSQLRHKWGIEKTRETYHHHAVDALIIAASSQLRLWKKQESPLVVDYQEGRQVDLETGEILELTDEQYKELVYQPPYQGFVNTISSSAFDNEILFSYQVDSKVNRKISDATIYATRNAQLGKDKTEGIYVLGKIKDIYTQAGYEAFLKRYTKDKTSFLMYHKDLDTWEKVIEIILRDYREYDEKGKEIGNPFERYRRENGYVKKYSRKGNGTAIKSLKYYDNKLGNHIDITPENSRNAVVLQSLKPWRTDVYFNKETGKYEFLGIKYSDLSFEKGTGEYGISQEKYDSIKIAEGVAKKSIFKFTLYKQDLLFIKDIENNFGKLLRFTSKNDTSKHYVELKPYDKNKFGTEEPLLPVLGNVAKSGQCIKGLNKSNISIYKVRTDILGYRHFIKQEGEHPQLKFKK

SEQ ID NO: 584 - protein, 1122 aa, Streptococcus suis
MSNGKILGLDIGIASVGVGVIDAQTGEIIHASSRIFPSANAANNAERRTFRGSRRLIRRKKHRIKRLDDLFNDFHINLDGEMSTDNPYVLRVKGLSQKLTVEELYISIKNIMKRRGISYLDDAESDNEAGRSDYAKAIERNRQLLTSKTPGEIQLERLEKYGQLRGNFTIIDEEGQSQQIINVFSTSDYVKEVEKILDCQKMYHKFISDEFCDKLIELLREKRKYYVGPGNEKSRTDYGIYRTDGTTLENLFGILIGKCTFYPDQYRSSRASYTAQEFNFLNDLNNLTVPTETKKLSQEQKEFLVNYAKETSVLGAGKILQQIAKLADCKVEDIRGYRLDNKDKPELHTFETYRAMKGLVPLVDIGVLSREQLDILADILTLNTDFEGIREALKKQLPNVFDEKQVKGLASFRKSKSQLFAKGWHNLSQKIMLEVIPELYATSDEQMTILTRLGKFEKSSVAEYPSSINVDEITDEIYNPVVAKSIRQTIKIINASIKKWDEFDQIVIEMPRDRNEDEEKKRIADGQKANAKEKADSILRAAELYCAGKVLPDYVYNGHNQLATKIRLWYQQGERCIYTGQPISIHDLIHNQNQYEIDHILPLSLTFDDSLSNKVLVLATANQEKAQRTPYNYLKSATSAWSYREFKDYVTKRKGIGKKKCEYLTFEEDINGFEVRSKFIQRNLVDTRYASKVILNALQDYFKISGIQTKVSVVRGQFTSQLRHKWGIEKTRETYHHHAVDALIIAASSQLRLWKKQESPLVVDYQEGRQVDLETGEILELTDEQYKELVYQPPYQGFVNTISSSAFDNEILFSYQVDSKVNRKISDATIYATRNAQLGKDKTEGIYVLGKIKDIYTQAGYEAFLKRYTKDKTSFLMYHKDLDTWEKVIEIILRDYREYDEKGKEIGNPFERYRRENGYVKKYSRKGNGTAIKSLKYYDNKLGNHIDITPENSRNAVVLQSLKPWRTDVYFNKETGKYEFLGIKYSDLSFEKGTGEYGISQEKYDSIKIAEGVAKKSIFKFTLYKQDLLFIKDIENNFGKLLRFTSKNDTSKHYVELKPYDKNKFGTEEPLLPVLGNVAKSGQCIKGLNKSNISIYKVRTDILGYRHFIKQEGEHPQLKFKK

SEQ ID NO: 585 - protein, 1381 aa, Streptococcus suis
MVKKKYAIGIDIGTNSVGWSIVTDDYKVPSKKMKVFGNTEKRYIKKNLLGTLLFDEGNTAENRRLKRTARRRYTRRRNRILYLQEIFAEEINKIDDSFFQRLDDSFLIVEDKQGSKHPIFGTLQEEKEYHKQFPTIYHLRKQLADSSQKADIRLIYLALAHIIKYRGHFLFEGDLKSENKDVQHLFNDFVEMFDKTVEGSYLSENLPNVADVLVEKVSKSRRLENILHYFPNEKKNGLFGNFLALALGLQPNFKTNFELAEDAKIQFSKETYEEDLEELLGKIGDDYADLFIATKSLYDGILLAGILSTTDSTTKAPLSSSMVNRYEEHQKDLALLKNFIHQNLSDSYKEVFNDKLKDGYAGYIEGKTTQENFYRFIKKAIEKIEGSNYFIDKIDREDFLRKQRTFDNGSIPHQIHLQEMHAIIRRQAEFYPFLVENQDKIEKILTFRIPYYVGPLARGKSEFAWLNRKSDEKIRPWNFDEMVDKETSAENFITRMTNYDRYLPDQKVLPKHSLLYEKFAVYNELTKVKFIAEGMRDYQFLDSGQKKDIVKTLFKTKRKVTAKDIKAYLENSNGYAGVELKGLEEQFNASLPTYHDLLKILRDKAFIDAEENQEILEDIVLTLTLFEDREMIRKRLEKYKDILTEEQRKKLERRHYTGWGRLSAKLINGILDKVTRKTILGYLIDDGTSNRNFMQLINDDTLSFVDEIRLAQGSGEAEDYRAEVQNLAGSPAIKKGILQSLKIVDELIEVMGYEPEHIVVEMARENQFTNQGRRNSQQRINRLENALKDFGSKILEEQKPYGVSKVNNIHLQSDRLFLYYLQNGKDMYTDEELDIDHLSEYDIDHIIPQAFIKDDSLDNKVLTKSAKNRGKSDDVPSMEIVHNRKNFWRQLLKSKLISQRKFDNLTKAERGGLTNEDKARFIQRQLVETRQITKHVARMLDTRFNTKLDEAGNRIRDPKVNIITLKSNLVSQFRKDYQLYKIREINNYHHAHDAYINAVVATALLKKYPQLAPEFVYGEYPTYNSYNSRKSATEKVLFYSNIMNFFKRIVVHSKTGEVRIRPVIEVNKETGEIVWDKKSDFRTVRKVLSYPQVNVVKKTEVQNHGLDRGKPKGFYNANLSPRPKEGSVENLVPAKQSFDTKRYGGYAGISNSYAVLVNGIIEKGKKKSKAEVTEFQGISILARKDFDKNPKQYLLNLGYKDIKSIIKLPKYSLFELENGSRRMLASILSTNNKRGEIHKGNEMYLPDKFVTLLYHAMRVNRTLEPGHKKYVETHRHVFDELLIYILEYNEKIVGAKANGKRIVEAYSARKDTDNLEELCNSFINLLNLTALGSAVDFEFLGTKIPRYRDYTPSSLLKATLIHQSVTGLYETRIDLSKLGGD

SEQ ID NO: 586 - protein, 1122 aa, Streptococcus suis; identical to SEQ ID NO: 583

SEQ ID NO: 587 - protein, 1388 aa, Streptococcus thermophilus
MTKPYSIGLDIGTNSVGWAVITDNYKVPSKKMKVLGNTSKKYIKKNLLGVLLFDSGITAEGRRLKRTARRRYTRRRNRILYLQEIFSTEMATLDDAFFQRLDDSFLVPDDKRDSKYPIFGNLVEEKVYHDEFPTIYHLRKYLADSTKKADLRLVYLALAHMIKYRGHFLIEGEFNSKNNDIQKNFQDFLDTYNAIFESDLSLENSKQLEEIVKDKISKLEKKDRILKLFPGEKNSGIFSEFLKLIVGNQADFRKCFNLDEKASLHFSKESYDEDLETLLGYIGDDYSDVFLKAKKLYDAILLSGFLTVTDNETEAPLSSAMIKRYNEHKEDLALLKEYIRNISLKTYNEVFKDDTKNGYAGYIDGKTNQEDFYVYLKNLLAEFEGADYFLEKIDREDFLRKQRTFDNGSIPYQIHLQEMRAILDKQAKFYPFLAKNKERIEKILTFRIPYYVGPLARGNSDFAWSIRKRNEKITPWNFEDVIDKESSAEAFINRMTSFDLYLPEEKVLPKHSLLYETFNVYNELTKVRFIAESMRDYQFLDSKQKKDIVRLYFKDKRKVTDKDIIEYLHAIYGYDGIELKGIEKQFNSSLSTYHDLLNIINDKEFLDDSSNEAIIEEIIHTLTIFEDREMIKQRLSKFENIFDKSVLKKLSRRHYTGWGKLSAKLINGIRDEKSGNTILDYLIDDGISNRNFMQLIHDDALSFKKKIQKAQIIGDEDKGNIKEVVKSLPGSPAIKKGILQSIKIVDELVKVMGGRKPESIVVEMARENQYTNQGKSNSQQRLKRLEKSLKELGSKILKENIPAKLSKIDNNALQNDRLYLYYLQNGKDMYTGDDLDIDRLSNYDIDHIIPQAFLKDNSIDNKVLVSSASNRGKSDDFPSLEVVKKRKTFWYQLLKSKLISQRKFDNLTKAERGGLLPEDKAGFIQRQLVETRQITKHVARLLDEKFNNKKDENNRAVRTVKIITLKSTLVSQFRKDFELYKVREINDFHHAHDAYLNAVIASALLKKYPKLEPEFVYGDYPKYNSFRERKSATEKVYFYSNIMNIFKKSISLADGRVIERPLIEVNEETGESVWNKESDLATVRRVLSYPQVNVVKKVEEQNHGLDRGKPKGLFNANLSSKPKPNSNENLVGAKEYLDPKKYGGYAGISNSFAVLVKGTIEKGAKKKITNVLEFQGISILDRINYRKDKLNFLLEKGYKDIELIIELPKYSLFELSDGSRRMLASILSTNNKRGEIHKGNQIFLSQKFVKLLYHAKRISNTINENHRKYVENHKKEFEELFYYILEFNENYVGAKKNGKLLNSAFQSWQNHSIDELCSSFIGPTGSERKGLFELTSRGSAADFEFLGVKIPRYRDYTPSSLLKDATLIHQSVTGLYETRIDLAKLGEG

SEQ ID NO: 588 - protein, 1128 aa, Streptococcus thermophilus
MSDLVLGLDIGIGSVGVGILNKVTGEIIHKNSRIFPAAQAENNLVRRTNRQGRRLTRRKKHRIVRLNRLFEESGLITDFTKISINLNPYQLRVKGLTDELSNEELFIALKNMVKHRGISYLDDASDDGNSSVGDYAQIVKENSKQLETKTPGQIQLERYQTYGQLRGDFTVEKDGKKHRLINVFPTSAYRSEALRILQTQQEFNPQITDEFINRYLEILTGKRKYYHGPGNEKSRTDYGRYRTSGETLDNIFGILIGKCTFYPEEFRAAKASYTAQEFNLLNDLNNLTVPTETKKLSKEQKNQIINYVKNEKAMGPAKLFKYIAKLLSCDVADIKGYRIDKSGKAEIHTFEAYRKMKTLETLDIEQMDRETLDKLAYVLTLNTEREGIQEALEHEFADGSFSQKQVDELVQFRKANSSIFGKGWHNFSVKLMMELIPELYETSEEQMTILTRLGKQKRLRLQIKQNISNKTKYIDEKLLTEEIYNPVVAKSVRQAIKIVNAAIKEYGDFDNIVIEMARETNEDDEKKAIQKIQKANKDEKDAAMLKAANQYNGKAELPHSVFHGHKQLATKIRLWHQQGERCLYTGKTISIHDLINNPNQFEVDHILPLSITFDDSLANKVLVYATANQEKGQRTPYQALDSMDDAWSFRELKAFVRESKTLSNKKKEYLLTEEDISKFDVRKKFIERNLVDTRYASRVVLNALQEHFRAHKIDTKVSVVRGQFTSQLRRHWGIEKTRDTYHHHAVDALIIAASSQLNLWKKQKNTLVSYSEEQLLDIETGELISDDEYKESVFKAPYQHFVDTLKSKEFEDSILFSYQVDSKFNRKISDATIYATRQAKVGKDKKDETYVLGKIKDIYTQDGYDAFMKIYKKDKSKFLMYRHDPQTFEKVIEPILENYPNKQMNEKGKEVPCNPFLKYKEEHGYIRKYSKKGNGPEIKSLKYYDSKLLGNPIDITPENSKNKVVLQSLKPWRTDVYFNKATGKYEILGLKYADLQFEKGTGTYKISQEKYNDIKKKEGVDSDSEFKFTLYKNDLLLVKDTETKEQQLFRFLSRTLPKQKHYVELKPYDKQKFEGGEALIKVLGNVANGGQCIKGLAKSNISIYKVRTDVLGNQHIIKNEGDKPKLDF

SEQ ID NO: 589 - protein, 1121 aa, Streptococcus thermophilus
MSDLVLGLDIGIGSVGVGILNKVTGEIIHKNSRIFPAAQAENNLVRRTNRQGRRLTRRKKHRIVRLNRLFEESGLITDFTKISINLNPYQLRVKGLTDELSNEELFIALKNMVKHRGISYLDDASDDGNSSVGDYAQIVKENSKQLETKTPGQIQLERYQTYGQLRGDFTVEKDGKKHRLINVFPTSAYRSEALRILQTQQEFNPQITDEFINRYLEILTGKRKYYHGPGNEKSRTDYGRYRTSGETLDNIFGILIGKCTFYPDEFRAAKASYTAQEFNLLNDLNNLTVPTETKKLSKEQKNQIINYVKNEKAMGPAKLFKYIAKLLSCDVADIKEYRIDKSGKAEIHTFEAYRKMKTLETLDIEQMDRETLDKLAYVLTLNTEREGIQEALEHEFADGSFSQKQVDELVQFRKANSSIFGKGWHNFSVKLMMELIPELYETSEEQMTILTRLGKQKTTSSSNKTKYIDEKLLTEEIYNPVVAKSVRQAIKIVNAAIKEYGDFDNIVIEMARETNEDDEKKAIQKIQKANKDEKDAAMLKAANQYNGKAELPHSVFHGHKQLATKIRLWHQQGERCLYTGKTISIHDLINNSNQFEVDHILPLSITFDDSLANKVLVYATANQEKGQRTPYQALDSMDDAWSFRELKAFVRESKTLSNKKKEYLLTEEDISKFDVRKKFIERNLVDTRYASRVVLNALQEHFRAHKIDTKVSVVRGQFTSQLRRHWGIEKTRDTYHHHAVDALIIAASIQLNLWKKQKNTLVSYSEDQLLDIETGELISDDEYKESVFKAPYQHFVDTLKSKEFEDSILFSYQVDSKFNRKISDATIYATRQAKVGKDKADETYVLGKIKDIYTQDGYDAFMKIYKKDKSKFLMYRHDPQTFEKVIEPILENYPNKQINEKGKEVPVNPFLKYKEEHGYIRKYSKKGNGPEIKSLKYYDSKLGNHIDITPKDSNNKVVLQSVSPWRADVYFNKTTGKYEILGLKYADLQFEKGTGTYKISQEKYNDIKKKEGVDSDSEFKFTLYKNDLLLVKDTETKEQQLFRFLSRTMPKQKHYVELKPYDKQKFEGGEALIKVLGNVANSGQCKKGLGKSNISIYKVRTDVLGNQHIIKNEGDKPKLDF

SEQ ID NO: 590 - protein, 1388 aa, Streptococcus thermophilus
MTKPYSIGLDIGTNSVGWAVTTDNYKVPSKKMKVLGNTSKKYIKKNLLGVLLFDSGITAEGRRLKRTARRRYTRRRNRILYLQEIFSTEMATLDDAFFQRLDDSFLVPDDKRDSKYPIFGNLVEEKAYHDEFPTIYHLRKYLADSTKKADLRLVYLALAHMIKYRGHFLIEGEFNSKNNDIQKNFQDFLDTYNAIFESDLSLENSKQLEEIVKDKISKLEKKDRILKLFPGEKNSGIFSEFLKLIVGNQADFRKCFNLDEKASLHFSKESYDEDLETLLGYIGDDYSDVFLKAKKLYDAILLSGFLTVTDNETEAPLSSAMIKRYNEHKEDLALLKEYIRNISLKTYNEVFKDDTKNGYAGYIDGKTNQEDFYVYLKKLLAEFEGADYFLEKIDREDFLRKQRTFDNGSIPYQIHLQEMRAILDKQAKFYPFLAKNKERIEKILTFRIPYYVGPLARGNSDFAWSIRKRNEKITPWNFEDVIDKESSAEAFINRMTSFDLYLPEEKVLPKHSLLYETFNVYNELTKVRFIAESMRDYQFLDSKQKKDIVRLYFKDKRKVTDKDIIEYLHAIYGYDGIELKGIEKQFNSSLSTYHDLLNIINDKEFLDDSSNEAIIEEIIHTLTIFEDREMIKQRLSKFENIFDKSVLKKLSRRHYTGWGKLSAKLINGIRDEKSGNTILDYLIDDGISNRNFMQLIHDDALSFKKKIQKAQIIGDEDKGNIKEVVKSLPGSPAIKKGILQSIKIVDELVKVMGGRKPESIVVEMARENQYTNQGKSNSQQRLKRLEKSLKELGSKILKENIPAKLSKIDNNALQNDRLYLYYLQNGKDMYTGDDLDIDRLSNYDIDHIIPQAFLKDNSIDNKVLVSSASNRGKSDDVPSLEVVKKRKTFWYQLLKSKLISQRKFDNLTKAERGGLSPEDKAGFIQRQLVETRQITKHVARLLDEKFNNKKDENNRAVRTVKIITLKSTLVSQFRKDFELYKVREINDFHHAHDAYLNAVVASALLKKYPKLEPEFVYGDYPKYNSFRERKSATEKVYFYSNIMNIFKKSISLADGRVIERPLIEVNEETGESVWNKESDLATVRRVLSYPQVNVVKKVEEQNHGLDRGKPKGLFNANLSSKPKPNSNENLVGAKEYLDPKKYGGYAGISNSFTVLVKGTIEKGAKKKITNVLEFQGISILDRINYRKDKLNFLLEKGYKDIELIIELPKYSLFELSDGSRRMLASILSTNNKRGEIHKGNQIFLSQKFVKLLYHAKRISNTINENHRKYVENHKKEFEELFYYILEFNENYVGAKKNGKLLNSAFQSWQNHSIDELCSSFIGPTGSERKGLFELTSRGSAADFEFLGVKIPRYRDYTPSSLLKDATLIHQSVTGLYETRIDLAKLGEG

SEQ ID NO: 591 - protein, 1121 aa, Streptococcus thermophilus
MSDLVLGLDIGIGSVGVGILNKVTGEIIHKNSRIFPAAQAENNLVRRTNRQGRRLARRKKHRRVRLNRLFEESGLITDFTKISINLNPYQLRVKGLTDELSNEELFIALKNMVKHRGISYLDDASDDGNSSVGDYAQIVKENSKQLETKTPGQIQLERYQTYGQLRGDFTVEKDGKKHRLINVFPTSAYRSEALRILQTQQEFNPQITDEFINRYLEILTGKRKYYHGPGNEKSRTDYGRYRTSGETLDNIFGILIGKCTFYPDEFRAAKASYTAQEFNLLNDLNNLTVPTETKKLSKEQKNQIINYVKNEKAMGPAKLFKYIAKLLSCDVADIKGYRIDKSGKAEIHTFEAYRKMKTLETLDIEQMDRETLDKLAYVLTLNTEREGIQEALEHEFADGSFSQKQVDELVQFRKANSSIFGKGWHNFSVKLMMELIPELYETSEEQMTILTRLGKQKTTSSSNKTKYIDEKLLTEEIYNPVVAKSVRQAIKIVNAAIKEYGDFDNIVIEMARETNEDDEKKAIQKIQKANKDEKDAAMLKAANQYNGKAELPHSVFHGHKQLATKIRLWHQQGERCLYTGKTISIHDLINNSNQFEVDHILPLSITFDDSLANKVLVYATANQEKGQRTPYQALDSMDDAWSFRELKAFVRESKTLSNKKKEYLLTEEDISKFDVRKKFIERNLVDTRYASRVVLNALQEHFRAHKIDTKVSVVRGQFTSQLRRHWGIEKTRDTYHHHAVDALIIAASSQLNLWKKQKNTLVSYSEDQLLDIETGELISDDEYKESVFKAPYQHFVDTLKSKEFEDSILFSYQVDSKFNRKISDATIYATRQAKVGKDKADETYVLGKIKDIYTQDGYDAFMKIYKKDKSKFLMYRHDPQTFEKVIEPILENYPNKQINEKGKEVPCNPFLKYKEEHGYIRKYSKKGNGPEIKSLKYYDSKLGNHIDITPKDSNNKVVLQSVSPWRADVYFNKTTGKYEILGLKYADLQFEKGTGTYKISQEKYNDIKKKEGVDSDSEFKFTLYKNDLLLVKDTETKEQQLFRFLSRTMPKQKHYVELKPYDKQKFEGGEALIKVLGNVANSGQCKKGLGKSNISIYKVRTDVLGNQHIIKNEGDKPKLDF

SEQ ID NO: 592 - protein, 1122 aa, Streptococcus thermophilus
MSDLVLGLDIGIGSVGVGILNKVTGEIIHKNSRIFPAAQAENNLVRRTNRQGRRLTRRKKHRIVRLNRLFEESGLITDFTKISINLNPYQLRVKGLTDELSNEELFIALKNMVKHRGISYLDDASDDGNSSVGDYAQIVKENSKQLETKTPGQIQLERYQTYGQLRGDFTVEKDGKKHRLINVFPTSAYRSEALRILQTQQEFNSQITDEFINRYLEILTGKRKYYHGPGNEKSRTDYGRYRTNGETLDNIFGILIGKCTFYPDEFRAAKASYTAQEFNLLNDLNNLTVPTETKKLSKEQKNQIINYVKNEKVMGPAKLFKYIAKLLSCDVADIKGHRIDKSGKAEIHTFEAYRKMKTLETLDIEQMDRETLDKLAYVLTLNTEREGIQEALEHEFADGSFSQKQVDELVQFRKANSSIFGKGWHNFSVKLMMELIPELYETSEEQMTILTRLGKQKTTSSSNKTKYIDEKLLTEEIYNPVVAKSVRQAIKIVNAAIKEYGDFDNIVIEMARETNEDDEKKAIQKIQKANKDEKDAAMLKAANQYNGKAELPHSVFHGHKQLATKIRLWHQQGERCLYTGKTISIHDLINNPNQFEVDHILPLSITFDDSLANKVLVYATANQEKGQRTPYQALDSMDDAWSFRELKAFVRESKTLSNKKKEYLLTEEDISKFDVRKKFIERNLVDTRYASRVVLNALQEHFRAHKIDTKVSVVRGQFTSQLRRHWGIEKTRDTYHHHAVDALIIAASSQLNLWKKQKNTLVSYSEEQLLDIETGELISDDEYKESVFKAPYQHFVDTLKSKEFEDSILFSYQVDSKFNRKISDATIYATRQAKVGKDKKDETYVLGKIKDIYTQDGYDAFMKIYKKDKSKFLMYRHDPQTFEKVIEPILENYPNKEMNEKGKEVPCNPFLKYKEEHGYIRKYSKKGNGPEIKSLKYYDSKLLGNPIDITPENSKNKVVLQSLKPWRTDVYFNKNTGKYEILGLKYADLQFEKKTGTYKISQEKYNGIMKEEGVDSDSEFKFTLYKNDLLLVKDTETKEQQLFRFLSRTMPNVKYYVELKPYSKDKFEKNESLIEILGSADKSGRCIKGLGKSNISIYKVRTDVLGNQHIIKNEGDKPKLDF

SEQ ID NO: 593 - protein, 1388 aa, Streptococcus thermophilus
MTKPYSIGLDIGTNSVGWAVITDNYKVPSKKMKVLGNTSKKYIKKNLLGVLLFDSGITAEGRRLKRTARRRYTRRRNRILYLQEIFSTEMATLDDAFFQRLDDSFLVPDDKRDSKYPIFGNLVEEKAYHDEFPTIYHLRKYLADSTKKADLRLVYLALAHMIKYRGHFLIEGEFNSKNNDIQKNFQDFLDTYNAIFESDLSLENSKQLEEIVKDKISKLEKKDRILKLFPGEKNSGIFSEFLKLIVGNQADFRKCFNLDEKASLHFSKESYDEDLETLLGYIGDDYSDVFLKAKKLYDAILLSGFLTVTDNETEAPLSSAMIKRYNEHKEDLALLKEYIRNISLKTYNEVFKDDTKNGYAGYIDGKTNQEDFYVYLKNLLAEFEGADYFLEKIDREDFLRKQRTFDNGSIPYQIHLQEMRAILDKQAKFYPFLAKNKERIEKILTFRIPYYVGPLARGNSDFAWSIRKRNEKITPWNFEDVIDKESSAEAFINRMTSFDLYLPEEKVLPKHSLLYETFNVYNELTKVRFIAESMRDYQFLDSKQKKDIVRLYFKDKRKVTDKDIIEYLHAIYGYDGIELKGIEKQFNSSLSTYHDLLNIINDKEFLDDSSNEAIIEEIIHTLTIFEDREMIKQRLSKFENIFDKSVLKKLSRRHYTGWGKLSAKLINGIRDEKSGNTILDYLIDDGISNRNFMQLIHDDALSFKKKIQKAQIIGDEDKGNIKEVVKSLPGSPAIKKGILQSIKIVDELVKVMGGRKPESIVVEMARENQYTNQGKSNSQQRLKRLEKSLKELGSKILKENIPAKLSKIDNNALQNDRLYLYYLQNGKDMYTGDDLDIDRLSNYDIDHIIPQAFLKDNSIDNKVLVSSASNRGKSDDFPSLEVVKKRKTFWYQLLKSKLISQRKFDNLTKAERGGLLPEDKAGFIQRQLVETRQITKHVARLLDEKFNNKKDENNRAVRTVKIITLKSTLVSQFRKDFELYKVREINDFHHAHDAYLNAVIASALLKKYPKLEPEFVYGDYPKYNSFRERKSATEKVYFYSNIMNIFKKSISLADGRVIERPLIEVNEETGESVWNKESDLATVRRVLSYPQVNVVKKVEEQNHGLDRGKPKGLFNANLSSKPKPNSNENLVGAKEYLDPKKYGGYAGISNSFAVLVKGTIEKGAKKKITNVLEFQGISILDRINYRKDKLNFLLEKGYKDIELIIELPKYSLFELSDGSRRMLASILSTNNKRGEIHKGNQIFLSQKFVKLLYHAKRISNTINENHRKYVENHKKEFEELFYYILEFNENYVGAKKNGKLLNSAFQSWQNHSIDELCSSFIGPTGSERKGLFELTSRGSAADFEFLGVKIPRYRDYTPSSLLKDATLIHQSVTGLYETRIDLAKLGEG

SEQ ID NO: 594 - protein, 1121 aa, Streptococcus thermophilus
MSDLVLGLDIGIGSVGVGILNKVTGEIIHKNSRIFPAAQAENNLVRRTNRQGRRLTRRKKHRRVRLNRLFEESGLITDFTKISINLNPYQLRVKGLTDELSNEELFIALKNMVKHRGISYLDDASDDGNSSVGDYAQIVKENSKQLETKTPGQIQLERYQTYGQLRGDFTVEKDGKKHRLINVFPTSAYRSEALRILQTQQEFNPQITDEFVNRYLEILTGKRKYYHGPGNEKSRTDYGRYRTNGETLDNIFGILIGKCTFYPEEFRAAKASYTAQEFNLLNDLNNLTVPTETKKLSKEQKNQIINYVKNEKAMGPAKLFKYIAKLLSCDVADIKGYRIDKSGKAEIHTFEAYRKMKTLETLDIEQMDRETLDKLAYVLTLNTEREGIQEALEHEFADGSFSQKQVDELVQFRKANSSIFGKGWHNFSVKLMMELIPELYETSEEQMTILKRLGKQKTTSSSNKTKYIDEKLLTEEIYNPVVAKSIRQAIKIVNAAIKEYGDFDNIVIEMARETNEDDEKKAIQKIQKANKDEKDAAMLKAANQYNGKAELPHSVFHGHKQLATKIRLWHQQGERCLYTGKTISIHDLINNPNQFEVDHILPLSITFDDSLANKVLVYATANQEKGQRTPYQALDSMDDAWSFRELKAFVRESKTLSNKKKEYLLTEEDISKFDVRKKFIERNLVDTRYASRVVLNALQEHFRAHKIDTKVSVVRGQFTSQLRRHWGIEKTRDTYHHHAVDALIIAASSQLNLWKKQKNTLVSYSEDQLLDIETGELISDDEYKESVFKAPYQHFVDTLKSKEFEDSILFSYQVDSKFNRKISDATIYATRQAKVGKDKKDETYVLGKIKDIYTQDGYDAFMKIYKKDKSKFLMYRHDPQTFEKVIEPILENYPNKEMNEKGKEVPCNPFLKYKEEHGYIRKYSKKGNDPEIKSLKYYDSKLGNHIDITPKDSNNKVVLQSVSPWRADVYFNKTTGKYEILGLKYADLQFEKGTGTYKISQEKYNDIKKKEGVDSDSEFKFTLYKNDLLLVKDTETKEQQLFRFLSRTMPKQKHYVELKPYDKQKFEGGEALIKVLGNVANSGQCKKGLGKSNISIYKVRTDVLGNQHIIKNEGDKPKLDF

SEQ ID NO: 595 - protein, 1122 aa, Streptococcus thermophilus
  Streptococcus thermophilus MTCC 5460
MSDLVLGLDIGIGSVGVGILNKVTGEIIHKNSRIFPAAQAENNVERRTNRQGRRLTRRKKHRRVRLNRLFEESGLITDFTKISINLNPYQLRVRGLTDELSNEELFIALKNMVKHRGISYLDDASDDGNSSVGDYAQIVKENSKQLETKTPGQIQLERYQTYGQLRGDFTVEKDGKKHRLINVFPTSAYRSEALRILQTQQEFNSQITDEFINRYLEILTGKRKYYHGPGNEKSRTDYGRYRTSGETLDNIFGILIGKCTFYPEEFRAAKASYTAQEFNLLNDLNNLTVPTETKKLSKEQKNQIINYVKNEKAMGPAKLFKYIAKLLSCDVADIKGYRIDKSGKAEIHTFEAYRKMKTLETLDIEQMDRETLDKLAYVLTLNTEREGIQEALEHEFADGSFSQKQVDELVQFRKASSSIFGKGWHNFSVKLMMELIPELYETSEEQMTILTRLGKQKTTSSSNKTKYIDEKLLTEEIYNPVVAKSVRQAIKIVNAAIKEYGDFDNIVIEMARETNEDDEKKAIQKIQKANKDEKDAAMLKAANQYNGKAELPHSVFHGHKQLATKIRLWHQQGERCLYTGKTISIHDLINNPNQFEVDHILPLSITFDDSLANKVLVYATANQEKGQRTPYQALDSMDDAWSFRELKAFVRESKTLSNKKKEYLLTEEDISKFDVRKKFIERNLVDTRYASRVVLNALQEHFRAHKIDTKVSVVRGQFTSQLRRHWGIEKTRDTYHHHAVDALIIAASSQLNLWKKQKNTLVSYSEDQLLDIETGELISDDEYKESVFKAPYQHFVDTLKSKEFEDSILFSYQVDSKFNRKLSDATIYATRQAKVGKDKKDETYVLGKIKDIYTQDGYDAFMKIYKKDKSKFLMYRHDPQTFEKVIEPILENYPNKEMNEKGKEVPCNPFLKYKEEHGYIRKYSKKGNGPEIKSLKYYDSKLLGNPIDITPENSKNKVVLQSLKPWRADVYFNKTTGKYEILGLKYADLQFEKKTGTYKISQEKYNGIMKEEGVDSDSEFKFTLYKNDLLLVKDTETKEQQLFRFLSRTMPNVKYYVELKPYSKDKFEKNESLIEILGSADKSGRCIKGLGKSNISIYKVRTDVLGNQHIIKNEGDKPKLDF

SEQ ID NO: 596 - protein, 1121 aa, Streptococcus thermophilus
MSDLVLGLDIGIGSVGVGILNKVTGEIIHKNSRIFPAAQAENNLVRRTNRQGRRLTRRKKHRIVRLNRLFEESGLITDFTKISINLNPYQLRVKGLTDELSNEELFIALKNMVKHRGISYLDDASDDGNSSVGDYAQIVKENSKQLETKTPGQIQLERYQTYGQLRGDFTVEKDGKKHRLINVFPTSAYRSEALRILQTQQEFNPQITDEFINRYLEILTGKRKYYHGPGNEKSRTDYGRYRTSGETLDNIFGILIGKCTFYPDEFRAAKASYTAQEFNLLNDLNNLTVPTETKKLSKEQKNQIINYVKNEKAMGPAKLFKYIAKLLSCDVADIKGYRIDKSGKAEIHTFEAYRKMKTLETLDIEQMDRETLDKLAYVLTLNTEREGIQEALEHEFADGSFSQKQVDELVQFRKANSSIFGKGWHNFSVKLMMELIPELYETSEEQMTILTRLGKQKTTSSSNKTKYIDEKLLTEEIYNPVVAKSVRQAIKIVNAAIKEYGDFDNIVIEMARETNEDDEKKAIQKIQKANKDEKDAAMLKAANQYNGKAELPHSVFHGHKQLATKIRLWHQQGERCLYTGKTISIHDLINNSNQFEVDHILPLSITFDDSLANKVLVYATANQEKGQRTPYQALDSMDDAWSFRELKAFVRESKTLSNKKKEYLLTEEDISKFDVRKKFIERNLVDTRYASRVVLNALQEHFRAHKIDTKVSVVRGQFTSQLRRHWGIEKTRDTYHHHAVDALIIAASSQLNLWKKQKNTLVSYSEDQLLDIETGELISDDEYKESVFKAPYQHFVDTLKSKEFEDSILFSYQVDSKFNRKISDATIYATRQAKVGKDKADETYVLGKIKDIYTQDGYDAFMKIYKKDKSKFLMYRHDPQTFEKVIEPILENYPNKQMNEKGKEVPCNPFLKYKEEHGYIRKYSKKGNGPEIKSLKYYDSKLGNHIDITPKDSNNKVVLQSVSPWRADIYFNNTTGKYEILGLKYADLQFEKGTGTYKISQEKYNDIKKKEGVDSDSEFKFTLYKNDLLLVKETETKEQQLFRFLSRTMPKQKHYVELKPYDKQKFEGGEALIKVLGNVANGGQCIKGLGKSNISIYKVRTDVLGNQHIIKNEGDKPKLDF

SEQ ID NO: 597 - protein, 1388 aa, Streptococcus thermophilus
MTKPYSIGLDIGTNSVGWAVITDNYKVPSKKMKVLGNTSKKYIKKNLLGVLLFDSGITAEGRRLKRTARRRYTRRRNRILYLQEIFSTEMATLDDAFFQRLDDSFLVPDDKRDSKYPIFGNLVEEKAYHDEFPTIYHLRKYLADSTKKADLRLVYLALAHMIKYRGHFLIEGEFNSKNNDIQKNFQDFLDTYNAIFESDLSLENSKQLEEIVKDKISKLEKKDRILKLFPGEKNSGIFSEFLKLIVGNQADFRKCFNLDEKASLHFSKESYDEDLETLLGYIGDDYSDVFLKAKKLYDAILLSGFLTVTDNETEAPLSSAMIKRYNEHKEDLALLKEYIRNISLKTYNEVFKDDTKNGYAGYIDGKTNQEDFYVYLKNLLAEFEGADYFLEKIDREDFLRKQRTFDNGSIPYQIHLQEMRAILDKQAKFYPFLAKNKERIEKILTFRIPYYVGPLARGNSDFAWSIRKRNEKITPWNFEDVIDKESSAEAFINRMTSFDLYLPEEKVLPKHSLLYETFNVYNELTKVRFIAESMRDYQFLDSKQKKDIVRLYFKDKRKVTDKDIIEYLHAIYGYDGIELKGIEKQFNSSLSTYHDLLNIINDKEFLDDSSNEAIIEEIIHTLTIFEDREMIKQRLSKFENIFDKSVLKKLSRRHYTGWGKLSAKLINGIRDEKSGNTILDYLIDDGISNRNFMQLIHDDALSFKKKIQKAQIIGDEDKGNIKEVVKSLPGSPAIKKGILQSIKIVDELVKVMGGRKPESIVVEMARENQYTNQGKSNSQQRLKRLEKSLKELGSKILKENIPAKLSKIDNNALQNDRLYLYYLQNGKDMYTGDDLDIDRLSNYDIDHIIPQAFLKDNSIDNKVLVSSASNRGKSDDFPSLEVVKKRKTFWYQLLKSKLISQRKFDNLTKAERGGLLPEDKAGFIQRQLVETRQITKHVARLLDEKFNNKKDENNRAVRTVKIITLKSTLVSQFRKDFELYKVCEINDFHHAHDAYLNAVIASALLKKYPKLEPEFVYGDYPKYNSFRERKSATEKVYFYSNIMNIFKKSISLADGRVIERPLIEVNEETGESVWNKESDLATVRRVLSYPQVNVVKKVEEQNHGLDRGKPKGLFNANLSSKPKPNSNENLVGAKEYLDPKKYGGYAGISNSFAVLVKGTIEKGAKKKITNVLEFQGISILDRINYRKDKLNFLLEKGYKDIELIIELPKYSLFELSDGSRRMLASILSTNNKRGEIHKGNQIFLSQKFVKLLYHAKRISNTINENHRKYVENHKKEFEELFYYILEFNENYVGAKKNGKLLNSAFQSWQNHSIDELCSSFIGPTGSERKGLFELTSRGSAADFEFLGVKIPRYRDYTPSSLLKDATLIHQSVTGLYETRIDLAKLGEG

SEQ ID NO: 598 - protein, 1128 aa, Streptococcus vestibularis
  Streptococcus vestibularis ATCC 49124
MSDLVLGLDIGIGSVGVGILNKVTGEIIHKNSRIFPAAQAENNVERRTNRQGRRLTRRKKHRRVRLNHLFEESGLITDFTKVSINLNPYQLRVKGLIDELSNEELFIALKNMVKHRGISYLDDASDDGNSSVGDYAQIVKENSKQLETKTPGQIQLERYQKYGQLRGDFTVEEDGKKHRLINVFPTSAYRSEALRILQTQKEFNPQITDEFINRYLEILTGKRKYYHGPGNEKSRTDYGRYTTKKDSENEYITLDNIFGILIGKCTFYPEEYRAAKASYTAQEFNLLNDLNNLTVPTETKKLSEEQKNQIINYVKNEKAMGPAKLFKYIAKLLSCDVADIKGYRIDKSDKAEIHTFEAYRKMKTLETIDFEKMSRDQLDKLAYVLTLNTEREGIQEALDHEFADGNFSQEQIDELVQFRKANSSIFGKGWHNFSVKLMMELIPELYATSEEQMTILTRLGKQKTTSSSNKTKYIDEKLLTEEIYNPVVAKSVRQAIKIVNAAIKEYGDFDNIVIEMARETNEDDEKKAIQKIQKANKDEKDAAMLKAANQYNGRAELPHSVFHGHKQLATKIRLWHQQGERCLYTGKTISIHDLINNPNQFEIDHILPLSITFDDSLANKVLVYATANQEKGQRTPYQALDSMDDAWSFRELKAFVRESKSLSNKKKEYLLTEEDISRFDVRKKFIERNLVDTRYASRVVLNALQEHFRAHKTDTKVSVVRGQFTSQLRRHWGIEKTRDTYHHHAVDALIIAASSQLNLWKKQKNTLVNYSENQLLDIETGELISDDEYKESVFKAPYQHFVDTLKSKEFEDSILFSYQVDSKFNRKISDATIYATRQAKVGKDKKDETYVLGKIKDIYSQTGYDAFIKIYQKDKSKFLMYRHDPQTFEKVIEPILENYPNKEMNEKGKEVPCNPFLKYKEEHGDYIRKYSKKGNGPEIKSLKYYDSKLGNHIDITPKDSNNKVVLQSVSPWRADVYFNKTTGKYEILGLKYADLQFEKGTGTYKISQEKYNVIKKKEGVDSDSEFKFTLYKNDLLLIKDTETKEQQLFRFLSRTKPNVKHYVELKPYDKQKFEGNESLINVLGAVAKGGQCQKGINKPNISIYKVRTDVLGNQHIIKNEGDKPKLDF

SEQ ID NO: 599 - protein, 1084 aa, Subdoligranulum sp.
  Subdoligranulum sp. 4_3_54A2FAA
MKNTLYGIGLDIGVASVGWAVVGLNGTGEPVGLHRLGVRIFDKAEQPKTGESLAAPRRMARGMRRRLRRKALRRADVYALLERSGLSTREELAQMFEAGGLEDIYALRTRALDEPVGKAEFSRILLHLAQRRGFKSNRRTASDGEDGRLLAAVNENRRRMAQGGWRTVGEMLYRHEAFALHKRNKADDYLSTVGRDMVAEEASILFERQRAMGCSWAAPELQAEYLSILLRQRSFDEGPGGNSPYGGNQVEKMVGRCTFEPDEPRAAKAAYSFEYFSLLQKLNHIRLAENGETRPLTQPQRQQLLSLAHKTPDISLARIRKELALPETVQFNGVRCRANETLEESEKKEKFACLPAYHKMRKALDGVVKGRISSLSISQRDAAATALSLYKNEDTLRAKLTEAGFQAPEIDALAGLTGFSKFGHLSLKACRKLIPHLEQGLTYDQACTAAGYDFKGHGAGERAFTLPAAAPEMEQITSPVVRRAVAQTIKVVNGIIREMDASPAWVRIELARELSKTFGERQEMDRSMRENAAQNERLMQELRDTFHLLSPTGQDLVKYRLWKEQDGVCAYSLRRLDVERLFEPGYVDVDHIVPYSLSFDDRRSNKVLVLSSENRQKGNRLPLQYLQGKRREDFIVWTNSSVHDYRKRQNLLREKLSGDEAEGFRQRNLQDTQHMARFLYNYISDHLAFAQSEALGKKRVFAVSGAVTSHLRKRWGLSKVRADGDLHHALDAAVVACTTDGMIRRISGYYGHIEGEYLQDADGAGSQHARTKERFPAPWPRFRDELIVRLSEQPAEPLLDINPEFYCEYGTEHIRPVFVSRMPRRKVTGPGHKETIKGAAAADEGLLTVRKALTELKLDKDGEIKDYYMPSSDTLLYEALKAQLRRFGGDGKKAFAEPFYKPKADGTPGPLVRKVKTTEKATLTVPVHGGAASNDTMVRVDVFLVPGDGYYWVPVYTADTLKPELPNRAVVQGKPYSEWKEMREEDFIFSLYPNDLVYVEHKSGLKFTLQNADSTLEKTRTQTSAFAYFVSGSISTASITIRTHDNAYGIPSLGVKTLKTFHKYQVDVLGNVFPVHKETRQKFR

SEQ ID NO: 600 - protein, 1422 aa, Sutterella wadsworthensis
  Sutterella wadsworthensis 3_1_45B
MTQSERRFSCSIGIDMGAKYTGVFYALFDREELPTNLNSKAMTLVMPETGPRYVQAQRTAVRHRLRGQKRYTLARKLAFLVVDDMIKKQEKRLTDEEWKRGREALSGLLKRRGYSRPNADGEDLTPLENVRADVFAAHPAFSTYFSEVRSLAEQWEEFTANISNVEKFLGDPNIPADKEFIEFAVAEGLIDKTEKKAYQSALSTLRANANVLTGLRQMGHKPRSEYFKAIEADLKKDSRLAKINEAFGGAERLARLLGNLSNLQLRAERWYFNAPDIMKDRGWEPDRFKKTLVRAFKFFHPAKDQNKQHLELIKQIENSEDIIETLCTLDPNRTIPPYEDQNNRRPPLDQTLLLSPEKLTRQYGEIWKTWSARLTSAEPTLAPAAEILERSTDRKSRVAVNGHEPLPTLAYQLSYALQRAFDRSKALDPYALRALAAGSKSNKLTSARTALENCIGGQNVKTFLDCARRYYREADDAKVGLWFDNADGLLERSDLHPPMKKKILPLLVANILQTDETTGQKFLDEIWRKQIKGRETVASRCARIETVRKSFGGGFNIAYNTAQYREVNKLPRNAQDKELLTIRDRVAETADFIAANLGLSDEQKRKFANPFSLAQFYTLIETEVSGFSATTLAVHLENAWRMTIKDAVINGETVRAAQCSRLPAETARPFDGLVRRLVDRQAWEIAKRVSTDIQSKVDFSNGIVDVSIFVEENKFEFSASVADLKKNKRVKDKMLSEAEKLETRWLIKNERIKKASRGTCPYTGDRLAEGGEIDHILPRSLIKDARGIVFNAEPNLIYASSRGNQLKKNQRYSLSDLKANYRNEIFKTSNIAAITAEIEDVVTKLQQTHRLKFFDLLNEHEQDCVRHALFLDDGSEARDAVLELLATQRRTRVNGTQIWMIKNLANKIREELQNWCKTTNNRLHFQAAATNVSDAKNLRLKLAQNQPDFEKPDIQPIASHSIDALCSFAVGSADAERDQNGFDYLDGKTVLGLYPQSCEVIHLQAKPQEEKSHFDSVAIFKEGIYAEQFLPIFTLNEKIWIGYETLNAKGERCGAIEVSGKQPKELLEMLAPFFNKPVGDLSAHATYRILKKPAYEFLAKAALQPLSAEEKRLAALLDALRYCTSRKSLMSLFMAANGKSLKKREDVLKPKLFQLKVELKGEKSFKLNGSLTLPVKQDWLRICDSPELADAFGKPCSADELTSKLARIWKRPVMRDLAHAPVRREFSLPAIDNPSGGFRIRRTNLFGNELYQVHAINAKKYRGFASAGSNVDWSKGILFNELQHENLTECGGRFITSADVTPMSEWRKVVAEDNLSIWIAPGTEGRRYVRVETTFIQASHWFEQSVENWAITSPLSLPASFKVDKPAEFQKAVGTELSELLGQPRSEIFIENVGNAKHIRFWYIVVSSNKKMNESYNNVSKS

SEQ ID NO: 601 - protein, 1049 aa, Tistrella mobilis
MINERLTFGIDLGIGSCGWAVLRHADAAGEPGVIEGLGSWCFDVPETSKERIPTNQVRRSNRLLRRVIRRRRNRMAEIRRLFHAQGLLPSADEDALKRPRLDPWELRARGLDQCLSAEEFAVALGHIARHRGFRSSAKRKAANTSGEDSKMLSALLVTRERTARYRTVGEMFARDPEYSARRRNRDGIFDRTVARDDLIHEVGKLFEAQRARGSAFASPDLEADFNAIAFRQAEMQDSERLVGNCPFERDEKRAARWAPSFERFRLLTRLINLRIATAEGERRFTPEDLARVSAELGATAKLPVSRVRALIGLLPDERFTTIRVEDEDRDIVARTGEAAPGTWRLRKTLGEALWAEMQARPDQLDAIAHVLSFFEATAKIRSELDRLGLPAAVIEALDRGLEDGAFAKFKGAGHISAKACRNLLPHLQQGHRYDQACRLAGYDHAASTLSHTAQVVSKAGFNALVTELGESIANPIARKALTEGLKQIRAMCARWGLPGAIHIELAREVGNSIEKRRELESQRETTTKRRQTERDEIRGLLALEDVDDDTLLRYRLWKEQGGKCLYTGKDIHVRQLIATDNSVQVDHILPWSRFGDDSFNNKTLCLASANQRKRGQTPWEWFSLTGTPEAWEVFASRVETSKDLRGFKKRNLLLKNADEVAQRFRSRNLNDTRYAARLLAEAAKLFYPAGDRQEKDGRRRVLTRPGPLTAALRHAWGLESLKKADGKRVSDDRHHALDALAVAAISEREVQRLTRSFQEWEQQGLARPLRHVAPPWPGFRGDVLAAYAQAFVARPERRRARGKGHDASIRQVVGEGPEAQVFERRGLADLKEADLDRVKDPERNQAIIEAVRAWILAGRPADAPPRSPRGDVIVKLRTAPAKKIKPAVPVRGGTADRGDMVRIDVFTRPNRKGRDEWYLVPIYPHQVMNRKAWPHPPMRSVVAYKDEAGWTEIGAEHSFRFSLYPRSYVQLVKSNGDVIEGYLVSMDRSTGAFRVFVHNNPAEMAKGIGAKTLLNLRKFNVDRFGVRTEVKSEVRTWHGEVCTSPVPPD

SEQ ID NO: 602 - protein, 1395 aa, Treponema denticola
  Treponema denticola AL-2
MKKEIKDYFLGLDVGTGSVGWAVTDTDYKLLKANRKDLWGMRCFETAETAEVRRLHRGARRRIERRKKRIKLLQELFSQEIAKIDEGFFQRMKESPFYAEDKTILQENALFNDKDFTDKTYHKAYPTINHLIKAWIENKVKPDPRLLYLACHNIIKKRGHFLFEGDFDSENQFDTSIQALFEYLREDMEVDIDADSQKVKEILKDSSLKNSEKQSRLNKILGLKPSDKQKKAITNLISGNKINFADLYDNPDLKDAEKNSISFSKDDFDALSDDLASILGDSFELLLKAKAVYNCSVLSKVIGDEQYLSFAKVKIYEKHKTDLTKLKAVIKKHFPNNYKKVFGYNQDNESKNNYSGYVGVCKTKNKKLVINNSVNQEDFYKFLKPILSAKSEIKEVNDILAEIETGNFLPKQISKSNAEIPYQLRKMELEKILSNAEKHFSFLKQKDEKGLSHSEKIIMLLTFKIPYYIGPINDNHKKSFPDRCWVVKKEKSPSGKTTPWNFFDHIDKEKTAEEFITSRTNFCTYLIGESVLPKNSLLYSEYTVLNEINNLQIIIDGKNICDTKLKQKIYEDLFKKYKKITQKQISTFIKHEGICNKTDEVIILGIDKECTSSLKSYIELKNIFGKQVDEISTKNMLEEIIRWATIYDEGEGKTILKTKIKAEYGKYCSDEQIKKILNLKFSGWGRLSRKFLETVTSEMPGFSEPVNIITAMRETQNNLMELLSSEFKFTENIKKINSGFEDAEKQFSYDGLVKPLFLSPSVKKMLWQTLKLVKEISHITQAPPKKIFIEMAKGAELEPARTKTRLKILQDLYSSCKNDADAFSSEIQYLSGKIENEDNLRLRSDKLYLYYTQLGKCMYCGKPIEIGHVFDTSNYDIDHIYPQSKIKDDSISNRVLVCSSCNKNKEDKYPLKSEIQSKQRGFWNFLQRNNFISLEKLNRLTRTTPISDDETAKFIARQLVETRQATKVAAKVLEKMFPETKIVYSKAETVSMFRNKFDIIKCREINDFHHAHDAYLNIVVGNVYNTKFTNNPWNFIKEKRDNPKIADTYNYYKVFDYDVKRNNITAWEKGKTIITVKDMLKRNTPIYTRQAACKKGGLFDQTIMKKGLGQHPLKKEGPFSNISKYGGYNKVSAAYYTLIEYEEKGNKIRSLETIPLYLVKDIQKDQDVLKSYLTDLLGKKEFKILVPKIKINSLLKINGFPCHITGKTNDSFLLRPAVQFCCSNDEVLYFKKIIRFSEIRSQREKIGKTISPYEDLSFRSYIKENLCKKTKNDEIGEKEFYDLLQKKNLEIYDMLLTKHKDTIYKKRPNSATIDILVKGKEKFKSLIIENQFEVILEILKLFSATRNVSELQHIGGSKYSGVAKIGNKISSLDNCILIYQSITGIFEKRIDLLKV

SEQ ID NO: 603 - protein, 1395 aa, Treponema denticola
  Treponema denticola ASLM
MKKEIKDYFLGLDVGTGSVGWAVTDTDYKLLKANRKDLWGMRCFETAETAEVRRLHRGARRRIERRKKRIKLLQELFSQEIAKIDEGFFQRMKESPLYAEDKTILQENTLFNDKDFTDKTYHKAYPTINHLIKAWIENKVKPDPRLLYLACHNIIKKRGHFLFEGDFDSENQFDTSIQALFEYLREDMEVDIDADSQKVKEILKDSSLKNSEKQSRLNKMLGLKPSDKQKKAITNLISGNKINFADLYDNPDLKDAEKNSISFSKDDFDALSDDLASILGDSFELLLKAKAVYNCSVLSKVIGDEQYLSFAKVKIYEKHKTDLTKLKNVIKKHFPKDYKKVFGYNKNEKNNNNYSGYVGVCKTKSKKLIINNSVNQEDFYKFLKTILSAKSEIKEVNDILTEIETGTFLPKQISKSNAEIPYQLRKMELEKILSNAEKHFSFLKQKDEKGLSHSEKIIMLLTFKIPYYIGPINDNHKKSFPDRCWVVKKEKSPSGKTTPWNFFDHIDKEKTAEEFITSRTNFCTYLIGESVLPKNSLLYSEYTVLNEINNLQIIIDGKNICDTKLKQKIYEELFKKYKKITQKQISTFIKHEGICNKTDEVIILGIDKECTSSLKSYIELKNIFGKQVDEISTKNMLEEIIRWATIYDEGEGKTILKTKIKAEYGKYCSDEQIKKILNLKFSGWGRLSRKFLETVTSEMPGFSEPVNIITAMRETQNNLMELLSSEFKFTENIKKINSGFEDVEKQFSYDGLVKPLFLSPSVKKMLWQTLKLVKEISHITQAPPKKIFIEMAKGAELDPVRTKTRLKILQDLYNNCKNDADAFSSEIKDLSGKIENEDNLRLRSDKLYLYYTQLGKCMYCGKPIEIGHVFDTSNYDIDHIYPQSKIKDDSISNRVLVCSSCNKNKEDKYPLKAEIQSKQRGFWNFLQRNNFISLEKFNRLTRATPISDDETAKFIARQLVETRQATKVAARVLEKMFPETKIVYSKAETVSMFRNKFDIVKCREINDFHHAHDAYLNIVVGNVYNTKFTNNLWNFIKEKRDNPKIADTYNYYKVFDYDVKRNNITAWEKGKTIITVKDMLKRNTPIYTRQAACKKGGLFDQTIMKKGLGQHPLKKEGPFSNISKYGGYNKVSAAYYTLIEYEEKGNKIRSLETIPLYLVKDIQKDQDVLKSYLTDLLGKKEFKILVPKIKINSLLKINGFPCHITGKTNDSFLLRPAVQFCCSNDEVLYFKKIIRFSEIRSQREKIGKTISPYEDLSFRSYIKENLCKKTKNDEIGEKEFYDLLQKKNLEIYDMLLTKHKDTIYKKRPNSATIDILVKGKEKFKSLIIENQFEVILEILKLFSATRNVSDLQHIGGSKYSGVAKIGNKISSLDNCILIYQSITGIFEKRIDLLKV

SEQ ID NO: 604 - protein, 1395 aa, Treponema denticola
  Treponema denticola ATCC 35405
MKKEIKDYFLGLDVGTGSVGWAVTDTDYKLLKANRKDLWGMRCFETAETAEVRRLHRGARRRIERRKKRIKLLQELFSQEIAKTDEGFFQRMKESPFYAEDKTILQENTLFNDKDFADKTYHKAYPTINHLIKAWIENKVKPDPRLLYLACHNIIKKRGHFLFEGDFDSENQFDTSIQALFEYLREDMEVDIDADSQKVKEILKDSSLKNSEKQSRLNKILGLKPSDKQKKAITNLISGNKINFADLYDNPDLKDAEKNSISFSKDDFDALSDDLASILGDSFELLLKAKAVYNCSVLSKVIGDEQYLSFAKVKIYEKHKTDLTKLKNVIKKHFPKDYKKVFGYNKNEKNNNNYSGYVGVCKTKSKKLIINNSVNQEDFYKFLKTILSAKSEIKEVNDILTEIETGTFLPKQISKSNAEIPYQLRKMELEKILSNAEKHFSFLKQKDEKGLSHSEKIIMLLTFKIPYYIGPINDNHKKFFPDRCWVVKKEKSPSGKTTPWNFFDHIDKEKTAEAFITSRTNFCTYLVGESVLPKSSLLYSEYTVLNEINNLQIIIDGKNICDIKLKQKIYEDLFKKYKKITQKQISTFIKHEGICNKTDEVIILGIDKECTSSLKSYIELKNIFGKQVDEISTKNMLEEIIRWATIYDEGEGKTILKTKIKAEYGKYCSDEQIKKILNLKFSGWGRLSRKFLETVTSEMPGFSEPVNIITAMRETQNNLMELLSSEFTFTENIKKINSGFEDAEKQFSYDGLVKPLFLSPSVKKMLWQTLKLVKEISHITQAPPKKIFIEMAKGAELEPARTKTRLKILQDLYNNCKNDADAFSSEIKDLSGKIENEDNLRLRSDKLYLYYTQLGKCMYCGKPIEIGHVFDTSNYDIDHIYPQSKIKDDSISNRVLVCSSCNKNKEDKYPLKSEIQSKQRGFWNFLQRNNFISLEKLNRLTRATPISDDETAKFIARQLVETRQATKVAAKVLEKMFPETKIVYSKAETVSMFRNKFDIVKCREINDFHHAHDAYLNIVVGNVYNTKFTNNPWNFIKEKRDNPKIADTYNYYKVFDYDVKRNNITAWEKGKTIITVKDMLKRNTPIYTRQAACKKGELFNQTIMKKGLGQHPLKKEGPFSNISKYGGYNKVSAAYYTLIEYEEKGNKIRSLETIPLYLVKDIQKDQDVLKSYLTDLLGKKEFKILVPKIKINSLLKINGFPCHITGKTNDSFLLRPAVQFCCSNNEVLYFKKIIRFSEIRSQREKIGKTISPYEDLSFRSYIKENLWKKTKNDEIGEKEFYDLLQKKNLEIYDMLLTKHKDTIYKKRPNSATIDILVKGKEKFKSLIIENQFEVILEILKLFSATRNVSDLQHIGGSKYSGVAKIGNKISSLDNCILIYQSITGIFEKRIDLLKV

SEQ ID NO: 605 - protein, 1395 aa, Treponema denticola
  Treponema denticola H1-T
MKKEIKDYFLGLDVGTGSVGWAVTDTDYKLLKANRKDLWGMRCFETAETAEVRRLHRGARRRIERRKKRIKLLQELFSQEIAKIDEGFFQRMKESPFYAEDKTILQENALFNDKDFTDKTYHKAYPTINHLIKAWIENKVKPDPRLLYLACHNIIKKRGHFLFEGDFDSENQFDTSIQALFEYLREDMEVDIDADSQKVKEILKDSSLKNSEKQSRLNKILGLKPSDKQKKAITNLISGNKINFADLYDNPDLKDAEKNSISFSKDDFDALSDDLASILGDSFELLLKAKAVYNCSVLSKVIGDEQYLSFAKVKIYEKHKTDLTKLKAVIKKHFPNNYKKVFGYNQDNESKNNYSGYVGVCKTKNKKLVINNSVNQEDFYKFLKPILSAKSEIKEVNDILAEIETGNFLPKQISKSNAEIPYQLRKMELEKILSNAEKHFSFLKQKDEKGLSHSEKIIMLLTFKIPYYIGPINDNHKKSFPDRCWVVKKEKSPSGKTTPWNFFDHIDKEKTAEEFITSRTNFCTYLIGESVLPKNSLLYSEYTVLNEINNLQIIIDGKNICDTKLKQKIYEDLFKKYKKITQKQISTFIKHEGICNKTDEVIILGIDKECTSSLKSYIELKNIFGKQVDEISTKNMLEEIIRWATIYDEGEGKTILKTKIKAEYGKYCSDEQIKKILNLKFSGWGRLSRKFLETVTSEMPGFSEPVNIITAMRETQNNLMELLSSEFKFTENIKKINSGFEDAEKQFSYDGLVKPLFLSPSVKKMLWQTLKLVKEISHITQAPPKKIFIEMAKGAELEPARTKTRLKILQDLYSSCKNDADAFSSEIQYLSGKIENEDNLRLRSDKLYLYYTQLGKCMYCGKPIEIGHVFDTSNYDIDHIYPQSKIKDDSISNRVLVCSSCNKNKEDKYPLKSEIQSKQRGFWNFLQRNNFISLEKLNRLTRTTPISDDETAKFIARQLVETRQATKVAAKVLEKMFPETKIVYSKAETVSMFRNKFDIIKCREINDFHHAHDAYLNIVVGNVYNTKFTNNPWNFIKEKRDNPKIADTYNYYKVFDYDVKRNNITAWEKGKTIITVKDMLKRNTPIYTRQAACKKGELFNQTIMKKGLGQHPLKKEGPFSNISKYGGYNKVSAAYYTLIEYEEKVNKIRSLETIPLYLVKDIQKDQDVLKSYLTDLLGKKEIKILVPKIKINSLLKINGFPCHITGKTGDSFVLRPAVQFCCSNDEVLYFKKIIRFNEIRSQREKMGKTISPYEDLSFRSYIKENLCKKTKADEIGEKEFYDLLQKKNLEIYDMLLTKHKDTIYNKRPNSTTLGMLTKGRYEFINLKPKDQIIVMLEILKLFCTTREAIDLGLIKGKPAAGVATLGKKISNLDNCILIYQSITGIFEKRIDLLKV

SEQ ID NO: 606 - protein, 1395 aa, Treponema denticola
  Treponema denticola H-22
MKKEIKDYFLGLDVGTGSVGWAVTDTDYKLLKANRKDLWGMRCFETAETAEVRRLHRGARRRIERRKKRIKLLQELFSQEIAKIDEGFFQRMKESPFYAEDKTILQENTLFNDKDFTDKTYHKAYPTINHLIKAWIENKVKPDPRLLYLACHNIIKKRGHFLFEGDFDSENQFDTSIQALFEYLREDMEVDIDADSQKVKEILKDSSLKNSEKQSRLNKILGLKPSDKQKKAITNLISGNKINFADLYDNPDLKDAEKNSISFSKDDFDALSDDLASILGDSFELLLKAKAVYNCSVLSKVIGDEQYLSFAKVKIYEKHKTDLTKLKNVIKKHFPKDYKKVFGYNKNEKNNNNYSGYVGVCKTKSKKLIINNSVNQEDFYKFLKTILSAKSEIKEVNDILTEIETGTFLPKQISKSNAEIPYQLRKMELEKILSNAEKHFSFLKQKDEKGLSHSEKIIMLLTFKIPYYIGPINDNHKKSFPDRCWVIKKEKSPSGKTTPWNFFDHIDKDKTAEAFITSRTNFCTYLVGESVLPKSSLLYSEYTVLNEINNLQIIIDGKNICDIKLKQKIYEELFKKYKKITQKQISTFIKHEGICNKTDEVIILGIDKECTSSLKSYIELKNIFGKQVDEISTKNMLEEIIRWATIYDEGEGKTILKTKIKAEYGKYCSDEQIKKILNLKFSGWGRLSRKFLETVTSEMPGFSEPVNIITAMRETQNNLMELLSSEFKFTENIKKINSGFEDAEKQFSYNGLVKPLFLSPSVKKMLWQTLKLVKEISHITQAPPKKIFIEMAKGAELEPARTKTRLKILQDLYNNCKNDADAFSSEIKDLSGKIENEDNLRLRSDKLYLYYTQLGKCMYCGKPIEIGHVFDTSNYDIDHIYPQSKIKDDSISNRVLVCSSCNKNKEDKYPLKSEIQSKQRGFWNFLQRNNFISLEKLNRLTRTTPISDDETAKFIARQLVETRQATKVAAKVLEKMFPETKIVYSKAETVSMFRNKFDIIKCREINDFHHAHDAYLNIVVGNVYNTKFTNNPWNFIKEKRDNPKIADTYNYYKVFDYDVKRNNITAWEKGKTIITVKDMLKRNTPIYTRQAACKKGGLFDQTIMKKGLGQHPLKKEGAFSNISKYGGYNKVSAAYYTLIEYEEKGNKIRSLETIPLYLVKDIQKDQDVLKSYLTDLLGKKEIKILVPKIKINSLLKINGFPCHITGKTGDSFVLRPAVQFCCSNDEVLYFKKIIRFNEIRSQREKMGKTISPYEDLSFRSYIKENLCKKTKADEIGEKEFYDLLQKKNLEIYDMLLTKHKDTIYNKRPNSTTLGMLTKGRYEFINLKPKDQIIVMLEILKLFCTTREAIDLGLIKGKPAAGVATLGKKISNPDNCILIYQSITGIFEKRIDLLKV

SEQ ID NO: 607 - protein, 1395 aa, Treponema denticola
  Treponema denticola OTK
MKKEIKDYFLGLDVGTGSVGWAVTDTDYKLLKANRKDLWGMRCFETAETAEVRRLHRGARRRIERRKKRIKLLQELFSQEIAKIDEGFFQRMKESPLYAEDKTILQENTLFNDKDFTDKTYHKAYPTINHLIKAWIENKVKPDPRLLYLACHNIIKKRGHFLFEGDFDSENQFDTSIQALFEYLREDMELDIDADSQKVKEILKDSSLKNSEKQSRLNKMLGLKPSDKQKKAITNLISGNKINFADLYDNPDLKDAEKNSISFSKDDFDALSDDLASILGDSFELLLKAKAVYNCSVLSKVIGDEQYLSFAKVKIYEKHKTDLTKLKNVIKKHFPKDYKKVFGYNKNEKNNNNYSAYVGVCKITHKKLVIKNSASQEDFYKFLKTILSAKSEIKEVNDILTEIETGTFLPKQISKSNAEIPYQLRKMELEKILSNAEKHFSFLKQKDEKGLSHSEKIIMLLTFKIPYYIGPINDNHKKSFPDRCWVVKKEKSPSGKTTPWNFFDHIDKEKTAEEFITSRTNFCTYLIGESVLPKSSLLYSEYTVLNEINNLQIIIDGKNICDIKLKQKIYEELFKKYKKITQKQISTFIKHEGICNKTDEVIILGIDKECTSSLKSYIELKNIFGKQVDEISTKNMLEEIIRWATIYDEGEGKTILKTKIKAEYGKYCSDEQIKKILNLKFSGWGRLSRKFLETVTSEMPGFSEPVNIITAMRETQNNLMELLSSEFKFTENIKKINSGFEDAEKQFSYNGLVKPLFLSPSVKKMLWQTLKLVKEISHITQAPPKKIFIEMAKGAELEPARTKTRLKILQDLYSSCKNDADAFSSEIQYLSGKIENEDNLRLRSDKLYLYYTQLGKCMYCGKPIEIGHVFDTSNYDIDHIYPQSKIKDDSISNRVLVCSSCNKNKEDKYPLKAEIQSKQRGFWNFLQRNNFISLEKLNRLTRTSPISDDETAKFIARQLVETRQATKVAAKVLEKMFPETKIVYSKAETVSMFRNKFDIIKCREINDFHHAHDAYLNIVVGNVYNTKFTNNPWNFIKEKRDNPKIADTYNYYKVFDYDVKRNNITAWEKGKTIITVKDMLKRNTPIYTRQAACKKGELFNQTIMKKGLGQHPLKKEGPLSNISKYGGYNKVSAAYYTLIEYEEKGSKIRSLETIPLYLVKDIQKNKDGLKSYLTDQIGKKEIKILIPKIKINSLLKINGFPCHITGKMGEAFVLRPAVQFCCSNDEALYFKKIIRFNEIRKQREKMGKTISPYEDLSFRSYIKDNLCKKTKADEIEEKEFYDLLQKKNLEIYDMLLTKHKDTIYKKRPNSATIDILVKGKEKFKSLIIENQFEVILEILKLFSATRNVSDLQHIGGSKNAGNARVGNKISSLDNCILIYQSITGIFEKRIDLLKI

SEQ ID NO: 608 - protein, 1395 aa, Treponema denticola
  Treponema denticola SP37
MKKEIKDYFLGLDVGTGSVGWAVTDTDYKLLKANRKDLWGMRCFETAETAEVRRLHRGARRRIERRKKRIKLLQELFSQEIAKTDEGFFQRMKESPFYAEDKTILQENALFNDRDFTDKTYHKAYPTINHLIKAWIENKVKPDPRLLYLACHNIIKKRGHFLFEGDFDSENQFDTSIQALFEYLREDMEVDIDADSQKVKEILKDSSLKNSEKQSRLNKMLGLKPSDKQKKAITNLISGNKINFADLYDNPDLKDAEKNSISFSKDDFDALSDDLASILGDSFELLLKAKAVYNCSVLSKVIGDEQYLSFAKVKIYEKHKTDLTKLKNVIKKHFPNDYKKVFGYNKNEKNNNNYSAYVGVCKTKSKKLVINNTVNQEDFYKFLKPILLAKSEIKEVNDILTEIETGTFLPKQISKSNAEIPYQLRKMELEKILSNAEKHFSFLKQKDEKGLSHSEKIIMLLTFKIPYYIGPINDNHKKSFPDRCWVIKKEKSPSGKTTPWNFFDHIDKDKTAEAFITSRTNFCTYLVGESVLPKNSLLYSEYTVLNEINNLQIIIDGKNICDIKLKQKIYEELFKKYKKITQKQISTFIKHEGICNKTDEVIILGIDKECTSSLKSYIELKNIFGKQVDEISTKNMLEEIIRWATIYDEGEGKTILKTKIKAEYGKYCSDEQIKKILNLKFSGWGRLSRKFLETVTSEMPGFSEPVNIITAMRETQNNLMELLSSEFKFTENIKKINSGFEDVEKQFSYDSLVKPLFLSPSVKKMLWQTLKLVKEISHITQAPPKKIFIEMAKGAELDPVRTKTRLKILQDLYNNCKNDADAFSSEIKDLSGKIENEDNLRLRSDKLYLYYTQLGKCMYCGKPIEIGHVFDTSNYDIDHIYPQSKIKDDSISNRVLVCSSCNKNKEDKYPLKAEIQSKQRGFWNFLQRNNFISLEKLNRLTRTSPISDDETAKFIARQLVETRQATKVAAKVLEKMFPETKIVYSKAETVSMFRNKFDIIKCREINDFHHAHDAYLNIVVGNVYNTKFTNNPWNFIKEKRDNPKIADTYNYYKVFDYDVKRNNITAWEKGKTIITVKDMLKRNTPIYTRQAACKKGELFNQTIMKKGLGQHPLKKEGPLSNISKYGGYNKVSAAYYTLIEYEEKGSKIRSLETIPLYLVKDIQKNKDGLKSYLTDQIGKKEIKILIPKIKINSLLKINGFPCHITGKMGEAFVLRPAVQFCCSNDEALYFKKIIRFNEIRKQREKMGKTISPYEDLSFRSYIKDNLCKKTKADEIEEKEFYDLLQKKNLEIYDMLLTKHKDTIYKKRPNSATIDILVKGKEKFKSLIIENQFEVILEILKLFSATRNVSDLQHIGGSKNAGNARVGNKISSLDNCILIYQSITGIFEKRIDLLKI

SEQ ID NO: 609 - protein, 1062 aa, Treponema sp.
  Treponema sp. JC4
MIMKLEKWRLGLDLGTNSIGWSVFSLDKDNSVQDLIDMGVRIFSDGRDPKTKEPLAVARRTARSQRKLIYRRKLRRKQVFKFLQEQGLFPKTKEECMTLKSLNPYELRIKALDEKLEPYELGRALFNLAVRRGFKSNRKDGSREEVSEKKSPDEIKTQADMQTHLEKAIKENGCRTITEFLYKNQGENGGIRFAPGRMTYYPTRKMYEEEFNLIRSKQEKYYPQVDWDDIYKAIFYQRPLKPQQRGYCIYENDKERTFKAMPCSQKLRILQDIGNLAYYEGGSKKRVELNDNQDKVLYELLNSKDKVTFDQMRKALCLADSNSFNLEENRDFLIGNPTAVKMRSKNRFGKLWDEIPLEEQDLIIETIITADEDDAVYEVIKKYDLTQEQRDFIVKNTILQSGTSMLCKEVSEKLVKRLEEIADLKYHEAVESLGYKFADQTVEKYDLLPYYGKVLPGSTMEIDLSAPETNPEKHYGKISNPTVHVALNQTRVVVNALIKEYGKPSQIAIELSRDLKNNVEKKAEIARKQNQRAKENIAINDTISALYHTAFPGKSFYPNRNDRMKYRLWSELGLGNKCIYCGKGISGAELFTKEIEIEHILPFSRTLLDAESNLTVAHSSCNAFKAERSPFEAFGTNPSGYSWQEIIQRANQLKNTSKKNKFSPNAMDSFEKDSSFIARQLSDNQYIAKAALRYLKCLVENPSDVWTTNGSMTKLLRDKWEMDSILCRKFTEKEVALLGLKPEQIGNYKKNRFDHRHHAIDAVVIGLTDRSMVQKLATKNSHKGNRIEIPEFPILRSDLIEKVKNIVVSFKPDHGAEGKLSKETLLGKIKLHGKETFVCRENIVSLSEKNLDDIVDEKIKSKVKDYVAKHKGQKIEAVLSDFSKENGIKKVRCVNRVQTPIEITSGKISRYLSPEDYFAAVIWEIPGEKKTFKAQYIRRNEVEKNSKGLNVVKPAVLENGKPHPAAKQVCLLHKDDYLEFSDKGKMYFCRIAGYAATNNKLDIRPVYAVSYCADWINSTNETMLTGYWKPTPTQNWVSVNVLFDKQKARLVTVSPIGRVFRK

SEQ ID NO: 610 - protein, 1011 aa, Unknown
  Description of Unknown: uncultured delta proteobacterium HF0070_07E19 polypeptide
MSSKAIDSLEQLDLFKPQEYTLGLDLGIKSIGWAILSGERIANAGVYLFETAEELNSTGNKLISKAAERGRKRRIRRMLDRKARRGRHIRYLLEREGLPTDELEEVVVHQSNRTLWDVRAEAVERKLTKQELAAVLFHLVRHRGYFPNTKKLPPDDESDSADEEQGKINRATSRLREELKASDCKTIGQFLAQNRDRQRNREGDYSNLMARKLVFEEALQILAFQRKQGHELSKDFEKTYLDVLMGQRSGRSPKLGNCSLIPSELRAPSSAPSTEWFKFLQNLGNLQISNAYREEWSIDAPRRAQIIDACSQRSTSSYWQIRRDFQIPDEYRFNLVNYERRDPDVDLQEYLQQQERKTLANFRNWKQLEKIIGTGHPIQTLDEAARLITLIKDDEKLSDQLADLLPEASDKAITQLCELDFTTAAKISLEAMYRILPHMNQGMGFFDACQQESLPEIGVPPAGDRVPPFDEMYNPVVNRVLSQSRKLINAVIDEYGMPAKIRVELARDLGKGRELRERIKLDQLDKSKQNDQRAEDFRAEFQQAPRGDQSLRYRLWKEQNCTCPYSGRMIPVNSVLSEDTQIDHILPISQSFDNSLSNKVLCFTEENAQKSNRTPFEYLDAADFQRLEAISGNWPEAKRNKLLHKSFGKVAEEWKSRALNDTRYLTSALADHLRHHLPDSKIQTVNGRITGYLRKQWGLEKDRDKHTHHAVDAIVVACTTPAIVQQVTLYHQDIRRYKKLGEKRPTPWPETFRQDVLDVEEEIFITRQPKKVSGGIQTKDTLRKHRSKPDRQRVALTKVKLADLERLVEKDASNRNLYEHLKQCLEESGDQPTKAFKAPFYMPSGPEAKQRPILSKVTLLREKPEPPKQLTELSGGRRYDSMAQGRLDIYRYKPGGKRKDEYRVVLQRMIDLMRGEENVHVFQKGVPYDQGPEIEQNYTFLFSLYFDDLVEFQRSADSEVIRGYYRTFNIANGQLKISTYLEGRQDFDFFGANRLAHFAKVQVNLLGKVIK

SEQ ID NO: 611 - protein, 1032 aa, Unknown
  Description of Unknown: uncultured Termite group 1 bacterium phylotype Rs-D17 polypeptide
MLYHIANHRGTDSVRSFLEYDDDKIKENTLTAKIAKETKKVIDAKKYRTFGEYLYKGKIEKFQQNIRKKVSNRKTPANKNKEFAVTRDVIIKETEKILASQKQYYTYILTDEYIKKIKDAISYQTEKLIPESGYCPYFKDEKRLPRSHKLNEYRRMYEALNNAKYFDPVLDENTGEILSYQEKEFSREEKKILFDEVLLKGMELTESGAKKLLYHLPDGCEVQLQGRDKTTQKIKGYALVDLEASPFWLRLSQQQQDEFLYDWNSLPLEKLKPKLTNYYSLTESEVDETFQEIKLPSNYASVGKKAMEILLTYIKDGCSYTEALEKAVSEGKLKVDKQTMIYDSLPYYGKILKESTQKLIGKAFSKQFADRNYKEPDTNKNEREFGKIANPVVHQTLNELRKLINEIITVFGKKPLEIGLETTRELKKSKKNREYLSKQQNKNEYARNRIYKEYIEPHLSQIKSRQENPSKYISKFELLEEQNFICPFCSEKITPDDIINSKVDVEHIFPIEESEDITKNNLVIAHNECNADKGKKSPFDAFGDKTSGKYRWNCILHNAQKNLPHKVWRFYQGSLEKFLENKPMSRRFGTDNSYISKIAARYLACLFNDPYHSEIFCIKSSLIAQLRIAWDLNSIMVPLVKNILSEKELEEFKISKNKKIRIDNRHHALDAIVIAYANRGYHNFLNRIHAKEYKINYREKSWLSKILLPPLNRDLEDFKISVKDSIEKANVSIKHDHNTNGSLVKATAYKVYYSGAGEYIITTSKNVEEISFKEKEDPKDTLYRALCKFECRDIDIKDEKLIKKLKYNSTLYKKVQNNLSKAKQELEQDNKKTEEEGKKSQKITEVRIYKKACSLVKGQYIQCGSRLKDKFFAVKEPTEIKTGLGYDTGDNLFLDLYYDKTGKLCGEIIRKVNFNRNKPNYQKEGYTLFERIYQSDILEVDTSEDRISLKNKTGSAPSDRTFIKVNTFTEVNAYFDGKRDKIQIFFGNLLKSSFKNDSFFISSMQKYNVRKVILTSLGIIKYRSQILKNKEV

SEQ ID NO: 612 - protein, 1398 aa, Veillonella atypica
  Veillonella atypica ACS-134-V-Col7a
METQTSNQLITSHLKDYPKQDYFVGLDIGTNSVGWAVTNTSYELLKFHSHKMWGSRLFEEGESAVTRRGFRSMRRRLERRKLRLKLLEELFADAMAQVDSTFFIRLHESKYHYEDKTTGHSSKHILFIDEDYTDQDYFTEYPTIYHLRKDLMENGTDDIRKLFLAVHHILKYRGNFLYEGATFNSNAFTFEDVLKQALVNITFNCFDTNSAISSISNILMESGKTKSDKAKAIERLVDTYTVFDEVNTPDKPQKEQVKEDKKTLKAFANLVLGLSANLIDLFGSVEDIDDDLKKLQIVGDTYDEKRDELAKVWGDEIHIIDDCKSVYDAIILMSIKEPGLTISQSKVKAFDKHKEDLVILKSLLKLDRNVYNEMFKSDKKGLHNYVHYIKQGRTEETSCSREDFYKYTKKIVEGLADSKDKEYILNEIELQTLLPLQRIKDNGVIPYQLHLEELKVILDKCGPKFPFLHTVSDGFSVTEKLIKMLEFRIPYYVGPLNTHHNIDNGGFSWAVRKQAGRVTPWNFEEKIDREKSAAAFIKNLTNKCTYLFGEDVLPKSSLLYSEFMLLNELNNVRIDGKALAQGVKQHLIDSIFKQDHKKMTKNRIELFLKDNNYITKKHKPEITGLDGEIKNDLTSYRDMVRILGNNFDVSMAEDIITDITIFGESKKMLRQTLRNKFGSQLNDETIKKLSKLRYRDWGRLSKKLLKGIDGCDKAGNGAPKTIIELMRNDSYNLMEILGDKFSFMECIEEENAKLAQGQVVNPHDIIDELALSPAVKRAVWQALRIVDEVAHIKKALPSRIFVEVARTNKSEKKKKDSRQKRLSDLYSAIKKDDVLQSGLQDKEFGALKSGLANYDDAALRSKKLYLYYTQMGRCAYTGNIIDLNQLNTDNYDIDHIYPRSLTKDDSFDNLVLCERTANAKKSDIYPIDNRIQTKQKPFWAFLKHQGLISERKYERLTRIAPLTADDLSGFIARQLVETNQSVKATTTLLRRLYPDIDVVFVKAENVSDFRHNNNFIKVRSLNHHHHAKDAYLNIVVGNVYHEKFTRNFRLFFKKNGANRTYNLAKMFNYDVICTNAQDGKAWDVKTSMNTVKKMMASNDVRVTRRLLEQSGALADATIYKASVAAKAKDGAYIGMKTKYSVFADVTKYGGMTKIKNAYSIIVQYTGKKGEEIKEIVPLPIYLINRNATDIELIDYVKSVIPKAKDISIKYRKLCINQLVKVNGFYYYLGGKTNDKIYIDNAIELVVPHDIATYIKLLDKYDLLRKENKTLKASSITTSIYNINTSTVVSLSNKVGIDVFDYFMSKLRTPLYMKMKGNKVDELSSTGRSKFIKMTLEEQSIYLLEVLNLLTNSKTTFDVKPLGITGSRSTIGVKIHNLDEFKIINESITGLYSNEVTIV

SEQ ID NO: 613 - protein, 1398 aa, Veillonella parvula
  Veillonella parvula ATCC 17745
METQASNQLISSHLKGYPIKDYFVGLDIGTSSVGWAVTNKAYELLKFRSHKMWGSRLFDEGESAVARRGFRSMRRRLERRKLRLKLLEELFADAMAQVDPTFFMRLRESKYHYEDKTTGHSSKHILFIDKNYNDQDYFKEYPTVYHLRSELMKSGTDDIRKLFLAVHHILKYRGNFLYEGATFDSNASTLDDVIKQALENITFNCFDCNSAISSIGQILMEAGKTKSDKAKAIEHLVDTYIATDTVDTSSKTQKDQVKEDKKRLKAFANLVLGLNASLIDLFGSVEELEEDLKKLQITGDTYDDKRDELAKAWSDEIYIIDDCKSVYDAIILLSIKEPGLTISESKVKAFNKHKDDLAILKSLLKSDRSIYNTMFKVDEKGLHNYVHYIKQGRTEETSCNREDFYKYTKKIVEGLSDSKDKEYILSQIELQILLPLQRIKDNGVIPYQLHLEELKAILAKCGPKFPFLNEVADGFSVAEKLIKMLEFRIPYYVGPLNTHHNVDNGGFAWAVRKASGRVTPWNFDDKIDREKSAAAFIKNLTNKCTYLLGEDVLPKSSLLYSEFMLLNELNNVRIDGKPLEKVVKEHLIEAVFKQDHKKMTKNRIEQFLKDNGYISETHKHEITGLDGEIKNDLASYRDMVRILGDGFDRSMAEEIITDITIFGESKKMLRETLRKKFASCLDDEAIKKLTKLRYRDWGRLSQKLLNGIEGCDKAGDGTPETIIILMRNFSYNLMELLGDKFSFMERIQEINAKLTEGQIVNPHDIIDDLALSPAVKRAVWQALRIVDEVAHIKKALPARIFVEVTRSNKNEKKKKDSRQKRLSDLYAAIKKDDVLLNGLNNEIFGELKSSLAKYDDAALRSKKLYLYYTQMGRCAYTGEIIELSLLNTDNYDIDHIYPRSLTKDDSFDNLVLCKRTANAQKSDAYPISEEIQKTQKPFWTFLKQQGLISERKYERLTRITPLTADDLSGFIARQLVETNQSVKAATTLLRRLYPGVDVVFVKAENVTDFRHDNNFIKVRSLNHHHHAKDAYLNIVVGNVYHERFTRNFRAFFKKNGANRTYNLAKMFNYDVNCTNAKDGKAWDVKTSMDTVKKMMDSNDVRVTKRLLEQTGALADATIYKATVAGKAKDGAYIGMKTKSSVFADVSKYGGMTKIKNAYSIIVQYTGKKGEVIKEIVPLPIYLTNRNTTDQDLINYVASIIPQAKDISIIYGKLCINQLVKVNGFYYYLGGKTNSKFCIDNAIQVIVSNEWIPYLKVLEKFNNMRKDNKDLKANVVSTRALDNKHTIEVRIVEEKNIEFFDYLVSKLKMPIYQKMKGNKAAELSEKGYGLFKKMSLEEQSIHLIELLNLLTNQKTTFEVKPLGITASRSTVGSKISNQDEFKVINESITGLYSNEVTIV

SEQ ID NO: 614 - protein, 1395 aa, Veillonella sp.
  Veillonella sp. 6_1_27
METQASNQLISSHLKGYPIKDYFVGLDIGTSSVGWAVTNKAYELLKFRSHKMWGSRLFDEGESAVARRGFRSMRRRLERRKLRLKLLEELFADAMAQVDPTFFMRLRESKYHYEDKTTGHSSKHILFIDKNYTDQDYYKEYPTIYHLRVALMKSGTDDIRKLFLAVHHILKYRGNFLYEGATFDSNASTLDDVLKQALENITFNCFDSSAAIGSIGQILMELGKTKSDKAKAIERLVDTYIITDEVDTSGKTQKEQVKEDKKRLKSFANLVLGLSASLTDLFGSVEDLDEDLKKLQIIGDTYDERRDDLAKVWGDEIHIIDDCKSVYDAIILMSIKEPGLTISESKVKAFKKHKDDLAILKSLLKSDRSIYNTMFKVDEKGLHNYVHYIKQGRTEETSCNREDFYKYTKKVVEGLPDSKDKEYILSEIELQTLLPLQRIKDNGVIPYQLHLEELKVILAKCGPKFPFLNEVADGFSVAEKLIKMLEFRIPYYVGPLNTHHNVDNGGFAWAVRKASGRVTPWNFDDKIDREKSAAAFIKNLTNKCTYLLGEDVLPKSSLLYSEFMLLNELNNVRIDGKPLEKAVKEHLIEAVFKQDHKKMTKNRIEQFLKDNNYIPEKHKPEITGLDGEIKNDLASYRDMVRILGNNFDLSMAEEIITDITIFGESKKMLRETLRNKFSSRLDDEAIKKLSKLRYRDWGRLSRKLLNVIEGCDKAGDGTPETIIILMRNFSYNLMELLGDKFSFMERIQEINAKLIEGQIVNPHDIIDDLALSPAVKRAVWQALRIVDEIVHIKKTLPARIFVEVTRSNKAEKKKKDSRQKRLSDLYAAIKKDDALLSGLTNEEFGGLKSGLAKYDDAALRSKKLYLYYTQMGRCAYTGEVIDLSQLNTDNYDIDHIYPRSLTKDDSFDNLVLCKRTANAQKSDTYPISKEIQKAQKAFWIFLKQQGLISERKYERLTRITPLTADDLSGFIARQLVETNQSVKAATTLLRRLYPGVDVVFVKAENVTDFRHDNDFIKVRSLNHHHHAKDAYLNIVVGNVYHERFTRNFRAFFKKNGANRTYNLAKMFNYDVKCTNAKDGKAWAVKTSMDTVKKMMDSNDVRVTKRVYEQKGQLSDINLTKASKVKADIYLPIKANDPIMSQNMKYGGYSDIKNAYYTIIEYSDKKNNSIKAFIPIPIFIATKTLTKQALLEYIKTVLPKANNLRIIYKKVYNDQLLKIDGFNYYLGGRSNDRFCIDNAIQLIVPLEIQFYIKLVEKFTAIISENKNIALKASSVKSRNPINNQVENITLEYTQKLFDYLVSKFNELIYLKMRGNKLTDVNNIGRKQFIKLSLEERCKALAELLNIFTNMNKKLSLSTINVSASRKVVNFKISSLDEFKIVNESITGLYSHEITIV

SEQ ID NO: 615 - protein, 1120 aa, Veillonella sp.
  Veillonella sp. oral taxon 780 str. F0422
MGFKANLVNLFTDEDIEVILPEEKEFKSINLHEGIYEDVRDAYEDAWGDRFAIVDQCKVLHDIIVISSIIKPGQSLSEAKIESYNQHKEDLVLLKSVLKEDRKLYDDMFVVDTDKGTNYVKYTKQGVNGNTSATQEEFYKYVRKVVSVLPETEHTRRIVQKLEEGTFLPLQRISKNGVVPYQLHKEELVRILDKATVNFPFLNKVENGLTVADKIISILEFKIPYYVGPLNPTHSIENGGFAWVVRKEAGQVLPWNFEQKVDVQASAVKFIENLTNKCTYLIDQDVLPKYSLLYAEFSLLNELNNIRVNDKPLPADVKQAFIRDHFISLQDSKTATKKVVAKYLVDNNYVSQPPIITGMDQQIATKLTSHRDMTRILGEHFDHAMAEDIIRYITIFGESKDMLRQVLKNYYGDRLTTEQIKKLGKLTYTGWGRLSKKFLSDIWGMKKNDDDAEAGTIIEHMREGQENLMQLLSSSYSFIDVVQEYVTNVLGEKEKTAFEMLEDLSLSPMVKRSVWQTLRILDEIVSIRKELPKKIFVEVARTNKADKKRTQSRKALLEELYKQIKDEDVHVLQQELESKEDSALNSKKLYLYFTQMGRCMYSGRRIDIHELFTDKYDIDHIYPRSLTKDDSWHNIVLVEKQLNAEKTDRFPILSAIQSKQKGFWKLLWDRGFISEKKYDRLVRTTDLTDEELNQFINRQMVSTNQSVKAVTTLLHQLYPETEVVFSKAENVSDFRHDYDFVKVRSINHHHHAKDAYLNIVVGNVYHEKFTKNFLSFAKQKGTRRTYNLTKIFEYEIKLTEESKKVIWDPNIHMDIVKKMMKSNDVRVTQRAVPQKGGLSDETIYKKGIAKRGVYLPLKSSDERVRDVEKYGGRTSITISEYIILNIRDTSDQDRIEIFSLPLYIAGKKDIHKAIEEAYLSTCKKPASVVDIQILYRGLYIGSKVNINGFTYYMGGKTGSNVSIDSAVDVVMDITSSVYIKLLEKVAIKKIENPKTFRIENIKTSYNHKEVTVSKEQNIALYQELLKKLDTPLFSKMKGNKLEEFRTVGFDTFIALSLEEQASVLLEVLNVLTNFKTKRDITKIGMTSSRSTLGINISNTEQFSVITTSITGLYEQEIKIK

SEQ ID NO: 616 - protein, 1068 aa, Verminephrobacter eiseniae
MNKAVAYRLALDLGSTSLGWAIFRLNEAREPTAIIRAGVRIFSDGRNANSEPLAVHRRVARAMRRRRDRLLKRKKRMHDQLVQHGFFPAEVAERKELERLNPYQLRAKGLHEALTPGEFARALFHINQRRGFKSNRKTDRKDNDSGALKQAISELRKRIQDSDCATAGEWFWKERMQQKPEGVRGQWVRARYRKTPSTTDEGKKRIGYDLYVDRAMVEQEFDALWAAQAALQPGLFTEAARAELKDTLLYQRDLRPVKPGRCTLLPAEERAPLALPSTQRFRILQEVNNLRLLDEALREVPLNLAQRDAVVSALEGKKELSFAAIRKLLTLSGKFNLEDEKRAELKGNATSVILARKDLFGDAWAGFDAAVQDEIVWRLVSQESEGALIAWLQQHTGVDGVCAEAIVNTRLPDGYGRLSRKALERIVPALQREVCTYDKAVQAAGFAHHSDLGFDFDYAEDEVQQVGEHTIASTGEVQAQYAFKQLPYYGKALQRHVAFGSGDAKDHEEKCYGKIANPTVHIGLNQVRTVVNALIRRYGHPTEVVVELARDLKQSREQKQQTQREQADNQKRNEDIRKRIAPILETSPERVRDRDIKKWILWEELNKKDIADRHCPYSGERISATMLLSEAVEIEHILPFSRTLDDSLNNRTVAMRRANRIKGDRTPWEARADFEAQGWRYEAILQRAEGMPPRKRYRFAEDGYQRWLGKDRNFLARALNDTSYLSRLAANYLRLVCPQGVRVIPGQMTDKLRGKFGLNSVLGLDGKKNRNDHRHHAVDACVIGVTDQGLMQRFANASKQARENGLTRLVQDMLLPWWPSYYDHVERAVRHIRVSHRPDHGFEGAMMKGTAHGIREDGIREDGRIKQRPKAKGSADHKTITLIPIDEPRQLARHGVDAEGKPLPYKGYASGSNYCIEITKNGKGKWEGQVISTFDAYRIKAAADAAARAGQVISTVEADSIVRKSGWERLRGAQSQNGQPLVMRLVIGDSVRMEVDGRDEVMRVVKMSGKEMVFAPVREANVDKRNNMPDEQDPFTYTYKRADQLRKAKARQVTISPIGELRDPGFKG

SEQ ID NO: 617 - protein, 1440 aa, Weeksella virosa
MKTILGLDLGTNSIGWALVEQDFENKQGLILGMGSRIIPMDAGIIGKFAEGSSISQTAERTGYRSIRRLRERHLLRRERLHRVLNILKFLPEHYAAEIDFEKRFGQFLAETEPKLAWKKNAEGKFEFLFQRSFDEMVADFKANGQDIKIPYDWTIYYLRKKALTQKISPQELAWIILNFNQKRGYYQLRGEEEEENPNKKVEFYSLKIVDVVADEQPNKKGDTWYSLHLENGWVYRRSSKIPLYDWKDKVRDFIVTTDINEDGSEKLDKDGEVKRSFRAPKEDDWTLIKKKTEQEIEQFNQTVGSYIYEALLDNPTQKIRGKLVRTIERKFYKSELKKILEKQIELQPELFTEDLYNACARELYRRNVAHQQQLSSRDFVYLFLNDIIFYQRPLRSQKSLISNCSLEFRTIKDKDGNGQIIYLKAIPKSNPYYQEFRVWQWLYNLKIFTKEDDKDVTNQFINKVEDLEALFEFLMNQKEVNHTDILTYLIEPIVKSKYPNAKGKAFKDELKKELKKYRWNYVYDADKDESKSYPMNETRYELRKRLDKVENVPADFMTRKIEQHLWHIIYSVTDKIEFEKALKSFANKYDLHQESFVENFKRFKPFDSDYGTYSEKAIKKLLPLMRVGKYWSWDIIDDKTKTRIGKIITGEYDETIKNRVREKAIDLTEENHFQGLQLWLAQYIVYDRHSEADIAGKWNSVADLEQYLSEFKQHSLRNPIVEQVITETLRVVRDIWKQYGKGAKDYFDEIHIELGREMKNTAEERKRLSSIISENETTNLRIRAILEELMYDENMENVRPYSPMQQEALKIYEDGVLSSSVEIPEDIEKISKKSEPTKSEIQRYKLWLEQKYRSPYTGRPIPLSKLFTPAYQIEHIIPQARFFDDGFSNKVICESEVNALKDKMLGLEFIQNYYGQKVTTSFGEVTILTEDAYKAFVKEHYDKNRSKRNKLLLEEIPEKMIDRQMNDTRYISKYISKVLSNLVRGEKDDEGVNSKNIIPGNGKITGILKQDWGLNDVWNDLILPRFERMNQLTNSTDFTAWNEKHQKFLPSVPLELSKGFQKKRIDHRHHALDALIIACATRDHVNLLNNKHAKSRNERYDLQHKLRHTTPWQDKEGKVRTKFTEFKKPWETFTQDTKKELEKIVVNFKQNLRVINKATNYYEKIVDGKKVMFKQEGVNWAIRKPMHKETVSGKIDLPRVKVSKGKILTATRKSLDTSFNAKTILSITDTGIQKILLNYLKAKGNPELAFSPEGIEEMNQNISLYNDGKPHQPILKVRVFEQGSKFPLGETGNKTTKYVEAAKGTNLFFGVYEDNQGKRSYDTIPLNIVIERQKQGLNSVPETNEKGHRLLFSLSPNDLVYVPIEGEVFDETNPDVNRIYKVVSFSGSQMFCVRQDVATSIVYKLEFSSLNKMERTIDGIMIKEICIKLKVDRLGNISKA

SEQ ID NO: 618 - protein, 1409 aa, Wolinella succinogenes
MLVSPISVDLGGKNTGFFSFTDSLDNSQSGTVIYDESFVLSQVGRRSKRHSKRNNLRNKLVKRLFLLILQEHHGLSIDVLPDEIRGLFNKRGYTYAGFELDEKKKDALESDTLKEFLSEKLQSIDRDSDVEDFLNQIASNAESFKDYKKGFEAVFASATHSPNKKLELKDELKSEYGENAKELLAGLRVTKEILDEFDKQENQGNLPRAKYFEELGEYIATNEKVKSFFDSNSLKLTDMTKLIGNISNYQLKELRRYFNDKEMEKGDIWIPNKLHKITERFVRSWHPKNDADRQRRAELMKDLKSKEIMELLTTTEPVMTIPPYDDMNNRGAVKCQTLRLNEEYLDKHLPNWRDIAKRLNHGKFNDDLADSTVKGYSEDSTLLHRLLDTSKEIDIYELRGKKPNELLVKTLGQSDANRLYGFAQNYYELIRQKVRAGIWVPVKNKDDSLNLEDNSNMLKRCNHNPPHKKNQIHNLVAGILGVKLDEAKFAEFEKELWSAKVGNKKLSAYCKNIEELRKTHGNTFKIDIEELRKKDPAELSKEEKAKLRLTDDVILNEWSQKIANFFDIDDKHRQRFNNLFSMAQLHTVIDTPRSGFSSTCKRCTAENRFRSETAFYNDETGEFHKKATATCQRLPADTQRPFSGKIERYIDKLGYELAKIKAKELEGMEAKEIKVPIILEQNAFEYEESLRKSKTGSNDRVINSKKDRDGKKLAKAKENAEDRLKDKDKRIKAFSSGICPYCGDTIGDDGEIDHILPRSHTLKIYGTVFNPEGNLIYVHQKCNQAKADSIYKLSDIKAGVSAQWIEEQVANIKGYKTFSVLSAEQQKAFRYALFLQNDNEAYKKVVDWLRTDQSARVNGTQKYLAKKIQEKLTKMLPNKHLSFEFILADATEVSELRRQYARQNPLLAKAEKQAPSSHAIDAVMAFVARYQKVFKDGTPPNADEVAKLAMLDSWNPASNEPLTKGLSTNQKIEKMIKSGDYGQKNMREVFGKSIFGENAIGERYKPIVVQEGGYYIGYPATVKKGYELKNCKVVTSKNDIAKLEKIIKNQDLISLKENQYIKIFSINKQTISELSNRYFNMNYKNLVERDKEIVGLLEFIVENCRYYTKKVDVKFAPKYIHETKYPFYDDWRRFDEAWRYLQENQNKTSSKDRFVIDKSSLNEYYQPDKNEYKLDVDTQPIWDDFCRWYFLDRYKTANDKKSIRIKARKTFSLLAESGVQGKVFRAKRKIPTGYAYQALPMDNNVIAGDYANILLEANSKTLSLVPKSGISIEKQLDKKLDVIKKTDVRGLAIDNNSFFNADFDTHGIRLIVENTSVKVGNFPISAIDKSAKRMIFRALFEKEKGKRKKKTTISFKESGPVQDYLKVFLKKIVKIQLRTDGSISNIVVRKNAADFTLSFRSEHIQKLLK

SEQ ID NO: 619 - protein, 1059 aa, Wolinella succinogenes
MIERILGVDLGISSLGWAIVEYDKDDEAANRIIDCGVRLFTAAETPKKKESPNKARREARGIRRVLNRRRVRMNMIKKLFLRAGLIQDVDLDGEGGMFYSKANRADVWELRHDGLYRLLKGDELARVLIHIAKHRGYKFIGDDEADEESGKVKKAGVVLRQNFEAAGCRTVGEWLWRERGANGKKRNKHGDYEISIHRDLLVEEVEAIFVAQQEMRSTIATDALKAAYREIAFFVRPMQRIEKMVGHCTYFPEERRAPKSAPTAEKFIAISKFFSTVIIDNEGWEQKIIERKTLEELLDFAVSREKVEFRHLRKFLDLSDNEIFKGLHYKGKPKTAKKREATLFDPNEPTELEFDKVEAEKKAWISLRGAAKLREALGNEFYGRFVALGKHADEATKILTYYKDEGQKRRELTKLPLEAEMVERLVKIGFSDFLKLSLKAIRDILPAMESGARYDEAVLMLGVPHKEKSAILPPLNKTDIDILNPTVIRAFAQFRKVANALVRKYGAFDRVHFELAREINTKGEIEDIKESQRKNEKERKEAADWIAETSFQVPLTRKNILKKRLYIQQDGRCAYTGDVIELERLFDEGYCEIDHILPRSRSADDSFANKVLCLARANQQKTDRTPYEWFGHDAARWNAFETRTSAPSNRVRTGKGKIDRLLKKNFDENSEMAFKDRNLNDTRYMARAIKTYCEQYWVFKNSHTKAPVQVRSGKLTSVLRYQWGLESKDRESHTHHAVDAIIIAFSTQGMVQKLSEYYRFKETHREKERPKLAVPLANFRDAVEEATRIENTETVKEGVEVKRLLISRPPRARVTGQAHEQTAKPYPRIKQVKNKKKWRLAPIDEEKFESFKADRVASANQKNFYETSTIPRVDVYHKKGKFHLVPIYLHEMVLNELPNLSLGTNPEAMDENFFKFSIFKDDLISIQTQGTPKKPAKIIMGYFKNMHGANMVLSSINNSPCEGFTCTPVSMDKKHKDKCKLCPEENRIAGRCLQGFLDYWSQEGLRPPRKEFECDQGVKFALDVKKYQIDPLGYYYEVKQEKRLGTIPQMRSAKKLVKK

SEQ ID NO: 620 - protein, 1388 aa, Zunongwangia profunda
MKRILGLDLGTNSIGWALVNEAENEKEISKIIKLGVRVNPLTIDEKTNFEKGRPLSTNADRTLKRGARRNLQRYKLRRENLIEILIDNHIITKETPLTEIGKGTTYQTLSLRAKAVRERIDLEDFAKVLLAINKKRGYKSSRKASNDEEGQAIDGMAIAKELYERGITPGQYVLELLENDRKYIPDFYRSDLKQEFNKIWNNQKTFYPEILTDELFKELDGKNKSQTWAICQKPFNIKGIKRITKGREKTIENYHWRVKGLSGKLNLEKLAIILQEINNDINQSSGYLGGISDKSKKLYLNKETVGEFLYKQIAKNPHTSLKNQVFYRHDYLDEFEQIWKTQSNFNANLTDELKQEIRDVIIFYQRKIKSQKSLISFCQFESWEQEYFDKETGKTKTRTVGRRVIPKSSPLFQEFKIWQNLNHLVFTNSETDEKIEIKEVEQEIRKELFEELNLRGDLNPNDLLKILRSQFKIGKLSNWKCNFEKIEGNRTNAALFNIYQKISDFEGYGIDWNKSNAKKIRKELKATFPEIGIDASILEFDAYKKQLTNQSSYELWHLLYSAEEDFKISEQDKLIYGNSSVSLKKKLHLKFGFNPEYAKMLANLSLMSDYGNLSAKAIKKILPYLEDGHLYSEACRLAGYNHSKSLTAEELEKFEPKAKLDLLKKNSLRNPVVEKILNQMVNVVNQVIDTYGKPDGVRIELARELKKSAKERAEMTKGIADGTRRNEEIKKIITQKFGIPNPTKSDLVRYRLWQELESRGYKDIFTDKYISPDKIFSSEIDIEHIIPKALLFDDSFSNKTLSFRNVNLKKANRTALDFITQDYQSNVEAYKERVETWNKDNHISKGKRNKLLMSLKDIPDGFIERDLRNSQYIARKAKRMLYEVFPNEVLATSGSITDKLRSDWDLINVMKELNLPKYKALGLTEYEERLDKGTEELFKHEVIKDWTKRNDHRHHAMDALAVAFTTHNHIQYINNLNARKDITQDNHPIIKNIENLITEVNSKGKRVFKAPMSSFRESAKEQIEAILVSFKNKNKVVTKNINQTKKEGGFNYQNAKTPRGQLHKETIYGKSKQPLEKPVKINNRFCKKQVGLIINFKEQEAVLHHLKKYDNNEKIAFSNKTLKSDPIQVNGSPLREVKIFEEIFTIRKDINPDNFKTQKHLDKIIDKGIKEVMKKRLEEYNGDFKTAFSDLDKNPIWLNQSKGITIKRATISGVTNAEPLHQAKDHLGNIILDDNGKEIPIDYVSTGNNHHVAIYQDESGNLQEEVVSFYEAVIRKNQDQPIIKKRHPKGWKFLFTMKQNEMFVFSSENFNPSEIDLLDEKNAAIISPNLFRVQKIATKNYMFRHHLETEVTNNLDFTYRHFQATEWLRNLCKVRIDHIGRIVQIGEY

SEQ ID NO: 621-631 - skipped (11 entries)

SEQ ID NO: 632 - RNA, 22 nt, Homo sapiens
ugcucagguugcacagcuggga

SEQ ID NO: 633 - RNA, 22 nt, Homo sapiens
ucccagcugugcaaccugagca

SEQ ID NO: 634 - RNA, 22 nt, Homo sapiens
ucagguguggaaacugaggcag

SEQ ID NO: 635 - RNA, 22 nt, Homo sapiens
cugccucaguuuccacaccuga

SEQ ID NO: 636 - RNA, 22 nt, Homo sapiens
caaaaccgcgauuacucuugca

SEQ ID NO: 637 - RNA, 22 nt, Homo sapiens
ugcaagaguaaucgcgguuuug

SEQ ID NO: 638 - RNA, 21 nt, Homo sapiens
aaaaguaauugugguuuuugc

SEQ ID NO: 639 - RNA, 21 nt, Homo sapiens
gcaaaaaccacaauuacuuuu

SEQ ID NO: 640 - RNA, 21 nt, Homo sapiens
aaaaacugcaaucacuuuugc

SEQ ID NO: 641 - RNA, 21 nt, Homo sapiens
gcaaaagugauugcaguuuuu

SEQ ID NO: 642 - RNA, 22 nt, Homo sapiens
caaaagugauugugguuuuugc

SEQ ID NO: 643 - RNA, 22 nt, Homo sapiens
gcaaaaaccacaaucacuuuug

SEQ ID NO: 644 - RNA, 22 nt, Homo sapiens
agcaguguuuguuuugcccaca

SEQ ID NO: 645 - RNA, 22 nt, Homo sapiens
ugugggcaaaacaaacacugcu

SEQ ID NO: 646 - RNA, 22 nt, Homo sapiens
ucgggcgcaagagcacugcagu

SEQ ID NO: 647 - RNA, 22 nt, Homo sapiens
acugcagugcucuugcgcccga

SEQ ID NO: 648 - RNA, 21 nt, Homo sapiens
acacuuguugggaugaccugc

SEQ ID NO: 649 - RNA, 21 nt, Homo sapiens
gcaggucaucccaacaagugu

SEQ ID NO: 650 - RNA, 24 nt, Homo sapiens
aggagcuauccacuccaggugucc

SEQ ID NO: 651 - RNA, 24 nt, Homo sapiens
ggacaccuggaguggauagcuccu

SEQ ID NO: 652 - RNA, 23 nt, Homo sapiens
ccagagcagccugcgguaacagu

SEQ ID NO: 653 - RNA, 23 nt, Homo sapiens
acuguuaccgcaggcugcucugg

SEQ ID NO: 654 - RNA, 22 nt, Homo sapiens
aguugccagggcugccuuuggu

SEQ ID NO: 655 - RNA, 22 nt, Homo sapiens
accaaaggcagcccuggcaacu

SEQ ID NO: 656 - RNA, 21 nt, Homo sapiens
uagaccaucuuucuagaguau

SEQ ID NO: 657 - RNA, 21 nt, Homo sapiens
auacucuagaaagauggucua

SEQ ID NO: 658 - RNA, 22 nt, Homo sapiens
agcucuagaaagauuguugacc

SEQ ID NO: 659 - RNA, 22 nt, Homo sapiens
ggucaacaaucuuucuagagcu

SEQ ID NO: 660 - RNA, 21 nt, Homo sapiens
gggacuaggaugcagaccucc

SEQ ID NO: 661 - RNA, 21 nt, Homo sapiens
ggaggucugcauccuaguccc

SEQ ID NO: 662 - RNA, 23 nt, Homo sapiens
aggucugcauucaaauccccaga

SEQ ID NO: 663 - RNA, 23 nt, Homo sapiens
ucuggggauuugaaugcagaccu

SEQ ID NO: 664 - RNA, 20 nt, Homo sapiens
cauuacagcacagccauucu

SEQ ID NO: 665 - RNA, 20 nt, Homo sapiens
agaauggcugugcuguaaug

SEQ ID NO: 666 - RNA, 21 nt, Homo sapiens
ucuggcugugcuguaaugcag

SEQ ID NO: 667 - RNA, 21 nt, Homo sapiens
cugcauuacagcacagccaga

SEQ ID NO: 668 - RNA, 21 nt, Homo sapiens
ugacuucuaccucuuccaaag

SEQ ID NO: 669 - RNA, 21 nt, Homo sapiens
cuuuggaagagguagaaguca

SEQ ID NO: 670 - RNA, 22 nt, Homo sapiens
uuggaauaggggauaucucagc

SEQ ID NO: 671 - RNA, 22 nt, Homo sapiens
gcugagauauccccuauuccaa

SEQ ID NO: 672 - RNA, 22 nt, Homo sapiens
ucguaucagagauuccagacac

SEQ ID NO: 673 - RNA, 22 nt, Homo sapiens
gugucuggaaucucugauacga

SEQ ID NO: 674 - RNA, 23 nt, Homo sapiens
acugggaugucacugaauauggu

SEQ ID NO: 675 - RNA, 23 nt, Homo sapiens
accauauucagugacaucccagu

SEQ ID NO: 676 - RNA, 22 nt, Homo sapiens
caaaguccuuccuauuuuuccc

SEQ ID NO: 677 - RNA, 22 nt, Homo sapiens
gggaaaaauaggaaggacuuug

SEQ ID NO: 678 - RNA, 21 nt, Homo sapiens
gaagaauaggagggacuuugu

SEQ ID NO: 679 - RNA, 21 nt, Homo sapiens
acaaagucccuccuauucuuc

SEQ ID NO: 680 - RNA, 22 nt, Homo sapiens
ugggccaugcauuucuagaacu

SEQ ID NO: 681 - RNA, 22 nt, Homo sapiens
aguucuagaaaugcauggccca

SEQ ID NO: 682 - RNA, 21 nt, Homo sapiens
ucuagaaaugcaugacccacc

SEQ ID NO: 683 - RNA, 21 nt, Homo sapiens
ggugggucaugcauuucuaga

SEQ ID NO: 684 - RNA, 22 nt, Homo sapiens
uuccacugccacuaccuaauuu

SEQ ID NO: 685 - RNA, 22 nt, Homo sapiens
aaauuagguaguggcaguggaa

SEQ ID NO: 686 - RNA, 21 nt, Homo sapiens
auuagguaguggcaguggaac

SEQ ID NO: 687 - RNA, 21 nt, Homo sapiens
guuccacugccacuaccuaau

SEQ ID NO: 688 - RNA, 21 nt, Homo sapiens
caccgacucugucuccugcag

SEQ ID NO: 689 - RNA, 21 nt, Homo sapiens
cugcaggagacagagucggug

SEQ ID NO: 690 - RNA, 22 nt, Homo sapiens
cagcaggggagagagaggaguc

SEQ ID NO: 691 - RNA, 22 nt, Homo sapiens
gacuccucucucuccccugcug

SEQ ID NO: 692 - RNA, 22 nt, Homo sapiens
uuccagcccuucuaaugguagg

SEQ ID NO: 693 - RNA, 22 nt, Homo sapiens
ccuaccauuagaagggcuggaa

SEQ ID NO: 694 - RNA, 22 nt, Homo sapiens
uaccauuagaagagcuggaaga

SEQ ID NO: 695 - RNA, 22 nt, Homo sapiens
ucuuccagcucuucuaauggua

SEQ ID NO: 696 - RNA, 21 nt, Homo sapiens
ucaagugucaucugucccuag

SEQ ID NO: 697 - RNA, 21 nt, Homo sapiens
cuagggacagaugacacuuga

SEQ ID NO: 698 - RNA, 23 nt, Homo sapiens
uuugggauugacgccacaugucu

SEQ ID NO: 699 - RNA, 23 nt, Homo sapiens
agacauguggcgucaaucccaaa

SEQ ID NO: 700 - RNA, 21 nt, Homo sapiens
cugccuguucuuccacuccag

SEQ ID NO: 701 - RNA, 21 nt, Homo sapiens
cuggaguggaagaacaggcag

SEQ ID NO: 702 - RNA, 23 nt, Homo sapiens
uauggaguggacuuucagcuggc

SEQ ID NO: 703 - RNA, 23 nt, Homo sapiens
gccagcugaaaguccacuccaua

SEQ ID NO: 704 - RNA, 22 nt, Homo sapiens
ccucaccaucccuucugccugc

SEQ ID NO: 705 - RNA, 22 nt, Homo sapiens
gcaggcagaagggauggugagg

SEQ ID NO: 706 - RNA, 23 nt, Homo sapiens
caggcagaaguggggcugacagg

SEQ ID NO: 707 - RNA, 23 nt, Homo sapiens
ccugucagccccacuucugccug

SEQ ID NO: 708 - RNA, 20 nt, Homo sapiens
ucucuucaucuaccccccag

SEQ ID NO: 709 - RNA, 20 nt, Homo sapiens
cugggggguagaugaagaga

SEQ ID NO: 710 - RNA, 21 nt, Homo sapiens
uuggaggguguggaagacauc

SEQ ID NO: 711 - RNA, 21 nt, Homo sapiens
gaugucuuccacacccuccaa

SEQ ID NO: 712 - RNA, 22 nt, Homo sapiens
cugccagccccguuccagggca

SEQ ID NO: 713 - RNA, 22 nt, Homo sapiens
ugcccuggaacggggcuggcag

SEQ ID NO: 714 - RNA, 23 nt, Homo sapiens
acaaaguacagcauuagccuuag

SEQ ID NO: 715 - RNA, 23 nt, Homo sapiens
cuaaggcuaaugcuguacuuugu

SEQ ID NO: 716 - RNA, 23 nt, Homo sapiens
aaaggucauuguaagguuaaugc

SEQ ID NO: 717 - RNA, 23 nt, Homo sapiens
gcauuaaccuuacaaugaccuuu

SEQ ID NO: 718 - RNA, 22 nt, Homo sapiens
ugaggcuaaugcacuacuucac

SEQ ID NO: 719 - RNA, 22 nt, Homo sapiens
gugaaguagugcauuagccuca

SEQ ID NO: 720 - RNA, 24 nt, Homo sapiens
uauagagagcaggaagauuaaugu

SEQ ID NO: 721 - RNA, 24 nt, Homo sapiens
acauuaaucuuccugcucucuaua

SEQ ID NO: 722 - RNA, 23 nt, Homo sapiens
gugcuucaucguaauuaaccuua

SEQ ID NO: 723 - RNA, 23 nt, Homo sapiens
uaagguuaauuacgaugaagcac

SEQ ID NO: 724 - RNA, 24 nt, Homo sapiens
guggaaagcaugcauccagggugu

SEQ ID NO: 725 - RNA, 24 nt, Homo sapiens
acacccuggaugcaugcuuuccac

SEQ ID NO: 726 - RNA, 22 nt, Homo sapiens
agacacauuuggagagggaacc

SEQ ID NO: 727 - RNA, 22 nt, Homo sapiens
gguucccucuccaaaugugucu

SEQ ID NO: 728 - RNA, 22 nt, Homo sapiens
uucccuuugucauccuaugccu

SEQ ID NO: 729 - RNA, 22 nt, Homo sapiens
aggcauaggaugacaaagggaa

SEQ ID NO: 730 - RNA, 21 nt, Homo sapiens
gcugggaaggcaaagggacgu

SEQ ID NO: 731 - RNA, 21 nt, Homo sapiens
acgucccuuugccuucccagc

SEQ ID NO: 732 - RNA, 21 nt, Homo sapiens
uaccacaggguagaaccacgg

SEQ ID NO: 733 - RNA, 21 nt, Homo sapiens
ccgugguucuacccuguggua

SEQ ID NO: 734 - RNA, 22 nt, Homo sapiens
ggcuggagcgagugcaguggug

SEQ ID NO: 735 - RNA, 22 nt, Homo sapiens
caccacugcacucgcuccagcc

SEQ ID NO: 736 - RNA, 18 nt, Homo sapiens
ccaggcucugcaguggga

SEQ ID NO: 737 - RNA, 18 nt, Homo sapiens
ucccacugcagagccugg

SEQ ID NO: 738 - RNA, 22 nt, Homo sapiens
cugggaggugugauauuguggu

SEQ ID NO: 739 - RNA, 22 nt, Homo sapiens
accacaauaucacaccucccag

SEQ ID NO: 740 - RNA, 22 nt, Homo sapiens
gggaggugugaucucacacucg

SEQ ID NO: 741 - RNA, 22 nt, Homo sapiens
cgagugugagaucacaccuccc

SEQ ID NO: 742 - RNA, 22 nt, Homo sapiens
ugugauaucaugguuccuggga

SEQ ID NO: 743 - RNA, 22 nt, Homo sapiens
ucccaggaaccaugauaucaca

SEQ ID NO: 744 - RNA, 22 nt, Homo sapiens
ugugauaucgugcuuccuggga

SEQ ID NO: 745 - RNA, 22 nt, Homo sapiens
ucccaggaagcacgauaucaca

SEQ ID NO: 746 - RNA, 18 nt, Homo sapiens
ggugggcuucccggaggg

SEQ ID NO: 747 - RNA, 18 nt, Homo sapiens
cccuccgggaagcccacc

SEQ ID NO: 748 - RNA, 18 nt, Homo sapiens
cacugcaggacucagcag

SEQ ID NO: 749 - RNA, 18 nt, Homo sapiens
cugcugaguccugcagug

SEQ ID NO: 750 - RNA, 17 nt, Homo sapiens
ugagggaggagacugca

SEQ ID NO: 751 - RNA, 17 nt, Homo sapiens
ugcagucuccucccuca

SEQ ID NO: 752 - RNA, 18 nt, Homo sapiens
gaggcugaaggaagaugg

SEQ ID NO: 753 - RNA, 18 nt, Homo sapiens
ccaucuuccuucagccuc

SEQ ID NO: 754 - RNA, 22 nt, Homo sapiens
gucacugaugucuguagcugag

SEQ ID NO: 755 - RNA, 22 nt, Homo sapiens
cucagcuacagacaucagugac

SEQ ID NO: 756 - RNA, 22 nt, Homo sapiens
accugucuguggaaaggagcua

SEQ ID NO: 757 - RNA, 22 nt, Homo sapiens
uagcuccuuuccacagacaggu

SEQ ID NO: 758 - RNA, 22 nt, Homo sapiens
agaguuaacucaaaauggacua

SEQ ID NO: 759 - RNA, 22 nt, Homo sapiens
uaguccauuuugaguuaacucu

SEQ ID NO: 760 - RNA, 22 nt, Homo sapiens
uguugggauucagcaggaccau

SEQ ID NO: 761 - RNA, 22 nt, Homo sapiens
augguccugcugaaucccaaca

SEQ ID NO: 762 - RNA, 17 nt, Homo sapiens
gaagauggacguacuuu

SEQ ID NO: 763 - RNA, 17 nt, Homo sapiens
aaaguacguccaucuuc

SEQ ID NO: 764 - RNA, 21 nt, Homo sapiens
ucugaauagagucugaagagu

SEQ ID NO: 765 - RNA, 21 nt, Homo sapiens
acucuucagacucuauucaga

SEQ ID NO: 766 - RNA, 22 nt, Homo sapiens
caaggagacgggaacauggagc

SEQ ID NO: 767 - RNA, 22 nt, Homo sapiens
gcuccauguucccgucuccuug

SEQ ID NO: 768 - RNA, 20 nt, Homo sapiens
aaaagcugggcugagaggcg

SEQ ID NO: 769 - RNA, 20 nt, Homo sapiens
cgccucucagcccagcuuuu

SEQ ID NO: 770 - RNA, 18 nt, Homo sapiens
aggcuggagugagcggag

SEQ ID NO: 771 - RNA, 18 nt, Homo sapiens
cuccgcucacuccagccu

SEQ ID NO: 772 - RNA, 22 nt, Homo sapiens
gcgacucugaaaacuagaaggu

SEQ ID NO: 773 - RNA, 22 nt, Homo sapiens
accuucuaguuuucagagucgc

SEQ ID NO: 774 - RNA, 20 nt, Homo sapiens
aaagacucugcaagaugccu

SEQ ID NO: 775 - RNA, 20 nt, Homo sapiens
aggcaucuugcagagucuuu

SEQ ID NO: 776 - RNA, 21 nt, Homo sapiens
acaggagugggggugggacau

SEQ ID NO: 777 - RNA, 21 nt, Homo sapiens
augucccacccccacuccugu

SEQ ID NO: 778 - RNA, 21 nt, Homo sapiens
cgucccaccccccacuccugu

SEQ ID NO: 779 - RNA, 21 nt, Homo sapiens
acaggaguggggggugggacg

SEQ ID NO: 780 - RNA, 18 nt, Homo sapiens
aggagaaguaaaguagaa

SEQ ID NO: 781 - RNA, 18 nt, Homo sapiens
uucuacuuuacuucuccu

SEQ ID NO: 782 - RNA, 22 nt, Homo sapiens
auggccagagcucacacagagg

SEQ ID NO: 783 - RNA, 22 nt, Homo sapiens
ccucugugugagcucuggccau

SEQ ID NO: 784 - RNA, 21 nt, Homo sapiens
ugggcucaggguacaaagguu

SEQ ID NO: 785 - RNA, 21 nt, Homo sapiens
aaccuuuguacccugagccca

SEQ ID NO: 786 - RNA, 21 nt, Homo sapiens
cacaggcuuagaaaagacagu

SEQ ID NO: 787 - RNA, 21 nt, Homo sapiens
acugucuuuucuaagccugug

SEQ ID NO: 788 - RNA, 22 nt, Homo sapiens
gugacugauaccuuggaggcau

SEQ ID NO: 789 - RNA, 22 nt, Homo sapiens
augccuccaagguaucagucac

SEQ ID NO: 790 - RNA, 22 nt, Homo sapiens
ugucguggggcuugcuggcuug

SEQ ID NO: 791 - RNA, 22 nt, Homo sapiens
caagccagcaagccccacgaca

SEQ ID NO: 792 - RNA, 17 nt, Homo sapiens
acagggaggagauugua

SEQ ID NO: 793 - RNA, 17 nt, Homo sapiens
uacaaucuccucccugu

SEQ ID NO: 794 - RNA, 17 nt, Homo sapiens
gccggacaagagggagg

SEQ ID NO: 795 - RNA, 17 nt, Homo sapiens
ccucccucuuguccggc

SEQ ID NO: 796 - RNA, 17 nt, Homo sapiens
uuggaggcguggguuuu

SEQ ID NO: 797 - RNA, 17 nt, Homo sapiens
aaaacccacgccuccaa

SEQ ID NO: 798 - RNA, 18 nt, Homo sapiens
cucgaguuggaagaggcg

SEQ ID NO: 799 - RNA, 18 nt, Homo sapiens
cgccucuuccaacucgag

SEQ ID NO: 800 - RNA, 21 nt, Homo sapiens
cacggcaaaagaaacaaucca

SEQ ID NO: 801 - RNA, 21 nt, Homo sapiens
uggauuguuucuuuugccgug

SEQ ID NO: 802 - RNA, 22 nt, Homo sapiens
agauuguuucuuuugccgugca

SEQ ID NO: 803 - RNA, 22 nt, Homo sapiens
ugcacggcaaaagaaacaaucu

SEQ ID NO: 804 - RNA, 17 nt, Homo sapiens
ggugggggcuguuguuu

SEQ ID NO: 805 - RNA, 17 nt, Homo sapiens
aaacaacagcccccacc

SEQ ID NO: 806 - RNA, 20 nt, Homo sapiens
ggcuccuuggucuaggggua

SEQ ID NO: 807 - RNA, 20 nt, Homo sapiens
uaccccuagaccaaggagcc

SEQ ID NO: 808 - RNA, 22 nt, Homo sapiens
cgucccggggcugcgcgaggca

SEQ ID NO: 809 - RNA, 22 nt, Homo sapiens
ugccucgcgcagccccgggacg

SEQ ID NO: 810 - RNA, 22 nt, Homo sapiens
uggggauuuggagaagugguga

SEQ ID NO: 811 - RNA, 22 nt, Homo sapiens
ucaccacuucuccaaaucccca

SEQ ID NO: 812 - RNA, 17 nt, Homo sapiens
ugguagagcugaggaca

SEQ ID NO: 813 - RNA, 17 nt, Homo sapiens
uguccucagcucuacca

SEQ ID NO: 814 - RNA, 23 nt, Homo sapiens
uugaauucuuggccuuaagugau

SEQ ID NO: 815 - RNA, 23 nt, Homo sapiens
aucacuuaaggccaagaauucaa

SEQ ID NO: 816 - RNA, 20 nt, Homo sapiens
gagcuuggucuguagcgguu

SEQ ID NO: 817 - RNA, 20 nt, Homo sapiens
aaccgcuacagaccaagcuc

SEQ ID NO: 818 - RNA, 20 nt, Homo sapiens
ggauccgagucacggcacca

SEQ ID NO: 819 - RNA, 20 nt, Homo sapiens
uggugccgugacucggaucc

SEQ ID NO: 820 - RNA, 17 nt, Homo sapiens
aggguguguguguuuuu

SEQ ID NO: 821 - RNA, 17 nt, Homo sapiens
aaaaacacacacacccu

SEQ ID NO: 822 - RNA, 17 nt, Homo sapiens
ccugguggcuuccuuuu

SEQ ID NO: 823 - RNA, 17 nt, Homo sapiens
aaaaggaagccaccagg

SEQ ID NO: 824 - RNA, 22 nt, Homo sapiens
ucacaagguauugacuggcgua

SEQ ID NO: 825 - RNA, 22 nt, Homo sapiens
uacgccagucaauaccuuguga

SEQ ID NO: 826 - RNA, 19 nt, Homo sapiens
agagguagguguggaagaa

SEQ ID NO: 827 - RNA, 19 nt, Homo sapiens
uucuuccacaccuaccucu

SEQ ID NO: 828 - RNA, 22 nt, Homo sapiens
ccaggaggcggaggagguggag

SEQ ID NO: 829 - RNA, 22 nt, Homo sapiens
cuccaccuccuccgccuccugg

SEQ ID NO: 830 - RNA, 22 nt, Homo sapiens
auagugguugugaauuuaccuu

SEQ ID NO: 831 - RNA, 22 nt, Homo sapiens
aagguaaauucacaaccacuau

SEQ ID NO: 832 - RNA, 23 nt, Homo sapiens
gauugagacuaguagggcuaggc

SEQ ID NO: 833 - RNA, 23 nt, Homo sapiens
gccuagcccuacuagucucaauc

SEQ ID NO: 834 - RNA, 23 nt, Homo sapiens
ugacacggaggguggcuugggaa

SEQ ID NO: 835 - RNA, 23 nt, Homo sapiens
uucccaagccacccuccguguca

SEQ ID NO: 836 - RNA, 17 nt, Homo sapiens
gagacugggguggggcc

SEQ ID NO: 837 - RNA, 17 nt, Homo sapiens
ggccccaccccagucuc

SEQ ID NO: 838 - RNA, 21 nt, Homo sapiens
aagguuuggauagaugcaaua

SEQ ID NO: 839 - RNA, 21 nt, Homo sapiens
uauugcaucuauccaaaccuu

SEQ ID NO: 840 - RNA, 22 nt, Homo sapiens
cucaaguagucugaccagggga

SEQ ID NO: 841 - RNA, 22 nt, Homo sapiens
uccccuggucagacuacuugag

SEQ ID NO: 842 - RNA, 18 nt, Homo sapiens
gggugcgggccggcgggg

SEQ ID NO: 843 - RNA, 18 nt, Homo sapiens
ccccgccggcccgcaccc

SEQ ID NO: 844 - RNA, 18 nt, Homo sapiens
agagcagaaggaugagau

SEQ ID NO: 845 - RNA, 18 nt, Homo sapiens
aucucauccuucugcucu

SEQ ID NO: 846 - RNA, 21 nt, Homo sapiens
uggcaaacguggaagccgaga

SEQ ID NO: 847 - RNA, 21 nt, Homo sapiens
ucucggcuuccacguuugcca

SEQ ID NO: 848 - RNA, 18 nt, Homo sapiens
ggugggggguguuguuuu

SEQ ID NO: 849 - RNA, 18 nt, Homo sapiens
aaaacaacaccccccacc

SEQ ID NO: 850 - RNA, 22 nt, Homo sapiens
cuagugcucuccguuacaagua

SEQ ID NO: 851 - RNA, 22 nt, Homo sapiens
uacuuguaacggagagcacuag

SEQ ID NO: 852 - RNA, 22 nt, Homo sapiens
caagggaccaagcauucauuau

SEQ ID NO: 853 - RNA, 22 nt, Homo sapiens
auaaugaaugcuuggucccuug

SEQ ID NO: 854 - RNA, 22 nt, Homo sapiens
caggaaggauuuagggacaggc

SEQ ID NO: 855 - RNA, 22 nt, Homo sapiens
gccugucccuaaauccuuccug

SEQ ID NO: 856 - RNA, 22 nt, Homo sapiens
cuauuaaggacauuugugauuc

SEQ ID NO: 857 - RNA, 22 nt, Homo sapiens
gaaucacaaauguccuuaauag

SEQ ID NO: 858 - RNA, 22 nt, Homo sapiens
auuaaggacauuugugauugau

SEQ ID NO: 859 - RNA, 22 nt, Homo sapiens
aucaaucacaaauguccuuaau

SEQ ID NO: 860 - RNA, 17 nt, Homo sapiens
gaggcugagcugaggag

SEQ ID NO: 861 - RNA, 17 nt, Homo sapiens
cuccucagcucagccuc

SEQ ID NO: 862 - RNA, 22 nt, Homo sapiens
cgcgcggccgugcucggagcag

SEQ ID NO: 863 - RNA, 22 nt, Homo sapiens
cugcuccgagcacggccgcgcg

SEQ ID NO: 864 - RNA, 21 nt, Homo sapiens
agccaaguggaaguuacuuua

SEQ ID NO: 865 - RNA, 21 nt, Homo sapiens
uaaaguaacuuccacuuggcu

SEQ ID NO: 866 - RNA, 17 nt, Homo sapiens
ggagugggcuggugguu

SEQ ID NO: 867 - RNA, 17 nt, Homo sapiens
aaccaccagcccacucc

SEQ ID NO: 868 - RNA, 22 nt, Homo sapiens
uuucuauuucucaguggggcuc

SEQ ID NO: 869 - RNA, 22 nt, Homo sapiens
gagccccacugagaaauagaaa

SEQ ID NO: 870 - RNA, 22 nt, Homo sapiens
aacccagugggcuauggaaaug

SEQ ID NO: 871 - RNA, 22 nt, Homo sapiens
cauuuccauagcccacuggguu

SEQ ID NO: 872 - RNA, 17 nt, Homo sapiens
gggguggucuguuguug

SEQ ID NO: 873 - RNA, 17 nt, Homo sapiens
caacaacagaccacccc

SEQ ID NO: 874 - RNA, 20 nt, Homo sapiens
aaaaggcgggagaagcccca

SEQ ID NO: 875 - RNA, 20 nt, Homo sapiens
uggggcuucucccgccuuuu

SEQ ID NO: 876 - RNA, 20 nt, Homo sapiens
uaacggccgcgguacccuaa

SEQ ID NO: 877 - RNA, 20 nt, Homo sapiens
uuaggguaccgcggccguua

SEQ ID NO: 878 - RNA, 17 nt, Homo sapiens
gcugggcgaggcuggca

SEQ ID NO: 879 - RNA, 17 nt, Homo sapiens
ugccagccucgcccagc

SEQ ID NO: 880 - RNA, 19 nt, Homo sapiens
agagcuggcugaagggcag

SEQ ID NO: 881 - RNA, 19 nt, Homo sapiens
cugcccuucagccagcucu

SEQ ID NO: 882 - RNA, 18 nt, Homo sapiens
agggggcgggcuccggcg

SEQ ID NO: 883 - RNA, 18 nt, Homo sapiens
cgccggagcccgcccccu

SEQ ID NO: 884 - RNA, 22 nt, Homo sapiens
ucugguaagagauuugggcaua

SEQ ID NO: 885 - RNA, 22 nt, Homo sapiens
uaugcccaaaucucuuaccaga

SEQ ID NO: 886 - RNA, 22 nt, Homo sapiens
aauguggacuggugugaccaaa

SEQ ID NO: 887 - RNA, 22 nt, Homo sapiens
uuuggucacaccaguccacauu

SEQ ID NO: 888 - RNA, 17 nt, Homo sapiens
ggggcugggcgcgcgcc

SEQ ID NO: 889 - RNA, 17 nt, Homo sapiens
ggcgcgcgcccagcccc

SEQ ID NO: 890 - RNA, 21 nt, Homo sapiens
agaaggccuuuccaucucugu

SEQ ID NO: 891 - RNA, 21 nt, Homo sapiens
acagagauggaaaggccuucu

SEQ ID NO: 892 - RNA, 22 nt, Homo sapiens
ccagacuguggcugaccagagg

SEQ ID NO: 893 - RNA, 22 nt, Homo sapiens
ccucuggucagccacagucugg

SEQ ID NO: 894 - RNA, 21 nt, Homo sapiens
aauguaaacaggcuuuuugcu

SEQ ID NO: 895 - RNA, 21 nt, Homo sapiens
agcaaaaagccuguuuacauu

SEQ ID NO: 896 - RNA, 22 nt, Homo sapiens
gaggaaacugaagcugagaggg

SEQ ID NO: 897 - RNA, 22 nt, Homo sapiens
cccucucagcuucaguuuccuc

SEQ ID NO: 898 - RNA, 17 nt, Homo sapiens
cuccgggacggcugggc

SEQ ID NO: 899 - RNA, 17 nt, Homo sapiens
gcccagccgucccggag

SEQ ID NO: 900 - RNA, 22 nt, Homo sapiens
ugggcuggcagggcaagugcug

SEQ ID NO: 901 - RNA, 22 nt, Homo sapiens
cagcacuugcccugccagccca

SEQ ID NO: 902 - RNA, 17 nt, Homo sapiens
aagacugagaggaggga

SEQ ID NO: 903 - RNA, 17 nt, Homo sapiens
ucccuccucucagucuu

SEQ ID NO: 904 - RNA, 17 nt, Homo sapiens
ugagguaguaguuucuu

SEQ ID NO: 905 - RNA, 17 nt, Homo sapiens
aagaaacuacuaccuca

SEQ ID NO: 906 - RNA, 21 nt, Homo sapiens
uaugugaccucggaugaauca

SEQ ID NO: 907 - RNA, 21 nt, Homo sapiens
ugauucauccgaggucacaua

SEQ ID NO: 908 - RNA, 22 nt, Homo sapiens
gcugaugaugauggugcugaag

SEQ ID NO: 909 - RNA, 22 nt, Homo sapiens
cuucagcaccaucaucaucagc

SEQ ID NO: 910 - RNA, 22 nt, Homo sapiens
uuuaagcaggaaauagaauuua

SEQ ID NO: 911 - RNA, 22 nt, Homo sapiens
uaaauucuauuuccugcuuaaa

SEQ ID NO: 912 - RNA, 22 nt, Homo sapiens
ugugacaauagagaugaacaug

SEQ ID NO: 913 - RNA, 22 nt, Homo sapiens
cauguucaucucuauugucaca

SEQ ID NO: 914 - RNA, 18 nt, Homo sapiens
aggcugggcugggacgga

SEQ ID NO: 915 - RNA, 18 nt, Homo sapiens
uccgucccagcccagccu

SEQ ID NO: 916 - RNA, 20 nt, Homo sapiens
aaauggguggucugaggcaa

SEQ ID NO: 917 - RNA, 20 nt, Homo sapiens
uugccucagaccacccauuu

SEQ ID NO: 918 - RNA, 20 nt, Homo sapiens
cuggguugggcugggcuggg

SEQ ID NO: 919 - RNA, 20 nt, Homo sapiens
cccagcccagcccaacccag

SEQ ID NO: 920 - RNA, 17 nt, Homo sapiens
gcggggcugggcgcgcg

SEQ ID NO: 921 - RNA, 17 nt, Homo sapiens
cgcgcgcccagccccgc

SEQ ID NO: 922 - RNA, 22 nt, Homo sapiens
acuaaaggauauagaagguuuu

SEQ ID NO: 923 - RNA, 22 nt, Homo sapiens
aaaaccuucuauauccuuuagu

SEQ ID NO: 924 - RNA, 22 nt, Homo sapiens
ugagggaguaggauguaugguu

SEQ ID NO: 925 - RNA, 22 nt, Homo sapiens
aaccauacauccuacucccuca

SEQ ID NO: 926 - RNA, 22 nt, Homo sapiens
gaagaacuguugcauuugcccu

SEQ ID NO: 927 - RNA, 22 nt, Homo sapiens
agggcaaaugcaacaguucuuc

SEQ ID NO: 928 - RNA, 22 nt, Homo sapiens
cagggccucacuguaucgccca

SEQ ID NO: 929 - RNA, 22 nt, Homo sapiens
ugggcgauacagugaggcccug

SEQ ID NO: 930 - RNA, 22 nt, Homo sapiens
agacugacggcuggaggcccau

SEQ ID NO: 931 - RNA, 22 nt, Homo sapiens
augggccuccagccgucagucu

SEQ ID NO: 932 - RNA, 18 nt, Homo sapiens
acaggcaggauuggggaa

SEQ ID NO: 933 - RNA, 18 nt, Homo sapiens
uuccccaauccugccugu

SEQ ID NO: 934 - RNA, 22 nt, Homo sapiens
aggacuggacucccggcagccc

SEQ ID NO: 935 - RNA, 22 nt, Homo sapiens
gggcugccgggaguccaguccu

SEQ ID NO: 936 - RNA, 17 nt, Homo sapiens
gggagaagggucggggc

SEQ ID NO: 937 - RNA, 17 nt, Homo sapiens
gccccgacccuucuccc

SEQ ID NO: 938 - RNA, 25 nt, Homo sapiens
aaauaugaugaaacucacagcugag

SEQ ID NO: 939 - RNA, 25 nt, Homo sapiens
cucagcugugaguuucaucauauuu

SEQ ID NO: 940 - RNA, 26 nt, Homo sapiens
gcucagggaugauaacugugcugaga

SEQ ID NO: 941 - RNA, 26 nt, Homo sapiens
ucucagcacaguuaucaucccugagc

SEQ ID NO: 942 - RNA, 18 nt, Homo sapiens
cagcagugcgcagggcug

SEQ ID NO: 943 - RNA, 18 nt, Homo sapiens
cagcccugcgcacugcug

SEQ ID NO: 944 - RNA, 22 nt, Homo sapiens
gcuaaggaaguccugugcucag

SEQ ID NO: 945 - RNA, 22 nt, Homo sapiens
cugagcacaggacuuccuuagc

SEQ ID NO: 946 - RNA, 21 nt, Homo sapiens
ugacucugccuguaggccggu

SEQ ID NO: 947 - RNA, 21 nt, Homo sapiens
accggccuacaggcagaguca

SEQ ID NO: 948 - RNA, 21 nt, Homo sapiens
gaccgagagggccucggcugu

SEQ ID NO: 949 - RNA, 21 nt, Homo sapiens
acagccgaggcccucucgguc

SEQ ID NO: 950 - RNA, 21 nt, Homo sapiens
ggggggaugugcaugcugguu

SEQ ID NO: 951 - RNA, 21 nt, Homo sapiens
aaccagcaugcacaucccccc

SEQ ID NO: 952 - RNA, 22 nt, Homo sapiens
uggucugcaaagagaugacugu

SEQ ID NO: 953 - RNA, 22 nt, Homo sapiens
acagucaucucuuugcagacca

SEQ ID NO: 954 - RNA, 22 nt, Homo sapiens
ucauuauauguaugaucuggac

SEQ ID NO: 955 - RNA, 22 nt, Homo sapiens
guccagaucauacauauaauga

SEQ ID NO: 956 - RNA, 18 nt, Homo sapiens
cccagcaggacgggagcg

SEQ ID NO: 957 - RNA, 18 nt, Homo sapiens
cgcucccguccugcuggg

SEQ ID NO: 958 - RNA, 17 nt, Homo sapiens
auggagaaggcuucuga

SEQ ID NO: 959 - RNA, 17 nt, Homo sapiens
ucagaagccuucuccau

SEQ ID NO: 960 - RNA, 17 nt, Homo sapiens
ccccggggagcccggcg

SEQ ID NO: 961 - RNA, 17 nt, Homo sapiens
cgccgggcuccccgggg

SEQ ID NO: 962 - RNA, 22 nt, Homo sapiens
uggaaggagguugccggacgcu

SEQ ID NO: 963 - RNA, 22 nt, Homo sapiens
agcguccggcaaccuccuucca

SEQ ID NO: 964 - RNA, 17 nt, Homo sapiens
ggauggaggaggggucu

SEQ ID NO: 965 - RNA, 17 nt, Homo sapiens
agaccccuccuccaucc

SEQ ID NO: 966 - RNA, 17 nt, Homo sapiens
guggaccuggcugggac

SEQ ID NO: 967 - RNA, 17 nt, Homo sapiens
gucccagccagguccac

SEQ ID NO: 968 - RNA, 21 nt, Homo sapiens
ucgugcauauaucuaccacau

SEQ ID NO: 969 - RNA, 21 nt, Homo sapiens
augugguagauauaugcacga

SEQ ID NO: 970 - RNA, 21 nt, Homo sapiens
ugugguagauauaugcacgau

SEQ ID NO: 971 - RNA, 21 nt, Homo sapiens
aucgugcauauaucuaccaca

SEQ ID NO: 972 - RNA, 22 nt, Homo sapiens
ugagccgagcugagcuuagcug

SEQ ID NO: 973 - RNA, 22 nt, Homo sapiens
cagcuaagcucagcucggcuca

SEQ ID NO: 974 - RNA, 22 nt, Homo sapiens
gagcuuggaugagcugggcuga

SEQ ID NO: 975 - RNA, 22 nt, Homo sapiens
ucagcccagcucauccaagcuc

SEQ ID NO: 976 - RNA, 22 nt, Homo sapiens
gcugaacugggcugagcugggc

SEQ ID NO: 977 - RNA, 22 nt, Homo sapiens
gcccagcucagcccaguucagc

SEQ ID NO: 978 - RNA, 21 nt, Homo sapiens
uuaguccugccuguagguuua

SEQ ID NO: 979 - RNA, 21 nt, Homo sapiens
uaaaccuacaggcaggacuaa

SEQ ID NO: 980 - RNA, 20 nt, Homo sapiens
uugggcugggcuggguuggg

SEQ ID NO: 981 - RNA, 20 nt, Homo sapiens
cccaacccagcccagcccaa

SEQ ID NO: 982 - RNA, 20 nt, Homo sapiens
uaggaugggggugagaggug

SEQ ID NO: 983 - RNA, 20 nt, Homo sapiens
caccucucacccccauccua

SEQ ID NO: 984 - RNA, 22 nt, Homo sapiens
aaaaguaauuguggauuuugcu

SEQ ID NO: 985 - RNA, 22 nt, Homo sapiens
agcaaaauccacaauuacuuuu

SEQ ID NO: 986 - RNA, 22 nt, Homo sapiens
caaaaaccggcaauuacuuuug

SEQ ID NO: 987 - RNA, 22 nt, Homo sapiens
caaaaguaauugccgguuuuug

SEQ ID NO: 988 - RNA, 22 nt, Homo sapiens
gaaaacgacaaugacuuuugca

SEQ ID NO: 989 - RNA, 22 nt, Homo sapiens
ugcaaaagucauugucguuuuc

SEQ ID NO: 990 - RNA, 21 nt, Homo sapiens
caaaaacugcaauuacuuuca

SEQ ID NO: 991 - RNA, 21 nt, Homo sapiens
ugaaaguaauugcaguuuuug

SEQ ID NO: 992 - RNA, 21 nt, Homo sapiens
aaagguaauugugguuucugc

SEQ ID NO: 993 - RNA, 21 nt, Homo sapiens
gcagaaaccacaauuaccuuu

SEQ ID NO: 994 - RNA, 22 nt, Homo sapiens
caaaaacugcaguuacuuuugc

SEQ ID NO: 995 - RNA, 22 nt, Homo sapiens
gcaaaaguaacugcaguuuuug

SEQ ID NO: 996 - RNA, 20 nt, Homo sapiens
aaaagugauugcaguguuug

SEQ ID NO: 997 - RNA, 20 nt, Homo sapiens
caaacacugcaaucacuuuu

SEQ ID NO: 998 - RNA, 22 nt, Homo sapiens
aaagguaauugcaguuuuuccc

SEQ ID NO: 999 - RNA, 22 nt, Homo sapiens
gggaaaaacugcaauuaccuuu

SEQ ID NO: 1000 - RNA, 21 nt, Homo sapiens
uaaaaacugcaauuacuuuua

SEQ ID NO: 1001 - RNA, 21 nt, Homo sapiens
uaaaaguaauugcaguuuuua

SEQ ID NO: 1002 - RNA, 23 nt, Homo sapiens
ugcaaaaguaauugcaguuuuug

SEQ ID NO: 1003 - RNA, 23 nt, Homo sapiens
caaaaacugcaauuacuuuugca

SEQ ID NO: 1004 - RNA, 21 nt, Homo sapiens
aaaaguaacugcgguuuuuga

SEQ ID NO: 1005 - RNA, 21 nt, Homo sapiens
ucaaaaaccgcaguuacuuuu

SEQ ID NO: 1006 - RNA, 22 nt, Homo sapiens
aacggcaaugacuuuuguacca

SEQ ID NO: 1007 - RNA, 22 nt, Homo sapiens
ugguacaaaagucauugccguu

SEQ ID NO: 1008 - RNA, 22 nt, Homo sapiens
caaaaacugcaguuacuuuugu

SEQ ID NO: 1009 - RNA, 22 nt, Homo sapiens
acaaaaguaacugcaguuuuug

SEQ ID NO: 1010 - RNA, 22 nt, Homo sapiens
aaaaguaauugcgguuuuugcc

SEQ ID NO: 1011 - RNA, 22 nt, Homo sapiens
ggcaaaaaccgcaauuacuuuu

SEQ ID NO: 1012 - RNA, 20 nt, Homo sapiens
aaaaggcauugugguuuuug

SEQ ID NO: 1013 - RNA, 20 nt, Homo sapiens
caaaaaccacaaugccuuuu

SEQ ID NO: 1014 - RNA, 23 nt, Homo sapiens
cggcccgggcugcugcuguuccu

SEQ ID NO: 1015 - RNA, 23 nt, Homo sapiens
aggaacagcagcagcccgggccg

SEQ ID NO: 1016 - RNA, 20 nt, Homo sapiens
agagguauagggcaugggaa

SEQ ID NO: 1017 - RNA, 20 nt, Homo sapiens
uucccaugcccuauaccucu

SEQ ID NO: 1018 - RNA, 22 nt, Homo sapiens
uuccuaugcauauacuucuuug

SEQ ID NO: 1019 - RNA, 22 nt, Homo sapiens
caaagaaguauaugcauaggaa

SEQ ID NO: 1020 - RNA, 22 nt, Homo sapiens
aucauagaggaaaauccauguu

SEQ ID NO: 1021 - RNA, 22 nt, Homo sapiens
aacauggauuuuccucuaugau

SEQ ID NO: 1022 - RNA, 22 nt, Homo sapiens
cguggauauuccuucuauguuu

SEQ ID NO: 1023 - RNA, 22 nt, Homo sapiens
aaacauagaaggaauauccacg

SEQ ID NO: 1024 - RNA, 22 nt, Homo sapiens
ugaguauuacauggccaaucuc

SEQ ID NO: 1025 - RNA, 22 nt, Homo sapiens
gagauuggccauguaauacuca

SEQ ID NO: 1026 - RNA, 21 nt, Homo sapiens
cuuccgccccgccgggcgucg

SEQ ID NO: 1027 - RNA, 21 nt, Homo sapiens
cgacgcccggcggggcggaag

SEQ ID NO: 1028 - RNA, 22 nt, Homo sapiens
uagcuuaucagacugauguuga

SEQ ID NO: 1029 - RNA, 22 nt, Homo sapiens
ucaacaucagucugauaagcua

SEQ ID NO: 1030 - RNA, 22 nt, Homo sapiens
cacuagauugugagcuccugga

SEQ ID NO: 1031 - RNA, 22 nt, Homo sapiens
uccaggagcucacaaucuagug

SEQ ID NO: 1032 - RNA, 22 nt, Homo sapiens
aaggagcucacagucuauugag

SEQ ID NO: 1033 - RNA, 22 nt, Homo sapiens
cucaauagacugugagcuccuu

SEQ ID NO: 1034 - RNA, 22 nt, Homo sapiens
uacgucaucguugucaucguca

SEQ ID NO: 1035 - RNA, 22 nt, Homo sapiens
ugacgaugacaacgaugacgua

SEQ ID NO: 1036 - RNA, 22 nt, Homo sapiens
cacgcucaugcacacacccaca

SEQ ID NO: 1037 - RNA, 22 nt, Homo sapiens
ugugggugugugcaugagcgug

SEQ ID NO: 1038 - RNA, 21 nt, Homo sapiens
caacaccagucgaugggcugu

SEQ ID NO: 1039 - RNA, 21 nt, Homo sapiens
acagcccaucgacugguguug

SEQ ID NO: 1040 - RNA, 22 nt, Homo sapiens
uucaccaccuucuccacccagc

SEQ ID NO: 1041 - RNA, 22 nt, Homo sapiens
gcuggguggagaagguggugaa

SEQ ID NO: 1042 - RNA, 23 nt, Homo sapiens
cggguagagagggcagugggagg

SEQ ID NO: 1043 - RNA, 23 nt, Homo sapiens
ccucccacugcccucucuacccg

SEQ ID NO: 1044 - RNA, 18 nt, Homo sapiens
aauccuugcuaccugggu

SEQ ID NO: 1045 - RNA, 18 nt, Homo sapiens
acccagguagcaaggauu

SEQ ID NO: 1046 - RNA, 22 nt, Homo sapiens
caauuuagugugugugauauuu

SEQ ID NO: 1047 - RNA, 22 nt, Homo sapiens
aaauaucacacacacuaaauug

SEQ ID NO: 1048 - RNA, 22 nt, Homo sapiens
uauugcacauuacuaaguugca

SEQ ID NO: 1049 - RNA, 22 nt, Homo sapiens
ugcaacuuaguaaugugcaaua

SEQ ID NO: 1050 - RNA, 22 nt, Homo sapiens
ccuauucuugauuacuuguuuc

SEQ ID NO: 1051 - RNA, 22 nt, Homo sapiens
gaaacaaguaaucaagaauagg

SEQ ID NO: 1052 - RNA, 22 nt, Homo sapiens
uucaaguaauccaggauaggcu

SEQ ID NO: 1053 - RNA, 22 nt, Homo sapiens
agccuauccuggauuacuugaa

SEQ ID NO: 1054 - RNA, 23 nt, Homo sapiens
ccaguuaccgcuuccgcuaccgc

SEQ ID NO: 1055 - RNA, 23 nt, Homo sapiens
gcgguagcggaagcgguaacugg

SEQ ID NO: 1056 - RNA, 21 nt, Homo sapiens
gauuucaguggagugaaguuc

SEQ ID NO: 1057 - RNA, 21 nt, Homo sapiens
gaacuucacuccacugaaauc

SEQ ID NO: 1058 - RNA, 22 nt, Homo sapiens
uccuucauuccaccggagucug

SEQ ID NO: 1059 - RNA, 22 nt, Homo sapiens
cagacuccgguggaaugaagga

SEQ ID NO: 1060 - RNA, 23 nt, Homo sapiens
aaaauggugcccuagugacuaca

SEQ ID NO: 1061 - RNA, 23 nt, Homo sapiens
uguagucacuagggcaccauuuu

SEQ ID NO: 1062 - RNA, 21 nt, Homo sapiens
caagucacuagugguuccguu

SEQ ID NO: 1063 - RNA, 21 nt, Homo sapiens
aacggaaccacuagugacuug

SEQ ID NO: 1064 - RNA, 22 nt, Homo sapiens
ccaguauuaacugugcugcuga

SEQ ID NO: 1065 - RNA, 22 nt, Homo sapiens
ucagcagcacaguuaauacugg

SEQ ID NO: 1066 - RNA, 23 nt, Homo sapiens
ucccccaggugugauucugauuu

SEQ ID NO: 1067 - RNA, 23 nt, Homo sapiens
aaaucagaaucacaccuggggga

SEQ ID NO: 1068 - RNA, 22 nt, Homo sapiens
aaaagcuggguugagagggcga

SEQ ID NO: 1069 - RNA, 22 nt, Homo sapiens
ucgcccucucaacccagcuuuu

SEQ ID NO: 1070 - RNA, 22 nt, Homo sapiens
uggacggagaacugauaagggu

SEQ ID NO: 1071 - RNA, 22 nt, Homo sapiens
acccuuaucaguucuccgucca

SEQ ID NO: 1072 - RNA, 22 nt, Homo sapiens
uggugggccgcagaacaugugc

SEQ ID NO: 1073 - RNA, 22 nt, Homo sapiens
gcacauguucugcggcccacca

SEQ ID NO: 1074 - RNA, 22 nt, Homo sapiens
agugccugcuaugugccaggca

SEQ ID NO: 1075 - RNA, 22 nt, Homo sapiens
ugccuggcacauagcaggcacu

SEQ ID NO: 1076 - RNA, 22 nt, Homo sapiens
cuuggcaccuagcaagcacuca

SEQ ID NO: 1077 - RNA, 22 nt, Homo sapiens
ugagugcuugcuaggugccaag

SEQ ID NO: 1078 - RNA, 23 nt, Homo sapiens
uuauugcuuaagaauacgcguag

SEQ ID NO: 1079 - RNA, 23 nt, Homo sapiens
cuacgcguauucuuaagcaauaa

SEQ ID NO: 1080 - RNA, 22 nt, Homo sapiens
uugcauagucacaaaagugauc

SEQ ID NO: 1081 - RNA, 22 nt, Homo sapiens
gaucacuuuugugacuaugcaa

SEQ ID NO: 1082 - RNA, 22 nt, Homo sapiens
gugaauuaccgaagggccauaa

SEQ ID NO: 1083 - RNA, 22 nt, Homo sapiens
uuauggcccuucgguaauucac

SEQ ID NO: 1084 - RNA, 22 nt, Homo sapiens
uauggcacugguagaauucacu

SEQ ID NO: 1085 - RNA, 22 nt, Homo sapiens
agugaauucuaccagugccaua

SEQ ID NO: 1086 - RNA, 22 nt, Homo sapiens
ugauauguuugauauauuaggu

SEQ ID NO: 1087 - RNA, 22 nt, Homo sapiens
accuaauauaucaaacauauca

SEQ ID NO: 1088 - RNA, 21 nt, Homo sapiens
ugauauguuugauauuggguu

SEQ ID NO: 1089 - RNA, 21 nt, Homo sapiens
aacccaauaucaaacauauca

SEQ ID NO: 1090 - RNA, 18 nt, Homo sapiens
agcaggugcggggcggcg

SEQ ID NO: 1091 - RNA, 18 nt, Homo sapiens
cgccgccccgcaccugcu

SEQ ID NO: 1092 - RNA, 21 nt, Homo sapiens
cagugcaaguguagaugccga

SEQ ID NO: 1093 - RNA, 21 nt, Homo sapiens
ucggcaucuacacuugcacug

SEQ ID NO: 1094 - RNA, 22 nt, Homo sapiens
uauguaauaugguccacaucuu

SEQ ID NO: 1095 - RNA, 22 nt, Homo sapiens
aagauguggaccauauuacaua

SEQ ID NO: 1096 - RNA, 21 nt, Homo sapiens
aauauaacacagauggccugu

SEQ ID NO: 1097 - RNA, 21 nt, Homo sapiens
acaggccaucuguguuauauu

SEQ ID NO: 1098 - RNA, 22 nt, Homo sapiens
aucgggaaugucguguccgccc

SEQ ID NO: 1099 - RNA, 22 nt, Homo sapiens
gggcggacacgacauucccgau

SEQ ID NO: 1100 - RNA, 23 nt, Homo sapiens
aaugacacgaucacucccguuga

SEQ ID NO: 1101 - RNA, 23 nt, Homo sapiens
ucaacgggagugaucgugucauu

SEQ ID NO: 1102 - RNA, 22 nt, Homo sapiens
uacucaggagaguggcaaucac

SEQ ID NO: 1103 - RNA, 22 nt, Homo sapiens
gugauugccacucuccugagua

SEQ ID NO: 1104 - RNA, 23 nt, Homo sapiens
uggaagacuagugauuuuguugu

SEQ ID NO: 1105 - RNA, 23 nt, Homo sapiens
acaacaaaaucacuagucuucca

SEQ ID NO: 1106 - RNA, 22 nt, Homo sapiens
auaaagcuagauaaccgaaagu

SEQ ID NO: 1107 - RNA, 22 nt, Homo sapiens
acuuucgguuaucuagcuuuau

SEQ ID NO: 1108 - RNA, 23 nt, Homo sapiens
ucuuugguuaucuagcuguauga

SEQ ID NO: 1109 - RNA, 23 nt, Homo sapiens
ucauacagcuagauaaccaaaga

SEQ ID NO: 1110 - RNA, 22 nt, Homo sapiens
acaggugagguucuugggagcc

SEQ ID NO: 1111 - RNA, 22 nt, Homo sapiens
ggcucccaagaaccucaccugu

SEQ ID NO: 1112 - RNA, 24 nt, Homo sapiens
ucccugagacccuuuaaccuguga

SEQ ID NO: 1113 - RNA, 24 nt, Homo sapiens
ucacagguuaaagggucucaggga

SEQ ID NO: 1114 - RNA, 22 nt, Homo sapiens
caacaaaucccagucuaccuaa

SEQ ID NO: 1115 - RNA, 22 nt, Homo sapiens
uuagguagacugggauuuguug

SEQ ID NO: 1116 - RNA, 22 nt, Homo sapiens
cguguucacagcggaccuugau

SEQ ID NO: 1117 - RNA, 22 nt, Homo sapiens
aucaagguccgcugugaacacg

SEQ ID NO: 1118 - RNA, 20 nt, Homo sapiens
uaaggcacgcggugaaugcc

SEQ ID NO: 1119 - RNA, 20 nt, Homo sapiens
ggcauucaccgcgugccuua

SEQ ID NO: 1120 - RNA, 22 nt, Homo sapiens
aacacaccugguuaaccucuuu

SEQ ID NO: 1121 - RNA, 22 nt, Homo sapiens
aaagagguuaaccagguguguu

SEQ ID NO: 1122 - RNA, 22 nt, Homo sapiens
uaacagucuacagccauggucg

SEQ ID NO: 1123 - RNA, 22 nt, Homo sapiens
cgaccauggcuguagacuguua

SEQ ID NO: 1124 - RNA, 22 nt, Homo sapiens
accguggcuuucgauuguuacu

SEQ ID NO: 1125 - RNA, 22 nt, Homo sapiens
aguaacaaucgaaagccacggu

SEQ ID NO: 1126 - RNA, 21 nt, Homo sapiens
uaacagucuccagucacggcc

SEQ ID NO: 1127 - RNA, 21 nt, Homo sapiens
ggccgugacuggagacuguua

SEQ ID NO: 1128 - RNA, 23 nt, Homo sapiens
accuuggcucuagacugcuuacu

SEQ ID NO: 1129 - RNA, 23 nt, Homo sapiens
aguaagcagucuagagccaaggu

SEQ ID NO: 1130 - RNA, 23 nt, Homo sapiens
ucucacacagaaaucgcacccgu

SEQ ID NO: 1131 - RNA, 23 nt, Homo sapiens
acgggugcgauuucugugugaga

SEQ ID NO: 1132 - RNA, 22 nt, Homo sapiens
ugguugaccauagaacaugcgc

SEQ ID NO: 1133 - RNA, 22 nt, Homo sapiens
gcgcauguucuauggucaacca

SEQ ID NO: 1134 - RNA, 23 nt, Homo sapiens
caguaacaaagauucauccuugu

SEQ ID NO: 1135 - RNA, 23 nt, Homo sapiens
acaaggaugaaucuuuguuacug

SEQ ID NO: 1136 - RNA, 22 nt, Homo sapiens
agaguugagucuggacgucccg

SEQ ID NO: 1137 - RNA, 22 nt, Homo sapiens
cgggacguccagacucaacucu

SEQ ID NO: 1138 - RNA, 22 nt, Homo sapiens
agaauuguggcuggacaucugu

SEQ ID NO: 1139 - RNA, 22 nt, Homo sapiens
acagauguccagccacaauucu

SEQ ID NO: 1140 - RNA, 21 nt, Homo sapiens
ugauuguccaaacgcaauucu

SEQ ID NO: 1141 - RNA, 21 nt, Homo sapiens
agaauugcguuuggacaauca

SEQ ID NO: 1142 - RNA, 22 nt, Homo sapiens
uauagggauuggagccguggcg

SEQ ID NO: 1143 - RNA, 22 nt, Homo sapiens
cgccacggcuccaaucccuaua

SEQ ID NO: 1144 - RNA, 23 nt, Homo sapiens
uauggcuuuuuauuccuauguga

SEQ ID NO: 1145 - RNA, 23 nt, Homo sapiens
ucacauaggaauaaaaagccaua

SEQ ID NO: 1146 - RNA, 22 nt, Homo sapiens
auguagggcuaaaagccauggg

SEQ ID NO: 1147 - RNA, 22 nt, Homo sapiens
cccauggcuuuuagcccuacau

SEQ ID NO: 1148 - RNA, 23 nt, Homo sapiens
uauggcuuuucauuccuauguga

SEQ ID NO: 1149 - RNA, 23 nt, Homo sapiens
ucacauaggaaugaaaagccaua

SEQ ID NO: 1150 - RNA, 22 nt, Homo sapiens
aaccaucgaccguugaguggac

SEQ ID NO: 1151 - RNA, 22 nt, Homo sapiens
guccacucaacggucgaugguu

SEQ ID NO: 1152 - RNA, 22 nt, Homo sapiens
aacauucaaccugucggugagu

SEQ ID NO: 1153 - RNA, 22 nt, Homo sapiens
acucaccgacagguugaauguu

SEQ ID NO: 1154 - RNA, 25 nt, Homo sapiens
cuuccagacgcuccgccccacgucg

SEQ ID NO: 1155 - RNA, 25 nt, Homo sapiens
cgacguggggcggagcgucuggaag

SEQ ID NO: 1156 - RNA, 24 nt, Homo sapiens
aacaacaaaaucacuagucuucca

SEQ ID NO: 1157 - RNA, 24 nt, Homo sapiens
uggaagacuagugauuuuguuguu

SEQ ID NO: 1158 - RNA, 22 nt, Homo sapiens
agguagacugggauuuguuguu

SEQ ID NO: 1159 - RNA, 22 nt, Homo sapiens
aacaacaaaucccagucuaccu

SEQ ID NO: 1160 - RNA, 22 nt, Homo sapiens
aaacaccauugucacacuccac

SEQ ID NO: 1161 - RNA, 22 nt, Homo sapiens
guggagugugacaaugguguuu

SEQ ID NO: 1162 - RNA, 23 nt, Homo sapiens
uuuagugugauaauggcguuuga

SEQ ID NO: 1163 - RNA, 23 nt, Homo sapiens
ucaaacgccauuaucacacuaaa

SEQ ID NO: 1164 - RNA, 22 nt, Homo sapiens
uauggaaagacuuugccacucu

SEQ ID NO: 1165 - RNA, 22 nt, Homo sapiens
agaguggcaaagucuuuccaua

SEQ ID NO: 1166 - RNA, 21 nt, Homo sapiens
aguggcaaagucuuuccauau

SEQ ID NO: 1167 - RNA, 21 nt, Homo sapiens
auauggaaagacuuugccacu

SEQ ID NO: 1168 - RNA, 22 nt, Homo sapiens
cagcccggaucccagcccacuu

SEQ ID NO: 1169 - RNA, 22 nt, Homo sapiens
aagugggcugggauccgggcug

SEQ ID NO: 1170 - RNA, 20 nt, Homo sapiens
guggguuggggcgggcucug

SEQ ID NO: 1171 - RNA, 20 nt, Homo sapiens
cagagcccgccccaacccac

SEQ ID NO: 1172 - RNA, 23 nt, Homo sapiens
uucgggcuggccugcugcuccgg

SEQ ID NO: 1173 - RNA, 23 nt, Homo sapiens
ccggagcagcaggccagcccgaa

SEQ ID NO: 1174 - RNA, 21 nt, Homo sapiens
ugugcagcaggccaaccgaga

SEQ ID NO: 1175 - RNA, 21 nt, Homo sapiens
ucucgguuggccugcugcaca

SEQ ID NO: 1176 - RNA, 22 nt, Homo sapiens
cagggcaggaagaaguggacaa

SEQ ID NO: 1177 - RNA, 22 nt, Homo sapiens
uuguccacuucuuccugcccug

SEQ ID NO: 1178 - RNA, 22 nt, Homo sapiens
guccacuucugccugcccugcc

SEQ ID NO: 1179 - RNA, 22 nt, Homo sapiens
ggcagggcaggcagaaguggac

SEQ ID NO: 1180 - RNA, 22 nt, Homo sapiens
uuuggacagaaaacacgcaggu

SEQ ID NO: 1181 - RNA, 22 nt, Homo sapiens
accugcguguuuucuguccaaa

SEQ ID NO: 1182 - RNA, 20 nt, Homo sapiens
ccugcguguuuucuguccaa

SEQ ID NO: 1183 - RNA, 20 nt, Homo sapiens
uuggacagaaaacacgcagg

SEQ ID NO: 1184 - RNA, 22 nt, Homo sapiens
ugccgcccucucgcugcucuag

SEQ ID NO: 1185 - RNA, 22 nt, Homo sapiens
cuagagcagcgagagggcggca

SEQ ID NO: 1186 - RNA, 23 nt, Homo sapiens
gagggcagcguggguguggcgga

SEQ ID NO: 1187 - RNA, 23 nt, Homo sapiens
uccgccacacccacgcugcccuc

SEQ ID NO: 1188 - RNA, 22 nt, Homo sapiens
aggagcuagccaggcauaugca

SEQ ID NO: 1189 - RNA, 22 nt, Homo sapiens
ugcauaugccuggcuagcuccu

SEQ ID NO: 1190 - RNA, 20 nt, Homo sapiens
auaugccuggcuagcuccuc

SEQ ID NO: 1191 - RNA, 20 nt, Homo sapiens
gaggagcuagccaggcauau

SEQ ID NO: 1192 - RNA, 19 nt, Homo sapiens
cggcgcgaccggcccgggg

SEQ ID NO: 1193 - RNA, 19 nt, Homo sapiens
ccccgggccggucgcgccg

SEQ ID NO: 1194 - RNA, 21 nt, Homo sapiens
ucuugaagucagaacccgcaa

SEQ ID NO: 1195 - RNA, 21 nt, Homo sapiens
uugcggguucugacuucaaga

SEQ ID NO: 1196 - RNA, 22 nt, Homo sapiens
aacucguguucaaagccuuuag

SEQ ID NO: 1197 - RNA, 22 nt, Homo sapiens
cuaaaggcuuugaacacgaguu

SEQ ID NO: 1198 - RNA, 23 nt, Homo sapiens
ccuggacaccgcucagccggccg

SEQ ID NO: 1199 - RNA, 23 nt, Homo sapiens
cggccggcugagcgguguccagg

SEQ ID NO: 1200 - RNA, 21 nt, Homo sapiens
acucggcugcgguggacaagu

SEQ ID NO: 1201 - RNA, 21 nt, Homo sapiens
acuuguccaccgcagccgagu

SEQ ID NO: 1202 - RNA, 20 nt, Homo sapiens
ucacucucaccuugcuuugc

SEQ ID NO: 1203 - RNA, 20 nt, Homo sapiens
gcaaagcaaggugagaguga

SEQ ID NO: 1204 - RNA, 22 nt, Homo sapiens
uugcuaaguaggcugagauuga

SEQ ID NO: 1205 - RNA, 22 nt, Homo sapiens
ucaaucucagccuacuuagcaa

SEQ ID NO: 1206 - RNA, 22 nt, Homo sapiens
cacccccuguuuccuggcccac

SEQ ID NO: 1207 - RNA, 22 nt, Homo sapiens
gugggccaggaaacagggggug

SEQ ID NO: 1208 - RNA, 23 nt, Homo sapiens
ugggccagggagcagcugguggg

SEQ ID NO: 1209 - RNA, 23 nt, Homo sapiens
cccaccagcugcucccuggccca

SEQ ID NO: 1210 - RNA, 24 nt, Homo sapiens
ugcccaugccauacuuuugccuca

SEQ ID NO: 1211 - RNA, 24 nt, Homo sapiens
ugaggcaaaaguauggcaugggca

SEQ ID NO: 1212 - RNA, 22 nt, Homo sapiens
auggcaucguccccugguggcu

SEQ ID NO: 1213 - RNA, 22 nt, Homo sapiens
agccaccaggggacgaugccau

SEQ ID NO: 1214 - RNA, 22 nt, Homo sapiens
gacacaugaccauaaaugcuaa

SEQ ID NO: 1215 - RNA, 22 nt, Homo sapiens
uuagcauuuauggucauguguc

SEQ ID NO: 1216 - RNA, 23 nt, Homo sapiens
uggagagagaaaagagacagaag

SEQ ID NO: 1217 - RNA, 23 nt, Homo sapiens
cuucugucucuuuucucucucca

SEQ ID NO: 1218 - RNA, 22 nt, Homo sapiens
agacaguaguucuugccugguu

SEQ ID NO: 1219 - RNA, 22 nt, Homo sapiens
aaccaggcaagaacuacugucu

SEQ ID NO: 1220 - RNA, 19 nt, Homo sapiens
accaggcaagaaauauugu

SEQ ID NO: 1221 - RNA, 19 nt, Homo sapiens
acaauauuucuugccuggu

SEQ ID NO: 1222 - RNA, 21 nt, Homo sapiens
auugucccucucccuucccag

SEQ ID NO: 1223 - RNA, 21 nt, Homo sapiens
cugggaagggagagggacaau

SEQ ID NO: 1224 - RNA, 22 nt, Homo sapiens
acugggaagaggagcugaggga

SEQ ID NO: 1225 - RNA, 22 nt, Homo sapiens
ucccucagcuccucuucccagu

SEQ ID NO: 1226 - RNA, 23 nt, Homo sapiens
gaagauggugcugugcugaggaa

SEQ ID NO: 1227 - RNA, 23 nt, Homo sapiens
uuccucagcacagcaccaucuuc

SEQ ID NO: 1228 - RNA, 20 nt, Homo sapiens
ugugggacugcaaaugggag

SEQ ID NO: 1229 - RNA, 20 nt, Homo sapiens
cucccauuugcagucccaca

SEQ ID NO: 1230 - RNA, 21 nt, Homo sapiens
ucugaggccugccucucccca

SEQ ID NO: 1231 - RNA, 21 nt, Homo sapiens
uggggagaggcaggccucaga

SEQ ID NO: 1232 - RNA, 24 nt, Homo sapiens
ugggcgaggggugggcucucagag

SEQ ID NO: 1233 - RNA, 24 nt, Homo sapiens
cucugagagcccaccccucgccca

SEQ ID NO: 1234 - RNA, 21 nt, Homo sapiens
agguagaaugaggccugacau

SEQ ID NO: 1235 - RNA, 21 nt, Homo sapiens
augucaggccucauucuaccu

SEQ ID NO: 1236 - RNA, 19 nt, Homo sapiens
ucaggccucuuucuaccuu

SEQ ID NO: 1237 - RNA, 19 nt, Homo sapiens
aagguagaaagaggccuga

SEQ ID NO: 1238 - RNA, 20 nt, Homo sapiens
cggggugggugaggucgggc

SEQ ID NO: 1239 - RNA, 20 nt, Homo sapiens
gcccgaccucacccaccccg

SEQ ID NO: 1240 - RNA, 22 nt, Homo sapiens
guucuguuaacccauccccuca

SEQ ID NO: 1241 - RNA, 22 nt, Homo sapiens
ugaggggauggguuaacagaac

SEQ ID NO: 1242 - RNA, 22 nt, Homo sapiens
aggggacugguuaauagaacua

SEQ ID NO: 1243 - RNA, 22 nt, Homo sapiens
uaguucuauuaaccaguccccu

SEQ ID NO: 1244 - RNA, 23 nt, Homo sapiens
uggaguuaaggguugcuuggaga

SEQ ID NO: 1245 - RNA, 23 nt, Homo sapiens
ucuccaagcaacccuuaacucca

SEQ ID NO: 1246 - RNA, 22 nt, Homo sapiens
ucucugagcaaggcuuaacacc

SEQ ID NO: 1247 - RNA, 22 nt, Homo sapiens
gguguuaagccuugcucagaga

SEQ ID NO: 1248 - RNA, 22 nt, Homo sapiens
ugugggaucuggaggcaucugg

SEQ ID NO: 1249 - RNA, 22 nt, Homo sapiens
ccagaugccuccagaucccaca

SEQ ID NO: 1250 - RNA, 21 nt, Homo sapiens
acccucgucagguccccgggg

SEQ ID NO: 1251 - RNA, 21 nt, Homo sapiens
ccccggggaccugacgagggu

SEQ ID NO: 1252 - RNA, 22 nt, Homo sapiens
caccggggauggcagagggucg

SEQ ID NO: 1253 - RNA, 22 nt, Homo sapiens
cgacccucugccauccccggug

SEQ ID NO: 1254 - RNA, 23 nt, Homo sapiens
ugggcugagggcaggaggccugu

SEQ ID NO: 1255 - RNA, 23 nt, Homo sapiens
acaggccuccugcccucagccca

SEQ ID NO: 1256 - RNA, 23 nt, Homo sapiens
aauguggaaguggucugaggcau

SEQ ID NO: 1257 - RNA, 23 nt, Homo sapiens
augccucagaccacuuccacauu

SEQ ID NO: 1258 - RNA, 23 nt, Homo sapiens
gugaguguggauccuggaggaau

SEQ ID NO: 1259 - RNA, 23 nt, Homo sapiens
auuccuccaggauccacacucac

SEQ ID NO: 1260 - RNA, 22 nt, Homo sapiens
uuucuucuuagacauggcaacg

SEQ ID NO: 1261 - RNA, 22 nt, Homo sapiens
cguugccaugucuaagaagaaa

SEQ ID NO: 1262 - RNA, 22 nt, Homo sapiens
cugccaugucuaagaagaaaac

SEQ ID NO: 1263 - RNA, 22 nt, Homo sapiens
guuuucuucuuagacauggcag

SEQ ID NO: 1264 - RNA, 22 nt, Homo sapiens
uuucuucuuagacauggcagcu

SEQ ID NO: 1265 - RNA, 22 nt, Homo sapiens
agcugccaugucuaagaagaaa

SEQ ID NO: 1266 - RNA, 19 nt, Homo sapiens
uugccaugucuaagaagaa

SEQ ID NO: 1267 - RNA, 19 nt, Homo sapiens
uucuucuuagacauggcaa

SEQ ID NO: 1268 - RNA, 23 nt, Homo sapiens
ugcagcucugguggaaaauggag

SEQ ID NO: 1269 - RNA, 23 nt, Homo sapiens
cuccauuuuccaccagagcugca

SEQ ID NO: 1270 - RNA, 22 nt, Homo sapiens
caggauccacagagcuagucca

SEQ ID NO: 1271 - RNA, 22 nt, Homo sapiens
uggacuagcucuguggauccug

SEQ ID NO: 1272 - RNA, 22 nt, Homo sapiens
aacuagcucuguggauccugac

SEQ ID NO: 1273 - RNA, 22 nt, Homo sapiens
gucaggauccacagagcuaguu

SEQ ID NO: 1274 - RNA, 22 nt, Homo sapiens
aaagauggacaauuggcuaaau

SEQ ID NO: 1275 - RNA, 22 nt, Homo sapiens
auuuagccaauuguccaucuuu

SEQ ID NO: 1276 - RNA, 24 nt, Homo sapiens
agcugagcuccauggacgugcagu

SEQ ID NO: 1277 - RNA, 24 nt, Homo sapiens
acugcacguccauggagcucagcu

SEQ ID NO: 1278 - RNA, 22 nt, Homo sapiens
cuuccggucugugagccccguc

SEQ ID NO: 1279 - RNA, 22 nt, Homo sapiens
gacggggcucacagaccggaag

SEQ ID NO: 1280 - RNA, 22 nt, Homo sapiens
uggggugcccacuccgcaaguu

SEQ ID NO: 1281 - RNA, 22 nt, Homo sapiens
aacuugcggagugggcacccca

SEQ ID NO: 1282 - RNA, 26 nt, Homo sapiens
cucggccgcggcgcguagcccccgcc

SEQ ID NO: 1283 - RNA, 26 nt, Homo sapiens
ggcgggggcuacgcgccgcggccgag

SEQ ID NO: 1284 - RNA, 23 nt, Homo sapiens
cugggggacgcgugagcgcgagc

SEQ ID NO: 1285 - RNA, 23 nt, Homo sapiens
gcucgcgcucacgcgucccccag

SEQ ID NO: 1286 - RNA, 21 nt, Homo sapiens
cauacaaucugacauguauuu

SEQ ID NO: 1287 - RNA, 21 nt, Homo sapiens
aaauacaugucagauuguaug

SEQ ID NO: 1288 - RNA, 21 nt, Homo sapiens
auacaugucagauuguaugcc

SEQ ID NO: 1289 - RNA, 21 nt, Homo sapiens
ggcauacaaucugacauguau

SEQ ID NO: 1290 - RNA, 21 nt, Homo sapiens
ucccuccuucuguccccacag

SEQ ID NO: 1291 - RNA, 21 nt, Homo sapiens
cuguggggacagaaggaggga

SEQ ID NO: 1292 - RNA, 22 nt, Homo sapiens
acuggggagcagaaggagaacc

SEQ ID NO: 1293 - RNA, 22 nt, Homo sapiens
gguucuccuucugcuccccagu

SEQ ID NO: 1294 - RNA, 23 nt, Homo sapiens
gaaaauccuuuuuguuuuuccag

SEQ ID NO: 1295 - RNA, 23 nt, Homo sapiens
cuggaaaaacaaaaaggauuuuc

SEQ ID NO: 1296 - RNA, 23 nt, Homo sapiens
agggaaaaaaaaaaggauuuguc

SEQ ID NO: 1297 - RNA, 23 nt, Homo sapiens
gacaaauccuuuuuuuuuucccu

SEQ ID NO: 1298 - RNA, 22 nt, Homo sapiens
uguguccgggaaguggaggagg

SEQ ID NO: 1299 - RNA, 22 nt, Homo sapiens
ccuccuccacuucccggacaca

SEQ ID NO: 1300 - RNA, 22 nt, Homo sapiens
ugaaguuacaucauggucgcuu

SEQ ID NO: 1301 - RNA, 22 nt, Homo sapiens
aagcgaccaugauguaacuuca

SEQ ID NO: 1302 - RNA, 22 nt, Homo sapiens
aagcgaccaugauguaacuuca

SEQ ID NO: 1303 - RNA, 22 nt, Homo sapiens
ugaaguuacaucauggucgcuu

SEQ ID NO: 1304 - RNA, 21 nt, Homo sapiens
uuagugcauagucuuuggucu

SEQ ID NO: 1305 - RNA, 21 nt, Homo sapiens
agaccaaagacuaugcacuaa

SEQ ID NO: 1306 - RNA, 22 nt, Homo sapiens
accgaagacugugcgcuaaucu

SEQ ID NO: 1307 - RNA, 22 nt, Homo sapiens
agauuagcgcacagucuucggu

SEQ ID NO: 1308 - RNA, 21 nt, Homo sapiens
uuacacagcuggacagaggca

SEQ ID NO: 1309 - RNA, 21 nt, Homo sapiens
ugccucuguccagcuguguaa

SEQ ID NO: 1310 - RNA, 22 nt, Homo sapiens
uccaggcaggagccggacugga

SEQ ID NO: 1311 - RNA, 22 nt, Homo sapiens
uccaguccggcuccugccugga

SEQ ID NO: 1312 - RNA, 21 nt, Homo sapiens
cugggcucgggacgcgcggcu

SEQ ID NO: 1313 - RNA, 21 nt, Homo sapiens
agccgcgcgucccgagcccag

SEQ ID NO: 1314 - RNA, 22 nt, Homo sapiens
ggggcugugauugaccagcagg

SEQ ID NO: 1315 - RNA, 22 nt, Homo sapiens
ccugcuggucaaucacagcccc

SEQ ID NO: 1316 - RNA, 22 nt, Homo sapiens
cacuguuucaccacuggcucuu

SEQ ID NO: 1317 - RNA, 22 nt, Homo sapiens
aagagccaguggugaaacagug

SEQ ID NO: 1318 - RNA, 21 nt, Homo sapiens
gagccaguggugagacaguga

SEQ ID NO: 1319 - RNA, 21 nt, Homo sapiens
ucacugucucaccacuggcuc

SEQ ID NO: 1320 - RNA, 22 nt, Homo sapiens
aagguauuguucagacuuauga

SEQ ID NO: 1321 - RNA, 22 nt, Homo sapiens
ucauaagucugaacaauaccuu

SEQ ID NO: 1322 - RNA, 22 nt, Homo sapiens
ucugugauagagauucuuugcu

SEQ ID NO: 1323 - RNA, 22 nt, Homo sapiens
agcaaagaaucucuaucacaga

SEQ ID NO: 1324 - RNA, 21 nt, Homo sapiens
ucugaauuguaagaguuguua

SEQ ID NO: 1325 - RNA, 21 nt, Homo sapiens
uaacaacucuuacaauucaga

SEQ ID NO: 1326 - RNA, 23 nt, Homo sapiens
agaacucuugcagucuuagaugu

SEQ ID NO: 1327 - RNA, 23 nt, Homo sapiens
acaucuaagacugcaagaguucu

SEQ ID NO: 1328 - RNA, 22 nt, Homo sapiens
aacgggaaugcaggcuguaucu

SEQ ID NO: 1329 - RNA, 22 nt, Homo sapiens
agauacagccugcauucccguu

SEQ ID NO: 1330 - RNA, 23 nt, Homo sapiens
ucugaguuccuggagccuggucu

SEQ ID NO: 1331 - RNA, 23 nt, Homo sapiens
agaccaggcuccaggaacucaga

SEQ ID NO: 1332 - RNA, 23 nt, Homo sapiens
uggagauccagugcucgcccgau

SEQ ID NO: 1333 - RNA, 23 nt, Homo sapiens
aucgggcgagcacuggaucucca

SEQ ID NO: 1334 - RNA, 22 nt, Homo sapiens
uguugcaagucgguggagacgu

SEQ ID NO: 1335 - RNA, 22 nt, Homo sapiens
acgucuccaccgacuugcaaca

SEQ ID NO: 1336 - RNA, 22 nt, Homo sapiens
cucucuacugacuugcaacaua

SEQ ID NO: 1337 - RNA, 22 nt, Homo sapiens
uauguugcaagucaguagagag

SEQ ID NO: 1338 - RNA, 22 nt, Homo sapiens
ucucccuuccugcccuggcuag

SEQ ID NO: 1339 - RNA, 22 nt, Homo sapiens
cuagccagggcaggaagggaga

SEQ ID NO: 1340 - RNA, 26 nt, Homo sapiens
cccagggcuuggaguggggcaagguu

SEQ ID NO: 1341 - RNA, 26 nt, Homo sapiens
aaccuugccccacuccaagcccuggg

SEQ ID NO: 1342 - RNA, 23 nt, Homo sapiens
uaucugcugggcuuucugguguu

SEQ ID NO: 1343 - RNA, 23 nt, Homo sapiens
aacaccagaaagcccagcagaua

SEQ ID NO: 1344 - RNA, 21 nt, Homo sapiens
uggcuguuggagggggcaggc

SEQ ID NO: 1345 - RNA, 21 nt, Homo sapiens
gccugcccccuccaacagcca

SEQ ID NO: 1346 - RNA, 22 nt, Homo sapiens
cagcccuccucccgcacccaaa

SEQ ID NO: 1347 - RNA, 22 nt, Homo sapiens
uuugggugcgggaggagggcug

SEQ ID NO: 1348 - RNA, 22 nt, Homo sapiens
uaggggcagcagaggaccuggg

SEQ ID NO: 1349 - RNA, 22 nt, Homo sapiens
cccagguccucugcugccccua

SEQ ID NO: 1350 - RNA, 22 nt, Homo sapiens
uugaggagacauggugggggcc

SEQ ID NO: 1351 - RNA, 22 nt, Homo sapiens
ggcccccaccaugucuccucaa

SEQ ID NO: 1352 - RNA, 21 nt, Homo sapiens
gcagcccagcugaggccucug

SEQ ID NO: 1353 - RNA, 21 nt, Homo sapiens
cagaggccucagcugggcugc

SEQ ID NO: 1354 - RNA, 22 nt, Homo sapiens
gagcaggcgaggcugggcugaa

SEQ ID NO: 1355 - RNA, 22 nt, Homo sapiens
uucagcccagccucgccugcuc

SEQ ID NO: 1356 - RNA, 23 nt, Homo sapiens
ccagccacggacugagagugcau

SEQ ID NO: 1357 - RNA, 23 nt, Homo sapiens
augcacucucaguccguggcugg

SEQ ID NO: 1358 - RNA, 23 nt, Homo sapiens
guccuccaggccaugagcugcgg

SEQ ID NO: 1359 - RNA, 23 nt, Homo sapiens
ccgcagcucauggccuggaggac

SEQ ID NO: 1360 - RNA, 22 nt, Homo sapiens
ucaggcaguguggguaucagau

SEQ ID NO: 1361 - RNA, 22 nt, Homo sapiens
aucugauacccacacugccuga

SEQ ID NO: 1362 - RNA, 23 nt, Homo sapiens
ugagaguggaauucacaguauuu

SEQ ID NO: 1363 - RNA, 23 nt, Homo sapiens
aaauacugugaauuccacucuca

SEQ ID NO: 1364 - RNA, 23 nt, Homo sapiens
auacugugaauuucacugucaca

SEQ ID NO: 1365 - RNA, 23 nt, Homo sapiens
ugugacagugaaauucacaguau

SEQ ID NO: 1366 - RNA, 21 nt, Homo sapiens
caaauggacaggauaacaccu

SEQ ID NO: 1367 - RNA, 21 nt, Homo sapiens
agguguuauccuguccauuug

SEQ ID NO: 1368 - RNA, 22 nt, Homo sapiens
agguguuauccuauccauuugc

SEQ ID NO: 1369 - RNA, 22 nt, Homo sapiens
gcaaauggauaggauaacaccu

SEQ ID NO: 1370 - RNA, 22 nt, Homo sapiens
ugaucucaccgcugccuccuuc

SEQ ID NO: 1371 - RNA, 22 nt, Homo sapiens
gaaggaggcagcggugagauca

SEQ ID NO: 1372 - RNA, 22 nt, Homo sapiens
caggaggcagugggcgagcagg

SEQ ID NO: 1373 - RNA, 22 nt, Homo sapiens
ccugcucgcccacugccuccug

SEQ ID NO: 1374 - RNA, 22 nt, Homo sapiens
ugcaagacggauacugucaucu

SEQ ID NO: 1375 - RNA, 22 nt, Homo sapiens
agaugacaguauccgucuugca

SEQ ID NO: 1376 - RNA, 24 nt, Homo sapiens
ugucagugacuccugccccuuggu

SEQ ID NO: 1377 - RNA, 24 nt, Homo sapiens
accaaggggcaggagucacugaca

SEQ ID NO: 1378 - RNA, 22 nt, Homo sapiens
agggggcgcagucacugacgug

SEQ ID NO: 1379 - RNA, 22 nt, Homo sapiens
cacgucagugacugcgcccccu

SEQ ID NO: 1380 - RNA, 23 nt, Homo sapiens
ucaaaauguagaggaagacccca

SEQ ID NO: 1381 - RNA, 23 nt, Homo sapiens
uggggucuuccucuacauuuuga

SEQ ID NO: 1382 - RNA, 22 nt, Homo sapiens
aauuuacucugcaaucuucucc

SEQ ID NO: 1383 - RNA, 22 nt, Homo sapiens
ggagaagauugcagaguaaauu

SEQ ID NO: 1384 - RNA, 22 nt, Homo sapiens
agaagauugcagaguaaguucc

SEQ ID NO: 1385 - RNA, 22 nt, Homo sapiens
ggaacuuacucugcaaucuucu

SEQ ID NO: 1386 - RNA, 26 nt, Homo sapiens
cacaggacugacuccucaccccagug

SEQ ID NO: 1387 - RNA, 26 nt, Homo sapiens
cacuggggugaggagucaguccugug

SEQ ID NO: 1388 - RNA, 22 nt, Homo sapiens
ucuggggaugaggacagugugu

SEQ ID NO: 1389 - RNA, 22 nt, Homo sapiens
acacacuguccucauccccaga

SEQ ID NO: 1390 - RNA, 20 nt, Homo sapiens
augggugauggguguggugu

SEQ ID NO: 1391 - RNA, 20 nt, Homo sapiens
acaccacacccaucacccau

SEQ ID NO: 1392 - RNA, 22 nt, Homo sapiens
uuggccaccacaccuaccccuu

SEQ ID NO: 1393 - RNA, 22 nt, Homo sapiens
aagggguaggugugguggccaa

SEQ ID NO: 1394 - RNA, 22 nt, Homo sapiens
uguaguuguauuguauugccac

SEQ ID NO: 1395 - RNA, 22 nt, Homo sapiens
guggcaauacaauacaacuaca

SEQ ID NO: 1396 - RNA, 23 nt, Homo sapiens
uagcaauacaguacaaauauagu

SEQ ID NO: 1397 - RNA, 23 nt, Homo sapiens
acuauauuuguacuguauugcua

SEQ ID NO: 1398 - RNA, 22 nt, Homo sapiens
ucagucacauaucuagugucua

SEQ ID NO: 1399 - RNA, 22 nt, Homo sapiens
uagacacuagauaugugacuga

SEQ ID NO: 1400 - RNA, 22 nt, Homo sapiens
gacacuaggcaugugagugauu

SEQ ID NO: 1401 - RNA, 22 nt, Homo sapiens
aaucacucacaugccuaguguc

SEQ ID NO: 1402 - RNA, 22 nt, Homo sapiens
ucaaucacuugguaauugcugu

SEQ ID NO: 1403 - RNA, 22 nt, Homo sapiens
acagcaauuaccaagugauuga

SEQ ID NO: 1404 - RNA, 25 nt, Homo sapiens
agcggggaggaagugggcgcugcuu

SEQ ID NO: 1405 - RNA, 25 nt, Homo sapiens
aagcagcgcccacuuccuccccgcu

SEQ ID NO: 1406 - RNA, 22 nt, Homo sapiens
agcccgccccagccgagguucu

SEQ ID NO: 1407 - RNA, 22 nt, Homo sapiens
agaaccucggcuggggcgggcu

SEQ ID NO: 1408 - RNA, 23 nt, Homo sapiens
gccccggcgcgggcggguucugg

SEQ ID NO: 1409 - RNA, 23 nt, Homo sapiens
ccagaacccgcccgcgccggggc

SEQ ID NO: 1410 - RNA, 22 nt, Homo sapiens
agcaaggcggcaucucucugau

SEQ ID NO: 1411 - RNA, 22 nt, Homo sapiens
aucagagagaugccgccuugcu

SEQ ID NO: 1412 - RNA, 21 nt, Homo sapiens
agagaugccgccuugcuccuu

SEQ ID NO: 1413 - RNA, 21 nt, Homo sapiens
aaggagcaaggcggcaucucu

SEQ ID NO: 1414 - RNA, 23 nt, Homo sapiens
uugaagaggaggugcucuguagc

SEQ ID NO: 1415 - RNA, 23 nt, Homo sapiens
gcuacagagcaccuccucuucaa

SEQ ID NO: 1416 - RNA, 22 nt, Homo sapiens
acaacagugacuugcucuccaa

SEQ ID NO: 1417 - RNA, 22 nt, Homo sapiens
uuggagagcaagucacuguugu

SEQ ID NO: 1418 - RNA, 18 nt, Homo sapiens
gggugagggcaggugguu

SEQ ID NO: 1419 - RNA, 18 nt, Homo sapiens
aaccaccugcccucaccc

SEQ ID NO: 1420 - RNA, 18 nt, Homo sapiens
cgugucuucuggcuugau

SEQ ID NO: 1421 - RNA, 18 nt, Homo sapiens
aucaagccagaagacacg

SEQ ID NO: 1422 - RNA, 23 nt, Homo sapiens
ugcaucaggccagaagacaugag

SEQ ID NO: 1423 - RNA, 23 nt, Homo sapiens
cucaugucuucuggccugaugca

SEQ ID NO: 1424 - RNA, 21 nt, Homo sapiens
aaugagagaccuguacuguau

SEQ ID NO: 1425 - RNA, 21 nt, Homo sapiens
auacaguacaggucucucauu

SEQ ID NO: 1426 - RNA, 22 nt, Homo sapiens
uccaguacaggucucucauuuc

SEQ ID NO: 1427 - RNA, 22 nt, Homo sapiens
gaaaugagagaccuguacugga

SEQ ID NO: 1428 - RNA, 22 nt, Homo sapiens
ugggauccagacagugggagaa

SEQ ID NO: 1429 - RNA, 22 nt, Homo sapiens
uucucccacugucuggauccca

SEQ ID NO: 1430 - RNA, 22 nt, Homo sapiens
uucucccacuaccaggcuccca

SEQ ID NO: 1431 - RNA, 22 nt, Homo sapiens
ugggagccugguagugggagaa

SEQ ID NO: 1432 - RNA, 22 nt, Homo sapiens
ccaaccuagguggucagaguug

SEQ ID NO: 1433 - RNA, 22 nt, Homo sapiens
caacucugaccaccuagguugg

SEQ ID NO: 1434 - RNA, 22 nt, Homo sapiens
aacucugaccccuuagguugau

SEQ ID NO: 1435 - RNA, 22 nt, Homo sapiens
aucaaccuaaggggucagaguu

SEQ ID NO: 1436 - RNA, 23 nt, Homo sapiens
gugccaccuuaacugcagccaau

SEQ ID NO: 1437 - RNA, 23 nt, Homo sapiens
auuggcugcaguuaagguggcac

SEQ ID NO: 1438 - RNA, 22 nt, Homo sapiens
aaguuggcugcaguuaaggugg

SEQ ID NO: 1439 - RNA, 22 nt, Homo sapiens
ccaccuuaacugcagccaacuu

SEQ ID NO: 1440 - RNA, 22 nt, Homo sapiens
aagggggaaggaaacauggaga

SEQ ID NO: 1441 - RNA, 22 nt, Homo sapiens
ucuccauguuuccuucccccuu

SEQ ID NO: 1442 - RNA, 22 nt, Homo sapiens
uccauguuuccuucccccuucu

SEQ ID NO: 1443 - RNA, 22 nt, Homo sapiens
agaagggggaaggaaacaugga

SEQ ID NO: 1444 - RNA, 21 nt, Homo sapiens
acacauggguggcuguggccu

SEQ ID NO: 1445 - RNA, 21 nt, Homo sapiens
aggccacagccacccaugugu

SEQ ID NO: 1446 - RNA, 22 nt, Homo sapiens
uaggccacagccacccaugugu

SEQ ID NO: 1447 - RNA, 22 nt, Homo sapiens
acacauggguggcuguggccua

SEQ ID NO: 1448 - RNA, 21 nt, Homo sapiens
agcuguaccugaaaccaagca

SEQ ID NO: 1449 - RNA, 21 nt, Homo sapiens
ugcuugguuucagguacagcu

SEQ ID NO: 1450 - RNA, 22 nt, Homo sapiens
ucacaaaucuauaauaugcagg

SEQ ID NO: 1451 - RNA, 22 nt, Homo sapiens
ccugcauauuauagauuuguga

SEQ ID NO: 1452 - RNA, 21 nt, Homo sapiens
ugcuuaaguuguaccaaguau

SEQ ID NO: 1453 - RNA, 21 nt, Homo sapiens
auacuugguacaacuuaagca

SEQ ID NO: 1454 - RNA, 22 nt, Homo sapiens
ccuggcauauuugguauaacuu

SEQ ID NO: 1455 - RNA, 22 nt, Homo sapiens
aaguuauaccaaauaugccagg

SEQ ID NO: 1456 - RNA, 22 nt, Homo sapiens
ugagggcuccaggugacggugg

SEQ ID NO: 1457 - RNA, 22 nt, Homo sapiens
ccaccgucaccuggagcccuca

SEQ ID NO: 1458 - RNA, 22 nt, Homo sapiens
accugccagcaccucccugcag

SEQ ID NO: 1459 - RNA, 22 nt, Homo sapiens
cugcagggaggugcuggcaggu

SEQ ID NO: 1460 - RNA, 23 nt, Homo sapiens
ggcaggagggcugugccagguug

SEQ ID NO: 1461 - RNA, 23 nt, Homo sapiens
caaccuggcacagcccuccugcc

SEQ ID NO: 1462 - RNA, 22 nt, Homo sapiens
cccucucuggcuccuccccaaa

SEQ ID NO: 1463 - RNA, 22 nt, Homo sapiens
uuuggggaggagccagagaggg

SEQ ID NO: 1464 - RNA, 24 nt, Homo sapiens
ugggggagccaugagauaagagca

SEQ ID NO: 1465 - RNA, 24 nt, Homo sapiens
ugcucuuaucucauggcuccccca

SEQ ID NO: 1466 - RNA, 21 nt, Homo sapiens
guaccuucugguucagcuagu

SEQ ID NO: 1467 - RNA, 21 nt, Homo sapiens
acuagcugaaccagaagguac

SEQ ID NO: 1468 - RNA, 23 nt, Homo sapiens
aacugaaccaggagugagcuucg

SEQ ID NO: 1469 - RNA, 23 nt, Homo sapiens
cgaagcucacuccugguucaguu

SEQ ID NO: 1470 - RNA, 22 nt, Homo sapiens
uggggaaggcgucagugucggg

SEQ ID NO: 1471 - RNA, 22 nt, Homo sapiens
cccgacacugacgccuucccca

SEQ ID NO: 1472 - RNA, 21 nt, Homo sapiens
agacccugcagccuucccacc

SEQ ID NO: 1473 - RNA, 21 nt, Homo sapiens
ggugggaaggcugcagggucu

SEQ ID NO: 1474 - RNA, 22 nt, Homo sapiens
acccagguucccucuggccgca

SEQ ID NO: 1475 - RNA, 22 nt, Homo sapiens
ugcggccagagggaaccugggu

SEQ ID NO: 1476 - RNA, 23 nt, Homo sapiens
agggccagaggagccuggagugg

SEQ ID NO: 1477 - RNA, 23 nt, Homo sapiens
ccacuccaggcuccucuggcccu

SEQ ID NO: 1478 - RNA, 22 nt, Homo sapiens
auagugggaagcuggcagauuc

SEQ ID NO: 1479 - RNA, 22 nt, Homo sapiens
gaaucugccagcuucccacuau

SEQ ID NO: 1480 - RNA, 21 nt, Homo sapiens
aucugccagcuuccacagugg

SEQ ID NO: 1481 - RNA, 21 nt, Homo sapiens
ccacuguggaagcuggcagau

SEQ ID NO: 1482 - RNA, 25 nt, Homo sapiens
caugcugaccucccuccugccccag

SEQ ID NO: 1483 - RNA, 25 nt, Homo sapiens
cuggggcaggagggaggucagcaug

SEQ ID NO: 1484 - RNA, 23 nt, Homo sapiens
ugggaggggagaggcagcaagca

SEQ ID NO: 1485 - RNA, 23 nt, Homo sapiens
ugcuugcugccucuccccuccca

SEQ ID NO: 1486 - RNA, 22 nt, Homo sapiens
ucauuuaucuguugggaagcua

SEQ ID NO: 1487 - RNA, 22 nt, Homo sapiens
uagcuucccaacagauaaauga

SEQ ID NO: 1488 - RNA, 23 nt, Homo sapiens
cuggcggagcccauuccaugcca

SEQ ID NO: 1489 - RNA, 23 nt, Homo sapiens
uggcauggaaugggcuccgccag

SEQ ID NO: 1490 - RNA, 22 nt, Homo sapiens
cacacaaguggcccccaacacu

SEQ ID NO: 1491 - RNA, 22 nt, Homo sapiens
aguguugggggccacuugugug

SEQ ID NO: 1492 - RNA, 22 nt, Homo sapiens
ugcugggggccacaugagugug

SEQ ID NO: 1493 - RNA, 22 nt, Homo sapiens
cacacucauguggcccccagca

SEQ ID NO: 1494 - RNA, 21 nt, Homo sapiens
gcccugaccuguccuguucug

SEQ ID NO: 1495 - RNA, 21 nt, Homo sapiens
cagaacaggacaggucagggc

SEQ ID NO: 1496 - RNA, 23 nt, Homo sapiens
uguagagcagggagcaggaagcu

SEQ ID NO: 1497 - RNA, 23 nt, Homo sapiens
agcuuccugcucccugcucuaca

SEQ ID NO: 1498 - RNA, 22 nt, Homo sapiens
ccaccaggucuagcauugggau

SEQ ID NO: 1499 - RNA, 22 nt, Homo sapiens
aucccaaugcuagaccuggugg

SEQ ID NO: 1500 - RNA, 22 nt, Homo sapiens
aaucccaaugcuagacccggug

SEQ ID NO: 1501 - RNA, 22 nt, Homo sapiens
caccgggucuagcauugggauu

SEQ ID NO: 1502 - RNA, 22 nt, Homo sapiens
gcugcgggcugcggucagggcg

SEQ ID NO: 1503 - RNA, 22 nt, Homo sapiens
cgcccugaccgcagcccgcagc

SEQ ID NO: 1504 - RNA, 21 nt, Homo sapiens
aaaggugcucaaauuagacau

SEQ ID NO: 1505 - RNA, 21 nt, Homo sapiens
augucuaauuugagcaccuuu

SEQ ID NO: 1506 - RNA, 22 nt, Homo sapiens
ccuaauuugaacaccuucggua

SEQ ID NO: 1507 - RNA, 22 nt, Homo sapiens
uaccgaagguguucaaauuagg

SEQ ID NO: 1508 - RNA, 19 nt, Homo sapiens
aggcagguuaucugggcug

SEQ ID NO: 1509 - RNA, 19 nt, Homo sapiens
cagcccagauaaccugccu

SEQ ID NO: 1510 - RNA, 20 nt, Homo sapiens
augcgaggaugcugacagug

SEQ ID NO: 1511 - RNA, 20 nt, Homo sapiens
cacugucagcauccucgcau

SEQ ID NO: 1512 - RNA, 22 nt, Homo sapiens
ugaaacuggagcgccuggagga

SEQ ID NO: 1513 - RNA, 22 nt, Homo sapiens
uccuccaggcgcuccaguuuca

SEQ ID NO: 1514 - RNA, 22 nt, Homo sapiens
accagcgcguuuucaguuucau

SEQ ID NO: 1515 - RNA, 22 nt, Homo sapiens
augaaacugaaaacgcgcuggu

SEQ ID NO: 1516 - RNA, 25 nt, Homo sapiens
aagggaggaggagcggaggggcccu

SEQ ID NO: 1517 - RNA, 25 nt, Homo sapiens
agggccccuccgcuccuccucccuu

SEQ ID NO: 1518 - RNA, 22 nt, Homo sapiens
gcccgagaggauccgucccugc

SEQ ID NO: 1519 - RNA, 22 nt, Homo sapiens
gcagggacggauccucucgggc

SEQ ID NO: 1520 - RNA, 22 nt, Homo sapiens
aggacugauccucucgggcagg

SEQ ID NO: 1521 - RNA, 22 nt, Homo sapiens
ccugcccgagaggaucaguccu

SEQ ID NO: 1522 - RNA, 23 nt, Homo sapiens
ucaggcaaagggauauuuacaga

SEQ ID NO: 1523 - RNA, 23 nt, Homo sapiens
ucuguaaauaucccuuugccuga

SEQ ID NO: 1524 - RNA, 21 nt, Homo sapiens
uuucugucuuuucugguccag

SEQ ID NO: 1525 - RNA, 21 nt, Homo sapiens
cuggaccagaaaagacagaaa

SEQ ID NO: 1526 - RNA, 23 nt, Homo sapiens
uggccggaugggacaggaggcau

SEQ ID NO: 1527 - RNA, 23 nt, Homo sapiens
augccuccugucccauccggcca

SEQ ID NO: 1528 - RNA, 23 nt, Homo sapiens
ucuaaagacuagacuucgcuaug

SEQ ID NO: 1529 - RNA, 23 nt, Homo sapiens
cauagcgaagucuagucuuuaga

SEQ ID NO: 1530 - RNA, 23 nt, Homo sapiens
uggcccggcgacgucucacgguc

SEQ ID NO: 1531 - RNA, 23 nt, Homo sapiens
gaccgugagacgucgccgggcca

SEQ ID NO: 1532 - RNA, 23 nt, Homo sapiens
ugaguggggcucccgggacggcg

SEQ ID NO: 1533 - RNA, 23 nt, Homo sapiens
cgccgucccgggagccccacuca

SEQ ID NO: 1534 - RNA, 21 nt, Homo sapiens
agcggugcuccugcgggccga

SEQ ID NO: 1535 - RNA, 21 nt, Homo sapiens
ucggcccgcaggagcaccgcu

SEQ ID NO: 1536 - RNA, 23 nt, Homo sapiens
ccggucccaggagaaccugcaga

SEQ ID NO: 1537 - RNA, 23 nt, Homo sapiens
ucugcagguucuccugggaccgg

SEQ ID NO: 1538 - RNA, 22 nt, Homo sapiens
aaggcccgggcuuuccucccag

SEQ ID NO: 1539 - RNA, 22 nt, Homo sapiens
cugggaggaaagcccgggccuu

SEQ ID NO: 1540 - RNA, 22 nt, Homo sapiens
agggaaggaggcuuggucuuag

SEQ ID NO: 1541 - RNA, 22 nt, Homo sapiens
cuaagaccaagccuccuucccu

SEQ ID NO: 1542 - RNA, 21 nt, Homo sapiens
gagguuuggggaggauuugcu

SEQ ID NO: 1543 - RNA, 21 nt, Homo sapiens
agcaaauccuccccaaaccuc

SEQ ID NO: 1544 - RNA, 20 nt, Homo sapiens
cgccccuccugcccccacag

SEQ ID NO: 1545 - RNA, 20 nt, Homo sapiens
cugugggggcaggaggggcg

SEQ ID NO: 1546 - RNA, 22 nt, Homo sapiens
ugcggggacaggccagggcauc

SEQ ID NO: 1547 - RNA, 22 nt, Homo sapiens
gaugcccuggccuguccccgca

SEQ ID NO: 1548 - RNA, 22 nt, Homo sapiens
ccugacccacccccucccgcag

SEQ ID NO: 1549 - RNA, 22 nt, Homo sapiens
cugcgggagggggugggucagg

SEQ ID NO: 1550 - RNA, 22 nt, Homo sapiens
cucgggcggaggugguugagug

SEQ ID NO: 1551 - RNA, 22 nt, Homo sapiens
cacucaaccaccuccgcccgag

SEQ ID NO: 1552 - RNA, 24 nt, Homo sapiens
agaggacccguagcugcuagaagg

SEQ ID NO: 1553 - RNA, 24 nt, Homo sapiens
ccuucuagcagcuacggguccucu

SEQ ID NO: 1554 - RNA, 22 nt, Homo sapiens
uuguggaucucaaggaugugcu

SEQ ID NO: 1555 - RNA, 22 nt, Homo sapiens
agcacauccuugagauccacaa

SEQ ID NO: 1556 - RNA, 22 nt, Homo sapiens
uucucuuucuuuagccuugugu

SEQ ID NO: 1557 - RNA, 22 nt, Homo sapiens
acacaaggcuaaagaaagagaa

SEQ ID NO: 1558 - RNA, 22 nt, Homo sapiens
caaggccaaaggaagagaacag

SEQ ID NO: 1559 - RNA, 22 nt, Homo sapiens
cuguucucuuccuuuggccuug

SEQ ID NO: 1560 - RNA, 23 nt, Homo sapiens
augcggaccuggguuagcggagu

SEQ ID NO: 1561 - RNA, 23 nt, Homo sapiens
acuccgcuaacccagguccgcau

SEQ ID NO: 1562 - RNA, 22 nt, Homo sapiens
agccaggcucugaagggaaagu

SEQ ID NO: 1563 - RNA, 22 nt, Homo sapiens
acuuucccuucagagccuggcu

SEQ ID NO: 1564 - RNA, 22 nt, Homo sapiens
uuucccuucagagccuggcuuu

SEQ ID NO: 1565 - RNA, 22 nt, Homo sapiens
aaagccaggcucugaagggaaa

SEQ ID NO: 1566 - RNA, 22 nt, Homo sapiens
ccagagaugguugccuuccuau

SEQ ID NO: 1567 - RNA, 22 nt, Homo sapiens
auaggaaggcaaccaucucugg

SEQ ID NO: 1568 - RNA, 23 nt, Homo sapiens
cagggaggcgcucacucucugcu

SEQ ID NO: 1569 - RNA, 23 nt, Homo sapiens
agcagagagugagcgccucccug

SEQ ID NO: 1570 - RNA, 22 nt, Homo sapiens
caugacgucacagaggcuucgc

SEQ ID NO: 1571 - RNA, 22 nt, Homo sapiens
gcgaagccucugugacgucaug

SEQ ID NO: 1572 - RNA, 23 nt, Homo sapiens
aggccucugugacgucacggugu

SEQ ID NO: 1573 - RNA, 23 nt, Homo sapiens
acaccgugacgucacagaggccu

SEQ ID NO: 1574 - RNA, 23 nt, Homo sapiens
ugccccaccugcugaccacccuc

SEQ ID NO: 1575 - RNA, 23 nt, Homo sapiens
gaggguggucagcagguggggca

SEQ ID NO: 1576 - RNA, 23 nt, Homo sapiens
gugagugggagccgguggggcug

SEQ ID NO: 1577 - RNA, 23 nt, Homo sapiens
cagccccaccggcucccacucac

SEQ ID NO: 1578 - RNA, 21 nt, Homo sapiens
uaggacuagauguuggaauua

SEQ ID NO: 1579 - RNA, 21 nt, Homo sapiens
uaauuccaacaucuaguccua

SEQ ID NO: 1580 - RNA, 22 nt, Homo sapiens
aaauucauguucaaucuaaacc

SEQ ID NO: 1581 - RNA, 22 nt, Homo sapiens
gguuuagauugaacaugaauuu

SEQ ID NO: 1582 - RNA, 22 nt, Homo sapiens
uuuagauugaacaugaaguuag

SEQ ID NO: 1583 - RNA, 22 nt, Homo sapiens
cuaacuucauguucaaucuaaa

SEQ ID NO: 1584 - RNA, 21 nt, Homo sapiens
gagggcaugcgcacuuugucc

SEQ ID NO: 1585 - RNA, 21 nt, Homo sapiens
ggacaaagugcgcaugcccuc

SEQ ID NO: 1586 - RNA, 21 nt, Homo sapiens
acaaggugugcaugccugacc

SEQ ID NO: 1587 - RNA, 21 nt, Homo sapiens
ggucaggcaugcacaccuugu

SEQ ID NO: 1588 - RNA, 22 nt, Homo sapiens
cuucugaucaagauuuguggug

SEQ ID NO: 1589 - RNA, 22 nt, Homo sapiens
caccacaaaucuugaucagaag

SEQ ID NO: 1590 - RNA, 21 nt, Homo sapiens
ccaaaucuugaucagaagccu

SEQ ID NO: 1591 - RNA, 21 nt, Homo sapiens
aggcuucugaucaagauuugg

SEQ ID NO: 1592 - RNA, 24 nt, Homo sapiens
aggcaggggcuggugcugggcggg

SEQ ID NO: 1593 - RNA, 24 nt, Homo sapiens
cccgcccagcaccagccccugccu

SEQ ID NO: 1594 - RNA, 21 nt, Homo sapiens
cgccugcccagcccuccugcu

SEQ ID NO: 1595 - RNA, 21 nt, Homo sapiens
agcaggagggcugggcaggcg

SEQ ID NO: 1596 - RNA, 22 nt, Homo sapiens
uuaacuccuuucacacccaugg

SEQ ID NO: 1597 - RNA, 22 nt, Homo sapiens
ccaugggugugaaaggaguuaa

SEQ ID NO: 1598 - RNA, 21 nt, Homo sapiens
uggauguggaaggaguuaucu

SEQ ID NO: 1599 - RNA, 21 nt, Homo sapiens
agauaacuccuuccacaucca

SEQ ID NO: 1600 - RNA, 22 nt, Homo sapiens
ugagugauugauagcuauguuc

SEQ ID NO: 1601 - RNA, 22 nt, Homo sapiens
gaacauagcuaucaaucacuca

SEQ ID NO: 1602 - RNA, 21 nt, Homo sapiens
auagcaauugcucuuuuggaa

SEQ ID NO: 1603 - RNA, 21 nt, Homo sapiens
uuccaaaagagcaauugcuau

SEQ ID NO: 1604 - RNA, 21 nt, Homo sapiens
ucugaaagagcaguugguguu

SEQ ID NO: 1605 - RNA, 21 nt, Homo sapiens
aacaccaacugcucuuucaga

SEQ ID NO: 1606 - RNA, 23 nt, Homo sapiens
cgcgggcgcuccuggccgccgcc

SEQ ID NO: 1607 - RNA, 23 nt, Homo sapiens
ggcggcggccaggagcgcccgcg

SEQ ID NO: 1608 - RNA, 20 nt, Homo sapiens
ccaggagauccagagagaau

SEQ ID NO: 1609 - RNA, 20 nt, Homo sapiens
auucucucuggaucuccugg

SEQ ID NO: 1610 - RNA, 22 nt, Homo sapiens
auucucucuggaucccauggau

SEQ ID NO: 1611 - RNA, 22 nt, Homo sapiens
auccaugggauccagagagaau

SEQ ID NO: 1612 - RNA, 22 nt, Homo sapiens
ucugccauccucccuccccuac

SEQ ID NO: 1613 - RNA, 22 nt, Homo sapiens
guaggggagggaggauggcaga

SEQ ID NO: 1614 - RNA, 24 nt, Homo sapiens
ggugggauggagagaagguaugag

SEQ ID NO: 1615 - RNA, 24 nt, Homo sapiens
cucauaccuucucuccaucccacc

SEQ ID NO: 1616 - RNA, 18 nt, Homo sapiens
ugagaugacacuguagcu

SEQ ID NO: 1617 - RNA, 18 nt, Homo sapiens
agcuacagugucaucuca

SEQ ID NO: 1618 - RNA, 21 nt, Homo sapiens
agcagacuugaccuacaauua

SEQ ID NO: 1619 - RNA, 21 nt, Homo sapiens
uaauuguaggucaagucugcu

SEQ ID NO: 1620 - RNA, 22 nt, Homo sapiens
cagaacaggagcauagaaaggc

SEQ ID NO: 1621 - RNA, 22 nt, Homo sapiens
gccuuucuaugcuccuguucug

SEQ ID NO: 1622 - RNA, 22 nt, Homo sapiens
uuaauuuuuuguuucggucacu

SEQ ID NO: 1623 - RNA, 22 nt, Homo sapiens
agugaccgaaacaaaaaauuaa

SEQ ID NO: 1624 - RNA, 23 nt, Homo sapiens
cuugccauccugguccacugcau

SEQ ID NO: 1625 - RNA, 23 nt, Homo sapiens
augcaguggaccaggauggcaag

SEQ ID NO: 1626 - RNA, 22 nt, Homo sapiens
guggaccaggauggcaagggcu

SEQ ID NO: 1627 - RNA, 22 nt, Homo sapiens
agcccuugccauccugguccac

SEQ ID NO: 1628 - RNA, 22 nt, Homo sapiens
auaccucaucuagaaugcugua

SEQ ID NO: 1629 - RNA, 22 nt, Homo sapiens
uacagcauucuagaugagguau

SEQ ID NO: 1630 - RNA, 22 nt, Homo sapiens
uucuagaugagagauauauaua

SEQ ID NO: 1631 - RNA, 22 nt, Homo sapiens
uauauauaucucucaucuagaa

SEQ ID NO: 1632 - RNA, 22 nt, Homo sapiens
ucuucuuccuuugcagaguuga

SEQ ID NO: 1633 - RNA, 22 nt, Homo sapiens
ucaacucugcaaaggaagaaga

SEQ ID NO: 1634 - RNA, 22 nt, Homo sapiens
aauucuguaaaggaagaagagg

SEQ ID NO: 1635 - RNA, 22 nt, Homo sapiens
ccucuucuuccuuuacagaauu

SEQ ID NO: 1636 - RNA, 22 nt, Homo sapiens
uaggagggaauaguaaaagcag

SEQ ID NO: 1637 - RNA, 22 nt, Homo sapiens
cugcuuuuacuauucccuccua

SEQ ID NO: 1638 - RNA, 22 nt, Homo sapiens
acccuugagccugaucccuagc

SEQ ID NO: 1639 - RNA, 22 nt, Homo sapiens
gcuagggaucaggcucaagggu

SEQ ID NO: 1640 - RNA, 22 nt, Homo sapiens
aauguuggaauccucgcuagag

SEQ ID NO: 1641 - RNA, 22 nt, Homo sapiens
cucuagcgaggauuccaacauu

SEQ ID NO: 1642 - RNA, 21 nt, Homo sapiens
uagcggggauuccaauauugg

SEQ ID NO: 1643 - RNA, 21 nt, Homo sapiens
ccaauauuggaauccccgcua

SEQ ID NO: 1644 - RNA, 22 nt, Homo sapiens
ugauugucuucauaucuagaac

SEQ ID NO: 1645 - RNA, 22 nt, Homo sapiens
guucuagauaugaagacaauca

SEQ ID NO: 1646 - RNA, 22 nt, Homo sapiens
uucuggauaugaagacaaucaa

SEQ ID NO: 1647 - RNA, 22 nt, Homo sapiens
uugauugucuucauauccagaa

SEQ ID NO: 1648 - RNA, 23 nt, Homo sapiens
ccccgguguuggggcgcgucugc

SEQ ID NO: 1649 - RNA, 23 nt, Homo sapiens
gcagacgcgccccaacaccgggg

SEQ ID NO: 1650 - RNA, 21 nt, Homo sapiens
ggcgcgcccagcucccgggcu

SEQ ID NO: 1651 - RNA, 21 nt, Homo sapiens
agcccgggagcugggcgcgcc

SEQ ID NO: 1652 - RNA, 20 nt, Homo sapiens
ugaggagaugcugggacuga

SEQ ID NO: 1653 - RNA, 20 nt, Homo sapiens
ucagucccagcaucuccuca

SEQ ID NO: 1654 - RNA, 21 nt, Homo sapiens
agagucggcgacgccgccagc

SEQ ID NO: 1655 - RNA, 21 nt, Homo sapiens
gcuggcggcgucgccgacucu

SEQ ID NO: 1656 - RNA, 22 nt, Homo sapiens
ugaagccagcucuggucugggc

SEQ ID NO: 1657 - RNA, 22 nt, Homo sapiens
gcccagaccagagcuggcuuca

SEQ ID NO: 1658 - RNA, 22 nt, Homo sapiens
ugagaccaggacuggaugcacc

SEQ ID NO: 1659 - RNA, 22 nt, Homo sapiens
ggugcauccaguccuggucuca

SEQ ID NO: 1660 - RNA, 24 nt, Homo sapiens
gaugcgccgcccacugccccgcgc

SEQ ID NO: 1661 - RNA, 24 nt, Homo sapiens
gcgcggggcagugggcggcgcauc

SEQ ID NO: 1662 - RNA, 22 nt, Homo sapiens
gcggggguggcggcggcauccc

SEQ ID NO: 1663 - RNA, 22 nt, Homo sapiens
gggaugccgccgccacccccgc

SEQ ID NO: 1664 - RNA, 22 nt, Homo sapiens
uuacggaccagcuaagggaggc

SEQ ID NO: 1665 - RNA, 22 nt, Homo sapiens
gccucccuuagcugguccguaa

SEQ ID NO: 1666 - RNA, 21 nt, Homo sapiens
cacacauagcagguguauaua

SEQ ID NO: 1667 - RNA, 21 nt, Homo sapiens
uauauacaccugcuaugugug

SEQ ID NO: 1668 - RNA, 22 nt, Homo sapiens
guauacaccugauauguguaug

SEQ ID NO: 1669 - RNA, 22 nt, Homo sapiens
cauacacauaucagguguauac

SEQ ID NO: 1670 - RNA, 22 nt, Homo sapiens
ugaaugguaaagcgaugucaca

SEQ ID NO: 1671 - RNA, 22 nt, Homo sapiens
ugugacaucgcuuuaccauuca

SEQ ID NO: 1672 - RNA, 20 nt, Homo sapiens
aucgcuuuaccauucauguu

SEQ ID NO: 1673 - RNA, 20 nt, Homo sapiens
aacaugaaugguaaagcgau

SEQ ID NO: 1674 - RNA, 18 nt, Homo sapiens
uggauaugaugacugaaa

SEQ ID NO: 1675 - RNA, 18 nt, Homo sapiens
uuucagucaucauaucca

SEQ ID NO: 1676 - RNA, 18 nt, Homo sapiens
cggugagcgcucgcuggc

SEQ ID NO: 1677 - RNA, 18 nt, Homo sapiens
gccagcgagcgcucaccg

SEQ ID NO: 1678 - RNA, 23 nt, Homo sapiens
ucugcacugugaguuggcuggcu

SEQ ID NO: 1679 - RNA, 23 nt, Homo sapiens
agccagccaacucacagugcaga

SEQ ID NO: 1680 - RNA, 24 nt, Homo sapiens
acauccugcuccacagggcagagg

SEQ ID NO: 1681 - RNA, 24 nt, Homo sapiens
ccucugcccuguggagcaggaugu

SEQ ID NO: 1682 - RNA, 22 nt, Homo sapiens
ucuggcuaucucacgagacugu

SEQ ID NO: 1683 - RNA, 22 nt, Homo sapiens
acagucucgugagauagccaga

SEQ ID NO: 1684 - RNA, 22 nt, Homo sapiens
auauuauuagccacuucuggau

SEQ ID NO: 1685 - RNA, 22 nt, Homo sapiens
auccagaaguggcuaauaauau

SEQ ID NO: 1686 - RNA, 21 nt, Homo sapiens
agaaguggcuaauaauauuga

SEQ ID NO: 1687 - RNA, 21 nt, Homo sapiens
ucaauauuauuagccacuucu

SEQ ID NO: 1688 - RNA, 22 nt, Homo sapiens
uaaaguggcagaguauagacac

SEQ ID NO: 1689 - RNA, 22 nt, Homo sapiens
gugucuauacucugccacuuua

SEQ ID NO: 1690 - RNA, 22 nt, Homo sapiens
ugucuauacucugucacuuuac

SEQ ID NO: 1691 - RNA, 22 nt, Homo sapiens
guaaagugacagaguauagaca

SEQ ID NO: 1692 - RNA, 21 nt, Homo sapiens
ucucaguaaguggcacucugu

SEQ ID NO: 1693 - RNA, 21 nt, Homo sapiens
acagagugccacuuacugaga

SEQ ID NO: 1694 - RNA, 21 nt, Homo sapiens
gacagagugccacuuacugaa

SEQ ID NO: 1695 - RNA, 21 nt, Homo sapiens
uucaguaaguggcacucuguc

SEQ ID NO: 1696 - RNA, 22 nt, Homo sapiens
aacucacgaaguauaccgaagu

SEQ ID NO: 1697 - RNA, 22 nt, Homo sapiens
acuucgguauacuucgugaguu

SEQ ID NO: 1698 - RNA, 22 nt, Homo sapiens
uucgguauacuuugugaauugg

SEQ ID NO: 1699 - RNA, 22 nt, Homo sapiens
ccaauucacaaaguauaccgaa

SEQ ID NO: 1700 - RNA, 22 nt, Homo sapiens
acuggcaugcugcauuuauaua

SEQ ID NO: 1701 - RNA, 22 nt, Homo sapiens
uauauaaaugcagcaugccagu

SEQ ID NO: 1702 - RNA, 22 nt, Homo sapiens
aucuaaaugcagcaugccaguc

SEQ ID NO: 1703 - RNA, 22 nt, Homo sapiens
gacuggcaugcugcauuuagau

SEQ ID NO: 1704 - RNA, 19 nt, Homo sapiens
cauccguccgucuguccac

SEQ ID NO: 1705 - RNA, 19 nt, Homo sapiens
guggacagacggacggaug

SEQ ID NO: 1706 - RNA, 21 nt, Homo sapiens
aguggaccgaggaaggaagga

SEQ ID NO: 1707 - RNA, 21 nt, Homo sapiens
uccuuccuuccucgguccacu

SEQ ID NO: 1708 - RNA, 22 nt, Homo sapiens
uacacaagaaaaccaaggcuca

SEQ ID NO: 1709 - RNA, 22 nt, Homo sapiens
ugagccuugguuuucuugugua

SEQ ID NO: 1710 - RNA, 21 nt, Homo sapiens
uaacauaauaguguggauuga

SEQ ID NO: 1711 - RNA, 21 nt, Homo sapiens
ucaauccacacuauuauguua

SEQ ID NO: 1712 - RNA, 21 nt, Homo sapiens
ugcuuaaccuugcccucgaaa

SEQ ID NO: 1713 - RNA, 21 nt, Homo sapiens
uuucgagggcaagguuaagca

SEQ ID NO: 1714 - RNA, 21 nt, Homo sapiens
uuggacgguaagguuaagcaa

SEQ ID NO: 1715 - RNA, 21 nt, Homo sapiens
uugcuuaaccuuaccguccaa

SEQ ID NO: 1716 - RNA, 21 nt, Homo sapiens
aaaagcaucaggaaguaccca

SEQ ID NO: 1717 - RNA, 21 nt, Homo sapiens
uggguacuuccugaugcuuuu

SEQ ID NO: 1718 - RNA, 21 nt, Homo sapiens
gcaggacaggcagaaguggau

SEQ ID NO: 1719 - RNA, 21 nt, Homo sapiens
auccacuucugccuguccugc

SEQ ID NO: 1720 - RNA, 22 nt, Homo sapiens
cagggcuggcagugacaugggu

SEQ ID NO: 1721 - RNA, 22 nt, Homo sapiens
acccaugucacugccagcccug

SEQ ID NO: 1722 - RNA, 22 nt, Homo sapiens
auuucccugccauucccuuggc

SEQ ID NO: 1723 - RNA, 22 nt, Homo sapiens
gccaagggaauggcagggaaau

SEQ ID NO: 1724 - RNA, 22 nt, Homo sapiens
uggcggcgguaguuaugggcuu

SEQ ID NO: 1725 - RNA, 22 nt, Homo sapiens
aagcccauaacuaccgccgcca

SEQ ID NO: 1726 - RNA, 22 nt, Homo sapiens
gcucccucuagggucgcucgga

SEQ ID NO: 1727 - RNA, 22 nt, Homo sapiens
uccgagcgacccuagagggagc

SEQ ID NO: 1728 - RNA, 22 nt, Homo sapiens
ugggaacuuaguagagguuuaa

SEQ ID NO: 1729 - RNA, 22 nt, Homo sapiens
uuaaaccucuacuaaguuccca

SEQ ID NO: 1730 - RNA, 21 nt, Homo sapiens
uggggcuagugaugcaggacg

SEQ ID NO: 1731 - RNA, 21 nt, Homo sapiens
cguccugcaucacuagcccca

SEQ ID NO: 1732 - RNA, 22 nt, Homo sapiens
gcugacagcagggcuggccgcu

SEQ ID NO: 1733 - RNA, 22 nt, Homo sapiens
agcggccagcccugcugucagc

SEQ ID NO: 1734 - RNA, 21 nt, Homo sapiens
auuggacugcugauggcccgu

SEQ ID NO: 1735 - RNA, 21 nt, Homo sapiens
acgggccaucagcaguccaau

SEQ ID NO: 1736 - RNA, 22 nt, Homo sapiens
aggccaucagcaguccaaugaa

SEQ ID NO: 1737 - RNA, 22 nt, Homo sapiens
uucauuggacugcugauggccu

SEQ ID NO: 1738 - RNA, 22 nt, Homo sapiens
uuggacagaaaacacgcaggaa

SEQ ID NO: 1739 - RNA, 22 nt, Homo sapiens
uuccugcguguuuucuguccaa

SEQ ID NO: 1740 - RNA, 20 nt, Homo sapiens
ccugcguguuuucuguccaa

SEQ ID NO: 1741 - RNA, 20 nt, Homo sapiens
uuggacagaaaacacgcagg

SEQ ID NO: 1742 - RNA, 22 nt, Homo sapiens
ugagacaggcuuaugcugcuau

SEQ ID NO: 1743 - RNA, 22 nt, Homo sapiens
auagcagcauaagccugucuca

SEQ ID NO: 1744 - RNA, 22 nt, Homo sapiens
auagcagcaugaaccugucuca

SEQ ID NO: 1745 - RNA, 22 nt, Homo sapiens
ugagacagguucaugcugcuau

SEQ ID NO: 1746 - RNA, 20 nt, Homo sapiens
gagacagguucaugcugcua

SEQ ID NO: 1747 - RNA, 20 nt, Homo sapiens
uagcagcaugaaccugucuc

SEQ ID NO: 1748 - RNA, 21 nt, Homo sapiens
auagcagcauaagccugucuc

SEQ ID NO: 1749 - RNA, 21 nt, Homo sapiens
gagacaggcuuaugcugcuau

SEQ ID NO: 1750 - RNA, 22 nt, Homo sapiens
uguguggauccuggaggaggca

SEQ ID NO: 1751 - RNA, 22 nt, Homo sapiens
ugccuccuccaggauccacaca

SEQ ID NO: 1752 - RNA, 22 nt, Homo sapiens
agacaucaagaucagucccaaa

SEQ ID NO: 1753 - RNA, 22 nt, Homo sapiens
uuugggacugaucuugaugucu

SEQ ID NO: 1754 - RNA, 22 nt, Homo sapiens
uuugggacugaucuugaugucu

SEQ ID NO: 1755 - RNA, 22 nt, Homo sapiens
agacaucaagaucagucccaaa

SEQ ID NO: 1756 - RNA, 22 nt, Homo sapiens
aaggaaccagaaaaugagaagu

SEQ ID NO: 1757 - RNA, 22 nt, Homo sapiens
acuucucauuuucugguuccuu

SEQ ID NO: 1758 - RNA, 22 nt, Homo sapiens
ucuggccuugacuugacucuuu

SEQ ID NO: 1759 - RNA, 22 nt, Homo sapiens
aaagagucaagucaaggccaga

SEQ ID NO: 1760 - RNA, 23 nt, Homo sapiens
ucaaggccagaggucccacagca

SEQ ID NO: 1761 - RNA, 23 nt, Homo sapiens
ugcugugggaccucuggccuuga

SEQ ID NO: 1762 - RNA, 21 nt, Homo sapiens
acuccaguuuuaguucucuug

SEQ ID NO: 1763 - RNA, 21 nt, Homo sapiens
caagagaacuaaaacuggagu

SEQ ID NO: 1764 - RNA, 22 nt, Homo sapiens
aagagaacugaaaguggagccu

SEQ ID NO: 1765 - RNA, 22 nt, Homo sapiens
aggcuccacuuucaguucucuu

SEQ ID NO: 1766 - RNA, 22 nt, Homo sapiens
uaagggguguauggcagaugca

SEQ ID NO: 1767 - RNA, 22 nt, Homo sapiens
ugcaucugccauacaccccuua

SEQ ID NO: 1768 - RNA, 21 nt, Homo sapiens
uuucagauaacaguauuacau

SEQ ID NO: 1769 - RNA, 21 nt, Homo sapiens
auguaauacuguuaucugaaa

SEQ ID NO: 1770 - RNA, 22 nt, Homo sapiens
aagcaauacuguuaccugaaau

SEQ ID NO: 1771 - RNA, 22 nt, Homo sapiens
auuucagguaacaguauugcuu

SEQ ID NO: 1772 - RNA, 22 nt, Homo sapiens
uacuaacugcagauucaaguga

SEQ ID NO: 1773 - RNA, 22 nt, Homo sapiens
ucacuugaaucugcaguuagua

SEQ ID NO: 1774 - RNA, 21 nt, Homo sapiens
auugccuaacaugugccagaa

SEQ ID NO: 1775 - RNA, 21 nt, Homo sapiens
uucuggcacauguuaggcaau

SEQ ID NO: 1776 - RNA, 22 nt, Homo sapiens
ucugguauguaguagguaauaa

SEQ ID NO: 1777 - RNA, 22 nt, Homo sapiens
uuauuaccuacuacauaccaga

SEQ ID NO: 1778 - RNA, 22 nt, Homo sapiens
aguugccuuuuuguucccaugc

SEQ ID NO: 1779 - RNA, 22 nt, Homo sapiens
gcaugggaacaaaaaggcaacu

SEQ ID NO: 1780 - RNA, 21 nt, Homo sapiens
auaggcaccaaaaagcaacaa

SEQ ID NO: 1781 - RNA, 21 nt, Homo sapiens
uuguugcuuuuuggugccuau

SEQ ID NO: 1782 - RNA, 22 nt, Homo sapiens
ccugcaacuuugccugaucaga

SEQ ID NO: 1783 - RNA, 22 nt, Homo sapiens
ucugaucaggcaaaguugcagg

SEQ ID NO: 1784 - RNA, 22 nt, Homo sapiens
ugaucaggcaaaauugcagacu

SEQ ID NO: 1785 - RNA, 22 nt, Homo sapiens
agucugcaauuuugccugauca

SEQ ID NO: 1786 - RNA, 22 nt, Homo sapiens
uuguggcuggucaugaggcuaa

SEQ ID NO: 1787 - RNA, 22 nt, Homo sapiens
uuagccucaugaccagccacaa

SEQ ID NO: 1788 - RNA, 21 nt, Homo sapiens
uuagucucaugaucagacaca

SEQ ID NO: 1789 - RNA, 21 nt, Homo sapiens
ugugucugaucaugagacuaa

SEQ ID NO: 1790 - RNA, 22 nt, Homo sapiens
aaagauagacaauuggcuaaau

SEQ ID NO: 1791 - RNA, 22 nt, Homo sapiens
auuuagccaauugucuaucuuu

SEQ ID NO: 1792 - RNA, 22 nt, Homo sapiens
uuagccaauuguccaucuuuag

SEQ ID NO: 1793 - RNA, 22 nt, Homo sapiens
cuaaagauggacaauuggcuaa

SEQ ID NO: 1794 - RNA, 22 nt, Homo sapiens
ucugugagaccaaagaacuacu

SEQ ID NO: 1795 - RNA, 22 nt, Homo sapiens
aguaguucuuuggucucacaga

SEQ ID NO: 1796 - RNA, 22 nt, Homo sapiens
uuguucuuuggucuuucagcca

SEQ ID NO: 1797 - RNA, 22 nt, Homo sapiens
uggcugaaagaccaaagaacaa

SEQ ID NO: 1798 - RNA, 23 nt, Homo sapiens
cgggcuguccggaggggucggcu

SEQ ID NO: 1799 - RNA, 23 nt, Homo sapiens
agccgaccccuccggacagcccg

SEQ ID NO: 1800 - RNA, 23 nt, Homo sapiens
ucuguauucuccuuugccugcag

SEQ ID NO: 1801 - RNA, 23 nt, Homo sapiens
cugcaggcaaaggagaauacaga

SEQ ID NO: 1802 - RNA, 23 nt, Homo sapiens
uacauggauggaaaccuucaagc

SEQ ID NO: 1803 - RNA, 23 nt, Homo sapiens
gcuugaagguuuccauccaugua

SEQ ID NO: 1804 - RNA, 22 nt, Homo sapiens
uauggagguucuagaccauguu

SEQ ID NO: 1805 - RNA, 22 nt, Homo sapiens
aacauggucuagaaccuccaua

SEQ ID NO: 1806 - RNA, 22 nt, Homo sapiens
gggaccauccugccugcugugg

SEQ ID NO: 1807 - RNA, 22 nt, Homo sapiens
ccacagcaggcaggaugguccc

SEQ ID NO: 1808 - RNA, 22 nt, Homo sapiens
ucagcaggcaggcuggugcagc

SEQ ID NO: 1809 - RNA, 22 nt, Homo sapiens
gcugcaccagccugccugcuga

SEQ ID NO: 1810 - RNA, 22 nt, Homo sapiens
ucaccugaccucccaugccugu

SEQ ID NO: 1811 - RNA, 22 nt, Homo sapiens
acaggcaugggaggucagguga

SEQ ID NO: 1812 - RNA, 22 nt, Homo sapiens
caggcacgggagcucaggugag

SEQ ID NO: 1813 - RNA, 22 nt, Homo sapiens
cucaccugagcucccgugccug

SEQ ID NO: 1814 - RNA, 21 nt, Homo sapiens
ugaguguugucuacgagggca

SEQ ID NO: 1815 - RNA, 21 nt, Homo sapiens
ugcccucguagacaacacuca

SEQ ID NO: 1816 - RNA, 21 nt, Homo sapiens
acugacaggagagcauuuuga

SEQ ID NO: 1817 - RNA, 21 nt, Homo sapiens
ucaaaaugcucuccugucagu

SEQ ID NO: 1818 - RNA, 22 nt, Homo sapiens
ugaccugggacucggacagcug

SEQ ID NO: 1819 - RNA, 22 nt, Homo sapiens
cagcuguccgagucccagguca

SEQ ID NO: 1820 - RNA, 22 nt, Homo sapiens
ucucaggaguaaagacagaguu

SEQ ID NO: 1821 - RNA, 22 nt, Homo sapiens
aacucugucuuuacuccugaga

SEQ ID NO: 1822 - RNA, 22 nt, Homo sapiens
aacucugucuucacucaugagu

SEQ ID NO: 1823 - RNA, 22 nt, Homo sapiens
acucaugagugaagacagaguu

SEQ ID NO: 1824 - RNA, 22 nt, Homo sapiens
uggggcggagcuuccggaggcc

SEQ ID NO: 1825 - RNA, 22 nt, Homo sapiens
ggccuccggaagcuccgcccca

SEQ ID NO: 1826 - RNA, 22 nt, Homo sapiens
caaucagcaaguauacugcccu

SEQ ID NO: 1827 - RNA, 22 nt, Homo sapiens
agggcaguauacuugcugauug

SEQ ID NO: 1828 - RNA, 22 nt, Homo sapiens
uggcagugucuuagcugguugu

SEQ ID NO: 1829 - RNA, 22 nt, Homo sapiens
acaaccagcuaagacacugcca

SEQ ID NO: 1830 - RNA, 22 nt, Homo sapiens
ccaauauuggcugugcugcucc

SEQ ID NO: 1831 - RNA, 22 nt, Homo sapiens
ggagcagcacagccaauauugg

SEQ ID NO: 1832 - RNA, 21 nt, Homo sapiens
uagcagcacagaaauauuggc

SEQ ID NO: 1833 - RNA, 21 nt, Homo sapiens
gccaauauuucugugcugcua

SEQ ID NO: 1834 - RNA, 21 nt, Homo sapiens
uaauuuuauguauaagcuagu

SEQ ID NO: 1835 - RNA, 21 nt, Homo sapiens
acuagcuuauacauaaaauua

SEQ ID NO: 1836 - RNA, 22 nt, Homo sapiens
gagcuuauucauaaaagugcag

SEQ ID NO: 1837 - RNA, 22 nt, Homo sapiens
cugcacuuuuaugaauaagcuc

SEQ ID NO: 1838 - RNA, 22 nt, Homo sapiens
aagacgggaggaaagaagggag

SEQ ID NO: 1839 - RNA, 22 nt, Homo sapiens
cucccuucuuuccucccgucuu

SEQ ID NO: 1840 - RNA, 22 nt, Homo sapiens
cagugguuuuacccuaugguag

SEQ ID NO: 1841 - RNA, 22 nt, Homo sapiens
cuaccauaggguaaaaccacug

SEQ ID NO: 1842 - RNA, 22 nt, Homo sapiens
auucuaauuucuccacgucuuu

SEQ ID NO: 1843 - RNA, 22 nt, Homo sapiens
aaagacguggagaaauuagaau

SEQ ID NO: 1844 - RNA, 22 nt, Homo sapiens
aaccagcaccccaacuuuggac

SEQ ID NO: 1845 - RNA, 22 nt, Homo sapiens
guccaaaguuggggugcugguu

SEQ ID NO: 1846 - RNA, 24 nt, Homo sapiens
aaagacauaggauagagucaccuc

SEQ ID NO: 1847 - RNA, 24 nt, Homo sapiens
gaggugacucuauccuaugucuuu

SEQ ID NO: 1848 - RNA, 22 nt, Homo sapiens
uaacugguugaacaacugaacc

SEQ ID NO: 1849 - RNA, 22 nt, Homo sapiens
gguucaguuguucaaccaguua

SEQ ID NO: 1850 - RNA, 20 nt, Homo sapiens
cgugccacccuuuuccccag

SEQ ID NO: 1851 - RNA, 20 nt, Homo sapiens
cuggggaaaaggguggcacg

SEQ ID NO: 1852 - RNA, 17 nt, Homo sapiens
guggggccaggcggugg

SEQ ID NO: 1853 - RNA, 17 nt, Homo sapiens
ccaccgccuggccccac

SEQ ID NO: 1854 - RNA, 22 nt, Homo sapiens
aaaagcuggguugagagggcaa

SEQ ID NO: 1855 - RNA, 22 nt, Homo sapiens
uugcccucucaacccagcuuuu

SEQ ID NO: 1856 - RNA, 22 nt, Homo sapiens
gguccagaggggagauagguuc

SEQ ID NO: 1857 - RNA, 22 nt, Homo sapiens
gaaccuaucuccccucuggacc

SEQ ID NO: 1858 - RNA, 23 nt, Homo sapiens
uagccuucagaucuugguguuuu

SEQ ID NO: 1859 - RNA, 23 nt, Homo sapiens
aaaacaccaagaucugaaggcua

SEQ ID NO: 1860 - RNA, 23 nt, Homo sapiens
ccacuuggaucugaaggcugccc

SEQ ID NO: 1861 - RNA, 23 nt, Homo sapiens
gggcagccuucagauccaagugg

SEQ ID NO: 1862 - RNA, 22 nt, Homo sapiens
ugugcgcagggagaccucuccc

SEQ ID NO: 1863 - RNA, 22 nt, Homo sapiens
gggagaggucucccugcgcaca

SEQ ID NO: 1864 - RNA, 22 nt, Homo sapiens
ugucuacuacuggagacacugg

SEQ ID NO: 1865 - RNA, 22 nt, Homo sapiens
ccagugucuccaguaguagaca

SEQ ID NO: 1866 - RNA, 21 nt, Homo sapiens
aaggcagggcccccgcucccc

SEQ ID NO: 1867 - RNA, 21 nt, Homo sapiens
ggggagcgggggcccugccuu

SEQ ID NO: 1868 - RNA, 21 nt, Homo sapiens
cugacuguugccguccuccag

SEQ ID NO: 1869 - RNA, 21 nt, Homo sapiens
cuggaggacggcaacagucag

SEQ ID NO: 1870 - RNA, 25 nt, Homo sapiens
aaaaaccacaauuacuuuugcacca

SEQ ID NO: 1871 - RNA, 25 nt, Homo sapiens
uggugcaaaaguaauugugguuuuu

SEQ ID NO: 1872 - RNA, 23 nt, Homo sapiens
caaaaaccgcaauuacuuuugca

SEQ ID NO: 1873 - RNA, 23 nt, Homo sapiens
ugcaaaaguaauugcgguuuuug

SEQ ID NO: 1874 - RNA, 22 nt, Homo sapiens
augugccugagggaguaagaca

SEQ ID NO: 1875 - RNA, 22 nt, Homo sapiens
ugucuuacucccucaggcacau

SEQ ID NO: 1876 - RNA, 20 nt, Homo sapiens
ucuuacucccucaggcacug

SEQ ID NO: 1877 - RNA, 20 nt, Homo sapiens
cagugccugagggaguaaga

SEQ ID NO: 1878 - RNA, 22 nt, Homo sapiens
agacacauuuggagagggaccc

SEQ ID NO: 1879 - RNA, 22 nt, Homo sapiens
gggucccucuccaaaugugucu

SEQ ID NO: 1880 - RNA, 22 nt, Homo sapiens
gguucccucuccaaaugugucu

SEQ ID NO: 1881 - RNA, 22 nt, Homo sapiens
agacacauuuggagagggaacc

SEQ ID NO: 1882 - RNA, 21 nt, Homo sapiens
aaaauuucuuucacuacuuag

SEQ ID NO: 1883 - RNA, 21 nt, Homo sapiens
cuaaguagugaaagaaauuuu

SEQ ID NO: 1884 - RNA, 21 nt, Homo sapiens
uuagugaaggcuauuuuaauu

SEQ ID NO: 1885 - RNA, 21 nt, Homo sapiens
aauuaaaauagccuucacuaa

SEQ ID NO: 1886 - RNA, 20 nt, Homo sapiens
acuguaaacgcuuucugaug

SEQ ID NO: 1887 - RNA, 20 nt, Homo sapiens
caucagaaagcguuuacagu

SEQ ID NO: 1888 - RNA, 22 nt, Homo sapiens
gcaugugaugaagcaaaucagu

SEQ ID NO: 1889 - RNA, 22 nt, Homo sapiens
acugauuugcuucaucacaugc

SEQ ID NO: 1890 - RNA, 24 nt, Homo sapiens
caaagugaugaguaauacuggcug

SEQ ID NO: 1891 - RNA, 24 nt, Homo sapiens
cagccaguauuacucaucacuuug

SEQ ID NO: 1892 - RNA, 20 nt, Homo sapiens
gaaucggaaaggaggcgccg

SEQ ID NO: 1893 - RNA, 20 nt, Homo sapiens
cggcgccuccuuuccgauuc

SEQ ID NO: 1894 - RNA, 21 nt, Homo sapiens
uugugaagaaagaaauucuua

SEQ ID NO: 1895 - RNA, 21 nt, Homo sapiens
uaagaauuucuuucuucacaa

SEQ ID NO: 1896 - RNA, 22 nt, Homo sapiens
aggaggcaucuugagaaaugga

SEQ ID NO: 1897 - RNA, 22 nt, Homo sapiens
uccauuucucaagaugccuccu

SEQ ID NO: 1898 - RNA, 24 nt, Homo sapiens
acaaaaaaaaaagcccaacccuuc

SEQ ID NO: 1899 - RNA, 24 nt, Homo sapiens
gaaggguugggcuuuuuuuuuugu

SEQ ID NO: 1900 - RNA, 22 nt, Homo sapiens
uguuguacuuuuuuuuuuguuc

SEQ ID NO: 1901 - RNA, 22 nt, Homo sapiens
gaacaaaaaaaaaaguacaaca

SEQ ID NO: 1902 - RNA, 21 nt, Homo sapiens
ucucucggcuccucgcggcuc

SEQ ID NO: 1903 - RNA, 21 nt, Homo sapiens
gagccgcgaggagccgagaga

SEQ ID NO: 1904 - RNA, 23 nt, Homo sapiens
cgagggcauuucaugaugcaggc

SEQ ID NO: 1905 - RNA, 23 nt, Homo sapiens
gccugcaucaugaaaugcccucg

SEQ ID NO: 1906 - RNA, 22 nt, Homo sapiens
augaagugcacucaugauaugu

SEQ ID NO: 1907 - RNA, 22 nt, Homo sapiens
acauaucaugagugcacuucau

SEQ ID NO: 1908 - RNA, 22 nt, Homo sapiens
ugucuacauuaaugaaaagagc

SEQ ID NO: 1909 - RNA, 22 nt, Homo sapiens
gcucuuuucauuaauguagaca

SEQ ID NO: 1910 - RNA, 22 nt, Homo sapiens
ucacccugcaucccgcacccag

SEQ ID NO: 1911 - RNA, 22 nt, Homo sapiens
cugggugcgggaugcaggguga

SEQ ID NO: 1912 - RNA, 22 nt, Homo sapiens
gugggcugggcugggcugggcc

SEQ ID NO: 1913 - RNA, 22 nt, Homo sapiens
ggcccagcccagcccagcccac

SEQ ID NO: 1914 - RNA, 20 nt, Homo sapiens
cgcgggucggggucugcagg

SEQ ID NO: 1915 - RNA, 20 nt, Homo sapiens
ccugcagaccccgacccgcg

SEQ ID NO: 1916 - RNA, 21 nt, Homo sapiens
ucaccugagcucccgugccug

SEQ ID NO: 1917 - RNA, 21 nt, Homo sapiens
caggcacgggagcucagguga

SEQ ID NO: 1918 - RNA, 20 nt, Homo sapiens
aggcaugggaggucagguga

SEQ ID NO: 1919 - RNA, 20 nt, Homo sapiens
ucaccugaccucccaugccu

SEQ ID NO: 1920 - RNA, 23 nt, Homo sapiens
caucagcacccuauguccuuucu

SEQ ID NO: 1921 - RNA, 23 nt, Homo sapiens
agaaaggacauagggugcugaug

SEQ ID NO: 1922 - RNA, 22 nt, Homo sapiens
aaagacauaguugcaagauggg

SEQ ID NO: 1923 - RNA, 22 nt, Homo sapiens
cccaucuugcaacuaugucuuu

SEQ ID NO: 1924 - RNA, 22 nt, Homo sapiens
uuugugaccugguccacuaacc

SEQ ID NO: 1925 - RNA, 22 nt, Homo sapiens
gguuaguggaccaggucacaaa

SEQ ID NO: 1926 - RNA, 22 nt, Homo sapiens
gaugguugaccagagagcacac

SEQ ID NO: 1927 - RNA, 22 nt, Homo sapiens
gugugcucucuggucaaccauc

SEQ ID NO: 1928 - RNA, 20 nt, Homo sapiens
aaaagcuggguugagagggu

SEQ ID NO: 1929 - RNA, 20 nt, Homo sapiens
acccucucaacccagcuuuu

SEQ ID NO: 1930 - RNA, 21 nt, Homo sapiens
cacaagguauugguauuaccu

SEQ ID NO: 1931 - RNA, 21 nt, Homo sapiens
agguaauaccaauaccuugug

SEQ ID NO: 1932 - RNA, 22 nt, Homo sapiens
uaguaccaguaccuuguguuca

SEQ ID NO: 1933 - RNA, 22 nt, Homo sapiens
ugaacacaagguacugguacua

SEQ ID NO: 1934 - RNA, 22 nt, Homo sapiens
aguauucuguaccagggaaggu

SEQ ID NO: 1935 - RNA, 22 nt, Homo sapiens
accuucccugguacagaauacu

SEQ ID NO: 1936 - RNA, 22 nt, Homo sapiens
uggcaguguauuguuagcuggu

SEQ ID NO: 1937 - RNA, 22 nt, Homo sapiens
accagcuaacaauacacugcca

SEQ ID NO: 1938 - RNA, 22 nt, Homo sapiens
uauacaagggcaagcucucugu

SEQ ID NO: 1939 - RNA, 22 nt, Homo sapiens
acagagagcuugcccuuguaua

SEQ ID NO: 1940 - RNA, 22 nt, Homo sapiens
agcgagguugcccuuuguauau

SEQ ID NO: 1941 - RNA, 22 nt, Homo sapiens
auauacaaagggcaaccucgcu

SEQ ID NO: 1942 - RNA, 22 nt, Homo sapiens
caaucacuaacuccacugccau

SEQ ID NO: 1943 - RNA, 22 nt, Homo sapiens
auggcaguggaguuagugauug

SEQ ID NO: 1944 - RNA, 23 nt, Homo sapiens
uaggcagugucauuagcugauug

SEQ ID NO: 1945 - RNA, 23 nt, Homo sapiens
caaucagcuaaugacacugccua

SEQ ID NO: 1946 - RNA, 22 nt, Homo sapiens
cagccacaacuacccugccacu

SEQ ID NO: 1947 - RNA, 22 nt, Homo sapiens
aguggcaggguaguuguggcug

SEQ ID NO: 1948 - RNA, 22 nt, Homo sapiens
aggcaguguauuguuagcuggc

SEQ ID NO: 1949 - RNA, 22 nt, Homo sapiens
gccagcuaacaauacacugccu

SEQ ID NO: 1950 - RNA, 22 nt, Homo sapiens
aaucacuaaccacacggccagg

SEQ ID NO: 1951 - RNA, 22 nt, Homo sapiens
ccuggccgugugguuagugauu

SEQ ID NO: 1952 - RNA, 23 nt, Homo sapiens
aggcaguguaguuagcugauugc

SEQ ID NO: 1953 - RNA, 23 nt, Homo sapiens
gcaaucagcuaacuacacugccu

SEQ ID NO: 1954 - RNA, 20 nt, Homo sapiens
guccgcucggcgguggccca

SEQ ID NO: 1955 - RNA, 20 nt, Homo sapiens
ugggccaccgccgagcggac

SEQ ID NO: 1956 - RNA, 23 nt, Homo sapiens
gaacgccuguucuugccaggugg

SEQ ID NO: 1957 - RNA, 23 nt, Homo sapiens
ccaccuggcaagaacaggcguuc

SEQ ID NO: 1958 - RNA, 19 nt, Homo sapiens
aagugugcagggcacuggu

SEQ ID NO: 1959 - RNA, 19 nt, Homo sapiens
accagugcccugcacacuu

SEQ ID NO: 1960 - RNA, 21 nt, Homo sapiens
aggggugcuaucugugauuga

SEQ ID NO: 1961 - RNA, 21 nt, Homo sapiens
ucaaucacagauagcaccccu

SEQ ID NO: 1962 - RNA, 22 nt, Homo sapiens
cuuucagucagauguuugcugc

SEQ ID NO: 1963 - RNA, 22 nt, Homo sapiens
gcagcaaacaucugacugaaag

SEQ ID NO: 1964 - RNA, 22 nt, Homo sapiens
uguaaacauccccgacuggaag

SEQ ID NO: 1965 - RNA, 22 nt, Homo sapiens
cuuccagucggggauguuuaca

SEQ ID NO: 1966 - RNA, 22 nt, Homo sapiens
uguaaacauccucgacuggaag

SEQ ID NO: 1967 - RNA, 22 nt, Homo sapiens
cuuccagucgaggauguuuaca

SEQ ID NO: 1968 - RNA, 22 nt, Homo sapiens
agaaguaauugcgguuuugcca

SEQ ID NO: 1969 - RNA, 22 nt, Homo sapiens
uggcaaaaccgcaauuacuucu

SEQ ID NO: 1970 - RNA, 22 nt, Homo sapiens
caaaacuggcaauuacuuuugc

SEQ ID NO: 1971 - RNA, 22 nt, Homo sapiens
gcaaaaguaauugccaguuuug

SEQ ID NO: 1972 - RNA, 22 nt, Homo sapiens
aaaaguaauugcgaguuuuacc

SEQ ID NO: 1973 - RNA, 22 nt, Homo sapiens
gguaaaacucgcaauuacuuuu

SEQ ID NO: 1974 - RNA, 22 nt, Homo sapiens
caagaaccucaguugcuuuugu

SEQ ID NO: 1975 - RNA, 22 nt, Homo sapiens
acaaaagcaacugagguucuug

SEQ ID NO: 1976 - RNA, 22 nt, Homo sapiens
caaaaaucucaauuacuuuugc

SEQ ID NO: 1977 - RNA, 22 nt, Homo sapiens
gcaaaaguaauugagauuuuug

SEQ ID NO: 1978 - RNA, 22 nt, Homo sapiens
caaaaaccacaguuucuuuugc

SEQ ID NO: 1979 - RNA, 22 nt, Homo sapiens
gcaaaagaaacugugguuuuug

SEQ ID NO: 1980 - RNA, 22 nt, Homo sapiens
aaaaguaauugugguuuuugcc

SEQ ID NO: 1981 - RNA, 22 nt, Homo sapiens
ggcaaaaaccacaauuacuuuu

SEQ ID NO: 1982 - RNA, 21 nt, Homo sapiens
ugacaacuauggaugagcucu

SEQ ID NO: 1983 - RNA, 21 nt, Homo sapiens
agagcucauccauaguuguca

SEQ ID NO: 1984 - RNA, 21 nt, Homo sapiens
aacaggugacugguuagacaa

SEQ ID NO: 1985 - RNA, 21 nt, Homo sapiens
uugucuaaccagucaccuguu

SEQ ID NO: 1986 - RNA, 21 nt, Homo sapiens
aaaacggugagauuuuguuuu

SEQ ID NO: 1987 - RNA, 21 nt, Homo sapiens
aaaacaaaaucucaccguuuu

SEQ ID NO: 1988 - RNA, 21 nt, Homo sapiens
gcuaguccugacucagccagu

SEQ ID NO: 1989 - RNA, 21 nt, Homo sapiens
acuggcugagucaggacuagc

SEQ ID NO: 1990 - RNA, 21 nt, Homo sapiens
aggguaagcugaaccucugau

SEQ ID NO: 1991 - RNA, 21 nt, Homo sapiens
aucagagguucagcuuacccu

SEQ ID NO: 1992 - RNA, 22 nt, Homo sapiens
auauuaccauuagcucaucuuu

SEQ ID NO: 1993 - RNA, 22 nt, Homo sapiens
aaagaugagcuaaugguaauau

SEQ ID NO: 1994 - RNA, 22 nt, Homo sapiens
gaugagcucauuguaauaugag

SEQ ID NO: 1995 - RNA, 22 nt, Homo sapiens
cucauauuacaaugagcucauc

SEQ ID NO: 1996 - RNA, 19 nt, Homo sapiens
agguugacauacguuuccc

SEQ ID NO: 1997 - RNA, 19 nt, Homo sapiens
gggaaacguaugucaaccu

SEQ ID NO: 1998 - RNA, 20 nt, Homo sapiens
auguauaaauguauacacac

SEQ ID NO: 1999 - RNA, 20 nt, Homo sapiens
guguguauacauuuauacau

SEQ ID NO: 2000 - RNA, 24 nt, Homo sapiens
cugaagugauguguaacugaucag

SEQ ID NO: 2001 - RNA, 24 nt, Homo sapiens
cugaucaguuacacaucacuucag

SEQ ID NO: 2002 - RNA, 22 nt, Homo sapiens
aagauguggaaaaauuggaauc

SEQ ID NO: 2003 - RNA, 22 nt, Homo sapiens
gauuccaauuuuuccacaucuu

SEQ ID NO: 2004 - RNA, 21 nt, Homo sapiens
uagauaaaauauugguaccug

SEQ ID NO: 2005 - RNA, 21 nt, Homo sapiens
cagguaccaauauuuuaucua

SEQ ID NO: 2006 - RNA, 21 nt, Homo sapiens
cuucuugugcucuaggauugu

SEQ ID NO: 2007 - RNA, 21 nt, Homo sapiens
acaauccuagagcacaagaag

SEQ ID NO: 2008 - RNA, 22 nt, Homo sapiens
uaugcauuguauuuuuaggucc

SEQ ID NO: 2009 - RNA, 22 nt, Homo sapiens
ggaccuaaaaauacaaugcaua

SEQ ID NO: 2010 - RNA, 21 nt, Homo sapiens
uuuccauaggugaugagucac

SEQ ID NO: 2011 - RNA, 21 nt, Homo sapiens
gugacucaucaccuauggaaa

SEQ ID NO: 2012 - RNA, 21 nt, Homo sapiens
uuggccacaauggguuagaac

SEQ ID NO: 2013 - RNA, 21 nt, Homo sapiens
guucuaacccauuguggccaa

SEQ ID NO: 2014 - RNA, 22 nt, Homo sapiens
ugugucacucgaugaccacugu

SEQ ID NO: 2015 - RNA, 22 nt, Homo sapiens
acaguggucaucgagugacaca

SEQ ID NO: 2016 - RNA, 23 nt, Homo sapiens
acuuacagacaagagccuugcuc

SEQ ID NO: 2017 - RNA, 23 nt, Homo sapiens
gagcaaggcucuugucuguaagu

SEQ ID NO: 2018 - RNA, 19 nt, Homo sapiens
aggcugcggaauucaggac

SEQ ID NO: 2019 - RNA, 19 nt, Homo sapiens
guccugaauuccgcagccu

SEQ ID NO: 2020 - RNA, 23 nt, Homo sapiens
uaaaucccauggugccuucuccu

SEQ ID NO: 2021 - RNA, 23 nt, Homo sapiens
aggagaaggcaccaugggauuua

SEQ ID NO: 2022 - RNA, 21 nt, Homo sapiens
aaacuacugaaaaucaaagau

SEQ ID NO: 2023 - RNA, 21 nt, Homo sapiens
aucuuugauuuucaguaguuu

SEQ ID NO: 2024 - RNA, 21 nt, Homo sapiens
guucaaauccagaucuauaac

SEQ ID NO: 2025 - RNA, 21 nt, Homo sapiens
guuauagaucuggauuugaac

SEQ ID NO: 2026 - RNA, 19 nt, Homo sapiens
ccgguuccagucccuggag

SEQ ID NO: 2027 - RNA, 19 nt, Homo sapiens
cuccagggacuggaaccgg

SEQ ID NO: 2028 - RNA, 20 nt, Homo sapiens
aggguguuucucucaucucu

SEQ ID NO: 2029 - RNA, 20 nt, Homo sapiens
agagaugagagaaacacccu

SEQ ID NO: 2030 - RNA, 24 nt, Homo sapiens
gaccuggacauguuugugcccagu

SEQ ID NO: 2031 - RNA, 24 nt, Homo sapiens
acugggcacaaacauguccagguc

SEQ ID NO: 2032 - RNA, 20 nt, Homo sapiens
auggagauagauauagaaau

SEQ ID NO: 2033 - RNA, 20 nt, Homo sapiens
auuucuauaucuaucuccau

SEQ ID NO: 2034 - RNA, 19 nt, Homo sapiens
agcugucugaaaaugucuu

SEQ ID NO: 2035 - RNA, 19 nt, Homo sapiens
aagacauuuucagacagcu

SEQ ID NO: 2036 - RNA, 21 nt, Homo sapiens
agaccuggcccagaccucagc

SEQ ID NO: 2037 - RNA, 21 nt, Homo sapiens
gcugaggucugggccaggucu

SEQ ID NO: 2038 - RNA, 23 nt, Homo sapiens
acuugggcacugaaacaaugucc

SEQ ID NO: 2039 - RNA, 23 nt, Homo sapiens
ggacauuguuucagugcccaagu

SEQ ID NO: 2040 - RNA, 24 nt, Homo sapiens
acugggggcuuucgggcucugcgu

SEQ ID NO: 2041 - RNA, 24 nt, Homo sapiens
acgcagagcccgaaagcccccagu

SEQ ID NO: 2042 - RNA, 23 nt, Homo sapiens
aucgcugcgguugcgagcgcugu

SEQ ID NO: 2043 - RNA, 23 nt, Homo sapiens
acagcgcucgcaaccgcagcgau

SEQ ID NO: 2044 - RNA, 22 nt, Homo sapiens
gucccucuccaaaugugucuug

SEQ ID NO: 2045 - RNA, 22 nt, Homo sapiens
caagacacauuuggagagggac

SEQ ID NO: 2046 - RNA, 22 nt, Homo sapiens
acuuguaugcuagcucagguag

SEQ ID NO: 2047 - RNA, 22 nt, Homo sapiens
cuaccugagcuagcauacaagu

SEQ ID NO: 2048 - RNA, 22 nt, Homo sapiens
uuuaggauaagcuugacuuuug

SEQ ID NO: 2049 - RNA, 22 nt, Homo sapiens
caaaagucaagcuuauccuaaa

SEQ ID NO: 2050 - RNA, 21 nt, Homo sapiens
guguugaaacaaucucuacug

SEQ ID NO: 2051 - RNA, 21 nt, Homo sapiens
caguagagauuguuucaacac

SEQ ID NO: 2052 - RNA, 22 nt, Homo sapiens
uaugucugcugaccaucaccuu

SEQ ID NO: 2053 - RNA, 22 nt, Homo sapiens
aaggugauggucagcagacaua

SEQ ID NO: 2054 - RNA, 22 nt, Homo sapiens
ggggcuggggccggggccgagc

SEQ ID NO: 2055 - RNA, 22 nt, Homo sapiens
gcucggccccggccccagcccc

SEQ ID NO: 2056 - RNA, 22 nt, Homo sapiens
ugagguaguagguuguaugguu

SEQ ID NO: 2057 - RNA, 22 nt, Homo sapiens
aaccauacaaccuacuaccuca

SEQ ID NO: 2058 - RNA, 21 nt, Homo sapiens
gugucuuuugcucugcaguca

SEQ ID NO: 2059 - RNA, 21 nt, Homo sapiens
ugacugcagagcaaaagacac

SEQ ID NO: 2060 - RNA, 24 nt, Homo sapiens
ccccgggaacgucgagacuggagc

SEQ ID NO: 2061 - RNA, 24 nt, Homo sapiens
gcuccagucucgacguucccgggg

SEQ ID NO: 2062 - RNA, 22 nt, Homo sapiens
acccgucccguucguccccgga

SEQ ID NO: 2063 - RNA, 22 nt, Homo sapiens
uccggggacgaacgggacgggu

SEQ ID NO: 2064 - RNA, 22 nt, Homo sapiens
augggugaauuuguagaaggau

SEQ ID NO: 2065 - RNA, 22 nt, Homo sapiens
auccuucuacaaauucacccau

SEQ ID NO: 2066 - RNA, 22 nt, Homo sapiens
cuggacugagccgugcuacugg

SEQ ID NO: 2067 - RNA, 22 nt, Homo sapiens
ccaguagcacggcucaguccag

SEQ ID NO: 2068 - RNA, 22 nt, Homo sapiens
cuggacugagccaugcuacugg

SEQ ID NO: 2069 - RNA, 22 nt, Homo sapiens
ccaguagcauggcucaguccag

SEQ ID NO: 2070 - RNA, 22 nt, Homo sapiens
uacguagauauauauguauuuu

SEQ ID NO: 2071 - RNA, 22 nt, Homo sapiens
aaaauacauauauaucuacgua

SEQ ID NO: 2072 - RNA, 24 nt, Homo sapiens
aaauauauauauauauguacguau

SEQ ID NO: 2073 - RNA, 22 nt, Homo sapiens
gcucuuuucauuaauguagaca

SEQ ID NO: 2074 - RNA, 22 nt, Homo sapiens
ugcuggaucagugguucgaguc

SEQ ID NO: 2075 - RNA, 22 nt, Homo sapiens
gacucgaaccacugauccagca

SEQ ID NO: 2076 - RNA, 19 nt, Homo sapiens
uggauuuuuggaucaggga

SEQ ID NO: 2077 - RNA, 19 nt, Homo sapiens
ucccugauccaaaaaucca

SEQ ID NO: 2078 - RNA, 22 nt, Homo sapiens
uuauaaagcaaugagacugauu

SEQ ID NO: 2079 - RNA, 22 nt, Homo sapiens
aaucagucucauugcuuuauaa

SEQ ID NO: 2080 - RNA, 23 nt, Homo sapiens
uagugcaauauugcuuauagggu

SEQ ID NO: 2081 - RNA, 23 nt, Homo sapiens
acccuauaagcaauauugcacua

SEQ ID NO: 2082 - RNA, 22 nt, Homo sapiens
acccuaucaauauugucucugc

SEQ ID NO: 2083 - RNA, 22 nt, Homo sapiens
gcagagacaauauugauagggu

SEQ ID NO: 2084 - RNA, 17 nt, Homo sapiens
uaagugcuuccaugcuu

SEQ ID NO: 2085 - RNA, 17 nt, Homo sapiens
aagcauggaagcacuua

SEQ ID NO: 2086 - RNA, 22 nt, Homo sapiens
ucggccugaccacccaccccac

SEQ ID NO: 2087 - RNA, 22 nt, Homo sapiens
gugggguggguggucaggccga

SEQ ID NO: 2088 - RNA, 21 nt, Homo sapiens
ggggggggggggggggggccg

SEQ ID NO: 2089 - RNA, 21 nt, Homo sapiens
cggcccccccccccccccccc

SEQ ID NO: 2090 - RNA, 22 nt, Homo sapiens
cuauacgaccugcugccuuucu

SEQ ID NO: 2091 - RNA, 22 nt, Homo sapiens
agaaaggcagcaggucguauag

SEQ ID NO: 2092 - RNA, 22 nt, Homo sapiens
agagguaguagguugcauaguu

SEQ ID NO: 2093 - RNA, 22 nt, Homo sapiens
aacuaugcaaccuacuaccucu

SEQ ID NO: 2094 - RNA, 22 nt, Homo sapiens
ccgcacuguggguacuugcugc

SEQ ID NO: 2095 - RNA, 22 nt, Homo sapiens
gcagcaaguacccacagugcgg

SEQ ID NO: 2096 - RNA, 21 nt, Homo sapiens
uaaagugcugacagugcagau

SEQ ID NO: 2097 - RNA, 21 nt, Homo sapiens
aucugcacugucagcacuuua

SEQ ID NO: 2098 - RNA, 22 nt, Homo sapiens
aacuggaucaauuauaggagug

SEQ ID NO: 2099 - RNA, 22 nt, Homo sapiens
cacuccuauaauugauccaguu

SEQ ID NO: 2100 - RNA, 26 nt, Homo sapiens
aaguaguugguuuguaugagaugguu

SEQ ID NO: 2101 - RNA, 26 nt, Homo sapiens
aaccaucucauacaaaccaacuacuu

SEQ ID NO: 2102 - RNA, 21 nt, Homo sapiens
aagugaucuaaaggccuacau

SEQ ID NO: 2103 - RNA, 21 nt, Homo sapiens
auguaggccuuuagaucacuu

SEQ ID NO: 2104 - RNA, 22 nt, Homo sapiens
ucagaugaucuaaaggccuaua

SEQ ID NO: 2105 - RNA, 22 nt, Homo sapiens
uauaggccuuuagaucaucuga

SEQ ID NO: 2106 - RNA, 21 nt, Homo sapiens
uaggccuuuagaucacuuaaa

SEQ ID NO: 2107 - RNA, 21 nt, Homo sapiens
uuuaagugaucuaaaggccua

SEQ ID NO: 2108 - RNA, 21 nt, Homo sapiens
acucuagcugccaaaggcgcu

SEQ ID NO: 2109 - RNA, 21 nt, Homo sapiens
agcgccuuuggcagcuagagu

SEQ ID NO: 2110 - RNA, 22 nt, Homo sapiens
agaaggaaauugaauucauuua

SEQ ID NO: 2111 - RNA, 22 nt, Homo sapiens
uaaaugaauucaauuuccuucu

SEQ ID NO: 2112 - RNA, 21 nt, Homo sapiens
agagaagaagaucagccugca

SEQ ID NO: 2113 - RNA, 21 nt, Homo sapiens
ugcaggcugaucuucuucucu

SEQ ID NO: 2114 - RNA, 24 nt, Homo sapiens
agccuggaagcuggagccugcagu

SEQ ID NO: 2115 - RNA, 24 nt, Homo sapiens
acugcaggcuccagcuuccaggcu

SEQ ID NO: 2116 - RNA, 23 nt, Homo sapiens
aggaugagcaaagaaaguagauu

SEQ ID NO: 2117 - RNA, 23 nt, Homo sapiens
aaucuacuuucuuugcucauccu

SEQ ID NO: 2118 - RNA, 22 nt, Homo sapiens
aaccacuuucuuugcucaucca

SEQ ID NO: 2119 - RNA, 22 nt, Homo sapiens
uggaugagcaaagaaagugguu

SEQ ID NO: 2120 - RNA, 22 nt, Homo sapiens
cggaugagcaaagaaagugguu

SEQ ID NO: 2121 - RNA, 22 nt, Homo sapiens
aaccacuuucuuugcucauccg

SEQ ID NO: 2122 - RNA, 22 nt, Homo sapiens
aggcauugacuucucacuagcu

SEQ ID NO: 2123 - RNA, 22 nt, Homo sapiens
agcuagugagaagucaaugccu

SEQ ID NO: 2124 - RNA, 21 nt, Homo sapiens
agugaaugauggguucugacc

SEQ ID NO: 2125 - RNA, 21 nt, Homo sapiens
ggucagaacccaucauucacu

SEQ ID NO: 2126 - RNA, 21 nt, Homo sapiens
aguuaggauuaggucguggaa

SEQ ID NO: 2127 - RNA, 21 nt, Homo sapiens
uuccacgaccuaauccuaacu

SEQ ID NO: 2128 - RNA, 19 nt, Homo sapiens
auggauaaggcuuuggcuu

SEQ ID NO: 2129 - RNA, 19 nt, Homo sapiens
aagccaaagccuuauccau

SEQ ID NO: 2130 - RNA, 22 nt, Homo sapiens
augguacccuggcauacugagu

SEQ ID NO: 2131 - RNA, 22 nt, Homo sapiens
acucaguaugccaggguaccau

SEQ ID NO: 2132 - RNA, 23 nt, Homo sapiens
caagucuuauuugagcaccuguu

SEQ ID NO: 2133 - RNA, 23 nt, Homo sapiens
aacaggugcucaaauaagacuug

SEQ ID NO: 2134 - RNA, 22 nt, Homo sapiens
caggauguggucaaguguuguu

SEQ ID NO: 2135 - RNA, 22 nt, Homo sapiens
aacaacacuugaccacauccug

SEQ ID NO: 2136 - RNA, 23 nt, Homo sapiens
ccucagggcuguagaacagggcu

SEQ ID NO: 2137 - RNA, 23 nt, Homo sapiens
agcccuguucuacagcccugagg

SEQ ID NO: 2138 - RNA, 21 nt, Homo sapiens
ccuguugaaguguaaucccca

SEQ ID NO: 2139 - RNA, 21 nt, Homo sapiens
uggggauuacacuucaacagg

SEQ ID NO: 2140 - RNA, 18 nt, Homo sapiens
cgggcguggugguggggg

SEQ ID NO: 2141 - RNA, 18 nt, Homo sapiens
cccccaccaccacgcccg

SEQ ID NO: 2142 - RNA, 20 nt, Homo sapiens
cgggcgugguggugggggug

SEQ ID NO: 2143 - RNA, 20 nt, Homo sapiens
cacccccaccaccacgcccg

SEQ ID NO: 2144 - RNA, 23 nt, Homo sapiens
cuggagauauggaagagcugugu

SEQ ID NO: 2145 - RNA, 23 nt, Homo sapiens
acacagcucuuccauaucuccag

SEQ ID NO: 2146 - RNA, 26 nt, Homo sapiens
gaugaugauggcagcaaauucugaaa

SEQ ID NO: 2147 - RNA, 26 nt, Homo sapiens
uuucagaauuugcugccaucaucauc

SEQ ID NO: 2148 - RNA, 25 nt, Homo sapiens
gggcgacaaagcaagacucuuucuu

SEQ ID NO: 2149 - RNA, 25 nt, Homo sapiens
aagaaagagucuugcuuugucgccc

SEQ ID NO: 2150 - RNA, 25 nt, Homo sapiens
gaacccaugagguugaggcugcagu

SEQ ID NO: 2151 - RNA, 25 nt, Homo sapiens
acugcagccucaaccucauggguuc

SEQ ID NO: 2152 - RNA, 17 nt, Homo sapiens
gugggggagaggcuguc

SEQ ID NO: 2153 - RNA, 17 nt, Homo sapiens
gacagccucucccccac

SEQ ID NO: 2154 - RNA, 20 nt, Homo sapiens
uaaagagcccuguggagaca

SEQ ID NO: 2155 - RNA, 20 nt, Homo sapiens
ugucuccacagggcucuuua

SEQ ID NO: 2156 - RNA, 22 nt, Homo sapiens
uaguacugugcauaucaucuau

SEQ ID NO: 2157 - RNA, 22 nt, Homo sapiens
auagaugauaugcacaguacua

SEQ ID NO: 2158 - RNA, 20 nt, Homo sapiens
ucguuugccuuuuucugcuu

SEQ ID NO: 2159 - RNA, 20 nt, Homo sapiens
aagcagaaaaaggcaaacga

SEQ ID NO: 2160 - RNA, 21 nt, Homo sapiens
uggacugcccugaucuggaga

SEQ ID NO: 2161 - RNA, 21 nt, Homo sapiens
ucuccagaucagggcagucca

SEQ ID NO: 2162 - RNA, 22 nt, Homo sapiens
uggguggucuggagauuugugc

SEQ ID NO: 2163 - RNA, 22 nt, Homo sapiens
gcacaaaucuccagaccaccca

SEQ ID NO: 2164 - RNA, 22 nt, Homo sapiens
ugugagguuggcauuguugucu

SEQ ID NO: 2165 - RNA, 22 nt, Homo sapiens
agacaacaaugccaaccucaca

SEQ ID NO: 2166 - RNA, 17 nt, Homo sapiens
uucaaguaauucaggug

SEQ ID NO: 2167 - RNA, 17 nt, Homo sapiens
caccugaauuacuugaa

SEQ ID NO: 2168 - RNA, 22 nt, Homo sapiens
uucuggaauucugugugaggga

SEQ ID NO: 2169 - RNA, 22 nt, Homo sapiens
ucccucacacagaauuccagaa

SEQ ID NO: 2170 - RNA, 22 nt, Homo sapiens
uuuucaacucuaaugggagaga

SEQ ID NO: 2171 - RNA, 22 nt, Homo sapiens
ucucucccauuagaguugaaaa

SEQ ID NO: 2172 - RNA, 18 nt, Homo sapiens
acguuggcucugguggug

SEQ ID NO: 2173 - RNA, 18 nt, Homo sapiens
caccaccagagccaacgu

SEQ ID NO: 2174 - RNA, 22 nt, Homo sapiens
ccaccuccccugcaaacgucca

SEQ ID NO: 2175 - RNA, 22 nt, Homo sapiens
uggacguuugcaggggaggugg

SEQ ID NO: 2176 - RNA, 22 nt, Homo sapiens
acucggcguggcgucggucgug

SEQ ID NO: 2177 - RNA, 22 nt, Homo sapiens
cacgaccgacgccacgccgagu

SEQ ID NO: 2178 - RNA, 21 nt, Homo sapiens
ucgaccggaccucgaccggcu

SEQ ID NO: 2179 - RNA, 21 nt, Homo sapiens
agccggucgagguccggucga

SEQ ID NO: 2180 - RNA, 22 nt, Homo sapiens
ugagaacugaauuccauaggcu

SEQ ID NO: 2181 - RNA, 22 nt, Homo sapiens
agccuauggaauucaguucuca

SEQ ID NO: 2182 - RNA, 22 nt, Homo sapiens
aaucauacacgguugaccuauu

SEQ ID NO: 2183 - RNA, 22 nt, Homo sapiens
aauaggucaaccguguaugauu

SEQ ID NO: 2184 - RNA, 22 nt, Homo sapiens
uagguuauccguguugccuucg

SEQ ID NO: 2185 - RNA, 22 nt, Homo sapiens
cgaaggcaacacggauaaccua

SEQ ID NO: 2186 - RNA, 21 nt, Homo sapiens
ccaguccugugccugccgccu

SEQ ID NO: 2187 - RNA, 21 nt, Homo sapiens
aggcggcaggcacaggacugg

SEQ ID NO: 2188 - RNA, 22 nt, Homo sapiens
ucugcccccuccgcugcugcca

SEQ ID NO: 2189 - RNA, 22 nt, Homo sapiens
uggcagcagcggagggggcaga

SEQ ID NO: 2190 - RNA, 22 nt, Homo sapiens
ggaggggucccgcacugggagg

SEQ ID NO: 2191 - RNA, 22 nt, Homo sapiens
ccucccagugcgggaccccucc

SEQ ID NO: 2192 - RNA, 22 nt, Homo sapiens
cccugugcccggcccacuucug

SEQ ID NO: 2193 - RNA, 22 nt, Homo sapiens
cagaagugggccgggcacaggg

SEQ ID NO: 2194 - RNA, 20 nt, Homo sapiens
ccccagggcgacgcggcggg

SEQ ID NO: 2195 - RNA, 20 nt, Homo sapiens
cccgccgcgucgcccugggg

SEQ ID NO: 2196 - RNA, 22 nt, Homo sapiens
accuugccuugcugcccgggcc

SEQ ID NO: 2197 - RNA, 22 nt, Homo sapiens
ggcccgggcagcaaggcaaggu

SEQ ID NO: 2198 - RNA, 21 nt, Homo sapiens
auuugugcuuggcucugucac

SEQ ID NO: 2199 - RNA, 21 nt, Homo sapiens
gugacagagccaagcacaaau

SEQ ID NO: 2200 - RNA, 22 nt, Homo sapiens
auuguccuugcuguuuggagau

SEQ ID NO: 2201 - RNA, 22 nt, Homo sapiens
aucuccaaacagcaaggacaau

SEQ ID NO: 2202 - RNA, 21 nt, Homo sapiens
auccccagauacaauggacaa

SEQ ID NO: 2203 - RNA, 21 nt, Homo sapiens
uuguccauuguaucuggggau

SEQ ID NO: 2204 - RNA, 23 nt, Homo sapiens
cagugcaauaguauugucaaagc

SEQ ID NO: 2205 - RNA, 23 nt, Homo sapiens
gcuuugacaauacuauugcacug

SEQ ID NO: 2206 - RNA, 22 nt, Homo sapiens
gcucugacuuuauugcacuacu

SEQ ID NO: 2207 - RNA, 22 nt, Homo sapiens
aguagugcaauaaagucagagc

SEQ ID NO: 2208 - RNA, 23 nt, Homo sapiens
uaagugcuuccauguuuuaguag

SEQ ID NO: 2209 - RNA, 23 nt, Homo sapiens
cuacuaaaacauggaagcacuua

SEQ ID NO: 2210 - RNA, 22 nt, Homo sapiens
acuuuaacauggaagugcuuuc

SEQ ID NO: 2211 - RNA, 22 nt, Homo sapiens
gaaagcacuuccauguuaaagu

SEQ ID NO: 2212 - RNA, 23 nt, Homo sapiens
uaagugcuuccauguuucagugg

SEQ ID NO: 2213 - RNA, 23 nt, Homo sapiens
ccacugaaacauggaagcacuua

SEQ ID NO: 2214 - RNA, 22 nt, Homo sapiens
uuuaacauggggguaccugcug

SEQ ID NO: 2215 - RNA, 22 nt, Homo sapiens
cagcagguacccccauguuaaa

SEQ ID NO: 2216 - RNA, 23 nt, Homo sapiens
uaagugcuuccauguuugagugu

SEQ ID NO: 2217 - RNA, 23 nt, Homo sapiens
acacucaaacauggaagcacuua

SEQ ID NO: 2218 - RNA, 22 nt, Homo sapiens
acuuuaacauggaggcacuugc

SEQ ID NO: 2219 - RNA, 22 nt, Homo sapiens
gcaagugccuccauguuaaagu

SEQ ID NO: 2220 - RNA, 22 nt, Homo sapiens
aauugcacuuuagcaaugguga

SEQ ID NO: 2221 - RNA, 22 nt, Homo sapiens
ucaccauugcuaaagugcaauu

SEQ ID NO: 2222 - RNA, 22 nt, Homo sapiens
acuguugcuaauaugcaacucu

SEQ ID NO: 2223 - RNA, 22 nt, Homo sapiens
agaguugcauauuagcaacagu

SEQ ID NO: 2224 - RNA, 23 nt, Homo sapiens
agcucggucugaggccccucagu

SEQ ID NO: 2225 - RNA, 23 nt, Homo sapiens
acugaggggccucagaccgagcu

SEQ ID NO: 2226 - RNA, 22 nt, Homo sapiens
aaaaacugagacuacuuuugca

SEQ ID NO: 2227 - RNA, 22 nt, Homo sapiens
ugcaaaaguagucucaguuuuu

SEQ ID NO: 2228 - RNA, 19 nt, Homo sapiens
aaaaacuguaauuacuuuu

SEQ ID NO: 2229 - RNA, 19 nt, Homo sapiens
aaaaguaauuacaguuuuu

SEQ ID NO: 2230 - RNA, 22 nt, Homo sapiens
aaaacuguaauuacuuuuguac

SEQ ID NO: 2231 - RNA, 22 nt, Homo sapiens
guacaaaaguaauuacaguuuu

SEQ ID NO: 2232 - RNA, 23 nt, Homo sapiens
ugcaaaaguaauugcaguuuuug

SEQ ID NO: 2233 - RNA, 23 nt, Homo sapiens
caaaaacugcaauuacuuuugca

SEQ ID NO: 2234 - RNA, 23 nt, Homo sapiens
caaaaaccgcaauuacuuuugca

SEQ ID NO: 2235 - RNA, 23 nt, Homo sapiens
ugcaaaaguaauugcgguuuuug

SEQ ID NO: 2236 - RNA, 22 nt, Homo sapiens
aaaaguaaucgcgguuuuuguc

SEQ ID NO: 2237 - RNA, 22 nt, Homo sapiens
gacaaaaaccgcgauuacuuuu

SEQ ID NO: 2238 - RNA, 22 nt, Homo sapiens
aaaaguacuugcggauuuugcu

SEQ ID NO: 2239 - RNA, 22 nt, Homo sapiens
agcaaaauccgcaaguacuuuu

SEQ ID NO: 2240 - RNA, 22 nt, Homo sapiens
aaaaguauuugcggguuuuguc

SEQ ID NO: 2241 - RNA, 22 nt, Homo sapiens
gacaaaacccgcaaauacuuuu

SEQ ID NO: 2242 - RNA, 21 nt, Homo sapiens
caaagguauuugugguuuuug

SEQ ID NO: 2243 - RNA, 21 nt, Homo sapiens
caaaaaccacaaauaccuuug

SEQ ID NO: 2244 - RNA, 22 nt, Homo sapiens
ccaaaacugcaguuacuuuugc

SEQ ID NO: 2245 - RNA, 22 nt, Homo sapiens
gcaaaaguaacugcaguuuugg

SEQ ID NO: 2246 - RNA, 22 nt, Homo sapiens
aaaaguaauugcgguuuuugcc

SEQ ID NO: 2247 - RNA, 22 nt, Homo sapiens
ggcaaaaaccgcaauuacuuuu

SEQ ID NO: 2248 - RNA, 22 nt, Homo sapiens
uagcaaaaacugcaguuacuuu

SEQ ID NO: 2249 - RNA, 22 nt, Homo sapiens
aaaguaacugcaguuuuugcua

SEQ ID NO: 2250 - RNA, 20 nt, Homo sapiens
ggagguugggaagggcagag

SEQ ID NO: 2251 - RNA, 20 nt, Homo sapiens
cucugcccuucccaaccucc

SEQ ID NO: 2252 - RNA, 18 nt, Homo sapiens
ugaggcgggggggcgagc

SEQ ID NO: 2253 - RNA, 18 nt, Homo sapiens
gcucgcccccccgccuca

SEQ ID NO: 2254 - RNA, 20 nt, Homo sapiens
agagaugaagcgggggggcg

SEQ ID NO: 2255 - RNA, 20 nt, Homo sapiens
cgcccccccgcuucaucucu

SEQ ID NO: 2256 - RNA, 24 nt, Homo sapiens
ggaggccgggguggggcggggcgg

SEQ ID NO: 2257 - RNA, 24 nt, Homo sapiens
ccgccccgccccaccccggccucc

SEQ ID NO: 2258 - RNA, 19 nt, Homo sapiens
ggggagcgaggggcggggc

SEQ ID NO: 2259 - RNA, 19 nt, Homo sapiens
gccccgccccucgcucccc

SEQ ID NO: 2260 - RNA, 23 nt, Homo sapiens
uauucauuuauccccagccuaca

SEQ ID NO: 2261 - RNA, 23 nt, Homo sapiens
uguaggcuggggauaaaugaaua

SEQ ID NO: 2262 - RNA, 24 nt, Homo sapiens
acuggcuagggaaaaugauuggau

SEQ ID NO: 2263 - RNA, 24 nt, Homo sapiens
auccaaucauuuucccuagccagu

SEQ ID NO: 2264 - RNA, 22 nt, Homo sapiens
uucauuugccucccagccuaca

SEQ ID NO: 2265 - RNA, 22 nt, Homo sapiens
uguaggcugggaggcaaaugaa

SEQ ID NO: 2266 - RNA, 24 nt, Homo sapiens
ugggcuaagggagaugauugggua

SEQ ID NO: 2267 - RNA, 24 nt, Homo sapiens
uacccaaucaucucccuuagccca

SEQ ID NO: 2268 - RNA, 22 nt, Homo sapiens
acuccagccccacagccucagc

SEQ ID NO: 2269 - RNA, 22 nt, Homo sapiens
gcugaggcuguggggcuggagu

SEQ ID NO: 2270 - RNA, 22 nt, Homo sapiens
aggaggaauuggugcuggucuu

SEQ ID NO: 2271 - RNA, 22 nt, Homo sapiens
aagaccagcaccaauuccuccu

SEQ ID NO: 2272 - RNA, 22 nt, Homo sapiens
aggcagcgggguguaguggaua

SEQ ID NO: 2273 - RNA, 22 nt, Homo sapiens
uauccacuacaccccgcugccu

SEQ ID NO: 2274 - RNA, 22 nt, Homo sapiens
uccauuacacuacccugccucu

SEQ ID NO: 2275 - RNA, 22 nt, Homo sapiens
agaggcaggguaguguaaugga

SEQ ID NO: 2276 - RNA, 22 nt, Homo sapiens
acugcugagcuagcacuucccg

SEQ ID NO: 2277 - RNA, 22 nt, Homo sapiens
cgggaagugcuagcucagcagu

SEQ ID NO: 2278 - RNA, 23 nt, Homo sapiens
caaagugcuguucgugcagguag

SEQ ID NO: 2279 - RNA, 23 nt, Homo sapiens
cuaccugcacgaacagcacuuug

SEQ ID NO: 2280 - RNA, 23 nt, Homo sapiens
cacccggcugugugcacaugugc

SEQ ID NO: 2281 - RNA, 23 nt, Homo sapiens
gcacaugugcacacagccgggug

SEQ ID NO: 2282 - RNA, 23 nt, Homo sapiens
agcuucuuuacagugcugccuug

SEQ ID NO: 2283 - RNA, 23 nt, Homo sapiens
caaggcagcacuguaaagaagcu

SEQ ID NO: 2284 - RNA, 23 nt, Homo sapiens
agcagcauuguacagggcuauga

SEQ ID NO: 2285 - RNA, 23 nt, Homo sapiens
ucauagcccuguacaaugcugcu

SEQ ID NO: 2286 - RNA, 17 nt, Homo sapiens
ccugagaaaagggccaa

SEQ ID NO: 2287 - RNA, 17 nt, Homo sapiens
uuggcccuuuucucagg

SEQ ID NO: 2288 - RNA, 19 nt, Homo sapiens
ggccacugagucagcacca

SEQ ID NO: 2289 - RNA, 19 nt, Homo sapiens
uggugcugacucaguggcc

SEQ ID NO: 2290 - RNA, 18 nt, Homo sapiens
agggcauguccagggggu

SEQ ID NO: 2291 - RNA, 18 nt, Homo sapiens
acccccuggacaugcccu

SEQ ID NO: 2292 - RNA, 23 nt, Homo sapiens
gccuggagcuacuccaccaucuc

SEQ ID NO: 2293 - RNA, 23 nt, Homo sapiens
gagaugguggaguagcuccaggc

SEQ ID NO: 2294 - RNA, 17 nt, Homo sapiens
caguguucagagaugga

SEQ ID NO: 2295 - RNA, 17 nt, Homo sapiens
uccaucucugaacacug

SEQ ID NO: 2296 - RNA, 18 nt, Homo sapiens
aucugaccugaugaaggu

SEQ ID NO: 2297 - RNA, 18 nt, Homo sapiens
accuucaucaggucagau

SEQ ID NO: 2298 - RNA, 18 nt, Homo sapiens
ccagagguggggacugag

SEQ ID NO: 2299 - RNA, 18 nt, Homo sapiens
cucaguccccaccucugg

SEQ ID NO: 2300 - RNA, 17 nt, Homo sapiens
ccccgccaccgccuugg

SEQ ID NO: 2301 - RNA, 17 nt, Homo sapiens
ccaaggcgguggcgggg

SEQ ID NO: 2302 - RNA, 22 nt, Homo sapiens
caguugggucuaggggucagga

SEQ ID NO: 2303 - RNA, 22 nt, Homo sapiens
uccugaccccuagacccaacug

SEQ ID NO: 2304 - RNA, 19 nt, Homo sapiens
cuuggggcauggaguccca

SEQ ID NO: 2305 - RNA, 19 nt, Homo sapiens
ugggacuccaugccccaag

SEQ ID NO: 2306 - RNA, 16 nt, Homo sapiens
aggaaacagggaccca

SEQ ID NO: 2307 - RNA, 16 nt, Homo sapiens
ugggucccuguuuccu

SEQ ID NO: 2308 - RNA, 17 nt, Homo sapiens
gacauucagacuaccug

SEQ ID NO: 2309 - RNA, 17 nt, Homo sapiens
cagguagucugaauguc

SEQ ID NO: 2310 - RNA, 18 nt, Homo sapiens
auucuaagugccuuggcc

SEQ ID NO: 2311 - RNA, 18 nt, Homo sapiens
ggccaaggcacuuagaau

SEQ ID NO: 2312 - RNA, 17 nt, Homo sapiens
acucagucauggucauu

SEQ ID NO: 2313 - RNA, 17 nt, Homo sapiens
aaugaccaugacugagu

SEQ ID NO: 2314 - RNA, 19 nt, Homo sapiens
cugugggcucagcucuggg

SEQ ID NO: 2315 - RNA, 19 nt, Homo sapiens
cccagagcugagcccacag

SEQ ID NO: 2316 - RNA, 16 nt, Homo sapiens
cuaggaggccuuggcc

SEQ ID NO: 2317 - RNA, 16 nt, Homo sapiens
ggccaaggccuccuag

SEQ ID NO: 2318 - RNA, 16 nt, Homo sapiens
uccagcucgguggcac

SEQ ID NO: 2319 - RNA, 16 nt, Homo sapiens
gugccaccgagcugga

SEQ ID NO: 2320 - RNA, 21 nt, Homo sapiens
ggcuccuccucucaggaugug

SEQ ID NO: 2321 - RNA, 21 nt, Homo sapiens
cacauccugagaggaggagcc

SEQ ID NO: 2322 - RNA, 21 nt, Homo sapiens
gcaggcacagacagcccuggc

SEQ ID NO: 2323 - RNA, 21 nt, Homo sapiens
gccagggcugucugugccugc

SEQ ID NO: 2324 - RNA, 20 nt, Homo sapiens
ucagggagucaggggagggc

SEQ ID NO: 2325 - RNA, 20 nt, Homo sapiens
gcccuccccugacucccuga

SEQ ID NO: 2326 - RNA, 19 nt, Homo sapiens
gggggaagaaaaggugggg

SEQ ID NO: 2327 - RNA, 19 nt, Homo sapiens
ccccaccuuuucuuccccc

SEQ ID NO: 2328 - RNA, 18 nt, Homo sapiens
cauucaacuagugauugu

SEQ ID NO: 2329 - RNA, 18 nt, Homo sapiens
acaaucacuaguugaaug

SEQ ID NO: 2330 - RNA, 18 nt, Homo sapiens
cagcagucccucccccug

SEQ ID NO: 2331 - RNA, 18 nt, Homo sapiens
cagggggagggacugcug

SEQ ID NO: 2332 - RNA, 17 nt, Homo sapiens
ccaauuaccacuucuuu

SEQ ID NO: 2333 - RNA, 17 nt, Homo sapiens
aaagaagugguaauugg

SEQ ID NO: 2334 - RNA, 17 nt, Homo sapiens
cucagugacucaugugc

SEQ ID NO: 2335 - RNA, 17 nt, Homo sapiens
gcacaugagucacugag

SEQ ID NO: 2336 - RNA, 21 nt, Homo sapiens
gcaguucugagcacaguacac

SEQ ID NO: 2337 - RNA, 21 nt, Homo sapiens
guguacugugcucagaacugc

SEQ ID NO: 2338 - RNA, 18 nt, Homo sapiens
cuaggggguuugcccuug

SEQ ID NO: 2339 - RNA, 18 nt, Homo sapiens
caagggcaaacccccuag

SEQ ID NO: 2340 - RNA, 16 nt, Homo sapiens
cucuccucccggcuuc

SEQ ID NO: 2341 - RNA, 16 nt, Homo sapiens
gaagccgggaggagag

SEQ ID NO: 2342 - RNA, 21 nt, Homo sapiens
gaguguaguucugagcagagc

SEQ ID NO: 2343 - RNA, 21 nt, Homo sapiens
gcucugcucagaacuacacuc

SEQ ID NO: 2344 - RNA, 18 nt, Homo sapiens
gggucccggggagggggg

SEQ ID NO: 2345 - RNA, 18 nt, Homo sapiens
ccccccuccccgggaccc

SEQ ID NO: 2346 - RNA, 18 nt, Homo sapiens
uaaaauuugcauccagga

SEQ ID NO: 2347 - RNA, 18 nt, Homo sapiens
uccuggaugcaaauuuua

SEQ ID NO: 2348 - RNA, 17 nt, Homo sapiens
uggggcucagcgaguuu

SEQ ID NO: 2349 - RNA, 17 nt, Homo sapiens
aaacucgcugagcccca

SEQ ID NO: 2350 - RNA, 18 nt, Homo sapiens
gggcucacaucaccccau

SEQ ID NO: 2351 - RNA, 18 nt, Homo sapiens
auggggugaugugagccc

SEQ ID NO: 2352 - RNA, 18 nt, Homo sapiens
gcggcgaguccgacucau

SEQ ID NO: 2353 - RNA, 18 nt, Homo sapiens
augagucggacucgccgc

SEQ ID NO: 2354 - RNA, 17 nt, Homo sapiens
accccacuccugguacc

SEQ ID NO: 2355 - RNA, 17 nt, Homo sapiens
gguaccaggaguggggu

SEQ ID NO: 2356 - RNA, 19 nt, Homo sapiens
ucucccuugagggcacuuu

SEQ ID NO: 2357 - RNA, 19 nt, Homo sapiens
aaagugcccucaagggaga

SEQ ID NO: 2358 - RNA, 17 nt, Homo sapiens
uugucugcugaguuucc

SEQ ID NO: 2359 - RNA, 17 nt, Homo sapiens
ggaaacucagcagacaa

SEQ ID NO: 2360 - RNA, 19 nt, Homo sapiens
gcauugugcagggcuauca

SEQ ID NO: 2361 - RNA, 19 nt, Homo sapiens
ugauagcccugcacaaugc

SEQ ID NO: 2362 - RNA, 19 nt, Homo sapiens
ugcccuccuuucuucccuc

SEQ ID NO: 2363 - RNA, 19 nt, Homo sapiens
gagggaagaaaggagggca

SEQ ID NO: 2364 - RNA, 16 nt, Homo sapiens
uucagcaggaacagcu

SEQ ID NO: 2365 - RNA, 16 nt, Homo sapiens
agcuguuccugcugaa

SEQ ID NO: 2366 - RNA, 18 nt, Homo sapiens
ccccugggccggccuugg

SEQ ID NO: 2367 - RNA, 18 nt, Homo sapiens
ccaaggccggcccagggg

SEQ ID NO: 2368 - RNA, 17 nt, Homo sapiens
cagccugacaggaacag

SEQ ID NO: 2369 - RNA, 17 nt, Homo sapiens
cuguuccugucaggcug

SEQ ID NO: 2370 - RNA, 17 nt, Homo sapiens
gggagucuacagcaggg

SEQ ID NO: 2371 - RNA, 17 nt, Homo sapiens
cccugcuguagacuccc

SEQ ID NO: 2372 - RNA, 18 nt, Homo sapiens
cagugcaauguuuuccuu

SEQ ID NO: 2373 - RNA, 18 nt, Homo sapiens
aaggaaaacauugcacug

SEQ ID NO: 2374 - RNA, 17 nt, Homo sapiens
augugggcucaggcuca

SEQ ID NO: 2375 - RNA, 17 nt, Homo sapiens
ugagccugagcccacau

SEQ ID NO: 2376 - RNA, 16 nt, Homo sapiens
ugccuuccugucugug

SEQ ID NO: 2377 - RNA, 16 nt, Homo sapiens
cacagacaggaaggca

SEQ ID NO: 2378 - RNA, 22 nt, Homo sapiens
cugggacaggaggaggaggcag

SEQ ID NO: 2379 - RNA, 22 nt, Homo sapiens
cugccuccuccuccugucccag

SEQ ID NO: 2380 - RNA, 18 nt, Homo sapiens
gcuggugacaugagaggc

SEQ ID NO: 2381 - RNA, 18 nt, Homo sapiens
gccucucaugucaccagc

SEQ ID NO: 2382 - RNA, 18 nt, Homo sapiens
ugggagcuggacuacuuc

SEQ ID NO: 2383 - RNA, 18 nt, Homo sapiens
gaaguaguccagcuccca

SEQ ID NO: 2384 - RNA, 20 nt, Homo sapiens
ucccacuacuucacuuguga

SEQ ID NO: 2385 - RNA, 20 nt, Homo sapiens
ucacaagugaaguaguggga

SEQ ID NO: 2386 - RNA, 18 nt, Homo sapiens
ccaguguggcucagcgag

SEQ ID NO: 2387 - RNA, 18 nt, Homo sapiens
cucgcugagccacacugg

SEQ ID NO: 2388 - RNA, 17 nt, Homo sapiens
uucugagcugaggacag

SEQ ID NO: 2389 - RNA, 17 nt, Homo sapiens
cuguccucagcucagaa

SEQ ID NO: 2390 - RNA, 17 nt, Homo sapiens
ccggcauguccagggca

SEQ ID NO: 2391 - RNA, 17 nt, Homo sapiens
ugcccuggacaugccgg

SEQ ID NO: 2392 - RNA, 18 nt, Homo sapiens
ccuagacaccuccaguuc

SEQ ID NO: 2393 - RNA, 18 nt, Homo sapiens
gaacuggaggugucuagg

SEQ ID NO: 2394 - RNA, 17 nt, Homo sapiens
uggagagaaaggcagua

SEQ ID NO: 2395 - RNA, 17 nt, Homo sapiens
uacugccuuucucucca

SEQ ID NO: 2396 - RNA, 19 nt, Homo sapiens
aauguuuuuuccuguuucc

SEQ ID NO: 2397 - RNA, 19 nt, Homo sapiens
ggaaacaggaaaaaacauu

SEQ ID NO: 2398 - RNA, 18 nt, Homo sapiens
ucccuggaguuucuucuu

SEQ ID NO: 2399 - RNA, 18 nt, Homo sapiens
aagaagaaacuccaggga

SEQ ID NO: 2400 - RNA, 18 nt, Homo sapiens
cuggagucuaggauucca

SEQ ID NO: 2401 - RNA, 18 nt, Homo sapiens
uggaauccuagacuccag

SEQ ID NO: 2402 - RNA, 16 nt, Homo sapiens
gcagcauucauguccc

SEQ ID NO: 2403 - RNA, 16 nt, Homo sapiens
gggacaugaaugcugc

SEQ ID NO: 2404 - RNA, 18 nt, Homo sapiens
gaaagagagcugagugug

SEQ ID NO: 2405 - RNA, 18 nt, Homo sapiens
cacacucagcucucuuuc

SEQ ID NO: 2406 - RNA, 19 nt, Homo sapiens
ggccuuguuccugucccca

SEQ ID NO: 2407 - RNA, 19 nt, Homo sapiens
uggggacaggaacaaggcc

SEQ ID NO: 2408 - RNA, 20 nt, Homo sapiens
agcccccuggccccaaaccc

SEQ ID NO: 2409 - RNA, 20 nt, Homo sapiens
ggguuuggggccagggggcu

SEQ ID NO: 2410 - RNA, 18 nt, Homo sapiens
cucugggaaaugggacag

SEQ ID NO: 2411 - RNA, 18 nt, Homo sapiens
cugucccauuucccagag

SEQ ID NO: 2412 - RNA, 18 nt, Homo sapiens
ccgcuuucugagcuggac

SEQ ID NO: 2413 - RNA, 18 nt, Homo sapiens
guccagcucagaaagcgg

SEQ ID NO: 2414 - RNA, 17 nt, Homo sapiens
ggugaggcuagcuggug

SEQ ID NO: 2415 - RNA, 17 nt, Homo sapiens
caccagcuagccucacc

SEQ ID NO: 2416 - RNA, 17 nt, Homo sapiens
acauugccagggaguuu

SEQ ID NO: 2417 - RNA, 17 nt, Homo sapiens
aaacucccuggcaaugu

SEQ ID NO: 2418 - RNA, 17 nt, Homo sapiens
cacuguggguacaugcu

SEQ ID NO: 2419 - RNA, 17 nt, Homo sapiens
agcauguacccacagug

SEQ ID NO: 2420 - RNA, 17 nt, Homo sapiens
ucccugagcaaagccac

SEQ ID NO: 2421 - RNA, 17 nt, Homo sapiens
guggcuuugcucaggga

SEQ ID NO: 2422 - RNA, 18 nt, Homo sapiens
gggauucuguagcuuccu

SEQ ID NO: 2423 - RNA, 18 nt, Homo sapiens
aggaagcuacagaauccc

SEQ ID NO: 2424 - RNA, 21 nt, Homo sapiens
uuagcgguggaccgcccugcg

SEQ ID NO: 2425 - RNA, 21 nt, Homo sapiens
cgcagggcgguccaccgcuaa

SEQ ID NO: 2426 - RNA, 21 nt, Homo sapiens
cugugggcucagcgcgugggg

SEQ ID NO: 2427 - RNA, 21 nt, Homo sapiens
ccccacgcgcugagcccacag

SEQ ID NO: 2428 - RNA, 18 nt, Homo sapiens
cagccccacagccucaga

SEQ ID NO: 2429 - RNA, 18 nt, Homo sapiens
ucugaggcuguggggcug

SEQ ID NO: 2430 - RNA, 20 nt, Homo sapiens
cccugagacccuaaccuuaa

SEQ ID NO: 2431 - RNA, 20 nt, Homo sapiens
uuaagguuagggucucaggg

SEQ ID NO: 2432 - RNA, 18 nt, Homo sapiens
uugcacuugucucaguga

SEQ ID NO: 2433 - RNA, 18 nt, Homo sapiens
ucacugagacaagugcaa

SEQ ID NO: 2434 - RNA, 20 nt, Homo sapiens
uguuccucugucucccagac

SEQ ID NO: 2435 - RNA, 20 nt, Homo sapiens
gucugggagacagaggaaca

SEQ ID NO: 2436 - RNA, 19 nt, Homo sapiens
ggcuugcaugggggacugg

SEQ ID NO: 2437 - RNA, 19 nt, Homo sapiens
ccagucccccaugcaagcc

SEQ ID NO: 2438 - RNA, 17 nt, Homo sapiens
ccaguuuucccaggauu

SEQ ID NO: 2439 - RNA, 17 nt, Homo sapiens
aauccugggaaaacugg

SEQ ID NO: 2440 - RNA, 19 nt, Homo sapiens
ccugagacccuaguuccac

SEQ ID NO: 2441 - RNA, 19 nt, Homo sapiens
guggaacuagggucucagg

SEQ ID NO: 2442 - RNA, 19 nt, Homo sapiens
ccucagaucagagccuugc

SEQ ID NO: 2443 - RNA, 19 nt, Homo sapiens
gcaaggcucugaucugagg

SEQ ID NO: 2444 - RNA, 22 nt, Homo sapiens
cauugcacuugucucggucuga

SEQ ID NO: 2445 - RNA, 22 nt, Homo sapiens
ucagaccgagacaagugcaaug

SEQ ID NO: 2446 - RNA, 21 nt, Homo sapiens
aggcggagacuugggcaauug

SEQ ID NO: 2447 - RNA, 21 nt, Homo sapiens
caauugcccaagucuccgccu

SEQ ID NO: 2448 - RNA, 22 nt, Homo sapiens
ccuauucuugguuacuugcacg

SEQ ID NO: 2449 - RNA, 22 nt, Homo sapiens
cgugcaaguaaccaagaauagg

SEQ ID NO: 2450 - RNA, 19 nt, Homo sapiens
aauggauuuuuggagcagg

SEQ ID NO: 2451 - RNA, 19 nt, Homo sapiens
ccugcuccaaaaauccauu

SEQ ID NO: 2452 - RNA, 22 nt, Homo sapiens
ugcggggcuagggcuaacagca

SEQ ID NO: 2453 - RNA, 22 nt, Homo sapiens
ugcuguuagcccuagccccgca

SEQ ID NO: 2454 - RNA, 22 nt, Homo sapiens
aaaaguaauugcggauuuugcc

SEQ ID NO: 2455 - RNA, 22 nt, Homo sapiens
ggcaaaauccgcaauuacuuuu

SEQ ID NO: 2456 - RNA, 22 nt, Homo sapiens
caaaaguaauuguggauuuugu

SEQ ID NO: 2457 - RNA, 22 nt, Homo sapiens
acaaaauccacaauuacuuuug

SEQ ID NO: 2458 - RNA, 23 nt, Homo sapiens
uaagugcuuccauguuuugguga

SEQ ID NO: 2459 - RNA, 23 nt, Homo sapiens
ucaccaaaacauggaagcacuua

SEQ ID NO: 2460 - RNA, 23 nt, Homo sapiens
acuuaaacguggauguacuugcu

SEQ ID NO: 2461 - RNA, 23 nt, Homo sapiens
agcaaguacauccacguuuaagu

SEQ ID NO: 2462 - RNA, 21 nt, Homo sapiens
cuauacaaucuacugucuuuc

SEQ ID NO: 2463 - RNA, 21 nt, Homo sapiens
gaaagacaguagauuguauag

SEQ ID NO: 2464 - RNA, 22 nt, Homo sapiens
ugagguaguagguuguauaguu

SEQ ID NO: 2465 - RNA, 22 nt, Homo sapiens
aacuauacaaccuacuaccuca

SEQ ID NO: 2466 - RNA, 22 nt, Homo sapiens
cuguacagccuccuagcuuucc

SEQ ID NO: 2467 - RNA, 22 nt, Homo sapiens
ggaaagcuaggaggcuguacag

SEQ ID NO: 2468 - RNA, 20 nt, Homo sapiens
caccaggcauuguggucucc

SEQ ID NO: 2469 - RNA, 20 nt, Homo sapiens
ggagaccacaaugccuggug

SEQ ID NO: 2470 - RNA, 23 nt, Homo sapiens
ugaguaccgccaugucuguuggg

SEQ ID NO: 2471 - RNA, 23 nt, Homo sapiens
cccaacagacauggcgguacuca

SEQ ID NO: 2472 - RNA, 22 nt, Homo sapiens
uacccagagcaugcagugugaa

SEQ ID NO: 2473 - RNA, 22 nt, Homo sapiens
uucacacugcaugcucugggua

SEQ ID NO: 2474 - RNA, 22 nt, Homo sapiens
aagugcugucauagcugagguc

SEQ ID NO: 2475 - RNA, 22 nt, Homo sapiens
gaccucagcuaugacagcacuu

SEQ ID NO: 2476 - RNA, 23 nt, Homo sapiens
cacucagccuugagggcacuuuc

SEQ ID NO: 2477 - RNA, 23 nt, Homo sapiens
gaaagugcccucaaggcugagug

SEQ ID NO: 2478 - RNA, 22 nt, Homo sapiens
ucgacagcacgacacugccuuc

SEQ ID NO: 2479 - RNA, 22 nt, Homo sapiens
gaaggcagugucgugcugucga

SEQ ID NO: 2480 - RNA, 22 nt, Homo sapiens
uagguaguuuccuguuguuggg

SEQ ID NO: 2481 - RNA, 22 nt, Homo sapiens
cccaacaacaggaaacuaccua

SEQ ID NO: 2482 - RNA, 21 nt, Homo sapiens
uacaguacugugauaacugaa

SEQ ID NO: 2483 - RNA, 21 nt, Homo sapiens
uucaguuaucacaguacugua

SEQ ID NO: 2484 - RNA, 22 nt, Homo sapiens
caguuaucacagugcugaugcu

SEQ ID NO: 2485 - RNA, 22 nt, Homo sapiens
agcaucagcacugugauaacug

SEQ ID NO: 2486 - RNA, 23 nt, Homo sapiens
ugugcaaaucuaugcaaaacuga

SEQ ID NO: 2487 - RNA, 23 nt, Homo sapiens
ucaguuuugcauagauuugcaca

SEQ ID NO: 2488 - RNA, 22 nt, Homo sapiens
aguuuugcauaguugcacuaca

SEQ ID NO: 2489 - RNA, 22 nt, Homo sapiens
uguagugcaacuaugcaaaacu

SEQ ID NO: 2490 - RNA, 23 nt, Homo sapiens
aguuuugcagguuugcauccagc

SEQ ID NO: 2491 - RNA, 23 nt, Homo sapiens
gcuggaugcaaaccugcaaaacu

SEQ ID NO: 2492 - RNA, 22 nt, Homo sapiens
aguuuugcagguuugcauuuca

SEQ ID NO: 2493 - RNA, 22 nt, Homo sapiens
ugaaaugcaaaccugcaaaacu

SEQ ID NO: 2494 - RNA, 23 nt, Homo sapiens
ugugcaaauccaugcaaaacuga

SEQ ID NO: 2495 - RNA, 23 nt, Homo sapiens
ucaguuuugcauggauuugcaca

SEQ ID NO: 2496 - RNA, 23 nt, Homo sapiens
uacugcaucaggaacugauugga

SEQ ID NO: 2497 - RNA, 23 nt, Homo sapiens
uccaaucaguuccugaugcagua

SEQ ID NO: 2498 - RNA, 22 nt, Homo sapiens
augguuccgucaagcaccaugg

SEQ ID NO: 2499 - RNA, 22 nt, Homo sapiens
ccauggugcuugacggaaccau

SEQ ID NO: 2500 - RNA, 21 nt, Homo sapiens
agcuacaucuggcuacugggu

SEQ ID NO: 2501 - RNA, 21 nt, Homo sapiens
acccaguagccagauguagcu

SEQ ID NO: 2502 - RNA, 22 nt, Homo sapiens
cucaguagccaguguagauccu

SEQ ID NO: 2503 - RNA, 22 nt, Homo sapiens
aggaucuacacuggcuacugag

SEQ ID NO: 2504 - RNA, 22 nt, Homo sapiens
uuaucagaaucuccagggguac

SEQ ID NO: 2505 - RNA, 22 nt, Homo sapiens
guaccccuggagauucugauaa

SEQ ID NO: 2506 - RNA, 23 nt, Homo sapiens
aucaacagacauuaauugggcgc

SEQ ID NO: 2507 - RNA, 23 nt, Homo sapiens
gcgcccaauuaaugucuguugau

SEQ ID NO: 2508 - RNA, 21 nt, Homo sapiens
caaaacgugaggcgcugcuau

SEQ ID NO: 2509 - RNA, 21 nt, Homo sapiens
auagcagcgccucacguuuug

SEQ ID NO: 2510 - RNA, 22 nt, Homo sapiens
cagcagcaauucauguuuugaa

SEQ ID NO: 2511 - RNA, 22 nt, Homo sapiens
uucaaaacaugaauugcugcug

SEQ ID NO: 2512 - RNA, 18 nt, Homo sapiens
uucacagggaggugucau

SEQ ID NO: 2513 - RNA, 18 nt, Homo sapiens
augacaccucccugugaa

SEQ ID NO: 2514 - RNA, 20 nt, Homo sapiens
gcggagagagaauggggagc

SEQ ID NO: 2515 - RNA, 20 nt, Homo sapiens
gcuccccauucucucuccgc

SEQ ID NO: 2516 - RNA, 21 nt, Homo sapiens
ccugcgagucuccggcggugg

SEQ ID NO: 2517 - RNA, 21 nt, Homo sapiens
ccaccgccggagacucgcagg

SEQ ID NO: 2518 - RNA, 21 nt, Homo sapiens
gggcuagggccugcugccccc

SEQ ID NO: 2519 - RNA, 21 nt, Homo sapiens
gggggcagcaggcccuagccc

SEQ ID NO: 2520 - RNA, 19 nt, Homo sapiens
uucugcugccggccaaggc

SEQ ID NO: 2521 - RNA, 19 nt, Homo sapiens
gccuuggccggcagcagaa

SEQ ID NO: 2522 - RNA, 22 nt, Homo sapiens
uccucaucacacugcaccuuag

SEQ ID NO: 2523 - RNA, 22 nt, Homo sapiens
cuaaggugcagugugaugagga

SEQ ID NO: 2524 - RNA, 20 nt, Homo sapiens
gguagugaguuaucagcuac

SEQ ID NO: 2525 - RNA, 20 nt, Homo sapiens
guagcugauaacucacuacc

SEQ ID NO: 2526 - RNA, 20 nt, Homo sapiens
gauauucagaggcuaggugg

SEQ ID NO: 2527 - RNA, 20 nt, Homo sapiens
ccaccuagccucugaauauc

SEQ ID NO: 2528 - RNA, 21 nt, Homo sapiens
acggcccaggcggcauuggug

SEQ ID NO: 2529 - RNA, 21 nt, Homo sapiens
caccaaugccgccugggccgu

SEQ ID NO: 2530 - RNA, 21 nt, Homo sapiens
agcaugacagaggagaggugg

SEQ ID NO: 2531 - RNA, 21 nt, Homo sapiens
ccaccucuccucugucaugcu

SEQ ID NO: 2532 - RNA, 21 nt, Homo sapiens
gggaagagcuguacggccuuc

SEQ ID NO: 2533 - RNA, 21 nt, Homo sapiens
gaaggccguacagcucuuccc

SEQ ID NO: 2534 - RNA, 19 nt, Homo sapiens
ccgccugagcuagcugugg

SEQ ID NO: 2535 - RNA, 19 nt, Homo sapiens
ccacagcuagcucaggcgg

SEQ ID NO: 2536 - RNA, 24 nt, Homo sapiens
uuggaagcuuggaccaacuagcug

SEQ ID NO: 2537 - RNA, 24 nt, Homo sapiens
cagcuaguugguccaagcuuccaa

SEQ ID NO: 2538 - RNA, 19 nt, Homo sapiens
ucuagugcgggcguucccg

SEQ ID NO: 2539 - RNA, 19 nt, Homo sapiens
cgggaacgcccgcacuaga

SEQ ID NO: 2540 - RNA, 24 nt, Homo sapiens
aggagcagugccggccaaggcgcc

SEQ ID NO: 2541 - RNA, 24 nt, Homo sapiens
ggcgccuuggccggcacugcuccu

SEQ ID NO: 2542 - RNA, 19 nt, Homo sapiens
gaauacgucugguugaucc

SEQ ID NO: 2543 - RNA, 19 nt, Homo sapiens
ggaucaaccagacguauuc

SEQ ID NO: 2544 - RNA, 20 nt, Homo sapiens
cuuauaucagaggcuguggg

SEQ ID NO: 2545 - RNA, 20 nt, Homo sapiens
cccacagccucugauauaag

SEQ ID NO: 2546 - RNA, 20 nt, Homo sapiens
uuccgccagucgguggccgg

SEQ ID NO: 2547 - RNA, 20 nt, Homo sapiens
ccggccaccgacuggcggaa

SEQ ID NO: 2548 - RNA, 19 nt, Homo sapiens
aaggggcugggggagcaca

SEQ ID NO: 2549 - RNA, 19 nt, Homo sapiens
ugugcucccccagccccuu

SEQ ID NO: 2550 - RNA, 23 nt, Homo sapiens
agguugggaucgguugcaaugcu

SEQ ID NO: 2551 - RNA, 23 nt, Homo sapiens
agcauugcaaccgaucccaaccu

SEQ ID NO: 2552 - RNA, 22 nt, Homo sapiens
ggguggggauuuguugcauuac

SEQ ID NO: 2553 - RNA, 22 nt, Homo sapiens
guaaugcaacaaauccccaccc

SEQ ID NO: 2554 - RNA, 22 nt, Homo sapiens
uauugcacuugucccggccugu

SEQ ID NO: 2555 - RNA, 22 nt, Homo sapiens
acaggccgggacaagugcaaua

SEQ ID NO: 2556 - RNA, 22 nt, Homo sapiens
uauugcacucgucccggccucc

SEQ ID NO: 2557 - RNA, 22 nt, Homo sapiens
ggaggccgggacgagugcaaua

SEQ ID NO: 2558 - RNA, 22 nt, Homo sapiens
agggacgggacgcggugcagug

SEQ ID NO: 2559 - RNA, 22 nt, Homo sapiens
cacugcaccgcgucccgucccu

SEQ ID NO: 2560 - RNA, 21 nt, Homo sapiens
aucacauugccagggauuucc

SEQ ID NO: 2561 - RNA, 21 nt, Homo sapiens
ggaaaucccuggcaaugugau

SEQ ID NO: 2562 - RNA, 22 nt, Homo sapiens
gggguuccuggggaugggauuu

SEQ ID NO: 2563 - RNA, 22 nt, Homo sapiens
aaaucccauccccaggaacccc

SEQ ID NO: 2564 - RNA, 22 nt, Homo sapiens
acugcagugaaggcacuuguag

SEQ ID NO: 2565 - RNA, 22 nt, Homo sapiens
cuacaagugccuucacugcagu

SEQ ID NO: 2566 - RNA, 23 nt, Homo sapiens
agcuacauugucugcuggguuuc

SEQ ID NO: 2567 - RNA, 23 nt, Homo sapiens
gaaacccagcagacaauguagcu

SEQ ID NO: 2568 - RNA, 22 nt, Homo sapiens
accuggcauacaauguagauuu

SEQ ID NO: 2569 - RNA, 22 nt, Homo sapiens
aaaucuacauuguaugccaggu

SEQ ID NO: 2570 - RNA, 22 nt, Homo sapiens
ucguaccgugaguaauaaugcg

SEQ ID NO: 2571 - RNA, 22 nt, Homo sapiens
cgcauuauuacucacgguacga

SEQ ID NO: 2572 - RNA, 21 nt, Homo sapiens
cauuauuacuuuugguacgcg

SEQ ID NO: 2573 - RNA, 21 nt, Homo sapiens
cgcguaccaaaaguaauaaug

SEQ ID NO: 2574 - RNA, 23 nt, Homo sapiens
uacuccagagggcgucacucaug

SEQ ID NO: 2575 - RNA, 23 nt, Homo sapiens
caugagugacgcccucuggagua

SEQ ID NO: 2576 - RNA, 21 nt, Homo sapiens
ucccacguuguggcccagcag

SEQ ID NO: 2577 - RNA, 21 nt, Homo sapiens
cugcugggccacaacguggga

SEQ ID NO: 2578 - RNA, 23 nt, Homo sapiens
ccucaccaccccuucugccugca

SEQ ID NO: 2579 - RNA, 23 nt, Homo sapiens
ugcaggcagaagggguggugagg

SEQ ID NO: 2580 - RNA, 24 nt, Homo sapiens
cugcaggcagaaguggggcugaca

SEQ ID NO: 2581 - RNA, 24 nt, Homo sapiens
ugucagccccacuucugccugcag

SEQ ID NO: 2582 - RNA, 21 nt, Homo sapiens
ccaaaccagucgugccugugg

SEQ ID NO: 2583 - RNA, 21 nt, Homo sapiens
ccacaggcacgacugguuugg

SEQ ID NO: 2584 - RNA, 22 nt, Homo sapiens
cucaaaccggcugugccugugg

SEQ ID NO: 2585 - RNA, 22 nt, Homo sapiens
ccacaggcacagccgguuugag

SEQ ID NO: 2586 - RNA, 21 nt, Homo sapiens
acaggcacgacugguuuggca

SEQ ID NO: 2587 - RNA, 21 nt, Homo sapiens
ugccaaaccagucgugccugu

SEQ ID NO: 2588 - RNA, 22 nt, Homo sapiens
uccgaacucuccauuccucugc

SEQ ID NO: 2589 - RNA, 22 nt, Homo sapiens
gcagaggaauggagaguucgga

SEQ ID NO: 2590 - RNA, 20 nt, Homo sapiens
ugggaauggggguaagggcc

SEQ ID NO: 2591 - RNA, 20 nt, Homo sapiens
ggcccuuacccccauuccca

SEQ ID NO: 2592 - RNA, 22 nt, Homo sapiens
aggcgauguggggauguagaga

SEQ ID NO: 2593 - RNA, 22 nt, Homo sapiens
ucucuacauccccacaucgccu

SEQ ID NO: 2594 - RNA, 21 nt, Homo sapiens
uaguggucagagggcuuauga

SEQ ID NO: 2595 - RNA, 21 nt, Homo sapiens
ucauaagcccucugaccacua

SEQ ID NO: 2596 - RNA, 22 nt, Homo sapiens
ucugacaucagugauucuccug

SEQ ID NO: 2597 - RNA, 22 nt, Homo sapiens
caggagaaucacugaugucaga

SEQ ID NO: 2598 - RNA, 22 nt, Homo sapiens
cgcgccugcaggaacugguaga

SEQ ID NO: 2599 - RNA, 22 nt, Homo sapiens
ucuaccaguuccugcaggcgcg

SEQ ID NO: 2600 - RNA, 23 nt, Homo sapiens
ugggcaggggcuuauuguaggag

SEQ ID NO: 2601 - RNA, 23 nt, Homo sapiens
cuccuacaauaagccccugccca

SEQ ID NO: 2602 - RNA, 22 nt, Homo sapiens
ugcaggggucgggugggccagg

SEQ ID NO: 2603 - RNA, 22 nt, Homo sapiens
ccuggcccacccgaccccugca

SEQ ID NO: 2604 - RNA, 20 nt, Homo sapiens
aggcgcacccgaccacaugc

SEQ ID NO: 2605 - RNA, 20 nt, Homo sapiens
gcauguggucgggugcgccu

SEQ ID NO: 2606 - RNA, 22 nt, Homo sapiens
auaguccgaguaacgucggggc

SEQ ID NO: 2607 - RNA, 22 nt, Homo sapiens
gccccgacguuacucggacuau

SEQ ID NO: 2608 - RNA, 23 nt, Homo sapiens
cugggcccgcggcgggcgugggg

SEQ ID NO: 2609 - RNA, 23 nt, Homo sapiens
ccccacgcccgccgcgggcccag

SEQ ID NO: 2610 - RNA, 21 nt, Homo sapiens
uacuuggaaaggcaucaguug

SEQ ID NO: 2611 - RNA, 21 nt, Homo sapiens
caacugaugccuuuccaagua

SEQ ID NO: 2612 - RNA, 22 nt, Homo sapiens
ugcaacgaaccugagccacuga

SEQ ID NO: 2613 - RNA, 22 nt, Homo sapiens
ucaguggcucagguucguugca

SEQ ID NO: 2614 - RNA, 22 nt, Homo sapiens
ugcaacuuaccugagucauuga

SEQ ID NO: 2615 - RNA, 22 nt, Homo sapiens
ucaaugacucagguaaguugca

SEQ ID NO: 2616 - RNA, 21 nt, Homo sapiens
cacuguguccuuucugcguag

SEQ ID NO: 2617 - RNA, 21 nt, Homo sapiens
cuacgcagaaaggacacagug

SEQ ID NO: 2618 - RNA, 22 nt, Homo sapiens
cacuggcuccuuucuggguaga

SEQ ID NO: 2619 - RNA, 22 nt, Homo sapiens
ucuacccagaaaggagccagug

SEQ ID NO: 2620 - RNA, 22 nt, Homo sapiens
cacuguuuccuuucugagugga

SEQ ID NO: 2621 - RNA, 22 nt, Homo sapiens
uccacucagaaaggaaacagug

SEQ ID NO: 2622 - RNA, 21 nt, Homo sapiens
uauucagaaaggugccaguca

SEQ ID NO: 2623 - RNA, 21 nt, Homo sapiens
ugacuggcaccuuucugaaua

SEQ ID NO: 2624 - RNA, 20 nt, Homo sapiens
auuccuagaaauuguucaua

SEQ ID NO: 2625 - RNA, 20 nt, Homo sapiens
uaugaacaauuucuaggaau

SEQ ID NO: 2626 - RNA, 22 nt, Homo sapiens
uaauacugucugguaaaaccgu

SEQ ID NO: 2627 - RNA, 22 nt, Homo sapiens
acgguuuuaccagacaguauua

SEQ ID NO: 2628 - RNA, 22 nt, Homo sapiens
ugaaacauacacgggaaaccuc

SEQ ID NO: 2629 - RNA, 22 nt, Homo sapiens
gagguuucccguguauguuuca

SEQ ID NO: 2630 - RNA, 22 nt, Homo sapiens
cuauacaaccuacugccuuccc

SEQ ID NO: 2631 - RNA, 22 nt, Homo sapiens
gggaaggcaguagguuguauag

SEQ ID NO: 2632 - RNA, 22 nt, Homo sapiens
ugagguaguagguugugugguu

SEQ ID NO: 2633 - RNA, 22 nt, Homo sapiens
aaccacacaaccuacuaccuca

SEQ ID NO: 2634 - RNA, 22 nt, Homo sapiens
uaacacugucugguaacgaugu

SEQ ID NO: 2635 - RNA, 22 nt, Homo sapiens
acaucguuaccagacaguguua

SEQ ID NO: 2636 - RNA, 22 nt, Homo sapiens
caucuuaccggacagugcugga

SEQ ID NO: 2637 - RNA, 22 nt, Homo sapiens
uccagcacuguccgguaagaug

SEQ ID NO: 2638 - RNA, 22 nt, Homo sapiens
uaauacugccugguaaugauga

SEQ ID NO: 2639 - RNA, 22 nt, Homo sapiens
ucaucauuaccaggcaguauua

SEQ ID NO: 2640 - RNA, 22 nt, Homo sapiens
caucuuacugggcagcauugga

SEQ ID NO: 2641 - RNA, 22 nt, Homo sapiens
uccaaugcugcccaguaagaug

SEQ ID NO: 2642 - RNA, 23 nt, Homo sapiens
uaauacugccggguaaugaugga

SEQ ID NO: 2643 - RNA, 23 nt, Homo sapiens
uccaucauuacccggcaguauua

SEQ ID NO: 2644 - RNA, 22 nt, Homo sapiens
cgucuuacccagcaguguuugg

SEQ ID NO: 2645 - RNA, 22 nt, Homo sapiens
ccaaacacugcuggguaagacg

SEQ ID NO: 2646 - RNA, 22 nt, Homo sapiens
uccagcaucagugauuuuguug

SEQ ID NO: 2647 - RNA, 22 nt, Homo sapiens
caacaaaaucacugaugcugga

SEQ ID NO: 2648 - RNA, 20 nt, Homo sapiens
uacaguauagaugauguacu

SEQ ID NO: 2649 - RNA, 20 nt, Homo sapiens
aguacaucaucuauacugua

SEQ ID NO: 2650 - RNA, 22 nt, Homo sapiens
ggauaucaucauauacuguaag

SEQ ID NO: 2651 - RNA, 22 nt, Homo sapiens
cuuacaguauaugaugauaucc

SEQ ID NO: 2652 - RNA, 21 nt, Homo sapiens
cggggcagcucaguacaggau

SEQ ID NO: 2653 - RNA, 21 nt, Homo sapiens
auccuguacugagcugccccg

SEQ ID NO: 2654 - RNA, 21 nt, Homo sapiens
uccuucugcuccgucccccag

SEQ ID NO: 2655 - RNA, 21 nt, Homo sapiens
cugggggacggagcagaagga

SEQ ID NO: 2656 - RNA, 21 nt, Homo sapiens
cgggggcggggccgaagcgcg

SEQ ID NO: 2657 - RNA, 21 nt, Homo sapiens
cgcgcuucggccccgcccccg

SEQ ID NO: 2658 - RNA, 21 nt, Homo sapiens
uccugcgcgucccagaugccc

SEQ ID NO: 2659 - RNA, 21 nt, Homo sapiens
gggcaucugggacgcgcagga

SEQ ID NO: 2660 - RNA, 22 nt, Homo sapiens
caucagaauucauggaggcuag

SEQ ID NO: 2661 - RNA, 22 nt, Homo sapiens
cuagccuccaugaauucugaug

SEQ ID NO: 2662 - RNA, 22 nt, Homo sapiens
agcuuccaugacuccugaugga

SEQ ID NO: 2663 - RNA, 22 nt, Homo sapiens
uccaucaggagucauggaagcu

SEQ ID NO: 2664 - RNA, 21 nt, Homo sapiens
ugacagcgcccugccuggcuc

SEQ ID NO: 2665 - RNA, 21 nt, Homo sapiens
gagccaggcagggcgcuguca

SEQ ID NO: 2666 - RNA, 24 nt, Homo sapiens
agcgcgggcugagcgcugccaguc

SEQ ID NO: 2667 - RNA, 24 nt, Homo sapiens
gacuggcagcgcucagcccgcgcu

SEQ ID NO: 2668 - RNA, 22 nt, Homo sapiens
cugggaggugugauaucguggu

SEQ ID NO: 2669 - RNA, 22 nt, Homo sapiens
accacgauaucacaccucccag

SEQ ID NO: 2670 - RNA, 22 nt, Homo sapiens
ugugauaucaugguuccuggga

SEQ ID NO: 2671 - RNA, 22 nt, Homo sapiens
ucccaggaaccaugauaucaca

SEQ ID NO: 2672 - RNA, 22 nt, Homo sapiens
aggugcuccaggcuggcucaca

SEQ ID NO: 2673 - RNA, 22 nt, Homo sapiens
ugugagccagccuggagcaccu

SEQ ID NO: 2674 - RNA, 22 nt, Homo sapiens
gagcaauguagguagacuguuu

SEQ ID NO: 2675 - RNA, 22 nt, Homo sapiens
aaacagucuaccuacauugcuc

SEQ ID NO: 2676 - RNA, 22 nt, Homo sapiens
uguccucuagggccugcagucu

SEQ ID NO: 2677 - RNA, 22 nt, Homo sapiens
agacugcaggcccuagaggaca

SEQ ID NO: 2678 - RNA, 20 nt, Homo sapiens
aaaggcauaaaaccaagaca

SEQ ID NO: 2679 - RNA, 20 nt, Homo sapiens
ugucuugguuuuaugccuuu

SEQ ID NO: 2680 - RNA, 21 nt, Homo sapiens
uaacgcauaauauggacaugu

SEQ ID NO: 2681 - RNA, 21 nt, Homo sapiens
acauguccauauuaugcguua

SEQ ID NO: 2682 - RNA, 22 nt, Homo sapiens
uugaggaaaagauggucuuauu

SEQ ID NO: 2683 - RNA, 22 nt, Homo sapiens
aauaagaccaucuuuuccucaa

SEQ ID NO: 2684 - RNA, 26 nt, Homo sapiens
aagaggaagaaauggcugguucucag

SEQ ID NO: 2685 - RNA, 26 nt, Homo sapiens
cugagaaccagccauuucuuccucuu

SEQ ID NO: 2686 - RNA, 20 nt, Homo sapiens
gcucggacugagcagguggg

SEQ ID NO: 2687 - RNA, 20 nt, Homo sapiens
cccaccugcucaguccgagc

SEQ ID NO: 2688 - RNA, 21 nt, Homo sapiens
acagggccgcagauggagacu

SEQ ID NO: 2689 - RNA, 21 nt, Homo sapiens
agucuccaucugcggcccugu

SEQ ID NO: 2690 - RNA, 21 nt, Homo sapiens
gcagagaacaaaggacucagu

SEQ ID NO: 2691 - RNA, 21 nt, Homo sapiens
acugaguccuuuguucucugc

SEQ ID NO: 2692 - RNA, 22 nt, Homo sapiens
acugauuaucuuaacucucuga

SEQ ID NO: 2693 - RNA, 22 nt, Homo sapiens
ucagagaguuaagauaaucagu

SEQ ID NO: 2694 - RNA, 23 nt, Homo sapiens
ucucugaguaccauaugccuugu

SEQ ID NO: 2695 - RNA, 23 nt, Homo sapiens
acaaggcauaugguacucagaga

SEQ ID NO: 2696 - RNA, 22 nt, Homo sapiens
aacuaguaauguuggauuaggg

SEQ ID NO: 2697 - RNA, 22 nt, Homo sapiens
cccuaauccaacauuacuaguu

SEQ ID NO: 2698 - RNA, 22 nt, Homo sapiens
auauguauaugugacugcuacu

SEQ ID NO: 2699 - RNA, 22 nt, Homo sapiens
aguagcagucacauauacauau

SEQ ID NO: 2700 - RNA, 21 nt, Homo sapiens
uggccaaaaagcaggcagaga

SEQ ID NO: 2701 - RNA, 21 nt, Homo sapiens
ucucugccugcuuuuuggcca

SEQ ID NO: 2702 - RNA, 22 nt, Homo sapiens
ggaggaaccuuggagcuucggc

SEQ ID NO: 2703 - RNA, 22 nt, Homo sapiens
gccgaagcuccaagguuccucc

SEQ ID NO: 2704 - RNA, 23 nt, Homo sapiens
gaggcugaugugaguagaccacu

SEQ ID NO: 2705 - RNA, 23 nt, Homo sapiens
aguggucuacucacaucagccuc

SEQ ID NO: 2706 - RNA, 21 nt, Homo sapiens
cuguccuaagguuguugaguu

SEQ ID NO: 2707 - RNA, 21 nt, Homo sapiens
aacucaacaaccuuaggacag

SEQ ID NO: 2708 - RNA, 21 nt, Homo sapiens
ucuucaaccucaggacuugca

SEQ ID NO: 2709 - RNA, 21 nt, Homo sapiens
ugcaaguccugagguugaaga

SEQ ID NO: 2710 - RNA, 22 nt, Homo sapiens
ugugauaucaugguuccuggga

SEQ ID NO: 2711 - RNA, 22 nt, Homo sapiens
ucccaggaaccaugauaucaca

SEQ ID NO: 2712 - RNA, 22 nt, Homo sapiens
cugggaggugugauauuguggu

SEQ ID NO: 2713 - RNA, 22 nt, Homo sapiens
accacaauaucacaccucccag

SEQ ID NO: 2714 - RNA, 22 nt, Homo sapiens
cagguagauauuugauaggcau

SEQ ID NO: 2715 - RNA, 22 nt, Homo sapiens
augccuaucaaauaucuaccug

SEQ ID NO: 2716 - RNA, 21 nt, Homo sapiens
gccuaucacauaucugccugu

SEQ ID NO: 2717 - RNA, 21 nt, Homo sapiens
acaggcagauaugugauaggc

SEQ ID NO: 2718 - RNA, 20 nt, Homo sapiens
gggcuggggcgcggggaggu

SEQ ID NO: 2719 - RNA, 20 nt, Homo sapiens
accuccccgcgccccagccc

SEQ ID NO: 2720 - RNA, 18 nt, Homo sapiens
ugcuuccuuucagagggu

SEQ ID NO: 2721 - RNA, 18 nt, Homo sapiens
acccucugaaaggaagca

SEQ ID NO: 2722 - RNA, 21 nt, Homo sapiens
ugaguuggccaucugagugag

SEQ ID NO: 2723 - RNA, 21 nt, Homo sapiens
cucacucagauggccaacuca

SEQ ID NO: 2724 - RNA, 23 nt, Homo sapiens
aacauucauuguugucggugggu

SEQ ID NO: 2725 - RNA, 23 nt, Homo sapiens
acccaccgacaacaaugaauguu

SEQ ID NO: 2726 - RNA, 21 nt, Homo sapiens
ucacagugaaccggucucuuu

SEQ ID NO: 2727 - RNA, 21 nt, Homo sapiens
aaagagaccgguucacuguga

SEQ ID NO: 2728 - RNA, 22 nt, Homo sapiens
caacaaaucacagucugccaua

SEQ ID NO: 2729 - RNA, 22 nt, Homo sapiens
uauggcagacugugauuuguug

SEQ ID NO: 2730 - RNA, 21 nt, Homo sapiens
cucacugaacaaugaaugcaa

SEQ ID NO: 2731 - RNA, 21 nt, Homo sapiens
uugcauucauuguucagugag

SEQ ID NO: 2732 - RNA, 23 nt, Homo sapiens
aacauucauugcugucggugggu

SEQ ID NO: 2733 - RNA, 23 nt, Homo sapiens
acccaccgacagcaaugaauguu

SEQ ID NO: 2734 - RNA, 22 nt, Homo sapiens
accaucgaccguugauuguacc

SEQ ID NO: 2735 - RNA, 22 nt, Homo sapiens
gguacaaucaacggucgauggu

SEQ ID NO: 2736 - RNA, 23 nt, Homo sapiens
aacauucaacgcugucggugagu

SEQ ID NO: 2737 - RNA, 23 nt, Homo sapiens
acucaccgacagcguugaauguu

SEQ ID NO: 2738 - RNA, 22 nt, Homo sapiens
accacugaccguugacuguacc

SEQ ID NO: 2739 - RNA, 22 nt, Homo sapiens
gguacagucaacggucaguggu

SEQ ID NO: 2740 - RNA, 22 nt, Homo sapiens
cuguugccacuaaccucaaccu

SEQ ID NO: 2741 - RNA, 22 nt, Homo sapiens
agguugagguuaguggcaacag

SEQ ID NO: 2742 - RNA, 22 nt, Homo sapiens
auaagacgagcaaaaagcuugu

SEQ ID NO: 2743 - RNA, 22 nt, Homo sapiens
acaagcuuuuugcucgucuuau

SEQ ID NO: 2744 - RNA, 22 nt, Homo sapiens
auaagacgaacaaaagguuugu

SEQ ID NO: 2745 - RNA, 22 nt, Homo sapiens
acaaaccuuuuguucgucuuau

SEQ ID NO: 2746 - RNA, 21 nt, Homo sapiens
agggagggacgggggcugugc

SEQ ID NO: 2747 - RNA, 21 nt, Homo sapiens
gcacagcccccgucccucccu

SEQ ID NO: 2748 - RNA, 23 nt, Homo sapiens
ucuggcuccgugucuucacuccc

SEQ ID NO: 2749 - RNA, 23 nt, Homo sapiens
gggagugaagacacggagccaga

SEQ ID NO: 2750 - RNA, 22 nt, Homo sapiens
uggaauguaaagaaguauguau

SEQ ID NO: 2751 - RNA, 22 nt, Homo sapiens
auacauacuucuuuacauucca

SEQ ID NO: 2752 - RNA, 22 nt, Homo sapiens
aacaucacagcaagucugugcu

SEQ ID NO: 2753 - RNA, 22 nt, Homo sapiens
agcacagacuugcugugauguu

SEQ ID NO: 2754 - RNA, 21 nt, Homo sapiens
uuaagacuugcagugauguuu

SEQ ID NO: 2755 - RNA, 21 nt, Homo sapiens
aaacaucacugcaagucuuaa

SEQ ID NO: 2756 - RNA, 22 nt, Homo sapiens
aacaucacugcaagucuuaaca

SEQ ID NO: 2757 - RNA, 22 nt, Homo sapiens
uguuaagacuugcagugauguu

SEQ ID NO: 2758 - RNA, 21 nt, Homo sapiens
acagacuugcugugauguuca

SEQ ID NO: 2759 - RNA, 21 nt, Homo sapiens
ugaacaucacagcaagucugu

SEQ ID NO: 2760 - RNA, 22 nt, Homo sapiens
aaaccguuaccauuacugaguu

SEQ ID NO: 2761 - RNA, 22 nt, Homo sapiens
aacucaguaaugguaacgguuu

SEQ ID NO: 2762 - RNA, 22 nt, Homo sapiens
uagcaagagaaccauuaccauu

SEQ ID NO: 2763 - RNA, 22 nt, Homo sapiens
aaugguaaugguucucuugcua

SEQ ID NO: 2764 - RNA, 23 nt, Homo sapiens
ugaggggcagagagcgagacuuu

SEQ ID NO: 2765 - RNA, 23 nt, Homo sapiens
aaagucucgcucucugccccuca

SEQ ID NO: 2766 - RNA, 22 nt, Homo sapiens
caagcucgcuucuaugggucug

SEQ ID NO: 2767 - RNA, 22 nt, Homo sapiens
cagacccauagaagcgagcuug

SEQ ID NO: 2768 - RNA, 22 nt, Homo sapiens
aacccguagauccgaucuugug

SEQ ID NO: 2769 - RNA, 22 nt, Homo sapiens
cacaagaucggaucuacggguu

SEQ ID NO: 2770 - RNA, 22 nt, Homo sapiens
caagcucgugucuguggguccg

SEQ ID NO: 2771 - RNA, 22 nt, Homo sapiens
cggacccacagacacgagcuug

SEQ ID NO: 2772 - RNA, 22 nt, Homo sapiens
cacccguagaaccgaccuugcg

SEQ ID NO: 2773 - RNA, 22 nt, Homo sapiens
cgcaaggucgguucuacgggug

SEQ ID NO: 2774 - RNA, 23 nt, Homo sapiens
uggagacgcggcccuguuggagu

SEQ ID NO: 2775 - RNA, 23 nt, Homo sapiens
acuccaacagggccgcgucucca

SEQ ID NO: 2776 - RNA, 23 nt, Homo sapiens
ucuacagugcacgugucuccagu

SEQ ID NO: 2777 - RNA, 23 nt, Homo sapiens
acuggagacacgugcacuguaga

SEQ ID NO: 2778 - RNA, 22 nt, Homo sapiens
caaauucguaucuaggggaaua

SEQ ID NO: 2779 - RNA, 22 nt, Homo sapiens
uauuccccuagauacgaauuug

SEQ ID NO: 2780 - RNA, 23 nt, Homo sapiens
uacccuguagauccgaauuugug

SEQ ID NO: 2781 - RNA, 23 nt, Homo sapiens
cacaaauucggaucuacagggua

SEQ ID NO: 2782 - RNA, 23 nt, Homo sapiens
ccugcagcgacuugauggcuucc

SEQ ID NO: 2783 - RNA, 23 nt, Homo sapiens
ggaagccaucaagucgcugcagg

SEQ ID NO: 2784 - RNA, 22 nt, Homo sapiens
ucagugcacuacagaacuuugu

SEQ ID NO: 2785 - RNA, 22 nt, Homo sapiens
acaaaguucuguagugcacuga

SEQ ID NO: 2786 - RNA, 22 nt, Homo sapiens
aaaguucugagacacuccgacu

SEQ ID NO: 2787 - RNA, 22 nt, Homo sapiens
agucggagugucucagaacuuu

SEQ ID NO: 2788 - RNA, 22 nt, Homo sapiens
ccuguucuccauuacuuggcuc

SEQ ID NO: 2789 - RNA, 22 nt, Homo sapiens
gagccaaguaauggagaacagg

SEQ ID NO: 2790 - RNA, 21 nt, Homo sapiens
uucaaguaauucaggauaggu

SEQ ID NO: 2791 - RNA, 21 nt, Homo sapiens
accuauccugaauuacuugaa

SEQ ID NO: 2792 - RNA, 22 nt, Homo sapiens
gcccugaacgaggggucuggag

SEQ ID NO: 2793 - RNA, 22 nt, Homo sapiens
cuccagaccccucguucagggc

SEQ ID NO: 2794 - RNA, 22 nt, Homo sapiens
gcugacuccuaguccagggcuc

SEQ ID NO: 2795 - RNA, 22 nt, Homo sapiens
gagcccuggacuaggagucagc

SEQ ID NO: 2796 - RNA, 22 nt, Homo sapiens
aucacacaaaggcaacuuuugu

SEQ ID NO: 2797 - RNA, 22 nt, Homo sapiens
acaaaaguugccuuugugugau

SEQ ID NO: 2798 - RNA, 22 nt, Homo sapiens
agagguugcccuuggugaauuc

SEQ ID NO: 2799 - RNA, 22 nt, Homo sapiens
gaauucaccaagggcaaccucu

SEQ ID NO: 2800 - RNA, 21 nt, Homo sapiens
gguagauuuuccuucuauggu

SEQ ID NO: 2801 - RNA, 21 nt, Homo sapiens
accauagaaggaaaaucuacc

SEQ ID NO: 2802 - RNA, 21 nt, Homo sapiens
aucauagaggaaaauccacgu

SEQ ID NO: 2803 - RNA, 21 nt, Homo sapiens
acguggauuuuccucuaugau

SEQ ID NO: 2804 - RNA, 22 nt, Homo sapiens
guagauucuccuucuaugagua

SEQ ID NO: 2805 - RNA, 22 nt, Homo sapiens
uacucauagaaggagaaucuac

SEQ ID NO: 2806 - RNA, 22 nt, Homo sapiens
cugguacaggccugggggacag

SEQ ID NO: 2807 - RNA, 22 nt, Homo sapiens
cugucccccaggccuguaccag

SEQ ID NO: 2808 - RNA, 22 nt, Homo sapiens
ucucccaacccuuguaccagug

SEQ ID NO: 2809 - RNA, 22 nt, Homo sapiens
cacugguacaaggguugggaga

SEQ ID NO: 2810 - RNA, 22 nt, Homo sapiens
acggguuaggcucuugggagcu

SEQ ID NO: 2811 - RNA, 22 nt, Homo sapiens
agcucccaagagccuaacccgu

SEQ ID NO: 2812 - RNA, 22 nt, Homo sapiens
ucacaagucaggcucuugggac

SEQ ID NO: 2813 - RNA, 22 nt, Homo sapiens
gucccaagagccugacuuguga

SEQ ID NO: 2814 - RNA, 22 nt, Homo sapiens
aacccguagauccgaacuugug

SEQ ID NO: 2815 - RNA, 22 nt, Homo sapiens
cacaaguucggaucuacggguu

SEQ ID NO: 2816 - RNA, 21 nt, Homo sapiens
cuguacaggccacugccuugc

SEQ ID NO: 2817 - RNA, 21 nt, Homo sapiens
gcaaggcaguggccuguacag

SEQ ID NO: 2818 - RNA, 22 nt, Homo sapiens
ugagguaguaguuuguacaguu

SEQ ID NO: 2819 - RNA, 22 nt, Homo sapiens
aacuguacaaacuacuaccuca

SEQ ID NO: 2820 - RNA, 22 nt, Homo sapiens
ucccugagacccuaacuuguga

SEQ ID NO: 2821 - RNA, 22 nt, Homo sapiens
ucacaaguuagggucucaggga

SEQ ID NO: 2822 - RNA, 22 nt, Homo sapiens
caagcuuguaucuauagguaug

SEQ ID NO: 2823 - RNA, 22 nt, Homo sapiens
cauaccuauagauacaagcuug

SEQ ID NO: 2824 - RNA, 23 nt, Homo sapiens
aaagugcugcgacauuugagcgu

SEQ ID NO: 2825 - RNA, 23 nt, Homo sapiens
acgcucaaaugucgcagcacuuu

SEQ ID NO: 2826 - RNA, 22 nt, Homo sapiens
uuuagagacggggucuugcucu

SEQ ID NO: 2827 - RNA, 22 nt, Homo sapiens
agagcaagaccccgucucuaaa

SEQ ID NO: 2828 - RNA, 24 nt, Homo sapiens
uggcccugacugaagaccagcagu

SEQ ID NO: 2829 - RNA, 24 nt, Homo sapiens
acugcuggucuucagucagggcca

SEQ ID NO: 2830 - RNA, 21 nt, Homo sapiens
gcgacccauacuugguuucag

SEQ ID NO: 2831 - RNA, 21 nt, Homo sapiens
cugaaaccaaguaugggucgc

SEQ ID NO: 2832 - RNA, 22 nt, Homo sapiens
gaaaucaagcgugggugagacc

SEQ ID NO: 2833 - RNA, 22 nt, Homo sapiens
ggucucacccacgcuugauuuc

SEQ ID NO: 2834 - RNA, 21 nt, Homo sapiens
cccugggccucugcuccccag

SEQ ID NO: 2835 - RNA, 21 nt, Homo sapiens
cuggggagcagaggcccaggg

SEQ ID NO: 2836 - RNA, 24 nt, Homo sapiens
uggggagcugaggcucugggggug

SEQ ID NO: 2837 - RNA, 24 nt, Homo sapiens
cacccccagagccucagcucccca

SEQ ID NO: 2838 - RNA, 20 nt, Homo sapiens
ggggagcuguggaagcagua

SEQ ID NO: 2839 - RNA, 20 nt, Homo sapiens
uacugcuuccacagcucccc

SEQ ID NO: 2840 - RNA, 25 nt, Homo sapiens
cuagugagggacagaaccaggauuc

SEQ ID NO: 2841 - RNA, 25 nt, Homo sapiens
gaauccugguucugucccucacuag

SEQ ID NO: 2842 - RNA, 20 nt, Homo sapiens
agagucuugugaugucuugc

SEQ ID NO: 2843 - RNA, 20 nt, Homo sapiens
gcaagacaucacaagacucu

SEQ ID NO: 2844 - RNA, 23 nt, Homo sapiens
gcagcagagaauaggacuacguc

SEQ ID NO: 2845 - RNA, 23 nt, Homo sapiens
gacguaguccuauucucugcugc

SEQ ID NO: 2846 - RNA, 23 nt, Homo sapiens
ugagcgccucgacgacagagccg

SEQ ID NO: 2847 - RNA, 23 nt, Homo sapiens
cggcucugucgucgaggcgcuca

SEQ ID NO: 2848 - RNA, 23 nt, Homo sapiens
ucccuguccuccaggagcucacg

SEQ ID NO: 2849 - RNA, 23 nt, Homo sapiens
cgugagcuccuggaggacaggga

SEQ ID NO: 2850 - RNA, 22 nt, Homo sapiens
cuauacggccuccuagcuuucc

SEQ ID NO: 2851 - RNA, 22 nt, Homo sapiens
ggaaagcuaggaggccguauag

SEQ ID NO: 2852 - RNA, 22 nt, Homo sapiens
ugagguaggagguuguauaguu

SEQ ID NO: 2853 - RNA, 22 nt, Homo sapiens
aacuauacaaccuccuaccuca

SEQ ID NO: 2854 - RNA, 22 nt, Homo sapiens
cugcgcaagcuacugccuugcu

SEQ ID NO: 2855 - RNA, 22 nt, Homo sapiens
agcaaggcaguagcuugcgcag

SEQ ID NO: 2856 - RNA, 22 nt, Homo sapiens
ugagguaguaguuugugcuguu

SEQ ID NO: 2857 - RNA, 22 nt, Homo sapiens
aacagcacaaacuacuaccuca

SEQ ID NO: 2858 - RNA, 22 nt, Homo sapiens
ugcccuguggacucaguucugg

SEQ ID NO: 2859 - RNA, 22 nt, Homo sapiens
ccagaacugaguccacagggca

SEQ ID NO: 2860 - RNA, 21 nt, Homo sapiens
ugguucuagacuugccaacua

SEQ ID NO: 2861 - RNA, 21 nt, Homo sapiens
uaguuggcaagucuagaacca

SEQ ID NO: 2862 - RNA, 23 nt, Homo sapiens
ugucugcccgcaugccugccucu

SEQ ID NO: 2863 - RNA, 23 nt, Homo sapiens
agaggcaggcaugcgggcagaca

SEQ ID NO: 2864 - RNA, 22 nt, Homo sapiens
aaaaguaauugcggucuuuggu

SEQ ID NO: 2865 - RNA, 22 nt, Homo sapiens
accaaagaccgcaauuacuuuu

SEQ ID NO: 2866 - RNA, 18 nt, Homo sapiens
ucgaggagcucacagucu

SEQ ID NO: 2867 - RNA, 18 nt, Homo sapiens
agacugugagcuccucga

SEQ ID NO: 2868 - RNA, 22 nt, Homo sapiens
cuauacaaucuauugccuuccc

SEQ ID NO: 2869 - RNA, 22 nt, Homo sapiens
gggaaggcaauagauuguauag

SEQ ID NO: 2870 - RNA, 22 nt, Homo sapiens
cuauacagucuacugucuuucc

SEQ ID NO: 2871 - RNA, 22 nt, Homo sapiens
ggaaagacaguagacuguauag

SEQ ID NO: 2872 - RNA, 22 nt, Homo sapiens
ugagguaguagauuguauaguu

SEQ ID NO: 2873 - RNA, 22 nt, Homo sapiens
aacuauacaaucuacuaccuca

SEQ ID NO: 2874 - RNA, 22 nt, Homo sapiens
aaaaguaauugugguuuuggcc

SEQ ID NO: 2875 - RNA, 22 nt, Homo sapiens
ggccaaaaccacaauuacuuuu

SEQ ID NO: 2876 - RNA, 22 nt, Homo sapiens
aaaaguaauugcgguuuuugcc

SEQ ID NO: 2877 - RNA, 22 nt, Homo sapiens
ggcaaaaaccgcaauuacuuuu

SEQ ID NO: 2878 - RNA, 22 nt, Homo sapiens
ccucugaaauucaguucuucag

SEQ ID NO: 2879 - RNA, 22 nt, Homo sapiens
cugaagaacugaauuucagagg

SEQ ID NO: 2880 - RNA, 22 nt, Homo sapiens
ugagaacugaauuccauggguu

SEQ ID NO: 2881 - RNA, 22 nt, Homo sapiens
aacccauggaauucaguucuca

SEQ ID NO: 2882 - RNA, 22 nt, Homo sapiens
acagcaggcacagacaggcagu

SEQ ID NO: 2883 - RNA, 22 nt, Homo sapiens
acugccugucugugccugcugu

SEQ ID NO: 2884 - RNA, 22 nt, Homo sapiens
ugccugucuacacuugcugugc

SEQ ID NO: 2885 - RNA, 22 nt, Homo sapiens
gcacagcaaguguagacaggca

SEQ ID NO: 2886 - RNA, 22 nt, Homo sapiens
uagcaccaucugaaaucgguua

SEQ ID NO: 2887 - RNA, 22 nt, Homo sapiens
uaaccgauuucagauggugcua

SEQ ID NO: 2888 - RNA, 22 nt, Homo sapiens
acugauuucuuuugguguucag

SEQ ID NO: 2889 - RNA, 22 nt, Homo sapiens
cugaacaccaaaagaaaucagu

SEQ ID NO: 2890 - RNA, 24 nt, Homo sapiens
gcugguuucauauggugguuuaga

SEQ ID NO: 2891 - RNA, 24 nt, Homo sapiens
ucuaaaccaccauaugaaaccagc

SEQ ID NO: 2892 - RNA, 22 nt, Homo sapiens
cugguuucacaugguggcuuag

SEQ ID NO: 2893 - RNA, 22 nt, Homo sapiens
cuaagccaccaugugaaaccag

SEQ ID NO: 2894 - RNA, 23 nt, Homo sapiens
uagcaccauuugaaaucaguguu

SEQ ID NO: 2895 - RNA, 23 nt, Homo sapiens
aacacugauuucaaauggugcua

SEQ ID NO: 2896 - RNA, 22 nt, Homo sapiens
uagcaccauuugaaaucgguua

SEQ ID NO: 2897 - RNA, 22 nt, Homo sapiens
uaaccgauuucaaauggugcua

SEQ ID NO: 2898 - RNA, 22 nt, Homo sapiens
ugaccgauuucuccugguguuc

SEQ ID NO: 2899 - RNA, 22 nt, Homo sapiens
gaacaccaggagaaaucgguca

SEQ ID NO: 2900 - RNA, 23 nt, Homo sapiens
ugucacucggcucggcccacuac

SEQ ID NO: 2901 - RNA, 23 nt, Homo sapiens
guagugggccgagccgagugaca

SEQ ID NO: 2902 - RNA, 22 nt, Homo sapiens
cugccaauuccauaggucacag

SEQ ID NO: 2903 - RNA, 22 nt, Homo sapiens
cugugaccuauggaauuggcag

SEQ ID NO: 2904 - RNA, 21 nt, Homo sapiens
cugaccuaugaauugacagcc

SEQ ID NO: 2905 - RNA, 21 nt, Homo sapiens
ggcugucaauucauaggucag

SEQ ID NO: 2906 - RNA, 20 nt, Homo sapiens
acugccccaggugcugcugg

SEQ ID NO: 2907 - RNA, 20 nt, Homo sapiens
ccagcagcaccuggggcagu

SEQ ID NO: 2908 - RNA, 22 nt, Homo sapiens
aacgccauuaucacacuaaaua

SEQ ID NO: 2909 - RNA, 22 nt, Homo sapiens
uauuuagugugauaauggcguu

SEQ ID NO: 2910 - RNA, 22 nt, Homo sapiens
cuuucagucggauguuugcagc

SEQ ID NO: 2911 - RNA, 22 nt, Homo sapiens
gcugcaaacauccgacugaaag

SEQ ID NO: 2912 - RNA, 22 nt, Homo sapiens
aauugcacgguauccaucugua

SEQ ID NO: 2913 - RNA, 22 nt, Homo sapiens
uacagauggauaccgugcaauu

SEQ ID NO: 2914 - RNA, 22 nt, Homo sapiens
cggguggaucacgaugcaauuu

SEQ ID NO: 2915 - RNA, 22 nt, Homo sapiens
aaauugcaucgugauccacccg

SEQ ID NO: 2916 - RNA, 22 nt, Homo sapiens
cugggagguggauguuuacuuc

SEQ ID NO: 2917 - RNA, 22 nt, Homo sapiens
gaaguaaacauccaccucccag

SEQ ID NO: 2918 - RNA, 22 nt, Homo sapiens
uguaaacauccuacacucagcu

SEQ ID NO: 2919 - RNA, 22 nt, Homo sapiens
agcugaguguaggauguuuaca

SEQ ID NO: 2920 - RNA, 22 nt, Homo sapiens
cugggagaggguuguuuacucc

SEQ ID NO: 2921 - RNA, 22 nt, Homo sapiens
ggaguaaacaacccucucccag

SEQ ID NO: 2922 - RNA, 22 nt, Homo sapiens
cugggagaaggcuguuuacucu

SEQ ID NO: 2923 - RNA, 22 nt, Homo sapiens
agaguaaacagccuucucccag

SEQ ID NO: 2924 - RNA, 23 nt, Homo sapiens
uguaaacauccuacacucucagc

SEQ ID NO: 2925 - RNA, 23 nt, Homo sapiens
gcugagaguguaggauguuuaca

SEQ ID NO: 2926 - RNA, 22 nt, Homo sapiens
uuuuucauuauugcuccugacc

SEQ ID NO: 2927 - RNA, 22 nt, Homo sapiens
ggucaggagcaauaaugaaaaa

SEQ ID NO: 2928 - RNA, 23 nt, Homo sapiens
ucaagagcaauaacgaaaaaugu

SEQ ID NO: 2929 - RNA, 23 nt, Homo sapiens
acauuuuucguuauugcucuuga

SEQ ID NO: 2930 - RNA, 23 nt, Homo sapiens
caaagugcuuacagugcagguag

SEQ ID NO: 2931 - RNA, 23 nt, Homo sapiens
cuaccugcacuguaagcacuuug

SEQ ID NO: 2932 - RNA, 22 nt, Homo sapiens
ggauuccuggaaauacuguucu

SEQ ID NO: 2933 - RNA, 22 nt, Homo sapiens
agaacaguauuuccaggaaucc

SEQ ID NO: 2934 - RNA, 23 nt, Homo sapiens
guccaguuuucccaggaaucccu

SEQ ID NO: 2935 - RNA, 23 nt, Homo sapiens
agggauuccugggaaaacuggac

SEQ ID NO: 2936 - RNA, 22 nt, Homo sapiens
acugcauuaugagcacuuaaag

SEQ ID NO: 2937 - RNA, 22 nt, Homo sapiens
cuuuaagugcucauaaugcagu

SEQ ID NO: 2938 - RNA, 23 nt, Homo sapiens
uaaagugcuuauagugcagguag

SEQ ID NO: 2939 - RNA, 23 nt, Homo sapiens
cuaccugcacuauaagcacuuua

SEQ ID NO: 2940 - RNA, 22 nt, Homo sapiens
gaggguuggguggaggcucucc

SEQ ID NO: 2941 - RNA, 22 nt, Homo sapiens
ggagagccuccacccaacccuc

SEQ ID NO: 2942 - RNA, 22 nt, Homo sapiens
cugugcgugugacagcggcuga

SEQ ID NO: 2943 - RNA, 22 nt, Homo sapiens
ucagccgcugucacacgcacag

SEQ ID NO: 2944 - RNA, 22 nt, Homo sapiens
ccaguggggcugcuguuaucug

SEQ ID NO: 2945 - RNA, 22 nt, Homo sapiens
cagauaacagcagccccacugg

SEQ ID NO: 2946 - RNA, 22 nt, Homo sapiens
uguaacagcaacuccaugugga

SEQ ID NO: 2947 - RNA, 22 nt, Homo sapiens
uccacauggaguugcuguuaca

SEQ ID NO: 2948 - RNA, 22 nt, Homo sapiens
ucacaguggucucugggauuau

SEQ ID NO: 2949 - RNA, 22 nt, Homo sapiens
auaaucccagagaccacuguga

SEQ ID NO: 2950 - RNA, 22 nt, Homo sapiens
uaaucucagcuggcaacuguga

SEQ ID NO: 2951 - RNA, 22 nt, Homo sapiens
ucacaguugccagcugagauua

SEQ ID NO: 2952 - RNA, 22 nt, Homo sapiens
cagugccucggcagugcagccc

SEQ ID NO: 2953 - RNA, 22 nt, Homo sapiens
gggcugcacugccgaggcacug

SEQ ID NO: 2954 - RNA, 20 nt, Homo sapiens
gugcauugcuguugcauugc

SEQ ID NO: 2955 - RNA, 20 nt, Homo sapiens
gcaaugcaacagcaaugcac

SEQ ID NO: 2956 - RNA, 19 nt, Homo sapiens
acuggacuuggaggcagaa

SEQ ID NO: 2957 - RNA, 19 nt, Homo sapiens
uucugccuccaaguccagu

SEQ ID NO: 2958 - RNA, 25 nt, Homo sapiens
acuggacuuggagucagaagagugg

SEQ ID NO: 2959 - RNA, 25 nt, Homo sapiens
ccacucuucugacuccaaguccagu

SEQ ID NO: 2960 - RNA, 20 nt, Homo sapiens
acuggacuuggagucagaaa

SEQ ID NO: 2961 - RNA, 20 nt, Homo sapiens
uuucugacuccaaguccagu

SEQ ID NO: 2962 - RNA, 19 nt, Homo sapiens
acuggacuuggagucagga

SEQ ID NO: 2963 - RNA, 19 nt, Homo sapiens
uccugacuccaaguccagu

SEQ ID NO: 2964 - RNA, 20 nt, Homo sapiens
acuggacuuggagccagaag

SEQ ID NO: 2965 - RNA, 20 nt, Homo sapiens
cuucuggcuccaaguccagu

SEQ ID NO: 2966 - RNA, 20 nt, Homo sapiens
acugggcuuggagucagaag

SEQ ID NO: 2967 - RNA, 20 nt, Homo sapiens
cuucugacuccaagcccagu

SEQ ID NO: 2968 - RNA, 21 nt, Homo sapiens
acuggacuuggugucagaugg

SEQ ID NO: 2969 - RNA, 21 nt, Homo sapiens
ccaucugacaccaaguccagu

SEQ ID NO: 2970 - RNA, 21 nt, Homo sapiens
acuggacuaggagucagaagg

SEQ ID NO: 2971 - RNA, 21 nt, Homo sapiens
ccuucugacuccuaguccagu

SEQ ID NO: 2972 - RNA, 19 nt, Homo sapiens
acuggauuuggagccagaa

SEQ ID NO: 2973 - RNA, 19 nt, Homo sapiens
uucuggcuccaaauccagu

SEQ ID NO: 2974 - RNA, 20 nt, Homo sapiens
aggaauguuccuucuuugcc

SEQ ID NO: 2975 - RNA, 20 nt, Homo sapiens
ggcaaagaaggaacauuccu

SEQ ID NO: 2976 - RNA, 21 nt, Homo sapiens
ucagugcaugacagaacuugg

SEQ ID NO: 2977 - RNA, 21 nt, Homo sapiens
ccaaguucugucaugcacuga

SEQ ID NO: 2978 - RNA, 20 nt, Homo sapiens
ucacaccugccucgcccccc

SEQ ID NO: 2979 - RNA, 20 nt, Homo sapiens
ggggggcgaggcagguguga

SEQ ID NO: 2980 - RNA, 21 nt, Homo sapiens
gugggcgggggcaggugugug

SEQ ID NO: 2981 - RNA, 21 nt, Homo sapiens
cacacaccugcccccgcccac

SEQ ID NO: 2982 - RNA, 22 nt, Homo sapiens
acgcccuucccccccuucuuca

SEQ ID NO: 2983 - RNA, 22 nt, Homo sapiens
ugaagaagggggggaagggcgu

SEQ ID NO: 2984 - RNA, 22 nt, Homo sapiens
uugcauauguaggaugucccau

SEQ ID NO: 2985 - RNA, 22 nt, Homo sapiens
augggacauccuacauaugcaa

SEQ ID NO: 2986 - RNA, 23 nt, Homo sapiens
guuugcacgggugggccuugucu

SEQ ID NO: 2987 - RNA, 23 nt, Homo sapiens
agacaaggcccacccgugcaaac

SEQ ID NO: 2988 - RNA, 22 nt, Homo sapiens
gacuauagaacuuucccccuca

SEQ ID NO: 2989 - RNA, 22 nt, Homo sapiens
ugagggggaaaguucuauaguc

SEQ ID NO: 2990 - RNA, 21 nt, Homo sapiens
agggggaaaguucuauagucc

SEQ ID NO: 2991 - RNA, 21 nt, Homo sapiens
ggacuauagaacuuucccccu

SEQ ID NO: 2992 - RNA, 21 nt, Homo sapiens
cuuuuugcggucugggcuugc

SEQ ID NO: 2993 - RNA, 21 nt, Homo sapiens
gcaagcccagaccgcaaaaag

SEQ ID NO: 2994 - RNA, 21 nt, Homo sapiens
ucuuguguucucuagaucagu

SEQ ID NO: 2995 - RNA, 21 nt, Homo sapiens
acugaucuagagaacacaaga

SEQ ID NO: 2996 - RNA, 23 nt, Homo sapiens
cccaguguucagacuaccuguuc

SEQ ID NO: 2997 - RNA, 23 nt, Homo sapiens
gaacagguagucugaacacuggg

SEQ ID NO: 2998 - RNA, 22 nt, Homo sapiens
acaguagucugcacauugguua

SEQ ID NO: 2999 - RNA, 22 nt, Homo sapiens
uaaccaaugugcagacuacugu

SEQ ID NO: 3000 - RNA, 22 nt, Homo sapiens
acaguagucugcacauugguua

SEQ ID NO: 3001 - RNA, 22 nt, Homo sapiens
uaaccaaugugcagacuacugu

SEQ ID NO: 3002 - RNA, 23 nt, Homo sapiens
cccaguguuuagacuaucuguuc

SEQ ID NO: 3003 - RNA, 23 nt, Homo sapiens
gaacagauagucuaaacacuggg

SEQ ID NO: 3004 - RNA, 22 nt, Homo sapiens
uggagugugacaaugguguuug

SEQ ID NO: 3005 - RNA, 22 nt, Homo sapiens
caaacaccauugucacacucca

SEQ ID NO: 3006 - RNA, 22 nt, Homo sapiens
ugcccuaaaugccccuucuggc

SEQ ID NO: 3007 - RNA, 22 nt, Homo sapiens
gccagaaggggcauuuagggca

SEQ ID NO: 3008 - RNA, 23 nt, Homo sapiens
uaaggugcaucuagugcaguuag

SEQ ID NO: 3009 - RNA, 23 nt, Homo sapiens
cuaacugcacuagaugcaccuua

SEQ ID NO: 3010 - RNA, 22 nt, Homo sapiens
cuccuauaugaugccuuucuuc

SEQ ID NO: 3011 - RNA, 22 nt, Homo sapiens
gaagaaaggcaucauauaggag

SEQ ID NO: 3012 - RNA, 21 nt, Homo sapiens
gaacggcuucauacaggaguu

SEQ ID NO: 3013 - RNA, 21 nt, Homo sapiens
aacuccuguaugaagccguuc

SEQ ID NO: 3014 - RNA, 22 nt, Homo sapiens
ugugacugguugaccagagggg

SEQ ID NO: 3015 - RNA, 22 nt, Homo sapiens
ccccucuggucaaccagucaca

SEQ ID NO: 3016 - RNA, 23 nt, Homo sapiens
acugcccuaagugcuccuucugg

SEQ ID NO: 3017 - RNA, 23 nt, Homo sapiens
ccagaaggagcacuuagggcagu

SEQ ID NO: 3018 - RNA, 23 nt, Homo sapiens
uaaggugcaucuagugcagauag

SEQ ID NO: 3019 - RNA, 23 nt, Homo sapiens
cuaucugcacuagaugcaccuua

SEQ ID NO: 3020 - RNA, 22 nt, Homo sapiens
cagugcaaugaugaaagggcau

SEQ ID NO: 3021 - RNA, 22 nt, Homo sapiens
augcccuuucaucauugcacug

SEQ ID NO: 3022 - RNA, 21 nt, Homo sapiens
acucuuucccuguugcacuac

SEQ ID NO: 3023 - RNA, 21 nt, Homo sapiens
guagugcaacagggaaagagu

SEQ ID NO: 3024 - RNA, 24 nt, Homo sapiens
uuuggcaaugguagaacucacacu

SEQ ID NO: 3025 - RNA, 24 nt, Homo sapiens
agugugaguucuaccauugccaaa

SEQ ID NO: 3026 - RNA, 21 nt, Homo sapiens
agggcccccccucaauccugu

SEQ ID NO: 3027 - RNA, 21 nt, Homo sapiens
acaggauugagggggggcccu

SEQ ID NO: 3028 - RNA, 22 nt, Homo sapiens
cagugcaauguuaaaagggcau

SEQ ID NO: 3029 - RNA, 22 nt, Homo sapiens
augcccuuuuaacauugcacug

SEQ ID NO: 3030 - RNA, 22 nt, Homo sapiens
uucacauugugcuacugucugc

SEQ ID NO: 3031 - RNA, 22 nt, Homo sapiens
gcagacaguagcacaaugugaa

SEQ ID NO: 3032 - RNA, 22 nt, Homo sapiens
ucggauccgucugagcuuggcu

SEQ ID NO: 3033 - RNA, 22 nt, Homo sapiens
agccaagcucagacggauccga

SEQ ID NO: 3034 - RNA, 22 nt, Homo sapiens
cugaagcucagagggcucugau

SEQ ID NO: 3035 - RNA, 22 nt, Homo sapiens
aucagagcccucugagcuucag

SEQ ID NO: 3036 - RNA, 22 nt, Homo sapiens
ccucuuccccuugucucuccag

SEQ ID NO: 3037 - RNA, 22 nt, Homo sapiens
cuggagagacaaggggaagagg

SEQ ID NO: 3038 - RNA, 22 nt, Homo sapiens
ugagugacaggggaaaugggga

SEQ ID NO: 3039 - RNA, 22 nt, Homo sapiens
uccccauuuccccugucacuca

SEQ ID NO: 3040 - RNA, 22 nt, Homo sapiens
ucaggacacuucugaacuugga

SEQ ID NO: 3041 - RNA, 22 nt, Homo sapiens
uccaaguucagaaguguccuga

SEQ ID NO: 3042 - RNA, 22 nt, Homo sapiens
caguucagaaguguuccugagu

SEQ ID NO: 3043 - RNA, 22 nt, Homo sapiens
acucaggaacacuucugaacug

SEQ ID NO: 3044 - RNA, 21 nt, Homo sapiens
uuucccuuuccauccuggcag

SEQ ID NO: 3045 - RNA, 21 nt, Homo sapiens
cugccaggauggaaagggaaa

SEQ ID NO: 3046 - RNA, 21 nt, Homo sapiens
uugccagggcaggagguggaa

SEQ ID NO: 3047 - RNA, 21 nt, Homo sapiens
uuccaccuccugcccuggcaa

SEQ ID NO: 3048 - RNA, 21 nt, Homo sapiens
agagauugguagaaaucaggu

SEQ ID NO: 3049 - RNA, 21 nt, Homo sapiens
accugauuucuaccaaucucu

SEQ ID NO: 3050 - RNA, 23 nt, Homo sapiens
aaucggacccauuuaaaccggag

SEQ ID NO: 3051 - RNA, 23 nt, Homo sapiens
cuccgguuuaaauggguccgauu

SEQ ID NO: 3052 - RNA, 24 nt, Homo sapiens
ucugggcacaggcggauggacagg

SEQ ID NO: 3053 - RNA, 24 nt, Homo sapiens
ccuguccauccgccugugcccaga

SEQ ID NO: 3054 - RNA, 21 nt, Homo sapiens
ccagugacugagcuggagcca

SEQ ID NO: 3055 - RNA, 21 nt, Homo sapiens
uggcuccagcucagucacugg

SEQ ID NO: 3056 - RNA, 22 nt, Homo sapiens
aggauaggaagaaugaagugcu

SEQ ID NO: 3057 - RNA, 22 nt, Homo sapiens
agcacuucauucuuccuauccu

SEQ ID NO: 3058 - RNA, 22 nt, Homo sapiens
aggagaguggauuccagguggu

SEQ ID NO: 3059 - RNA, 22 nt, Homo sapiens
accaccuggaauccacucuccu

SEQ ID NO: 3060 - RNA, 22 nt, Homo sapiens
uccuccucuaccucaucccagu

SEQ ID NO: 3061 - RNA, 22 nt, Homo sapiens
acugggaugagguagaggagga

SEQ ID NO: 3062 - RNA, 22 nt, Homo sapiens
ugagggguuuggaaugggaugg

SEQ ID NO: 3063 - RNA, 22 nt, Homo sapiens
ccaucccauuccaaaccccuca

SEQ ID NO: 3064 - RNA, 21 nt, Homo sapiens
auccaguucucugagggggcu

SEQ ID NO: 3065 - RNA, 21 nt, Homo sapiens
agcccccucagagaacuggau

SEQ ID NO: 3066 - RNA, 22 nt, Homo sapiens
aaccccuaaggcaacuggaugg

SEQ ID NO: 3067 - RNA, 22 nt, Homo sapiens
ccauccaguugccuuagggguu

SEQ ID NO: 3068 - RNA, 21 nt, Homo sapiens
ucauccucgucucccucccag

SEQ ID NO: 3069 - RNA, 21 nt, Homo sapiens
cugggagggagacgaggauga

SEQ ID NO: 3070 - RNA, 22 nt, Homo sapiens
agggaaggggacgaggguuggg

SEQ ID NO: 3071 - RNA, 22 nt, Homo sapiens
cccaacccucguccccuucccu

SEQ ID NO: 3072 - RNA, 23 nt, Homo sapiens
aagaagagacugagucaucgaau

SEQ ID NO: 3073 - RNA, 23 nt, Homo sapiens
auucgaugacucagucucuucuu

SEQ ID NO: 3074 - RNA, 23 nt, Homo sapiens
caauggcacaaacucauucuuga

SEQ ID NO: 3075 - RNA, 23 nt, Homo sapiens
ucaagaaugaguuugugccauug

SEQ ID NO: 3076 - RNA, 21 nt, Homo sapiens
acugaauccucuuuuccucag

SEQ ID NO: 3077 - RNA, 21 nt, Homo sapiens
cugaggaaaagaggauucagu

SEQ ID NO: 3078 - RNA, 22 nt, Homo sapiens
ugggaugagggauugaagugga

SEQ ID NO: 3079 - RNA, 22 nt, Homo sapiens
uccacuucaaucccucauccca

SEQ ID NO: 3080 - RNA, 22 nt, Homo sapiens
caggccauauugugcugccuca

SEQ ID NO: 3081 - RNA, 22 nt, Homo sapiens
ugaggcagcacaauauggccug

SEQ ID NO: 3082 - RNA, 22 nt, Homo sapiens
uagcagcacauaaugguuugug

SEQ ID NO: 3083 - RNA, 22 nt, Homo sapiens
cacaaaccauuaugugcugcua

SEQ ID NO: 3084 - RNA, 22 nt, Homo sapiens
cgaaucauuauuugcugcucua

SEQ ID NO: 3085 - RNA, 22 nt, Homo sapiens
uagagcagcaaauaaugauucg

SEQ ID NO: 3086 - RNA, 22 nt, Homo sapiens
uagcagcacaucaugguuuaca

SEQ ID NO: 3087 - RNA, 22 nt, Homo sapiens
uguaaaccaugaugugcugcua

SEQ ID NO: 3088 - RNA, 22 nt, Homo sapiens
ccaauauuacugugcugcuuua

SEQ ID NO: 3089 - RNA, 22 nt, Homo sapiens
uaaagcagcacaguaauauugg

SEQ ID NO: 3090 - RNA, 22 nt, Homo sapiens
cuagguauggucccagggaucc

SEQ ID NO: 3091 - RNA, 22 nt, Homo sapiens
ggaucccugggaccauaccuag

SEQ ID NO: 3092 - RNA, 20 nt, Homo sapiens
guguguggaaaugcuucugc

SEQ ID NO: 3093 - RNA, 20 nt, Homo sapiens
gcagaagcauuuccacacac

SEQ ID NO: 3094 - RNA, 22 nt, Homo sapiens
gugugcggaaaugcuucugcua

SEQ ID NO: 3095 - RNA, 22 nt, Homo sapiens
uagcagaagcauuuccgcacac

SEQ ID NO: 3096 - RNA, 23 nt, Homo sapiens
agcagcauuguacagggcuauca

SEQ ID NO: 3097 - RNA, 23 nt, Homo sapiens
ugauagcccuguacaaugcugcu

SEQ ID NO: 3098 - RNA, 22 nt, Homo sapiens
aacuggcccucaaagucccgcu

SEQ ID NO: 3099 - RNA, 22 nt, Homo sapiens
agcgggacuuugagggccaguu

SEQ ID NO: 3100 - RNA, 22 nt, Homo sapiens
cgggguuuugagggcgagauga

SEQ ID NO: 3101 - RNA, 22 nt, Homo sapiens
ucaucucgcccucaaaaccccg

SEQ ID NO: 3102 - RNA, 21 nt, Homo sapiens
gcagggacagcaaaggggugc

SEQ ID NO: 3103 - RNA, 21 nt, Homo sapiens
gcaccccuuugcugucccugc

SEQ ID NO: 3104 - RNA, 22 nt, Homo sapiens
uucccuuugucauccuucgccu

SEQ ID NO: 3105 - RNA, 22 nt, Homo sapiens
aggcgaaggaugacaaagggaa

SEQ ID NO: 3106 - RNA, 23 nt, Homo sapiens
auggccaaaacugcaguuauuuu

SEQ ID NO: 3107 - RNA, 23 nt, Homo sapiens
aaaauaacugcaguuuuggccau

SEQ ID NO: 3108 - RNA, 25 nt, Homo sapiens
aaaaaccacaauuacuuuugcacca

SEQ ID NO: 3109 - RNA, 25 nt, Homo sapiens
uggugcaaaaguaauugugguuuuu

SEQ ID NO: 3110 - RNA, 21 nt, Homo sapiens
caaaagugaucgugguuuuug

SEQ ID NO: 3111 - RNA, 21 nt, Homo sapiens
caaaaaccacgaucacuuuug

SEQ ID NO: 3112 - RNA, 23 nt, Homo sapiens
caaagacugcaauuacuuuugcg

SEQ ID NO: 3113 - RNA, 23 nt, Homo sapiens
cgcaaaaguaauugcagucuuug

SEQ ID NO: 3114 - RNA, 23 nt, Homo sapiens
aaaaguaacugcgguuuuugccu

SEQ ID NO: 3115 - RNA, 23 nt, Homo sapiens
aggcaaaaaccgcaguuacuuuu

SEQ ID NO: 3116 - RNA, 22 nt, Homo sapiens
ugccuggaacauaguagggacu

SEQ ID NO: 3117 - RNA, 22 nt, Homo sapiens
agucccuacuauguuccaggca

SEQ ID NO: 3118 - RNA, 21 nt, Homo sapiens
auaggacucauauagugccag

SEQ ID NO: 3119 - RNA, 21 nt, Homo sapiens
cuggcacuauaugaguccuau

SEQ ID NO: 3120 - RNA, 20 nt, Homo sapiens
agacacuauacgagucauau

SEQ ID NO: 3121 - RNA, 20 nt, Homo sapiens
auaugacucguauagugucu

SEQ ID NO: 3122 - RNA, 23 nt, Homo sapiens
ugugacugcauuaugaaaauucu

SEQ ID NO: 3123 - RNA, 23 nt, Homo sapiens
agaauuuucauaaugcagucaca

SEQ ID NO: 3124 - RNA, 20 nt, Homo sapiens
uggcuuuuaacuuugauggc

SEQ ID NO: 3125 - RNA, 20 nt, Homo sapiens
gccaucaaaguuaaaagcca

SEQ ID NO: 3126 - RNA, 21 nt, Homo sapiens
cacagcaaguguagacaggca

SEQ ID NO: 3127 - RNA, 21 nt, Homo sapiens
ugccugucuacacuugcugug

SEQ ID NO: 3128 - RNA, 21 nt, Homo sapiens
ccugucugugccugcuguaca

SEQ ID NO: 3129 - RNA, 21 nt, Homo sapiens
uguacagcaggcacagacagg

SEQ ID NO: 3130 - RNA, 22 nt, Homo sapiens
uaaauagaguaggcaaaggaca

SEQ ID NO: 3131 - RNA, 22 nt, Homo sapiens
uguccuuugccuacucuauuua

SEQ ID NO: 3132 - RNA, 22 nt, Homo sapiens
uccuuugccuauucuauuuaag

SEQ ID NO: 3133 - RNA, 22 nt, Homo sapiens
cuuaaauagaauaggcaaagga

SEQ ID NO: 3134 - RNA, 22 nt, Homo sapiens
guugggacaagaggacggucuu

SEQ ID NO: 3135 - RNA, 22 nt, Homo sapiens
aagaccguccucuugucccaac

SEQ ID NO: 3136 - RNA, 17 nt, Homo sapiens
cagagaauuguuuaauc

SEQ ID NO: 3137 - RNA, 17 nt, Homo sapiens
gauuaaacaauucucug

SEQ ID NO: 3138 - RNA, 20 nt, Homo sapiens
uagaggaagcuguggagaga

SEQ ID NO: 3139 - RNA, 20 nt, Homo sapiens
ucucuccacagcuuccucua

SEQ ID NO: 3140 - RNA, 22 nt, Homo sapiens
uccccuucugcaggccugcugg

SEQ ID NO: 3141 - RNA, 22 nt, Homo sapiens
ccagcaggccugcagaagggga

SEQ ID NO: 3142 - RNA, 23 nt, Homo sapiens
aucagggcuuguggaaugggaag

SEQ ID NO: 3143 - RNA, 23 nt, Homo sapiens
cuucccauuccacaagcccugau

SEQ ID NO: 3144 - RNA, 23 nt, Homo sapiens
ucuggcaaguaaaaaacucucau

SEQ ID NO: 3145 - RNA, 23 nt, Homo sapiens
augagaguuuuuuacuugccaga

SEQ ID NO: 3146 - RNA, 23 nt, Homo sapiens
ucgaggacugguggaagggccuu

SEQ ID NO: 3147 - RNA, 23 nt, Homo sapiens
aaggcccuuccaccaguccucga

SEQ ID NO: 3148 - RNA, 24 nt, Homo sapiens
uggguagagaaggagcucagagga

SEQ ID NO: 3149 - RNA, 24 nt, Homo sapiens
uccucugagcuccuucucuaccca

SEQ ID NO: 3150 - RNA, 22 nt, Homo sapiens
uaaagaacucuuaaaacccaau

SEQ ID NO: 3151 - RNA, 22 nt, Homo sapiens
auuggguuuuaagaguucuuua

SEQ ID NO: 3152 - RNA, 23 nt, Homo sapiens
ugauggauaaaagacuacauauu

SEQ ID NO: 3153 - RNA, 23 nt, Homo sapiens
aauauguagucuuuuauccauca

SEQ ID NO: 3154 - RNA, 22 nt, Homo sapiens
ugccuaggcugagacugcagug

SEQ ID NO: 3155 - RNA, 22 nt, Homo sapiens
cacugcagucucagccuaggca

SEQ ID NO: 3156 - RNA, 22 nt, Homo sapiens
uggcccaaccuauucaguuagu

SEQ ID NO: 3157 - RNA, 22 nt, Homo sapiens
acuaacugaauagguugggcca

SEQ ID NO: 3158 - RNA, 23 nt, Homo sapiens
cugacugaauagguagggucauu

SEQ ID NO: 3159 - RNA, 23 nt, Homo sapiens
aaugacccuaccuauucagucag

SEQ ID NO: 3160 - RNA, 24 nt, Homo sapiens
ucuguagccugggagcaauggggu

SEQ ID NO: 3161 - RNA, 24 nt, Homo sapiens
accccauugcucccaggcuacaga

SEQ ID NO: 3162 - RNA, 23 nt, Homo sapiens
uaggagcucaacagaugccuguu

SEQ ID NO: 3163 - RNA, 23 nt, Homo sapiens
aacaggcaucuguugagcuccua

SEQ ID NO: 3164 - RNA, 19 nt, Homo sapiens
gagggcggguggaggagga

SEQ ID NO: 3165 - RNA, 19 nt, Homo sapiens
uccuccuccacccgcccuc

SEQ ID NO: 3166 - RNA, 25 nt, Homo sapiens
auaacauuguaaagcgcuucuuucg

SEQ ID NO: 3167 - RNA, 25 nt, Homo sapiens
cgaaagaagcgcuuuacaauguuau

SEQ ID NO: 3168 - RNA, 24 nt, Homo sapiens
agauauuuugaguguuuggaauug

SEQ ID NO: 3169 - RNA, 24 nt, Homo sapiens
caauuccaaacacucaaaauaucu

SEQ ID NO: 3170 - RNA, 22 nt, Homo sapiens
aacuccaaacacucaaaacuca

SEQ ID NO: 3171 - RNA, 22 nt, Homo sapiens
ugaguuuugaguguuuggaguu

SEQ ID NO: 3172 - RNA, 22 nt, Homo sapiens
caugcuaggauagaaagaaugg

SEQ ID NO: 3173 - RNA, 22 nt, Homo sapiens
ccauucuuucuauccuagcaug

SEQ ID NO: 3174 - RNA, 24 nt, Homo sapiens
gguugggcagugaggaggguguga

SEQ ID NO: 3175 - RNA, 24 nt, Homo sapiens
ucacacccuccucacugcccaacc

SEQ ID NO: 3176 - RNA, 22 nt, Homo sapiens
uggaaaaaacuggugugugcuu

SEQ ID NO: 3177 - RNA, 22 nt, Homo sapiens
aagcacacaccaguuuuuucca

SEQ ID NO: 3178 - RNA, 22 nt, Homo sapiens
cuggggagauccucgagguugg

SEQ ID NO: 3179 - RNA, 22 nt, Homo sapiens
ccaaccucgaggaucuccccag

SEQ ID NO: 3180 - RNA, 22 nt, Homo sapiens
caaccucgacgaucuccucagc

SEQ ID NO: 3181 - RNA, 22 nt, Homo sapiens
gcugaggagaucgucgagguug

SEQ ID NO: 3182 - RNA, 21 nt, Homo sapiens
ugaggagaucgucgagguugg

SEQ ID NO: 3183 - RNA, 21 nt, Homo sapiens
ccaaccucgacgaucuccuca

SEQ ID NO: 3184 - RNA, 22 nt, Homo sapiens
caaccucgaggaucuccccagc

SEQ ID NO: 3185 - RNA, 22 nt, Homo sapiens
gcuggggagauccucgagguug

SEQ ID NO: 3186 - RNA, 21 nt, Homo sapiens
gguggggcaaugggaucaggu

SEQ ID NO: 3187 - RNA, 21 nt, Homo sapiens
accugaucccauugccccacc

SEQ ID NO: 3188 - RNA, 23 nt, Homo sapiens
ggggaaagcgaguagggacauuu

SEQ ID NO: 3189 - RNA, 23 nt, Homo sapiens
aaaugucccuacucgcuuucccc

SEQ ID NO: 3190 - RNA, 22 nt, Homo sapiens
cagaaggggaguugggagcaga

SEQ ID NO: 3191 - RNA, 22 nt, Homo sapiens
ucugcucccaacuccccuucug

SEQ ID NO: 3192 - RNA, 21 nt, Homo sapiens
ccaggcucugcagugggaacu

SEQ ID NO: 3193 - RNA, 21 nt, Homo sapiens
aguucccacugcagagccugg

SEQ ID NO: 3194 - RNA, 21 nt, Homo sapiens
cucccacuuccagaucuuucu

SEQ ID NO: 3195 - RNA, 21 nt, Homo sapiens
agaaagaucuggaagugggag

SEQ ID NO: 3196 - RNA, 22 nt, Homo sapiens
aaagaucuggaagugggagaca

SEQ ID NO: 3197 - RNA, 22 nt, Homo sapiens
ugucucccacuuccagaucuuu

SEQ ID NO: 3198 - RNA, 22 nt, Homo sapiens
cugcccuagucuagcugaagcu

SEQ ID NO: 3199 - RNA, 22 nt, Homo sapiens
agcuucagcuagacuagggcag

SEQ ID NO: 3200 - RNA, 22 nt, Homo sapiens
uucagccaggcuagugcagucu

SEQ ID NO: 3201 - RNA, 22 nt, Homo sapiens
agacugcacuagccuggcugaa

SEQ ID NO: 3202 - RNA, 22 nt, Homo sapiens
uaggauuacaagugucggccac

SEQ ID NO: 3203 - RNA, 22 nt, Homo sapiens
guggccgacacuuguaauccua

SEQ ID NO: 3204 - RNA, 22 nt, Homo sapiens
agagcugagacuagaaagccca

SEQ ID NO: 3205 - RNA, 22 nt, Homo sapiens
ugggcuuucuagucucagcucu

SEQ ID NO: 3206 - RNA, 22 nt, Homo sapiens
ggcuuucuagucucagcucucc

SEQ ID NO: 3207 - RNA, 22 nt, Homo sapiens
ggagagcugagacuagaaagcc

SEQ ID NO: 3208 - RNA, 23 nt, Homo sapiens
cugauaagaacagaggcccagau

SEQ ID NO: 3209 - RNA, 23 nt, Homo sapiens
aucugggccucuguucuuaucag

SEQ ID NO: 3210 - RNA, 21 nt, Homo sapiens
ucccuaccccuccacucccca

SEQ ID NO: 3211 - RNA, 21 nt, Homo sapiens
uggggaguggagggguaggga

SEQ ID NO: 3212 - RNA, 23 nt, Homo sapiens
uuagggaguagaaggguggggag

SEQ ID NO: 3213 - RNA, 23 nt, Homo sapiens
cuccccacccuucuacucccuaa

SEQ ID NO: 3214 - RNA, 22 nt, Homo sapiens
uauaaaaugagggcaguaagac

SEQ ID NO: 3215 - RNA, 22 nt, Homo sapiens
gucuuacugcccucauuuuaua

SEQ ID NO: 3216 - RNA, 22 nt, Homo sapiens
ugugacuuuaagggaaauggcg

SEQ ID NO: 3217 - RNA, 22 nt, Homo sapiens
cgccauuucccuuaaagucaca

SEQ ID NO: 3218 - RNA, 22 nt, Homo sapiens
agguggaugcaaugugaccuca

SEQ ID NO: 3219 - RNA, 22 nt, Homo sapiens
ugaggucacauugcauccaccu

SEQ ID NO: 3220 - RNA, 23 nt, Homo sapiens
cgcagacaaugccuacuggccua

SEQ ID NO: 3221 - RNA, 23 nt, Homo sapiens
uaggccaguaggcauugucugcg

SEQ ID NO: 3222 - RNA, 17 nt, Homo sapiens
gaguucuacagucagac

SEQ ID NO: 3223 - RNA, 17 nt, Homo sapiens
gucugacuguagaacuc

SEQ ID NO: 3224 - RNA, 22 nt, Homo sapiens
uaggacugugcuuggcacauag

SEQ ID NO: 3225 - RNA, 22 nt, Homo sapiens
cuaugugccaagcacaguccua

SEQ ID NO: 3226 - RNA, 22 nt, Homo sapiens
cugggguucugagacagacagu

SEQ ID NO: 3227 - RNA, 22 nt, Homo sapiens
acugucugucucagaaccccag

SEQ ID NO: 3228 - RNA, 22 nt, Homo sapiens
aaaggaggaaauaggcaggcca

SEQ ID NO: 3229 - RNA, 22 nt, Homo sapiens
uggccugccuauuuccuccuuu

SEQ ID NO: 3230 - RNA, 22 nt, Homo sapiens
ugcccugccuguuuucuccuuu

SEQ ID NO: 3231 - RNA, 22 nt, Homo sapiens
aaaggagaaaacaggcagggca

SEQ ID NO: 3232 - RNA, 23 nt, Homo sapiens
uagugaguuagagaugcagagcc

SEQ ID NO: 3233 - RNA, 23 nt, Homo sapiens
ggcucugcaucucuaacucacua

SEQ ID NO: 3234 - RNA, 19 nt, Homo sapiens
acuggccugggacuaccgg

SEQ ID NO: 3235 - RNA, 19 nt, Homo sapiens
ccgguagucccaggccagu

SEQ ID NO: 3236 - RNA, 21 nt, Homo sapiens
ugcacggcacuggggacacgu

SEQ ID NO: 3237 - RNA, 21 nt, Homo sapiens
acguguccccagugccgugca

SEQ ID NO: 3238 - RNA, 23 nt, Homo sapiens
uguguacacacgugccaggcgcu

SEQ ID NO: 3239 - RNA, 23 nt, Homo sapiens
agcgccuggcacguguguacaca

SEQ ID NO: 3240 - RNA, 17 nt, Homo sapiens
ggggcgcggccggaucg

SEQ ID NO: 3241 - RNA, 17 nt, Homo sapiens
cgauccggccgcgcccc

SEQ ID NO: 3242 - RNA, 22 nt, Homo sapiens
agaaggggugaaauuuaaacgu

SEQ ID NO: 3243 - RNA, 22 nt, Homo sapiens
acguuuaaauuucaccccuucu

SEQ ID NO: 3244 - RNA, 19 nt, Homo sapiens
aucgggcccucggcgccgg

SEQ ID NO: 3245 - RNA, 19 nt, Homo sapiens
ccggcgccgagggcccgau

SEQ ID NO: 3246 - RNA, 17 nt, Homo sapiens
gcuucuguaguguaguc

SEQ ID NO: 3247 - RNA, 17 nt, Homo sapiens
gacuacacuacagaagc

SEQ ID NO: 3248 - RNA, 22 nt, Homo sapiens
gccucucucggagucgcucgga

SEQ ID NO: 3249 - RNA, 22 nt, Homo sapiens
uccgagcgacuccgagagaggc

SEQ ID NO: 3250 - RNA, 23 nt, Homo sapiens
aaagucucgcucucugccccuca

SEQ ID NO: 3251 - RNA, 23 nt, Homo sapiens
ugaggggcagagagcgagacuuu

SEQ ID NO: 3252 - RNA, 24 nt, Homo sapiens
ugaggggccucagaccgagcuuuu

SEQ ID NO: 3253 - RNA, 24 nt, Homo sapiens
aaaagcucggucugaggccccuca

SEQ ID NO: 3254 - RNA, 23 nt, Homo sapiens
agaagaaggcggucggucugcgg

SEQ ID NO: 3255 - RNA, 23 nt, Homo sapiens
ccgcagaccgaccgccuucuucu

SEQ ID NO: 3256 - RNA, 20 nt, Homo sapiens
uuggccauggggcugcgcgg

SEQ ID NO: 3257 - RNA, 20 nt, Homo sapiens
ccgcgcagccccauggccaa

SEQ ID NO: 3258 - RNA, 23 nt, Homo sapiens
ccugggcagcguguggcugaagg

SEQ ID NO: 3259 - RNA, 23 nt, Homo sapiens
ccuucagccacacgcugcccagg

SEQ ID NO: 3260 - RNA, 23 nt, Homo sapiens
agaggcuuugugcggauacgggg

SEQ ID NO: 3261 - RNA, 23 nt, Homo sapiens
ccccguauccgcacaaagccucu

SEQ ID NO: 3262 - RNA, 21 nt, Homo sapiens
cccuugggucugaugggguag

SEQ ID NO: 3263 - RNA, 21 nt, Homo sapiens
cuaccccaucagacccaaggg

SEQ ID NO: 3264 - RNA, 25 nt, Homo sapiens
ugccccaucugugcccuggguagga

SEQ ID NO: 3265 - RNA, 25 nt, Homo sapiens
uccuacccagggcacagauggggca

SEQ ID NO: 3266 - RNA, 23 nt, Homo sapiens
uguggaagguagacggccagaga

SEQ ID NO: 3267 - RNA, 23 nt, Homo sapiens
ucucuggccgucuaccuuccaca

SEQ ID NO: 3268 - RNA, 20 nt, Homo sapiens
ucuggccagcuacgucccca

SEQ ID NO: 3269 - RNA, 20 nt, Homo sapiens
uggggacguagcuggccaga

SEQ ID NO: 3270 - RNA, 23 nt, Homo sapiens
uggggacguagcuggccagacag

SEQ ID NO: 3271 - RNA, 23 nt, Homo sapiens
cugucuggccagcuacgucccca

SEQ ID NO: 3272 - RNA, 22 nt, Homo sapiens
cucucuggccgucuaccuucca

SEQ ID NO: 3273 - RNA, 22 nt, Homo sapiens
uggaagguagacggccagagag

SEQ ID NO: 3274 - RNA, 23 nt, Homo sapiens
ucugggagguuguagcaguggaa

SEQ ID NO: 3275 - RNA, 23 nt, Homo sapiens
uuccacugcuacaaccucccaga

SEQ ID NO: 3276 - RNA, 22 nt, Homo sapiens
uccugcguaggaucugaggagu

SEQ ID NO: 3277 - RNA, 22 nt, Homo sapiens
acuccucagauccuacgcagga

SEQ ID NO: 3278 - RNA, 22 nt, Homo sapiens
agcucugcugcucacuggcagu

SEQ ID NO: 3279 - RNA, 22 nt, Homo sapiens
acugccagugagcagcagagcu

SEQ ID NO: 3280 - RNA, 21 nt, Homo sapiens
ggccagccaccaggagggcug

SEQ ID NO: 3281 - RNA, 21 nt, Homo sapiens
cagcccuccugguggcuggcc

SEQ ID NO: 3282 - RNA, 17 nt, Homo sapiens
cgcgccgggcccggguu

SEQ ID NO: 3283 - RNA, 17 nt, Homo sapiens
aacccgggcccggcgcg

SEQ ID NO: 3284 - RNA, 23 nt, Homo sapiens
ggaggcgcaggcucggaaaggcg

SEQ ID NO: 3285 - RNA, 23 nt, Homo sapiens
cgccuuuccgagccugcgccucc

SEQ ID NO: 3286 - RNA, 22 nt, Homo sapiens
guggaguccuggggaauggaga

SEQ ID NO: 3287 - RNA, 22 nt, Homo sapiens
ucuccauuccccaggacuccac

SEQ ID NO: 3288 - RNA, 23 nt, Homo sapiens
agggacugccuuaggagaaaguu

SEQ ID NO: 3289 - RNA, 23 nt, Homo sapiens
aacuuucuccuaaggcagucccu

SEQ ID NO: 3290 - RNA, 17 nt, Homo sapiens
gggauaugaagaaaaau

SEQ ID NO: 3291 - RNA, 17 nt, Homo sapiens
auuuuucuucauauccc

SEQ ID NO: 3292 - RNA, 22 nt, Homo sapiens
uggaagggagaagagcuuuaau

SEQ ID NO: 3293 - RNA, 22 nt, Homo sapiens
auuaaagcucuucucccuucca

SEQ ID NO: 3294 - RNA, 22 nt, Homo sapiens
acuuuccucacucccgugaagu

SEQ ID NO: 3295 - RNA, 22 nt, Homo sapiens
acuucacgggagugaggaaagu

SEQ ID NO: 3296 - RNA, 21 nt, Homo sapiens
uucgcgggcgaaggcaaaguc

SEQ ID NO: 3297 - RNA, 21 nt, Homo sapiens
gacuuugccuucgcccgcgaa

SEQ ID NO: 3298 - RNA, 22 nt, Homo sapiens
caucuggcauccgucacacaga

SEQ ID NO: 3299 - RNA, 22 nt, Homo sapiens
ucugugugacggaugccagaug

SEQ ID NO: 3300 - RNA, 22 nt, Homo sapiens
ugagggacagaugccagaagca

SEQ ID NO: 3301 - RNA, 22 nt, Homo sapiens
ugcuucuggcaucugucccuca

SEQ ID NO: 3302 - RNA, 22 nt, Homo sapiens
aaacuaaucucuacacugcugc

SEQ ID NO: 3303 - RNA, 22 nt, Homo sapiens
gcagcaguguagagauuaguuu

SEQ ID NO: 3304 - RNA, 22 nt, Homo sapiens
gcaguaguguagagauugguuu

SEQ ID NO: 3305 - RNA, 22 nt, Homo sapiens
aaaccaaucucuacacuacugc

SEQ ID NO: 3306 - RNA, 21 nt, Homo sapiens
gcugcaccggagacuggguaa

SEQ ID NO: 3307 - RNA, 21 nt, Homo sapiens
uuacccagucuccggugcagc

SEQ ID NO: 3308 - RNA, 21 nt, Homo sapiens
uacccagucuccggugcagcc

SEQ ID NO: 3309 - RNA, 21 nt, Homo sapiens
ggcugcaccggagacugggua

SEQ ID NO: 3310 - RNA, 24 nt, Homo sapiens
uguggacagugagguagagggagu

SEQ ID NO: 3311 - RNA, 24 nt, Homo sapiens
acucccucuaccucacuguccaca

SEQ ID NO: 3312 - RNA, 22 nt, Homo sapiens
agcuuuugggaauucagguagu

SEQ ID NO: 3313 - RNA, 22 nt, Homo sapiens
acuaccugaauucccaaaagcu

SEQ ID NO: 3314 - RNA, 21 nt, Homo sapiens
accugaauuaccaaaagcuuu

SEQ ID NO: 3315 - RNA, 21 nt, Homo sapiens
aaagcuuuugguaauucaggu

SEQ ID NO: 3316 - RNA, 22 nt, Homo sapiens
auauaccuguucggucucuuua

SEQ ID NO: 3317 - RNA, 22 nt, Homo sapiens
uaaagagaccgaacagguauau

SEQ ID NO: 3318 - RNA, 22 nt, Homo sapiens
aggggaccaaagagauauauag

SEQ ID NO: 3319 - RNA, 22 nt, Homo sapiens
cuauauaucucuuugguccccu

SEQ ID NO: 3320 - RNA, 23 nt, Homo sapiens
uuuguauggauauguguguguau

SEQ ID NO: 3321 - RNA, 23 nt, Homo sapiens
auacacacacauauccauacaaa

SEQ ID NO: 3322 - RNA, 22 nt, Homo sapiens
uguguuagaauaggggcaauaa

SEQ ID NO: 3323 - RNA, 22 nt, Homo sapiens
uuauugccccuauucuaacaca

SEQ ID NO: 3324 - RNA, 22 nt, Homo sapiens
auugccucuguucuaacacaag

SEQ ID NO: 3325 - RNA, 22 nt, Homo sapiens
cuuguguuagaacagaggcaau

SEQ ID NO: 3326 - RNA, 22 nt, Homo sapiens
aagggcuuccucucugcaggac

SEQ ID NO: 3327 - RNA, 22 nt, Homo sapiens
guccugcagagaggaagcccuu

SEQ ID NO: 3328 - RNA, 21 nt, Homo sapiens
ccugcagagaggaagcccuuc

SEQ ID NO: 3329 - RNA, 21 nt, Homo sapiens
gaagggcuuccucucugcagg

SEQ ID NO: 3330 - RNA, 22 nt, Homo sapiens
aggauuucagaaauacuggugu

SEQ ID NO: 3331 - RNA, 22 nt, Homo sapiens
acaccaguauuucugaaauccu

SEQ ID NO: 3332 - RNA, 24 nt, Homo sapiens
agauguauggaaucuguauauauc

SEQ ID NO: 3333 - RNA, 24 nt, Homo sapiens
gauauauacagauuccauacaucu

SEQ ID NO: 3334 - RNA, 22 nt, Homo sapiens
cggggagagaacgcagugacgu

SEQ ID NO: 3335 - RNA, 22 nt, Homo sapiens
acgucacugcguucucuccccg

SEQ ID NO: 3336 - RNA, 19 nt, Homo sapiens
uggggcggagcuuccggag

SEQ ID NO: 3337 - RNA, 19 nt, Homo sapiens
cuccggaagcuccgcccca

SEQ ID NO: 3338 - RNA, 21 nt, Homo sapiens
ucacgcggagagauggcuuug

SEQ ID NO: 3339 - RNA, 21 nt, Homo sapiens
caaagccaucucuccgcguga

SEQ ID NO: 3340 - RNA, 22 nt, Homo sapiens
caggcgucugucuacguggcuu

SEQ ID NO: 3341 - RNA, 22 nt, Homo sapiens
aagccacguagacagacgccug

SEQ ID NO: 3342 - RNA, 22 nt, Homo sapiens
caccuugcgcuacucaggucug

SEQ ID NO: 3343 - RNA, 22 nt, Homo sapiens
cagaccugaguagcgcaaggug

SEQ ID NO: 3344 - RNA, 22 nt, Homo sapiens
aaucugagaaggcgcacaaggu

SEQ ID NO: 3345 - RNA, 22 nt, Homo sapiens
accuugugcgccuucucagauu

SEQ ID NO: 3346 - RNA, 22 nt, Homo sapiens
aaggccuuucugaaccuucaga

SEQ ID NO: 3347 - RNA, 22 nt, Homo sapiens
ucugaagguucagaaaggccuu

SEQ ID NO: 3348 - RNA, 22 nt, Homo sapiens
gugacaucacauauacggcagc

SEQ ID NO: 3349 - RNA, 22 nt, Homo sapiens
gcugccguauaugugaugucac

SEQ ID NO: 3350 - RNA, 24 nt, Homo sapiens
ucagaacaaaugccgguucccaga

SEQ ID NO: 3351 - RNA, 24 nt, Homo sapiens
ucugggaaccggcauuuguucuga

SEQ ID NO: 3352 - RNA, 22 nt, Homo sapiens
ugagaaccacgucugcucugag

SEQ ID NO: 3353 - RNA, 22 nt, Homo sapiens
cucagagcagacgugguucuca

SEQ ID NO: 3354 - RNA, 17 nt, Homo sapiens
ucauauugcuucuuucu

SEQ ID NO: 3355 - RNA, 17 nt, Homo sapiens
agaaagaagcaauauga

SEQ ID NO: 3356 - RNA, 22 nt, Homo sapiens
ugugacagauugauaacugaaa

SEQ ID NO: 3357 - RNA, 22 nt, Homo sapiens
uuucaguuaucaaucugucaca

SEQ ID NO: 3358 - RNA, 23 nt, Homo sapiens
uggaguccaggaaucugcauuuu

SEQ ID NO: 3359 - RNA, 23 nt, Homo sapiens
aaaaugcagauuccuggacucca

SEQ ID NO: 3360 - RNA, 22 nt, Homo sapiens
aagcccuuaccccaaaaaguau

SEQ ID NO: 3361 - RNA, 22 nt, Homo sapiens
auacuuuuugggguaagggcuu

SEQ ID NO: 3362 - RNA, 22 nt, Homo sapiens
aagcccuuaccccaaaaagcau

SEQ ID NO: 3363 - RNA, 22 nt, Homo sapiens
augcuuuuugggguaagggcuu

SEQ ID NO: 3364 - RNA, 22 nt, Homo sapiens
uggaauguaaggaagugugugg

SEQ ID NO: 3365 - RNA, 22 nt, Homo sapiens
ccacacacuuccuuacauucca

SEQ ID NO: 3366 - RNA, 22 nt, Homo sapiens
cuuaucagauuguauuguaauu

SEQ ID NO: 3367 - RNA, 22 nt, Homo sapiens
aauuacaauacaaucugauaag

SEQ ID NO: 3368 - RNA, 22 nt, Homo sapiens
uuauaauacaaccugauaagug

SEQ ID NO: 3369 - RNA, 22 nt, Homo sapiens
cacuuaucagguuguauuauaa

SEQ ID NO: 3370 - RNA, 22 nt, Homo sapiens
cuuagcagguuguauuaucauu

SEQ ID NO: 3371 - RNA, 22 nt, Homo sapiens
aaugauaauacaaccugcuaag

SEQ ID NO: 3372 - RNA, 22 nt, Homo sapiens
auauaauacaaccugcuaagug

SEQ ID NO: 3373 - RNA, 22 nt, Homo sapiens
cacuuagcagguuguauuauau

SEQ ID NO: 3374 - RNA, 22 nt, Homo sapiens
cacuuagcagguuguauuauau

SEQ ID NO: 3375 - RNA, 22 nt, Homo sapiens
auauaauacaaccugcuaagug

SEQ ID NO: 3376 - RNA, 22 nt, Homo sapiens
auaauacaaccugcuaagugcu

SEQ ID NO: 3377 - RNA, 22 nt, Homo sapiens
agcacuuagcagguuguauuau

SEQ ID NO: 3378 - RNA, 22 nt, Homo sapiens
uuugguccccuucaaccagcug

SEQ ID NO: 3379 - RNA, 22 nt, Homo sapiens
cagcugguugaaggggaccaaa

SEQ ID NO: 3380 - RNA, 22 nt, Homo sapiens
uuugguccccuucaaccagcua

SEQ ID NO: 3381 - RNA, 22 nt, Homo sapiens
uagcugguugaaggggaccaaa

SEQ ID NO: 3382 - RNA, 22 nt, Homo sapiens
uguaaacauccuugacuggaag

SEQ ID NO: 3383 - RNA, 22 nt, Homo sapiens
cuuccagucaaggauguuuaca

SEQ ID NO: 3384 - RNA, 22 nt, Homo sapiens
ugucaguuugucaaauacccca

SEQ ID NO: 3385 - RNA, 22 nt, Homo sapiens
ugggguauuugacaaacugaca

SEQ ID NO: 3386 - RNA, 22 nt, Homo sapiens
cguguauuugacaagcugaguu

SEQ ID NO: 3387 - RNA, 22 nt, Homo sapiens
aacucagcuugucaaauacacg

SEQ ID NO: 3388 - RNA, 21 nt, Homo sapiens
uucacaguggcuaaguuccgc

SEQ ID NO: 3389 - RNA, 21 nt, Homo sapiens
gcggaacuuagccacugugaa

SEQ ID NO: 3390 - RNA, 22 nt, Homo sapiens
agggcuuagcugcuugugagca

SEQ ID NO: 3391 - RNA, 22 nt, Homo sapiens
ugcucacaagcagcuaagcccu

SEQ ID NO: 3392 - RNA, 21 nt, Homo sapiens
aucacauugccagggauuacc

SEQ ID NO: 3393 - RNA, 21 nt, Homo sapiens
gguaaucccuggcaaugugau

SEQ ID NO: 3394 - RNA, 22 nt, Homo sapiens
uggguuccuggcaugcugauuu

SEQ ID NO: 3395 - RNA, 22 nt, Homo sapiens
aaaucagcaugccaggaaccca

SEQ ID NO: 3396 - RNA, 22 nt, Homo sapiens
cuuucagucggauguuuacagc

SEQ ID NO: 3397 - RNA, 22 nt, Homo sapiens
gcuguaaacauccgacugaaag

SEQ ID NO: 3398 - RNA, 22 nt, Homo sapiens
ugccuacugagcugauaucagu

SEQ ID NO: 3399 - RNA, 22 nt, Homo sapiens
acugauaucagcucaguaggca

SEQ ID NO: 3400 - RNA, 22 nt, Homo sapiens
ugccuacugagcugaaacacag

SEQ ID NO: 3401 - RNA, 22 nt, Homo sapiens
cuguguuucagcucaguaggca

SEQ ID NO: 3402 - RNA, 22 nt, Homo sapiens
uggcucaguucagcaggaacag

SEQ ID NO: 3403 - RNA, 22 nt, Homo sapiens
cuguuccugcugaacugagcca

SEQ ID NO: 3404 - RNA, 21 nt, Homo sapiens
uucacaguggcuaaguucugc

SEQ ID NO: 3405 - RNA, 21 nt, Homo sapiens
gcagaacuuagccacugugaa

SEQ ID NO: 3406 - RNA, 22 nt, Homo sapiens
agagcuuagcugauuggugaac

SEQ ID NO: 3407 - RNA, 22 nt, Homo sapiens
guucaccaaucagcuaagcucu

SEQ ID NO: 3408 - RNA, 23 nt, Homo sapiens
uguaguguuuccuacuuuaugga

SEQ ID NO: 3409 - RNA, 23 nt, Homo sapiens
uccauaaaguaggaaacacuaca

SEQ ID NO: 3410 - RNA, 21 nt, Homo sapiens
cauaaaguagaaagcacuacu

SEQ ID NO: 3411 - RNA, 21 nt, Homo sapiens
aguagugcuuucuacuuuaug

SEQ ID NO: 3412 - RNA, 22 nt, Homo sapiens
ugaaggucuacugugugccagg

SEQ ID NO: 3413 - RNA, 22 nt, Homo sapiens
ccuggcacacaguagaccuuca

SEQ ID NO: 3414 - RNA, 22 nt, Homo sapiens
uuguacaugguaggcuuucauu

SEQ ID NO: 3415 - RNA, 22 nt, Homo sapiens
aaugaaagccuaccauguacaa

SEQ ID NO: 3416 - RNA, 21 nt, Homo sapiens
cuggauggcuccuccaugucu

SEQ ID NO: 3417 - RNA, 21 nt, Homo sapiens
agacauggaggagccauccag

SEQ ID NO: 3418 - RNA, 23 nt, Homo sapiens
ucuuggaguaggucauugggugg

SEQ ID NO: 3419 - RNA, 23 nt, Homo sapiens
ccacccaaugaccuacuccaaga

SEQ ID NO: 3420 - RNA, 22 nt, Homo sapiens
cucaucugcaaagaaguaagug

SEQ ID NO: 3421 - RNA, 22 nt, Homo sapiens
cacuuacuucuuugcagaugag

SEQ ID NO: 3422 - RNA, 22 nt, Homo sapiens
aacuguuugcagaggaaacuga

SEQ ID NO: 3423 - RNA, 22 nt, Homo sapiens
ucaguuuccucugcaaacaguu

SEQ ID NO: 3424 - RNA, 22 nt, Homo sapiens
cuugguucagggagggucccca

SEQ ID NO: 3425 - RNA, 22 nt, Homo sapiens
uggggacccucccugaaccaag

SEQ ID NO: 3426 - RNA, 22 nt, Homo sapiens
aggaccuucccugaaccaagga

SEQ ID NO: 3427 - RNA, 22 nt, Homo sapiens
uccuugguucagggaagguccu

SEQ ID NO: 3428 - RNA, 21 nt, Homo sapiens
accuccugugugcauggauua

SEQ ID NO: 3429 - RNA, 21 nt, Homo sapiens
uaauccaugcacacaggaggu

SEQ ID NO: 3430 - RNA, 22 nt, Homo sapiens
uacccauugcauaucggaguug

SEQ ID NO: 3431 - RNA, 22 nt, Homo sapiens
caacuccgauaugcaaugggua

SEQ ID NO: 3432 - RNA, 18 nt, Homo sapiens
aaagcuggguugagaagg

SEQ ID NO: 3433 - RNA, 18 nt, Homo sapiens
ccuucucaacccagcuuu

SEQ ID NO: 3434 - RNA, 20 nt, Homo sapiens
gguauccguuuggggauggu

SEQ ID NO: 3435 - RNA, 20 nt, Homo sapiens
accauccccaaacggauacc

SEQ ID NO: 3436 - RNA, 22 nt, Homo sapiens
gaaggcagcagugcuccccugu

SEQ ID NO: 3437 - RNA, 22 nt, Homo sapiens
acaggggagcacugcugccuuc

SEQ ID NO: 3438 - RNA, 22 nt, Homo sapiens
ucagugcaucacagaacuuugu

SEQ ID NO: 3439 - RNA, 22 nt, Homo sapiens
acaaaguucugugaugcacuga

SEQ ID NO: 3440 - RNA, 22 nt, Homo sapiens
aaguucuguuauacacucaggc

SEQ ID NO: 3441 - RNA, 22 nt, Homo sapiens
gccugaguguauaacagaacuu

SEQ ID NO: 3442 - RNA, 22 nt, Homo sapiens
cuggcccucucugcccuuccgu

SEQ ID NO: 3443 - RNA, 22 nt, Homo sapiens
acggaagggcagagagggccag

SEQ ID NO: 3444 - RNA, 21 nt, Homo sapiens
cuagacugaagcuccuugagg

SEQ ID NO: 3445 - RNA, 21 nt, Homo sapiens
ccucaaggagcuucagucuag

SEQ ID NO: 3446 - RNA, 21 nt, Homo sapiens
ucgaggagcucacagucuagu

SEQ ID NO: 3447 - RNA, 21 nt, Homo sapiens
acuagacugugagcuccucga

SEQ ID NO: 3448 - RNA, 21 nt, Homo sapiens
cacauuacacggucgaccucu

SEQ ID NO: 3449 - RNA, 21 nt, Homo sapiens
agaggucgaccguguaaugug

SEQ ID NO: 3450 - RNA, 22 nt, Homo sapiens
aggugguccguggcgcguucgc

SEQ ID NO: 3451 - RNA, 22 nt, Homo sapiens
gcgaacgcgccacggaccaccu

SEQ ID NO: 3452 - RNA, 23 nt, Homo sapiens
cgcauccccuagggcauuggugu

SEQ ID NO: 3453 - RNA, 23 nt, Homo sapiens
acaccaaugcccuaggggaugcg

SEQ ID NO: 3454 - RNA, 20 nt, Homo sapiens
ccucugggcccuuccuccag

SEQ ID NO: 3455 - RNA, 20 nt, Homo sapiens
cuggaggaagggcccagagg

SEQ ID NO: 3456 - RNA, 23 nt, Homo sapiens
ccuaguagguguccaguaagugu

SEQ ID NO: 3457 - RNA, 23 nt, Homo sapiens
acacuuacuggacaccuacuagg

SEQ ID NO: 3458 - RNA, 21 nt, Homo sapiens
acggugcuggauguggccuuu

SEQ ID NO: 3459 - RNA, 21 nt, Homo sapiens
aaaggccacauccagcaccgu

SEQ ID NO: 3460 - RNA, 23 nt, Homo sapiens
ucagcaccaggauauuguuggag

SEQ ID NO: 3461 - RNA, 23 nt, Homo sapiens
cuccaacaauauccuggugcuga

SEQ ID NO: 3462 - RNA, 23 nt, Homo sapiens
ucaacaaaaucacugaugcugga

SEQ ID NO: 3463 - RNA, 23 nt, Homo sapiens
uccagcaucagugauuuuguuga

SEQ ID NO: 3464 - RNA, 22 nt, Homo sapiens
aacaauauccuggugcugagug

SEQ ID NO: 3465 - RNA, 22 nt, Homo sapiens
cacucagcaccaggauauuguu

SEQ ID NO: 3466 - RNA, 23 nt, Homo sapiens
ggcagguucucacccucucuagg

SEQ ID NO: 3467 - RNA, 23 nt, Homo sapiens
ccuagagagggugagaaccugcc

SEQ ID NO: 3468 - RNA, 23 nt, Homo sapiens
gacacgggcgacagcugcggccc

SEQ ID NO: 3469 - RNA, 23 nt, Homo sapiens
gggccgcagcugucgcccguguc

SEQ ID NO: 3470 - RNA, 21 nt, Homo sapiens
auguaugugugcaugugcaug

SEQ ID NO: 3471 - RNA, 21 nt, Homo sapiens
caugcacaugcacacauacau

SEQ ID NO: 3472 - RNA, 22 nt, Homo sapiens
uauacaagggcagacucucucu

SEQ ID NO: 3473 - RNA, 22 nt, Homo sapiens
agagagagucugcccuuguaua

SEQ ID NO: 3474 - RNA, 20 nt, Homo sapiens
ggcggcggcggaggcggggg

SEQ ID NO: 3475 - RNA, 20 nt, Homo sapiens
cccccgccuccgccgccgcc

SEQ ID NO: 3476 - RNA, 22 nt, Homo sapiens
gcaggugcucacuuguccuccu

SEQ ID NO: 3477 - RNA, 22 nt, Homo sapiens
aggaggacaagugagcaccugc

SEQ ID NO: 3478 - RNA, 19 nt, Homo sapiens
ggggccuggcggugggcgg

SEQ ID NO: 3479 - RNA, 19 nt, Homo sapiens
ccgcccaccgccaggcccc

SEQ ID NO: 3480 - RNA, 22 nt, Homo sapiens
gcccaaaggugaauuuuuuggg

SEQ ID NO: 3481 - RNA, 22 nt, Homo sapiens
cccaaaaaauucaccuuugggc

SEQ ID NO: 3482 - RNA, 22 nt, Homo sapiens
caaagaauucuccuuuugggcu

SEQ ID NO: 3483 - RNA, 22 nt, Homo sapiens
agcccaaaaggagaauucuuug

SEQ ID NO: 3484 - RNA, 22 nt, Homo sapiens
cugcaauguaagcacuucuuac

SEQ ID NO: 3485 - RNA, 22 nt, Homo sapiens
guaagaagugcuuacauugcag

SEQ ID NO: 3486 - RNA, 23 nt, Homo sapiens
aaaagugcuuacagugcagguag

SEQ ID NO: 3487 - RNA, 23 nt, Homo sapiens
cuaccugcacuguaagcacuuuu

SEQ ID NO: 3488 - RNA, 22 nt, Homo sapiens
acuguaguaugggcacuuccag

SEQ ID NO: 3489 - RNA, 22 nt, Homo sapiens
cuggaagugcccauacuacagu

SEQ ID NO: 3490 - RNA, 23 nt, Homo sapiens
caaagugcucauagugcagguag

SEQ ID NO: 3491 - RNA, 23 nt, Homo sapiens
cuaccugcacuaugagcacuuug

SEQ ID NO: 3492 - RNA, 23 nt, Homo sapiens
gggguauuguuuccgcugccagg

SEQ ID NO: 3493 - RNA, 23 nt, Homo sapiens
ccuggcagcggaaacaauacccc

SEQ ID NO: 3494 - RNA, 23 nt, Homo sapiens
uagcagcgggaacaguucugcag

SEQ ID NO: 3495 - RNA, 23 nt, Homo sapiens
cugcagaacuguucccgcugcua

SEQ ID NO: 3496 - RNA, 21 nt, Homo sapiens
cgagccucaagcaagggacuu

SEQ ID NO: 3497 - RNA, 21 nt, Homo sapiens
aagucccuugcuugaggcucg

SEQ ID NO: 3498 - RNA, 22 nt, Homo sapiens
uagucccuuccuugaagcgguc

SEQ ID NO: 3499 - RNA, 22 nt, Homo sapiens
gaccgcuucaaggaagggacua

SEQ ID NO: 3500 - RNA, 21 nt, Homo sapiens
acuggacuuggagucagaagg

SEQ ID NO: 3501 - RNA, 21 nt, Homo sapiens
ccuucugacuccaaguccagu

SEQ ID NO: 3502 - RNA, 22 nt, Homo sapiens
cuccugacuccagguccugugu

SEQ ID NO: 3503 - RNA, 22 nt, Homo sapiens
acacaggaccuggagucaggag

SEQ ID NO: 3504 - RNA, 22 nt, Homo sapiens
uuuguucguucggcucgcguga

SEQ ID NO: 3505 - RNA, 22 nt, Homo sapiens
ucacgcgagccgaacgaacaaa

SEQ ID NO: 3506 - RNA, 22 nt, Homo sapiens
acggauguuugagcaugugcua

SEQ ID NO: 3507 - RNA, 22 nt, Homo sapiens
uagcacaugcucaaacauccgu

SEQ ID NO: 3508 - RNA, 23 nt, Homo sapiens
ucaaaugcucagacuccuguggu

SEQ ID NO: 3509 - RNA, 23 nt, Homo sapiens
accacaggagucugagcauuuga

SEQ ID NO: 3510 - RNA, 22 nt, Homo sapiens
cggcaacaagaaacugccugag

SEQ ID NO: 3511 - RNA, 22 nt, Homo sapiens
cucaggcaguuucuuguugccg

SEQ ID NO: 3512 - RNA, 22 nt, Homo sapiens
uagguaguuucauguuguuggg

SEQ ID NO: 3513 - RNA, 22 nt, Homo sapiens
cccaacaacaugaaacuaccua

SEQ ID NO: 3514 - RNA, 22 nt, Homo sapiens
caauguuuccacagugcaucac

SEQ ID NO: 3515 - RNA, 22 nt, Homo sapiens
gugaugcacuguggaaacauug

SEQ ID NO: 3516 - RNA, 21 nt, Homo sapiens
gugcauuguaguugcauugca

SEQ ID NO: 3517 - RNA, 21 nt, Homo sapiens
ugcaaugcaacuacaaugcac

SEQ ID NO: 3518 - RNA, 18 nt, Homo sapiens
aucccaccucugccacca

SEQ ID NO: 3519 - RNA, 18 nt, Homo sapiens
ugguggcagaggugggau

SEQ ID NO: 3520 - RNA, 19 nt, Homo sapiens
aucccaccacugccaccau

SEQ ID NO: 3521 - RNA, 19 nt, Homo sapiens
augguggcaguggugggau

SEQ ID NO: 3522 - RNA, 22 nt, Homo sapiens
accuuccucuccaugggucuuu

SEQ ID NO: 3523 - RNA, 22 nt, Homo sapiens
aaagacccauggagaggaaggu

SEQ ID NO: 3524 - RNA, 22 nt, Homo sapiens
aaagacccauugaggagaaggu

SEQ ID NO: 3525 - RNA, 22 nt, Homo sapiens
accuucuccucaaugggucuuu

SEQ ID NO: 3526 - RNA, 21 nt, Homo sapiens
aauguagagauugaucaaaau

SEQ ID NO: 3527 - RNA, 21 nt, Homo sapiens
auuuugaucaaucucuacauu

SEQ ID NO: 3528 - RNA, 23 nt, Homo sapiens
acggaauauguauacggaauaua

SEQ ID NO: 3529 - RNA, 23 nt, Homo sapiens
uauauuccguauacauauuccgu

SEQ ID NO: 3530 - RNA, 24 nt, Homo sapiens
agagcucacagcuguccuucucua

SEQ ID NO: 3531 - RNA, 24 nt, Homo sapiens
uagagaaggacagcugugagcucu

SEQ ID NO: 3532 - RNA, 22 nt, Homo sapiens
aucaaauaaggacuagucugca

SEQ ID NO: 3533 - RNA, 22 nt, Homo sapiens
ugcagacuaguccuuauuugau

SEQ ID NO: 3534 - RNA, 23 nt, Homo sapiens
augagacucauguaaaacaucuu

SEQ ID NO: 3535 - RNA, 23 nt, Homo sapiens
aagauguuuuacaugagucucau

SEQ ID NO: 3536 - RNA, 21 nt, Homo sapiens
auggaauguauauacggaaua

SEQ ID NO: 3537 - RNA, 21 nt, Homo sapiens
uauuccguauauacauuccau

SEQ ID NO: 3538 - RNA, 22 nt, Homo sapiens
auuguagaaccuaagauuggcc

SEQ ID NO: 3539 - RNA, 22 nt, Homo sapiens
ggccaaucuuagguucuacaau

SEQ ID NO: 3540 - RNA, 22 nt, Homo sapiens
caucucuaaggaacucccccaa

SEQ ID NO: 3541 - RNA, 22 nt, Homo sapiens
uugggggaguuccuuagagaug

SEQ ID NO: 3542 - RNA, 23 nt, Homo sapiens
uauggggcuucuguagagauuuc

SEQ ID NO: 3543 - RNA, 23 nt, Homo sapiens
gaaaucucuacagaagccccaua

SEQ ID NO: 3544 - RNA, 20 nt, Homo sapiens
ccguguuucccccacgcuuu

SEQ ID NO: 3545 - RNA, 20 nt, Homo sapiens
aaagcgugggggaaacacgg

SEQ ID NO: 3546 - RNA, 15 nt, Homo sapiens
aggagauccuggguu

SEQ ID NO: 3547 - RNA, 15 nt, Homo sapiens
aacccaggaucuccu

SEQ ID NO: 3548 - RNA, 22 nt, Homo sapiens
cucgugggcucuggccacggcc

SEQ ID NO: 3549 - RNA, 22 nt, Homo sapiens
ggccguggccagagcccacgag

SEQ ID NO: 3550 - RNA, 22 nt, Homo sapiens
caguggccagagcccugcagug

SEQ ID NO: 3551 - RNA, 22 nt, Homo sapiens
cacugcagggcucuggccacug

SEQ ID NO: 3552 - RNA, 22 nt, Homo sapiens
cugcagaguuuguacggaccgg

SEQ ID NO: 3553 - RNA, 22 nt, Homo sapiens
ccgguccguacaaacucugcag

SEQ ID NO: 3554 - RNA, 20 nt, Homo sapiens
uccguacaaacucugcugug

SEQ ID NO: 3555 - RNA, 20 nt, Homo sapiens
cacagcagaguuuguacgga

SEQ ID NO: 3556 - RNA, 22 nt, Homo sapiens
cuuccccccaguaaucuucauc

SEQ ID NO: 3557 - RNA, 22 nt, Homo sapiens
gaugaagauuacuggggggaag

SEQ ID NO: 3558 - RNA, 23 nt, Homo sapiens
ugaggauauggcagggaagggga

SEQ ID NO: 3559 - RNA, 23 nt, Homo sapiens
uccccuucccugccauauccuca

SEQ ID NO: 3560 - RNA, 23 nt, Homo sapiens
uuuugcaugacccugggaguagg

SEQ ID NO: 3561 - RNA, 23 nt, Homo sapiens
ccuacucccagggucaugcaaaa

SEQ ID NO: 3562 - RNA, 22 nt, Homo sapiens
gacucacucacaggauugugca

SEQ ID NO: 3563 - RNA, 22 nt, Homo sapiens
ugcacaauccugugagugaguc

SEQ ID NO: 3564 - RNA, 22 nt, Homo sapiens
acacagugcuucauccacuacu

SEQ ID NO: 3565 - RNA, 22 nt, Homo sapiens
aguaguggaugaagcacugugu

SEQ ID NO: 3566 - RNA, 22 nt, Homo sapiens
uaguggaugaugcacucugugc

SEQ ID NO: 3567 - RNA, 22 nt, Homo sapiens
gcacagagugcaucauccacua

SEQ ID NO: 3568 - RNA, 21 nt, Homo sapiens
ugaugauacagguggagguag

SEQ ID NO: 3569 - RNA, 21 nt, Homo sapiens
cuaccuccaccuguaucauca

SEQ ID NO: 3570 - RNA, 22 nt, Homo sapiens
cuacuucuaccuguguuaucau

SEQ ID NO: 3571 - RNA, 22 nt, Homo sapiens
augauaacacagguagaaguag

SEQ ID NO: 3572 - RNA, 22 nt, Homo sapiens
ugcgacauuggaaguaguauca

SEQ ID NO: 3573 - RNA, 22 nt, Homo sapiens
ugauacuacuuccaaugucgca

SEQ ID NO: 3574 - RNA, 21 nt, Homo sapiens
uuagaccuaguacacguccuu

SEQ ID NO: 3575 - RNA, 21 nt, Homo sapiens
aaggacguguacuaggucuaa

SEQ ID NO: 3576 - RNA, 22 nt, Homo sapiens
uuuccuacccuaccugaagacu

SEQ ID NO: 3577 - RNA, 22 nt, Homo sapiens
agucuucagguaggguaggaaa

SEQ ID NO: 3578 - RNA, 22 nt, Homo sapiens
aucuguaagagaaaguaaauga

SEQ ID NO: 3579 - RNA, 22 nt, Homo sapiens
ucauuuacuuucucuuacagau

SEQ ID NO: 3580 - RNA, 24 nt, Homo sapiens
cccggacaggcguucgugcgacgu

SEQ ID NO: 3581 - RNA, 24 nt, Homo sapiens
acgucgcacgaacgccuguccggg

SEQ ID NO: 3582 - RNA, 23 nt, Homo sapiens
accuggacccagcguagacaaag

SEQ ID NO: 3583 - RNA, 23 nt, Homo sapiens
cuuugucuacgcuggguccaggu

SEQ ID NO: 3584 - RNA, 22 nt, Homo sapiens
accaagucugcgucauccucuc

SEQ ID NO: 3585 - RNA, 22 nt, Homo sapiens
gagaggaugacgcagacuuggu

SEQ ID NO: 3586 - RNA, 23 nt, Homo sapiens
aguggaugauggagacucgguac

SEQ ID NO: 3587 - RNA, 23 nt, Homo sapiens
guaccgagucuccaucauccacu

SEQ ID NO: 3588 - RNA, 24 nt, Homo sapiens
guuccacacugacacugcagaagu

SEQ ID NO: 3589 - RNA, 24 nt, Homo sapiens
acuucugcagugucaguguggaac

SEQ ID NO: 3590 - RNA, 24 nt, Homo sapiens
ccugcuggucaggaguggauacug

SEQ ID NO: 3591 - RNA, 24 nt, Homo sapiens
caguauccacuccugaccagcagg

SEQ ID NO: 3592 - RNA, 23 nt, Homo sapiens
gagggucuugggagggaugugac

SEQ ID NO: 3593 - RNA, 23 nt, Homo sapiens
gucacaucccucccaagacccuc

SEQ ID NO: 3594 - RNA, 22 nt, Homo sapiens
auauacagggggagacucuuau

SEQ ID NO: 3595 - RNA, 22 nt, Homo sapiens
auaagagucucccccuguauau

SEQ ID NO: 3596 - RNA, 22 nt, Homo sapiens
auauacagggggagacucucau

SEQ ID NO: 3597 - RNA, 22 nt, Homo sapiens
augagagucucccccuguauau

SEQ ID NO: 3598 - RNA, 21 nt, Homo sapiens
agaggauacccuuuguauguu

SEQ ID NO: 3599 - RNA, 21 nt, Homo sapiens
aacauacaaaggguauccucu

SEQ ID NO: 3600 - RNA, 22 nt, Homo sapiens
ucuacaaaggaaagcgcuuucu

SEQ ID NO: 3601 - RNA, 22 nt, Homo sapiens
agaaagcgcuuuccuuuguaga

SEQ ID NO: 3602 - RNA, 22 nt, Homo sapiens
ucaaaacugaggggcauuuucu

SEQ ID NO: 3603 - RNA, 22 nt, Homo sapiens
agaaaaugccccucaguuuuga

SEQ ID NO: 3604 - RNA, 24 nt, Homo sapiens
uucuccaaaagaaagcacuuucug

SEQ ID NO: 3605 - RNA, 24 nt, Homo sapiens
cagaaagugcuuucuuuuggagaa

SEQ ID NO: 3606 - RNA, 23 nt, Homo sapiens
uucucgaggaaagaagcacuuuc

SEQ ID NO: 3607 - RNA, 23 nt, Homo sapiens
gaaagugcuucuuuccucgagaa

SEQ ID NO: 3608 - RNA, 22 nt, Homo sapiens
ccucuagauggaagcacugucu

SEQ ID NO: 3609 - RNA, 22 nt, Homo sapiens
agacagugcuuccaucuagagg

SEQ ID NO: 3610 - RNA, 22 nt, Homo sapiens
aucgugcaucccuuuagagugu

SEQ ID NO: 3611 - RNA, 22 nt, Homo sapiens
acacucuaaagggaugcacgau

SEQ ID NO: 3612 - RNA, 22 nt, Homo sapiens
aucgugcaucccuuuagagugu

SEQ ID NO: 3613 - RNA, 22 nt, Homo sapiens
acacucuaaagggaugcacgau

SEQ ID NO: 3614 - RNA, 22 nt, Homo sapiens
aucgugcauccuuuuagagugu

SEQ ID NO: 3615 - RNA, 22 nt, Homo sapiens
acacucuaaaaggaugcacgau

SEQ ID NO: 3616 - RNA, 22 nt, Homo sapiens
caaagcgcuccccuuuagaggu

SEQ ID NO: 3617 - RNA, 22 nt, Homo sapiens
accucuaaaggggagcgcuuug

SEQ ID NO: 3618 - RNA, 23 nt, Homo sapiens
caaagcgcuucucuuuagagugu

SEQ ID NO: 3619 - RNA, 23 nt, Homo sapiens
acacucuaaagagaagcgcuuug

SEQ ID NO: 3620 - RNA, 23 nt, Homo sapiens
ucucuggagggaagcacuuucug

SEQ ID NO: 3621 - RNA, 23 nt, Homo sapiens
cagaaagugcuucccuccagaga

SEQ ID NO: 3622 - RNA, 21 nt, Homo sapiens
gaaagcgcuucucuuuagagg

SEQ ID NO: 3623 - RNA, 21 nt, Homo sapiens
ccucuaaagagaagcgcuuuc

SEQ ID NO: 3624 - RNA, 22 nt, Homo sapiens
cucuagagggaagcacuuucuc

SEQ ID NO: 3625 - RNA, 22 nt, Homo sapiens
gagaaagugcuucccucuagag

SEQ ID NO: 3626 - RNA, 22 nt, Homo sapiens
aaagugcauccuuuuagagugu

SEQ ID NO: 3627 - RNA, 22 nt, Homo sapiens
acacucuaaaaggaugcacuuu

SEQ ID NO: 3628 - RNA, 22 nt, Homo sapiens
cucuagagggaagcgcuuucug

SEQ ID NO: 3629 - RNA, 22 nt, Homo sapiens
cagaaagcgcuucccucuagag

SEQ ID NO: 3630 - RNA, 22 nt, Homo sapiens
caaagugccucccuuuagagug

SEQ ID NO: 3631 - RNA, 22 nt, Homo sapiens
cacucuaaagggaggcacuuug

SEQ ID NO: 3632 - RNA, 22 nt, Homo sapiens
aagugccuccuuuuagaguguu

SEQ ID NO: 3633 - RNA, 22 nt, Homo sapiens
aacacucuaaaaggaggcacuu

SEQ ID NO: 3634 - RNA, 22 nt, Homo sapiens
uucuccaaaagggagcacuuuc

SEQ ID NO: 3635 - RNA, 22 nt, Homo sapiens
gaaagugcucccuuuuggagaa

SEQ ID NO: 3636 - RNA, 22 nt, Homo sapiens
aaagugcuucccuuuggacugu

SEQ ID NO: 3637 - RNA, 22 nt, Homo sapiens
acaguccaaagggaagcacuuu

SEQ ID NO: 3638 - RNA, 21 nt, Homo sapiens
cuccagagggaaguacuuucu

SEQ ID NO: 3639 - RNA, 21 nt, Homo sapiens
agaaaguacuucccucuggag

SEQ ID NO: 3640 - RNA, 22 nt, Homo sapiens
acaaagugcuucccuuuagagu

SEQ ID NO: 3641 - RNA, 22 nt, Homo sapiens
acucuaaagggaagcacuuugu

SEQ ID NO: 3642 - RNA, 22 nt, Homo sapiens
cuacaaagggaagcacuuucuc

SEQ ID NO: 3643 - RNA, 22 nt, Homo sapiens
gagaaagugcuucccuuuguag

SEQ ID NO: 3644 - RNA, 22 nt, Homo sapiens
gaaggcgcuucccuuuagagcg

SEQ ID NO: 3645 - RNA, 22 nt, Homo sapiens
cgcucuaaagggaagcgccuuc

SEQ ID NO: 3646 - RNA, 21 nt, Homo sapiens
cuccagagggaugcacuuucu

SEQ ID NO: 3647 - RNA, 21 nt, Homo sapiens
agaaagugcaucccucuggag

SEQ ID NO: 3648 - RNA, 22 nt, Homo sapiens
cucuagagggaagcacuuucug

SEQ ID NO: 3649 - RNA, 22 nt, Homo sapiens
cagaaagugcuucccucuagag

SEQ ID NO: 3650 - RNA, 22 nt, Homo sapiens
gaaagugcuuccuuuuagaggc

SEQ ID NO: 3651 - RNA, 22 nt, Homo sapiens
gccucuaaaaggaagcacuuuc

SEQ ID NO: 3652 - RNA, 23 nt, Homo sapiens
cucuugagggaagcacuuucugu

SEQ ID NO: 3653 - RNA, 23 nt, Homo sapiens
acagaaagugcuucccucaagag

SEQ ID NO: 3654 - RNA, 22 nt, Homo sapiens
acuggacuuagggucagaaggc

SEQ ID NO: 3655 - RNA, 22 nt, Homo sapiens
gccuucugacccuaaguccagu

SEQ ID NO: 3656 - RNA, 22 nt, Homo sapiens
aaacaaacauggugcacuucuu

SEQ ID NO: 3657 - RNA, 22 nt, Homo sapiens
aagaagugcaccauguuuguuu

SEQ ID NO: 3658 - RNA, 22 nt, Homo sapiens
gaaguugcccauguuauuuucg

SEQ ID NO: 3659 - RNA, 22 nt, Homo sapiens
cgaaaauaacaugggcaacuuc

SEQ ID NO: 3660 - RNA, 21 nt, Homo sapiens
aaucauucacggacaacacuu

SEQ ID NO: 3661 - RNA, 21 nt, Homo sapiens
aaguguuguccgugaaugauu

SEQ ID NO: 3662 - RNA, 22 nt, Homo sapiens
gaaguuguucgugguggauucg

SEQ ID NO: 3663 - RNA, 22 nt, Homo sapiens
cgaauccaccacgaacaacuuc

SEQ ID NO: 3664 - RNA, 23 nt, Homo sapiens
ccuccguguuaccuguccucuag

SEQ ID NO: 3665 - RNA, 23 nt, Homo sapiens
cuagaggacagguaacacggagg

SEQ ID NO: 3666 - RNA, 23 nt, Homo sapiens
ugaggauggauagcaaggaagcc

SEQ ID NO: 3667 - RNA, 23 nt, Homo sapiens
ggcuuccuugcuauccauccuca

SEQ ID NO: 3668 - RNA, 22 nt, Homo sapiens
uucagaucccagcggugccucu

SEQ ID NO: 3669 - RNA, 22 nt, Homo sapiens
agaggcaccgcugggaucugaa

SEQ ID NO: 3670 - RNA, 19 nt, Homo sapiens
guccuaggaggcuccucug

SEQ ID NO: 3671 - RNA, 19 nt, Homo sapiens
cagaggagccuccuaggac

SEQ ID NO: 3672 - RNA, 21 nt, Homo sapiens
caauucucaaaggagccuccc

SEQ ID NO: 3673 - RNA, 21 nt, Homo sapiens
gggaggcuccuuugagaauug

SEQ ID NO: 3674 - RNA, 21 nt, Homo sapiens
guuggggugcaggggucugcu

SEQ ID NO: 3675 - RNA, 21 nt, Homo sapiens
agcagaccccugcaccccaac

SEQ ID NO: 3676 - RNA, 22 nt, Homo sapiens
uuuccggcucgcgugggugugu

SEQ ID NO: 3677 - RNA, 22 nt, Homo sapiens
acacacccacgcgagccggaaa

SEQ ID NO: 3678 - RNA, 23 nt, Homo sapiens
ugagugugugugugugagugugu

SEQ ID NO: 3679 - RNA, 23 nt, Homo sapiens
acacacucacacacacacacuca

SEQ ID NO: 3680 - RNA, 22 nt, Homo sapiens
agugggaggccagggcacggca

SEQ ID NO: 3681 - RNA, 22 nt, Homo sapiens
ugccgugcccuggccucccacu

SEQ ID NO: 3682 - RNA, 20 nt, Homo sapiens
ugagcccuguccucccgcag

SEQ ID NO: 3683 - RNA, 20 nt, Homo sapiens
cugcgggaggacagggcuca

SEQ ID NO: 3684 - RNA, 23 nt, Homo sapiens
aagugccgccaucuuuugagugu

SEQ ID NO: 3685 - RNA, 23 nt, Homo sapiens
acacucaaaagauggcggcacuu

SEQ ID NO: 3686 - RNA, 20 nt, Homo sapiens
acucaaacugugggggcacu

SEQ ID NO: 3687 - RNA, 20 nt, Homo sapiens
agugcccccacaguuugagu

SEQ ID NO: 3688 - RNA, 23 nt, Homo sapiens
aagugcccccacaguuugagugc

SEQ ID NO: 3689 - RNA, 23 nt, Homo sapiens
gcacucaaacugugggggcacuu

SEQ ID NO: 3690 - RNA, 22 nt, Homo sapiens
acucaaaagauggcggcacuuu

SEQ ID NO: 3691 - RNA, 22 nt, Homo sapiens
aaagugccgccaucuuuugagu

SEQ ID NO: 3692 - RNA, 22 nt, Homo sapiens
aaaccuguguuguucaagaguc

SEQ ID NO: 3693 - RNA, 22 nt, Homo sapiens
gacucuugaacaacacagguuu

SEQ ID NO: 3694 - RNA, 22 nt, Homo sapiens
acaguagagggaggaaucgcag

SEQ ID NO: 3695 - RNA, 22 nt, Homo sapiens
cugcgauuccucccucuacugu

SEQ ID NO: 3696 - RNA, 22 nt, Homo sapiens
gugaaauguuuaggaccacuag

SEQ ID NO: 3697 - RNA, 22 nt, Homo sapiens
cuagugguccuaaacauuucac

SEQ ID NO: 3698 - RNA, 23 nt, Homo sapiens
uugaacuguuaagaaccacugga

SEQ ID NO: 3699 - RNA, 23 nt, Homo sapiens
uccagugguucuuaacaguucaa

SEQ ID NO: 3700 - RNA, 22 nt, Homo sapiens
uagugguccuaaacauuucaca

SEQ ID NO: 3701 - RNA, 22 nt, Homo sapiens
ugugaaauguuuaggaccacua

SEQ ID NO: 3702 - RNA, 21 nt, Homo sapiens
ugcaggaccaagaugagcccu

SEQ ID NO: 3703 - RNA, 21 nt, Homo sapiens
agggcucaucuugguccugca

SEQ ID NO: 3704 - RNA, 21 nt, Homo sapiens
cucccacaugcaggguuugca

SEQ ID NO: 3705 - RNA, 21 nt, Homo sapiens
ugcaaacccugcaugugggag

SEQ ID NO: 3706 - RNA, 21 nt, Homo sapiens
caucccuugcaugguggaggg

SEQ ID NO: 3707 - RNA, 21 nt, Homo sapiens
cccuccaccaugcaagggaug

SEQ ID NO: 3708 - RNA, 22 nt, Homo sapiens
aaaaugaaaugagcccagccca

SEQ ID NO: 3709 - RNA, 22 nt, Homo sapiens
ugggcugggcucauuucauuuu

SEQ ID NO: 3710 - RNA, 21 nt, Homo sapiens
agccgcggggaucgccgaggg

SEQ ID NO: 3711 - RNA, 21 nt, Homo sapiens
cccucggcgauccccgcggcu

SEQ ID NO: 3712 - RNA, 19 nt, Homo sapiens
agggaccugagugucuaag

SEQ ID NO: 3713 - RNA, 19 nt, Homo sapiens
cuuagacacucaggucccu

SEQ ID NO: 3714 - RNA, 19 nt, Homo sapiens
aggugugucuguagagucc

SEQ ID NO: 3715 - RNA, 19 nt, Homo sapiens
ggacucuacagacacaccu

SEQ ID NO: 3716 - RNA, 24 nt, Homo sapiens
cauagcccggucgcugguacauga

SEQ ID NO: 3717 - RNA, 24 nt, Homo sapiens
ucauguaccagcgaccgggcuaug

SEQ ID NO: 3718 - RNA, 18 nt, Homo sapiens
cggcuggaggugugagga

SEQ ID NO: 3719 - RNA, 18 nt, Homo sapiens
uccucacaccuccagccg

SEQ ID NO: 3720 - RNA, 18 nt, Homo sapiens
cuaagaaguugacugaag

SEQ ID NO: 3721 - RNA, 18 nt, Homo sapiens
cuucagucaacuucuuag

SEQ ID NO: 3722 - RNA, 19 nt, Homo sapiens
gacuggacaagcugaggaa

SEQ ID NO: 3723 - RNA, 19 nt, Homo sapiens
uuccucagcuuguccaguc

SEQ ID NO: 3724 - RNA, 21 nt, Homo sapiens
gcuugucgcugcgguguugcu

SEQ ID NO: 3725 - RNA, 21 nt, Homo sapiens
agcaacaccgcagcgacaagc

SEQ ID NO: 3726 - RNA, 17 nt, Homo sapiens
ggcgggugcgggggugg

SEQ ID NO: 3727 - RNA, 17 nt, Homo sapiens
ccacccccgcacccgcc

SEQ ID NO: 3728 - RNA, 21 nt, Homo sapiens
ugugucccauuauuggugauu

SEQ ID NO: 3729 - RNA, 21 nt, Homo sapiens
aaucaccaauaaugggacaca

SEQ ID NO: 3730 - RNA, 22 nt, Homo sapiens
uuuaagaaaacaccauggagau

SEQ ID NO: 3731 - RNA, 22 nt, Homo sapiens
aucuccaugguguuuucuuaaa

SEQ ID NO: 3732 - RNA, 22 nt, Homo sapiens
gcuauuucacgacaccaggguu

SEQ ID NO: 3733 - RNA, 22 nt, Homo sapiens
aacccuggugucgugaaauagc

SEQ ID NO: 3734 - RNA, 23 nt, Homo sapiens
agcugguguugugaaucaggccg

SEQ ID NO: 3735 - RNA, 23 nt, Homo sapiens
cggccugauucacaacaccagcu

SEQ ID NO: 3736 - RNA, 21 nt, Homo sapiens
aauaauacaugguugaucuuu

SEQ ID NO: 3737 - RNA, 21 nt, Homo sapiens
aaagaucaaccauguauuauu

SEQ ID NO: 3738 - RNA, 22 nt, Homo sapiens
agaucgaccguguuauauucgc

SEQ ID NO: 3739 - RNA, 22 nt, Homo sapiens
gcgaauauaacacggucgaucu

SEQ ID NO: 3740 - RNA, 22 nt, Homo sapiens
aaucaugugcagugccaauaug

SEQ ID NO: 3741 - RNA, 22 nt, Homo sapiens
cauauuggcacugcacaugauu

SEQ ID NO: 3742 - RNA, 23 nt, Homo sapiens
uuuggcacuagcacauuuuugcu

SEQ ID NO: 3743 - RNA, 23 nt, Homo sapiens
agcaaaaaugugcuagugccaaa

SEQ ID NO: 3744 - RNA, 22 nt, Homo sapiens
uccuguacugagcugccccgag

SEQ ID NO: 3745 - RNA, 22 nt, Homo sapiens
cucggggcagcucaguacagga

SEQ ID NO: 3746 - RNA, 22 nt, Homo sapiens
gcuacuucacaacaccagggcc

SEQ ID NO: 3747 - RNA, 22 nt, Homo sapiens
ggcccugguguugugaaguagc

SEQ ID NO: 3748 - RNA, 22 nt, Homo sapiens
caucaucgucucaaaugagucu

SEQ ID NO: 3749 - RNA, 22 nt, Homo sapiens
agacucauuugagacgaugaug

SEQ ID NO: 3750 - RNA, 23 nt, Homo sapiens
acuccauuuguuuugaugaugga

SEQ ID NO: 3751 - RNA, 23 nt, Homo sapiens
uccaucaucaaaacaaauggagu

SEQ ID NO: 3752 - RNA, 22 nt, Homo sapiens
cuccuacauauuagcauuaaca

SEQ ID NO: 3753 - RNA, 22 nt, Homo sapiens
uguuaaugcuaauauguaggag

SEQ ID NO: 3754 - RNA, 23 nt, Homo sapiens
uuaaugcuaaucgugauaggggu

SEQ ID NO: 3755 - RNA, 23 nt, Homo sapiens
accccuaucacgauuagcauuaa

SEQ ID NO: 3756 - RNA, 22 nt, Homo sapiens
agaucagaaggugauuguggcu

SEQ ID NO: 3757 - RNA, 22 nt, Homo sapiens
agccacaaucaccuucugaucu

SEQ ID NO: 3758 - RNA, 22 nt, Homo sapiens
uacugcagacguggcaaucaug

SEQ ID NO: 3759 - RNA, 22 nt, Homo sapiens
caugauugccacgucugcagua

SEQ ID NO: 3760 - RNA, 21 nt, Homo sapiens
guuagggccaacaucucuugg

SEQ ID NO: 3761 - RNA, 21 nt, Homo sapiens
ccaagagauguuggcccuaac

SEQ ID NO: 3762 - RNA, 21 nt, Homo sapiens
aacauagaggaaauuccacgu

SEQ ID NO: 3763 - RNA, 21 nt, Homo sapiens
acguggaauuuccucuauguu

SEQ ID NO: 3764 - RNA, 21 nt, Homo sapiens
gguggauauuccuucuauguu

SEQ ID NO: 3765 - RNA, 21 nt, Homo sapiens
aacauagaaggaauauccacc

SEQ ID NO: 3766 - RNA, 23 nt, Homo sapiens
ucauagcccuguacaaugcugcu

SEQ ID NO: 3767 - RNA, 23 nt, Homo sapiens
agcagcauuguacagggcuauga

SEQ ID NO: 3768 - RNA, 22 nt, Homo sapiens
uaacacugucugguaaagaugg

SEQ ID NO: 3769 - RNA, 22 nt, Homo sapiens
ccaucuuuaccagacaguguua

SEQ ID NO: 3770 - RNA, 22 nt, Homo sapiens
caucuuccaguacaguguugga

SEQ ID NO: 3771 - RNA, 22 nt, Homo sapiens
uccaacacuguacuggaagaug

SEQ ID NO: 3772 - RNA, 22 nt, Homo sapiens
aacuggccuacaaagucccagu

SEQ ID NO: 3773 - RNA, 22 nt, Homo sapiens
acugggacuuuguaggccaguu

SEQ ID NO: 3774 - RNA, 22 nt, Homo sapiens
ugggucuuugcgggcgagauga

SEQ ID NO: 3775 - RNA, 22 nt, Homo sapiens
ucaucucgcccgcaaagaccca

SEQ ID NO: 3776 - RNA, 21 nt, Homo sapiens
augaccuaugaauugacagac

SEQ ID NO: 3777 - RNA, 21 nt, Homo sapiens
gucugucaauucauaggucau

SEQ ID NO: 3778 - RNA, 22 nt, Homo sapiens
aagcugccaguugaagaacugu

SEQ ID NO: 3779 - RNA, 22 nt, Homo sapiens
acaguucuucaacuggcagcuu

SEQ ID NO: 3780 - RNA, 22 nt, Homo sapiens
aguucuucaguggcaagcuuua

SEQ ID NO: 3781 - RNA, 22 nt, Homo sapiens
uaaagcuugccacugaagaacu

SEQ ID NO: 3782 - RNA, 22 nt, Homo sapiens
acagauucgauucuaggggaau

SEQ ID NO: 3783 - RNA, 22 nt, Homo sapiens
auuccccuagaaucgaaucugu

SEQ ID NO: 3784 - RNA, 23 nt, Homo sapiens
uacccuguagaaccgaauuugug

SEQ ID NO: 3785 - RNA, 23 nt, Homo sapiens
cacaaauucgguucuacagggua

SEQ ID NO: 3786 - RNA, 22 nt, Homo sapiens
uagcagcacguaaauauuggcg

SEQ ID NO: 3787 - RNA, 22 nt, Homo sapiens
cgccaauauuuacgugcugcua

SEQ ID NO: 3788 - RNA, 21 nt, Homo sapiens
ugagaugaagcacuguagcuc

SEQ ID NO: 3789 - RNA, 21 nt, Homo sapiens
gagcuacagugcuucaucuca

SEQ ID NO: 3790 - RNA, 22 nt, Homo sapiens
ggugcagugcugcaucucuggu

SEQ ID NO: 3791 - RNA, 22 nt, Homo sapiens
accagagaugcagcacugcacc

SEQ ID NO: 3792 - RNA, 21 nt, Homo sapiens
uugcucacuguucuucccuag

SEQ ID NO: 3793 - RNA, 21 nt, Homo sapiens
cuagggaagaacagugagcaa

SEQ ID NO: 3794 - RNA, 18 nt, Homo sapiens
cagggucagcugagcaug

SEQ ID NO: 3795 - RNA, 18 nt, Homo sapiens
caugcucagcugacccug

SEQ ID NO: 3796 - RNA, 21 nt, Homo sapiens
aagcauucuuucauugguugg

SEQ ID NO: 3797 - RNA, 21 nt, Homo sapiens
ccaaccaaugaaagaaugcuu

SEQ ID NO: 3798 - RNA, 21 nt, Homo sapiens
ccgucgccgccacccgagccg

SEQ ID NO: 3799 - RNA, 21 nt, Homo sapiens
cggcucggguggcggcgacgg

SEQ ID NO: 3800 - RNA, 27 nt, Homo sapiens
cacuguaggugauggugagagugggca

SEQ ID NO: 3801 - RNA, 27 nt, Homo sapiens
ugcccacucucaccaucaccuacagug

SEQ ID NO: 3802 - RNA, 23 nt, Homo sapiens
gggaugguagaccggugacgugc

SEQ ID NO: 3803 - RNA, 23 nt, Homo sapiens
gcacgucaccggucuaccauccc

SEQ ID NO: 3804 - RNA, 21 nt, Homo sapiens
uaggacacauggucuacuucu

SEQ ID NO: 3805 - RNA, 21 nt, Homo sapiens
agaaguagaccauguguccua

SEQ ID NO: 3806 - RNA, 22 nt, Homo sapiens
cuccugagccauucugagccuc

SEQ ID NO: 3807 - RNA, 22 nt, Homo sapiens
gaggcucagaauggcucaggag

SEQ ID NO: 3808 - RNA, 21 nt, Homo sapiens
gugccagcugcagugggggag

SEQ ID NO: 3809 - RNA, 21 nt, Homo sapiens
cucccccacugcagcuggcac

SEQ ID NO: 3810 - RNA, 21 nt, Homo sapiens
cccggagccaggaugcagcuc

SEQ ID NO: 3811 - RNA, 21 nt, Homo sapiens
gagcugcauccuggcuccggg

SEQ ID NO: 3812 - RNA, 21 nt, Homo sapiens
ucguggccuggucuccauuau

SEQ ID NO: 3813 - RNA, 21 nt, Homo sapiens
auaauggagaccaggccacga

SEQ ID NO: 3814 - RNA, 20 nt, Homo sapiens
ucugcaggguuugcuuugag

SEQ ID NO: 3815 - RNA, 20 nt, Homo sapiens
cucaaagcaaacccugcaga

SEQ ID NO: 3816 - RNA, 21 nt, Homo sapiens
uguucauguagauguuuaagc

SEQ ID NO: 3817 - RNA, 21 nt, Homo sapiens
gcuuaaacaucuacaugaaca

SEQ ID NO: 3818 - RNA, 18 nt, Homo sapiens
ucagcuggcccucauuuc

SEQ ID NO: 3819 - RNA, 18 nt, Homo sapiens
gaaaugagggccagcuga

SEQ ID NO: 3820 - RNA, 21 nt, Homo sapiens
uggcagggaggcugggagggg

SEQ ID NO: 3821 - RNA, 21 nt, Homo sapiens
ccccucccagccucccugcca

SEQ ID NO: 3822 - RNA, 20 nt, Homo sapiens
ucacuguucagacaggcgga

SEQ ID NO: 3823 - RNA, 20 nt, Homo sapiens
uccgccugucugaacaguga

SEQ ID NO: 3824 - RNA, 21 nt, Homo sapiens
ccccaccuccucucuccucag

SEQ ID NO: 3825 - RNA, 21 nt, Homo sapiens
cugaggagagaggaggugggg

SEQ ID NO: 3826 - RNA, 19 nt, Homo sapiens
gugaggacucgggaggugg

SEQ ID NO: 3827 - RNA, 19 nt, Homo sapiens
ccaccucccgaguccucac

SEQ ID NO: 3828 - RNA, 22 nt, Homo sapiens
ugagccccugugccgcccccag

SEQ ID NO: 3829 - RNA, 22 nt, Homo sapiens
cugggggcggcacaggggcuca

SEQ ID NO: 3830 - RNA, 22 nt, Homo sapiens
guggguacggcccagugggggg

SEQ ID NO: 3831 - RNA, 22 nt, Homo sapiens
ccccccacugggccguacccac

SEQ ID NO: 3832 - RNA, 22 nt, Homo sapiens
ucaccagcccuguguucccuag

SEQ ID NO: 3833 - RNA, 22 nt, Homo sapiens
cuagggaacacagggcugguga

SEQ ID NO: 3834 - RNA, 26 nt, Homo sapiens
gugagggcaugcaggccuggaugggg

SEQ ID NO: 3835 - RNA, 26 nt, Homo sapiens
ccccauccaggccugcaugcccucac

SEQ ID NO: 3836 - RNA, 23 nt, Homo sapiens
cucucaccacugcccucccacag

SEQ ID NO: 3837 - RNA, 23 nt, Homo sapiens
cugugggagggcaguggugagag

SEQ ID NO: 3838 - RNA, 24 nt, Homo sapiens
guggguaggguuugggggagagcg

SEQ ID NO: 3839 - RNA, 24 nt, Homo sapiens
cgcucucccccaaacccuacccac

SEQ ID NO: 3840 - RNA, 20 nt, Homo sapiens
gugucugggcggacagcugc

SEQ ID NO: 3841 - RNA, 20 nt, Homo sapiens
gcagcuguccgcccagacac

SEQ ID NO: 3842 - RNA, 20 nt, Homo sapiens
cuuccucgucugucugcccc

SEQ ID NO: 3843 - RNA, 20 nt, Homo sapiens
ggggcagacagacgaggaag

SEQ ID NO: 3844 - RNA, 23 nt, Homo sapiens
gugagugggagccccagugugug

SEQ ID NO: 3845 - RNA, 23 nt, Homo sapiens
cacacacuggggcucccacucac

SEQ ID NO: 3846 - RNA, 27 nt, Homo sapiens
accuucuuguauaagcacugugcuaaa

SEQ ID NO: 3847 - RNA, 27 nt, Homo sapiens
uuuagcacagugcuuauacaagaaggu

SEQ ID NO: 3848 - RNA, 22 nt, Homo sapiens
ggcgacaaaacgagacccuguc

SEQ ID NO: 3849 - RNA, 22 nt, Homo sapiens
gacagggucucguuuugucgcc

SEQ ID NO: 3850 - RNA, 22 nt, Homo sapiens
uugcuugaacccaggaagugga

SEQ ID NO: 3851 - RNA, 22 nt, Homo sapiens
uccacuuccuggguucaagcaa

SEQ ID NO: 3852 - RNA, 19 nt, Homo sapiens
ggagauggagguugcagug

SEQ ID NO: 3853 - RNA, 19 nt, Homo sapiens
cacugcaaccuccaucucc

SEQ ID NO: 3854 - RNA, 21 nt, Homo sapiens
accacugcacuccagccugag

SEQ ID NO: 3855 - RNA, 21 nt, Homo sapiens
cucaggcuggagugcaguggu

SEQ ID NO: 3856 - RNA, 22 nt, Homo sapiens
ggugguugaggcugcaguaagu

SEQ ID NO: 3857 - RNA, 22 nt, Homo sapiens
acuuacugcagccucaaccacc

SEQ ID NO: 3858 - RNA, 17 nt, Homo sapiens
ucgccuccuccucuccc

SEQ ID NO: 3859 - RNA, 17 nt, Homo sapiens
gggagaggaggaggcga

SEQ ID NO: 3860 - RNA, 22 nt, Homo sapiens
ucuauacagacccuggcuuuuc

SEQ ID NO: 3861 - RNA, 22 nt, Homo sapiens
gaaaagccagggucuguauaga

SEQ ID NO: 3862 - RNA, 22 nt, Homo sapiens
ucugggcaacaaagugagaccu

SEQ ID NO: 3863 - RNA, 22 nt, Homo sapiens
aggucucacuuuguugcccaga

SEQ ID NO: 3864 - RNA, 21 nt, Homo sapiens
gaucucacuuuguugcccagg

SEQ ID NO: 3865 - RNA, 21 nt, Homo sapiens
ccugggcaacaaagugagauc

SEQ ID NO: 3866 - RNA, 20 nt, Homo sapiens
ucgcgccccggcucccguuc

SEQ ID NO: 3867 - RNA, 20 nt, Homo sapiens
gaacgggagccggggcgcga

SEQ ID NO: 3868 - RNA, 25 nt, Homo sapiens
ugggaacggguuccggcagacgcug

SEQ ID NO: 3869 - RNA, 25 nt, Homo sapiens
cagcgucugccggaacccguuccca

SEQ ID NO: 3870 - RNA, 21 nt, Homo sapiens
uuaggccgcagaucuggguga

SEQ ID NO: 3871 - RNA, 21 nt, Homo sapiens
ucacccagaucugcggccuaa

SEQ ID NO: 3872 - RNA, 22 nt, Homo sapiens
aauaggccacggaucugggcaa

SEQ ID NO: 3873 - RNA, 22 nt, Homo sapiens
uugcccagauccguggccuauu

SEQ ID NO: 3874 - RNA, 21 nt, Homo sapiens
cacccagaucugcggccuaau

SEQ ID NO: 3875 - RNA, 21 nt, Homo sapiens
auuaggccgcagaucugggug

SEQ ID NO: 3876 - RNA, 22 nt, Homo sapiens
uuagggcccuggcuccaucucc

SEQ ID NO: 3877 - RNA, 22 nt, Homo sapiens
ggagauggagccagggcccuaa

SEQ ID NO: 3878 - RNA, 22 nt, Homo sapiens
uucauucggcuguccagaugua

SEQ ID NO: 3879 - RNA, 22 nt, Homo sapiens
uacaucuggacagccgaaugaa

SEQ ID NO: 3880 - RNA, 24 nt, Homo sapiens
uugcagcugccugggagugacuuc

SEQ ID NO: 3881 - RNA, 24 nt, Homo sapiens
gaagucacucccaggcagcugcaa

SEQ ID NO: 3882 - RNA, 21 nt, Homo sapiens
uugggacauacuuaugcuaaa

SEQ ID NO: 3883 - RNA, 21 nt, Homo sapiens
uuuagcauaaguaugucccaa

SEQ ID NO: 3884 - RNA, 22 nt, Homo sapiens
ucucacuguagccucgaacccc

SEQ ID NO: 3885 - RNA, 22 nt, Homo sapiens
gggguucgaggcuacagugaga

SEQ ID NO: 3886 - RNA, 22 nt, Homo sapiens
uuugaggcuacagugagaugug

SEQ ID NO: 3887 - RNA, 22 nt, Homo sapiens
cacaucucacuguagccucaaa

SEQ ID NO: 3888 - RNA, 18 nt, Homo sapiens
cagggaggugaaugugau

SEQ ID NO: 3889 - RNA, 18 nt, Homo sapiens
aucacauucaccucccug

SEQ ID NO: 3890 - RNA, 19 nt, Homo sapiens
gaugaugcugcugaugcug

SEQ ID NO: 3891 - RNA, 19 nt, Homo sapiens
cagcaucagcagcaucauc

SEQ ID NO: 3892 - RNA, 24 nt, Homo sapiens
ccagacagaauucuaugcacuuuc

SEQ ID NO: 3893 - RNA, 24 nt, Homo sapiens
gaaagugcauagaauucugucugg

SEQ ID NO: 3894 - RNA, 22 nt, Homo sapiens
cuccuggggcccgcacucucgc

SEQ ID NO: 3895 - RNA, 22 nt, Homo sapiens
gcgagagugcgggccccaggag

SEQ ID NO: 3896 - RNA, 21 nt, Homo sapiens
cuccguuugccuguuucgcug

SEQ ID NO: 3897 - RNA, 21 nt, Homo sapiens
cagcgaaacaggcaaacggag

SEQ ID NO: 3898 - RNA, 22 nt, Homo sapiens
cucggcgcggggcgcgggcucc

SEQ ID NO: 3899 - RNA, 22 nt, Homo sapiens
ggagcccgcgccccgcgccgag

SEQ ID NO: 3900 - RNA, 21 nt, Homo sapiens
gcccuccgcccgugcaccccg

SEQ ID NO: 3901 - RNA, 21 nt, Homo sapiens
cggggugcacgggcggagggc

SEQ ID NO: 3902 - RNA, 22 nt, Homo sapiens
gcccgcguguggagccaggugu

SEQ ID NO: 3903 - RNA, 22 nt, Homo sapiens
acaccuggcuccacacgcgggc

SEQ ID NO: 3904 - RNA, 22 nt, Homo sapiens
aaaaccgucuaguuacaguugu

SEQ ID NO: 3905 - RNA, 22 nt, Homo sapiens
acaacuguaacuagacgguuuu

SEQ ID NO: 3906 - RNA, 18 nt, Homo sapiens
uccagugcccuccucucc

SEQ ID NO: 3907 - RNA, 18 nt, Homo sapiens
ggagaggagggcacugga

SEQ ID NO: 3908 - RNA, 18 nt, Homo sapiens
ugaggcaguagauugaau

SEQ ID NO: 3909 - RNA, 18 nt, Homo sapiens
auucaaucuacugccuca

SEQ ID NO: 3910 - RNA, 22 nt, Homo sapiens
aggggcuggcuuuccucugguc

SEQ ID NO: 3911 - RNA, 22 nt, Homo sapiens
gaccagaggaaagccagccccu

SEQ ID NO: 3912 - RNA, 22 nt, Homo sapiens
uggagagaaaggcaguuccuga

SEQ ID NO: 3913 - RNA, 22 nt, Homo sapiens
ucaggaacugccuuucucucca

SEQ ID NO: 3914 - RNA, 22 nt, Homo sapiens
ucgugucuuguguugcagccgg

SEQ ID NO: 3915 - RNA, 22 nt, Homo sapiens
ccggcugcaacacaagacacga

SEQ ID NO: 3916 - RNA, 22 nt, Homo sapiens
ggcuacaacacaggacccgggc

SEQ ID NO: 3917 - RNA, 22 nt, Homo sapiens
gcccggguccuguguuguagcc

SEQ ID NO: 3918 - RNA, 21 nt, Homo sapiens
cggcggggacggcgauugguc

SEQ ID NO: 3919 - RNA, 21 nt, Homo sapiens
gaccaaucgccguccccgccg

SEQ ID NO: 3920 - RNA, 22 nt, Homo sapiens
cgcaggggccgggugcucaccg

SEQ ID NO: 3921 - RNA, 22 nt, Homo sapiens
cggugagcacccggccccugcg

SEQ ID NO: 3922 - RNA, 21 nt, Homo sapiens
ugagugccggugccugcccug

SEQ ID NO: 3923 - RNA, 21 nt, Homo sapiens
cagggcaggcaccggcacuca

SEQ ID NO: 3924 - RNA, 22 nt, Homo sapiens
gcugcgcuuggauuucgucccc

SEQ ID NO: 3925 - RNA, 22 nt, Homo sapiens
ggggacgaaauccaagcgcagc

SEQ ID NO: 3926 - RNA, 23 nt, Homo sapiens
caacggaaucccaaaagcagcug

SEQ ID NO: 3927 - RNA, 23 nt, Homo sapiens
cagcugcuuuugggauuccguug

SEQ ID NO: 3928 - RNA, 22 nt, Homo sapiens
ucaggccaggcacaguggcuca

SEQ ID NO: 3929 - RNA, 22 nt, Homo sapiens
ugagccacugugccuggccuga

SEQ ID NO: 3930 - RNA, 19 nt, Homo sapiens
accgugcaaagguagcaua

SEQ ID NO: 3931 - RNA, 19 nt, Homo sapiens
uaugcuaccuuugcacggu

SEQ ID NO: 3932 - RNA, 20 nt, Homo sapiens
ccuccugcccuccuugcugu

SEQ ID NO: 3933 - RNA, 20 nt, Homo sapiens
acagcaaggagggcaggagg

SEQ ID NO: 3934 - RNA, 20 nt, Homo sapiens
uguuuugauaacaguaaugu

SEQ ID NO: 3935 - RNA, 20 nt, Homo sapiens
acauuacuguuaucaaaaca

SEQ ID NO: 3936 - RNA, 23 nt, Homo sapiens
guguuaauuaaaccucuauuuac

SEQ ID NO: 3937 - RNA, 23 nt, Homo sapiens
guaaauagagguuuaauuaacac

SEQ ID NO: 3938 - RNA, 23 nt, Homo sapiens
cuguaauauaaauuuaauuuauu

SEQ ID NO: 3939 - RNA, 23 nt, Homo sapiens
aauaaauuaaauuuauauuacag

SEQ ID NO: 3940 - RNA, 22 nt, Homo sapiens
uuggggaaacggccgcugagug

SEQ ID NO: 3941 - RNA, 22 nt, Homo sapiens
cacucagcggccguuuccccaa

SEQ ID NO: 3942 - RNA, 21 nt, Homo sapiens
ccucccaugccaagaacuccc

SEQ ID NO: 3943 - RNA, 21 nt, Homo sapiens
gggaguucuuggcaugggagg

SEQ ID NO: 3944 - RNA, 21 nt, Homo sapiens
gguucuuagcauaggaggucu

SEQ ID NO: 3945 - RNA, 21 nt, Homo sapiens
agaccuccuaugcuaagaacc

SEQ ID NO: 3946 - RNA, 21 nt, Homo sapiens
uguucucuuugccaaggacag

SEQ ID NO: 3947 - RNA, 21 nt, Homo sapiens
cuguccuuggcaaagagaaca

SEQ ID NO: 3948 - RNA, 22 nt, Homo sapiens
aaaucucugcaggcaaauguga

SEQ ID NO: 3949 - RNA, 22 nt, Homo sapiens
ucacauuugccugcagagauuu

SEQ ID NO: 3950 - RNA, 22 nt, Homo sapiens
caugguucugucaagcaccgcg

SEQ ID NO: 3951 - RNA, 22 nt, Homo sapiens
cgcggugcuugacagaaccaug

SEQ ID NO: 3952 - RNA, 21 nt, Homo sapiens
uugugcuugaucuaaccaugu

SEQ ID NO: 3953 - RNA, 21 nt, Homo sapiens
acaugguuagaucaagcacaa

SEQ ID NO: 3954 - RNA, 22 nt, Homo sapiens
ucugcaagugucagaggcgagg

SEQ ID NO: 3955 - RNA, 22 nt, Homo sapiens
ccucgccucugacacuugcaga

SEQ ID NO: 3956 - RNA, 22 nt, Homo sapiens
gagagcaguguguguugccugg

SEQ ID NO: 3957 - RNA, 22 nt, Homo sapiens
ccaggcaacacacacugcucuc

SEQ ID NO: 3958 - RNA, 22 nt, Homo sapiens
aucacauugccagugauuaccc

SEQ ID NO: 3959 - RNA, 22 nt, Homo sapiens
ggguaaucacuggcaaugugau

SEQ ID NO: 3960 - RNA, 22 nt, Homo sapiens
agcagaggcagagaggcucagg

SEQ ID NO: 3961 - RNA, 22 nt, Homo sapiens
ccugagccucucugccucugcu

SEQ ID NO: 3962 - RNA, 23 nt, Homo sapiens
ugaggcucuguuagccuuggcuc

SEQ ID NO: 3963 - RNA, 23 nt, Homo sapiens
gagccaaggcuaacagagccuca

SEQ ID NO: 3964 - RNA, 22 nt, Homo sapiens
uaucauggaguugguaaagcac

SEQ ID NO: 3965 - RNA, 22 nt, Homo sapiens
gugcuuuaccaacuccaugaua

SEQ ID NO: 3966 - RNA, 22 nt, Homo sapiens
guuuuaccaccuccaggagacu

SEQ ID NO: 3967 - RNA, 22 nt, Homo sapiens
agucuccuggaggugguaaaac

SEQ ID NO: 3968 - RNA, 22 nt, Homo sapiens
cgccucuucagcgcugucuucc

SEQ ID NO: 3969 - RNA, 22 nt, Homo sapiens
ggaagacagcgcugaagaggcg

SEQ ID NO: 3970 - RNA, 23 nt, Homo sapiens
caggcagugacuguucagacguc

SEQ ID NO: 3971 - RNA, 23 nt, Homo sapiens
gacgucugaacagucacugccug

SEQ ID NO: 3972 - RNA, 23 nt, Homo sapiens
agaauugcguuuggacaaucagu

SEQ ID NO: 3973 - RNA, 23 nt, Homo sapiens
acugauuguccaaacgcaauucu

SEQ ID NO: 3974 - RNA, 22 nt, Homo sapiens
agauguccagccacaauucucg

SEQ ID NO: 3975 - RNA, 22 nt, Homo sapiens
cgagaauuguggcuggacaucu

SEQ ID NO: 3976 - RNA, 24 nt, Homo sapiens
agcagaagcagggagguucuccca

SEQ ID NO: 3977 - RNA, 24 nt, Homo sapiens
ugggagaaccucccugcuucugcu

SEQ ID NO: 3978 - RNA, 22 nt, Homo sapiens
uaugugggaugguaaaccgcuu

SEQ ID NO: 3979 - RNA, 22 nt, Homo sapiens
aagcgguuuaccaucccacaua

SEQ ID NO: 3980 - RNA, 22 nt, Homo sapiens
ugguuuaccgucccacauacau

SEQ ID NO: 3981 - RNA, 22 nt, Homo sapiens
auguaugugggacgguaaacca

SEQ ID NO: 3982 - RNA, 23 nt, Homo sapiens
cagugcaaugauauugucaaagc

SEQ ID NO: 3983 - RNA, 23 nt, Homo sapiens
gcuuugacaauaucauugcacug

SEQ ID NO: 3984 - RNA, 17 nt, Homo sapiens
uaauugcuuccauguuu

SEQ ID NO: 3985 - RNA, 17 nt, Homo sapiens
aaacauggaagcaauua

SEQ ID NO: 3986 - RNA, 23 nt, Homo sapiens
uugccacacugcaacaccuuaca

SEQ ID NO: 3987 - RNA, 23 nt, Homo sapiens
uguaagguguugcaguguggcaa

SEQ ID NO: 3988 - RNA, 21 nt, Homo sapiens
ucuggcuguuguggugugcaa

SEQ ID NO: 3989 - RNA, 21 nt, Homo sapiens
uugcacaccacaacagccaga

SEQ ID NO: 3990 - RNA, 22 nt, Homo sapiens
gauaucagcucaguaggcaccg

SEQ ID NO: 3991 - RNA, 22 nt, Homo sapiens
cggugccuacugagcugauauc

SEQ ID NO: 3992 - RNA, 21 nt, Homo sapiens
guuccugcugaacugagccag

SEQ ID NO: 3993 - RNA, 21 nt, Homo sapiens
cuggcucaguucagcaggaac

SEQ ID NO: 3994 - RNA, 20 nt, Homo sapiens
auauggguuuacuaguuggu

SEQ ID NO: 3995 - RNA, 20 nt, Homo sapiens
accaacuaguaaacccauau

SEQ ID NO: 3996 - RNA, 22 nt, Homo sapiens
ugcuaugccaacauauugccau

SEQ ID NO: 3997 - RNA, 22 nt, Homo sapiens
auggcaauauguuggcauagca

SEQ ID NO: 3998 - RNA, 21 nt, Homo sapiens
aggcaagaugcuggcauagcu

SEQ ID NO: 3999 - RNA, 21 nt, Homo sapiens
agcuaugccagcaucuugccu

SEQ ID NO: 4000 - RNA, 18 nt, Homo sapiens
cggggcggcaggggccuc

SEQ ID NO: 4001 - RNA, 18 nt, Homo sapiens
gaggccccugccgccccg

SEQ ID NO: 4002 - RNA, 19 nt, Homo sapiens
aaaagcuggguugagagga

SEQ ID NO: 4003 - RNA, 19 nt, Homo sapiens
uccucucaacccagcuuuu

SEQ ID NO: 4004 - RNA, 22 nt, Homo sapiens
cccaauacacggucgaccucuu

SEQ ID NO: 4005 - RNA, 22 nt, Homo sapiens
aagaggucgaccguguauuggg

SEQ ID NO: 4006 - RNA, 23 nt, Homo sapiens
agguuguccguggugaguucgca

SEQ ID NO: 4007 - RNA, 23 nt, Homo sapiens
ugcgaacucaccacggacaaccu

SEQ ID NO: 4008 - RNA, 23 nt, Homo sapiens
gcaaagcacacggccugcagaga

SEQ ID NO: 4009 - RNA, 23 nt, Homo sapiens
ucucugcaggccgugugcuuugc

SEQ ID NO: 4010 - RNA, 22 nt, Homo sapiens
ucucugggccugugucuuaggc

SEQ ID NO: 4011 - RNA, 22 nt, Homo sapiens
gccuaagacacaggcccagaga

SEQ ID NO: 4012 - RNA, 21 nt, Homo sapiens
gccccugggccuauccuagaa

SEQ ID NO: 4013 - RNA, 21 nt, Homo sapiens
uucuaggauaggcccaggggc

SEQ ID NO: 4014 - RNA, 22 nt, Homo sapiens
uccgucucaguuacuuuauagc

SEQ ID NO: 4015 - RNA, 22 nt, Homo sapiens
gcuauaaaguaacugagacgga

SEQ ID NO: 4016 - RNA, 22 nt, Homo sapiens
aacacaccuauucaaggauuca

SEQ ID NO: 4017 - RNA, 22 nt, Homo sapiens
ugaauccuugaauagguguguu

SEQ ID NO: 4018 - RNA, 24 nt, Homo sapiens
aauccuuggaaccuaggugugagu

SEQ ID NO: 4019 - RNA, 24 nt, Homo sapiens
acucacaccuagguuccaaggauu

SEQ ID NO: 4020 - RNA, 22 nt, Homo sapiens
uaaugccccuaaaaauccuuau

SEQ ID NO: 4021 - RNA, 22 nt, Homo sapiens
auaaggauuuuuaggggcauua

SEQ ID NO: 4022 - RNA, 23 nt, Homo sapiens
agggacuuuugggggcagaugug

SEQ ID NO: 4023 - RNA, 23 nt, Homo sapiens
cacaucugcccccaaaagucccu

SEQ ID NO: 4024 - RNA, 22 nt, Homo sapiens
uaaugccccuaaaaauccuuau

SEQ ID NO: 4025 - RNA, 22 nt, Homo sapiens
auaaggauuuuuaggggcauua

SEQ ID NO: 4026 - RNA, 22 nt, Homo sapiens
agggacuuucaggggcagcugu

SEQ ID NO: 4027 - RNA, 22 nt, Homo sapiens
acagcugccccugaaagucccu

SEQ ID NO: 4028 - RNA, 24 nt, Homo sapiens
gaaaaugaugaguagugacugaug

SEQ ID NO: 4029 - RNA, 24 nt, Homo sapiens
caucagucacuacucaucauuuuc

SEQ ID NO: 4030 - RNA, 23 nt, Homo sapiens
ugagcaccacacaggccgggcgc

SEQ ID NO: 4031 - RNA, 23 nt, Homo sapiens
gcgcccggccuguguggugcuca

SEQ ID NO: 4032 - RNA, 21 nt, Homo sapiens
gcuggucugcguggugcucgg

SEQ ID NO: 4033 - RNA, 21 nt, Homo sapiens
ccgagcaccacgcagaccagc

SEQ ID NO: 4034 - RNA, 22 nt, Homo sapiens
gccugcugggguggaaccuggu

SEQ ID NO: 4035 - RNA, 22 nt, Homo sapiens
accagguuccaccccagcaggc

SEQ ID NO: 4036 - RNA, 23 nt, Homo sapiens
gaagugcuucgauuuuggggugu

SEQ ID NO: 4037 - RNA, 23 nt, Homo sapiens
acaccccaaaaucgaagcacuuc

SEQ ID NO: 4038 - RNA, 22 nt, Homo sapiens
acucaaaaugggggcgcuuucc

SEQ ID NO: 4039 - RNA, 22 nt, Homo sapiens
ggaaagcgcccccauuuugagu

SEQ ID NO: 4040 - RNA, 22 nt, Homo sapiens
uauguaacaugguccacuaacu

SEQ ID NO: 4041 - RNA, 22 nt, Homo sapiens
aguuaguggaccauguuacaua

SEQ ID NO: 4042 - RNA, 21 nt, Homo sapiens
ugguagacuauggaacguagg

SEQ ID NO: 4043 - RNA, 21 nt, Homo sapiens
ccuacguuccauagucuacca

SEQ ID NO: 4044 - RNA, 22 nt, Homo sapiens
uguagauacgagcaccagccac

SEQ ID NO: 4045 - RNA, 22 nt, Homo sapiens
guggcuggugcucguaucuaca

SEQ ID NO: 4046 - RNA, 23 nt, Homo sapiens
acaggcggcuguagcaauggggg

SEQ ID NO: 4047 - RNA, 23 nt, Homo sapiens
cccccauugcuacagccgccugu

SEQ ID NO: 4048 - RNA, 22 nt, Homo sapiens
aauucccuuguagauaacccgg

SEQ ID NO: 4049 - RNA, 22 nt, Homo sapiens
ccggguuaucuacaagggaauu

SEQ ID NO: 4050 - RNA, 22 nt, Homo sapiens
uacgcgcagaccacaggauguc

SEQ ID NO: 4051 - RNA, 22 nt, Homo sapiens
gacauccuguggucugcgcgua

SEQ ID NO: 4052 - RNA, 22 nt, Homo sapiens
uuacacacaacugaggaucaua

SEQ ID NO: 4053 - RNA, 22 nt, Homo sapiens
uaugauccucaguuguguguaa

SEQ ID NO: 4054 - RNA, 23 nt, Homo sapiens
uagcccccaggcuucacuuggcg

SEQ ID NO: 4055 - RNA, 23 nt, Homo sapiens
cgccaagugaagccugggggcua

SEQ ID NO: 4056 - RNA, 23 nt, Homo sapiens
agggcauaggagaggguugauau

SEQ ID NO: 4057 - RNA, 23 nt, Homo sapiens
auaucaacccucuccuaugcccu

SEQ ID NO: 4058 - RNA, 22 nt, Homo sapiens
gaauguugcucggugaaccccu

SEQ ID NO: 4059 - RNA, 22 nt, Homo sapiens
agggguucaccgagcaacauuc

SEQ ID NO: 4060 - RNA, 23 nt, Homo sapiens
agguuacccgagcaacuuugcau

SEQ ID NO: 4061 - RNA, 23 nt, Homo sapiens
augcaaaguugcucggguaaccu

SEQ ID NO: 4062 - RNA, 22 nt, Homo sapiens
uauguaacacgguccacuaacc

SEQ ID NO: 4063 - RNA, 22 nt, Homo sapiens
gguuaguggaccguguuacaua

SEQ ID NO: 4064 - RNA, 21 nt, Homo sapiens
uaguagaccguauagcguacg

SEQ ID NO: 4065 - RNA, 21 nt, Homo sapiens
cguacgcuauacggucuacua

SEQ ID NO: 4066 - RNA, 23 nt, Homo sapiens
acuucaccugguccacuagccgu

SEQ ID NO: 4067 - RNA, 23 nt, Homo sapiens
acggcuaguggaccaggugaagu

SEQ ID NO: 4068 - RNA, 18 nt, Homo sapiens
guguucucugauggacag

SEQ ID NO: 4069 - RNA, 18 nt, Homo sapiens
cuguccaucagagaacac

SEQ ID NO: 4070 - RNA, 22 nt, Homo sapiens
caggucgucuugcagggcuucu

SEQ ID NO: 4071 - RNA, 22 nt, Homo sapiens
agaagcccugcaagacgaccug

SEQ ID NO: 4072 - RNA, 21 nt, Homo sapiens
ugucuugcaggccgucaugca

SEQ ID NO: 4073 - RNA, 21 nt, Homo sapiens
ugcaugacggccugcaagaca

SEQ ID NO: 4074 - RNA, 22 nt, Homo sapiens
aucaugaugggcuccucggugu

SEQ ID NO: 4075 - RNA, 22 nt, Homo sapiens
acaccgaggagcccaucaugau

SEQ ID NO: 4076 - RNA, 23 nt, Homo sapiens
uugcuaguugcacuccucucugu

SEQ ID NO: 4077 - RNA, 23 nt, Homo sapiens
acagagaggagugcaacuagcaa

SEQ ID NO: 4078 - RNA, 25 nt, Homo sapiens
uaggcaguguauugcuagcggcugu

SEQ ID NO: 4079 - RNA, 25 nt, Homo sapiens
acagccgcuagcaauacacugccua

SEQ ID NO: 4080 - RNA, 22 nt, Homo sapiens
auuggggacauuuugcauucau

SEQ ID NO: 4081 - RNA, 22 nt, Homo sapiens
augaaugcaaaauguccccaau

SEQ ID NO: 4082 - RNA, 22 nt, Homo sapiens
uuuugcgauguguuccuaauau

SEQ ID NO: 4083 - RNA, 22 nt, Homo sapiens
auauuaggaacacaucgcaaaa

SEQ ID NO: 4084 - RNA, 22 nt, Homo sapiens
uugggaucauuuugcauccaua

SEQ ID NO: 4085 - RNA, 22 nt, Homo sapiens
uauggaugcaaaaugaucccaa

SEQ ID NO: 4086 - RNA, 22 nt, Homo sapiens
uuuugcaauauguuccugaaua

SEQ ID NO: 4087 - RNA, 22 nt, Homo sapiens
uauucaggaacauauugcaaaa

SEQ ID NO: 4088 - RNA, 21 nt, Homo sapiens
gcaguccaugggcauauacac

SEQ ID NO: 4089 - RNA, 21 nt, Homo sapiens
guguauaugcccauggacugc

SEQ ID NO: 4090 - RNA, 22 nt, Homo sapiens
uaugugccuuuggacuacaucg

SEQ ID NO: 4091 - RNA, 22 nt, Homo sapiens
cgauguaguccaaaggcacaua

SEQ ID NO: 4092 - RNA, 23 nt, Homo sapiens
auacacauacacgcaacacacau

SEQ ID NO: 4093 - RNA, 23 nt, Homo sapiens
auguguguugcguguauguguau

SEQ ID NO: 4094 - RNA, 23 nt, Homo sapiens
uugcaugucagauuguaauuccc

SEQ ID NO: 4095 - RNA, 23 nt, Homo sapiens
gggaauuacaaucugacaugcaa

SEQ ID NO: 4096 - RNA, 21 nt, Homo sapiens
ucacuccucuccucccgucuu

SEQ ID NO: 4097 - RNA, 21 nt, Homo sapiens
aagacgggaggagaggaguga

SEQ ID NO: 4098 - RNA, 22 nt, Homo sapiens
ucaggcucaguccccucccgau

SEQ ID NO: 4099 - RNA, 22 nt, Homo sapiens
aucgggaggggacugagccuga

SEQ ID NO: 4100 - RNA, 22 nt, Homo sapiens
gucauacacggcucuccucucu

SEQ ID NO: 4101 - RNA, 22 nt, Homo sapiens
agagaggagagccguguaugac

SEQ ID NO: 4102 - RNA, 22 nt, Homo sapiens
agaggcuggccgugaugaauuc

SEQ ID NO: 4103 - RNA, 22 nt, Homo sapiens
gaauucaucacggccagccucu

SEQ ID NO: 4104 - RNA, 22 nt, Homo sapiens
aaucauacagggacauccaguu

SEQ ID NO: 4105 - RNA, 22 nt, Homo sapiens
aacuggaugucccuguaugauu

SEQ ID NO: 4106 - RNA, 22 nt, Homo sapiens
aaucguacagggucauccacuu

SEQ ID NO: 4107 - RNA, 22 nt, Homo sapiens
aaguggaugacccuguacgauu

SEQ ID NO: 4108 - RNA, 21 nt, Homo sapiens
uugaaaggcuauuucuugguc

SEQ ID NO: 4109 - RNA, 21 nt, Homo sapiens
gaccaagaaauagccuuucaa

SEQ ID NO: 4110 - RNA, 21 nt, Homo sapiens
cccagauaauggcacucucaa

SEQ ID NO: 4111 - RNA, 21 nt, Homo sapiens
uugagagugccauuaucuggg

SEQ ID NO: 4112 - RNA, 22 nt, Homo sapiens
caaccuggaggacuccaugcug

SEQ ID NO: 4113 - RNA, 22 nt, Homo sapiens
cagcauggaguccuccagguug

SEQ ID NO: 4114 - RNA, 20 nt, Homo sapiens
ccauggaucuccaggugggu

SEQ ID NO: 4115 - RNA, 20 nt, Homo sapiens
acccaccuggagauccaugg

SEQ ID NO: 4116 - RNA, 22 nt, Homo sapiens
cuuaugcaagauucccuucuac

SEQ ID NO: 4117 - RNA, 22 nt, Homo sapiens
guagaagggaaucuugcauaag

SEQ ID NO: 4118 - RNA, 22 nt, Homo sapiens
aguggggaacccuuccaugagg

SEQ ID NO: 4119 - RNA, 22 nt, Homo sapiens
ccucauggaaggguuccccacu

SEQ ID NO: 4120 - RNA, 23 nt, Homo sapiens
aggaccugcgggacaagauucuu

SEQ ID NO: 4121 - RNA, 23 nt, Homo sapiens
aagaaucuugucccgcagguccu

SEQ ID NO: 4122 - RNA, 22 nt, Homo sapiens
caaaccacacugugguguuaga

SEQ ID NO: 4123 - RNA, 22 nt, Homo sapiens
ucuaacaccacagugugguuug

SEQ ID NO: 4124 - RNA, 21 nt, Homo sapiens
cagcagcacacugugguuugu

SEQ ID NO: 4125 - RNA, 21 nt, Homo sapiens
acaaaccacagugugcugcug

SEQ ID NO: 4126 - RNA, 23 nt, Homo sapiens
uuucaagccagggggcguuuuuc

SEQ ID NO: 4127 - RNA, 23 nt, Homo sapiens
gaaaaacgcccccuggcuugaaa

SEQ ID NO: 4128 - RNA, 20 nt, Homo sapiens
ucacuaccugacaauacagu

SEQ ID NO: 4129 - RNA, 20 nt, Homo sapiens
acuguauugucagguaguga

SEQ ID NO: 4130 - RNA, 21 nt, Homo sapiens
ugcuguauugucagguaguga

SEQ ID NO: 4131 - RNA, 21 nt, Homo sapiens
ucacuaccugacaauacagca

SEQ ID NO: 4132 - RNA, 22 nt, Homo sapiens
uucugccucuguccagguccuu

SEQ ID NO: 4133 - RNA, 22 nt, Homo sapiens
aaggaccuggacagaggcagaa

SEQ ID NO: 4134 - RNA, 24 nt, Homo sapiens
agggcuggacucagcggcggagcu

SEQ ID NO: 4135 - RNA, 24 nt, Homo sapiens
agcuccgccgcugaguccagcccu

SEQ ID NO: 4136 - RNA, 21 nt, Homo sapiens
ugacugccucacugaccacuu

SEQ ID NO: 4137 - RNA, 21 nt, Homo sapiens
aaguggucagugaggcaguca

SEQ ID NO: 4138 - RNA, 24 nt, Homo sapiens
aauuugguuucugaggcacuuagu

SEQ ID NO: 4139 - RNA, 24 nt, Homo sapiens
acuaagugccucagaaaccaaauu

SEQ ID NO: 4140 - RNA, 21 nt, Homo sapiens
uacuuuucuagguuguugggg

SEQ ID NO: 4141 - RNA, 21 nt, Homo sapiens
ccccaacaaccuagaaaagua

SEQ ID NO: 4142 - RNA, 23 nt, Homo sapiens
ucacaacaaccuugcaggguaga

SEQ ID NO: 4143 - RNA, 23 nt, Homo sapiens
ucuacccugcaagguuguuguga

SEQ ID NO: 4144 - RNA, 22 nt, Homo sapiens
cuuggauuuuccugggccucag

SEQ ID NO: 4145 - RNA, 22 nt, Homo sapiens
cugaggcccaggaaaauccaag

SEQ ID NO: 4146 - RNA, 22 nt, Homo sapiens
ugaggacagggcaaauucacga

SEQ ID NO: 4147 - RNA, 22 nt, Homo sapiens
ucgugaauuugcccuguccuca

SEQ ID NO: 4148 - RNA, 22 nt, Homo sapiens
aucauaugaaccaaacucuaau

SEQ ID NO: 4149 - RNA, 22 nt, Homo sapiens
auuagaguuugguucauaugau

SEQ ID NO: 4150 - RNA, 22 nt, Homo sapiens
uagagucuggcugauaugguuu

SEQ ID NO: 4151 - RNA, 22 nt, Homo sapiens
aaaccauaucagccagacucua

SEQ ID NO: 4152 - RNA, 21 nt, Homo sapiens
ccugugcucccagggccucgc

SEQ ID NO: 4153 - RNA, 21 nt, Homo sapiens
gcgaggcccugggagcacagg

SEQ ID NO: 4154 - RNA, 22 nt, Homo sapiens
ugaggcccuuggggcacagugg

SEQ ID NO: 4155 - RNA, 22 nt, Homo sapiens
ccacugugccccaagggccuca

SEQ ID NO: 4156 - RNA, 22 nt, Homo sapiens
uccuaaaucugaaaguccaaaa

SEQ ID NO: 4157 - RNA, 22 nt, Homo sapiens
uuuuggacuuucagauuuagga

SEQ ID NO: 4158 - RNA, 24 nt, Homo sapiens
uuggacuuuuucagauuuggggau

SEQ ID NO: 4159 - RNA, 24 nt, Homo sapiens
auccccaaaucugaaaaaguccaa

SEQ ID NO: 4160 - RNA, 22 nt, Homo sapiens
augcaccugggcaaggauucug

SEQ ID NO: 4161 - RNA, 22 nt, Homo sapiens
cagaauccuugcccaggugcau

SEQ ID NO: 4162 - RNA, 23 nt, Homo sapiens
uaauccuugcuaccugggugaga

SEQ ID NO: 4163 - RNA, 23 nt, Homo sapiens
ucucacccagguagcaaggauua

SEQ ID NO: 4164 - RNA, 22 nt, Homo sapiens
uuuugugucucccauuccccag

SEQ ID NO: 4165 - RNA, 22 nt, Homo sapiens
cuggggaaugggagacacaaaa

SEQ ID NO: 4166 - RNA, 22 nt, Homo sapiens
agggggauggcagagcaaaauu

SEQ ID NO: 4167 - RNA, 22 nt, Homo sapiens
aauuuugcucugccaucccccu

SEQ ID NO: 4168 - RNA, 22 nt, Homo sapiens
gugcauggcuguauauauaaca

SEQ ID NO: 4169 - RNA, 22 nt, Homo sapiens
uguuauauauacagccaugcac

SEQ ID NO: 4170 - RNA, 21 nt, Homo sapiens
uauauauacagccaugcacuc

SEQ ID NO: 4171 - RNA, 21 nt, Homo sapiens
gagugcauggcuguauauaua

SEQ ID NO: 4172 - RNA, 22 nt, Homo sapiens
aaugcacccgggcaaggauucu

SEQ ID NO: 4173 - RNA, 22 nt, Homo sapiens
agaauccuugcccgggugcauu

SEQ ID NO: 4174 - RNA, 22 nt, Homo sapiens
aauccuuugucccugggugaga

SEQ ID NO: 4175 - RNA, 22 nt, Homo sapiens
ucucacccagggacaaaggauu

SEQ ID NO: 4176 - RNA, 22 nt, Homo sapiens
aaugcaccugggcaaggauuca

SEQ ID NO: 4177 - RNA, 22 nt, Homo sapiens
ugaauccuugcccaggugcauu

SEQ ID NO: 4178 - RNA, 21 nt, Homo sapiens
auccuugcuaucugggugcua

SEQ ID NO: 4179 - RNA, 21 nt, Homo sapiens
uagcacccagauagcaaggau

SEQ ID NO: 4180 - RNA, 22 nt, Homo sapiens
agacccuggucugcacucuauc

SEQ ID NO: 4181 - RNA, 22 nt, Homo sapiens
gauagagugcagaccagggucu

SEQ ID NO: 4182 - RNA, 21 nt, Homo sapiens
uugcagcugcgguuguaaggu

SEQ ID NO: 4183 - RNA, 21 nt, Homo sapiens
accuuacaaccgcagcugcaa

SEQ ID NO: 4184 - RNA, 22 nt, Homo sapiens
cgucaacacuugcugguuuccu

SEQ ID NO: 4185 - RNA, 22 nt, Homo sapiens
aggaaaccagcaaguguugacg

SEQ ID NO: 4186 - RNA, 22 nt, Homo sapiens
gggagccaggaaguauugaugu

SEQ ID NO: 4187 - RNA, 22 nt, Homo sapiens
acaucaauacuuccuggcuccc

SEQ ID NO: 4188 - RNA, 21 nt, Homo sapiens
uaaggcacccuucugaguaga

SEQ ID NO: 4189 - RNA, 21 nt, Homo sapiens
ucuacucagaagggugccuua

SEQ ID NO: 4190 - RNA, 22 nt, Homo sapiens
uauucaggaagguguuacuuaa

SEQ ID NO: 4191 - RNA, 22 nt, Homo sapiens
uuaaguaacaccuuccugaaua

SEQ ID NO: 4192 - RNA, 21 nt, Homo sapiens
uuuugcaccuuuuggagugaa

SEQ ID NO: 4193 - RNA, 21 nt, Homo sapiens
uucacuccaaaaggugcaaaa

SEQ ID NO: 4194 - RNA, 23 nt, Homo sapiens
ugauuguagccuuuuggaguaga

SEQ ID NO: 4195 - RNA, 23 nt, Homo sapiens
ucuacuccaaaaggcuacaauca

SEQ ID NO: 4196 - RNA, 23 nt, Homo sapiens
ggguuuguagcuuugcuggcaug

SEQ ID NO: 4197 - RNA, 23 nt, Homo sapiens
caugccagcaaagcuacaaaccc

SEQ ID NO: 4198 - RNA, 23 nt, Homo sapiens
cagggcucagggauuggauggag

SEQ ID NO: 4199 - RNA, 23 nt, Homo sapiens
cuccauccaaucccugagcccug

SEQ ID NO: 4200 - RNA, 23 nt, Homo sapiens
augcuacucggaaaucccacuga

SEQ ID NO: 4201 - RNA, 23 nt, Homo sapiens
ucagugggauuuccgaguagcau

SEQ ID NO: 4202 - RNA, 21 nt, Homo sapiens
gugggauuucugaguagcauc

SEQ ID NO: 4203 - RNA, 21 nt, Homo sapiens
gaugcuacucagaaaucccac

SEQ ID NO: 4204 - RNA, 23 nt, Homo sapiens
ccggggcagauugguguagggug

SEQ ID NO: 4205 - RNA, 23 nt, Homo sapiens
cacccuacaccaaucugccccgg

SEQ ID NO: 4206 - RNA, 23 nt, Homo sapiens
acggagacgacaagacugugcug

SEQ ID NO: 4207 - RNA, 23 nt, Homo sapiens
cagcacagucuugucgucuccgu

SEQ ID NO: 4208 - RNA, 22 nt, Homo sapiens
aauccacgcugagcuuggcauc

SEQ ID NO: 4209 - RNA, 22 nt, Homo sapiens
gaugccaagcucagcguggauu

SEQ ID NO: 4210 - RNA, 23 nt, Homo sapiens
aggaaaugaggcuggcuaggagc

SEQ ID NO: 4211 - RNA, 23 nt, Homo sapiens
gcuccuagccagccucauuuccu

SEQ ID NO: 4212 - RNA, 22 nt, Homo sapiens
ugauugguacgucuguggguag

SEQ ID NO: 4213 - RNA, 22 nt, Homo sapiens
cuacccacagacguaccaauca

SEQ ID NO: 4214 - RNA, 22 nt, Homo sapiens
aaucagugaaugccuugaaccu

SEQ ID NO: 4215 - RNA, 22 nt, Homo sapiens
agguucaaggcauucacugauu

SEQ ID NO: 4216 - RNA, 21 nt, Homo sapiens
uuacaggcgugaaccaccgcg

SEQ ID NO: 4217 - RNA, 21 nt, Homo sapiens
cgcggugguucacgccuguaa

SEQ ID NO: 4218 - RNA, 21 nt, Homo sapiens
uacugcagacaguggcaauca

SEQ ID NO: 4219 - RNA, 21 nt, Homo sapiens
ugauugccacugucugcagua

SEQ ID NO: 4220 - RNA, 21 nt, Homo sapiens
guuucaccauguuggucaggc

SEQ ID NO: 4221 - RNA, 21 nt, Homo sapiens
gccugaccaacauggugaaac

SEQ ID NO: 4222 - RNA, 23 nt, Homo sapiens
uaaauuucaccuuucugagaagg

SEQ ID NO: 4223 - RNA, 23 nt, Homo sapiens
ccuucucagaaaggugaaauuua

SEQ ID NO: 4224 - RNA, 22 nt, Homo sapiens
uucacaaggaggugucauuuau

SEQ ID NO: 4225 - RNA, 22 nt, Homo sapiens
auaaaugacaccuccuugugaa

SEQ ID NO: 4226 - RNA, 23 nt, Homo sapiens
uaaauuucaccuuucugagaaga

SEQ ID NO: 4227 - RNA, 23 nt, Homo sapiens
ucuucucagaaaggugaaauuua

SEQ ID NO: 4228 - RNA, 22 nt, Homo sapiens
uucucaaggaggugucguuuau

SEQ ID NO: 4229 - RNA, 22 nt, Homo sapiens
auaaacgacaccuccuugagaa

SEQ ID NO: 4230 - RNA, 21 nt, Homo sapiens
auugacacuucugugaguaga

SEQ ID NO: 4231 - RNA, 21 nt, Homo sapiens
ucuacucacagaagugucaau

SEQ ID NO: 4232 - RNA, 23 nt, Homo sapiens
uacucuggagagugacaaucaug

SEQ ID NO: 4233 - RNA, 23 nt, Homo sapiens
caugauugucacucuccagagua

SEQ ID NO: 4234 - RNA, 21 nt, Homo sapiens
auugacaccucugugagugga

SEQ ID NO: 4235 - RNA, 21 nt, Homo sapiens
uccacucacagaggugucaau

SEQ ID NO: 4236 - RNA, 22 nt, Homo sapiens
uucucaagagggaggcaaucau

SEQ ID NO: 4237 - RNA, 22 nt, Homo sapiens
augauugccucccucuugagaa

SEQ ID NO: 4238 - RNA, 22 nt, Homo sapiens
gagugccuucuuuuggagcguu

SEQ ID NO: 4239 - RNA, 22 nt, Homo sapiens
aacgcuccaaaagaaggcacuc

SEQ ID NO: 4240 - RNA, 18 nt, Homo sapiens
ugcuuccuuucagagggu

SEQ ID NO: 4241 - RNA, 18 nt, Homo sapiens
acccucugaaaggaagca

SEQ ID NO: 4242 - RNA, 22 nt, Homo sapiens
aucuggagguaagaagcacuuu

SEQ ID NO: 4243 - RNA, 22 nt, Homo sapiens
aaagugcuucuuaccuccagau

SEQ ID NO: 4244 - RNA, 22 nt, Homo sapiens
gaaagcgcuucccuuugcugga

SEQ ID NO: 4245 - RNA, 22 nt, Homo sapiens
uccagcaaagggaagcgcuuuc

SEQ ID NO: 4246 - RNA, 20 nt, Homo sapiens
cugcaaagggaagcccuuuc

SEQ ID NO: 4247 - RNA, 20 nt, Homo sapiens
gaaagggcuucccuuugcag

SEQ ID NO: 4248 - RNA, 21 nt, Homo sapiens
caaagcgcuucccuuuggagc

SEQ ID NO: 4249 - RNA, 21 nt, Homo sapiens
gcuccaaagggaagcgcuuug

SEQ ID NO: 4250 - RNA, 22 nt, Homo sapiens
cucuagagggaagcacuuucug

SEQ ID NO: 4251 - RNA, 22 nt, Homo sapiens
cagaaagugcuucccucuagag

SEQ ID NO: 4252 - RNA, 21 nt, Homo sapiens
aaagcgcuucccuucagagug

SEQ ID NO: 4253 - RNA, 21 nt, Homo sapiens
cacucugaagggaagcgcuuu

SEQ ID NO: 4254 - RNA, 22 nt, Homo sapiens
cucuagagggaagcgcuuucug

SEQ ID NO: 4255 - RNA, 22 nt, Homo sapiens
cagaaagcgcuucccucuagag

SEQ ID NO: 4256 - RNA, 22 nt, Homo sapiens
aaagugcauccuuuuagagguu

SEQ ID NO: 4257 - RNA, 22 nt, Homo sapiens
aaccucuaaaaggaugcacuuu

SEQ ID NO: 4258 - RNA, 22 nt, Homo sapiens
cucuagagggaagcgcuuucug

SEQ ID NO: 4259 - RNA, 22 nt, Homo sapiens
cagaaagcgcuucccucuagag

SEQ ID NO: 4260 - RNA, 22 nt, Homo sapiens
aaagugcaucuuuuuagaggau

SEQ ID NO: 4261 - RNA, 22 nt, Homo sapiens
auccucuaaaaagaugcacuuu

SEQ ID NO: 4262 - RNA, 22 nt, Homo sapiens
cucuagagggaagcgcuuucug

SEQ ID NO: 4263 - RNA, 22 nt, Homo sapiens
cagaaagcgcuucccucuagag

SEQ ID NO: 4264 - RNA, 21 nt, Homo sapiens
aaagugcuuccuuuuagaggg

SEQ ID NO: 4265 - RNA, 21 nt, Homo sapiens
cccucuaaaaggaagcacuuu

SEQ ID NO: 4266 - RNA, 22 nt, Homo sapiens
aaagugcuuccuuuuagagggu

SEQ ID NO: 4267 - RNA, 22 nt, Homo sapiens
acccucuaaaaggaagcacuuu

SEQ ID NO: 4268 - RNA, 22 nt, Homo sapiens
cucuagagggaagcacuuucug

SEQ ID NO: 4269 - RNA, 22 nt, Homo sapiens
cagaaagugcuucccucuagag

SEQ ID NO: 4270 - RNA, 22 nt, Homo sapiens
aaagugcuucucuuuggugggu

SEQ ID NO: 4271 - RNA, 22 nt, Homo sapiens
acccaccaaagagaagcacuuu

SEQ ID NO: 4272 - RNA, 20 nt, Homo sapiens
cuacaaagggaagcccuuuc

SEQ ID NO: 4273 - RNA, 20 nt, Homo sapiens
gaaagggcuucccuuuguag

SEQ ID NO: 4274 - RNA, 21 nt, Homo sapiens
aaagugcuuccuuuuugaggg

SEQ ID NO: 4275 - RNA, 21 nt, Homo sapiens
cccucaaaaaggaagcacuuu

SEQ ID NO: 4276 - RNA, 22 nt, Homo sapiens
aagugcuuccuuuuagaggguu

SEQ ID NO: 4277 - RNA, 22 nt, Homo sapiens
aacccucuaaaaggaagcacuu

SEQ ID NO: 4278 - RNA, 24 nt, Homo sapiens
acaaagugcuucccuuuagagugu

SEQ ID NO: 4279 - RNA, 24 nt, Homo sapiens
acacucuaaagggaagcacuuugu

SEQ ID NO: 4280 - RNA, 22 nt, Homo sapiens
aacgcacuucccuuuagagugu

SEQ ID NO: 4281 - RNA, 22 nt, Homo sapiens
acacucuaaagggaagugcguu

SEQ ID NO: 4282 - RNA, 22 nt, Homo sapiens
aaaaugguucccuuuagagugu

SEQ ID NO: 4283 - RNA, 22 nt, Homo sapiens
acacucuaaagggaaccauuuu

SEQ ID NO: 4284 - RNA, 22 nt, Homo sapiens
cucuagagggaagcgcuuucug

SEQ ID NO: 4285 - RNA, 22 nt, Homo sapiens
cagaaagcgcuucccucuagag

SEQ ID NO: 4286 - RNA, 23 nt, Homo sapiens
gaacgcgcuucccuauagagggu

SEQ ID NO: 4287 - RNA, 23 nt, Homo sapiens
acccucuauagggaagcgcguuc

SEQ ID NO: 4288 - RNA, 22 nt, Homo sapiens
cucuagagggaagcgcuuucug

SEQ ID NO: 4289 - RNA, 22 nt, Homo sapiens
cagaaagcgcuucccucuagag

SEQ ID NO: 4290 - RNA, 21 nt, Homo sapiens
gaaggcgcuucccuuuggagu

SEQ ID NO: 4291 - RNA, 21 nt, Homo sapiens
acuccaaagggaagcgccuuc

SEQ ID NO: 4292 - RNA, 20 nt, Homo sapiens
cugcaaagggaagcccuuuc

SEQ ID NO: 4293 - RNA, 20 nt, Homo sapiens
gaaagggcuucccuuugcag

SEQ ID NO: 4294 - RNA, 22 nt, Homo sapiens
ccucccacacccaaggcuugca

SEQ ID NO: 4295 - RNA, 22 nt, Homo sapiens
ugcaagccuugggugugggagg

SEQ ID NO: 4296 - RNA, 22 nt, Homo sapiens
caugccuugaguguaggaccgu

SEQ ID NO: 4297 - RNA, 22 nt, Homo sapiens
acgguccuacacucaaggcaug

SEQ ID NO: 4298 - RNA, 22 nt, Homo sapiens
aucauacaaggacaauuucuuu

SEQ ID NO: 4299 - RNA, 22 nt, Homo sapiens
aaagaaauuguccuuguaugau

SEQ ID NO: 4300 - RNA, 22 nt, Homo sapiens
ggagaaauuauccuuggugugu

SEQ ID NO: 4301 - RNA, 22 nt, Homo sapiens
acacaccaaggauaauuucucc

SEQ ID NO: 4302 - RNA, 22 nt, Homo sapiens
uggugggcacagaaucuggacu

SEQ ID NO: 4303 - RNA, 22 nt, Homo sapiens
aguccagauucugugcccacca

SEQ ID NO: 4304 - RNA, 25 nt, Homo sapiens
aaaggauucugcugucggucccacu

SEQ ID NO: 4305 - RNA, 25 nt, Homo sapiens
agugggaccgacagcagaauccuuu

SEQ ID NO: 4306 - RNA, 23 nt, Homo sapiens
ucggggaucaucaugucacgaga

SEQ ID NO: 4307 - RNA, 23 nt, Homo sapiens
ucucgugacaugaugauccccga

SEQ ID NO: 4308 - RNA, 22 nt, Homo sapiens
aaacauucgcggugcacuucuu

SEQ ID NO: 4309 - RNA, 22 nt, Homo sapiens
aagaagugcaccgcgaauguuu

SEQ ID NO: 4310 - RNA, 22 nt, Homo sapiens
auucugcauuuuuagcaaguuc

SEQ ID NO: 4311 - RNA, 22 nt, Homo sapiens
gaacuugcuaaaaaugcagaau

SEQ ID NO: 4312 - RNA, 22 nt, Homo sapiens
accugagguugugcauuucuaa

SEQ ID NO: 4313 - RNA, 22 nt, Homo sapiens
uuagaaaugcacaaccucaggu

SEQ ID NO: 4314 - RNA, 22 nt, Homo sapiens
ucagcaaacauuuauugugugc

SEQ ID NO: 4315 - RNA, 22 nt, Homo sapiens
gcacacaauaaauguuugcuga

SEQ ID NO: 4316 - RNA, 22 nt, Homo sapiens
ucaguaaauguuuauuagauga

SEQ ID NO: 4317 - RNA, 22 nt, Homo sapiens
ucaucuaauaaacauuuacuga

SEQ ID NO: 4318 - RNA, 22 nt, Homo sapiens
agcuacaguuacuuuugcacca

SEQ ID NO: 4319 - RNA, 22 nt, Homo sapiens
uggugcaaaaguaacuguagcu

SEQ ID NO: 4320 - RNA, 20 nt, Homo sapiens
uaaaaacugcaauuacuuuc

SEQ ID NO: 4321 - RNA, 20 nt, Homo sapiens
gaaaguaauugcaguuuuua

SEQ ID NO: 4322 - RNA, 23 nt, Homo sapiens
ugcaaaaguaauugcaguuuuug

SEQ ID NO: 4323 - RNA, 23 nt, Homo sapiens
caaaaacugcaauuacuuuugca

SEQ ID NO: 4324 - RNA, 22 nt, Homo sapiens
aaagaccgugacuacuuuugca

SEQ ID NO: 4325 - RNA, 22 nt, Homo sapiens
ugcaaaaguagucacggucuuu

SEQ ID NO: 4326 - RNA, 22 nt, Homo sapiens
agaaguaacuacgguuuuugca

SEQ ID NO: 4327 - RNA, 22 nt, Homo sapiens
ugcaaaaaccguaguuacuucu

SEQ ID NO: 4328 - RNA, 19 nt, Homo sapiens
aaaaaccacaauuacuuuu

SEQ ID NO: 4329 - RNA, 19 nt, Homo sapiens
aaaaguaauugugguuuuu

SEQ ID NO: 4330 - RNA, 19 nt, Homo sapiens
aaaaguaauugcggucuuu

SEQ ID NO: 4331 - RNA, 19 nt, Homo sapiens
aaagaccgcaauuacuuuu

SEQ ID NO: 4332 - RNA, 22 nt, Homo sapiens
caaaaacugcaauuacuuuugc

SEQ ID NO: 4333 - RNA, 22 nt, Homo sapiens
gcaaaaguaauugcaguuuuug

SEQ ID NO: 4334 - RNA, 22 nt, Homo sapiens
gaaaguaauugcuguuuuugcc

SEQ ID NO: 4335 - RNA, 22 nt, Homo sapiens
ggcaaaaacagcaauuacuuuc

SEQ ID NO: 4336 - RNA, 21 nt, Homo sapiens
uaaaacugcaguuauuuuugc

SEQ ID NO: 4337 - RNA, 21 nt, Homo sapiens
gcaaaaauaacugcaguuuua

SEQ ID NO: 4338 - RNA, 21 nt, Homo sapiens
aaaaguaauugcaguuuuugc

SEQ ID NO: 4339 - RNA, 21 nt, Homo sapiens
gcaaaaacugcaauuacuuuu

SEQ ID NO: 4340 - RNA, 22 nt, Homo sapiens
uaaaacccacaauuauguuugu

SEQ ID NO: 4341 - RNA, 22 nt, Homo sapiens
acaaacauaauuguggguuuua

SEQ ID NO: 4342 - RNA, 22 nt, Homo sapiens
aaaaguaauugcggguuuugcc

SEQ ID NO: 4343 - RNA, 22 nt, Homo sapiens
ggcaaaacccgcaauuacuuuu

SEQ ID NO: 4344 - RNA, 21 nt, Homo sapiens
caaaaccgcaguaacuuuugu

SEQ ID NO: 4345 - RNA, 21 nt, Homo sapiens
acaaaaguuacugcgguuuug

SEQ ID NO: 4346 - RNA, 22 nt, Homo sapiens
aaaaguuauugcgguuuuggcu

SEQ ID NO: 4347 - RNA, 22 nt, Homo sapiens
agccaaaaccgcaauaacuuuu

SEQ ID NO: 4348 - RNA, 21 nt, Homo sapiens
uggcaguuacuuuugcaccag

SEQ ID NO: 4349 - RNA, 21 nt, Homo sapiens
cuggugcaaaaguaacugcca

SEQ ID NO: 4350 - RNA, 21 nt, Homo sapiens
aaaaguaauugcgguuuuugc

SEQ ID NO: 4351 - RNA, 21 nt, Homo sapiens
gcaaaaaccgcaauuacuuuu

SEQ ID NO: 4352 - RNA, 20 nt, Homo sapiens
aaaacugcaguuacuuuugc

SEQ ID NO: 4353 - RNA, 20 nt, Homo sapiens
gcaaaaguaacugcaguuuu

SEQ ID NO: 4354 - RNA, 18 nt, Homo sapiens
aaaaguacuugcggauuu

SEQ ID NO: 4355 - RNA, 18 nt, Homo sapiens
aaauccgcaaguacuuuu

SEQ ID NO: 4356 - RNA, 20 nt, Homo sapiens
gugcaaaagucaucacgguu

SEQ ID NO: 4357 - RNA, 20 nt, Homo sapiens
aaccgugaugacuuuugcac

SEQ ID NO: 4358 - RNA, 22 nt, Homo sapiens
gcuggugcaaaaguaauggcgg

SEQ ID NO: 4359 - RNA, 22 nt, Homo sapiens
ccgccauuacuuuugcaccagc

SEQ ID NO: 4360 - RNA, 22 nt, Homo sapiens
aaaaguaaucacuguuuuugcc

SEQ ID NO: 4361 - RNA, 22 nt, Homo sapiens
ggcaaaaacagugauuacuuuu

SEQ ID NO: 4362 - RNA, 20 nt, Homo sapiens
agugccugagggaguaagag

SEQ ID NO: 4363 - RNA, 20 nt, Homo sapiens
cucuuacucccucaggcacu

SEQ ID NO: 4364 - RNA, 22 nt, Homo sapiens
ugucuuacucccucaggcacau

SEQ ID NO: 4365 - RNA, 22 nt, Homo sapiens
augugccugagggaguaagaca

SEQ ID NO: 4366 - RNA, 23 nt, Homo sapiens
agugccugagggaguaagagccc

SEQ ID NO: 4367 - RNA, 23 nt, Homo sapiens
gggcucuuacucccucaggcacu

SEQ ID NO: 4368 - RNA, 21 nt, Homo sapiens
gcgacccacucuugguuucca

SEQ ID NO: 4369 - RNA, 21 nt, Homo sapiens
uggaaaccaagagugggucgc

SEQ ID NO: 4370 - RNA, 22 nt, Homo sapiens
uuagcuuaaggaguaccagauc

SEQ ID NO: 4371 - RNA, 22 nt, Homo sapiens
gaucugguacuccuuaagcuaa

SEQ ID NO: 4372 - RNA, 21 nt, Homo sapiens
uaugguacuccuuaagcuaac

SEQ ID NO: 4373 - RNA, 21 nt, Homo sapiens
guuagcuuaaggaguaccaua

SEQ ID NO: 4374 - RNA, 19 nt, Homo sapiens
ugagcugcuguaccaaaau

SEQ ID NO: 4375 - RNA, 19 nt, Homo sapiens
auuuugguacagcagcuca

SEQ ID NO: 4376 - RNA, 22 nt, Homo sapiens
cacauaugaagugagccagcac

SEQ ID NO: 4377 - RNA, 22 nt, Homo sapiens
gugcuggcucacuucauaugug

SEQ ID NO: 4378 - RNA, 22 nt, Homo sapiens
ugcuggcucauuucauaugugu

SEQ ID NO: 4379 - RNA, 22 nt, Homo sapiens
acacauaugaaaugagccagca

SEQ ID NO: 4380 - RNA, 22 nt, Homo sapiens
uuccaugccuccuagaaguucc

SEQ ID NO: 4381 - RNA, 22 nt, Homo sapiens
ggaacuucuaggaggcauggaa

SEQ ID NO: 4382 - RNA, 22 nt, Homo sapiens
agccuuccaggagaaauggaga

SEQ ID NO: 4383 - RNA, 22 nt, Homo sapiens
ucuccauuucuccuggaaggcu

SEQ ID NO: 4384 - RNA, 22 nt, Homo sapiens
uaaaacuuuaagugugccuagg

SEQ ID NO: 4385 - RNA, 22 nt, Homo sapiens
ccuaggcacacuuaaaguuuua

SEQ ID NO: 4386 - RNA, 22 nt, Homo sapiens
uaggcacacuuaaaguuauagc

SEQ ID NO: 4387 - RNA, 22 nt, Homo sapiens
gcuauaacuuuaagugugccua

SEQ ID NO: 4388 - RNA, 22 nt, Homo sapiens
gaauauggguauauuaguuugg

SEQ ID NO: 4389 - RNA, 22 nt, Homo sapiens
ccaaacuaauauacccauauuc

SEQ ID NO: 4390 - RNA, 22 nt, Homo sapiens
aaacuaauauacccauauucug

SEQ ID NO: 4391 - RNA, 22 nt, Homo sapiens
cagaauauggguauauuaguuu

SEQ ID NO: 4392 - RNA, 22 nt, Homo sapiens
uaguucuucccuuugcccaauu

SEQ ID NO: 4393 - RNA, 22 nt, Homo sapiens
aauugggcaaagggaagaacua

SEQ ID NO: 4394 - RNA, 22 nt, Homo sapiens
cagggaaaugggaagaacuaga

SEQ ID NO: 4395 - RNA, 22 nt, Homo sapiens
ucuaguucuucccauuucccug

SEQ ID NO: 4396 - RNA, 22 nt, Homo sapiens
cugaauagcugggacuacaggu

SEQ ID NO: 4397 - RNA, 22 nt, Homo sapiens
accuguagucccagcuauucag

SEQ ID NO: 4398 - RNA, 22 nt, Homo sapiens
ugaaguaccagcuacucgagag

SEQ ID NO: 4399 - RNA, 22 nt, Homo sapiens
cucucgaguagcugguacuuca

SEQ ID NO: 4400 - RNA, 22 nt, Homo sapiens
cagagugacaagcugguuaaag

SEQ ID NO: 4401 - RNA, 22 nt, Homo sapiens
cuuuaaccagcuugucacucug

SEQ ID NO: 4402 - RNA, 22 nt, Homo sapiens
uauccagcuuguuacuauaugc

SEQ ID NO: 4403 - RNA, 22 nt, Homo sapiens
gcauauaguaacaagcuggaua

SEQ ID NO: 4404 - RNA, 21 nt, Homo sapiens
gccccgggcagugugaucauc

SEQ ID NO: 4405 - RNA, 21 nt, Homo sapiens
gaugaucacacugcccggggc

SEQ ID NO: 4406 - RNA, 18 nt, Homo sapiens
auggucaccuccgggacu

SEQ ID NO: 4407 - RNA, 18 nt, Homo sapiens
agucccggaggugaccau

SEQ ID NO: 4408 - RNA, 19 nt, Homo sapiens
aagucccacuaaugccagc

SEQ ID NO: 4409 - RNA, 19 nt, Homo sapiens
gcuggcauuagugggacuu

SEQ ID NO: 4410 - RNA, 21 nt, Homo sapiens
acuggcauuagugggacuuuu

SEQ ID NO: 4411 - RNA, 21 nt, Homo sapiens
aaaagucccacuaaugccagu

SEQ ID NO: 4412 - RNA, 23 nt, Homo sapiens
ugcacauggcaaccuagcuccca

SEQ ID NO: 4413 - RNA, 23 nt, Homo sapiens
ugggagcuagguugccaugugca

SEQ ID NO: 4414 - RNA, 21 nt, Homo sapiens
ggcugggugcucuugugcagu

SEQ ID NO: 4415 - RNA, 21 nt, Homo sapiens
acugcacaagagcacccagcc

SEQ ID NO: 4416 - RNA, 21 nt, Homo sapiens
uaaaguaaauaugcaccaaaa

SEQ ID NO: 4417 - RNA, 21 nt, Homo sapiens
uuuuggugcauauuuacuuua

SEQ ID NO: 4418 - RNA, 21 nt, Homo sapiens
aauaaaguucauguauggcaa

SEQ ID NO: 4419 - RNA, 21 nt, Homo sapiens
uugccauacaugaacuuuauu

SEQ ID NO: 4420 - RNA, 21 nt, Homo sapiens
uugccauacauagacuuuauu

SEQ ID NO: 4421 - RNA, 21 nt, Homo sapiens
aauaaagucuauguauggcaa

SEQ ID NO: 4422 - RNA, 21 nt, Homo sapiens
auacccauagcuuagcuccca

SEQ ID NO: 4423 - RNA, 21 nt, Homo sapiens
ugggagcuaagcuauggguau

SEQ ID NO: 4424 - RNA, 21 nt, Homo sapiens
ugggagcuaagcuauggguau

SEQ ID NO: 4425 - RNA, 21 nt, Homo sapiens
auacccauagcuuagcuccca

SEQ ID NO: 4426 - RNA, 22 nt, Homo sapiens
caaaguuuaagauccuugaagu

SEQ ID NO: 4427 - RNA, 22 nt, Homo sapiens
acuucaaggaucuuaaacuuug

SEQ ID NO: 4428 - RNA, 22 nt, Homo sapiens
aucaaggaucuuaaacuuugcc

SEQ ID NO: 4429 - RNA, 22 nt, Homo sapiens
ggcaaaguuuaagauccuugau

SEQ ID NO: 4430 - RNA, 20 nt, Homo sapiens
aaaguagcuguaccauuugc

SEQ ID NO: 4431 - RNA, 20 nt, Homo sapiens
gcaaaugguacagcuacuuu

SEQ ID NO: 4432 - RNA, 19 nt, Homo sapiens
aggcacggugucagcaggc

SEQ ID NO: 4433 - RNA, 19 nt, Homo sapiens
gccugcugacaccgugccu

SEQ ID NO: 4434 - RNA, 19 nt, Homo sapiens
gggcgccugugaucccaac

SEQ ID NO: 4435 - RNA, 19 nt, Homo sapiens
guugggaucacaggcgccc

SEQ ID NO: 4436 - RNA, 23 nt, Homo sapiens
aguauguucuuccaggacagaac

SEQ ID NO: 4437 - RNA, 23 nt, Homo sapiens
guucuguccuggaagaacauacu

SEQ ID NO: 4438 - RNA, 22 nt, Homo sapiens
gagaaaugcuggacuaaucugc

SEQ ID NO: 4439 - RNA, 22 nt, Homo sapiens
gcagauuaguccagcauuucuc

SEQ ID NO: 4440 - RNA, 22 nt, Homo sapiens
agaaaggguggcaauaccucuu

SEQ ID NO: 4441 - RNA, 22 nt, Homo sapiens
aagagguauugccacccuuucu

SEQ ID NO: 4442 - RNA, 22 nt, Homo sapiens
agguauugccacccuuucuagu

SEQ ID NO: 4443 - RNA, 22 nt, Homo sapiens
acuagaaaggguggcaauaccu

SEQ ID NO: 4444 - RNA, 22 nt, Homo sapiens
guagcaccuugcaggauaaggu

SEQ ID NO: 4445 - RNA, 22 nt, Homo sapiens
accuuauccugcaaggugcuac

SEQ ID NO: 4446 - RNA, 24 nt, Homo sapiens
uacagaugcagauucucugacuuc

SEQ ID NO: 4447 - RNA, 24 nt, Homo sapiens
gaagucagagaaucugcaucugua

SEQ ID NO: 4448 - RNA, 20 nt, Homo sapiens
aacucuagccugagcaacag

SEQ ID NO: 4449 - RNA, 20 nt, Homo sapiens
cuguugcucaggcuagaguu

SEQ ID NO: 4450 - RNA, 22 nt, Homo sapiens
acagcccagcaguuaucacggg

SEQ ID NO: 4451 - RNA, 22 nt, Homo sapiens
cccgugauaacugcugggcugu

SEQ ID NO: 4452 - RNA, 21 nt, Homo sapiens
uaucguaucguauuguauugu

SEQ ID NO: 4453 - RNA, 21 nt, Homo sapiens
acaauacaauacgauacgaua

SEQ ID NO: 4454 - RNA, 22 nt, Homo sapiens
uuagaacguuuuagggucaaau

SEQ ID NO: 4455 - RNA, 22 nt, Homo sapiens
auuugacccuaaaacguucuaa

SEQ ID NO: 4456 - RNA, 22 nt, Homo sapiens
uaacaaacaccuguaaaacagc

SEQ ID NO: 4457 - RNA, 22 nt, Homo sapiens
gcuguuuuacagguguuuguua

SEQ ID NO: 4458 - RNA, 22 nt, Homo sapiens
agcauacaccuguaguccuaga

SEQ ID NO: 4459 - RNA, 22 nt, Homo sapiens
ucuaggacuacagguguaugcu

SEQ ID NO: 4460 - RNA, 21 nt, Homo sapiens
aguuaaugaauccuggaaagu

SEQ ID NO: 4461 - RNA, 21 nt, Homo sapiens
acuuuccaggauucauuaacu

SEQ ID NO: 4462 - RNA, 21 nt, Homo sapiens
ucagcuacuaccucuauuagg

SEQ ID NO: 4463 - RNA, 21 nt, Homo sapiens
ccuaauagagguaguagcuga

SEQ ID NO: 4464 - RNA, 22 nt, Homo sapiens
uugcucugagcuccgagaaagc

SEQ ID NO: 4465 - RNA, 22 nt, Homo sapiens
gcuuucucggagcucagagcaa

SEQ ID NO: 4466 - RNA, 22 nt, Homo sapiens
caaauaauaccacagugggugu

SEQ ID NO: 4467 - RNA, 22 nt, Homo sapiens
acacccacugugguauuauuug

SEQ ID NO: 4468 - RNA, 20 nt, Homo sapiens
aauaauaucacaguaggugu

SEQ ID NO: 4469 - RNA, 20 nt, Homo sapiens
acaccuacugugauauuauu

SEQ ID NO: 4470 - RNA, 22 nt, Homo sapiens
aauaauaucacaguagguguac

SEQ ID NO: 4471 - RNA, 22 nt, Homo sapiens
guacaccuacugugauauuauu

SEQ ID NO: 4472 - RNA, 22 nt, Homo sapiens
gcaguggcucugaaaugaacuc

SEQ ID NO: 4473 - RNA, 22 nt, Homo sapiens
gaguucauuucagagccacugc

SEQ ID NO: 4474 - RNA, 21 nt, Homo sapiens
cagaucaugggacugucucag

SEQ ID NO: 4475 - RNA, 21 nt, Homo sapiens
cugagacagucccaugaucug

SEQ ID NO: 4476 - RNA, 22 nt, Homo sapiens
acuccaagaagaaucuagacag

SEQ ID NO: 4477 - RNA, 22 nt, Homo sapiens
cugucuagauucuucuuggagu

SEQ ID NO: 4478 - RNA, 22 nt, Homo sapiens
cucauuuaaguagucugaugcc

SEQ ID NO: 4479 - RNA, 22 nt, Homo sapiens
ggcaucagacuacuuaaaugag

SEQ ID NO: 4480 - RNA, 22 nt, Homo sapiens
ucaaguaguuucaugauaaagg

SEQ ID NO: 4481 - RNA, 22 nt, Homo sapiens
ccuuuaucaugaaacuacuuga

SEQ ID NO: 4482 - RNA, 22 nt, Homo sapiens
ugggggagugcagugauugugg

SEQ ID NO: 4483 - RNA, 22 nt, Homo sapiens
ccacaaucacugcacuccccca

SEQ ID NO: 4484 - RNA, 22 nt, Homo sapiens
uccugucuuuccuuguuggagc

SEQ ID NO: 4485 - RNA, 22 nt, Homo sapiens
gcuccaacaaggaaagacagga

SEQ ID NO: 4486 - RNA, 22 nt, Homo sapiens
uaaugcauuaaauuauugaagg

SEQ ID NO: 4487 - RNA, 22 nt, Homo sapiens
ccuucaauaauuuaaugcauua

SEQ ID NO: 4488 - RNA, 19 nt, Homo sapiens
uuauugucacguucugauu

SEQ ID NO: 4489 - RNA, 19 nt, Homo sapiens
aaucagaacgugacaauaa

SEQ ID NO: 4490 - RNA, 22 nt, Homo sapiens
ugagucagcaacauaucccaug

SEQ ID NO: 4491 - RNA, 22 nt, Homo sapiens
caugggauauguugcugacuca

SEQ ID NO: 4492 - RNA, 18 nt, Homo sapiens
aggagaagucgggaaggu

SEQ ID NO: 4493 - RNA, 18 nt, Homo sapiens
accuucccgacuucuccu

SEQ ID NO: 4494 - RNA, 22 nt, Homo sapiens
cgaaaacagcaauuaccuuugc

SEQ ID NO: 4495 - RNA, 22 nt, Homo sapiens
gcaaagguaauugcuguuuucg

SEQ ID NO: 4496 - RNA, 22 nt, Homo sapiens
uuaggccaucaucccauuaugc

SEQ ID NO: 4497 - RNA, 22 nt, Homo sapiens
gcauaaugggaugauggccuaa

SEQ ID NO: 4498 - RNA, 23 nt, Homo sapiens
uguuucggggcucauggccugug

SEQ ID NO: 4499 - RNA, 23 nt, Homo sapiens
cacaggccaugagccccgaaaca

SEQ ID NO: 4500 - RNA, 22 nt, Homo sapiens
aaagguaauugcaguuuuuccc

SEQ ID NO: 4501 - RNA, 22 nt, Homo sapiens
gggaaaaacugcaauuaccuuu

SEQ ID NO: 4502 - RNA, 22 nt, Homo sapiens
uucuggauaacaugcugaagcu

SEQ ID NO: 4503 - RNA, 22 nt, Homo sapiens
agcuucagcauguuauccagaa

SEQ ID NO: 4504 - RNA, 22 nt, Homo sapiens
acguuugaaugcuguacaaggc

SEQ ID NO: 4505 - RNA, 22 nt, Homo sapiens
gccuuguacagcauucaaacgu

SEQ ID NO: 4506 - RNA, 20 nt, Homo sapiens
augagcgacugugccugacc

SEQ ID NO: 4507 - RNA, 20 nt, Homo sapiens
ggucaggcacagucgcucau

SEQ ID NO: 4508 - RNA, 19 nt, Homo sapiens
gagccaguuggacaggagc

SEQ ID NO: 4509 - RNA, 19 nt, Homo sapiens
gcuccuguccaacuggcuc

SEQ ID NO: 4510 - RNA, 23 nt, Homo sapiens
uucauuugguauaaaccgcgauu

SEQ ID NO: 4511 - RNA, 23 nt, Homo sapiens
aaucgcgguuuauaccaaaugaa

SEQ ID NO: 4512 - RNA, 22 nt, Homo sapiens
uugagaaugaugaaucauuagg

SEQ ID NO: 4513 - RNA, 22 nt, Homo sapiens
ccuaaugauucaucauucucaa

SEQ ID NO: 4514 - RNA, 23 nt, Homo sapiens
uuacaguuguucaaccaguuacu

SEQ ID NO: 4515 - RNA, 23 nt, Homo sapiens
aguaacugguugaacaacuguaa

SEQ ID NO: 4516 - RNA, 21 nt, Homo sapiens
caaagaggaaggucccauuac

SEQ ID NO: 4517 - RNA, 21 nt, Homo sapiens
guaaugggaccuuccucuuug

SEQ ID NO: 4518 - RNA, 22 nt, Homo sapiens
ucaguuccaggccaaccaggcu

SEQ ID NO: 4519 - RNA, 22 nt, Homo sapiens
agccugguuggccuggaacuga

SEQ ID NO: 4520 - RNA, 22 nt, Homo sapiens
uuaugguuugccugggacugag

SEQ ID NO: 4521 - RNA, 22 nt, Homo sapiens
cucagucccaggcaaaccauaa

SEQ ID NO: 4522 - RNA, 19 nt, Homo sapiens
ugggcguaucuguaugcua

SEQ ID NO: 4523 - RNA, 19 nt, Homo sapiens
uagcauacagauacgccca

SEQ ID NO: 4524 - RNA, 20 nt, Homo sapiens
agaccauggguucucauugu

SEQ ID NO: 4525 - RNA, 20 nt, Homo sapiens
acaaugagaacccauggucu

SEQ ID NO: 4526 - RNA, 22 nt, Homo sapiens
uugugucaauaugcgaugaugu

SEQ ID NO: 4527 - RNA, 22 nt, Homo sapiens
acaucaucgcauauugacacaa

SEQ ID NO: 4528 - RNA, 19 nt, Homo sapiens
ugucucugcugggguuucu

SEQ ID NO: 4529 - RNA, 19 nt, Homo sapiens
agaaaccccagcagagaca

SEQ ID NO: 4530 - RNA, 25 nt, Homo sapiens
aggcaccagccaggcauugcucagc

SEQ ID NO: 4531 - RNA, 25 nt, Homo sapiens
gcugagcaaugccuggcuggugccu

SEQ ID NO: 4532 - RNA, 21 nt, Homo sapiens
gaagugugccguggugugucu

SEQ ID NO: 4533 - RNA, 21 nt, Homo sapiens
agacacaccacggcacacuuc

SEQ ID NO: 4534 - RNA, 21 nt, Homo sapiens
aagccugcccggcuccucggg

SEQ ID NO: 4535 - RNA, 21 nt, Homo sapiens
cccgaggagccgggcaggcuu

SEQ ID NO: 4536 - RNA, 20 nt, Homo sapiens
guugugucaguuuaucaaac

SEQ ID NO: 4537 - RNA, 20 nt, Homo sapiens
guuugauaaacugacacaac

SEQ ID NO: 4538 - RNA, 22 nt, Homo sapiens
uggucuaggauuguuggaggag

SEQ ID NO: 4539 - RNA, 22 nt, Homo sapiens
cuccuccaacaauccuagacca

SEQ ID NO: 4540 - RNA, 22 nt, Homo sapiens
cacacacugcaauuacuuuugc

SEQ ID NO: 4541 - RNA, 22 nt, Homo sapiens
gcaaaaguaauugcagugugug

SEQ ID NO: 4542 - RNA, 25 nt, Homo sapiens
aggggugguguugggacagcuccgu

SEQ ID NO: 4543 - RNA, 25 nt, Homo sapiens
acggagcugucccaacaccaccccu

SEQ ID NO: 4544 - RNA, 21 nt, Homo sapiens
ugagcuaaaugugugcuggga

SEQ ID NO: 4545 - RNA, 21 nt, Homo sapiens
ucccagcacacauuuagcuca

SEQ ID NO: 4546 - RNA, 23 nt, Homo sapiens
gcgaggaccccucggggucugac

SEQ ID NO: 4547 - RNA, 23 nt, Homo sapiens
gucagaccccgagggguccucgc

SEQ ID NO: 4548 - RNA, 25 nt, Homo sapiens
gcugggcagggcuucugagcuccuu

SEQ ID NO: 4549 - RNA, 25 nt, Homo sapiens
aaggagcucagaagcccugcccagc

SEQ ID NO: 4550 - RNA, 20 nt, Homo sapiens
gggaaaaggaagggggagga

SEQ ID NO: 4551 - RNA, 20 nt, Homo sapiens
uccucccccuuccuuuuccc

SEQ ID NO: 4552 - RNA, 20 nt, Homo sapiens
gcggaaggcggagcggcgga

SEQ ID NO: 4553 - RNA, 20 nt, Homo sapiens
uccgccgcuccgccuuccgc

SEQ ID NO: 4554 - RNA, 18 nt, Homo sapiens
gugaaggcccggcggaga

SEQ ID NO: 4555 - RNA, 18 nt, Homo sapiens
ucuccgccgggccuucac

SEQ ID NO: 4556 - RNA, 19 nt, Homo sapiens
ugagggagugggugggagg

SEQ ID NO: 4557 - RNA, 19 nt, Homo sapiens
ccucccacccacucccuca

SEQ ID NO: 4558 - RNA, 19 nt, Homo sapiens
acuggaauuggagucaaaa

SEQ ID NO: 4559 - RNA, 19 nt, Homo sapiens
uuuugacuccaauuccagu

SEQ ID NO: 4560 - RNA, 19 nt, Homo sapiens
ugagggaguuggguguaua

SEQ ID NO: 4561 - RNA, 19 nt, Homo sapiens
uauacacccaacucccuca

SEQ ID NO: 4562 - RNA, 19 nt, Homo sapiens
ugagggaguggauuguaug

SEQ ID NO: 4563 - RNA, 19 nt, Homo sapiens
cauacaauccacucccuca

SEQ ID NO: 4564 - RNA, 19 nt, Homo sapiens
ggcuggucagaugggagug

SEQ ID NO: 4565 - RNA, 19 nt, Homo sapiens
cacucccaucugaccagcc

SEQ ID NO: 4566 - RNA, 19 nt, Homo sapiens
agcagggcuggggauugca

SEQ ID NO: 4567 - RNA, 19 nt, Homo sapiens
ugcaauccccagcccugcu

SEQ ID NO: 4568 - RNA, 19 nt, Homo sapiens
ugagggaggagguugggua

SEQ ID NO: 4569 - RNA, 19 nt, Homo sapiens
uacccaaccuccucccuca

SEQ ID NO: 4570 - RNA, 19 nt, Homo sapiens
ugaggugguaggauguaga

SEQ ID NO: 4571 - RNA, 19 nt, Homo sapiens
ucuacauccuaccaccuca

SEQ ID NO: 4572 - RNA, 22 nt, Homo sapiens
uccgagccugggucucccucuu

SEQ ID NO: 4573 - RNA, 22 nt, Homo sapiens
aagagggagacccaggcucgga

SEQ ID NO: 4574 - RNA, 22 nt, Homo sapiens
ggggguccccggugcucggauc

SEQ ID NO: 4575 - RNA, 22 nt, Homo sapiens
gauccgagcaccggggaccccc

SEQ ID NO: 4576 - RNA, 22 nt, Homo sapiens
agucauuggaggguuugagcag

SEQ ID NO: 4577 - RNA, 22 nt, Homo sapiens
cugcucaaacccuccaaugacu

SEQ ID NO: 4578 - RNA, 19 nt, Homo sapiens
cagcaggaggugaggggag

SEQ ID NO: 4579 - RNA, 19 nt, Homo sapiens
cuccccucaccuccugcug

SEQ ID NO: 4580 - RNA, 22 nt, Homo sapiens
acucaaaacccuucagugacuu

SEQ ID NO: 4581 - RNA, 22 nt, Homo sapiens
aagucacugaaggguuuugagu

SEQ ID NO: 4582 - RNA, 22 nt, Homo sapiens
agacuucccauuugaagguggc

SEQ ID NO: 4583 - RNA, 22 nt, Homo sapiens
gccaccuucaaaugggaagucu

SEQ ID NO: 4584 - RNA, 23 nt, Homo sapiens
aaacucuacuuguccuucugagu

SEQ ID NO: 4585 - RNA, 23 nt, Homo sapiens
acucagaaggacaaguagaguuu

SEQ ID NO: 4586 - RNA, 21 nt, Homo sapiens
ggcuagcaacagcgcuuaccu

SEQ ID NO: 4587 - RNA, 21 nt, Homo sapiens
agguaagcgcuguugcuagcc

SEQ ID NO: 4588 - RNA, 21 nt, Homo sapiens
acagucugcugagguuggagc

SEQ ID NO: 4589 - RNA, 21 nt, Homo sapiens
gcuccaaccucagcagacugu

SEQ ID NO: 4590 - RNA, 23 nt, Homo sapiens
aucccuugcaggggcuguugggu

SEQ ID NO: 4591 - RNA, 23 nt, Homo sapiens
acccaacagccccugcaagggau

SEQ ID NO: 4592 - RNA, 22 nt, Homo sapiens
gugagucucuaagaaaagagga

SEQ ID NO: 4593 - RNA, 22 nt, Homo sapiens
uccucuuuucuuagagacucac

SEQ ID NO: 4594 - RNA, 21 nt, Homo sapiens
ucuaguaagaguggcagucga

SEQ ID NO: 4595 - RNA, 21 nt, Homo sapiens
ucgacugccacucuuacuaga

SEQ ID NO: 4596 - RNA, 22 nt, Homo sapiens
augcugacauauuuacuagagg

SEQ ID NO: 4597 - RNA, 22 nt, Homo sapiens
ccucuaguaaauaugucagcau

SEQ ID NO: 4598 - RNA, 22 nt, Homo sapiens
guucucccaacguaagcccagc

SEQ ID NO: 4599 - RNA, 22 nt, Homo sapiens
gcugggcuuacguugggagaac

SEQ ID NO: 4600 - RNA, 21 nt, Homo sapiens
uggguuuacguugggagaacu

SEQ ID NO: 4601 - RNA, 21 nt, Homo sapiens
aguucucccaacguaaaccca

SEQ ID NO: 4602 - RNA, 19 nt, Homo sapiens
gugucugcuuccuguggga

SEQ ID NO: 4603 - RNA, 19 nt, Homo sapiens
ucccacaggaagcagacac

SEQ ID NO: 4604 - RNA, 23 nt, Homo sapiens
cuaauaguaucuaccacaauaaa

SEQ ID NO: 4605 - RNA, 23 nt, Homo sapiens
uuuauugugguagauacuauuag

SEQ ID NO: 4606 - RNA, 23 nt, Homo sapiens
ugugcuugcucgucccgcccgca

SEQ ID NO: 4607 - RNA, 23 nt, Homo sapiens
ugcgggcgggacgagcaagcaca

SEQ ID NO: 4608 - RNA, 25 nt, Homo sapiens
agggaucgcgggcggguggcggccu

SEQ ID NO: 4609 - RNA, 25 nt, Homo sapiens
aggccgccacccgcccgcgaucccu

SEQ ID NO: 4610 - RNA, 21 nt, Homo sapiens
augauccaggaaccugccucu

SEQ ID NO: 4611 - RNA, 21 nt, Homo sapiens
agaggcagguuccuggaucau

SEQ ID NO: 4612 - RNA, 19 nt, Homo sapiens
aguguggcuuucuuagagc

SEQ ID NO: 4613 - RNA, 19 nt, Homo sapiens
gcucuaagaaagccacacu

SEQ ID NO: 4614 - RNA, 19 nt, Homo sapiens
ucuaggcugguacugcuga

SEQ ID NO: 4615 - RNA, 19 nt, Homo sapiens
ucagcaguaccagccuaga

SEQ ID NO: 4616 - RNA, 19 nt, Homo sapiens
aagcagcugccucugaggc

SEQ ID NO: 4617 - RNA, 19 nt, Homo sapiens
gccucagaggcagcugcuu

SEQ ID NO: 4618 - RNA, 21 nt, Homo sapiens
guggcugcacucacuuccuuc

SEQ ID NO: 4619 - RNA, 21 nt, Homo sapiens
gaaggaagugagugcagccac

SEQ ID NO: 4620 - RNA, 21 nt, Homo sapiens
aggaggcagcgcucucaggac

SEQ ID NO: 4621 - RNA, 21 nt, Homo sapiens
guccugagagcgcugccuccu

SEQ ID NO: 4622 - RNA, 21 nt, Homo sapiens
aauggcgccacuaggguugug

SEQ ID NO: 4623 - RNA, 21 nt, Homo sapiens
cacaacccuaguggcgccauu

SEQ ID NO: 4624 - RNA, 25 nt, Homo sapiens
caacccuaggagagggugccauuca

SEQ ID NO: 4625 - RNA, 25 nt, Homo sapiens
ugaauggcacccucuccuaggguug

SEQ ID NO: 4626 - RNA, 22 nt, Homo sapiens
auaauacaugguuaaccucuuu

SEQ ID NO: 4627 - RNA, 22 nt, Homo sapiens
aaagagguuaaccauguauuau

SEQ ID NO: 4628 - RNA, 21 nt, Homo sapiens
aauauuauacagucaaccucu

SEQ ID NO: 4629 - RNA, 21 nt, Homo sapiens
agagguugacuguauaauauu

SEQ ID NO: 4630 - RNA, 25 nt, Homo sapiens
ggcggagggaaguagguccguuggu

SEQ ID NO: 4631 - RNA, 25 nt, Homo sapiens
accaacggaccuacuucccuccgcc

SEQ ID NO: 4632 - RNA, 24 nt, Homo sapiens
ugccugggucucuggccugcgcgu

SEQ ID NO: 4633 - RNA, 24 nt, Homo sapiens
acgcgcaggccagagacccaggca

SEQ ID NO: 4634 - RNA, 22 nt, Homo sapiens
aggcggggcgccgcgggaccgc

SEQ ID NO: 4635 - RNA, 22 nt, Homo sapiens
gcggucccgcggcgccccgccu

SEQ ID NO: 4636 - RNA, 22 nt, Homo sapiens
gguggcccggccgugccugagg

SEQ ID NO: 4637 - RNA, 22 nt, Homo sapiens
ccucaggcacggccgggccacc

SEQ ID NO: 4638 - RNA, 20 nt, Homo sapiens
accaggaggcugaggccccu

SEQ ID NO: 4639 - RNA, 20 nt, Homo sapiens
aggggccucagccuccuggu

SEQ ID NO: 4640 - RNA, 20 nt, Homo sapiens
gucccugaguguauguggug

SEQ ID NO: 4641 - RNA, 20 nt, Homo sapiens
caccacauacacucagggac

SEQ ID NO: 4642 - RNA, 21 nt, Homo sapiens
uccgguucucagggcuccacc

SEQ ID NO: 4643 - RNA, 21 nt, Homo sapiens
gguggagcccugagaaccgga

SEQ ID NO: 4644 - RNA, 23 nt, Homo sapiens
aggaagcccuggaggggcuggag

SEQ ID NO: 4645 - RNA, 23 nt, Homo sapiens
cuccagccccuccagggcuuccu

SEQ ID NO: 4646 - RNA, 20 nt, Homo sapiens
cuguaugcccucaccgcuca

SEQ ID NO: 4647 - RNA, 20 nt, Homo sapiens
ugagcggugagggcauacag

SEQ ID NO: 4648 - RNA, 23 nt, Homo sapiens
uggugcggagagggcccacagug

SEQ ID NO: 4649 - RNA, 23 nt, Homo sapiens
cacugugggcccucuccgcacca

SEQ ID NO: 4650 - RNA, 22 nt, Homo sapiens
caacuagacugugagcuucuag

SEQ ID NO: 4651 - RNA, 22 nt, Homo sapiens
cuagaagcucacagucuaguug

SEQ ID NO: 4652 - RNA, 23 nt, Homo sapiens
aaggagcuuacaaucuagcuggg

SEQ ID NO: 4653 - RNA, 23 nt, Homo sapiens
cccagcuagauuguaagcuccuu

SEQ ID NO: 4654 - RNA, 22 nt, Homo sapiens
gggacccagggagagacguaag

SEQ ID NO: 4655 - RNA, 22 nt, Homo sapiens
cuuacgucucucccuggguccc

SEQ ID NO: 4656 - RNA, 22 nt, Homo sapiens
gcagagugcaaacaauuuugac

SEQ ID NO: 4657 - RNA, 22 nt, Homo sapiens
gucaaaauuguuugcacucugc

SEQ ID NO: 4658 - RNA, 20 nt, Homo sapiens
cggcucugggucugugggga

SEQ ID NO: 4659 - RNA, 20 nt, Homo sapiens
uccccacagacccagagccg

SEQ ID NO: 4660 - RNA, 22 nt, Homo sapiens
gcagcagggugaaacugacaca

SEQ ID NO: 4661 - RNA, 22 nt, Homo sapiens
ugugucaguuucacccugcugc

SEQ ID NO: 4662 - RNA, 21 nt, Homo sapiens
uggaggagaaggaaggugaug

SEQ ID NO: 4663 - RNA, 21 nt, Homo sapiens
caucaccuuccuucuccucca

SEQ ID NO: 4664 - RNA, 23 nt, Homo sapiens
ucugcucauaccccaugguuucu

SEQ ID NO: 4665 - RNA, 23 nt, Homo sapiens
agaaaccaugggguaugagcaga

SEQ ID NO: 4666 - RNA, 23 nt, Homo sapiens
ugcaccaugguugucugagcaug

SEQ ID NO: 4667 - RNA, 23 nt, Homo sapiens
caugcucagacaaccauggugca

SEQ ID NO: 4668 - RNA, 23 nt, Homo sapiens
cugggaucuccggggucuugguu

SEQ ID NO: 4669 - RNA, 23 nt, Homo sapiens
aaccaagaccccggagaucccag

SEQ ID NO: 4670 - RNA, 22 nt, Homo sapiens
ugagaccucuggguucugagcu

SEQ ID NO: 4671 - RNA, 22 nt, Homo sapiens
agcucagaacccagaggucuca

SEQ ID NO: 4672 - RNA, 23 nt, Homo sapiens
uccaguaccacgugucagggcca

SEQ ID NO: 4673 - RNA, 23 nt, Homo sapiens
uggcccugacacgugguacugga

SEQ ID NO: 4674 - RNA, 22 nt, Homo sapiens
ggagacugaugaguucccggga

SEQ ID NO: 4675 - RNA, 22 nt, Homo sapiens
ucccgggaacucaucagucucc

SEQ ID NO: 4676 - RNA, 21 nt, Homo sapiens
gcaggaacuugugagucuccu

SEQ ID NO: 4677 - RNA, 21 nt, Homo sapiens
aggagacucacaaguuccugc

SEQ ID NO: 4678 - RNA, 22 nt, Homo sapiens
cugcccuggcccgagggaccga

SEQ ID NO: 4679 - RNA, 22 nt, Homo sapiens
ucggucccucgggccagggcag

SEQ ID NO: 4680 - RNA, 21 nt, Homo sapiens
ccuggaaacacugagguugug

SEQ ID NO: 4681 - RNA, 21 nt, Homo sapiens
cacaaccucaguguuuccagg

SEQ ID NO: 4682 - RNA, 22 nt, Homo sapiens
uauaccucaguuuuaucaggug

SEQ ID NO: 4683 - RNA, 22 nt, Homo sapiens
caccugauaaaacugagguaua

SEQ ID NO: 4684 - RNA, 22 nt, Homo sapiens
uggugguuuacaaaguaauuca

SEQ ID NO: 4685 - RNA, 22 nt, Homo sapiens
ugaauuacuuuguaaaccacca

SEQ ID NO: 4686 - RNA, 22 nt, Homo sapiens
uggauuucuuugugaaucacca

SEQ ID NO: 4687 - RNA, 22 nt, Homo sapiens
uggugauucacaaagaaaucca

SEQ ID NO: 4688 - RNA, 21 nt, Homo sapiens
uccucuucucccuccucccag

SEQ ID NO: 4689 - RNA, 21 nt, Homo sapiens
cugggaggagggagaagagga

SEQ ID NO: 4690 - RNA, 20 nt, Homo sapiens
guagaggagauggcgcaggg

SEQ ID NO: 4691 - RNA, 20 nt, Homo sapiens
cccugcgccaucuccucuac

SEQ ID NO: 4692 - RNA, 22 nt, Homo sapiens
gugaacgggcgccaucccgagg

SEQ ID NO: 4693 - RNA, 22 nt, Homo sapiens
ccucgggauggcgcccguucac

SEQ ID NO: 4694 - RNA, 22 nt, Homo sapiens
gacugacaccucuuugggugaa

SEQ ID NO: 4695 - RNA, 22 nt, Homo sapiens
uucacccaaagaggugucaguc

SEQ ID NO: 4696 - RNA, 21 nt, Homo sapiens
uacucaaaaagcugucaguca

SEQ ID NO: 4697 - RNA, 21 nt, Homo sapiens
ugacugacagcuuuuugagua

SEQ ID NO: 4698 - RNA, 21 nt, Homo sapiens
uuaauaucggacaaccauugu

SEQ ID NO: 4699 - RNA, 21 nt, Homo sapiens
acaaugguuguccgauauuaa

SEQ ID NO: 4700 - RNA, 22 nt, Homo sapiens
auccgcgcucugacucucugcc

SEQ ID NO: 4701 - RNA, 22 nt, Homo sapiens
ggcagagagucagagcgcggau

SEQ ID NO: 4702 - RNA, 20 nt, Homo sapiens
gugagucaggguggggcugg

SEQ ID NO: 4703 - RNA, 20 nt, Homo sapiens
ccagccccacccugacucac

SEQ ID NO: 4704 - RNA, 22 nt, Homo sapiens
ugcccuuaaaggugaacccagu

SEQ ID NO: 4705 - RNA, 22 nt, Homo sapiens
acuggguucaccuuuaagggca

SEQ ID NO: 4706 - RNA, 22 nt, Homo sapiens
ucuucucuguuuuggccaugug

SEQ ID NO: 4707 - RNA, 22 nt, Homo sapiens
cacauggccaaaacagagaaga

SEQ ID NO: 4708 - RNA, 22 nt, Homo sapiens
aaauuauuguacaucggaugag

SEQ ID NO: 4709 - RNA, 22 nt, Homo sapiens
cucauccgauguacaauaauuu

SEQ ID NO: 4710 - RNA, 22 nt, Homo sapiens
uucaacggguauuuauugagca

SEQ ID NO: 4711 - RNA, 22 nt, Homo sapiens
ugcucaauaaauacccguugaa

SEQ ID NO: 4712 - RNA, 22 nt, Homo sapiens
cuauacaacuuacuacuuuccc

SEQ ID NO: 4713 - RNA, 22 nt, Homo sapiens
gggaaaguaguaaguuguauag

SEQ ID NO: 4714 - RNA, 22 nt, Homo sapiens
ugagguaguaaguuguauuguu

SEQ ID NO: 4715 - RNA, 22 nt, Homo sapiens
aacaauacaacuuacuaccuca

SEQ ID NO: 4716-4733 - skipped (18 entries)

SEQ ID NO: 4734 - DNA, 3131 bp, Adeno-associated virus
gcggccgcgaattcgcccttggctgcgtcaactggaccaatgagaactttcccttcaatgattgcgtcgacaagatggtgatctggtgggaggagggcaagatgacggccaaggtcgtggagtccgccaaggccattctcggcggcagcaaggtgcgcgtggaccaaaagtgcaagtcgtccgcccagatcgaccccacccccgtgatcgtcacctccaacaccaacatgtgcgccgtgattgacgggaacagcaccaccttcgagcaccagcagcctctccaggaccggatgtttaagttcgaactcacccgccgtctggagcacgactttggcaaggtgacaaagcaggaagtcaaagagttcttccgctgggccagtgatcacgtgaccgaggtggcgcatgagttttacgtcagaaagggcggagccagcaaaagacccgcccccgatgacgcggataaaagcgagcccaagcgggcctgcccctcagtcgcggatccatcgacgtcagacgcggaaggagctccggtggactttgccgacaggtaccaaaacaaatgttctcgtcacgcgggcatgcttcagatgctgtttccctgcaaaacgtgcgagagaatgaatcggaatttcaacatttgcttcacacacggggtcagagactgctcagagtgtttccccggcgtgtcagaatctcaaccggtcgtcagaaagaggacgtatcggaaactccgtgcgattcatcatctgctggggcgggctcccgagattgcttgctcggcctgcgatctggtcaacgtggacctggatgactgtgtttctgagcaataaatgacttaaaccaggtatggctgccgatggttatcttccagattggctcgaggacaacctctctgagggcattcgcgagtggtgggcgctgaaacctggagccccgaagcccaaagccaaccagcaaaagcaggacgacggccggggtctggtgcttcctggctacaagtacctcggacccttcaacggactcgacaagggggagcccgtcaacgcggcggacgcagcggccctcgagcacgacaaggcttacgaccagcagctgcaggcgggtgacaatccgtacctgcggtataaccacgccgacgccgagtttcaggagcgtctgcaagaagatacgtcttttgggggcaacctcgggcgagcagtcttccaggccaagaagcgggttctcgaacctctcggtctggttgaggaaggcgctaagacggctcctggaaagaagagaccggtagagccatcaccccagcgttctccagactcctctacgggcatcggcaagaaaggccaacagcccgccagaaaaagactcaattttggtcagactggcgactcagagtcagttccagaccctcaacctctcggagaacctccagcagcgccctctggtgtgggacctaatacaatggctgcaggcggtggcgcaccaatggcagacaataacgaaggcgccgacggagtgggtagttcctcgggaaattggcattgcgattccacatggctgggcgacagagtcatcaccaccagcacccgaacctgggccctgcccacctacaacaaccacctctacaagcaaatctccaacgggacatcgggaggagccaccaacgacaacacctacttcggctacagcaccccctgggggtattttgactttaacagattccactgccacctttcaccacgtgactggcagcgactcatcaacaacaactggggattccgacccaagagactcagcttcaagctcttcaacatccaggtcaaggaggtcacgcagaatgaaggcaccaagaccatcgccaataacctcaccagcaccatccaggtgtttacggactcggagtaccagctgccgtacgttctcggctctgtccaccagggctgcctgcctccgttcccggcggacgtgttcatgattccccagtacggctacctaacactcaacaacggtagtcaggccgtgggacgctcctccttctactgcctggaatactttccttcgcagatgctgagaaccggcaacaacttccagtttacttacaccttcgaggacgtgcctttccacagcagctacgcccacagctagagcttggaccggctgatgaatcctctgattgaccagtacctgtactacttgtctcggactcaaacaacaggaggcacggcaaatacgcagactctgggcttcagccaaggtgggcctaatacaatggccaatcaggcaaagaactggctgccaggaccctgttaccgccaacaacgcgtctcaacgacaaccgggcaaaacaacaatagcaactttgcctggactgctgggaccaaataccatctgaatggaagaaattcattggctaatcctggcatcgctatggcaacacacaaagacgacgaggagcgtttttttcccagtaacgggatcctgatttttggcaaacaaaatgctgccagagacaatgcggattacagcgatgtcatgctcaccagcgaggaagaaatcaaaaccactaaccctgtggctacagaggaatacggtatcgtggcagataacttgcagcagcaaaacacggctcctcaaattggaactgtcaacagccagggggccttacccggtatggtctggcagaaccgggacgtgtacctgcagggtcccatctgggccaagattcctcacacggacggcaacttccacccgtctccgctgatgggcggctttggcctgaaacatcctccgcctcagatcctgatcaagaacacgcctgtacctgcggatcctccgaccaccttcaaccagtcaaagctgaactctttcatcacgcaatacagcaccggacaggtcagcgtggaaattgaatgggagctgcagaaggaaaacagcaagcgctggaaccccgagatccagtacacctccaactactacaaatctataagtgtggactttgctgttaatacagaaggcgtgtactctgaaccccgccccattggcacccgttacctcacccgtaatctgtaattgcctgttaatcaataaaccggttgattcgtttcagttgaactttggtctctgcgaagggcgaattc

SEQ ID NO: 4735 - protein, 728 aa, Adeno-associated virus
MAADGYLPDWLEDNLSEGIREWWDLKPGAPKPKANQQKQDDGRGLVLPGYKYLGPFNGLDKGEPVNEADAAALEHDKAYDKQLEQGDNPYLKYNHADAEFQERLQEDTSFGGNLGRAVFQAKKRVLEPLGLVEEGAKTAPGKKRPIESPDSSTGIGKKGQQPAKKKLNFGQTGDSESVPDPQPLGEPPAAPSGLGSGTMAAGGGAPMADNNEGADGVGNASGNWHCDSTWLGDRVITTSTRTWALPTYNNHLYKQISSQSGATNDNHFFGYSTPWGYFDFNRFHCHFSPRDWQRLINNNWGFRPRKLRFKLFNIQVKEVTTNDGVTTIANNLTSTIQVFSDSEYQLPYVLGSAHQGCLPPFPADVFMIPQYGYLTLNNGSQSMGRSSFYCLEYFPSQMLRTGNNFEFSYTFEEVPFHSSYAHSQSLDRLMNPLIDQYLYYLARTQSTTGSTRELQFHQAGPNTMAEQSKNWLPGPCYRQQRLSKNIDSNNNSNFAWTGATKYHLNGRNSLTNPGVAMATNKDDEGQFFPINGVLVFGKTGAANKTTLENVLMTSEEEIKTTNPVATEEYGVVSSNLQSSTAGPQTQTVNSQGALPGMVWQNRDVYLQGPIWAKIPHTDGNFHPSPLMGGFGLKHPPPQILIKNTPVPANPPGVFTPALFASFITQYSTGQVSVEIEWELQKENSKRWNPEIQYTSNYAKSNNVEFAVNNEGVYTEPRPIGTRYLTRNL

SEQ ID NO: 4736 - protein, 644 aa, Adeno-associated virus
  MOD_RES (434)..(434): Any amino acid
KAYDQQLKAGDNPYLRYNHADAEFQERLQEDTSFGGNLGRAVFQAKKRVLEPLGLVETPAKTAPGKKRPVDSPDSTSGIGKKGQQPAKKRLNFGQTGDSESVPDPQPIGEPPAGPSGLGSGTMAAGGGAPMADNNEGADGVGNASGNWHCDSTWLGDRVITTSTRTWALPTYNNHLYKQISSQSAGSTNDNVYFGYSTPWGYFDFNRFHCHFSPRDWQRLINNNWGFRPKKLNFKLFNIQVKEVTTNDGVTTIANNLTSTVQVFSDSEYQLPYVLGSAHQGCLPPFPADVFMIPQYGYLTLNNGSQSVGRSSFYCLEYFPSQMLRTGNNFTFSYTFEDVPFHSSYAHSQSLDRLMNPLIDQYLYYLARTQSNAGGTAGNRELQFYQGGPTTMAEQAKNWLPGPCFRQQRVSKTLDQNNNSNFAWTGATKYHLNXRNSLVNPGVAMATHKDDEERFFPSSGVLIFGKTGAANKTTLENVLMTNEEEIRPTNPVATEEYGIVSSNLQAASTAAQTQVVNNQGALPGMVWQNRDVYLQGPIWAKIPHTDGNFHPSPLMGGFGLKHPPPQILIKNTPVPANPPEVFTPAKFASFITQYSTGQVSVEIEWELQKENSKRWNPEIQYTSNFDKQTGVDFAVDSQGVYSEP

SEQ ID NO: 4737 - DNA, 1933 bp, Adeno-associated virus
caaggcctacgaccagcagctcaaagcgggtgacaatccgtacctgcggtataaccacgccgacgccgagtttcaggagtgtcttcaagaagatacgtcttttgggggcaacctcgggcgagcagtcttccaggccaaaaagcgggttctcgaacctcttggtctggttgagacgccagctaagacggcacctggaaagaagcgaccggtagactcgccagactccacctcgggcatcggcaagaaaggccagcagcccgcgaaaaagagactcaactttgggcagactggcgactcagagtcagtccccgaccctcaaccaatcggagaaccaccagcaggcccctctggtctgggatctggtacaatggttgcaggcggtggcgcaccaatggctgacaataacgagggcgccgacggagtgggtaatgcctcaggaaattggcattgcgattccacatggctgggcgacagagtcatcaccaccagcacccgaacctgggccctgcccacctacaacaaccacctctacaagcaaatctccagtcagtcagcagggagcaccaacgataacgtctatttcggctacagcaccccctgggggtattttgacttcaacagattccattgccacttctcaccacgtgactggcagcgacttatcaacaacaactggggattccggcccaagaagctcaacttcaagctcttcaacatccaggtcaaggaggtcacgacgaatgacggtgtcacaaccatcgctaataaccttaccagcacggttcaggtcttttcggactcggaatatcaactgccgtacgtcctcggctccgcgcaccagggctgcctgcctccgttcccggcagacgtgttcatgattccgcagtacggatacctgactctgaacaatggcagccaatcggtaggccgttcctccttctactgcctggagtactttccttctcagatgctgagaacgggcaacaacttcacctttagctacaccttcgaggacgtgcctttccacagcagctacgcgcacagccagagtctggaccggctgatgaatcccctcatcgaccagtacctgtactacttggccagaacacagagcaacgcaggaggtactgctggcaatcgggaactgcagttttatcagggcggacctaccaccatggccgaacaagcaaagaactggctgcccggaccttgcttccggcaacagagagtatccaagacgctggatcaaaataacaacagcaactttgcctggactggtgccacaaaataccatttaaatggaagaaattcattggttaatcccggtgtcgccatggcaacccacaaggacgacgaggaacgcttctccccttcgagcggagttctaatttttggcaaaactggagcagctaataaaactacattagaaaacgtgctcatgacaaatgaagaagaaattcgtcctaccaacccggtagctaccgaggaatacgggattgtaagcagcaacttgcaggcggctagcaccgcagcccagacacaagttgttaacaaccagggagccttacctggcatggtctggcagaaccgggacgtgtacctgcaaggtcccatttgggccaagattcctcacacggacggcaactttcacccgtctcctctaatgggtggctttggactgaaacacccgcctccccagatcctgatcaaaaacacgccggtacctgctaatcctccagaagtgtttactcctgccaagtttgcttccttcatcacgcagtacagcaccgggcaagtcagcgttgagatcgagtgggagctgcagaaagagaacagcaagcgctggaacccagagattcagtacacctccaactttgacaaacagactggagtggactttgctgttgacagccagggtgtttactctgagcct

SEQ ID NO: 4738 - protein, 644 aa, Adeno-associated virus
KAYDQQLKAGDNPYLRYNHADAEFQECLQEDTSFGGNLGRAVFQAKKRVLEPLGLVETPAKTAPGKKRPVDSPDSTSGIGKKGQQPAKKRLNFGQTGDSESVPDPQPIGEPPAGPSGLGSGTMVAGGGAPMADNNEGADGVGNASGNWHCDSTWLGDRVITTSTRTWALPTYNNHLYKQISSQSAGSTNDNVYFGYSTPWGYFDFNRFHCHFSPRDWQRLINNNWGFRPKKLNFKLFNIQVKEVTTNDGVTTIANNLTSTVQVFSDSEYQLPYVLGSAHQGCLPPFPADVFMIPQYGYLTLNNGSQSVGRSSFYCLEYFPSQMLRTGNNFTFSYTFEDVPFHSSYAHSQSLDRLMNPLIDQYLYYLARTQSNAGGTAGNRELQFYQGGPTTMAEQAKNWLPGPCFRQQRVSKTLDQNNNSNFAWTGATKYHLNGRNSLVNPGVAMATHKDDEERFSPSSGVLIFGKTGAANKTTLENVLMTNEEEIRPTNPVATEEYGIVSSNLQAASTAAQTQVVNNQGALPGMVWQNRDVYLQGPIWAKIPHTDGNFHPSPLMGGFGLKHPPPQILIKNTPVPANPPEVFTPAKFASFITQYSTGQVSVEIEWELQKENSKRWNPEIQYTSNFDKQTGVDFAVDSQGVYSEP

SEQ ID NO: 4739 - DNA, 1933 bp, Adeno-associated virus
caaggcctacgaccagcagctcaaagcgggtgacaatccgtacctgcggtataaccacgccgacgccgagtttcaggagcgtcttcaagaagatacgtcttttgggggcaacctcgggcgagcagtcttccaggccaaaaagcgggttctcgaacctcttggtctggttgagacgccagctaagacggcacctggaaagaagcgaccggtagactcgccagactccacctcgggcatcggcaagaaaggccagcagcccgcgaaaaagagactcaactttgggcagactggcgactcagagccagtccccgaccctcaaccaatcggagaaccaccagcaggcccctctggtctgggatctggtacaatggctgcaggcggtggcgcaccaatggctgacaataacgagggcgccgacggagtgggtaatgcctcaggaaattggcattgcgattccacacggctgggcgacagagtcatcaccaccagcacccgaacctgggccctgcccacctacaacaaccacctctacaagcaaatctccagtcagtcagcagggagcaccaacgataacgtctatttcggctacagcaccccctgggggtattttgacttcaacagattccattgccacttctcaccacgtgactggcagcgacttatcaacaacaactggggattccggcccaagaagctcaacttcaagctcttcaacatccaggtcaaggaggtcacgacgaatgacggcgtcacaaccatcgctaataaccttaccagcacggttcaggtcttttcggactcggaatatcaactgccgtacgtcctcggctccgcgcaccagggctgcctgcctccgttcccggcagacgtgttcatgattccgcagtacggatacctgactctgaacaatggcagccaatcggtaggccgttcctccttctactgcctggagtactttccttctcagatgctgagaacgggcaacaacttcacctttagctacaccttcgaggacgtgcctttccacagcagctacgcgcacagccagagtctgggccggctgatgaatcccctcatcgaccagtacctgtactacttggccagaacacagagcaacgcaggaggtactgctggcaatcgggaactgcagttttatcagggcggacctaccaccatggccgaacaagcaaagaactggctgcccggaccttgcttccggcaacagagagtatccaagacgctggatcaaaataacaacagcaactttgcctggactggtgccacaaaataccatttaaatggaagaaattcattggttaatcccggtgtcgccatggcaacccacaaggacgacgaggaacgcttcttcccttcgagcggagttctaatttttggcaaaactggagcagctaataaaactacattagaaaacgtgctcatgacaaatgaagaagaaattcgtcctaccaacccggtagctaccgaggaatacgggattgtaagcagcaacttgcaggcggctagcaccgcagcccagacacaagttgttaacaaccagggagccttacctggcatggtctggcagaaccgggacgtgtacctgcaaggtcccatttgggccaagattcctcacacggacggcaactttcacccgtctcctctaatgggtggctttggactgaaacacccgcctccccagatcctgatcaaaaacacaccggtacctgctaatcctccagaagtgtttactcctgccaagtttgcttccttcatcacgcagtacagcaccgggcaagtcagcgttgagatcgaatgggagctgcagaaagagaacagcaagcgctggaacccagagattcagtacacctccaactttgacaaacagactggagtggactttgctgttgacagccagggtgtttactctgagcct

SEQ ID NO: 4740 - protein, 644 aa, Adeno-associated virus
KAYDQQLKAGDNPYLRYNHADAEFQERLQEDTSFGGNLGRAVFQAKKRVLEPLGLVETPAKTAPGKKRPVDSPDSTSGIGKKGQQPAKKRLNFGQTGDSEPVPDPQPIGEPPAGPSGLGSGTMAAGGGAPMADNNEGADGVGNASGNWHCDSTRLGDRVITTSTRTWALPTYNNHLYKQISSQSAGSTNDNVYFGYSTPWGYFDFNRFHCHFSPRDWQRLINNNWGFRPKKLNFKLFNIQVKEVTTNDGVTTIANNLTSTVQVFSDSEYQLPYVLGSAHQGCLPPFPADVFMIPQYGYLTLNNGSQSVGRSSFYCLEYFPSQMLRTGNNFTFSYTFEDVPFHSSYAHSQSLGRLMNPLIDQYLYYLARTQSNAGGTAGNRELQFYQGGPTTMAEQAKNWLPGPCFRQQRVSKTLDQNNNSNFAWTGATKYHLNGRNSLVNPGVAMATHKDDEERFFPSSGVLIFGKTGAANKTTLENVLMTNEEEIRPTNPVATEEYGIVSSNLQAASTAAQTQVVNNQGALPGMVWQNRDVYLQGPIWAKIPHTDGNFHPSPLMGGFGLKHPPPQILIKNTPVPANPPEVFTPAKFASFITQYSTGQVSVEIEWELQKENSKRWNPEIQYTSNFDKQTGVDFAVDSQGVYSEP

SEQ ID NO: 4741 - DNA, 1933 bp, Adeno-associated virus; identical to SEQ ID NO: 4739

SEQ ID NO: 4742 - protein, 644 aa, Adeno-associated virus; identical to SEQ ID NO: 4740

SEQ ID NO: 4743 - DNA, 1933 bp, Adeno-associated virus
caaggcctacgaccagcagctcaaagcgggtgacaatccgtacctgcggtataaccacgccgacgccgagtttcaggagcgtcttcaagaagatacgtcttttgggggcaacctcgggcgagcagtcttccaggccaaaaagcgggttctcgaacctcttggtctggttgagacgccagctaagacggcacctggaaagaagcgaccggtagactcgccagactccacctcgggcatcggcaagaaaggccagcagcccgcgaaaaagagactcaactttgggcagactggcgactcagagtcagtccccgaccctcaaccaatcggagaaccaccagcaggcccctctggtctgggatctggtacaatggctgcaggcggtggcgcaccaatggctgacaatagcgagggcgccgacggagtgggtaatgcctcaggaaattggcattgcgattccacatggctgggcgacagagtcatcaccaccagcacccgaacctgggccctgcccacctacaacaaccacctctacaagcaaatctccagtcagtcagcagggagcaccaacgataacgtctatttcggctacagcaccccctgggggtattttgacttcaacagattccattgccacttctcaccacgtgactggcagcgacttatcaacaacaactggggattccggcccaagaagctcaacttcaagctcttcaacatccaggtcaaggaggtcacgacgaatgacggtgtcacaaccatcgctaataaccttaccagcacggttcaggtcttttcggactcggaatatcaactgccgtacgtcctcggctccgcgcaccagggctgcctgcctccgttcccggcagacgtgttcatgattccgcagtacggatacctgactctgaacaatggcagccaatcggtaggccgttcctccttctactgcctggagtactttccttctcagatgctgagaacgggcaacaacttcacctttagctacaccttcgaggacgtgcctttccacagcagctacgcgcacagccagagtctggaccggctgatgaatcccctcatcgaccagtacctgtactacttggccagaacacagagcaacgcaggaggtactgctggcaatcgggaactgcagttttatcagggcggacctaccaccatggccgaacaagcaaagaactggctgcccggaccttgcttccggcaacagagagtatccaagacgctggatcaaaataacaacagcaactttgcctggactggtgccacaaaataccatttaaatggaagaaattcattggttaatcccggtgtcgccatggcaacccacaaggacgacgaggaacgcttcttcccttcgagcggagttctaatttttggcaaaactggagcagctaataaaactacattagaaaacgtgctcatgacaaatgaagaagaaattcgtcctaccaacccggtagctaccgaggaatacgggattgtaagcagcaacttgcaggcggctagcaccgcagcccagacacaagttgttaacaaccagggagccttacctggcatggtctggcagaaccgggacgtgtacctgcaaggtcccatttgggccaagattcctcacacggacggcaactttcacccgtctcctctaatgggtggctttggactgaaacacccgcctccccagatcctgatcaaaaacacaccggtacctgctaatcctccagaagtgtttactcctgccaagcttgcttccttcatcacgcagtacagcaccgggcaagtcagcgttgagatcgagtgggagctgcagaaagagaacagcaagcgctggaacccagagattcagtacacctccaactttgacaaacagactggagtggactttgctgttgacagccagggtgtttactctgagcct

SEQ ID NO: 4744 - protein, 644 aa, Adeno-associated virus
KAYDQQLKAGDNPYLRYNHADAEFQERLQEDTSFGGNLGRAVFQAKKRVLEPLGLVETPAKTAPGKKRPVDSPDSTSGIGKKGQQPAKKRLNFGQTGDSESVPDPQPIGEPPAGPSGLGSGTMAAGGGAPMADNSEGADGVGNASGNWHCDSTWLGDRVITTSTRTWALPTYNNHLYKQISSQSAGSTNDNVYFGYSTPWGYFDFNRFHCHFSPRDWQRLINNNWGFRPKKLNFKLFNIQVKEVTTNDGVTTIANNLTSTVQVFSDSEYQLPYVLGSAHQGCLPPFPADVFMIPQYGYLTLNNGSQSVGRSSFYCLEYFPSQMLRTGNNFTFSYTFEDVPFHSSYAHSQSLDRLMNPLIDQYLYYLARTQSNAGGTAGNRELQFYQGGPTTMAEQAKNWLPGPCFRQQRVSKTLDQNNNSNFAWTGATKYHLNGRNSLVNPGVAMATHKDDEERFFPSSGVLIFGKTGAANKTTLENVLMTNEEEIRPTNPVATEEYGIVSSNLQAASTAAQTQVVNNQGALPGMVWQNRDVYLQGPIWAKIPHTDGNFHPSPLMGGFGLKHPPPQILIKNTPVPANPPEVFTPAKLASFITQYSTGQVSVEIEWELQKENSKRWNPEIQYTSNFDKQTGVDFAVDSQGVYSEP

SEQ ID NO: 4745 - DNA, 1933 bp, Adeno-associated virus
caaggcctacgaccagcagctcaaagcgggtgacaatccgtacctgcggtataaccacgccgacgccgagtttcaggagcgtcttcaagaagatacgtcttttgggggcaacctcgggcgagcagtcttccaggccaaaaagcgggttctcgaacctcttggtctggttgagacgccagctaagacggcacctggaaagaagcgaccggtagactcgccagactccacctcgggcatcggcaagaaaggccagcagcccgcgaaaaagagactcaactttgggcagactggcgactcagagtcagtccccgaccctcaaccaatcggagaaccaccagcaggcccctctggtctgggatctggtacaatggctgcaggcggtggcgcaccaatggctgacaataacgagggcgccgacggagtgggtaatgcctcaggaaattggcattgcgattccacatggctgggcgacagagtcatcaccaccagcacccgaacctgggccctgcccacctacaacaaccacctctacaagcaaatctccagtcagtcagcagggagcaccaacgataacgtctatttcggctacagcaccccctgggggtattttgacttcaacagattccattgccacttctcaccacgtgactggcagcgacttatcaacaacaactggggattccggcccaagaagctcaacttcaagctcttcaacatccaggtcaaggaggtcacgacgaatgacggcgtcacaaccatcgctaataaccttaccagcacggttcaggtcttttcggacccggaatatcaactgccgtacgtcctcggctccgcgcaccagggctgcctgcctccgttcccggcagacgtgttcatgattccgcagtacggatacctgactctgaacaatggcagccaatcggtaggccgttcctccttctactgcctggagtactttccttctcagatgctgagaacgggcaacaacttcacctttagctacaccttcgaggacgtgcctttccacagcagctacgcgcacagccagagtctggaccggctgatgaatcccctcatcgaccagtacctgtactacttggccagaacacagagcaacgcaggaggtactgctggcaatcgggaactgcagttttatcagggcggacctaccaccatggccgaacaagcaaagaactggctgcccggaccttgcttccggcaacagagagtatccaagacgctggatcaaaataacaacagcaactttgcctggactggtgccacaaaataccatttaaatggaagaaattcattggttaatcccggtgtcgccatggcaacccacaaggacgacgaggaacgcttcttcccttcgagcggagttctaatttttggcaaaactggagcagctaataaaactacattagaaaacgtgctcatgacaaatgaagaagaaattcgtcctaccaacccggtagctaccgaggaatacgggattgtaagcagcaacttgcaggcggctagcaccgcagcccagacacaagttgttaacaaccagggagccttacctggcatggtctggcagaaccgggacgtgtacctgcaaggtcccatttgggccaagattcctcacacggacggcaactttcacccgtctcctctaatgggtggctttggactgaaacacccgcctccccagatcctgatcaaaaacacaccggtacctgctaatcctccagaagtgtttactcctgccaagattgcttccttcatcacgcagtacagcaccgggcaagtcagcgttgagatcgagtgggagctgcagaaagagaacagcaagcgctggaacccagagattcagtacacctccaactttgacaaacagactggagtggactttgctgttgacagccagggtgtttactctgagcct

SEQ ID NO: 4746 - protein, 644 aa, Adeno-associated virus
KAYDQQLKAGDNPYLRYNHADAEFQERLQEDTSFGGNLGRAVFQAKKRVLEPLGLVETPAKTAPGKKRPVDSPDSTSGIGKKGQQPAKKRLNFGQTGDSESVPDPQPIGEPPAGPSGLGSGTMAAGGGAPMADNNEGADGVGNASGNWHCDSTWLGDRVITTSTRTWALPTYNNHLYKQISSQSAGSTNDNVYFGYSTPWGYFDFNRFHCHFSPRDWQRLINNNWGFRPKKLNFKLFNIQVKEVTTNDGVTTIANNLTSTVQVFSDPEYQLPYVLGSAHQGCLPPFPADVFMIPQYGYLTLNNGSQSVGRSSFYCLEYFPSQMLRTGNNFTFSYTFEDVPFHSSYAHSQSLDRLMNPLIDQYLYYLARTQSNAGGTAGNRELQFYQGGPTTMAEQAKNWLPGPCFRQQRVSKTLDQNNNSNFAWTGATKYHLNGRNSLVNPGVAMATHKDDEERFFPSSGVLIFGKTGAANKTTLENVLMTNEEEIRPTNPVATEEYGIVSSNLQAASTAAQTQVVNNQGALPGMVWQNRDVYLQGPIWAKIPHTDGNFHPSPLMGGFGLKHPPPQILIKNTPVPANPPEVFTPAKIASFITQYSTGQVSVEIEWELQKENSKRWNPEIQYTSNFDKQTGVDFAVDSQGVYSEP

SEQ ID NO: 4747 - protein, 728 aa, Adeno-associated virus
MAADGYLPDWLEDNLSEGIREWWDLKPGAPKPKANQQKQDDGRGLVLPGYKYLRPFNGLDKGEPVNEADAAALEHDKAYDKQLEQGDNPYLKYNHADAEFQERLQEDTSFGGNLGRAVFQAKKRVLEPLGLVEEVAKTAPGKKRPIESPDSSTGIGKKGQQPAKKKLNFGQTGDSESVPDPQPLGEPPAAPSGLGSGTMAAGGGAPMADNNEGADGVGNASGNWHCDSTWLGDRVITTSTRTWALPTYNNHLYKQISSQSGATNDNHFFSYSTPWGYFDFNRFHCHFSPRDWQRLINNNWGFRPRKLRFKLFNIQVKEVTTNDGVTTIANNLTSTIQVFSDSEYQLPYVLGSAHQGCLPPFPADVFMIPQYGYLTLNNGSQSVGRSSFYCLEYFPSQMLRTGNNFEFSYTFEEVPFHSSYVHSQSLDRLMNPLIDQYLYYLARTQSTTGSTRELQFHQAGPNTMAEQSKNWLPGPCYRQQRLSKNIDSNNNSNFAWTGATKYHLNGRNSLTNPGVAMATNKDDEDQFFPINGVLVFGKTGAANKTTLENVLMTSEEEIKTTNPVATEEYGVVSSNLQSSTAGPQTQTVNSQGALPGMVWQNRDVCLQGPIWAKIPHTDGNFHPSPLMGGFGLKHPPPQILIKNTPVPANPPEVFTPAKFASFITQYSTGQVSVEIEWELQKENSKRWNPEIQYTSNYAKSNNVEFAVNNEGVYTEPRPIGTRYLTRNL

SEQ ID NO: 4748 - protein, 728 aa, Adeno-associated virus
MAADGYLPDWLEDNLSEGIREWWDLKPGAPKPKANQQKQDDGRGLVLPGYKYLGPFNGLDKGEPVNEADAAALEHDKAYDKQLEQGDNPYLKYNHADAEFQERLQEDTSFGGNLGRAVFQAKKRVLEPLGLVEEGAKTASGKKRPIESPDSSTGIGKKGQQPAKKKLNFGQTGDSESVPDPQPLGEPPAAPSGLGSGTMAAGGGAPMADNNEGADGVGNASGNWHCDSTWLGDRVITTSTRTWALPTYNNHLYKQISSQSGATNDNHFFGYSTPWGYFDFNRFHCHFSPRDWQRLINNNWGFRPRKLRFKLFNIQVKEVTTNDGVTTIANNLTSTIQVFSDSEYQLPYVLGSAHQGCLPPFPADVFMIPQYGYLTLNNGSQSVGRSSFCCLEYFPSQMLRTGNNFEFSYTFEEVPFHSSYAHSQSLDRLMNPLIDQYLYYLARTQSTTGSTRELQFHQAGPNTVAEQSKNWLPGPCYRQQRLSKNIDSNNNSNFAWTGATKYHLNGRNSLTNPGVAMATNKDDEDQFLPINGVLVFGKTGAANKTTLENVLMTSEEEIKTTNPVATEEYGVVSSNLQSSTAGPRTQTVNSQGALPGMVWQNRDVYLQGPIWAEIPHTDGNFHPSPLMGGFGLKHPPPQILIKNTPVPANPPEVFTPAKFASFITQYSTGQVSVEIEWELQKENSKRWNPEIQYTSNYAKSNNVEFAVNNEGVYTEPRPIGTRYLTRNL

SEQ ID NO: 4749 - protein, 738 aa, Adeno-associated virus
MAADGYLPDWLEDNLSEGIREWWALKPGAPKPKANQQKQDDGRGLVLPGYKYLGPFNGLDKGEPVNAADAAALEHDKAYDQQLKAGDNPYLRYNHADAEFQERLQEDTSFGGNLGRAVFQAKKRVLEPLGLVEEGAKTAPGKKRPVEPSPQRSPDSTTGIGKKGQQPAKKRLNFGQTGDSESVPDPQPIGEPPAGPSGLGSGTMAAGGGAPMADNNEGADGVGSSSGNWHCDSTWLGDRVITTSTRTWALPTYNNHLYKQISNGTSGGSTNDNTYFGYSTPWGYFDFNRFHCHFSPRDWQRLINNNWGFRPKRLNFKLFNIQVKEVTQNEGTKTIANNLTSTIQVFTDSEYQLPYVLGSARQGCLPPFPADVFMIPQYGYLTLNNGSQAVGRSSFYCLEYFPSQMLRTGNNFEFSYQFEDVPFHSSYAHSQSLDRLMNPLIDQYLYYLSRTQSTGGTAGTQQLLFSQAGPNNMSAQAKNWLPGPCYRQQRVSTTLSQNNNSNFAWTGATKYHLNGRDSLVNPGVAMATHKDDEERFFPSSGVLMFGKQGAGKGNVDYSSVMLTSEEEIKTTNPVATEQYGVVADNLQQQNAAPIVGAVNSQGALPGMVWQNRDVYLQGPIWAKIPHTDGNFHPSPLMGGFGLKHPPPQILIKNTPVPADPPTTFSQAKLASFITQYSTGQVSVEIEWELQKENSKRWNPEIQYTSNYYKSTNVDFAVNTDGTYSEPRPIGTRYLTRNL

SEQ ID NO: 4750 - DNA, 3121 bp, Adeno-associated virus
gaattcgcccttcgcagagaccaaagttcaactgaaacgaatcaaccggtttattgattaacaagcaattacagattacgggtgaggtaacgggtgccgatggggcgaggctcagaataagtgccatctgtgttaacagcaaagtccacatttgtagatttgtagtagttggaagtgtattgaatctctgggttccagcgtttgctgttttctttctgcagctcccattcaatttccacgctgacctgtccggtgctgtactgcgtgatgaacgacgccagcttagcttgactgaaggtagttggaggatccgcgggaacaggtgtattcttaatcaggatctgaggaggcgggtgtttcagtccaaagccccccatcagcggcgagggatgaaagtttccgtccgtgtgaggaatcttggcccagataggaccctgcaggtacacgtcccggttctgccagaccatgccaggtaaggctccttgactgttgacggcccctacaataggagcggcgttttgctgttgcaggttatcggccaccacgccgtactgttctgtggccactgggttggtggttttaatttcttcctcactggttagcataacgctgctatagtccacgttgccttttccagctccctgtttcccaaacattaagactccgctggacggaaaaaatcgctcttcgtcgtccttgtgggttgccatagcgacaccgggatttaccagagagtctctgccattcagatgatacttggtggcaccggtccaggcaaagttgctgttgttattttgcgacagtgtcgtggagacgcgttgctgccggtagcagggcccgggtagccagtttttggcctgagccgacatgttattaggcccggcctgagaaaatagcaactgctgagttcctgcggtacctcccgtggactgagtccgagacaggtagtacaggtactggtcgatgagggggttcatcagccggtccaggctttggctgtgcgcgtagctgctgtgaaaaggcacgtcctcaaactggtagctgaactcaaagttgttgcccgttctcagcatttgagaaggaaagtactccaggcagtagaaggaggaacggcccacggcctgactgccattgttcagagtcaggtacccgtactgaggaatcatgaagacgtccgccgggaacggaggcaggcagccctggcgcgcagagccgaggacgtacgggagctggtattccgagtccgtaaagacctgaatcgtgctggtaaggttattggcgatggtcttggtgccttcattctgcgtgacctccttgacctggatgttgaagagcttgaagttgagtctcttgggccggaatccccagttgttgttgatgagtcgctgccagtcacgtggtgagaagtggcagtggaatctgttaaagtcaaaatacccccagggggtgctgtagccgaagtaggtgttgtcgttggtgcttcctcccgaagtcccgttggagatttgcttgtagaggtggttgttgtaggtggggagggcccaggttcgggtgctggtggtgatgactctgtcgcccagccatgtggaatcgcaatgccaatttcctgaggaactacccactccgtcggcgccttcgttattgtctgccattggagcgccaccgcctgcagccattgtaccagatcccagaccagaggggcctgcggggggttctccgattggttgagggtcgggcactgactctgagtcgccagtctgcccaaagttgagtctctttttcgcgggctgctggcctttcttgccgatgcccgtagtggagtctggagaacgctggggtgatggctctaccggtctcttctttccaggagccgtcttagcgccttcctcaaccagaccgagaggttcgagaacccgcttcttggcctggaagactgctcgtccgaggttgcccccaaaagacgtatcttcttgcagacgctcctgaaactcggcgtcggcgtggttataccgcaggtacggattgtcacccgctttgagctgctggtcgtaggccttgtcgtgctcgagggccgctgcgtccgccgcgttgacgggctcccccttgtcgagtccgttgaagggtccgaggtacttgtagccaggaagcaccagaccccggccgtcgtcctgcttttgctggttggctttgggcttcggggctccaggtttcagcgcccaccactcgcgaatgccctcagagaggttgtcctcgagccaatctggaagataaccatcggcagccatacctgatctaaatcatttattgttcaaagatgcagtcatccaaatccacattgaccagatcgcaggcagtgcaagcgtctggcacctttcccatgatatgatgaatgtagcacagtttctgatacgcctttttgacgacagaaacgggttgagattctgacacgggaaagcactctaaacagtctttctgtccgtgagtgaagcagatatttgaattctgattcattctctcgcattgtctgcagggaaacagcatcagattcatgcccacgtgacgagaacatttgttttggtacctgtccgcgtagttgatcgaagcttccgcgtctgacgtcgatggctgcgcaactgactcgcgcacccgtttgggctcacttatatctgcgtcactgggggcgggtcttttcttggctccaccctttttgacgtagaattcatgctccacctcaaccacgtgatcctttgcccaccggaaaaagtctttgacttcctgcttggtgaccttcccaaagtcatgatccagacggcgggtgagttcaaatttgaacatccggtcttgcaacggctgctggtgttcgaaggtcgttgagttcccgtcaatcacggcgcacatgttggtgttggaggtgacgatcacgggagtcgggtctatctgggccgaggacttgcatttctggtccacgcgcaccttgcttcctccgagaatggctttggccgactccacgaccttggcggtcatcttcccctcctcccaccagatcaccatcttgtcgacacagtcgttgaagggaaagttctcattggtccagttgacgcagccgtagaagggcgaattc

SEQ ID NO: 4751 - DNA, 3121 bp, Adeno-associated virus
gaattcgcccttctacggctgcgtcaactggaccaatgagaactttcccttcaacgactgtgtcgacaagatggtgatctggtgggaggaggggaagatgaccgccaaggtcgtggagtcggccaaagccattctcggaggaagcaaggtgcgcgtggaccagaaatgcaagtcctcggcccagatagacccgactcccgtgatcgtcacctccaacaccaacatgtgcgccgtgattgacgggaactcaacgaccttcgaacaccagcagccgttgcaagaccggatgttcaaatttgaactcacccgccgtctggatcatgactttgggaaggtcaccaagcaggaagtcaaagactttttccggtgggcaaaggatcacgtggttgaggtggagcacgaattctacgtcaaaaagggtggagccaagaaaagacccgcccccagtgacgcagatataagtgagcccaaacgggtgcgcgagtcagttgcgcagccatcgacgtcagacgcggaagcttcgatcaactacgcagacaggtaccaaaacaaatgttctcgtcacgcgggcatgaatctgatgctgtttccctgcagacaatgcgagagaatgaatcagaattcaaatatctgcttcactcacggacagaaagactgtttagagtgctttcccgtgtcagaatctcaacccgtttctgtcgtcaaaaaggcgtatcagaaactgtgctacattcatcatatcatgggaaaggtgccagacgcttgcactgcctgcgatctggtcgatgtggatttggatgactgcatctttgaacaataaatgatttaaatcaggtatggctgccgatggttatcttccagattggctcgaggacaacctctctgagggcattcgcgagtggtgggcgctgaaacctggagccccgaagcccaaagccaaccagcaaaagcaggacggcggccggggtctggtgcttcctggctacaagtacctcggacccttcaacggactcgacaagggggagcccgtcaacgcggcggacgcagcggccctcgagcacgacaaggcctacgaccagcagctcaaagcgggtgacaatccgtacctgcggtataaccacgccgacgccgagtttcaggagcgtctgcaagaagatacgtcttttgggggcaacctcgggcgagcagtcttccaggccaagaagcgggttctcgaacctctcggtctggttgaggaaggcgctaagacggctcctggaaagaagagaccggtagagccatcaccccagcgttctccagactcctctacgggcatcggcaagaaaggccagcagcccgcgaaaaagagactcaactttgggcagactggcgactcagagtcagtgcccgaccctcaaccaatcggagaaccccccgcaggcccctctggtctgggatctggtacaatggctgcaggcggtggcgctccaatggcagacaataacgaaggcgccgacggagtgggtagttcctcaggaaattggcattgcgattccacatggctgggcgactgagtcatcaccaccagcacccgaacctgggccctccccacctacaacaaccacctctacaagcaaatctccaacgggacttcgggaggaagcaccaacgacaacacctacttcggctacagcaccccctgggggtattttgactttaacagattccactgccacttctcaccacgtgactggcagcgactcatcaacaacaactggggattccggcccaagagactcaacttcaagctcttcaacatccaggtcaaggaggtcacgcagaatgaaggcaccaagaccatcgccaataaccttaccagcacgattcaggtctttacggactcggaataccagctcccgtacgtcctcggctctgcgcaccagggctgcctgcctccgttcccggcggacgtcttcatgattcctcagtacgggtacctgactctgaacaatggcagtcaggccgtgggccgttcctccttctactgcctggagtactttccttctcaaatgctgagaacgggcaacaactttgagttcagctaccagtttgaggacgtgccttttcacagcagctacgcgcacagccaaagcctggaccggctgatgaaccccctcatcgaccagtacctgtactacctgtctcggactcagtccacgggaggtaccgcaggaactcagcagttgctattttctcaggccgggcctaataacatgtcggctcaggccaaaaactggctacccgggccctgctaccggcagtaacgcgtctccacgacactgtcgcaaaataacaacagcaactttgtctggaccggtgccaccaagtatcatctgaatggcagagactctctggtagatcccggtgtcgctatggcaacccacaaggacgacgaagagcgattttttccgtccagcggagtcataatgtttgggaaacagggagctggaaaagacaacgtggactatagcagcgtcatgctaaccagtgaggaagaaattaaaaccaccaacccagtggccacagaacagtacggcgtggtggccgataacctgcaacagcaaaacgccgctcctattgtaggggccgtcaacagtcaaggagccttacctggcatggtctggcagaaccgggacgtgtacctgcagggtcctacctgggccaagattcctcacacggacggaaactttcatccctcgccgctgatgggaggctttggactgaaacacccgcctcctcagatcctgattaagaatacacctgttcccgcggatcctccaactaccttcagtcaagctaagctggcgtcgttcatcacgcagtacagcaccggacaggtcagcgtggaaattgaatgggagctgcaggaagaaaacagcaaacgctggaacccagagattcaatacacttccaactactacaaatctacaaatgtggactttgctgttaacacagatggcacttattctgagcctcgccccatcggcacccgttacctcacccgtaatctgtaattgcttgttaatcaataaaccggttgattcgtttcagttgaactttggtctctgcgaagggcgaattc

SEQ ID NO: 4752 - protein, 738 aa, Adeno-associated virus
MAADGYLPDWLEDNLSEGIREWWALKPGAPKPKANQQKQDDGRGLVLPGYKYLGPFNGLDKGEPVNAADAAALEHDKAYDQQLKAGDNPYLRYNHADAEFQERLQEDTSFGGNLGRAVFQAKKRVLEPLGLVEEGAKTAPGKKRPVEPSPQRSPDSSTGIGKKGQQPAKKRLNFGQTGDSESVPDPQPIGEPPAGPSGLGSGTMAAGGGAPMADNNEGADGVGSSSGNWHCDSTWLGDGVITTSTRTWALPTYNNHLYKQISNGTSGGSTNDNTYFGYSTPWGYFDFNRFHCHFSPRDWQRLINNNWGFRPKSLNFKLFNIQVKEVTQNEGTKTIANNLTSTIQVFTDSEYQLPYVLGSAHQGCLPPFPADVFMIPQYGYLTLNNGSQAVGRSSFYCLEYFPSQMLRTGNNFEFSYQFEDVPFHSSYAHSQSLDRLMNPLIDQYLYYLSRTQSTGGTAGTQQLLFSQAGPNNMSAQAKNWLPGPCYRQQRVSTTLSQNDNSNFAWTGATKYHLNGRDSLVNPGVAMATHKDDEERFFPSSGVLMFGKQGAGKDNVDYSSVMLTSEEEIKTTNPVATEQYGVVADNLQQQNAAPIVGAVNSQGALPGMVWQNRDVYLQGPIWAKIPHTDGNFHPSPLMGGFGLKHPPPQILIKNTPVPADPPTTFSQAKLASFITQYSTGQVSVEIEWELQKENSKRWNPEIQYTSNYYKSTNVDFAVNTDGTYSEPRPIGTRYLTRNL

SEQ ID NO: 4753 - DNA, 3121 bp, Adeno-associated virus
gaattcgcccttcgcgagaccaaagttcaactgaaacgaatcaaccggtttattgattaacaagcaattacagattacgggtgaggtaacgggtgccgatggggcgaggctcagaataagtgccatctgtgttaacagcaaagtccacatttgtagatttgtagtagttggaagtgtattgaatctctgggttccagcgtttgctgttttctttctgcagctcccattcaatttccacgctgacctgtccggtgctgtactgcgtgatgaacgacgccagcttagcttgactgaaggtagttggaggatccgcgggaacaggtgtattcttaatcaggatctgaggaggcgggtgtttcagtccaaagcctcccatcagcggcgagggatgaaagtttccgtccgtgtgaggaatcttggcccagataggaccctgcaggtacacgtcccggttctgccagaccatgccaggtaaggctccttgactgttgacggcccctacaataggagcggcgttttgctgttgcaggttatcggccaccacgccgtactgttctgtggccactgggttggtggttttaatttcttcctcactggttagcataacgctgctatagtccacgttgtcttttccagctccctgtttcccaaacattaagactccgctggacggaaaaaatcgctcttcgtcgtccttgtgggttgccatagcgacaccgggatttaccagagagtctctgccattcagatgatacttggtggcaccggtccaggcaaagttgctgttgtcattttgcgacagtgtcgtggagacgcgttgctgccggtagcagggcccgggtagccagtttttggcctgagccgacatgttattaggcccggcctgagaaaatagcaactgctgagttcctgcggtacctcccgtggactgagtccgagacaggtagtacaggtactggtcgatgagggggttcatcagccggtccaggctttggctgtgcgcgtagctgctgtgaaaaggcacgtcctcaaactggtagctgaactcaaagttgttgcccgttctcagcatttgagaaggaaagtactccaggcagtagaaggaggaacggcccacggcctgactgccattgttcagagtcaggtacccgtactgaggaatcatgaagacgtccgccgggaacggaggcaggcagccctggtgcgcagagccgaggacgtacgggagctggtattccgagtccgtaaagacctgaatcgtgctggtaaggttattggcgatggtcttggtgccttcattctgcgtgacctccttgacctggatgttgaagagcttgaagttgaggctcttgggccggaatccccagttgttgttgatgagtcgctgccagtcacgtggtgagaagtggcagtggaatctgttaaagtcaaaatacccccagggggtgctgtagccgaagtaggtgttgtcgttggtgcttcctcccgaagtcccgttggagatttgcttgtagaggtggttgttgtaggtggggagggcccaggttcgggtgctggtggtgatgactccgtcgcccagccatgtggaatcgcaatgccaatttcctgaggaactacccactccgtcggcgccttcgttattgtctgccattggagcgccaccgcctgcagccattgtaccagatcccagaccagaggggcctgcggggggttctccgattggttgagggtcgggcactgactctgagtcgccagtctgcccaaagttgagtctctttttcgcgggctgctggcctttcttgccgatgcccgtagaggagtctggagaacgctggggtgatggctctaccggtctcttctttccaggagccgtcttagcgccttcctcaaccagaccgagaggttcgagaacccgcttcttggcctggaagactgctcgcccgaggttgcccccaaaagacgtatcttcttgcagacgctcctgaaactcggcgtcggcgtggttataccgcaggtacggattgtcacccgctttgagctgctggtcgtaggccttgtcgtgctcgagggccgctgcgtccgccgcgttgacgggctcccccttgtcgagtccgttgaagggtccgaggtacttgtagccaggaagcaccagaccccggccgtcgtcctgcttttgctggttggctttgggcttcggggctccaggtttcagcgcccaccactcgcgaatgccctcagagaggttgtcctcgagccaatctggaagataaccatcggcagccatacctgatttaaatcatttattgttcaaagatgcagtcatccaaatccacattgaccagatcgcaggcagtgcaagcgtctggcacctttcccatgatatgatgaatgtagcacagtttctgatacgcctttttgacgacagaaacgggttgagattctgacacgggaaagcactctaaacagtctttctgtccgtgagtgaagcagatatttgaattctgattcattctctcgcattgtctgcagggaaacagcatcagattcatgcccacgtgacgagaacatttgttttggtacctgtctgcgtagttgatcgaagcttccgcgtctgacgtcgatggctgcgcaactgactcgcgcacccgtttgggctcacttatatctgcgtcactgggggcgggtcttttcttggctccaccctttttgacgtagaattcatgctccacctcaaccacgtgatcctttgcccaccggaaaaagtctttgacttcctgcttggtgaccttcccaaagtcatgatccagacggcgggtgagttcaaatttgaacatccggtcttgcaacggctgctggtgttcgaaggtcgttgagttcccgtcaatcacggcgcacatgttggtgttggaggtgacgatcacgggagtcgggtctatctgggccgaggacttgcatttctggtccacgcgcaccttgcttcctccgagaatggctttggccgactccacgaccttggcggtcatcttcccctcctcccaccagatcaccatcttgtcgacacagtcgttgaagggaaagttctcattggtccagttgacgcagccgtagaaagggcgaattc

SEQ ID NO: 4754 - DNA, 2211 bp, Adeno-associated virus
atggctgctgacggttatcttccagattggctcgaggacaacctttctgaaggcattcgtgagtggtgggctctgaaacctggagtccctcaacccaaagcgaaccaacaacaccaggacaaccgtcggggtcttgtgcttccgggttacaaatacctcggacccggtaacggactcgacaaaggagagccggtcaacgaggcggacgcggcagccctcgaacacgacaaagcttacgaccagcagctcaaggccggtgacaacccgtacctcaagtacaaccacgccgacgccgagtttcaggagcgtcttcaagaagatacgtcttttgggggcaaccttggcagagcagtcttccaggccaaaaagaggatccttgagcctcttggtctggttgaggaagcagctaaaacggctcctggaaagaagggggctgtagatcagtctcctcaggaaccggactcatcatctggtgttggcaaatcgggcaaacagcctgccagaaaaagactaaatttcggtcagactggagactcagagtcagtcccagaccctcaacctctcggagaaccaccagcagcccccacaagtttgggatctaatacaatggcttcaggcggtggcgcaccaatggcagacaataacgagggtgccgatggagtgggtaattcctcaggaaattggcattgcgattcccaatggctgggcgacagagtcatcaccaccagcaccagaacctgggccctgcccacttacaacaaccatctctacaagcaaatctccagccaatcaggagcttcaaacgacaaccactactttggctacagcaccccttgggggtattttgactttaacagattccactgccacttctcaccacgtgactggcagcgactcattaacaacaactggggattccggcccaagaaactcagcttcaagctcttcaacatccaagttagaggggtcacgcagaacgatggcacgacgactattgccaataaccttaccagcacggttcaagtgtttacggactcggagtatcagctcccgtacgtgctcgggtcggcgcaccaaggctgtctcccgccgtttccagcggacgtcttcatggtccctcagtatggatacctcaccctgaacaacggaagtcaagcggtgggacgctcatccttttactgcctggagtacttcccttcgcagatgctaaggactggaaataacttccaattcagctataccttcgaggatgtaccttttcacagcagctacgctcacagccagagtttggatcgcttgatgaatcctcttattgatcagtatctgtactacctgaacagaacgcaaggaacaacctctggaacaaccaaccaatcacggctgctttttagccaggctgggcctcagtctatgtctttgcaggccagaaattggctacctgggccctgctaccggcaacagagactttcaaagactgctaacgacaacaacaacagtaactttccttggacagcggccagcaaatatcatctcaatggccgcgactcgctggtgaatccaggaccagctatggccagtcacaaggacgatgaagaaaaatttttccctatgcacggcaatctaatatttggcaaagaagggacaacggcaagtaacgcagaattagataatgtaatgattacggatgaagaagagattcgtaccaccaatcctgtggcaacagagcagtatggaactgtggcaaataacttgcagagctcaaatacagctcccacgactggaactgtcaatcatcagggggccttacctggcatggtgtggcaagatcgtgacgtgtaccttcaaggacctatctgggcaaagattcctcacacggatggacactttcatccttctcctctgatgggaggctttggactgaaacatccgcctcctcaaatcatgatcaaaaatactccggtaccggcaaatcctccgacgactttcagcccggccaagtttgcttcatttatcactcagtactccactggacaggtcagcgtggaaattgagtgggagctacagaaagaaaacagcaaacgttggaatccagagattcagtacacttccaactacaacaagtctgttaatgtggactttactgtagacactaatggtgtttatagtgaacctcgccctattggaacccggtatctcacacgaaacttgtga

SEQ ID NO: 4755 - protein, 737 aa, Adeno-associated virus
MAADGYLPDWLEDNLSEGIREWWDLKPGAPKPKANQQKQDNGRGLVLPGYKYLGPFNGLDKGEPVNAADAAALEHDKAYDQQLNAGDNPYLRYNHADAEFQERLQEDTSFGGNLGRAVFQAKKRVLEPLGLVEEGAKTAPAKKRPVEPSPQRSPDSSTGIGKKGQQPARKRLNFGQTGDSESVPDPQPLGEPPAAPSSVGSGTVAAGGGAPMADNNEGADGVGNASGNWHCDSTWLGDRVITTSTRTWALPTYNNHLYEQISSETAGSTNDNTYFGYSTPWGYFDFNRFHCHFSPRDWQRLINNNWGFRPKKLRFKLFNIQVKEVTTNDGVTTIANNLTSTIQVFSDSEYQLPYVLGSAHQGCLPPFPADVFMIPQYGYLTLNNGSQSVGRSSFYCLEYFPSQMLRTGNNFEFSYSFEDVPFHSSYAHSQSLDRLMNPLIDQYLYYLARTQSDPGGTAGNRELQFYQGGPSTMAEQAKNWLPGPCFRQQRVSKTLDQNNNSNFAWTGATKYHLNGRNSLVNPGVAMATHKDDEDRFFPSSGVLIFGKTGATNKTTLENVLMTNEEEIRPTNPVATEEYGIVSSNLQAANTAAQTQVVNNQGALPGMVWQNRDVYLQGPIWAKIPHTDGNFHPSPLMGGFGLKHPPPQILIKNTPVPANPPEVFTPAKFASFITQYSTGQVSVEIEWELQKENSKRWDPEIQYTSNFEKQTGVDFAVDSQGVYSEPRPIGTRYLTRNL

SEQ ID NO: 4756 - DNA, 2211 bp, Adeno-associated virus
atggctgctgacggttatcttccagattggctcgaggacaacctttctgaaggcattcgtgagtggtgggctctgaaacctggagtccctcaacccaaagcgaaccaacaacaccaggacaaccgtcggggtcttgtgcttccgggttacaaatacctcggacccggtaacggactcgacaaaggagagccggtcaacgaggcggacgcggcagccctcgaacacgacaaagcttacgaccagcagctcaaggccggtgacaacccgtacctcaagtacaaccacgccgacgccgagtttcaggagcgtcttcaagaagatacgtcttttgggggcaaccttggcagagcagtcttccaggccaaaaagaggatccttgagcctcttggtctggttgaggaagcagctaaaacggctcctggaaagaagggggctgtagatcagtctcctcaggaaccggactcatcatctggtgttggcaaatcgggcaaacagcctgccagaaaaagactaaatttcggtcagactggagactcagagtcagtcccagaccctcaacctctcggagaaccaccagcagcccccacaagtttgggatctaatacaatggcttcaggcggtggcgcaccaatggcagacaataacgagggtgccgatggagtgggtaattcctcaggaaattggcattgcgattcccaatggctgggcgacagagtcatcaccaccagcaccagaacctgggccctgcccacttacaacaaccatctctacaagcaaatctccagccaatcaggagcttcaaacgacaaccactactttggctacagcaccccttgggggtattttgactttaacagattccactgccacttctcaccacgtgactggcagcgactcattaacaacaactggggattccggcccaagaaactcagcttcaagctcttcaacatccaagttagaggggtcacgcagaacgatggcacgacgactattgccaataaccttaccagcacggttcaagtgtttacggactcggagtatcagctcccgtacgtgctcgggtcggcgcaccaaggctgtctcccgccgtttccagcggacgtcttcatggtccctcagtatggatacctcaccctgaacaacggaagtcaagcggtgggacgctcatccttttactgcctggagtacttcccttcgcagatgctaaggactggaaataacttccaattcagctataccttcgaggatgtaccttttcacagcagctacgctcacagccagagtttggatcgcttgatgaatcctcttattgatcagtatctgtactacctgaacagaacgcaaggaacaacctctggaacaaccaaccaatcacggctgctttttagccaggctgggcctcagtctatgtctttgcaggccagaaattggctacctgggccctgctaccggcaacagagactttcaaagactgctaacgacaacaacaacagtaactttccttggacagcggccagcaaatatcatctcaatggccgcgactcgctggtgaatccaggaccagctatggccagtcacaaggacgatgaagaaaaatttttccctatgcacggcaatctaatatttggcaaagaagggacaacggcaagtaacgcagaattagataatgtaatgattacggatgaagaagagattcgtaccaccaatcctgtggcaacagagcagtatggaactgtggcaaataacttgcagagctcaaatacagctcccacgactggaactgtcaatcatcagggggccttacctggcatggtgtggcaagatcgtgacgtgtaccttcaaggacctatctgggcaaagattcctcacacggatggacactttcatccttctcctctgatgggaggctttggactgaaacatccgcctcctcaaatcatgatcaaaaatactccggtaccggcaaatcctccgacgactttcagcccggccaagtttgcttcatttatcactcagtactccactggacaggtcagcgtggaaattgagtgggagctacagaaagaaaacagcaaacgttggaatccagagattcagtacacttccaactacaacaagtctgttaatgtggactttactgtagacactaatggtgtttatagtgaacctcgccctattggaacccggtatctcacacgaaacttgtaa

SEQ ID NO: 4757 - protein, 736 aa, Adeno-associated virus
MAADGYLPDWLEDNLSEGIREWWALKPGVPQPKANQQHQDNRRGLVLPGYKYLGPGNGLDKGEPVNEADAAALEHDKAYDQQLKAGDNPYLKYNHADAEFQERLQEDTSFGGNLGRAVFQAKKRILEPLGLVEEAAKTAPGKKGAVDQSPQEPDSSSGVGKSGKQPARKRLNFGQTGDSESVPDPQPLGEPPAAPTSLGSNTMASGGGAPMADNNEGADGVGNSSGNWHCDSQWLGDRVITTSTRTWALPTYNNHLYKQISSQSGASNDNHYFGYSTPWGYFDFNRFHCHFSPRDWQRLINNNWGFRPKKLSFKLFNIQVRGVTQNDGTTTIANNLTSTVQVFTDSEYQLPYVLGSAHQGCLPPFPADVFMVPQYGYLTLNNGSQAVGRSSFYCLEYFPSQMLRTGNNFQFSYTFEDVPFHSSYAHSQSLDRLMNPLIDQYLYYLNRTQGTTSGTTNQSRLLFSQAGPQSMSLQARNWLPGPCYRQQRLSKTANDNNNSNFPWTAASKYHLNGRDSLVNPGPAMASHKDDEEKFFPMHGNLIFGKEGTTASNAELDNVMITDEEEIRTTNPVATEQYGTVANNLQSSNTAPTTGTVNHQGALPGMVWQDRDVYLQGPIWAKIPHTDGHFHPSPLMGGFGLKHPPPQIMIKNTPVPANPPTTFSPAKFASFITQYSTGQVSVEIEWELQKENSKRWNPEIQYTSNYNKSVNVDFTVDTNGVYSEPRPIGTRYLTRNL

SEQ ID NO: 4758 - protein, 728 aa, Adeno-associated virus
MAADGYLPDWLEDNLSEGIREWWDLKPGAPKPKANQQKQDDGRGLVLPGYKYLGPFNGLDKGEPVNEADAAALEHDKAYDKQLEQGDNPYLKYNHADAEFQERLQEDTSFGGNLGRAVFQAKKRVLEPLGLVEEGAKTAPGKKRPIESPDSSTGIGRKGQQPAKKKLNFGQTGDSESVPDPQPIGEPPAGPSGLGSGTMAAGGGAPMADNNEGADGVGNASGNWHCDSTWLGDRVITTSTRTWALPTYNNHLYKQISSQSGATNDNHFFGYSTPWGYFDFNRFHCHFSPRDWQRLINNNWGFRPRKLRFKLFNIQVKEVTTNDGVTTIANNLTSTIQVFSDSEYQLPYVLGSAHQGCLPPFPADVFMIPQYGYLTLNNGSQSVGRSSFYCLEYFPSQMLRTGNNFEFSYTFEEVPFHSSYAHSQSLDRLMNPLIDQYLYYLARTQSTTGSTRELQFHQAGPNTMAEQSKNWLPGPCYRQQRLSKNIDSNNNSNFAWTGATKYHLNGRNSLTNPGVAMATNKDDEDQFFPINGVLVFGKTGAANKTTLENVLMTSEEEIKTTNPVATEEYGVVSSNLQSSTAGPQTQTVNSQGALPGMVWQNRDVYLQGPIWAKIPHTDGNFHPSPLMGGFGLKHPPPQILIKNTPVPANPPEVFTPAKFASFITQYSTGQVSVEIEWELQKENSKRWNPEIQYTSNYAKSNNVEFAVNNEGVYTEPRPIGTRYLTRNL

SEQ ID NO: 4759 - protein, 728 aa, Adeno-associated virus
MAADGYLPDWLEDNLSEGIREWWDLKPGAPKPKANQQKQDDGRGLVLPGYKYLGPFNGLDKGEPVNAADAAALEHDKAYDQQLKAGDNPYLRYNHADAEFQERLQEDTSFGGNLGRAVFQAKKRVLEPLGLVEEGAKTAPGKKRPIESPDSSTGIGKKGQQPAKKKLNFGQTGDSESVPDPQPIGEPPAGPSGLGSGTMAAGGGAPMADNNEGADGVGNASGNWHCDSTWLGDRVITTSTRTWALPTYNNHLYKQISSQSGATNDNHFFGYSTPWGYFDFNRFHCHFSPRDWQRLINNNWGFRPRKLRFKLFNIQVKEVTTNDGVTTIANNLTSTIQVFSDSEYQLPYVLGSAHQGCLPPFPADVFMIPQYGYLTLNNGSQSVGRSSFYCLEYFPSQMLRTGNNFEFSYTFEEVPFHSSYAHSQSLDRLMNPLIDQYLYYLARTQSTTGSTRELQFHQAGPNTMAEQSKNWLPGPCYRRQRLSKDIDSNNNSNFAWTGATKYHLNGRNSLTNPGVAMATNKDDEDQFFPINGVLVFGKTGAANKTTLENVLMTSEEEIKTTNPVATEEYGVVSSNLQSSTAGPQTQTVNSQGALPGMVWQNRDVYLQGPIWAKIPHTDGNFHPSPLMGGFGLKHPPPQILIKNTPVPANPPEVFTPAKFASFITQYSTGQVSVEIEWELQKENSKRWNPEIQYTSNYAKSNNVEFAVNNEGVYTEPRPIGTRYLTRNL

SEQ ID NO: 4760 - protein, 685 aa, Adeno-associated virus
MAADGYLPDWLEDNLSEGIREWWDLKPGAPKPKANQQKQDDGRGLVLPGYKYLGPFNGLDKGEPVNEADAAALEHDKAYDKQLEQGDNPYLKYNHADAEFQERLQEDTSFGGNLGRAVFQAKKRVLEPLGLVEEGAKTAPGKKRPVEPSPQRSPDSSTGIGKTGQQPAKKRLNFGQTGDSESVPDPQPIGEPPAGPSGLGSGTMAAGGGAPMADNNEGADGVGSSSGNWHCDSTWLGDRVITTSTRTWALPTYNNHLYKQISNGTSGGSTNDNTYFGYSTPWGYFDFNRFHCHFSPRDWQRLINNNWGFRPKRLNFKLFNIQVKEVTQNEGTKTIANNLTSTIQVFTDSEYQLPYVLGSAHQGCLPPFPADVFMIPQYGYLTLNNGSQAVGRSSFYCLEYFPSQMLRTGNNFEFSYQFEDVPFHSSYAHSQSLDRLTNPLIDQYLYYLARTQSTTGSTRGLQFHQAGPNTMAEQSKNWLPGPCYRQQRLSKNIDSNNNSNFAWTGATKYHLNGRNSLTNPGVAMATNKDDEDQFFPINGVLVFGKTGAANKTTLENVLMTSEEEIKTTNPVATEEYGVVSSNLQSSTAGPQTQTVNSQGALPGMVWQNRDVYLQGPIWAKIPHTDGNFHPSPLMGGFGLKHPPPQILIKYTSNYYKSTNVDFAVNTEGTYSEPRPIGTRYLTRNL

SEQ ID NO: 4761 - protein, 733 aa, Adeno-associated virus
MAADGYLPDWLEDNLSEGIREWWDLKPGAPKPKANQQKQDDGRGLVLPGYKYLGPFNGLDKGEPVNAADAAALEHDKAYDQQLKAGDNPYLRYNHADAEFQERLQEDTSFGGNLGRAVFQAKKRVLEPLGLVEEGAKTAPGKKRPIESPDSSTGIGKKGQQPAKKKLNFGQTGDSESVPDPQPIGEPPAGPSGLGSGTMAAGGGAPMADNNEGADGVGSSSGNWHCDSTWLGDRVITTSTRTWALPTYNNHLYKQISNGTSGGSTNDNTYFGYSTPWGYFDFNRFHCHFSPRDWQRLINNNWGFRPKRLNFKLFNIQVKEVTQNEGTKTIANNLTSTIQVFTDSEYQLPYVLGSAHQGCLPPFPADVFMIPQYGYLTLNNGSQAVGRSSFYCLEYFPSQMLRTGNNFEFSYQFEDVPFHSSYAHSQSLDRLMNPLIDQYLYYLSRTQSTGGTAGTQQLLFSQAGPNNMSAQAKNWLPGPCYRQQRVSTTVSQNNNSNFAWTGATKYHLNGRDSLVNPGVAMATHKGDEERFFPSSGVLMFGKQGAGKDNVDYSSVMLTSEEEIKTTNPVATEQYGVVADNLQQQNAAPIVGAVNSQGALPGMVWQNRDVYLQGPIWAKIPHTDGNFHPSPLMGGFGLKHPPPQILIKNTPVPADPPTTFSQAKLASFITQYSTGQVSVEIEWELQKENSKRWNPEIQYTSNYYKSTNVDFAVNTEGTYSEPRPIGTRYLTRSL

SEQ ID NO: 4762 - protein, 738 aa, Adeno-associated virus
MAADGYLPDWLEDNLSEGIREWWDLKPGAPKPKANQQKQDDGRGLVLPGYKYLGPFNGLDKGEPVNAADAAALEHDKAYDQQLKAGDNPYLRYNHADAEFQERLQEDTSFGGNLGRAVFQAKKRVLEPLGLVEEGAKTAPGKKRPVEPSPQRSPDSSTGIGKTGQQPAKKRLNFGQTGDSESVPDPQPIGEPPAGPSGLGSGTMAAGGGAPMADNNEGADGVGSSSGNWHCDSTWLGDRVITTSTRTWALPTYNNHLYKQISNGTSGGSTNDNTYFGYSTPWGYFDFNRFHCHFSPRDWQRLINNNWGFRPKRLNFKLFNIQVKEVTQNEGTKTIANNLTSTIQVFTDSEYQLPYVLGSAHQGCPPPFPADVFMIPQYGYLTLNNGSQAVGRSSFYCLEYFPSQMRRTGNNFEFSYQFEDVPFHSSYAHSQSLDRLMNPLIDQYLYYLSRTQSTGGTAGTQQLLFSQAGPNNMSAQAKNWLPGPCYRQQRVSTTLSQNNNSNFAWTGATKYHLNGRDSLVNPGVAMATHKDDEERFFPSSGVLMFGKQGAGKDNVDYSSVMLTSEEEIKTTNPVATEQYGVVADNLQQQNAAPIVGAVNSQGALPGMVWQNRDVYLQGPIWAKIPHTDGNFHPSPLMGGFGLKHPPPQILIKNTPVPADPPTTFSQAKLASFITQYSTGQVSVEIEWELQKENSKRWNPEIQYTSNYYKSTNVDFAVNTEGTYSEPRPIGTRYLTRNL

SEQ ID NO: 4763 - protein, 733 aa, Adeno-associated virus
MAADGYLPDWLEDNLSEGIREWWDLRPGAPKPKANQQKQDDGRGLVLPGYKYLGPFNGLDKGEPVNEADAAALEHDKAYDKQLEQGDNPYLKYNHADAEFQERLQEDTSFGGNLGRAVFQAKKRVLEPLGLVEEGAKTAPGKKRPIESPDSSTGIGKKGQQPAKKRLNFGQTGDSESVPDPQPIGEPPAGPSGLGSGTMAAGGGAPMADNNEGADGVGSSSGNWHCDSTWLGDRVITTSTRTWALPTYNNHLYKQISNGTSGGSTNDNTYFGYSTPWGYFDFNRFHCHFSPRDWQRLINNNWGFRPKRLNFKLFNIQVKEVTQNEGTKTIANNLTSTIQVFTDSEYQLPYVLGSAHQGCLPPFPADVFMIPQYGYLTLNNGSQAVGRSSFYCLEYFPSQMLRTGNNFEFSYQFEDVPFHSSYAHSQSLDRLMNPLIDQYLYYLSRTQSTGGTAGTQQLLFSQAGPNNMSAQAKNWLPGPCYRQQRVSTTVSQNNNSNFAWTGATKYHLNGRDSLVNPGVAMATHKGDEERFFPSSGVLMFGKQGAGKDNVDYSSVMLTSEEEIKTTNPVATEQYGVVADNLQQQNAAPIVGAVNSQGALPGMVWQNRDVYLQGPIWAKIPHTDGNFHPSPLMGGFGLKHPPPQILIKNTPVPADPPTTFSQAKLASFITQYSTGQVSVEIEWELQKENSKRWNPEIQYTSNYYKSTNVDFAVNTEGTYSEPRPIGTRYLTRNL

SEQ ID NO: 4764 - DNA, 3098 bp, Adeno-associated virus
gaattcgccctttctacggctgcgtcaactggaccaatgagaactttcccttcaacgattgcgtcgacaagatggtgatctggtgggaggagggcaagatgacggccaaggtcgtggagtccgccaaggccattctcggcggcagcaaggtgcgcgtggaccaaaagtgcaagtcttccgcccagatcgatcccacccccgtgatcgtcacttccaacaccaacatgtgcgctgtgattgacgggaacagcaccaccttcgagcaccagcagccgttacaagaccggatgttcaaatttgaactcacccgccgtctggagcacgactttggcaaggtgacaaagcaggaagtcaaagagttcttccgctgggcgcaggatcacgtgaccgaggtggcgcatgagttctacgtcagaaagggtggagccaacaagagacccgcccccgatgacgcggataaaagcgagcccaagcgggcctgcccctcagtcgcggatccatcgacgtcagacgcggaaggagctccggtggactttgccgacaggtaccaaaacaaatgttctcgtcacgcgggcatgcttcagatgctgtttccctgcaagacatgcgagagaatgaatcagaatttcaacatttgcttcacgcacgggaccagagactgttcagaatgtttccccggcgtgtcagaatctcaaccggtcgtcagaaagaggacgtatcggaaactctgtgccattcatcatctgctggggcgggctcccgagattgcttgctcggcctgcgatctggtcaacgtggacctggatgaccgtgtttctgagcaataaatgacttaaaccaggtatggctgccgatggttatcttccagattggctcgaggacaacctctctgagggcattcgcgagtggtgggacttgaaacctggagccccgaaacccaaagccaaccagcaaaagcaggacgacggccggggtctggtgcttcctggctacaagtacctcggacccttcaacggactcgacaagggagagccggtcaacgaggcagacgccgcggccctcgagcacgacaaggcctacgacaagcagctcgagcagggggacaacccgtacctcaagtacaaccacgccgacgccgagtttcaggagcgtcttcaagaagatacgtcttttgggggcaacctcgggcgagcagtcttccaggccaagaagcgggttctcgaacctctcggtctggttgaggaaggcgctaagacggctcctggaaagaagagacccatagaatcccccgactcctccacgggcatcggcaagaaaggccagcagcccgctaaaaagaagctcaactttgggcagactggcgactcagagtcagtgcccgacccccaacctctcggagaacctcccgccgcgccctcaggtctgggatctggtacaatggctgcaggcggtggcgcaccaatggcagacaataacgaaggcgccgacggagtgggtaatgcctccggaaattggcattgcgattccacatggctgggcgacagagtcatcaccaccagcacccgcacctgggccctgcccacctacaacaaccacctctacaagcagatatcaagtcagagcggggctaccaacgacaaccacttcttcggctacagcaccccctggggctattttgacttcaacagattccactgccacttctcaccacgtgactggcagcgactcatcaacaacaactggggattccggcccagaaagctgcggttcaagttgttcaacatccaggtcaaggaggtcacgacgaacgacggcgttacgaccatcgctaataaccttaccagcacgattcaggtcttctcggactcggagtaccaactgccgtacgtcctcggctctgcgcaccagggctgcctccctccgttccctgcggacgtgttcatgattcctcagtacggatatctgactctaaacaacggcagtcagtctgtgggacgttcctccttctactgcctggagtactttccttctcagatgctgagaacgggcaataactttgaattcagctacacctttgaggaagtgcctttccacagcagctatgcgcacagccagagcctggaccggctgatgaatcccctcatcgaccagtacctgtactacctggcccggacccagagcactacggggtccacaagggagctgcagttccatcaggctgggcccaacaccatggccgagcaatcaaagaactggctgcccggaccctgttatcggcagcagagactgtcaaaaaacatagacagcaacaacaacagtaactttgcctggaccggggccactaaataccatctgaatggtagaaattcattaaccaacccgggcgtagccatggccaccaacaaggacgacgaggaccagttctttcccatcaacggagtgctggtttttggcgaaacgggggctgccaacaagacaacgctggaaaacgtgctaatgaccagcgaggaggagatcaaaaccaccaatcccgtggctacagaagaatacggtgtggtctccagcaacctgcaatcgtctacggccggaccccagacacagactgtcaacagccagggggctctgcccggcatggtctggcagaaccgggacgtgtacctgcagggtcccatctgggccaaaattcctcacacggacggcaactttcacccgtctcccctgatgggcggatttggactcaaacacccgcctcctcaaattctcatcaaaaacaccccggtacctgctaatcctccagaggtgtttactcctgccaagtttgcctcatttatcacgcagtacagcaccggccaggtcagcgtggagatcgagtgggaactgcagaaagaaaacagcaaacgctggaatccagagattcagtacacctcaaattatgccaagtctaataatgtggaatttgctgtcaacaacgaaggggtttatactgagcctcgccccattggcacccgttacctcacccgtaacctgtaattgcctgttaatcaataaaccggttaattcgtttcagttgaactttggtctctgcgaagggcgaattc

SEQ ID NO: 4765 - protein, 728 aa, Adeno-associated virus
MAADGYLPDWLEDNLSEGIREWWDLKPGAPKPKANQQKQDDGRGLVLPGYKYLGPFNGLDKGEPVNEADAAALEHDKAYDKQLEQGDNPYLKYNHADAEFQERLQEDTSFGGNLGRAVFQAKKRVLEPLGLVEEGAKTAPGKKRPIESPDSSTGIGKKGQQPAKKKLNFGQTGDSESVPDPQPLGEPPAAPSGLGSGTMAAGGGAPMADNNEGADGVGNASGNWHCDSTWLGDRVITTSTRTWALPTYNNHLYKQISSQSGATNDNHFFGYSTPWGYFDFNRFHCHFSPRDWQRLINNNWGFRPRKLRFKLFNIQVKEVTTNDGVTTIANNLTSTIQVFSDSEYQLPYVLGSAHQGCLPPFPADVFMIPQYGYLTLNNGSQSVGRSSFYCLEYFPSQMLRTGNNFEFSYTFEEVPFHSSYAHSQSLDRLMNPLIDQYLYYLARTQSTTGSTRELQFHQAGPNTMAEQSKNWLPGPCYRQQRLSKNIDSNNNSNFAWTGATKYHLNGRNSLTNPGVAMATNKDDEDQFFPINGVLVFGETGAANKTTLENVLMTSEEEIKTTNPVATEEYGVVSSNLQSSTAGPQTQTVNSQGALPGMVWQNRDVYLQGPIWAKIPHTDGNFHPSPLMGGFGLKHPPPQILIKNTPVPANPPEVFTPAKFASFITQYSTGQVSVEIEWELQKENSKRWNPEIQYTSNYAKSNNVEFAVNNEGVYTEPRPIGTRYLTRNL

SEQ ID NO: 4766 - protein, 733 aa, Adeno-associated virus
MAADGHLPDWLEDNLSEGIREWWDLKPGAPKPKANQQKQDDGRGLVLPGYKYLGPFNGLDKGEPVNAADAAALEHDKAYDQQLKAGDNPYLRYNHADAEFQERLQEDTSFGGNLGRAVFQAKKRVLEPLGLVEEGAKTAPGKKRPIESPDSSTGIGKKGQQPAKKKLNFGQTGDSESVPDPQPIGEPPAGPSGLGSGTMAAGGGAPMADNNEGADGVGSSSGNWHCDSTWLGDRVITTSTRTWALPTYNNHLYKQISNGTSGGSTNDNTYFGYSTPWGYFDFNRFHCHFSPRDWQRLINNSWGFRPKRLNFKLFNIQVKEVTQNEGTKTIANNLTSTIQVFTDSEYQLPYVLGSAHQGCLPPFPADVFMIPQYGYLTLNNGSQAVGRSSFYCLEYFPSQMLRTGNNFEFSYQFEDVPFHSSYAHSQSLDRLMNPLIDQYLYYLSRTQSTGGTAGTQQLLFSQAGPNNMSAQAKNWLPGPCYRQQRVSTTLSQNNNSNFAWTGATKYHLNGRDSLVNPGVAMATHKDDEERFFPSSGVLMFGKQGAGKDNVDYSSVMLTSEEEIKTTNPVATEQYGVVADNLQQQNAAPIVGAVNSQGALPGMVWQNRDVYLQGPIWAKIPHTDGNFHPSPLMGGFGLKHPPPQILIKNTPVPADPPTTFSQAKLASFITQYSTGQVSVEIEWELQKENSKRWNPEIQYTSNYYKSTNVDFAVNTEGTYSEPRPIGTRYLTRNL

SEQ ID NO: 4767 - DNA, 2495 bp, Adeno-associated virus
gaattcgccctttctacggctgcgtcaactagaccaatgagaactttcccttcaacgattgcgtcgacaagatggtgatctggtgggaggagggcaagatgacggccaaggtcgtggagtccgccaaggccattcatcatctgctggggcgggctcccgagattgcttgctcggcctgcgatctggtcaacgtggacctggatgactgtgtttctgagcaataaatgacttaaaccaggtatggctgccgatggttatcttccagattggctcgaggacaacctctctgagggcattcgcgagtggtgggacttgaaacctggagccccgaaacccaaagccaaccagcaaaagcaggacgacggccggggtctggtgcttcctggctacaagtacctcggacccttcaacggactcgacaagggagagccggtcaacgaggcagacgccgcggccctcgagcacgacaaggcctacgacaagcagctcgagcagggggacaacccgtacctcaagtacaaccacgccgacgccgagtttcaggagcgtcttcaagaagatacgtcttttgggggcaacctcgggcgagcagtcttccaggccaagaagcgggttctcgaacctctcggtctggttgaggaaggcgctaagacggctcctggaaagaagagacccatagaatcccccgactcctccacgggcatcggcaagaaaggccagcagcccgctaaaaagaagctcaactttgggcagactggcgactcagagtcagtgcccgaccctcaaccaatcggagaaccccccgcaggcccctctggtctgggatctggtacaatggctgcaggcggtggcgctccaatggcagacaataacgaaggcgccgacggagtgggtaatgcctccggaaattggcattgcgattccacatggctgggcgacagagtcatcaccaccagcacccgcacctgggccctgcccacctacaacaaccacctctacaagcagatatcaagtcagagcggggctaccaacgacaaccacttcttcggctacagcaccccctggggctattttgacttcaacagattccactgccacttctcaccacgtgactggcagcgactcatcaacaacaactggggattccggcccagaaagctgcggttcaagttgttcaacatccaggtcaaggaggtcacgacgaacgacggcgttacgaccatcgctaataaccttaccagcacgattcaggtcttctcggactcggagtaccaactgccgtacgtcctcggctctgcgcaccagggctgcctccctccgttccctgcggacgtgttcatgattcctcagtacggatatctgactctaaacaacggcagtcagtctgtgggacgttcctccttctactgcctggagtactttccttctcagatgctgagaacgggcaataactttgaattcagctacacctttgaggaagtgcctttccacagcagctatgcgcacagccagagcctggaccggctgatgaatcccctcatcgaccagtacctgtactacctggcccggacccagagcactacggggtccacaagggagctgcagttccatcaggctgggcccaacaccatggccgagcaatcaaagaactggctgcccggaccctgttatcggcagcagagactgtcaaaaaacatagacagcaacaacaccagtaactttgcctggaccggggccactaaataccatctgaatggtagaaattcattaaccaacccgggcgtagccatggccaccaacaaggacgacgaggaccagttctttcccatcaacggagtgctggtttttggcaaaacgggggctgccaacaagacaacgctggaaaacgtgctaatgaccagcgaggaggagatcaaaaccaccaatcccgtggctacagaacagtacggtgtggtctccagcaacctgcaatcgtctacggccggaccccagacacagactgtcaacagccagggggctctgcccggcatggtctggcagaaccgggacgtgtacctgcagggtcccatctgggccaaaattcctcacacggacggcaactttcacccgtctcccctgatgggcggatttggactcaaacacccgcctcctcaaattctcatcaaaaacaccccggtacctgctaatcctccagaggtgtttactcctgccaagtttgcctcatttatcacgcagtacagcaccggccaggtcagcgtggagatcgagtgggaactgcagaaagaaaacagcaaacgctggaatccagagattcagtacacctcaaattatgccaagtctaataatgtggaatttgctgtcaacaacgaaggggtttatactgagcctcgccccattggcacccgttacctcacccgtaacctgtaattgcctgttaatcaataaaccggttaattcgtttcagttgaactttggtctctgcgaagggcgaattc

SEQ ID NO: 4768 - protein, 728 aa, Adeno-associated virus
MAADGYLPDWLEDNLSEGIREWWDLKPGAPKPKANQQKQDDGRGLVLPGYKYLGPFNGLDKGEPVNEADAAALEHDKAYDKQLEQGDNPYLKYNHADAEFQERLQEDTSFGGNLGRAVFQAKKRVLEPLGLVEEGAKTAPGKKRPIESPDSSTGIGKKGQQPAKKKLNFGQTGDSESVPDPQPIGEPPAGPSGLGSGTMAAGGGAPMADNNEGADGVGNASGNWHCDSTWLGDRVITTSTRTWALPTYNNHLYKQISSQSGATNDNHFFGYSTPWGYFDFNRFHCHFSPRDWQRLINNNWGFRPRKLRFKLFNIQVKEVTTNDGVTTIANNLTSTIQVFSDSEYQLPYVLGSAHQGCLPPFPADVFMIPQYGYLTLNNGSQSVGRSSFYCLEYFPSQMLRTGNNFEFSYTFEEVPFHSSYAHSQSLDRLMNPLIDQYLYYLARTQSTTGSTRELQFHQAGPNTMAEQSKNWLPGPCYRQQRLSKNIDSNNTSNFAWTGATKYHLNGRNSLTNPGVAMATNKDDEDQFFPINGVLVFGKTGAANKTTLENVLMTSEEEIKTTNPVATEQYGVVSSNLQSSTAGPQTQTVNSQGALPGMVWQNRDVYLQGPIWAKIPHTDGNFHPSPLMGGFGLKHPPPQILIKNTPVPANPPEVFTPAKFASFITQYSTGQVSVEIEWELQKENSKRWNPEIQYTSNYAKSNNVEFAVNNEGVYTEPRPIGTRYLTRNL

SEQ ID NO: 4769 - DNA, 2504 bp, Adeno-associated virus
gaattcgccctttctacggctgcgtcaactggaccaatgagaactttcccttcaacgattgcgtcgacaagatggtgatctggtgggaggagggcaagatgacggccaaggtcgtggagtccgccaaggccattcatcatctgctggggcgggctcccgagattgcttgctcggcctgcgatctggtcaacgtggacctggatgactgtgtttctgagcaataaatgacttaaaccaggtatggctgccgatggttatcttccagattggctcgaggacaacctctctgagggcattcgcgagtggtgggacttgaaacctggagccccgaaacccaaagccaaccagcaaaagcaggacgacggccggggtctggtgcttcctggctacaagtacctcggacccttcaacggactcgacaagggagagccggtcaacgaggcagacgccgcggccctcgagcacgacaaggcctacgacaagcagctcgagcagggggacaacccgtacctcaagtacaaccacgccgacgccgagtttcaggagcgtcttcaagaagatacgtcttttgggggcaacctcgggcgagcagtcttccaggccaagaagcgggttctcgaacctctcggtctggttgaggaaggcgctaagacggctcctggaaagaagagacccatagaatcccccgactcctccacgggcatcggcaagaaaggccagcagcccgctaaaaagaagctcaactttgggcagactggcgactcagagtcagtgcccgaccctcaaccaatcggagaaccccccgcaggcccctctggtctgggatctggtacaatggctgcaggcggtggcgctccaatggcagacaataacgaaggcgccgacggagtgggtaatgcctccggaaattggcattgcgattccacatggctgggcgacagagtcatcaccaccagcacccgcacctgggccctgcccacctacaacaaccacctctacaagcagatatcaagtcagagcggggctaccaacgacaaccacttcttcggctacagcaccccctggggctattttgacttcaacagattccactgccacttctcatcacgtgactggcagcgactcatcaacaacaactggggattccggcccaagagactcaacttcaagctcttcaacatccaggtcaaggaggtcacgcagaatgaaggcaccaagaccatcgccaataaccttaccagcacgattcaggtctttacggactcggaataccggctcccgtacgtcctcggctctgcgcaccagggctgcctgcctccgttcccggcggacgtcttcatgattcctcagtacgggtacctgactctgaacaacggcagtcaggccgtgggccgttcctccttctactgcctggagtactttccttctcaaatgctgagaacgggcaacaactttgagttcagctaccagtttgaggacgtgccttttcacagcagctacgcgcacagccaaagcctggaccggctgatgaaccccctcatcgaccagtacctgtactacctgtctcggactcagtccacgggaggtaccgcaggaactcagcagttgctattttctcaggccgggcctaataacatgtcggctcaggccaaaaactggctacccgggccctgctaccggcagcaacgcgtctccacgacactgtcgcaaaataacaacagcaactttgcttggaccggtgccaccaagtatcatctgaatggcagagactctctggtaaatcccggtgtcgctatggcaacgcacaaggacgacgaagagcgattttttccatccagcggagtcttgatgtttgggaaacagggagctggaaaagacaacgtggactatagcagcgttatgctaaccagtgaggaagaaatcaaaaccaccaacccagtggccacagaacagtacggcgtggtggccgataacctgcaacagcaaaacgccgctcctattgtaggggccgtcaacagtcaaggagccttacctggcatggtctggcagaaccgggacgtgtacctgcagggtcctatctgggccaagattcctcacacggacggcaactttcatccttcgccgctgatgggaggctttggactgaaacacccgcctcctcagatcctgattaagaatacacctgttcccgcggatcctccaactaccttcagtcaagccaagccggcgtcgttcatcacgcagtacagcaccggacaggtcagcgtggaaattgaatgggagctgcagaaagagaacagcaagcgctggaacccagagattcagtatacttccaactactacaaatctacaaatgtggactttgctgtcaatactgagggtacttattcagagcctcgccccattggcacccgttacctcacccgtaacctgtaattgcctgttaatcaataaaccggttaattcgtttcagttgaactttggtctctgcgaagggcgaattc

SEQ ID NO: 4770 - protein, 731 aa, Adeno-associated virus
MAADGYLPDWLEDNLSEGIREWWDLKPGAPKPKANQQKQDDGRGLVLPGYKYLGPFNGLDKGEPVNEADAAALEHDKAYDKQLEQGDNPYLKYNHADAEFQERLQEDTSFGGNLGRAVFQAKKRVLEPLGLVEEGAKTAPGKKRPIESPDSSTGIGKKGQQPAKKKLNFGQTGDSESVPDPQPIGEPPAGPSGLGSGTMAAGGGAPMADNNEGADGVGNASGNWHCDSTWLGDRVITTSTRTWALPTYNNHLYKQISSQSGATNDNHFFGYSTPWGYFDFNRFHCHFSSRDWQRLINNNWGFRPKRLNFKLFNIQVKEVTQNEGTKTIANNLTSTIQVFTDSEYRLPYVLGSAHQGCLPPFPADVFMIPQYGYLTLNNGSQAVGRSSFYCLEYFPSQMLRTGNNFEFSYQFEDVPFHSSYAHSQSLDRLMNPLIDQYLYYLSRTQSTGGTAGTQQLLFSQAGPNNMSAQAKNWLPGPCYRQQRVSTTLSQNNNSNFAWTGATKYHLNGRDSLVNPGVAMATHKDDEERFFPSSGVLMFGKQGAGKDNVDYSSVMLTSEEEIKTTNPVATEQYGVVADNLQQQNAAPIVGAVNSQGALPGMVWQNRDVYLQGPIWAKIPHTDGNFHPSPLMGGFGLKHPPPQILIKNTPVPADPPTTFSQAKPASFITQYSTGQVSVEIEWELQKENSKRWNPEIQYTSNYYKSTNVDFAVNTEGTYSEPRPIGTRYLTRNL

SEQ ID NO: 4771 - protein, 731 aa, Adeno-associated virus
MAADGYLPDWLEDNLSEGIREWWDLKPGAPKPKANQQKQDDGRGLVLPGYKYLGPFNGLDKGEPVNEADAAALEHDKAYDKQLEQGDNPYLKYNHADAEFQERLQEDTSFGGNLGRAVFRAKKRVLEPLGLVEEGAKTAPGKKRPIESPDSSTGIGKKGQQPAKKKLNFGQTGDSESVPDPQPLGEPPAAPSGLGSGTMAAGGGAPMADNNEGADGVGNASGNWHCDSTWLGDRVITTSTRTWALPTYNNHLYKQISSQSGATNDNHFFGYSTPWGYFDFNRFHCHFSPRDWQRLINNNRGFRPRKLRFKLFNIQVKEVTTNDGVTTIANNLTSTIQVFSDSEYQLPYVLGSAHQGCLPPFPADVFMIPQYGYLTLNNGSQSVGRSSFYCLEYFPSQMLRTGNNFEFSYQFEDVPFHSSYAHSQSLDRLMNPLIDQYLYYLSRTQSTGGTAGTQQLLFSQAGPNNMSAQAKNWLPGPCYRQQRVSTTLSQNNNSNFAWTGATKYHLNGRDSLVNPGVAMATHKDDEERFFPSSGVLMFGKQGAGKDNVDYSSVMLTSEEEIKTTNPVATEQYGVVADNLQQQNAAPIVGAVNSQGALPGMAWQNRDVYLQGPIWAKIPHTDGNFHPSPLMGGFGLKHPPPQILIKNTPVPADPPTTFSQAKLASFITQYSTGQVSVEIEWELQKENSKRWNPEIQYTSNYYKSTNVDFAVNTEGTYSEPRPIGTRYLTRNL

SEQ ID NO: 4772 - protein, 738 aa, Adeno-associated virus
MAADGYLPDWLEDNLSEGIREWWDLKPGAPKPKANQQKQDDGRGLVLPGYKYLGPFNGLDKGEPVNEADAAALEHDKAYDKQLEQGDNPYLKYNHADAEFQERLQEDTSFGGNLGRAVFQAKKRVLEPLGLVEEGAKTAPGKKRPVEPSPQRSPDSSTGIGKTGQQPAKKRLNFGQTGDSESVPDPQPIGEPPAGPSGLGSGTMAAGGGAPMADNNEGADGVGSSSGNWHCDSTWLGDRVITTSTRTWALPTYNNHLYKQISNGTSGGSTNDNTYFGYSTPWGYFDFNRFHCHFSPRDWQRLINNNWGFRPKRLNFKLFNIQVKEVTQNEGTKTIANNLTSTIQVFTDSEYQLPYVLGSAHQGCLPPFPADVFMIPQYGYLTLNNGSQAVGRSSFYCLEYFPSQMLRTGNNFEFSYQFEDVPFHSSYAHSQSLDRLMNPLIDQYLYYLSRTQSTGGTAGTQQLLFSQAGPNNMSAQAKNWLPGPCYRQQRVSTTLSQNNNSNFAWTGATKYHLNGRDSLVNPGVAMATHKDDEERFFPSSGVLMFGKQGAGKDNVDYSSVMLTSEEEIKTTNPVATEQYGVVADNLQQQNAAPIVGAVNSQGALPGMVWQNRDVYLQGPIWAKIPHTDGNFHPSPLMGGFGLKHPPPQILIKNTPVPADPPTTFSQAKLASFITQYSTGQVSVEIEWELQKENSKRWNPEIQYTSNYYKSTNVDFAVNTEGTYSEPRPIGTRYLTRNL

SEQ ID NO: 4773 - protein, 735 aa, Adeno-associated virus
MAADGYLPDWLEDNLSEGIREWWDLKPGAPKPKANQQKQDDGRGLVLPGYKYLGPFNGLDKGEPVNEADAAALEHDKAYDKQLEQGDNPYLKYNHADAEFQERLQEDTSFGGNLGRAVFQAKKRVLEPLGLVEEGAKTAPGKKRPVEPSPQRSPDSSTGIGKTGQQPAKKRLNFGQTGDSESVPDPQPIGEPPAGPSGLGSGTMAAGGGAPMADNNEGADGVGSSSGNWHCDSTWLGDRVITTSTRTWALPTYNNHLYKQISNGTSGGSTNDNTYFGYSTPWGYFDFNRFHCHFSPRDWQRLINNNWGFRPRKLRFKLFNIQVKEVTTDDGVTTIANNLTSTIQVFSDSEYQLPYVLGSAHQGCLPPFPADVFMIPQYGYLTLNNGSQSVGRSSFYCLEYFPSQMLRTGNNFEFSYTFEEVPFHSSYAHSQSLDRLMNPLIDQYLYYLARTQSTTGSTRELQFHQAGPNTMAEQSKNWLPGPCYRQQRLSKNIDSNNNSNFAWTGATKYHLNGRNSLTNPGVAMATNKDDEDQFFPINGVLVFGKTGAANKTTLENVLMTSEEEIKTTNPVATEEYGVVSSNLQSSTAGPQTQTVNSQGALPGMVWQNRDVYLQGPIWAKIPHTDGNFHPSPLMDGFGLKHPPPQILIKNTPVPANPPEVFTPAKFASFITQYSTGQVSVEIEWELQKENSKRWNPEIQYTSNYAKSNNVEFAVNNEGVYTEPRPIGTRYLTRNL

SEQ ID NO: 4774 - DNA, 3128 bp, Adeno-associated virus
gaattcgccctttctacggctgcgtcaactggaccaatgagaactttcccttcaacgattgcgtcgacaagatggtgatctggtgggaggagggcaagatgacggccaaggtcgtggagtccgccaaggccattctcggcggcagcaaggtgcgcgtggaccaaaagtgcaagtcttccgcccagatcgatcccacccccgtgatcgtcacttccaacaccaacatgtgcgccgtgattgacgggaacagcaccaccttcgagcaccagcagccgttacaagaccggatgttcaaatttgaactcacccgccgtctggagcacgactttggcaaggtgacaaagcaggaagtcaaagagttcttccgctgggcgcaggatcacgtgaccgaggtggcgcatgagttctacgtcagaaagggtggagccaacaagagacccgcccccgatgacgcggataaaagcgagcccaagcgggcctgcccctcagtcgcggatccatcgacgtcagacgcggaaggagctccggtggactttgccgacaggtaccaaaacaaatgttctcgtcacgcgggcatgcttcagatgctgtttccctgcaagacatgcgagagaatgaatcagaatttcaacatttgcttcacgcacgggaccagagactgttcagaatgtttccccggcgtgtcagaatctcaaccggtcgtcagaaagaggacgtatcggaaactctgtgccattcatcatctgctagggcgggctcccgagattgcttgctcggcctgcgatctggtcaacgtggacctggatgactgtgtttctgagcaataaatgacttaaaccaggtatggctgccgatggttatcttccagattggctcgaggacaacctctctgagggcattcgcgagtggtgggacttgaaacctggagccccgaaacccaaagccaaccagcaaaagcaggacgacggccggggtctggtgcttcctggctacaagtacctcggacccttcaacggactcgacaagggggagcccgtcaacgcggcggacgcagcggccctcgagcacgacaaggcctacgaccagcagctcaaagcgggtgacaatccgtacctgcggtataaccacgccgacgccgagtttcaggagcgtctgcaagaagatacgtcttttgggggcaacctcgggcgagcagtcttccaggccaagaagcgggttctcgaacctctcggtctggttgaggaaggcgctaagacggctcctggaaagaagagaccggtagagccatcaccccagcgttctccagactcctctacgggcatcggcaagacaggccagcagcccgcgaaaaagagactcaactttgggcagactggcgactcagagtcagtgcccgaccctcaaccaatcggagaaccccccgcaggcccctctggtctgggatctggtacaatggctgcaggcggtggcgctccaatggcagacaataacgaaggcgccgacggagtgggtagttcctcaggaaattggcattgcgattccacatggctgggcgacagagtcatcaccaccagcacccgaacctgggccctccccacctacaacaaccacctctacaagcaaatctccaacgggacatcgggaggaagcaccaacgacaacacctacttcggctacagcaccccctgggggtattttgactttaacagattccactgccacttctcaccacgtgactggcagcgactcatcaacaacaactggggattccggcccaagagactcaacttcaagctcttcaacatccaggtcaaggaggtcacgcagaatgaaggcaccaagaccatcgccaataaccttaccagcacgattcaggtctttacggactcggaataccagctcccgtacgtcctcggctctgcgcaccagggctgcctgcctccgttcccggcggacgtcttcatgattcctcagtacgggtacctgactctgaacaacggcagtcaggccgtgggccgttcctccttctactgcctggagtactttccttctcaaatgctgagaacgggcaacaactttgagttcagctaccagtttgaggacgtgccttttcacagcagctacgcgcacagccaaagcctggaccggctgatgaaccccctcatcgaccagtacctgtactacctgtctcggactcagtccacgggaggtaccgcaggaactcagcagttgctattttctcaggccgggcctaataacatgtcggctcaggccaaaaactggctacccgggccctgctaccggcagcaacgcgtctccacgacactgtcgcaaaataacaacagcaactttgcttggaccggtgccaccaagtatcatctgaatggcagagactctctggtaaatcccggtgtcgctatggcaacgcacaaggacgacgaagagcgattttttccatccagcggagtcttgatgtttgggaaacagggagctggaaaagacaacgtggactatagcagcgttatgctaaccagtgaggaagaaatcaaaaccaccaacccagtggccacagaacagtacggcgtggtggccgataacctgcaacagcaaaacgccgctcctattgtaggggccgtcaacagtcaaggagccttacctggcatggtctggcagaaccgggacgtgtacctgcagggtcctatctgggccaagattcctcacacggacggcaactttcatccttcgccgctgatgggaggctttggactgaaacacccgcctcctcagatcctgattaagaatacacctgttcccgcggatcctccaactaccttcagtcaagccaagctggcgtcgttcatcacgcagtacagcaccggacaggtcagcgtggaaattgaatgggagctgcagaaagagaacagcaagcgctggaacccagagattcagtatacttccaactactacaaatctacaaatgtggactttgctgtcaatactgagggtacttattcagagcctcgccccattggcacccgttacctcacccgtaacctgtaattgcctgttaatcaataaaccggctaattcgtttcagttgaactttggtctctgcgaagggcgaattc

SEQ ID NO: 4775 - protein, 738 aa, Adeno-associated virus
MAADGYLPDWLEDNLSEGIREWWDLKPGAPKPKANQQKQDDGRGLVLPGYKYLGPFNGLDKGEPVNAADAAALEHDKAYDQQLKAGDNPYLRYNHADAEFQERLQEDTSFGGNLGRAVFQAKKRVLEPLGLVEEGAKTAPGKKRPVEPSPQRSPDSSTGIGKTGQQPAKKRLNFGQTGDSESVPDPQPIGEPPAGPSGLGSGTMAAGGGAPMADNNEGADGVGSSSGNWHCDSTWLGDRVITTSTRTWALPTYNNHLYKQISNGTSGGSTNDNTYFGYSTPWGYFDFNRFHCHFSPRDWQRLINNNWGFRPKRLNFKLFNIQVKEVTQNEGTKTIANNLTSTIQVFTDSEYQLPYVLGSAHQGCLPPFPADVFMIPQYGYLTLNNGSQAVGRSSFYCLEYFPSQMLRTGNNFEFSYQFEDVPFHSSYAHSQSLDRLMNPLIDQYLYYLSRTQSTGGTAGTQQLLFSQAGPNNMSAQAKNWLPGPCYRQQRVSTTLSQNNNSNFAWTGATKYHLNGRDSLVNPGVAMATHKDDEERFFPSSGVLMFGKQGAGKDNVDYSSVMLTSEEEIKTTNPVATEQYGVVADNLQQQNAAPIVGAVNSQGALPGMVWQNRDVYLQGPIWAKIPHTDGNFHPSPLMGGFGLKHPPPQILIKNTPVPADPPTTFSQAKLASFITQYSTGQVSVEIEWELQKENSKRWNPEIQYTSNYYKSTNVDFAVNTEGTYSEPRPIGTRYLTRNL

SEQ ID NO: 4776 - DNA, 3084 bp, Adeno-associated virus
gaattcgccctttctacggctgcatcaactggaccaatgagaactttcccttcaacgattgcgtcgacaagatggtgatctggtgggaggagggcaagatgacggccaaggtcgtggagtccgccaaggccattctcggcggcagcaaggtgcgcgtggaccaaaagtgcaagtcgtccgcccagatcgaccccacccccgtgatcgtcacctccaacaccaacatgtgcgccgtgattgacgggaacagcaccaccttcgagcaccagcagccgttgcaggaccggatgttcaagttcgaactcacccgccgtctggagcacgactttggcaaggtgaccaagcaggaagtcaaagagttcttccgctgggcgcaggatcacgtgaccgaggtggcgcatgagttctacgtcagaaagggcggagccagcaaaagacccgcccccgatgacgcggatataagcgagcccaagcgggcctgcccctcagtcgcggatccatcgacgtcagacgcggaaggagctccggtggactttgccgacaggtaccaaaacaaatgttctcgtcacgcgggcatgcttcagatgctgtttccctgcaaaacgtgcgagaaaatgaatcagaatttcaacatttgcttcacgcacggggtcagagactgctcagaatgtttccccggtgcatcagaatctcaaccggtcgtcagaaaaaaaacgtatcagaaactgtgtgccattcatcatctgctggggcgggcacccgagattgcttgctcggcctgcgatctggtcaacgtggacctggacgactgtgtttctgagcaataaatgacttaaaccaggtatggctgccgatggttatcttccagattggcttgaggacaacctctctgagggcattcgcgagtggtgggacctgaaacctggagccccgaaacccaaagccaaccagcaaaagcaggacgacggccggggtctggtgcttcctggctacaagtacctcggacccttcaacggactcgacaagggggagcccgtcaacgcggcggacgcagcggccctcgagcacgacaaggcctacgaccagcagctcaaagcgggtgacaatccgtacctgcggtataaccacgccgacgccgagtttcaggagcgtctgcaagaagatacgtcttttgggggcaacctcgggcgagcagtcttccaggccaagaagcgggttctcgaacctctcggtctggttgaggaaggcgctaagacggctcctggaaagaagagaccggtagagccatcacctcagcgttcccccgactcctccacgggcatcggcaagaaaggccaccagcccgcgagaaagagactgaactttgggcagactggcgactcggagtcagtccccgaccctcaaccaatcggagaaccaccagcaggcccctctggtctgggatctggtacaatggctgcaggcggtggcgctccaatggcagacaataacgaaggcgccgacggagtgggtagttcctcaggaaattggcattgcgattccacatggctgggcgacagagtcatcaccaccagcacccgaacctgggccctgcccacctacaacaaccatctctacaagcaaatctccaacgggacatcgggaggaagcactaacgacaacacctactttggctacagcaccccctgggggtattttgacttcaacagattccactgccacttctcaccacgtgactggcagcgactcatcaacaataactggggattccggcccaagagactcaacttcaagctcttcaacatccaggtcaaggaggtcacgcagaatgaaggcaccaagaccatcgccaataaccttaccagcacgattcaggtgtttacggactcggaataccagctcccgtacgtccccggctctgcgcaccagggctgcctccctccgttcccggcggacgtcttcatgattcctcagtacgggtatctgaccctaaacaatggcagtcaggctgtgggccgttcctccttctactgcctggaatacttcccttctcaaatgctgaggacgggcaacaactttgaattcagctacaccttcgaggacgtgcctttccacagcagctacgcgcacagccagagcctggaccggctgatgaaccctctcatcgaccagtacctgtattacttatccagaactcagtccacaggaggaactcaaggtactcagcaattgttattttctcaagccgggcccgcaaacatgtcggctcaggccaagaactggctacctggaccgtgttaccgtcagcaacgagtttccacgacactgtcgcaaaacaacaacagcaattttgcttggaccggtgccaccaagtatcacctgaatggcagagactccctggttaatcccggcgttgccatggctacccacaaggacgacgaggagcgcttcttcccgtcaagcggagttctaatgtttggcaagcagggggctggaaaagacaatgtggactacagcagcgtgatgctcaccagcgaagaagaaattaaaactactaacccagtggctacagagcagtatggtgtggtggcagacaacctgcagcagaccaacggagctcccattgtgggaactgtcaacagccagggggccttacctggtatggtctggcaaaaccgggacgtgtacctgcagggccccatctgggccaaaattcctcacacggacggcaactttcatccttcgccgctgatgggaggctttggactgaaacacccgcctcctcagatcctggtgaaaaacactcctgttcctgcggatcctccgaccaccttcagccaggccaagctggcttcttttatcacgcagtacagcaccggacaggtcagcgtggaaatcgaatgggagctgcagaaagaaaacagcaagcgctggaacccagagattcagtatacttccaactactacaaatctacaaatgtggactttgctgtcaatactgagggtacttattcagagcctcgccccattggcactcgttatctcacccgtaatctgtaattgcttgttaatcaataaaccggt

SEQ ID NO: 4777 - protein, 738 aa, Adeno-associated virus
MAADGYLPDWLEDNLSEGIREWWDLKPGAPKPKANQQKQDDGRGLVLPGYKYLGPFNGLDKGEPVNAADAAALEHDKAYDQQLKAGDNPYLRYNHADAEFQERLQEDTSFGGNLGRAVFQAKKRVLEPLGLVEEGAKTAPGKKRPVEPSPQRSPDSSTGIGKKGHQPARKRLNFGQTGDSESVPDPQPIGEPPAGPSGLGSGTMAAGGGAPMADNNEGADGVGSSSGNWHCDSTWLGDRVITTSTRTWALPTYNNHLYKQISNGTSGGSTNDNTYFGYSTPWGYFDFNRFHCHFSPRDWQRLINNNWGFRPKRLNFKLFNIQVKEVTQNEGTKTIANNLTSTIQVFTDSEYQLPYVPGSAHQGCLPPFPADVFMIPQYGYLTLNNGSQAVGRSSFYCLEYFPSQMLRTGNNFEFSYTFEDVPFHSSYAHSQSLDRLMNPLIDQYLYYLSRTQSTGGTQGTQQLLFSQAGPANMSAQAKNWLPGPCYRQQRVSTTLSQNNNSNFAWTGATKYHLNGRDSLVNPGVAMATHKDDEERFFPSSGVLMFGKQGAGKDNVDYSSVMLTSEEEIKTTNPVATEQYGVVADNLQQTNGAPIVGTVNSQGALPGMVWQNRDVYLQGPIWAKIPHTDGNFHPSPLMGGFGLKHPPPQILVKNTPVPADPPTTFSQAKLASFITQYSTGQVSVEIEWELQKENSKRWNPEIQYTSNYYKSTNVDFAVNTEGTYSEPRPIGTRYLTRNL

SEQ ID NO: 4778 - DNA, 3123 bp, Adeno-associated virus
gaattcgcccttggctgcgtcaactggaccaatgagaactttcccttcaacgattgcgtcgacaagatggtgatctggtgggaggagggcaagatgacggccaaggtcgtggagtccgccaaggccattctcggcggcagcaaggtgcgcgtggaccaaaagtgcaagtcgtccgcccagatcgaccccacccccgtgatcgtcacctccaacaccaacatgtgcgccgtgattgacgggaacagcaccaccttcgagcaccagcagccgttgcaggaccggatgttcaagttcgaactcacccgccgtctggagcacgactttggcaaggtgaccaagcaggaagtcaaagagttcttccgctgggcgcaggatcacgtgaccgaggtggcgcatgagttctacgtcagaaagggcggagccagcaaaagacccgcccccgatgacgcggatataagcgagcccaagcgggcctgcccctcagtcgcggatccatcgacgtcagacgcggaaggagctccggtggactttgccgacaggtaccaaaacaaatgttctcgtcacgcgggcatgctccagatgctgtttccctgcaaaacgtgcgagagaatgaatcagaatttcaacatttgcttcacgcacggggtcagagactgctcagaatgtttccccggtgcatcagaatctcaaccggtcgtcagaaaaaaaacgtatcagaaactgtgtgccattcatcatctgctggggcgggcacccgagattgcttgctcggcctgcgatctggtcaacgtggacctggacgactgtgtttctgagcaataaatgacttaaaccaggtatggctgccgatggttatcttccagattggcttgaggacaacctctctgagggcattcgcgagtggtgggacctgaaacctggagccccgaaacccaaagccaaccagcaaaagcaggacgacggccggggtctggtgcttcctggctacaagtacctcggacccttcaacggactcgacaagggggagcccgtcaacgcggcggacgcagcggccctcgagcacgacaaggcctacgaccagcagctcaaagcgggtgacaatccgtacctgcggtataaccacgccgacgccgagtttcaggagcgtctgcaagaagatacgtcttttgggggcaacctcgggcgagcagtcttccaggccaagaagcgggttctcgaacctctcggtctggttgaggaaggcgctaagacggctcctggaaagaagagaccggtagagccatcacctcagcgttcccccgactcctccacgggcatcggcaagaaaggccaccagcccgcgagaaagagactgaactttgggcagactggcgactcggagtcagtccccgaccctcaaccaatcggagaaccaccagcaggcccctctggtctgggatctggtacaatggctgcaggcggtggcgctccaatggcagacaataacgaaggcgccgacggagtgggtagttcctcaggaaattggcattgcgattccacatggctgggcgacagagtcatcaccaccagcacccgaacctgggccctgcccacctacaacaaccatctctacaagcaaatctccaacgggacatcgggaggaagcactaacgacaacacctactttggctacagcaccccctgggggtattttgacttcaacagattccactgccacttctcaccacgtgactggcagcgactcatcaacaataactggggattccggcccaagagactcaacttcaagctcttcaacatccaggtcaaggaggtcacgcagaatgaaggcaccaagaccatcgccaataaccttaccagcacgattcaggtgtttacggactcggaataccagctcccgtacgtcctcggctctgcgcaccagggctgcctccctccgttcccggcggacgtcttcatgattcctcagtacgggtatctgaccctaaacaatggcagtcaggctgtgggccgttcctccttctactgcctggaatacttcccttctcaaatgctgaggacgggcaacaactttgaattcagctacaccttcgaggacgtgcctttccacagcagctacgcgcacagccagagcctggaccggctgatgaaccctctcatcgaccagtacctgtattacttatccagaactcagtccacaggaggaactcaaggtactcagcaattgttattttctcaagccgggcccgcaaacatgtcggctcaggccaagaactggctacctggaccgtgttaccgtcagcaacgagtttccacgacactgtcgcaaaacaacaacagcaattttgcttggaccggtgccaccaagtatcacctgaatggcagagactccctggttaatcccggcgttgccatggctacccacaaggacgacgaggagcgcttcttcccgtcaagcggagttctaatgtttggcaagcagggggctggaaaagacaatgtggactacagcagcgtgatgctcaccagcgaagaagaaattaaaactactaacccagtggctacagagcagtatggtgtggtggcagacaacctgcagcagaccaacggagctcccattgtgggaactgtcaacagccagggggccttacctggtatggtctggcaaaaccgggacgtgtacctgcagggccccatctgggccaaaattcctcacacggacggcaactttcatccttcgccgctgatgggaggctttggactgaaacacccgcctcctcagatcctggtgaaaaacactcctgttcctgcggatcctccgaccaccttcagccaggccaagctggcttcttttatcacgcagtacagcaccggacaggtcagcgtggaaatcgaatgggagctgcagaaagaaaacagcaagcgctggaacccagagattcagtatacttccaactactacaaatctacaaatgtggactttgctgtcaatactgagggtacttattcagagcctcgccccattggcactcgttatctcacccgtaatctgtaattgcttgttaatcaataaaccggttaattcgtttcagttgaactttggtctctgcgaagggcgaattc

SEQ ID NO: 4779 - protein, 738 aa, Adeno-associated virus
MAADGYLPDWLEDNLSEGIREWWDLKPGAPKPKANQQKQDDGRGLVLPGYKYLGPFNGLDKGEPVNAADAAALEHDKAYDQQLKAGDNPYLRYNHADAEFQERLQEDTSFGGNLGRAVFQAKKRVLEPLGLVEEGAKTAPGKKRPVEPSPQRSPDSSTGIGKKGHQPARKRLNFGQTGDSESVPDPQPIGEPPAGPSGLGSGTMAAGGGAPMADNNEGADGVGSSSGNWHCDSTWLGDRVITTSTRTWALPTYNNHLYKQISNGTSGGSTNDNTYFGYSTPWGYFDFNRFHCHFSPRDWQRLINNNWGFRPKRLNFKLFNIQVKEVTQNEGTKTIANNLTSTIQVFTDSEYQLPYVLGSAHQGCLPPFPADVFMIPQYGYLTLNNGSQAVGRSSFYCLEYFPSQMLRTGNNFEFSYTFEDVPFHSSYAHSQSLDRLMNPLIDQYLYYLSRTQSTGGTQGTQQLLFSQAGPANMSAQAKNWLPGPCYRQQRVSTTLSQNNNSNFAWTGATKYHLNGRDSLVNPGVAMATHKDDEERFFPSSGVLMFGKQGAGKDNVDYSSVMLTSEEEIKTTNPVATEQYGVVADNLQQTNGAPIVGTVNSQGALPGMVWQNRDVYLQGPIWAKIPHTDGNFHPSPLMGGFGLKHPPPQILVKNTPVPADPPTTFSQAKLASFITQYSTGQVSVEIEWELQKENSKRWNPEIQYTSNYYKSTNVDFAVNTEGTYSEPRPIGTRYLTRNL

SEQ ID NO: 4780 - DNA, 3122 bp, Adeno-associated virus
gaattcgccctttctacggctgcgtcaactggaccaatgagaactttcccttcaacgattgcgtcgacaagatggtgatctggtgggaggagggcaagatgacggccaaggtcgtggagtccgccaaggccattctcggcggcagcaaggtgcgtgtggaccaaaagtgcaagtcttccgcccagatcgatcccacccccgtgatcgtcacctccaacaccaacatgtgcgccgtgattgacgggaacagcgccaccttcgagcaccagcagccgttgcaggaccggatgttcaaatttgaactcacccgccgtctggagcatgactttggcaaggtgacgaagcaggaagtcaaagagttcttccgctgggcgcaggatcacgtgaccgaggtggcgcatgagttccacgtcagaaagggtggagccaacaagagacccgcccccgatgacgcggatataagcgagcccaagcgggcctgcccctcagtcgcggatccatcgacgtcagacgcggaaggagctccggtggactttgccgacaggtaccaaaacaaatgttctcgtcacgcgggcatgcttcagatgctgtttccctgcaagacatgcgagagaatgaatcagaatttcaacatttgcttcacgcacgggaccagagactgttcagaatgtttccccggcgtgtcagaatctcaaccggtcgtcagaaagaggacgtatcggaaactctgtgcgattcatcatctgctggggcgggctcccgagattgcttgctcggcctgcgatctggtcaacgtggacctggatgactgtgtttctgagcaataaatgacttaaaccaggtatggctgccgatggttatcttccagattggctcgaggacaacctctctgagggcattcgcgagtggtgggacttgaaacctggagccccgaaacccaaagccaaccagcaaaagcaggacgacggccggggtctggtgcttcctggctacaagtacctcggacccttcaacggactcgacaagggggagcccgtcaacgcggcggacgcagcggccctcgagcacgacaaagcctacgaccagcagctcaaagcgggtgacaatccgtacctgcggtataatcacgccgacgccgagtttcaggagcgtctgcaagaagatacgtcttttgggggcaacctcgggcgagcagtcttccaggccaagaagcgggttctcgaacctctcggtctggttgaggaaggcgctaagacggctcctggaaagaagagactggtagagcagtcgccacaagagccagactcctcctcgggcatcggcaagacaggccagcagcccgctaaaaagagactcaattttggtcagactggcgactcagagtcagtccccgacccacaacctctcggagaacctccagcagccccctcaggtctgggacctaatacaatggcttcaggcggtggcgctccaatggcagacaataacgaaggcgccgacggagtgggtaattcctcgggaaattggcattgcgattccacatggctgggggacagagtcatcaccaccagcacccgaacctgggccctgcccacctacaacaaccacctctacaagcaaatctccaacggcacctcgggaggaagcaccaacgacaacacctattttggctacagcaccccctgggggtattttgacttcaacagattccactgtcacttttcaccacgtgactggcaacgactcatcaacaacaattggggattccggcccaaaagactcaacttcaagctgttcaacatccaggtcaaggaagtcacgacgaacgaaggcaccaagaccatcgccaataatctcaccagcaccgtgcaggtctttacggactcggagtaccagttaccgtacgtgctaggatccgctcaccagggatgtctgcctccgttcccggcggacgtcttcacggttcctcagtacggctatttaactttaaacaatggaagccaagccctgggacgttcctccttctactgtctggagtatttcccatcgcagatgctgagaaccggcaacaactttcagttcagctacaccttcgaggacgtgcctttccacagcagctacgcgcacagccagagcctggacaggctgatgaatcccctcatcgaccagtacctgtactacctggtcagaacgcaaacgactggaactggagggacgcagactctggcattcagccaagcgggtcctagctcaatggccaaccaggctagaaattgggtgcccggaccttgctaccggcagcagcgcgtctccacgacaaccaaccagaacaacaacagcaactttgcctggacgggagctgccaagtttaagctgaacggccgagactctctaatgaatccgggcgtggcaatggcttcccacaaggatgacgacgaccgcttcttcccttcgagcggggtcctgatttttggcaagcaaggagccgggaacgatggagtggattacagccaagtgctgattacagatgaggaagaaatcaaggctaccaaccccgtggccacagaagaatatggagcagtggccatcaacaaccaggccgccaatacgcaggcgcagaccggactcgtgcacaaccagggggtgattcccggcatggtgtggcagaatagagacgtgtacctgcagggtcccatctgggccaaaattcctcacacggacggcaactttcacccgtctcccctgatgggcggctttggactgaagcacccgcctcctcaaattctcatcaagaacacaccggttccagcggacccgccgcttaccttcaaccaggccaagctgaactctttcatcacgcagtacagcaccggacaggtcagcgtggaaatcgagtgggagctgcagaaagaaaacagcaaacgctggaatccagagattcaatacacttccaactactacaaatctacaaatgtggactttgctgtcaacacggaaggagtttatagcgagcctcgccccattggcacccgttacctcacccgcaacctgtaattacatgttaatcaataaaccggttaattcgtttcagttgaactttggtctctgcgaagggcgaattc

SEQ ID NO: 4781 - protein, 736 aa, Adeno-associated virus
MAADGYLPDWLEDNLSEGIREWWDLKPGAPKPKANQQKQDDGRGLVLPGYKYLGPFNGLDKGEPVNAADAAALEHDKAYDQQLKAGDNPYLRYNHADAEFQERLQEDTSFGGNLGRAVFQAKKRVLEPLGLVEEGAKTAPGKKRLVEQSPQEPDSSSGIGKTGQQPAKKRLNFGQTGDSESVPDPQPLGEPPAAPSGLGPNTMASGGGAPMADNNEGADGVGNSSGNWHCDSTWLGDRVITTSTRTWALPTYNNHLYKQISNGTSGGSTNDNTYFGYSTPWGYFDFNRFHCHFSPRDWQRLINNNWGFRPKRLNFKLFNIQVKEVTTNEGTKTIANNLTSTVQVFTDSEYQLPYVLGSAHQGCLPPFPADVFTVPQYGYLTLNNGSQALGRSSFYCLEYFPSQMLRTGNNFQFSYTFEDVPFHSSYAHSQSLDRLMNPLIDQYLYYLVRTQTTGTGGTQTLAFSQAGPSSMANQARNWVPGPCYRQQRVSTTTNQNNNSNFAWTGAAKFKLNGRDSLMNPGVAMASHKDDDDRFFPSSGVLIFGKQGAGNDGVDYSQVLITDEEEIKATNPVATEEYGAVAINNQAANTQAQTGLVHNQGVIPGMVWQNRDVYLQGPIWAKIPHTDGNFHPSPLMGGFGLKHPPPQILIKNTPVPADPPLTFNQAKLNSFITQYSTGQVSVEIEWELQKENSKRWNPEIQYTSNYYKSTNVDFAVNTEGVYSEPRPIGTRYLTRNL

SEQ ID NO: 4782 - DNA, 3117 bp, Adeno-associated virus
gaattcgcccttggctgcgtcaactggaccaatgagaactttcccttcaacgattgcgtcgacaagatggtgatctggtgggaggagggcaagatgacggccaaggtcgtggagtccgccaaggccattctcggcggcagcaaggtgcgtgtggaccaaaagtgcaagtcttccgcccagatcgatcccacccccgtgatcgtcacctccaacaccaacatgtgcgccgtgattgacgggaacagcaccaccttcgagcaccagcagccgttgcaggaccggatgttcaaatttgaactcacccgccgtctggagcatgactttggcaaggtgacgaagcaggaagtcaaagagttcttccgctgggcgcaggatcacgtgaccgaggtggcgcatgagttccacgtcagaaagggtggagccaacaagagacccgcccccgatgacgcggatataagcgagcccaagcgggcctgcccctcagtcgcggatccatcgacgtcagacgcggaaggagctccggtggactttgccgacaggtaccaaaacaaatgttctcgtcacgcgggcatgcttcagatgctgtttccctgcaagacatgcgagagaatgaatcagaatttcaacatttgcttcacgcacgggaccagagactgttcagaatgtttccccggcgtgtcagaatctcaaccggtcgtcagaaagaggacgtatcggaaactctgtgcgattcatcatctgctggggcgggctcccgagattgcttgctcggcctgcgatctggtcaacgtggacctggatgactgtgtttctgagcaataaatgacttaaaccaggtatggctgccgatggttatcttccagattggctcgaggacaacctctctgagggcattcgcgagtggtgggacttgaaacctggagccccgaaacccaaagccaaccagcaaaagcaggacgacggccggggtctggtgcttcctggctacaagtacctcggacccttcaacggactcgacaagggggagcccgtcaacgcggcggacgcagcggccctcgagcacgacaaagcctacgaccagcagctcaaagcgggtgacaatccgtacctgcggtataatcacgccgacgccgagtttcaggagcgtctgcaagaagatacgtcttttgggggcaacctcgggcgagcagtcttccaggccaagaagcgggttctcgaacctctcggtctggttgaggaaggcgctaagacggctcctggaaagaagagaccggtagagcagtcgccacaagagccagactcctcctcgggcatcggcaagacaggccagcagcccgctaaaaagagactcaattttggtcagactggcgactcagagtcagtccccgacccacaacctctcggagaacctccagcagccccctcaggtctgggacctaatacaatggcttcaggcggtggcgctccaatggcagacaataacgaaggcgccgacggagtgggtaattcctcgggaaattggcattgcgattccacatggctgggggacagagtcatcaccaccagcacccgaacctgggccctgcccacctacaacaaccacctctacaagcaaatctccaacggcacctcgggaggaagcaccaacgacaacacctattttggctacagcaccccctgggggtattttgacttcaacagattccactgtcacttttcaccacgtgactggcaacgactcatcaacaacaattggggattccggcccaaaagactcaacttcaagctgttcaacatccaggtcaaggaagtcacgacgaacgaaggcaccaagaccatcgccaataatctcaccagcaccgtgcgggtctttacggactcggagtaccagttaccgtacgtgctaggatccgctcaccagggatgtctgcctccgttcccggcggacgtcttcatggttcctcagtacggctatttaactttaaacaatggaagccaagccctgggacgttcctccttctactgtctggagtatttcccatcgcagatgctgagaaccggcaacaactttcagttcagctacaccttcgaggacgtgcctttccacagcagctacgcgcacagccagagcctggacaggctgatgaatcccctcatcgaccagtacctgtactacctggtcagaacgcaaacgactggaactggagggacgcagactctggcattcagccaagcgggtcctagctcaatggccaaccaggctagaaattgggtgcccggaccttgctaccggcagcagcgcgtctccacgacaaccaaccagagcaacaacagcaactttgcctggacgggagctgccaagtttaagctgaacggccgagactctctaatgaatccgggcgtggcaatggcttcccacaaggatgacgacgaccgcttcttcccttcgagcggggtcctgatttttggcaagcaaggagccgggaacgatggagtggattacagccaagtgctgattacagatgaggaagaaatcaaggctaccaaccccgtggccacagaagaatatggagcagtggccatcaacaaccaggccgccaatacgcaggcgcagaccggactcgtgcacaaccagggggtgattcccggcatggtgtggcagaatagagacgtgtacctgcagggtcccatctgggccaaaattcctcacacggacggcaactttcacccgtctcccctgatgggcggctttggactgaagcacccgcctcctcaaattctcatcaagaacacaccggttccagcggacccgccgcttaccttcaaccaggccaagctgaactctttcatcacgcagtacagcaccggacaggtcagcgtggaaatcgagtgggagctgcagaaagaaaacagcaaacgctggaatccagagattcaatacacttccaactactacaaatctacaaatgtggactttgctgtcaacacggaaggagtttatagcgagcctcgccccattggcacccgttacctcacccgcaacctgtaattacatgttaatcaataaaccggttaattcgtttcagttgaactttggtctctgcgaagggcgaattc

SEQ ID NO: 4783 - protein, 736 aa, Adeno-associated virus
MAADGYLPDWLEDNLSEGIREWWDLKPGAPKPKANQQKQDDGRGLVLPGYKYLGPFNGLDKGEPVNAADAAALEHDKAYDQQLKAGDNPYLRYNHADAEFQERLQEDTSFGGNLGRAVFQAKKRVLEPLGLVEEGAKTAPGKKRPVEQSPQEPDSSSGIGKTGQQPAKKRLNFGQTGDSESVPDPQPLGEPPAAPSGLGPNTMASGGGAPMADNNEGADGVGNSSGNWHCDSTWLGDRVITTSTRTWALPTYNNHLYKQISNGTSGGSTNDNTYFGYSTPWGYFDFNRFHCHFSPRDWQRLINNNWGFRPKRLNFKLFNIQVKEVTTNEGTKTIANNLTSTVRVFTDSEYQLPYVLGSAHQGCLPPFPADVFMVPQYGYLTLNNGSQALGRSSFYCLEYFPSQMLRTGNNFQFSYTFEDVPFHSSYAHSQSLDRLMNPLIDQYLYYLVRTQTTGTGGTQTLAFSQAGPSSMANQARNWVPGPCYRQQRVSTTTNQSNNSNFAWTGAAKFKLNGRDSLMNPGVAMASHKDDDDRFFPSSGVLIFGKQGAGNDGVDYSQVLITDEEEIKATNPVATEEYGAVAINNQAANTQAQTGLVHNQGVIPGMVWQNRDVYLQGPIWAKIPHTDGNFHPSPLMGGFGLKHPPPQILIKNTPVPADPPLTFNQAKLNSFITQYSTGQVSVEIEWELQKENSKRWNPEIQYTSNYYKSTNVDFAVNTEGVYSEPRPIGTRYLTRNL

SEQ ID NO: 4784 - DNA, 3121 bp, Adeno-associated virus
gaattcgcccttctacggctgcgtcaactggaccaatgagaactttcccttcaacgattgcgtcgacaagatggtgatctggtgggaggagggcaagatgacggccaaggtcgtggagtccgccaaggccattctcggcggcagcaaggtgcgtgtggaccaaaagtgcaagtcttccgcccagatcgatcccacccccgtgatcgtcacctccaacaccaacatgtgcgccgtgattgacgggaacagcaccaccttcgagcaccagcagccgttgcaggaccggatgttcaaatttgaactcacccgccgtctggagcatgactttggcaaggtgacgaagcaggaagtcaaagagttcttccgctgggcgcaggatcacgtgaccgaggtggcgcatgagttccacgtcagaaagggtggcgccaacaagagacccgcccccgatgacgcggatataagcgagcccaagcgggcctgcccctcagtcgcggatccatcgacgtcagacgcggaaggagctccggtggactttgccgacaggtaccaaaacaaatgttctcgtcacgcgggcatgcttcagatgctgtttccctgcaagacatgcgagagaatgaatcagaatttcaacatttgcttcacgcacgggaccagagactgttcagaatgtttccccggcgtgtcagaatctcaaccggtcgtcagaaagaggacgtatcggaaactctgtgcgattcatcatctgctggggcgggctcccgagattgcttgctcggcctgcgatctggtcaacgtggacctggatgactgtgtttctgagcaataaatgacttaaaccaggtatggctgccgatggttatcttccagattggctcgaggacaacctctctgagggcattcgcgagtggtgggacttgaaacctggagccccgaaacccaaagccaaccagcaaaagcaggacgacggccggggtctggtgcttcctggctacaagtacctcggacccttcaacggactcgacaagggggagcccgtcaacgcggcggacgcagcggccctcgagcacgacaaagcctacgaccagcagctcaaagcgggtgacaatccgtacctgcggtataatcacgccgacgccgagtttcaggagcgtctgcaagaagatacgtcctttgggggcaacctcgggcgagcagtcttccaggccaagaagcgggttctcgaacctctcggtctggttgaggaaggcgctaagacggctcctggaaagaagagaccggtagagcagtcgccacaagagccagactcctcctcgggcatcggcaagacaggccagcagcccgctaaaaagagactcaattttggtcagactggcgactcagagtcagtccccgacccacaacctctcggagaacctccagcagccccctcaggtctgggacctaatacaatggcttcaggcggtggcgctccaatggcagacaataacgaaggcgccgacggagtgggtaattcctcgggaaattggcattgcgattccacatggctgggggacagagtcatcaccaccagcacccgaacctgggccctgcccacctacaacaaccacctctacaagcaaatctccaacggcacctcgggaggaagcaccaacgacaacacctattttggctacagcaccccctgggggtattttgacttcaacagattccactgtcacttttcaccacgtgactggcaacgactcatcaacaacaattggggattccggcccaaaagactcaacttcaagctgttcaacatccaggtcaaggaagtcacgacgaacgaaggcaccaagaccatcgccaataatctcaccagcaccgtgcaggtctttacggacttggagtaccagttaccgtacgtgctaggatccgctcaccagggatgtctgcctccgttcccggcggacgtcttcatggttcctcagtacggctatttaactttaaacaatggaagccaagccctgggacgttcctccttctactgtctggagtatttcccatcgcagatgccgagaaccggcaacaactttcagttcagctacaccttcgaggacgtgcctttccacagcagctacgcgcacagccagagcctggacaggctgatgaatcccctcatcgaccagtacctgtactacctggtcagaacgcaaacgactggaactggagggacgcagactctggcattcagccaagcgggtcctagctcaatggccaaccaggctagaaattgggtgcccggaccttgctaccggcagcagcgcgtctccacgacaaccaaccagaacaacaacagcaactttgcctggacgggagctgccaagtttaagctgaacggccgagactctctaatgaatccgggcgtggcaatggcttcccacaaggatgacgacgaccgcttcttcccttcgagcggggtcctgatttttggcaagcaaggagccgggaacgatggagtggattacagccaagtgctgattacagatgaggaagaaatcaaggctaccaaccccgtggccacagaagaatatggagcagtggccatcaacaaccaggccgccaatacgcaggcgcagaccggactcgtgcacaaccagggggtgattcccggcatggtgtggcagaatagagacgtgtacctgcagggtcccatctgggccaaaattcctcacacggacggcaactttcacccgtctcccctgatgggcggctttggactgaagcacccgcctcctcaaattctcatcaagaacacaccggttccagcggacccgccgcttaccttcaaccaggccaagctgaactctttcatcacgcagtacagcaccggacaggtcagcgtggaaatcgagtgggagctgcagaaagaaaacagcaaacgctggaatccagagattcaatacacttccaactactacaaatctacaaatgtggactttgctgtcaacacggaaggagtttatagcgagcctcgccccattggcacccgttacctcacccgcaacctgtaattacatgttaatcaataaaccggttaattcgtttcagttgaactttggtctctgcgaagggcgaattc

SEQ ID NO: 4785 - protein, 736 aa, Adeno-associated virus
MAADGYLPDWLEDNLSEGIREWWDLKPGAPKPKANQQKQDDGRGLVLPGYKYLGPFNGLDKGEPVNAADAAALEHDKAYDQQLKAGDNPYLRYNHADAEFQERLQEDTSFGGNLGRAVFQAKKRVLEPLGLVEEGAKTAPGKKRPVEQSPQEPDSSSGIGKTGQQPAKKRLNFGQTGDSESVPDPQPLGEPPAAPSGLGPNTMASGGGAPMADNNEGADGVGNSSGNWHCDSTWLGDRVITTSTRTWALPTYNNHLYKQISNGTSGGSTNDNTYFGYSTPWGYFDFNRFHCHFSPRDWQRLINNNWGFRPKRLNFKLFNIQVKEVTTNEGTKTIANNLTSTVQVFTDLEYQLPYVLGSAHQGCLPPFPADVFMVPQYGYLTLNNGSQALGRSSFYCLEYFPSQMPRTGNNFQFSYTFEDVPFHSSYAHSQSLDRLMNPLIDQYLYYLVRTQTTGTGGTQTLAFSQAGPSSMANQARNWVPGPCYRQQRVSTTTNQNNNSNFAWTGAAKFKLNGRDSLMNPGVAMASHKDDDDRFFPSSGVLIFGKQGAGNDGVDYSQVLITDEEEIKATNPVATEEYGAVAINNQAANTQAQTGLVHNQGVIPGMVWQNRDVYLQGPIWAKIPHTDGNFHPSPLMGGFGLKHPPPQILIKNTPVPADPPLTFNQAKLNSFITQYSTGQVSVEIEWELQKENSKRWNPEIQYTSNYYKSTNVDFAVNTEGVYSEPRPIGTRYLTRNL

SEQ ID NO: 4786 - DNA, 3122 bp, Adeno-associated virus
gaattcgccctttctacggctgcgtcaactggaccaatgagaactttcccttcaacgattgcgtcgacaagatggtgatctggtgggaggagggcaagatgacggccaaggtcgtggagtccgccaaggccattctcggcggcagcaaggtgcgtgtggaccaaaagtgcaagtcttccgcccagatcgatcccacccccgtgatcgtcacctccaacaccaacatgtgcgccgtgattgacgggaacagcaccaccttcgagcaccagcagccgttgcaggaccggatgttcaaatttgaactcacccgccgtctggagcatgactttggcaaggtgacgaagcaggaagtcaaagggttcttccgctgggcgcaggatcacgtgaccgaggtggcgcatgagttccacgtgcgagcccaagcgggcctgcccctcagtcgcggatccatcgacgtcagaccagaaagggtggagccaacaagagacccgcccccgatgacgcggatataagcggaaggagctccggtggactttgccgacaggtaccaaaacaaatgttctcgtcacgcgggcatgcttcagatgctgtttccctgcaagacatgcgagagaatgaatcagaatttcaacatttgcttcacgcacgggaccagagactgttcagaatgtttccccggcgtgtcagaatctcaaccggtcgtcagaaagaggacgtatcggaaactctgtgcgattcatcatctgctggggcgggctcccgagattgcttgctcggcctgcgatctggtcaacgtggacctggatgactgtgtttctgagcaataaatgacttaaaccaggtatggctgccgatggttatcttccagattggctcgaggacaacctctctgagggcattcgcgagtggtgggacttgaaacctggagccccgaaacccaaagccaaccagcaaaagcaggacgacggccggggtctggtgcttcctggctacaagtacctcggacccttcaacggactcgacaagggggagcccgtcaacgcggcggacgcagcggccctcgagcacgacaaagcctacgaccagcagctcaaagcgggtgacaatccgtacctgcggtataatcacgccgacgccgagtttcaggagcgtctgcaagaagatacgtcttttgggggcaacctcgggcgagcagtcttccaggccaagaagcgggttctcgaacctctcggtctggttgaggaaggcgctaagacggctcctggaaagaagagaccggtagagcagtcgccacaagagccagactcctcctcgggcatcggcaagacaggccagcagcccgctaaaaagagactcaattttggtcagactggcgactcagagtcagtccccgacccacaacctctcggagaacctccagcagccccctcaggtctgggacctaatacaatggcttcaggcggtggcgctccaatggcagacaataacgaaggcgccgacggagtgggtaattcctcgggaaattggcattgcgattccacatggctgggggacagagtcatcaccaccagcacccgaacctgggccctgcccacctacaacaaccacctctacaagcaaatctccaacggcacctcgggaggaagcaccaacgacaacacctattttggctacagcaccccctgggggtattttgacttcaacagattccactgtcacttttcaccacgtgactggcaacgactcatcaacaacaattggggattccggcccaaaagactcaacttcaagctgttcaacatccaggtcaaggaagtcacgacgaacgaaggcaccaagaccatcgccaataatctcaccagcaccgtgcaggtctttacggactcggagtaccagttaccgtacgtgctaggatccgctcaccagggatgtctgcctccgttcccggcggacgtcttcatggttcctcagtacggctatttaactttaaacaatggaagccaagccctgggacgttcctccttctactgtctggagtatttcccatcgcagatgctgagaaccggcaacaactttcagttcagctacaccttcgaggacgtgcctttccacagcagctacgcgcacagccagagcctggacaggctgatgaatcccctcatcgaccagtacctgtactacctggtcagaacgcaaacgactggaactggagggacgcagactctggcattcagccaagcgggtcctagctcaatggccaaccaggctagaaattgggtgcccggaccttgctaccggcagcagcgcgtctccacgacaaccaaccagaacaacaacagcaactttgcctggacgggagctgccaagtttaagctgaacggccgagactctctaatgaatccgggcgtggcaatggcttcccacaaggatgacgacgaccgcttcttcccttcgagcggggtcctgatttttggcaagcaaggagccgggaacgatggagtggattacagccaagtgctgattacagatgaggaagaaatcaaggctaccaaccccgtggccacagaagaatatggagcagtggccatcaacaaccaggccgccaatacgcaggcgcagaccggactcgtgcacaaccagggggtgattcccggcatggtgtggcagaatagagacgtgtacctgcagggtcccatctgggccaaaattcctcacacggacggcaactttcacccgtctcccctgatgggcggctttggactgaagcacccgcctcctcaaattctcatcaagaacacaccggttccagcggacccgccgcttaccttcaaccaggccaagctgaactctttcatcacgcagtacagcaccggacaggtcagcgtggaaatcgagtgggagctgcagaaagaaaacagcaaacgctggaatccagagattcaatacacttccaactactacaaatctacaaatgtggactttgctgtcaacacggagggggtttatagcgagcctcgccccattggcacccgttacctcacccgcaacctgtaattacatgttaatcaataaaccggttaattcgtttcagttgaactttggtctctgcgaagggcgaattc

SEQ ID NO: 4787 - protein, 736 aa, Adeno-associated virus
MAADGYLPDWLEDNLSEGIREWWDLKPGAPKPKANQQKQDDGRGLVLPGYKYLGPFNGLDKGEPVNAADAAALEHDKAYDQQLKAGDNPYLRYNHADAEFQERLQEDTSFGGNLGRAVFQAKKRVLEPLGLVEEGAKTAPGKKRPVEQSPQEPDSSSGIGKTGQQPAKKRLNFGQTGDSESVPDPQPLGEPPAAPSGLGPNTMASGGGAPMADNNEGADGVGNSSGNWHCDSTWLGDRVITTSTRTWALPTYNNHLYKQISNGTSGGSTNDNTYFGYSTPWGYFDFNRFHCHFSPRDWQRLINNNWGFRPKRLNFKLFNIQVKEVTTNEGTKTIANNLTSTVQVFTDSEYQLPYVLGSAHQGCLPPFPADVFMVPQYGYLTLNNGSQALGRSSFYCLEYFPSQMLRTGNNFQFSYTFEDVPFHSSYAHSQSLDRLMNPLIDQYLYYLVRTQTTGTGGTQTLAFSQAGPSSMANQARNWVPGPCYRQQRVSTTTNQNNNSNFAWTGAAKFKLNGRDSLMNPGVAMASHKDDDDRFFPSSGVLIFGKQGAGNDGVDYSQVLITDEEEIKATNPVATEEYGAVAINNQAANTQAQTGLVHNQGVIPGMVWQNRDVYLQGPIWAKIPHTDGNFHPSPLMGGFGLKHPPPQILIKNTPVPADPPLTFNQAKLNSFITQYSTGQVSVEIEWELQKENSKRWNPEIQYTSNYYKSTNVDFAVNTEGVYSEPRPIGTRYLTRNL

SEQ ID NO: 4788 - DNA, 2370 bp, Adeno-associated virus
gaattcgccctttctacggctgcgtcaactggaccaatgagaactttcccttcaacgattgcgtcgacaagatggtgatctggtgggaggagggcaagatgacggccaaggtcgtggagtccgccaaggccattctcggcggcagcaaggtgcgcgtggaccaaaagtgcaagtcgtccgcccagatcgaccccacccccgtgatcgtcacctccaacaccaacatgtgcgccgtgattgacgggaacagcaccaccttcgagcaccagcagccgttgcaggaccggatgttcaagttcgaactcacccgccgtctggagcacgactttggcaaggtgaccaagcaggaagtcaaagagttcttccgctgggcgcaggatcacgtgaccgaggtggcgcatgagttctacgtcagaaagggcggagccagcaaaagacccgcccccgatgacgcggatataagcgagcccaagcgggcctgcccctcagtcgcggatccatcgacgtcagacgcggaaggagctccggtggactttgccgacaggtaccaaaacaaatgttctcgtcacgcgggcatgcttcagacgctgtttccctgcaaaacgtgcgagagaatgaatcagaatttcaacatttgcttcacgcacggggtcagagactgctcagaatgtttccccggtgcatcagaatctcaaccggtcgtcagaaaaaaaacgtatcagaaactgtgtgccattcatcatctgctggggcgggcacccgagattgcttgctcggcctgcgatctggtcaacgtggacctggacgactgtgtttctgagcaataaatgacttaaaccaggtatggctgccgatggttatcttccagattggcttgaggacaacctctctgagggcattcgcgagtggtgggacctgaaacctggagccccgaaacccaaagccaaccagcaaaagcaggacgacggccggggtctggtgcttcctggctacaagtacctcggacccttcaacggactcgacaagggggagcccgtcaacgcggcggacgcagcggccctcgagcacgacaaggcctacgaccagcagctcaaagcgggtgacaatccgtacctgcggtataaccacgccgacgccgagtttcaggagcgtctgcaagaagatacgtcttttgggggcaacctcgggcgagcagtcttccaggccaagaagcgggttctcgaacctctcggtctggttgaggaaggcgctaagacggctcctggaaagaagagaccggtagagccatcacctcagcgttcccccgactcctccacgggcatcggcaagaaaggccaccagcccgcgagaaagagactgaactttgggcagactggcgactcggagtcagtccccgaccctcaaccaatcggagaaccaccagcaggcccctctggtctgggatctggtacaatggctgcaggcggtggcgctccaatggcagacaataacgaaggcgccgacggagtgggtagttcctcaggaaattggcattgcgattccacatggctgggcgacagagtcatcaccaccagcacccgaacctgggccctgcccacctacaacaaccatctctacaagcaaatctccaacgggacatcgggaggaagcactaacgacaacacctactttggctacagcaccccctgggggtattttgacttcaacagattccactgccacttctcaccacgtgactggcagcgactcatcaacaataactggggattccggcccaagagactcaacttcaagctcttcaacatccaggtcaaggaggtcacgcagaatgaaggcaccaagaccatcgccaataaccttaccagcacgattcaggtgtttacggactcggaataccagctcccgtacgtcctcggctctgcgcaccagggctgcctccctccgttcccggcggacgtcttcatgattcctcagtacgggtatctgaccctaaacaatggcagtcaggctgtgggccgttcctccttctactgcctggaatacttcccttctcaaatgctgaggacgggcaacaactttgaattcagctacaccttcgaggacgtgcctttccacagcagctacgcgcacagccagagcctggaccggctgatgaaccctctcatcgaccagtacctgtattacttatccagaactcagtccacaggaggaactcaaggtactcagcaattgttattttctcaagccgggcccgcaaacatgtyggctcaggccaagaactggctacctggaccgtgttaccgtcagcaacgagtttccacgacactgtcgcaaaacaacaacagcaattttgctggaccggtgccacca

SEQ ID NO: 4789 - protein, 738 aa, Adeno-associated virus; identical to SEQ ID NO: 4779

SEQ ID NO: 4790 - DNA, 2205 bp, Adeno-associated virus
atgactgacggttaccttccagattggctagaggacaacctctctgaaggcgttcgagagtggtgggcgctgcaacctggagcccctaaacccaaggcaaatcaacaacatcaggacaacgctcggggtcttgtgcttccgggttacaaatacctcggacccggcaacggactcgacaagggggaacccgtcaacgcagcggacgcggcagccctcgagcacgacaaggcctacgaccagcagctcaaggccggtgacaacccctacctcaagtacaaccacgccgacgcggagttccagcagcggcttcagggcgacacatcgtttgggggcaacctcggcagagcagtcttccaggccaaaaagagggttcttgaacctcttggtctggttgagcaagcgggtgagacggctcctggaaagaagagaccgttgattgaatccccccagcagcccgactcctccacgggtatcggcaaaaaaggcaagcagccggctaaaaagaagctcgttttcgaagacgaaactggagcaggcgacggaccccctgagggatcaacttccggagccatgtctgatgacagtgagatgcgtgcagcagctggcggagctgcagtcgagggcggacaaggtgccgatggagtgggtaatgcctcgggtgattggcattgcgattccacctggtctgagggccacgtcacgaccaccagcaccagaacctgggtcttgcccacctacaacaaccacctctacaagcgactcggagagagcctgcagtccaacacctacaacggattctccaccccctggggatactttgacttcaaccgcttccactgccacttctcaccacgtgactggcagcgactcatcaacaacaactggggcatgcgacccaaagccatgcgggtcaaaatcttcaacatccaggtcaaggaggtcacgacgtcgaacggcgagacaacggtggctaataaccttaccagcacggttcagatctttgcggactcgtcgtacgaactgccgtacgtgatggatgcgggtcaagagggcagcctgcctccttttcccaacgacgtctttatggtgccccagtacggctactgtggactggtgaccggcaacacttcgcagcaacagactgacagaaatgccttctactgcctggagtactttccttcgcagatgctgcggactggcaacaactttgaaattacgtacagttttgagaaggtgcctttccactcgatgtacgcgcacagccagagcctggaccggctgatgaaccctctcatcgaccagtacctgtggggactgcaatcgaccaccaccggaaccaccctgaatgccgggactgccaccaccaactttaccaagctgcggcctaccaacttttccaactttaaaaagaactggctgcccgggccttcaatcaagcagcagggcttctcaaagactgccaatcaaaactacaagatccctgccaccgggtcagacagtctcatcaaatacgagacgcacagcactctggacggaagatggagtgccctgacccccggacctccaatggccacggctggacctgcggacagcaagttcagcaacagccagctcatctttgcggggcctaaacagaacggcaacacggccaccgtacccgggactctgatcttcacctctgaggaggagctggcagccaccaacgccaccgatacggacatgtggggcaacctacctggcggtgaccagagcaacagcaacctgccgaccgtggacagactgacagccttgggagccgtgcctggaatggtctggcaaaacagagacatttactaccagggtcccatttgggccaagattcctcataccgatggacactttcacccctcaccgctgattggtgggtttgggctgaaacacccgcctcctcaaatttttatcaagaacaccccggtacctgcgaatcctgcaacgaccttcagctctactccggtaaactccttcattactcagtacagcactggccaggtgtcggtgcagattgactgggagatccagaaggagcggtccaaacgctggaaccccgaggtccagtttacctccaactacggacagcaaaactctctgttgtgggctcccgatgcggctgggaaatacactgagcctagggctatcggtacccgctacctcacccaccacctgtaa

SEQ ID NO: 4791 - protein, 734 aa, Adeno-associated virus
MTDGYLPDWLEDNLSEGVREWWALQPGAPKPKANQQHQDNARGLVLPGYKYLGPGNGLDKGEPVNAADAAALEHDKAYDQQLKAGDNPYLKYNHADAEFQQRLQGDTSFGGNLGRAVFQAKKRVLEPLGLVEQAGETAPGKKRPLIESPQQPDSSTGIGKKGKQPAKKKLVFEDETGAGDGPPEGSTSGAMSDDSEMRAAAGGAAVEGGQGADGVGNASGDWHCDSTWSEGHVTTTSTRTWVLPTYNNHLYKRLGESLQSNTYNGFSTPWGYFDFNRFHCHFSPRDWQRLINNNWGMRPKAMRVKIFNIQVKEVTTSNGETTVANNLTSTVQIFADSSYELPYVMDAGQEGSLPPFPNDVFMVPQYGYCGLVTGNTSQQQTDRNAFYCLEYFPSQMLRTGNNFEITYSFEKVPFHSMYAHSQSLDRLMNPLIDQYLWGLQSTTTGTTLNAGTATTNFTKLRPTNFSNFKKNWLPGPSIKQQGFSKTANQNYKIPATGSDSLIKYETHSTLDGRWSALTPGPPMATAGPADSKFSNSQLIFAGPKQNGNTATVPGTLIFTSEEELAATNATDTDMWGNLPGGDQSNSNLPTVDRLTALGAVPGMVWQNRDIYYQGPIWAKIPHTDGHFHPSPLIGGFGLKHPPPQIFIKNTPVPANPATTFSSTPVNSFITQYSTGQVSVQIDWEIQKERSKRWNPEVQFTSNYGQQNSLLWAPDAAGKYTEPRAIGTRYLTHHL

SEQ ID NO: 4792 - DNA, 3128 bp, Adeno-associated virus
gaattcgccctttctacggctgcgtcaactggaccaatgagaactttcccttcaacgattgcgtcgacaagatgttgatctggtgggaggagggcaagatgacggccaaggtcgtggagtccgccaaggccattctcggcggcagcaaagtgcgcgtggaccaaaagtgcaagccgtccgcccagatcgaccccacccccgtgatcgtcacctccaacaccaacatgtgcgccgtgattgacgggaacagcaccaccttcgagcaccagcagccgttgcgggaccggatgttcaagtttgaactcacccgccgtctggagcacgactttggcaaggtgacaaagcaggaagtcagagagttcttccgctgggcgcaggatcacgtgaccgaggtggcgcacgagttctacgtcagaaagggtggagccaacaagagacccgcccccgatgacgcggataaaagcgagcccaagcgggcctgcccctcagtcgcggatccatcgacgtcagacgcggaaggagctccggtggactttgccgacaggtaccaaaacaaatgttctcgtcacgcgggcatgcttcagatgctgtttccctgcaaaacatgcgagagaatgaatcagaatttcaacatttgcttcacgcacgggaccagagactgttcagaatgtttccccggcgtgtcagaatctcaaccggtcgtcagaaaaaagacgtatcggaaactctgtgcgattcatcatctgctggggcgggcacccgagattgcttgctcggcctgcgatctggtcaacgtggacctagatgactgtgtttctgagcaataaatgacttaaaccaggtatggctgccgatggttatcttccagattggctcgaggacaacctctctgagggcattcgcgagtggtgggacttgaaacctggagccccgaaacccaaagccaaccagcaaaagcaggacgacggccggggtctggtgcttcctggctacaagtacctcggacccttcaacggactcgacaagggggagcccgtcaacgcggcggacgcagcggccctcgagcacgacaaggcctacgaccagcagctcaaagcgggtgacaatccgtacctgcggtataaccacgccgacgccgagtttcaggagcgtctgcaagaagatacgtcttttgggggcaacctcgggcgagcagtcttccaggccaagaagcgggttctcgaacctctcggtctggttgaggaaggcgctaagacggctcctggaaagaagagaccggtagagccatcaccccagcgttctccagactcctctacgggcatcggcaagaaaggccagcagcccgcgaaaaagagactcaactttgggcagactggcgactcagagtcagtgcccgaccctcaaccaatcggagaaccccccgcaggcccctctggtctgggatctggtacaatggctgcaggcggtggcgctccaatggcagacaataacgaaggcgccgacggagtgggtagttcctcaggaaattggcattgcgattccacatggctgggcgacagagtcatcaccaccagcacccgaacctgggccctccccacctacaacaaccacctctacaagcaaatctccaacgggacttcgggaggaagcaccaacgacaacacctacttcggctacagcaccccctgggggtattttgactttaacagattccactgccacttctcaccacgtgactggcagcgactcatcaacaacaactggggattccggcccaagagactcaacttcaagctcttcaacatccaggtcaaggaggtcacgcagaatgaaggcaccaagaccatcgccaataaccttaccagcacgattcaggtctttacggactcggaataccagctcccgtacgtcctcggctctgcgcaccagggctgcctgcctccgttcccggcggacgtcttcatgattcctcagtacgggtacctgactctgaacaatggcagtcaggccgtgggccgttcctccttctactgcctggagtactttccttctcaaatgctgagaacgggcaacaactttgagttcagctaccagtttgaggacgtgccttttcacagcagctacgcgcacagccaaagcctggaccggctgatgaaccccctcatcgaccagtacctgtactacctgtctcggactcagtccacgggaggtaccgcaggaactcagcagttgctattttctcaggccgggcctaataacatgtcggctcaggccaaaaactggctacccgggccctgctaccggcagcaacgcgtctccacgacactgtcgcaaaataacaacagcaactgtaaatcccggtgtcgctatggcaacccacaaggacgacgaagagcgattttgcctggaccggtgccaccaagtatcatctgaatggcagagactctctgttttccgtccagcggagtcttaatgtttgggaaacagggagctggaaaagacaacgtggactatagcagcgttatgctaaccagtgaggaagaaattaaaaccaccaacccagtggccacggaacagtacggcgtggtggccgataacctgcaacagcaaaacgccgctcctattgtaggggccgtcaacagtcaaggagccttacctggcatggtctggcagaaccgggacgtgtacctgcagggtcctatctgggccaagattcctcacacggacggaaactttcatccctcgccgctgatgggaggctttggactgaaacacccgcctcctcagatcctgattaagaatacacctgttcccgcggatcctccaactaccttcagtcaagctaagctggcgtcgttcatcacgcagtacagcaccggacaggtcagcgtggaaattgaatgggagctgcagaaagaaaacagcaaacgctggaacccagagattcaatacacttccaactactacaaatctacaaatgtggacttcgctgttaacacagatggcacttattctgagcctcgccccattggcacccgttacctcacccgtaatctgtaattgctcgttaatcaataaaccggttgattcgtttcagttgaactttggtctctgcgaagggcgaattc

SEQ ID NO: 4793 - protein, 738 aa, Adeno-associated virus
MAADGYLPDWLEDNLSEGIREWWDLKPGAPKPKANQQKQDDGRGLVLPGYKYLGPFNGLDKGEPVNAADAAALEHDKAYDQQLKAGDNPYLRYNHADAEFQERLQEDTSFGGNLGRAVFQAKKRVLEPLGLVEEGAKTAPGKKRPVEPSPQRSPDSSTGIGKKGQQPAKKRLNFGQTGDSESVPDPQPIGEPPAGPSGLGSGTMAAGGGAPMADNNEGADGVGSSSGNWHCDSTWLGDRVITTSTRTWALPTYNNHLYKQISNGTSGGSTNDNTYFGYSTPWGYFDFNRFHCHFSPRDWQRLINNNWGFRPKRLNFKLFNIQVKEVTQNEGTKTIANNLTSTIQVFTDSEYQLPYVLGSAHQGCLPPFPADVFMIPQYGYLTLNNGSQAVGRSSFYCLEYFPSQMLRTGNNFEFSYQFEDVPFHSSYAHSQSLDRLMNPLIDQYLYYLSRTQSTGGTAGTQQLLFSQAGPNNMSAQAKNWLPGPCYRQQRVSTTLSQNNNSNFAWTGATKYHLNGRDSLVNPGVAMATHKDDEERFFPSSGVLMFGKQGAGKDNVDYSSVMLTSEEEIKTTNPVATEQYGVVADNLQQQNAAPIVGAVNSQGALPGMVWQNRDVYLQGPIWAKIPHTDGNFHPSPLMGGFGLKHPPPQILIKNTPVPADPPTTFSQAKLASFITQYSTGQVSVEIEWELQKENSKRWNPEIQYTSNYYKSTNVDFAVNTDGTYSEPRPIGTRYLTRNL

SEQ ID NO: 4794 - DNA, 3129 bp, Adeno-associated virus
gaattcgccctttctacggctgcgtcaactggaccaatgagaactttcccttcaacgattgcgtcgacaagatggtgatctggtgggaggagggcaagatgacggccaaggtcgtggagtccgccaaggccattctcggcggcagcaaagtgcgcgtggaccaaaagtgcaagtcgtccgcccagatcgaccccacccccgtgatcgtcacctccaacaccaacatgtgcgccgtgattgacgggaacagcaccaccttcgagcaccagcagccgttgcaggaccggatgttcaagtttgaactcacccgccgtctggagcacgactttggcaaggtgacaaagcaggaagtcagagagttcttccgctgggcgcaggatcacgtgaccgaggtggcgcacgagttctacgtcagaaagggtggagccaacaagagacccgcccccgatgacgcggataaaagcgagcccaagcgggcctgcccctcagtcgcggatccatcgacgtcagacgcggaaggagctccggtggactttgccgacaggtaccaaaacaaatgttctcgtcacgcgggcatgcttcagatgctgtttccctgcaaaacatgcgagagaatgaatcagaatttcaacatttgcttcacgcacgggaccagagactgttcagaatgtttccccggcgtgtcagaatctcaaccggtcgtcagaaaaaagacgtatcggaaactctgtgcgattcatcatctgctgggggcgggcacccgagattgcttgctcggcctgcgatctggtcaacgtggacctagatgactgtgtttctgagcaataaatgacttaaaccaggtatggctgccgatggttatcttccagattggctcgaggacaacctctctgagggcattcgcgagtggtgggacttgaaacctggagccccgaaacccaaagccaaccagcaaaagcaggacgacggccggggtctggtgcttcctggctacaagtacctcggacccttcaacggactcgacaagggggagcccgtcaacgcggcggacgcagcggccctcgagcacgacaaggcctacgaccagcagctcaaagcgggtgacaatccgtacctgcggtataaccacgccgacgccgagtttcaggagcgtctgcaagaagatacgtcttttgggggcaacctcgggcgagcagtcttccaggccaagaagcgggttctcgaacctctcggtctggttgaggaaggcgctaagacggctcctggaaagaagagaccggtagagccatcaccccagcgttctccagactcctctacgggcatcggcaagaaaggccagcagcccgcgaaaaagagactcaactttgggcagactggcgactcagagtcagtgcccgaccctcaaccaatcggagaaccccccgcaggcccctctggtctgggatctggtacaatggctgcaggcggtggcgctccaatggcagacaataacgaaggcgccgacggagtgggtagttcctcaggaaattggcattgcgattccacatggctgggcgacagagtcatcaccaccagcacccgaacctgggccctccccacctacaacaaccacctctacaagcaaatctccaacgggacttcgggaggaagcaccaacgacaacacctacttcggctacagcaccccctgggggtattttgactttaacagattccactgccacttctcaccacgtgactggcagcgactcatcaacaacaactggggattccggcccaagagactcaacttcaagctcttcaacatccaggtcaaggaggtcacgcagaatgaaggcaccaagaccatcgccaataaccttaccagcacgattcaggtctttacggactcggaataccagctcccgtacgtcctcggctctgcgcaccagggctgcctgcctccgttcccggcggacgtcttcatgattcctcagtacgggtacctgactctgaacaatggcagtcaggccgtgggccgttcctccttctactgcctggagtactttccttctcaaatgctgagaacgggcaacaactttgagttcagctaccagtttgaggacgtgccttttcacagcagctacgcgcacagccaaagcctggaccggctgatgaaccccctcatcgaccagtacctgtactacctgtctcggactcagtccacgggaggtaccgcaggaactcagcagttgctattttctcaggccgggcctaataacatgtcggctcaggccaaaaactggctacccgggccctgctaccggcagcaacgcgtctccacgacactgtcgcaaaataacaacagcaactttgcctggaccggtgccaccaagtatcatctgaatggcagagactctctggtaaatcccggtgtcgctatggcaacccacaaggacgacgaagagcgattttttccgtccagcggagtcttaatgtttgggaaacagggagctggaaaagacaacgtggactatagcagcgttatgctaaccagtgaggaagaaattaaaaccaccaacccagtggccacagaacagtacggcgtggtggccgataacctgcaacagcaaaacgccgctcctattgtaggggccgtcaacagtcaaggagccttacctggcatggtctggcagaaccgggacgtgtacctgcagggtcctatctgggccaagattcctcacacggacggaaactttcatccctcgccgctgatgggaggctttggactgaaacacccgcctcctcagatcctgattaagaatacacctgttcccgcggatcctccaactaccttcagtcaagctaagctggcgtcgttcatcacgcagtacagcaccggacaggtcagcgtggaaattgaatgggagctgcagaaagaaaacagcaaacgctggaacccagagattcaatacacttccaactactacaaatctacaaatgtggactttgctgttaacacagatggcacttattctgagcctcgccccatcggcacccgttacctcacccgtaatctgtaattgcttgttaatcaataaaccggttgattcgtttcagttgaactttggtctctgcgaagggcgaattc

SEQ ID NO: 4795 - DNA, 3128 bp, Adeno-associated virus
gaattcgccctttctacggctgcgtcaactggaccaatgagaactttcccttcaacgattgcgtcgacaagatggtgatctggtgggaggagggcaagatgacggccaaggtcgtggagtccgccaaggccattctcggcggcagcaaagtgcgcgtggaccaaaagtgcaagtcgtccgcccagatcgaccccacccccgtgatcgtcacctccaacaccaacatgtgcgccgtgattgacgggaacagcaccaccttcgagcaccagcagccgttgcaggaccggatgttcaagtttgaactcacccgccgtctggagcacgactttggcaaggtgacaaagcaggaagtcagagagttcttccgctgggcgcaggatcacgtgaccgaggtggcgcacgagttctacgtcagaaagggtggagccaacaagagacccgcccccgatgacgcggataaaagcgagcccaagcgggcctgcccctcagtcgcggatccatcgacgtcagacgcggaaggagctccggtggactttgccgacaggtaccaaaacaaatgttctcgtcacgcgggcatgcttcagatgctgtttccctgcaaaacatgcgagagaatgaatcagaatttcaacatttgcttcacgcacgggaccagagactgttcagaatgtttccccggcgtgtcagaatctcaaccggttgtcagaaaaaagacgtatcggaaactctgtgcgattcatcatctgctggggcgggcacccgagattgcttgctcggcctgcgatctggtcaacgtggacctagatgactgtgtttctgagcaataaatgacttaaaccaggtatggctgccgatggttatcttccagattggctcgaggacaacctctctgagggcattcgcgagtggtgggacttgaaacctggagccccgaaacccaaagccaaccagcaaaagcaggacgacggccggggtctggtgcttcctggctacaagtacctcggacccttcaacggactcgacaagggggagcccgtcaacgcggcggacgcagcggccctcgagcacgacaaggcctacgaccagcagctcaaagcgggtgacaatccgtacctgcggtataaccacgccgacgccgagtttcaggagcgtctgcaagaagatacgtcttttgggggcaacctcgggcgagcagtcttccaggccaagaagcgggttctcgaacctctcggtctggttgaggaaggcgctaagacggctcctggaaagaagagaccggtagagccatcaccccagcgttctccagactcctctacgggcatcggcaagaaaggccagcagcccgcgaaaaagagactcaactttgggcagactggcgactcagagtcagtgcccgaccctcaaccaatcggagaaccccccgcaggcccctctggtctgggatctggtacaatggctgcaggcggtggcgctccaatggcagacaataacgaaggcgccgacggagtgggtagttcctcaggaaattggcattgcgattccacatggctgggcgacagagtcatcaccaccagcacccgaacctgggccctccccacctacaacaaccacctctacaagcaaatctccaacgggacttcgggaggaagcaccaacgacaacacctacttcggctacagcaccccctgggggtattttgactttaacagattccactgccacttctcaccacgtgactggcagcgactcatcaacaacaactggggattccggcccaagagacccaacttcaagctcttcaacatccaggtcaaggaggtcacgcagaatgaaggcaccaagaccatcgccaataaccttaccagcacgattcaggtctttacggactcggaataccagctcccgtacgtcctcggctctgcgcaccagggctgcctgcctccgttcccggcggacgtcttcatgattcctcagtacgggtacctgactctgaacaatggcagtcaggccgtgggccgttcctccttctactgcctggagtactttccttctcaaatgctgagaacgggcaacaactttgagttcagctaccagtttgaggacgtgccttttcacagcagctacgcgcacagccaaagcctggaccggctgatgaaccccctcatcgaccagtacctgtactacctgtctcggactcagtccacgggaggtaccgcaggaactcagcagttgctattttctcaggccgggcctaataacatgtcggctcaggccaaaaactggctacccgggccctgctaccggcagcaacgcgtctccacgacactgtcgcaaaataacaacagcaactttgcctggaccggtgccaccaagtatcatctgaatggcagagactctctggtaaatcccggtgtcgctatggcaacccacaaggacgacgaagagcgattttttccgtccagcggagtcttaatgtttgggaaacagggagctggaaaagacaacgtggactatagcagcgttatgctaaccagtgaggaagaaattaaaaccaccaacccagtggccacagaacagtacggcgtggtggccgataacctgcaacagcaaaacgccgctcctattgtaggggccgtcaacagtcaaggagccttacctggcatggtctggcagaaccgggacgtgtacctgcagggtcctatctgggccaagattcctcacacggacggaaactttcatccctcgccgctgatgggaggctttggactgaaacacccgcctcctcagatcctgattaagaatacacctgttcccgcggatcctccaactaccttcagtcaagctaagctggcgtcgttcatcacgcagtacagcaccggacaggtcagcgtggaaattgaatgggagctgcagaaagaaaacagcaaacgctggaacccagagattcaatacacttccaactactacaaatctacaaatgtggactttgctgttaacacagatggcacttattctgagcctcgccccattggcacccgttacctcacccgtaatctgtaattgcttgttaatcaataaaccggttgattcgtttcagttgaactttggtctctgcgaagggcgaattc

SEQ ID NO: 4796 - protein, 738 aa, Adeno-associated virus
MAADGYLPDWLEDNLSEGIREWWDLKPGAPKPKANQQKQDDGRGLVLPGYKYLGPFNGLDKGEPVNAADAAALEHDKAYDQQLKAGDNPYLRYNHADAEFQERLQEDTSFGGNLGRAVFQAKKRVLEPLGLVEEGAKTAPGKKRPVEPSPQRSPDSSTGIGKKGQQPAKKRLNFGQTGDSESVPDPQPIGEPPAGPSGLGSGTMAAGGGAPMADNNEGADGVGSSSGNWHCDSTWLGDRVITTSTRTWALPTYNNHLYKQISNGTSGGSTNDNTYFGYSTPWGYFDFNRFHCHFSPRDWQRLINNNWGFRPKRPNFKLFNIQVKEVTQNEGTKTIANNLTSTIQVFTDSEYQLPYVLGSAHQGCLPPFPADVFMIPQYGYLTLNNGSQAVGRSSFYCLEYFPSQMLRTGNNFEFSYQFEDVPFHSSYAHSQSLDRLMNPLIDQYLYYLSRTQSTGGTAGTQQLLFSQAGPNNMSAQAKNWLPGPCYRQQRVSTTLSQNNNSNFAWTGATKYHLNGRDSLVNPGVAMATHKDDEERFFPSSGVLMFGKQGAGKDNVDYSSVMLTSEEEIKTTNPVATEQYGVVADNLQQQNAAPIVGAVNSQGALPGMVWQNRDVYLQGPIWAKIPHTDGNFHPSPLMGGFGLKHPPPQILIKNTPVPADPPTTFSQAKLASFITQYSTGQVSVEIEWELQKENSKRWNPEIQYTSNYYKSTNVDFAVNTDGTYSEPRPIGTRYLTRNL

SEQ ID NO: 4797 - protein, 738 aa, Adeno-associated virus
MAADGYLPDWLEDNLSEGIREWWDLKPGAPKPKANQQKQDDGRGLVLPGYKYLGPFNGLDKGEPVNAADAAALEHDKAYDQQLKAGDNPYLRYNHADAEFQERLQEDTSFGGNLGRAVFQAKKRVLEPLGLVEEAAKTAPGKKRPVEPSPQRSPDSSTGIGKKGQQPAKKRLNFGQTGDSESVPDPQPIGEPPAGPSGLGSGTMAAGGGAPMADNNEGADGVGSSSGNWHCDSTWLGDRVITTSTRTWALPTYNNHLYKQISNGTSGGSTNDNTYFGYSTPWGYFDFNRFHCHFSPRDWQRLINNNWGFRPKRLSFKLFNIQVKEVTQNEGTKTIANNLTSTIQVFTDSEYQLPYVLGSAHQGCLPPFPADVFMIPQYGYLTLNNGSQAVGRSSFYCLEYFPSQMLRTGNNFEFSYTFEDVPFHSSYAHSQSLDRLMNPLIDQYLYYLSRTQSTGGTQGTQQLLFSQAGPANMSAQAKNWLPGPCYRQQRVSTTLSQNNNSNFAWTGATKYHLNGRDSLVNPGVAMATHKDDEERFFPSSGVLMFGKQGAGRDNVDYSSVMLTSEEEIKTTNPVATEQYGVVADNLQQTNTGPIVGNVNSQGALPGMVWQNRDVYLQGPIWAKIPHTDGNFHPSPLMGGFGLKHPPPQILIKNTPVPADPPTTFSQAKLASFITQYSTGQVSVEIEWELQKENSKRWNPEIQYTSNYYKSTNVDFAVNTEGTYSEPRPIGTRYLTRNL

SEQ ID NO: 4798 - protein, 720 aa, Adeno-associated virus
MSFVDHPPDWLEEVGEGLREFLGLEAGPPKPKPNQQHQDQARGLVLPGYNYLGPGNGLDRGEPVNRADEVAREHDISYNEQLEAGDNPYLKYNHADAEFQEKLADDTSFGGNLGKAVFQAKKRVLEPFGLVEEGAKTAPTGKRIDDHFPKRKKARTEEDSKPSTSSDAEAGPSGSQQLQIPAQPASSLGADTMSAGGGGPLGDNNQGADGVGNASGDWHCDSTWMGDRVVTKSTRTWVLPSYNNHQYREIKSGSVDGSNANAYFGYSTPWGYFDFNRFHSHWSPRDWQRLINNYWGFRPRSLRVKIFNIQVKEVTVQDSTTTIANNLTSTVQVFTDDDYQLPYVVGNGTEGCLPAFPPQVFTLPQYGYATLNRDNTENPTERSSFFCLEYFPSKMLRTGNNFEFTYNFEEVPFHSSFAPSQNLFKLANPLVDQYLYRFVSTNNTGGVQFNKNLAGRYANTYKNWFPGPMGRTQGWNLGSGVNRASVSAFATTNRMELEGASYQVPPQPNGMTNNLQGSNTYALENTMIFNSQPANPGTTATYLEGNMLITSESETQPVNRVAYNVGGQMATNNQSSTTAPATGTYNLQEIVPGSVWMERDVYLQGPIWAKIPETGAHFHPSPAMGGFGLKHPPPMMLIKNTPVPGNITSFSDVPVSSFITQYSTGQVTVEMEWELKKENSKRWNPEIQYTNNYNDPQFVDFAPDSTGEYRTTRPIGTRYL

SEQ ID NO: 4799 - protein, 736 aa, Adeno-associated virus
MAADGYLPDWLEDNLSEGIREWWDLKPGAPKPKANQQKQDDGRGLVLPGYKYLGPFNGLDKGEPVNAADAAALEHDKAYDQQLKAGDNPYLRYNHADAEFQERLQEDTSFGGNLGRAVFQAKKRVLEPFGLVEEGAKTAPGKKRPVEQSPQEPDSSSGIGKTGQQPAKKRLNFGQTGDSESVPDPQPLGEPPATPAAVGPTTMASGGGAPMADNNEGADGVGNASGNWHCDSTWLGDRVITTSTRTWALPTYNNHLYKQISSASTGASNDNHYFGYSTPWGYFDFNRFHCHFSPRDWQRLINNNWGFRPKRLNFKLFNIQVKEVTTNDGVTTIANNLTSTVQVFSDSEYQLPYVLGSAHQGCLPPFPADVFMIPQYGYLTLNNGSQAVGRSSFYCLEYFPSQMLRTGNNFTFSYTFEDVPFHSSYAHSQSLDRLMNPLIDQYLYYLNRTQNQSGSAQNKDLLFSRGSPAGMSVQPKNWLPGPCYRQQRVSKTKTDNNNSNFTWTGASKYNLNGRESIINPGTAMASHKDDKDKFFPMSGVMIFGKESAGASNTALDNVMITDEEEIKATNPVATERFGTVAVNLQSSSTDPATGDVHVMGALPGMVWQDRDVYLQGPIWAKIPHTDGHFHPSPLMGGFGLKHPPPQILIKNTPVPANPPAEFSATKFASFITQYSTGQVSVEIEWELQKENSKRWNPEVQYTSNYAKSANVDFTVDNNGLYTEPRPIGTRYLTRPL

SEQ ID NO: 4800 - protein, 736 aa, Adeno-associated virus
MAADGYLPDWLEDNLSEGIREWWDLKPGAPKPKANQQKQDDGRGLVLPGYKYLGPFNGLDKGEPVNAADAAALEHDKAYDQQLKAGDNPYLRYNHADAEFQERLQEDTSFGGNLGRAVFQAKKRVLEPFGLVEEGAKTAPGKKRPVEQSPQEPDSSSGIGKTGQQPAKKRLNFGQTGDSESVPDPQPLGEPPATPAAVGPTTMASGGGAPMADNNEGADGVGNASGNWHCDSTWLGDRVITTSTRTWALPTYNNHLYKQISSASTGASNDNHYFGYSTPWGYFDFNRFHCHFSPRDWQRLINNNWGFRPKRLNFKLFNIQVKEVTTNDGVTTIANNLTSTVQVFSDSEYQLPYVLGSAHQGCLPPFPADVFMIPQYGYLTLNNGSQAVGRSSFYCLEYFPSQMLRTGNNFTFSYTFEDVPFHSSYAHSQSLDRLMNPLIDQYLYYLNRTQNQSGSAQNKDLLFSRGSPAGMSVQPKNWLPGPCYRQQRVSKTKTDNNNSNFTWTGASKYNLNGRESIINPGTAMASHKDDEDKFFPMSGVMIFGKESAGASNTALDNVMITDEEEIKATNPVATERFGTVAVNLQSSSTDPATGDVHVMGALPGMVWQDRDVYLQGPIWAKIPHTDGHFHPSPLMGGFGLKHPPPQILIKNTPVPANPPAEFSATKFASFITQYSTGQVSVEIEWELQKENSKRWNPEVQYTSNYAKSANVDFTVDNNGLYTEPRPIGTRYLTRPL

SEQ ID NO: 4801 - protein, 736 aa, Adeno-associated virus
MAADGYLPDWLEDNLSEGIREWWDLKPGAPKPKANQQKQDDGRGLVLPGYKYLGPFNGLDKGEPVNAADAAALEHDKAYDQQLKAGDNPYLRYNHADAEFQERLQEDTSFGGNLGRAVFQAKKRVLEPLGLVEEGAKTAPGKKRPVEQSPQEPDSSSGIGKTGQQPAKKRLNFGQTGDSESVPDPQPLGEPPATPAAVGPTTMASGGGAPMADNNEGADGVGNASGNWHCDSTWLGDRVITTSTRTWALPTYNNHLYKQISSASTGASNDNHYFGYSTPWGYFDFNRFHCHFSPRDWQRLINNNWGFRPKRLNFKLFNIQVKEVTTNDGVTTIANNLTSTVQVFSDSEYQLPYVLGSAHQGCLPPFPADVFMIPQYGYLTLNNGSQAVGRSSFYCLEYFPSQMLRTGNNFTFSYTFEDVPFHSSYAHSQSLDRLMNPLIDQYLYYLNRTQNQSGSAQNKDLLFSRGSPAGMSVQPKNWLPGPCYRQQRVSKTKTDNNNSNFTWTGASKYNLNGRESIINPGTAMASHKDDEDKFFPMSGVMIFGKESAGASNTALDNVMITDEEEIKATNPVATERFGTVAVNLQSSSTDPATGDVHVMGALPGMVWQDRDVYLQGPIWAKIPHTDGHFHPSPLMGGFGLKHPPPQILIKNTPVPANPPAEFSATKFASFITQYSTGQVSVEIEWELQKENSKRWNPEVQYTSNYAKSANVDFTVDNNGLYTEPRPIGTRYLTRPL

SEQ ID NO: 4802 - protein, 736 aa, Adeno-associated virus
MAADGYLPDWLEDNLSEGIREWWDLKPGAPKPKANQQKQDDGRGLVLPGYKYLGPFNGLDKGEPVNAADAAALEHDKAYDQQLKAGDNPYLRYNHADAEFQERLQEDTSFGGNLGRAVFQAKKRVLEPLGLVEEGAKTAPGKKRPVEQSPQEPDSSSGIGKTGQQPAKKRLNFGQTGDSESVPDPQPLGEPPATPAAVGPTTMASGGGAPMADNNEGADGVGNASGNWHCDSTWLGDRVITTSTRTWALPTYNNHLYKQISSASTGASNDNHYFGYSTPWGYFDFNRFHCHFSPRDWQRLINNNWGFRPKRLNFKLFNIQVKEVTTNDGVTTIANNLTSTVQVFSDSEYQLPYVLGSAHQGCLPPFPADVFMIPQYGYLTLNNGSQAVGRSSFYCLEYFPSQMLRTGNNFTFSYTFEDVPFHSSYAHSQSLDRLMNPLIDQYLYYLNRTQNQSGSAQNKDLLFSRGSPAGMSVQPKNWLPGPCYRQQRVSKTKTDNNNSNFTWTGASKYNLNGRESIINPGTAMASHKDDKDKFFPMSGVMIFGKESAGASNTALDNVMITDEEEIKATNPVATERFGTVAVNLQSSSTDPATGDVHVMGALPGMVWQDRDVYLQGPIWAKIPHTDGHFHPSPLMGGFGLKHPPPQILIKNTPVPANPPAEFSATKFASFITQYSTGQVSVEIEWELQKENSKRWNPEVQYTSNYAKSANVDFTVDNNGLYTEPRPIGTRYLTRPL

SEQ ID NO: 4803 - protein, 728 aa, Adeno-associated virus
MAADGYLPDWLEGNLSEGIREWWDLKPGAPKPKANQQKQDDGRGLVLPGYRYLGPFNGLDKGEPVNEADAAALEHDKAYDKQLEQGDNPYLKYNHADAEFQERLQEDTSFGGNLGRAVFQAKKRVLEPLGLVEEGAKTAPGKKRPIESPDSSTGIGKNGQPPAKKKLNFGQTGDSESVPDPQPLGEPPAAPSGLGSGTMAAGGGAPMADNNEGADGVGNASGNWHCDSTWLGDRVITTSTRTWALPTYNNHLYKQISSQSGATNDNHFFGYSTPWGYFDFNRFHCHFSPRDWQRLINNNWGFRPRKLRFKLFNIQVKEVTTNDGVTTIANNLTSTIQVFSDSEYQLPYVLGSAHQGCLPPFPADVFMIPQYGYLTLNNGSQSVGRSSFYCLEYFPSQMLRTGDNFEFSYTFEEVPFHSSYAHSQSLDRLMNPLIDQYLYYLARTQSTTGSTRELQFHQAGPNTMAEQSKNWLPGPCYRQQRLSKNIDSNNNSNFAWTGATKYHLNGRNSLTNPGVAMATNKDDEDQFFPINGVLVFGKTGAANKTTLENVLMTSEEEIKTTNPVATEEYGVVSSNLQSSTAGPQTQTVNSQGALPGMVWQNRDVYLQGPIWAKIPHTDGNFHPSPLMGGFGLKHPPPQILIKNTPVPANPPEVFTPAKFASFITQYSTGQVSVEIEWELQKENSKRWNPEIQYTSNYAKSNNVEFAVNNEGVYTEPRPIGTRYLTRNL

SEQ ID NO: 4804 - DNA, 2211 bp, Adeno-associated virus
atggctgccgatggttatcttccagattggctcgaggacaaccttagtgaaggaattcgcgagtggtgggctttgaaacctggagcccctcaacccaaggcaaatcaacaacatcaagacaacgctcgaggtcttgtgcttccgggttacaaataccttggacccggcaacggactcgacaagggggagccggtcaacgcagcagacgcggcggccctcgagcacgacaaggcctacgaccagcagctcaaggccggagacaacccgtacctcaagtacaaccacgccgacgccgagttccaggagcggctcaaagaagatacgtcttttgggggcaacctcgggcgagcagtcttccaggccaaaaagaggcttcttgaacctcttggtctggttgaggaagcggctaagacggctcctggaaagaagaggcctgtagagcagtctcctcaggaaccggactcctccgcgggtattggcaaatcgggtgcacagcccgctaaaaagagactcaatttcggtcagactggcgacacagagtcagtcccagaccctcaaccaatcggagaacctcccgcagccccctcaggtgtgggatctcttacaatggcttcaggtggtggcgcaccagtggcagacaataacgaaggtgccgatggagtgggtagttcctcgggaaattggcattgcgattcccaatggctgggggacagagtcatcaccaccagcacccgaacctgggccctgcccacctacaacaatcacctctacaagcaaatctccaacagcacatctggaggatcttcaaatgacaacgcctacttcggctacagcaccccctgggggtattttgacttcaacagattccactgccacttctcaccacgtgactggcagcgactcatcaacaacaactggggattccggcctaagcgactcaacttcaagctcttcaacattcaggtcaaagaggttacggacaacaatggagtcaagaccatcgccaataaccttaccagcacggtccaggtcttcacggactcagactatcagctcccgtacgtgctcgggtcggctcacgagggctgcctcccgccgttcccagcggacgttttcatgattcctcagtacgggtatctgacgcttaatgatggaagccaggccgtgggtcgttcgtccttttactgcctggaatatttcccgtcgcaaatgctaagaacgggtaacaacttccagttcagctacgagtttgagaacgtacctttccatagcagctacgctcacagccaaagcctggaccgactaatgaatccactcatcgaccaatacttgtactatctctcaaagactattaacggttctggacagaatcaacaaacgctaaaattcagtgtggccggacccagcaacatggctgtccagggaagaaactacatacctggacccagctaccgacaacaacgtgtctcaaccactgtgactcaaaacaacaacagcgaatttgcttggcctggagcttcttcttgggctctcaatggacgtaatagcttgatgaatcctggacctgctatggccagccacaaagaaggagaggaccgtttctttcctttgtctggatctttaatttttggcaaacaaggaactggaagagacaacgtggatgcggacaaagtcatgataaccaacgaagaagaaattaaaactactaacccggtagcaacggagtcctatggacaagtggccacaaaccaccagagtgcccaagcacaggcgcagaccggctgggttcaaaaccaaggaatacttccgggtatggtttggcaggacagagatgtgtacctgcaaggacccatttgggccaaaattcctcacacggacggcaactttcacccttctccgctgatgggagggtttggaatgaagcacccgcctcctcagatcctcatcaaaaacacacctgtacctgcggatcctccaacggccttcaacaaggacaagctgaactctttcatcacccagtattctactggccaagtcagcgtggagatcgagtgggagctgcagaaggaaaacagcaagcgctggaacccggagatccagtacacttccaactattacaagtctaataatgttgaatttgctgttaatactgaaggtgtatatagtgaaccccgccccattggcaccagatacctgactcgtaatctgtaa

SEQ ID NO: 4805 - protein, 736 aa, Adeno-associated virus
MAADGYLPDWLEDNLSEGIREWWALKPGAPQPKANQQHQDNARGLVLPGYKYLGPGNGLDKGEPVNAADAAALEHDKAYDQQLKAGDNPYLKYNHADAEFQERLKEDTSFGGNLGRAVFQAKKRLLEPLGLVEEAAKTAPGKKRPVEQSPQEPDSSAGIGKSGAQPAKKRLNFGQTGDTESVPDPQPIGEPPAAPSGVGSLTMASGGGAPVADNNEGADGVGSSSGNWHCDSQWLGDRVITTSTRTWALPTYNNHLYKQISNSTSGGSSNDNAYFGYSTPWGYFDFNRFHCHFSPRDWQRLINNNWGFRPKRLNFKLFNIQVKEVTDNNGVKTIANNLTSTVQVFTDSDYQLPYVLGSAHEGCLPPFPADVFMIPQYGYLTLNDGSQAVGRSSFYCLEYFPSQMLRTGNNFQFSYEFENVPFHSSYAHSQSLDRLMNPLIDQYLYYLSKTINGSGQNQQTLKFSVAGPSNMAVQGRNYIPGPSYRQQRVSTTVTQNNNSEFAWPGASSWALNGRNSLMNPGPAMASHKEGEDRFFPLSGSLIFGKQGTGRDNVDADKVMITNEEEIKTTNPVATESYGQVATNHQSAQAQAQTGWVQNQGILPGMVWQDRDVYLQGPIWAKIPHTDGNFHPSPLMGGFGMKHPPPQILIKNTPVPADPPTAFNKDKLNSFITQYSTGQVSVEIEWELQKENSKRWNPEIQYTSNYYKSNNVEFAVNTEGVYSEPRPIGTRYLTRNL

SEQ ID NO: 4806 - DNA, 2460 bp, Adeno-associated virus
ggtaattcctccggaaattggcattgcgattccacatggctgggcgaccgagtcattaccaccagcacccggacttgggccctgcccacctacaacaaccacctctacaagcaaatctccagccaatcgggtgccaccaacgacaaccactacttcggctacagcaccccttgggggtattttgatttcaacagattccactgccatttctcaccacgtgactggcagcgactcatcaacaacaactggggattcatggctgccgatggttatcttccagattggctcgaggacactctctctgaaggaatcagacagtggtggaagctcaaacctggcccaccaccgccgaaacctaaccaacaacaccgggacgacagtaggggtcttgtgcttcctgggtacaagtacctcggacccttcaacggactcgacaaaggagagccggtcaacgaggcagacgccgcggccctcgagcacgacaaagcctacgaccaccagctcaagcaaggggacaacccgtacctcaaatacaaccacgcggacgctgaatttcaggagcgtcttcaagaagatacgtctttcgggggcaacctcgggcgagcagtcttccaggccaaaaagagggtactcgagcctcttggtctggttgaggaagctgttaagacggctcctggaaaaaagagacctatagagcagtctcctgcagaaccggactcttcctcgggcatcggcaaatcaggccagcagcccgctaagaaaagactcaattttggtcagactggcgacacagagtcagtcccagaccctcaaccaatcggagaaccccccgcagccccctctggtgtgggatctaatacaatggcttcaggcggtggggcaccaatggcagacaataacgaaggcgccgacggagtgggtaattcctcgggaaattggcattgcgattccacatggatgggcgacagagttatcaccaccagcacaagaacctgggccctccccacctacaataatcacctctacaagcaaatctccagcgaatcgggagccaccaacgacaaccactacttcggctacagcaccccctgggggtattttgactttaacagattccactgtcacttctcaccacgtgactggcagcgactcatcaacaacaactggggatttagacccaagaaactcaatttcaagctcttcaacatccaagtcaaggaggtcacgcagaatgatggaaccacgaccatcgccaataaccttaccagcacggtgcaggtcttcacagactctgagtaccagctgccctacgtcctcggttcggctcaccagggctgccttccgccgttcccagcagacgtcttcatgattcctcagtacggctacttgactctgaacaatggcagccaagcggtaggacgttcttcattctactgtctagagtattttccctctcagatgctgaggacgggaaacaacttcaccttcagctacacttttgaagacgtgcctttccacagcagctacgcgcacagccagagtctggatcggctgatgaatcctctcattgaccagtacctgtattacctgagcaaaactcagggtacaagtggaacaacgcagcaatcgagactgcagttcagccaagctgggcctagctccatggctcagcaggccaaaaactggctaccgggacccagctaccgacagcagcgaatgtctaagacggctaatgacaacaacaacagtgaatttgcttggactgcagccaccaaatattacctgaatggaagaaattctctggtcaatcccgggcccccaatggccagtcacaaggacgatgaggaaaagtatttccccatgcacggaaatctcatctttggaaaacaaggcacaggaactaccaatgtggacattgaatcagtgcttattacagacgaagaagaaatcagaacaactaatcctgtggctacagaacaatacggacaggttgccaccaaccatcagagtcagaacaccacagcttcctatggaagtgtggacagccagggaatcttacctggaatggtgtggcaggaccgcgatgtctatcttcaaggtcccatttgggccaaaactcctcacacggacggacactttcatccttctccgctcatgggaggctttggactgaaacaccctcctccccagatcctgatcaaaaacacacctgtgccagcgaatcccgcgaccactttcactcctggaaagtttgcttcgttcattacccagtattccaccggacaggtcagcgtggaaatagagtgggagctgcagaaagaaaacagcaaacgctggaacccagaaattcagtacacctccaactacaacaagtcggtgaatgtggagtttaccgtggacgcaaacggtgtttattctgaaccccgccctattggcactcgttaccttacccggaacttg

SEQ ID NO: 4807 - DNA, 3123 bp, Adeno-associated virus
gaattcgccctttctacggctgcgtcaactggaccaatgaaaactttcccttcaacgattgcgtcgacaagatggtgatctggtgggaggagggaaagatgaccgccaaggtcgtggaatctgccaaagccattctgggtggaggcaaggttcgtgtggaccagaaatgcaagtcttcggcccagatcgacccgactccggtgattgtcacctctaacaccaacatgtgcgccgtgattgacggaaactcgaccaccttcgagcaccagcagccgttgcaagaccggatgttcaaatttgaacttacccgccgtttggatcatgactttgggaaggtcaccaagcaggaagtcaaagactttttccggtgggctcaagatcacgtgactgaggtggagcatgagttctacgtcaaaaagggtggagccaagaaaaggcccgcccccgatgatgtatatataaatgagcccaagcgggcgcgcgagtcagttgcgcagccatcgacgtcagacgcggaagcttcgataaactacgcggacaggtaccaaaacaaatgttctcgtcacgtgggcatgaatctgatgctgtttccctgtcgacaatgcgaaagaatgaatcagaattcaaatatctgcttcacacacgggcaaaaagactgtttggaatgctttcccgtgtcagaatctcaacccgtttctgtcgtcagaaaaacgtatcagaaactttgttacattcatcatatcatgggaaaagtaccagacgcctgcactgcctgcgacctggtaaatgtggacttggatgactgtatttctgagcaataaatgacttaaatcaggtatggctgctgacggttatcttccagattggctcgaggacactctctctgaaggaatcagacagtggtggaagctcaaacctggcccaccaccgccgaaacctaaccaacaacaccgggacgacagtaggggtcttgtgcttcctgggtacaagtacctcggacccttcaacggactcgacaaaggagagccggtcaacgaggcagacgccgcggccctcgagcacgacaaagcctacgaccaccagctcaagcaaggggacaacccgtacctcaaatacaaccacgcggacgctgaatttcaggagcgtcttcaagaagatacgtctttcgggggcaacctcgggcgagcagtcttccaggccaaaaagagggtactcgagcctcttggtctggttgaggaagctgttaagacggctcctggaaaaaagagacctatagagcagtctcctgcagaaccggactcttcctcgggcatcggcaaatcaggccagcagcccgctaagaaaagactcaattttggtcagactggcgacacagagtcagtcccaggccctcaaccaatcggagaaccccccgcagccccctctggtgtgggatctaatacaatggcttcaggcggtggggcaccaatggcagacaataacgaaggcgccgacggagtgggtaattcctcgggaaattggcattgcgattccacatggatgggcgacagagttatcaccaccagcacaagaacctgggccctccccacctacaataatcacctctacaagcaaatctccagcgaatcgggagccaccaacgacaaccactacttcggctacagcaccccctgggggtattttgactttaacagattccactgtcacttctcaccacgtgactggcagcgactcatcaacaacaactggggatttagacccaagaaactcaatttcaagctcttcaacatccaagtcaaggaggtcacgcagaatgatggaaccacgaccatcgccaataaccttaccagcgcggtgcaggtcttcacagactctgagtaccagctgccctacgtcctcggttcggctcaccagggctgccttccgccgttcccagcagacgtcttcatgattcctcagtacggctacttgactctgaacaatggcagccaagcggtaggacgttcttcattctactgtctagagtattttccctctcagatgctgaggacgggaaacaacttcaccttcagctacacttttgaagacgtgcctttccacagcagctacgcgcacagccagagtctggatcggctgatgaatcctctcattgaccagtacctgtattacctgagcaaaactcagggtacaagtggaacaacgcagcaatcgagactgcagttcagccaagctgggcctagctccatggctcagcaggccaaaaactggctaccgggacccagctaccgacagcagcgaatgtctaagacggctaatgacaacaacaacagtgaatttgcttggactgcagccaccaaatattacctgaatggaagaaattctctggtcaatcccgggcccccagtggccagtcacaaggacgatgaggaaaagtatttccccatgcacggaaatctcatctttggaaaacaaggcacaggaactaccaatgtggacattgaatcagtgcttattacagacgaagaagaaatcagaacaactaatcctgtggctacagaacaatacggacaggttgccaccaaccatcagagtcagaacaccacagcttcctatggaagtgtggacagccagggaatcttacctggaatggtgtggcaggaccgcgatgtctatcttcaaggtcccatttgggccaaaactcctcacacggacggacactttcatccttctccgctcatgggaggctttggactgaaacaccctcctccccagatcctgatcaaaaacacacctgtgccagcgaatcccgcgaccactttcactcctggaaagtttgcttcgttcattacccagtattccacctgacaggtcagcgtggaaatagagtgggagctgcagaaagaaaacagcaaacgctggaacccagaaattcagtacacctccaactacaacaagtcggtgaatgtggagtttaccgtggacgcaaacggtgtttattctgaaccccgccctattggcactcgttaccttacccggaacttgtaatttcctgttaatgaataagccgatttatgcgtttcagttgaactttggtctctgcgaagggcgaattcgtttaaacct

SEQ ID NO: 4808 - protein, 735 aa, Adeno-associated virus
MAADGYLPDWLEDTLSEGIRQWWKLKPGPPPPKPNQQHRDDSRGLVLPGYKYLGPFNGLDKGEPVNEADAAALEHDKAYDHQLKQGDNPYLKYNHADAEFQERLQEDTSFGGNLGRAVFQAKKRVLEPLGLVEEAVKTAPGKKRPIEQSPAEPDSSSGIGKSGQQPAKKRLNFGQTGDTESVPGPQPIGEPPAAPSGVGSNTMASGGGAPMADNNEGADGVGNSSGNWHCDSTWMGDRVITTSTRTWALPTYNNHLYKQISSESGATNDNHYFGYSTPWGYFDFNRFHCHFSPRDWQRLINNNWGFRPKKLNFKLFNIQVKEVTQNDGTTTIANNLTSAVQVFTDSEYQLPYVLGSAHQGCLPPFPADVFMIPQYGYLTLNNGSQAVGRSSFYCLEYFPSQMLRTGNNFTFSYTFEDVPFHSSYAHSQSLDRLMNPLIDQYLYYLSKTQGTSGTTQQSRLQFSQAGPSSMAQQAKNWLPGPSYRQQRMSKTANDNNNSEFAWTAATKYYLNGRNSLVNPGPPVASHKDDEEKYFPMHGNLIFGKQGTGTTNVDIESVLITDEEEIRTTNPVATEQYGQVATNHQSQNTTASYGSVDSQGILPGMVWQDRDVYLQGPIWAKTPHTDGHFHPSPLMGGFGLKHPPPQILIKNTPVPANPATTFTPGKFASFITQYSTGQVSVEIEWELQKENSKRWNPEIQYTSNYNKSVNVEFTVDANGVYSEPRPIGTRYLTRNL

SEQ ID NO: 4809 - DNA, 3123 bp, Adeno-associated virus
gaattcgccctttctacggctgcgtcaactggaccaatgaaaactttcccttcaacgattgcgtcgacaagatggtgatctggtgggaggagggaaagatgaccgccaaggtcgtggaatctgccaaagccattctgggtggaagcaaggttcgtgtggaccagaaatgcaagtcttcggcccagatcgacccgactccggtgattgtcacctctaacaccaacatgtgcgccgtgattgacggaaactcgaccaccttcgagcaccagcagccgttgcaagaccggatgttcaaatttgaacttacccgccgtttggatcatgactttgggaaggtcaccaagcaggaagtcaaagactttttccggtgggctcaagatcacgtgactgaggtggagcatgagttctacgtcaaaaagggtggagccaagaaaaggcccgcccccgatgatgtatatataaatgagcccaagcgggcgcgcgagtcagttgcgcagccatcgacgtcagacgcggaagcttcgataaactacgcgggcaggtaccaaaacaaatgttctcgtcacgtgggcatgaatctgatgctgtttccctgtcgacaatgcgaaagaatgaatcagaattcaaatatctgcttcacacacgggcaaaaagactgtttggaatgctttcccgtgtcagaatctcaacccgtttctgtcgtcagaaaaacgtatcagaaactttgttacattcatcatatcatgggaaaagaaccagacgcctgcactgcctgcgacctggtaaatgtggacttggatgactgtatttctgagcaataaatgacttaaatcaggtatggctgctgacggttatcttccagattggctcgaggacactctctctgaaggaatcagacagtggtggaagctcaaacctggcccaccaccgccgaaacctaaccaacaacaccgggacgacagtaggggtcttgtgcttcctgggtacaagtacctcggacccttcaacggactcgacaaaggagagccggtcaacgaggcagacgccgcggccctcgagcacgacaaagcctacgaccaccagctcaagcaaggggacaacccgtacctcaaatacaaccacgcggacgctgaatttcaggagcgtcttcaagaagatacgtctttcgggggcaacctcgggcgagcagtcttccaggccaaaaagagggtactcgagcctcttggtctggttgaggaagctgttaagacggctcctggaaaaaagagacctatagagcagtctcctgcagaaccggactcttcctcgggcatcggcgaatcaggccagcagcccgctaagaaaagactcaattttggtcagactggcgacacagagtcagtcccagaccctcaaccaatcggagaaccccccgcagccccctctggtgtgggatctaatacaatggcttcaggcggtggggcaccaatggcagacgataacgaaggcgccgacggagtgggtaattcctcgggaaattggcattgcgattccacatggatgggcgacagagttatcaccaccagcacaagaacctgggccctccccacctacaataatcacctctacaagcaaatctccagcgaatcgggagccaccaacgacaaccactacttcggctacagcaccccctgggggtattttgactttaacagattccactgtcacttctcaccacgtgactggcagcgactcatcaacaacaactggggatttagacccaagaaactcaatttcaagctcttcaacatccaagtcaaggaggtcacgcagaatgatggaaccacgaccatcgccaataaccttaccagcacggtgcaggtcttcacagactctgagtaccagctgccctacgtcctcggttcggctcaccagggctgccttccgccgttcccagcagacgtcttcatgattcctcagtacggctacttgactctgaacaatggcagccaagcggtaggacgttcttcattctactgtctagagtattttccctctcagatgctgaggacgggaaacaacttcaccttcagctacacttttgaagacgtgcctttccacagcagctacgcgcacagccagagtctggatcggctgatgaatcctctcattgaccagtacctgtattacctgagcaaaactcagggtacaagtggaacaacgcagcaatcgagactgcagttcagccaagctgggcctagctccatggctcagcaggccaaaaactggctaccgggacccagctaccgacagcagcgaatgtctaagacggctaatgacaacaacaacagtgaatttgcttggactgcagccaccaaatattacctgaatggaagaaattctctggtcaatcccgggcccccaatggccagtcacaaggacgatgaggaaaagtatttccccatgcacggaaatctcatctttggaaaacaaggcacaggaactaccaatgtggacattgaatcagtgcttattacagacgaagaagaaatcagaacaactaatcctgtggctacagaacaatacggacaggttgccaccaaccatcagagtcaggacaccacagcttcctatggaagtgtggacagccagggaatcttacctggaatggtgtggcaggaccgcgatgtctatcttcaaggtcccatttgggccaaaactcctcacacggacggacactttcatccttctccgctcatgggaggctttggactgaaacaccctcctccccagatcctgatcaaaaacacacctgtgccagcgaatcccgcgaccactttcactcctggaaagtttgcttcgttcattacccagtattccaccggacaggtcagcgtggaaatagagtgggagctgcagaaagaaaacagcaaacgctggaacccagaaattcagtacacctccaactacaacaagtcggtgaatgtggagtttaccgtggacgcaaacggtgtttattctgaaccccgccctattggcactcgttaccttacccggaacttgtaatttcctgttaatgaataaaccgatttatgcgtttcagttgaactttggtctctgcgaagggcgaattcgcggccgcta

SEQ ID NO: 4810 - protein, 735 aa, Adeno-associated virus
MAADGYLPDWLEDTLSEGIRQWWKLKPGPPPPKPNQQHRDDSRGLVLPGYKYLGPFNGLDKGEPVNEADAAALEHDKAYDHQLKQGDNPYLKYNHADAEFQERLQEDTSFGGNLGRAVFQAKKRVLEPLGLVEEAVKTAPGKKRPIEQSPAEPDSSSGIGESGQQPAKKRLNFGQTGDTESVPDPQPIGEPPAAPSGVGSNTMASGGGAPMADDNEGADGVGNSSGNWHCDSTWMGDRVITTSTRTWALPTYNNHLYKQISSESGATNDNHYFGYSTPWGYFDFNRFHCHFSPRDWQRLINNNWGFRPKKLNFKLFNIQVKEVTQNDGTTTIANNLTSTVQVFTDSEYQLPYVLGSAHQGCLPPFPADVFMIPQYGYLTLNNGSQAVGRSSFYCLEYFPSQMLRTGNNFTFSYTFEDVPFHSSYAHSQSLDRLMNPLIDQYLYYLSKTQGTSGTTQQSRLQFSQAGPSSMAQQAKNWLPGPSYRQQRMSKTANDNNNSEFAWTAATKYYLNGRNSLVNPGPPMASHKDDEEKYFPMHGNLIFGKQGTGTTNVDIESVLITDEEEIRTTNPVATEQYGQVATNHQSQDTTASYGSVDSQGILPGMVWQDRDVYLQGPIWAKTPHTDGHFHPSPLMGGFGLKHPPPQILIKNTPVPANPATTFTPGKFASFITQYSTGQVSVEIEWELQKENSKRWNPEIQYTSNYNKSVNVEFTVDANGVYSEPRPIGTRYLTRNL

SEQ ID NO: 4811 - DNA, 3113 bp, Adeno-associated virus
gaattcgccctttctacggctgcgtcaactggaccaatgaaaactttcccttcaacgattgcgtcgacaagatggtgatctggtgggaggagggaaagatgaccgccaaggtcgtggaatctgccaaagccattctgggtggaagcaaggttcgtgtggaccagaaatgcaagtcttcggcccagatcgacccgactccggtgattgtcacctctaacaccaacatgtgcgccgtgattgacggaaactcgaccaccttcgagcaccagcagccgttgcaagaccggatgttcaaatttgaacttacccgccgtttggatcatgactttgggaaggtcaccaagcaggaagtcaaagactttttccggtgggctcaagatcacgtgactgaggtggagcatgagttctacgtcaaaaagggtggagccaagaaaaggcccgcccccgatgatgtatatataaatgagcccaagcgggcgcgcgagtcagttgcgcagccatcgacgtcagacgcggaagcttcgataaactacgcggacaggtaccaaaacaaatgttctcgtcacgtgggcatgaatctgatgctgtttccctgtcgacaatgcgaaagaatgaatcagaattcaaatatctgcttcacacacgggcaaaaagactgtttggaatgctttcccgtgtcagaatctcaacccgttcctgtcgtcagaaaaacgtatcagaaactttgttacattcatcatatcatgggaaaagtaccagacgcctgcactgcctgcgacctggtaaatgtggacttggatgactgtatttctgagcaataaatgacttaaatcaggtatggctgctgacggttatcttccagattggctcgaggacactctctctgaaggaatcagacagtggtggaagctcaaacctggcccaccaccgccgaaacctaaccaacaacaccgggacgacagtaggggtcttgtgcttcctgggtacaagtacctcggacccttcaacggactcgacaaaggagagccggtcaacgaggcagacgccgcggccctcgagcacgacaaagcctacgaccaccagctcaagcaaggggacaacccgtacctcaaatacaaccacgcggacgctgaatttcaggagcgtcttcaagaagatacgtctttcgggggcaacctcgggcgagcagtcttccaggccaaaaagagggtactcgagcctcttggtctggttgaggaagctgttaagacggctcctggaaaaaagagacctatagagcagtctcctgcagaaccggactcttcctcgggcatcggcaaatcaggccagcagcccgctaagaaaagactcaattttggtcagactggcgacacagagtcagtcccagaccctcaaccaatcggagaaccccccgcagccccctctggtgtgggatctaatacaatggcttcaggcggtggggcaccaatggcagacaataacgaaggcgccgacggagtgggtaattcctcgggaaattggcattgcgattccacatggatgggcgacagagttatcaccaccagcacaagaacctgggccctccccacctacaataatcacctctacaagcaaatctccagcgaatcgggagccaccaacgacaaccactacttcggctacagcaccccctgggggtattttgactttaacagattccactgtcacttctcaccacgtgactggcagcgactcatcaataacaactggggatttagacccaagaaactcaatttcaagctcttcaacatccaagtcaaggaggtcacgcagaatgatggaaccacgaccatcgccaataaccttaccagcacggtgcaggtcttcacagactctgagtaccagctgccctacgtcctcggttcggctcaccagggctgccttccgccgttcccagcagacgtcttcatgattcctcagtacggctacttgactctgaacaatggcagccaagcggtaggacgttcttcattctactgtctagagtattttccctctcagatgctgaggacgggaaacaacttcaccttcagctacacttttgaagacgtgcctttccacagcagctacgcgcacagccagagtctggatcggctgatgaatcctctcattgaccagtacctgtattacctgagcaaaactcagggtacaagtggaacaacgcagcaatcgagactgcagttcaaccaagctgggcctagctccatggctcagcaggccaaaaactggctaccgggacccagctaccgacagcagcgaatgtctaagacggctaatgacaacaacaacagtgaatttgcttggactgcagccaccaaatattacccgaatggaagaaattctctggtcaatcccgggcccccaatggccagtcacaaggacgatgaggaaaagtatttccccatgcacggaaatctcatctttggaaaacaaggcacaggaactaccaatgtggacattgaatcagtgcttattacagacgaagaagaaatcagaacgactaatcctgtggctacagaacaatacggacaggttgccaccaaccgtcagagtcagaacaccacagcttcctatggaagtgtggacagccagggaatcttacctggaatggtgtggcaggaccgcgatgtctatcttcaaggtcccatttgggccaaaactcctcacacggacggacactttcatccttctccgctcatgggaggctttggactgaaacaccctcctccccagatcctgatcaaaaacacacctgtgccagcgaatcccgcgaccactttcactcctggaaagtttgcttcgttcattacccagtattccaccggacaggtcagcgtggaaatagagtgggagctgcagaaagaaaacagcaaacgctggaacccggaaattcagtacacctccaactacaacaagtcggtgaatgtggagtttaccgtggacgcaaacggtgtttattctgaaccccgccctattggcactcgttaccttacccggaacttgtaatttcctgttaatgaataaaccgatttatgcgtttcagttgaactttggtctctgcgaagggcgaattc

SEQ ID NO: 4812 - protein, 735 aa, Adeno-associated virus
MAADGYLPDWLEDTLSEGIRQWWKLKPGPPPPKPNQQHRDDSRGLVLPGYKYLGPFNGLDKGEPVNEADAAALEHDKAYDHQLKQGDNPYLKYNHADAEFQERLQEDTSFGGNLGRAVFQAKKRVLEPLGLVEEAVKTAPGKKRPIEQSPAEPDSSSGIGKSGQQPAKKRLNFGQTGDTESVPDPQPIGEPPAAPSGVGSNTMASGGGAPMADNNEGADGVGNSSGNWHCDSTWMGDRVITTSTRTWALPTYNNHLYKQISSESGATNDNHYFGYSTPWGYFDFNRFHCHFSPRDWQRLINNNWGFRPKKLNFKLFNIQVKEVTQNDGTTTIANNLTSTVQVFTDSEYQLPYVLGSAHQGCLPPFPADVFMIPQYGYLTLNNGSQAVGRSSFYCLEYFPSQMLRTGNNFTFSYTFEDVPFHSSYAHSQSLDRLMNPLIDQYLYYLSKTQGTSGTTQQSRLQFNQAGPSSMAQQAKNWLPGPSYRQQRMSKTANDNNNSEFAWTAATKYYPNGRNSLVNPGPPMASHKDDEEKYFPMHGNLIFGKQGTGTTNVDIESVLITDEEEIRTTNPVATEQYGQVATNRQSQNTTASYGSVDSQGILPGMVWQDRDVYLQGPIWAKTPHTDGHFHPSPLMGGFGLKHPPPQILIKNTPVPANPATTFTPGKFASFITQYSTGQVSVEIEWELQKENSKRWNPEIQYTSNYNKSVNVEFTVDANGVYSEPRPIGTRYLTRNL

SEQ ID NO: 4813 - DNA, 3122 bp, Adeno-associated virus
agcggccgcgaattcgccctttctacggctgcgtcaactggaccaatgaaaactttcccttcaacgattgcgtcgacaagatggtgatctggtgggaggagggaaagatgaccgccaaggtcgtggaatctgccaaagccattctgggtggaagcaaggttcgtgtggaccagaaatgcaggtcttcggcccagatcgacccgactccggtgattgtcacctctaacaccaacatgtgcgccgtgattgacggaaactcgaccaccttcgagcaccagcagccgttgcaagaccggatgttcaaatttgaacttacccgccgtttggatcatgactttgggaaggtcaccaagcaggaagtcaaagactttttccggtgggctcaagatcacgtgactgaggtggagcatgagttctacgtcaaaaagggtggagccaagaaaaggcccgcccccgatgatgtatatataaatgagcccaagcgggcgcgcgagtcagttgcgcagccatcgacgtcagacgcggaagcttcgataaactacgcggacaggtaccaaaacaaatgttctcgtcacgtgggcatgaatctgatgctgtttccctgtcgacaatgcgaaagaatgaatcagaattcaaatatctgcttcacacacgggcaaaaagactgtttggaatgctttcccgtgtcagaatctcaacccgtttctgtcgtcagaaaaacgtatcagaaactttgttacattcatcatatcatgggaaaagtaccagacgcctgcactgcctgcgacctggtaaatgtggacttggatgactgtatttctgagcaataaatgacttaaatcaggtatggctgctgacggttatcttccagattggctcgaggacactctctctgaaggaatcagacagtggtggaagctcaaacctggcccaccaccgccgaaacctaaccaacaacaccgggacgacagtaggggtcttgtgcttcctgggtacaagtacctcggacccttcaacggactcgacaaaggagagccggtcaacgaggcagacgccgcggccctcgagcacgacaaagcctacgaccaccagctcaagcaaggggacaacccgtacctcaaatacaaccacgcggacgctgaatttcaggagcgtcttcaagaagatacgtctttcgggggcaacctcgggcgagcagtcttccaggccaaaaagagggtactcgagcctcttggtctggttgaggaagctgttaagacggctcctggaaaaaagagacctatagagcagtctcctgcagaaccggactcttcctcgggcatcggcaaatcaggccagcagcccgctaagaaaagactcaattttggtcagactggcgacacagagtcagtcccagaccctcaaccaatcggagaaccccccgcagccccctctggtgtgggatctaatacaatggcttcaggcggtggggcaccaatggcagacaataacgaaggcgccgacggagtgggtaattcctcgggaaattggcattgcgattccacatggatgggcgacagagttatcaccaccagcacaagaacctgggccctccccacctacaataatcgcctctacaagcaaatctccagcgaatcgggagccaccaacgacaaccactacttcggctacagcaccccctgggggtattttgactttaacagattccactgtcacttctcaccacgtgactggcagcgactcatcaacaacaactggggatttagacccaagaaactcaatttcaagctcttcaacatccaagtcaaggaggtcacgcagaatgatggaaccacgaccatcgccaataaccttaccagcacggtgcaggtcttcacagactctgagtaccagctgccctacgtcctcggttcggctcaccagggctgccttccgccgttcccagcagacgtcttcatgattcctcagtacggctacttgactctgaacaatggcagccaagcggtaggacgttcttcattctactgtctagagtattttccctctcagatgctgaggacgggaaacaacttcaccttcagctacacttttgaagacgtgcctttccacagcagctacgcgcacagccagagtctggatcggctgatgaatcctctcattgaccagtacctgtattacctgagcaaaactcagggtacaagtggaacaacgcagcaatcgagactgcagttcagccaagctgggcctagctccatggctcagcaggccaaaaactggctaccgggacccagctaccgacagcagcgaatgtctaagacggctaatgacaacaacaacagtgaatttgcttggactgcagccaccaaatattacctgaatggaagaaattctctggtcaatcccgggcccccaatggccagtcacaaggacgatgaggaaaagtatttccccatgcacggaaatctcatctttggaaaacaaggcacaggaactaccaatgtggacattgaatcagtgcttattacagacgaagaagaaatcagaacaactaatcctgtggctacagaacaatacggacaggttgccaccaaccatcagagtcagaacaccacagcttcctatggaagtgtggacagccagggaatcttacctggaatggtgtggcaggaccgcgatgtctatcttcaaggtcccatttgggccaaaactcctcacacggacggacactttcatccttctccgctcatgggaggctttggactgaaacaccctcctccccagatcctgatcaaaaacacacctgtgccagcgaatcccgcgaccactttcactcctggaaagtttgcttcgttcattacccagtattccaccggacaggtcagcgtggaaatagagtgggagctgcagaaagaaaacagcaaacgctggaacccagaaattcagtacacctccaactacaacaagtcggtgaatgtggagtttaccgtggacgcaaacggtgtttattctgaaccccgccctattggcactcgttaccttacccggaacttgtaatttcctgttaatgaataaaccgatttatgcgtttcagttgaactttggtctctgcgaagggcgaattc

SEQ ID NO: 4814 - protein, 735 aa, Adeno-associated virus
MAADGYLPDWLEDTLSEGIRQWWKLKPGPPPPKPNQQHRDDSRGLVLPGYKYLGPFNGLDKGEPVNEADAAALEHDKAYDHQLKQGDNPYLKYNHADAEFQERLQEDTSFGGNLGRAVFQAKKRVLEPLGLVEEAVKTAPGKKRPIEQSPAEPDSSSGIGKSGQQPAKKRLNFGQTGDTESVPDPQPIGEPPAAPSGVGSNTMASGGGAPMADNNEGADGVGNSSGNWHCDSTWMGDRVITTSTRTWALPTYNNRLYKQISSESGATNDNHYFGYSTPWGYFDFNRFHCHFSPRDWQRLINNNWGFRPKKLNFKLFNIQVKEVTQNDGTTTIANNLTSTVQVFTDSEYQLPYVLGSAHQGCLPPFPADVFMIPQYGYLTLNNGSQAVGRSSFYCLEYFPSQMLRTGNNFTFSYTFEDVPFHSSYAHSQSLDRLMNPLIDQYLYYLSKTQGTSGTTQQSRLQFSQAGPSSMAQQAKNWLPGPSYRQQRMSKTANDNNNSEFAWTAATKYYLNGRNSLVNPGPPMASHKDDEEKYFPMHGNLIFGKQGTGTTNVDIESVLITDEEEIRTTNPVATEQYGQVATNHQSQNTTASYGSVDSQGILPGMVWQDRDVYLQGPIWAKTPHTDGHFHPSPLMGGFGLKHPPPQILIKNTPVPANPATTFTPGKFASFITQYSTGQVSVEIEWELQKENSKRWNPEIQYTSNYNKSVNVEFTVDANGVYSEPRPIGTRYLTRNL

SEQ ID NO: 4815 - protein, 733 aa, Adeno-associated virus
MAADGYLPDWLEDNLSEGIREWWDLKPGAPKPKANQQKQDDGRGLVLPGYKYLGPFNGLDKGEPVNAADAAALEHDKAYDQQLKAGDNPYLRYNHADAEFQERLQEDTSFGGNLGRAVFQAKKRVLEPLGLVEEGAKTAPGKKRPLESPQEPDSSSGIGKKGKQPAKKRLNFEEDTGAGDGPPEGSDTSAMSSDIEMRAAPGGNAVDAGQGSDGVGNASGDWHCDSTWSEGKVTTTSTRTWVLPTYNNHLYLRLGTTSNSNTYNGFSTPWGYFDFNRFHCHFSPRDWQRLINNNWGLRPKAMRVKIFNIQVKEVTTSNGETTVANNLTSTVQIFADSSYELPYVMDAGQEGSLSPFPNDVFMVPQYGYCGIVTGENQNQTDRNAFYCLEYFPSQMLRTGNNFEMAYNFGKVPFHSMYAYSQSPDRLMNPLLDQYLWHLQSTTSGETLNQGNAATTFGKIRSGDFAFYRKNWLPGPCVKQQRLSKTASQNYKIPASGGNALLKYDTHYTLNNRWSNIAPGPPMATAGPSDGDFSNAQLIFPGPSVTGNTTTSANNLLFTSEEEIAATNPRDTDMFGQIADNNQNATTAPITGNVTAMGVLPGMVWQNRDIYYQGPIWAKIPHADGHFHPSPLIGGFGLKHPPPQIFIKNTPVPANPATTFTAARVDSFITQYSTGQVAVQIEWEIEKERSKRWNPEVQFTSNYGNQSSMLWAPDTTGKYTEPRVIGSRYLTNHL

SEQ ID NO: 4816 - protein, 733 aa, Adeno-associated virus
MAADGYLPDWLEDNLSEGIREWWDLKPGAPKLKANQQKQDDGRGLVLPGYKYLGPFHGLDKGEPVNAADAAALEHDKAYDQQLKAGDNPYLRYNHADAEFQERLQEDTSFGGNLGRAVFQAKKRVLEPLGLVEEGAKTAPGKKRPLESPQEPDSSSGIGKKGKQPAKKRLNFEEDTGAGDGPPEGSDTSAMSSDIEMRAAPGGNAVDAGQGSDGVGNASGDWHCDSTWSEGKVTTTSTRTWVLPTYNNHLYLRLGTTSNSNTYNGFSTPWGYFDFNRFHCHFSPRDWQRLINNNWGLRPKAMRVKIFNIQVKEVTTSNGETTVANNLTSTVQIFADSSYELPYVMDAGQEGSLPPFPNDVFMVPQYGYCGIVTGENQNQTDRNAFYCLEYFPSQMLRTGNNFEMAYNFEKVPFHSMYAHSQSLDRLMNPLLDQYLWHLQSTTSGETLNQGNAATTFGKIRSGDFAFYRKNWLPGPCVKQQRFSKTASQNYKIPASGGNALLKYDTHYTLNNRWSNIAPGPPMATAGPSDGDFSNAQLIFPGPSVTGNTTTSANNLLFTSEGEIAATNPRDTDMFGQIADNNQNATTAPITGNVTAMGVLPGMVWQNRDIYYQGPIWAKIPHADGHFHPSPLIGGFGLKHPPPQIFIKNTPVPANPATTFTAARVDSFITQYSTGQVAVQIEWEIEKERSKRRNPEVQFTSNYGNQSSMLWAPDTTGKYTEPRVIGSRYLTNHL

SEQ ID NO: 4817 - protein, 733 aa, Adeno-associated virus
MAADGYLPDWLEDNLSEGIREWWDLKPGAPKPKANQQKQDDGRGLVLPGYEYLGPFNGLDKGEPVNAADAAALEHDKAYDQQLKAGDNPYLRYNHADAEFQERLQEDTSFGGNLGRAVFQAKKRVLEPLGLVEEGAKTAPGKKRPLESPQEPDSSSGIGKKGKQPAKKRLNFEEDTGAGDGPPEGSDTSAMSSDIEMRAAPGGNAVDAGQGSDGVGNASGDWHCDSTWSEGKVTTTSTRTWVLPTYNNHLYLRLGTTSNSNTYNGFSTPWGYFDFNRFHCHFSPRDWQRLINNNWGLRPKAMRVKIFNIQVKEVTTSNGETTVANNLTSTVQIFADSSYELPYVMDAGQEGSLPPFPNDVFMVPQYGYCGIVTGENQNQTDRNAFYCLEYFPSQMLRTGNNFETAYNFEKVPFHSMYAHSQSLDGLMNPLLDQYLWHLQSTTSGETLNQGNAATTFGKIRSGDFAFYRKNWLPGPCVKQQRFSKTASQNYKIPASGGNALLKYDTHYTLNNRWSNIAPGPPMATAGPSDGDFSNAQLIFPGPSVTGNTTTSANNLLFTSEEEIAATNPRDTDMFGQIADNNQNATTAPITGNVTAMGVLPGMVWQNRDIYYQGPIWAKIPHADGHFHPSPLIGGFGLKHPPPQIFIKNTPVPAYPATTFTAARVDSFITQYSTGQVAVQIEWEIEKERSKRWNPEVQFTSNCGNQSSMLWAPDTTGKYTEPRVIGSRYLTNHL

SEQ ID NO: 4818 - protein, 735 aa, Adeno-associated virus
MAADGYLPDWLEDTLSEGIRQWWKLKPGPPPPKPNQQHRDDSRGLVLPGYKYLGPFNGLDKGEPVNEADAAALEHDKAYDHQLKQGDNPYLKYNHADAEFQERLQEDTSFGGNLGRAVFQAKKRVLEPLGLVEEAVKTAPGKKRPIEQSPAEPDSSSGIGKSGQQPAKKRLNFGQTGDTESVPDPQPIGEPPAAPSGVGSNTMASGGGAPMADNNEGADGVGNSSGNWHCDSTWMGDRVITTSTRTWALPTYNNHLYKQISSESGATNDNHYFGYSTPWGYFDFNRFHCHFSPRDWQRLINNNWGFRPKKLNFKLFNIQVKEVTQNDGTTTIANNLTSTVQVFTDSEYQLPYVLGSAHQGCLPPFPADVFMIPQYGYLTLNNGSQAVGRSSFYCLEYFPSQMLRTGNNFTFSYTFEDVPFHSSYAHSQSLDRLMNPLIDQYLYYLSKTQGTSGTTQQSRLQFSQAGPSSMAQQAKNWLPGPSYRQQRMSKTANDNNNSEFAWTAATKYYLNGRNSLVNPGPPMASHKDDEEKYFPMHGNLIFGKQGTGTTNVDIESVLITDEEEIRTTNPVATEQYGQVATNHQSQNTTASYGSVDSQGILPGMVWQDRDVYLQGPIWAKIPHTDGHFHPSPLMGGFGLKHPPPQILIKNTPVPANPATTFTPGKFASFITQYSTGQVSVEIEWELQKENSKRWNPEIQYTSNYNKSVNVEFTVDANGVYSEPRPIGTRYLTRNL

SEQ ID NO: 4819 - DNA, 3127 bp, Adeno-associated virus
gcggccgcgaattcgcccttcgcagagaccaaagttcaactgaaacgaatcaaccggtttattgattaacatgcaattacagattacgggtgaggtaacgagtgccaatagggcgaggctcagagtaaacaccctggctgtcaacggcaaagtccacaccagtctgcttttcaaagttggaggtgtactgaatctccgggtcccagcgcttgctgttttccttctgcagctcccactcgatttccacgctgacttgtccggtgctgtactgtgtgatgaacgaagcaaacttggcaggagtaaacacctccggaggattagcgggaacgggagtgttcttgatcaggatctgaggaggcggatgtttaagtccaaagccgcccatcaaaggagacgggtgaaagttgccatccgtgtgaggaatcttggcccagatgggaccctgcaggtacacgtcccggttctgccagaccatgccaggtaaggctccctggttgttgacaacttgtgtctgggctgcagtattagccgcttgtaagttgctgctgactatcccgtattcttccgtggctacaggattagtaggacgaatttcttcttcatttgtcattaacacattttccaatgtagttttgttagttgctccagtttttccaaaaatcaggactccgctggatgggaaaaagcggtcctcgtcgtccttgtgagttgccatggcgacgccgggattaaccaacgagtttctgccgttcaggtgatatttggtggcaccagtccaagcaaagttgctgttgttgttttgatccagcgttttggagaccctttgttgccggaagcagggtccaggtaaccaattcttggcttgttcggccatagttgaaggcccgccctggtaaaactgcagttcccgattgccagctgtgcctcctgggtcactctgtgttctggccaggtagtacaagtactggtcgatgaggggattcatcagccggtccaggctctggctgtgtgcgtagctgctgtggaaaggcacgtcctcgaagctgtagctgaactcaaagttgttgcccgttctcagcatctgagaggggaagtactccaggcagtagaaggaggaacgtcccacagactgactgccattgttgagagtcaggtagccgtactgaggaatcatgaagacgtccgccgggaacggaggcaggcagccctggtgcgcagagccgaggacgtacggcagctggtattccgagtccgagaatacctgaatcgtgctggtaaggttattagcgatggtcgtaacgccgtcattcgtcgtgacctccttgacctggatgttgaagagcttgaaccgcagcttcttgggccggaatccccagttgttgttgatgagtcgctgccagtcacgtggtgagaagtggcagtggaatctgttaaagtcaaaatacccccagggggtgctgtagccgaagtaggtgttgtcgttggtactacctgcagtttcactggagatttgctcgtagaggtggttgttgtaggtgggcagggcccaggttcgggtgctggtggtaatgactctgtcgcccagccatgtggaatcgcaatgccaatttcctgaggcattacccactccgtcggcaccttcgttattgtctgccattggtgcgccaccgcctgcagccactgtaccagatcccacactagagggcgctgctggaggttctccgagaggttgagggtcggggactgactctgagtcgccagtctgaccgaaattgagtctctttctggcgggctgctggcccttcttgccgatgcccgtggaggagtcgggggaacgctgaggtgacggctctaccggtctcttctttgcaggagccgtcttagcgccttcctcaaccagaccgagaggttcgagaacccgcttcttggcctggaagactgctcgcccgaggttgcccccaaatgacgtatcttcttgcagacgctcctgaaactcggcgtcggcgtggttataccgcaggtacgggttgtcacccgcattgagctgctggtcgtaggccttgtcgtgctcgagggccgctgcgtccgccgcgttgacgggctcccccttgtcgagtccgttgaagggtccgaggtacttgtagccaggaagcaccagaccccggccgttgtcctgcttttgctggttggctttgggtttcggggctccaggtttcaggtcccaccactcgcgaatgccctcagagaggttgtcctcgagccaatctggaagataaccatcggcagccatacctgatttaaatcatttattgttcaaagatgcagtcatccaaatccacattgaccagatcgcaggcagtgcaagcgtctggcacctttcccatgatatgatgaatgtagcacagtttctgatacgcctttttgacgacagaaacgggtttagattctgacacgggaaagcactctaaacagtctttctgtccgtgagtgaagcagatatttgaattctgattcattctctcgcattgtctgcagggaaacagcatcagattcatgcccacgtgacgagaacatttgttttggtacctgtctgcgtagttgatcgaagcttccgcgtctgacgtcgatggctgcgcaactgactcgcgcacccgtttgggctcacttatatctgcgtcactgggggcgggtcttttcttggctccaccctttttgacgtagaattcatgctccacctcaaccacgtaatcctttgcccaccggaaaaagtctttgacttcctgcttggtgaccttcccaaagtcatgatccagacggcgggtgagttcaaatttgaacatccggtcttgcaacggctgctggtgttcgaaggtcgttgagttcccgtcgatcacggcgcacatgttggtgttggagatgacgatcgcgggagtcgggtctatctgggccgaggacttgcatttctggtccacgcgcaccttgcttcctccgagaatggctttggccgactccacgaccttggcggtcatcttcccctcctcccaccagatcaccatcttgtcgacacagtcgttgaagggaaagttctcattggtccagttgacgcagccgtagaaagggcgaattc

SEQ ID NO: 4820 - DNA, 3106 bp, Adeno-associated virus
gcggccgcgaattcgcccttcgcagagaccaaagttcaactgaaacgaatcaaccggtttattgattaacaagtaattacaggttacgggtgaggtaacgggtgccaatggggcgaggctcagtataaaccccttcgttgttgacagcaaattccacattattagacttggcataatttgaggtgtactgaatctctggattccagcgtttgctgttttctttctgcagttcccactcgatctccacgctgacctggccggtgctgtactgcgtgataaatgaggcaaacttggcaggagtaaacacctctggaggattagcaggtaccggggtgtttttgatgagaatttgaggaggcgggtgtttgagtccaaatccgcccatcaggggagacgggtgaaagttgccgtccgtgtgaggaattttggcccagatgggaccctgcaggcacacgtcccggttctgccagaccatgccgggcagagccccctggctgttgacagtctgtgtctggggtccggccgtagacgattgcaggttgctggagaccacaccgtattcttctgtagccacgggattggtggttttgatctcctcctcgctggtcattagcacgttttccagcgttgtcttgttggcagcccccgttttgccaaaaaccagcactccgttgatgggaaagaactggtcctcgtcgtccttgttggtggccatggctacgcccgggttggttaatgaatttctaccattcagatggtatttagtggccccggtccaggcaaagttactgttgttgttgctgtctatgttttttgacagtctctgctgccgataacagggtccgggcagccagttctttgattgctcggccatggtgttgggcccagcctgatggaactgcagctcccttgtggaccccgtagtgctctgggtccgggccaggtagtacaggtactggtcgatgaggggattcatcagccggtctaggctctggctgtgcacatagctgctgtggaaaggcacttcctcaaaggtgtagctgaattcaaagttattgcccgttctcagcatctgagaaggaaagtactccaggcagtagaaggaggaacgtcccacagactgactgccgttgtttagagtcagatatccgtactgaggaatcatgaacacgtccgcagggaacggagggaggcagccctggtgcgcagagccgaggacgtacggcagttggtactccgagtccgagaagacctgaatcgtgctggtaaggttattagcgatggtcgtaacgccgtcgttcgtcgtgacctccttgacctggatgttgaacaacttgaaccgcagctttctgggccggaatccccagttgttgttgatgagtcgctgccagtcacgtggtgagaagtggcagtggaatctgttgaagtcaaaatagccccagggggtgctgtagctgaagaagtggttgtcgttggtagccccgctctgacttgatatctgcttgtagaggtggttgttgtaggtgggcagggcccaggtgcgggtgctggtggtgatgactctgtcgcccagccatgtggaatcgcaatgccaatttccggaggcattacccactccgtcggcgccttcgttattgtctgccattggtgcgccaccgcctgcagccattgtaccagatcccagacctgagggcgcggcgggaggttctccgagaggttgggggtcgggcactgactctgagtcgccagtctgcccaaagttgagcttctttttagcgggctgctggcctttcttgccgatgcccgtggaggagtcgggggattctatgggtctcttctttccaggagccgtcttagcgacttcctcaaccagaccgagaggttcgagaacccgcttcttggcctggaagactgctcgcccgaggttgcccccaaaagacgtatcttcttgaagacgctcctgaaactcggcgtcggcgtggttgtacttgaggtacgggttgtccccctgctcgagctgcttgtcgtaggccttgtcgtgctcgagggccgcggcgtctgcctcgttgaccggctctcccttgtcgagtccgttgaagggtctgaggtacttgtagccaggaagcaccagaccccggccgtcgtcctgcttttgctggttggctttgggtttcggggctccaggtttcaagtcccaccactcgcgaatgccctcagagaggttgtcctcgagccaatctggaagataaccatcggcagccatacctggtttaagtcatttattgctcagaaacacagtcatccaggtccacgttgaccagatcgcaggccgagcaagcaatctcgggagcccgccccagcagatgatgaatggcacagagtttccgatacgtcctctttctgacgaccggttgagattctgacacgccggggaaacattctgaacagtctctggtcccgtgcgtgaagcaaatgttgaaattctgattcactctctcgcatgtcttgcagggaaacagcatctgaagcatgcccgcgtgacgagaacatttgttttggtacctgtcggcaaagtccaccggagctccttccgcgtctgacgtcgatggattcgcgactgaggggcaggcccgcttgggctcgcttttatccgcgtcatcgggggcgggtctcttgttggccccaccctttctgacgtagaacccatgcgccacctcggtcacgtgatcctgcgcccagcggaagaaccttttgacttcctgctttgtcaccttgccaaagttatgctccagacggcgggtgggttcaaatttgaacatccggtcctgcaacggctgctggtgctcgaaggtggcgctgttcccgtcaatcacggcgcacatgttggtgttggaggtgacggtcacgggggtggggtcgatctgggcggacgacttgcacttttggtccacgcgcaccttgctgccgccgagaatggccttggcggactccacgaccttggccgtcatcttgccctcctcccaccagatcaccatcttgtcggcgcaatcgttgaagggaaagttctcattggtccagttgacgcagccgtagaaagggcgaattc

SEQ ID NO: 4821 - DNA, 3102 bp, Adeno-associated virus
gcggccgcgaattcgcccttcgcagagaccaaagttcaactgaaacgaatcaaccggtttattgattaacaagtaattacaggttacgggtgaggtaacgggtgccaatggggcgaggctcagtataaaccccttcgttgttgacagcaaattccacattattagacttggcataatttgaggtgtactgaatctctggattccagcgtttgctgttttctttctgcagttcccactcgatctccacgctgacctggccggtgctgtactgcgtgataaatgaggcaaacttggcaggagtaaacacctctggaggattagcaggtaccggggtgtttttgatgagaatttgaggaggcgggtgtttgagtccaaatccgcccatcaggggagacgggtgaaagttgccgtccgtgtgaggaatttcggcccagatgggaccctgcaggtacacgtcccggttctgccagaccatgccgggcagagccccctggctgttgacagtctgtgtccggggtccggccgtagacgattgcaggttgctggagaccacaccgtattcttctgtagccacgggattggtggttttgatctcctcctcgctggtcattagcacgttttccagcgttgtcttgttggcagcccccgttttgccaaaaaccagcactccgttgatgggaaggaactggtcctcgtcgtccttgttggtggccatggctacgcccgggttggttaatgaatttctaccattcagatggtatttagtggccccggtccaggcaaagttactgttgttgttgctgtctatgttttttgacagtctctgctgccgataacagggtccgggcagccagttctttgattgctcggccacggtgttgggcccagcctgatggaactgcagctcccttgtggaccccgtagtgctctgggtccgggccaggtagtacaggtactggtcgatgaggggattcatcagccggtccaggctctggctgtgcgcatagctgctgtggaaaggcacttcctcaaaggtgtagctgaattcaaagttattgcccgttctcagcatctgagaaggaaagtactccaggcagcagaaggaggaacgtcccacagactgactgccgttgtttagagtcagatatccgtactgaggaatcatgaacacgtccgcagggaacggagggaggcagccctggtgcgcagagccgaggacgtacggcagttggtactccgagtccgagaagacctgaatcgtgctggtaaggttattagcgatggtcgtaacgccgtcgttcgtcgtgacctccttgacctggatgttgaacaacttgaaccgcagctttctgggccggaatccccagttgttgttgatgagtcgctgccagtcacgtggtgagaagtggcagtggaatctgttgaagtcaaaatagccccagggggtgctgtagccgaagaagtggttgtcgttggtagccccgctctgacttgatatctgcttgtagaggtggttgttgtaggtgggcagggcccaggtgcgggtgctggtggtgatgactctgtcgcccagccatgtggaatcgcaatgccaatttccggaggcattacccactccgtcggcgccttcgttattgtctgccattggtgcgccaccgcctgcagccattgtaccagatcccagacctgagggcgcggcgggaggttctccgagaggttgggggtcgggcactgactctgagtcgccagtctgcccaaagttgagcttctttttagcgggctgctggcctttcttgccgatgcccgtggaggagtcgggggattctatgggtctcttctttccggaagccgtcttagcgccttcctcaaccagaccgagaggttcgagaacccgcttcttggcctggaagactgctcgcccgaggttgcccccaaaagacgtatcttcttgaagacgctcctgaaactcggcgtcggcgtggttgtacttgaggtacgggttgtccccctgctcgagctgcttgtcgtaggccttgtcgtgctcgagggccgcggcgtctgcctcgttgaccggctctcccttgtcgagtccgttgaagggtccgaggtacttgtagccaggaagcaccagaccccggccgtcgtcctgcttttgctggttggctttgggtttcggggctccaggtttcaagtcccaccactcgcgaatgccctcagagaggttgtcctcgagccaatctggaagataaccatcggcagccatacctggtttaagtcatttattgctcagaaacacagtcatccaggtccacgttgaccagatcgcaggccgagcaagcaatctcgggagcccgccccagcagatgatgaatggcacagagtttccgatacgtcctctttctgacgaccggttgagattctgacacgccggggaaacattctgaacagtctctggtcccgtgcgtgaagcaaatgttgaaattctgattcattctctcgcatgtcttgcagggaaacagcatctgaagcatgcccgcgtgacgagaacatttgttttggtacctgtcggcaaagtccaccggagctccttccgcgtctgacgtcgatggatccgcgactgaggggcaagcccgcttgggctcgcttttatccgcgtcatcgggggcgggtctcttgttggctccaccctttctgacgtagaactcatgcgccacctcggtcacgtgatcctgcgcccagcggaagaactctttgacttcctgctttgtcaccttgccaaagtcatgctccagacggcgggtgagttcaaatttgaacatccggtcttgtaacggctgctggtgctcgaaggtggtgctgttcccgtcaatcacggcgcacatgttggtgttggaagtgacgatcacgggggtgggatcgatctgggcggacgacttgcacttttggtccacgcgcaccttgctgccgccgagaatggccttggcggactccacgaccttggccgtcatcttgccctcctcccaccagatcaccatcttgtcgacgcaatcgttgaagggaaagttctcattggtccagttgacgcagccgaagggcgaattc

SEQ ID NO: 4822 - protein, 728 aa, Adeno-associated virus
MAADGYLPDWLEDNLSEGIREWWDLKPGAPKPKANQQKQDDGRGLVLPGYRYLGPFNGLDKGEPVNEADAAALEHDKAYDKQLEQGDNPYLKYNHADAEFQERLQEDTSFGGNLGRAVFQAKKRVLEPLGLVEEGAKTAPGKKRPIESPDSSTGIGKNGQPPAKKKLNFGQTGDSESVPDPQPLGEPPAAPSGLGSGTMAAGGGAPMADNNEGADGVGNASGNWHCDSTWLGDRVITTSTRTWALPTYNNHLYKQISSQSGATNDNHFFGYSTPWGYFDFNRFHCHFSPRDWQRLINNNWGFRPRKLRFKLFNIQVKEVTTNDGVTTIANNLTSTIQVFSDSEYQLPYVLGSAHQGCLPPFPADVFMIPQYGYLTLNNGSQSVGRSSFYCLEYFPSQMLRTGNNFEFSYTFEEVPFHSSYAHSQSLDRLMNPLIDQYLYYLARTQSTTGSTRELQFHQAGPNTMAEQSKNWLPGPCYRQQRLSKNIDSNNNSNFAWTGATKYHLNGRNSLTNPGVAMATNKDDEDQFFPINGVLVFGKTGAANKTTLENVLMTSEEEIKTTNPVATEEYGVVSSNLQSSTAGPQTQTVNSQGALPGMVWQNRDVYLQGPIWAKIPHTDGNFHPSPLMGGFGLKHPPPQILIKNTPVPANPPEVFTPAKFASFITQYSTGQVSVEIEWELQKENSKRWNPEIQYTSNYAKSNNVEFAVNNEGVYTEPRPIGTRYLTRNL

SEQ ID NO: 4823 - DNA, 2187 bp, Adeno-associated virus
atggctgccgatggttatcttccagattggctcgagggcaacctctctgagggcattcgcgagtggtgggacttgaaacctggagccccgaaacccaaagccaaccagcaaaagcaggacgacggccggggtctggtgcttcctggctacaggtacctcggacccttcaacggactcgacaagggagagccggtcaacgaggcagacgccgcggccctcgagcacgacaaggcctacgacaagcagctcgagcagggggacaacccgtacctcaagtacaaccacgccgacgccgagtttcaggagcgtcttcaagaagatacgtcttttgggggcaacctcgggcgagcagtcttccaggccaagaagcgggttctcgaacctctcggtctggttgaggaaggcgctaagacggctcctggaaagaagagacccatagaatcccccgactcctccacgggcatcggcaagaacggccagccgcccgctaaaaagaagctcaactttgggcagactggcgactcagagtcagtgcccgacccccaacctctcggagaacctcccgccgcgccctcaggtctgggatctggtacaatggctgcaggcggtggcgcaccaatggcagacaataacgaaggcgccgacggagtgggtaatgcctccggaaattggcattgcgattccacatggctgggcgacagagtcatcaccaccagcacccgcacctgggccctgcccacctacaacaaccacctctacaagcagatatcaagtcagagcggggctaccaacgacaaccacttcttcggctacagcaccccctggggctattttgacttcaacagattccactgccacttctcaccacgtgactggcagcgactcatcaacaacaactggggattccggcccagaaagctgcggttcaagttgttcaacatccaggtcaaggaggtcacgacgaacgacggcgttacgaccatcgctaataaccttaccagcacgattcaggtcttctcggactcggagtaccaactgccgtacgtcctcggctctgcgcaccagggctgcctccctccgttccctgcggacgtgttcatgattcctcagtacggatatctgactctaaacaacggcagtcagtctgtgggacgttcctccttctactgcctggagtactttccttctcagatgctgagaacgggcgataactttgaattcagctacacctttgaggaagtgcctttccacagcagctatgcgcacagccagagcctggaccggctgatgaatcccctcatcgaccagtacctgtactacctggcccggacccagagcactacggggtccacaagggagctgcagttccatcaggctgggcccaacaccatggccgagcaatcaaagaactggctgcccggaccctgttatcggcagcagagactgtcaaaaaacatagacagcaacaacaacagtaactttgcctggaccggggccactaaataccatctgaatggtagaaattcattaaccaacccgggcgtagccatggccaccaacaaggacgacgaggaccagttctttcccatcaacggagtgctggtttttggcaaaacgggggctgccaacaagacaacgctggaaaacgtgctaatgaccagcgaggaggagatcaaaaccaccaatcccgtggctacagaagaatacggtgtggtctccagcaacctgcaatcgtctacggccggaccccagacacagactgtcaacagccagggggctctgcccggcatggtctggcagaaccgggacgtgtacctgcagggtcccatctgggccaaaattcctcacacggacggcaactttcacccgtctcccctgatgggcggatttggactcaaacacccgcctcctcaaattctcatcaaaaacaccccggtacctgctaatcctccagaggtgtttactcctgccaagtttgcctcatttatcacgcagtacagcaccggccaggtcagcgtggagatcgagtgggaactgcagaaagaaaacagcaaacgctggaatccagagattcagtacacctcaaattatgccaagtctaataatgtggaatttgctgtcaacaacgaaggggtttatactgagcctcgccccattggcacccgttacctcacccgtaacctgtaa

SEQ ID NO: 4824 - protein, 728 aa, Adeno-associated virus; identical to SEQ ID NO: 4803

SEQ ID NO: 4825 - DNA, 3106 bp, Adeno-associated virus
gcggccgcgaattcgcccttcgcagagaccaaagttcaactgaaacgaatcagccggtttattgattaacaagtaattacaggttacgggtgaggtaacgggtgccaatggggcgaggctcagtataaaccccttcgttgttgacagcaaattccacattattagacttggcataatttgaggtgtactgaatctctggattccagcgtttgctgttttctttctgcagttcccactcgatctccacgctgacctggccggtgctgtactgcgtgataaatgaggcaaacttggcaggagtaaacacctctggaggattagcaggtaccggggtgtttttgatgagaatttgaggaggcgggtgtttgagtccaaatccgcccatcaggggagacgggtgaaagttgccgtccgtgtgaggaattttggcccagatgggaccctgcaggtacacgtcccggttctgccagaccatgccgggcagagccccctggctgttgacagtctgtgtctggggtccggccgtagacgattgcaggttgctggagaccacaccgtattcttctgtagccacgggattggtggttttgatctcctcctcgctggtcattagcacgttttccagcgttgtcttgttggcagcccccgttttgccaaaaaccagcactccgttgatgggaaagaactggtcctcgtcgtccttgttggtggccatggctacgcccgggttggttaatgaatttctaccattcagatggtatttagtggccccggtccaggcaaagttactgttgttgttgctgtctatgttttttgacagtctctgctgccgataacagggtccgggcagccagttctttgattgctcggccatggtgttgggcccagcctgatggaactgcagctcccttgtggaccccgtagtgctctgggtccgggccaggtagtacaggtactggtcgatgaggggattcatcagccggtccaggctctggctgtgcgcatagctgctgtggaaaggcacttcctcaaaggtgtagctgaattcaaagttatcgcccgttctcagcatctgagaaggaaagtactccaggcagtagaaggaggaacgtcccacagactgactgccgttgtttagagtcagatatccgtactgaggaatcatgaacacgtccgcagggaacggagggaggcagccctggtgcgcagagccgaggacgtacggcagttggtactccgagtccgagaagacctgaatcgtgctggtaaggttattagcgatggtcgtaacgccgtcgttcgtcgtgacctccttgacctggatgttgaacaacttgaaccgcagctttctgggccggaatccccagttgttgttgatgagtcgctgccagtcacgtggtgagaagtggcagtggaatctgttgaagtcaaaatagccccagggggtgctgtagccgaagaagtggttgtcgttggtagccccgctctgacttgatatctgcttgtagaggtggttgttgtaggtgggcagggcccaggtgcgggtgctggtggtgatgactctgtcgcccagccatgtggaatcgcaatgccaatttccggaggcattacccactccgtcggcgccttcgttattgtctgccattggtgcgccaccgcctgcagccattgtaccagatcccagacctgagggcgcggcgggaggttctccgagaggttgggggtcgggcactgactctgagtcgccagtctgcccaaagttgagcttctttttagcgggcggctggccgttcttgccgatgcccgtggaggagtcgggggattctatgggtctcttctttccaggagccgtcttagcgccttcctcaaccagaccgagaggttcgagaacccgcttcttggcctggaagactgctcgcccgaggttgcccccaaaagacgtatcttcttgaagacgctcctgaaactcggcgtcggcgtggttgtacttgaggtacgggttgtccccctgctcgagctgcttgtcgtaggccttgtcgtgctcgagggccgcggcgtctgcctcgttgaccggctctcccttgtcgagtccgttgaagggtccgaggtacctgtagccaggaagcaccagaccccggccgtcgtcctgcttttgctggttggctttgggtttcggggctccaggtttcaagtcccaccactcgcgaatgccctcagagaggttgccctcgagccaatctggaagataaccatcggcagccatacctggtttaagtcatttattgctcagaaacacagtcatccaggtccacgttggccagatcgcaggccgagcaagcaatctcgggagcccgccccagcagatgatgaatggcacagagtttccgatacgtcctctttctgacgaccggttgagattctgacacgccggggaaacattctgaacagtctctggtcccgtgcgtgaagcaaatgttgaaattctgattcattctctcgcatgtcttgcaggggaacagcatctgaagcatgcccgcgtgacgagaacatttgttttggtacctgtcggcaaagtccaccggagctccttccgcgtctgacgtcgatggatccgcgactgaggggcaggcccgcttgggctcgcttttatccgcgtcatcgggggcgggtctcttgttggctccaccctttctgacgtagaactcatacgccacctcggtcacgtgatcctgcgcccagcggaagaactctttgacttcctgctttgtcaccttgccaaagtcatgctccagacggcgggtgagttcaaatttgaacatccggtcttgtaacggctgctggtgctcgaaggtggtgctgttcccgtcaatcacggcgcacatgttggtgttggaagtgacgatcacgggggtgggatcgatctgggcggacgacttgcacttttggtccacgcgcaccttgctgccgccgagaatggccttggcggactccacgaccttggccgtcatcctgccctcctcccaccagatcaccatcttgtcgacgcaatcgttgaagggaaagttctcattggtccagttgacgcagccgtagaaagggcgaattc

SEQ ID NO: 4826 - protein, 728 aa, Adeno-associated virus
MAADGYLPDWLEDNLSEGIREWWDLKPGAPKPKANQQKQDDGRGLVLPGYRYLGPFNGLDKGEPVNEADAAALEHDKAYDKQLEQGDNPYLKYNHADAEFQERLQEDTSFGGNLGRAVFQAKKRVLEPLGLVEEGAKTAPGKKRPIESPDSSTGIGKNGQPPAKKKLNFGQTGDSESVPDPQPLGEPPAAPSGLGSGTMAAGGGAPMADNNEGADGVGNASGNWHCDSTWLGDRVITTSTRTWALPTYNNHLYKQISSQSGATNDNHFFGYSTPWGYFDFNRFHCHFSPRDWQRLINNNWGFRPRKLRFKLFNIQVKEVTTNDGVTTIANNLTSTIQVFSDSEYQLPYVLGSAHQGCLPPFPADVFMIPQYGYLTLNNGSQSVGRSSFYCLEYFPSQMLRTGDNFEFSYTFEEVPFHSSYAHSQSLDRLMNPLIDQYLYYLARTQSTTGSTRELQFHQAGPNTMAEQSKNWLPGPCYRQQRLSKNIDSNNNSNFAWTGATKYHLNGRNSLTNPGVAMATNKDDEDQFFPINGVLVFGKTGAANKTTLENVLMTSEEEIKTTNPVATEEYGVVSSNLQSSTAGPQTQTVNSQGALPGMVWQNRDVYLQGPIWAKIPHTDGNFHPSPLMGGFGLKHPPPQILIKNTPVPANPPEVFTPAKFASFITQYSTGQVSVEIEWELQKENSKRWNPEIQYTSNYAKSNNVEFAVNNEGVYTEPRPIGTRYLTRNL

SEQ ID NO: 4827 - protein, 728 aa, Adeno-associated virus; identical to SEQ ID NO: 4822

SEQ ID NO: 4828 - protein, 728 aa, Adeno-associated virus
MAADGYLPDWLEDNLSEGIREWWDLKPGAPKPKANQQKQDDGRGLVLPGYKYLGPFNGLDKGEPVNEADAAALEHDKAYDKQLEQGDNPYLKYNHADAEFQERLQEDTSFGGNLGRAVFQAKKRVLEPLGLVEEGAKTAPGKKRPIESPDSSTGIGKNGQPPAKKKLNFGQTGDSESVPDPQPLGEPPAAPSGLGSGTMAAGGGAPMADNNEGADGVGNASGNWHCDSTWLGDRVITTSTRTWALPTYNNHLYKQISSQSGATNDNHFFGYSTPWGYFDFNRFHCHFSPRDWQRLINNNWGFRPRKLRFKLFNIQVKEVTTNDGVTTIANNLTSTIQVFSDSEYQLPYVLGSAHQGCLPPFPADVFMIPQYGYLTLNNGSQSVGRSSFYCLEYFPSQMLRTGNNFEFSYTFEEVPFHSSYAHSQSLDRLMNPLIDQYLYYLARTQSTTGSTRELQFHQAGPNTMAEQSKNWLPGPCYRQQRLSKNIDSNNNSNFAWTGATKYHLNGRNSLTNPGVAMATNKDDEDQFFPINGVLVFGKTGAANKTTLENVLMTSEEEIKTTNPVATEEYGVVSSNLQSSTAGPQTQTVNSQGALPGMVWQNRDVYLQGPIWAKIPHTDGNFHPSPLMGGFGLKHPPPQILIKNTPVPANPPEVFTPAKFASFITQYSTGQVSVEIEWELQKENSKRWNPEIQYTSNYAKSNNVEFAVNNEGVYTEPRPIGTRYLTRNL

SEQ ID NO: 4829 - protein, 728 aa, Adeno-associated virus
MAADGYLPDWLEDNLSEGIREWWDLKPGAPKPKANQQKQDDGRGLVLPGYKYLGPFNGLDKGEPVNEADAAALEHDKAYDKQLEQGDNPYLKYNHADAEFQERLQEDTSFGGNLGRAVFQAKKRVLEPLGLVEEGAKTAPGKKRPIESPDSSTGIGKKGQQPAKKKLNFGQTGDSESVPDPQPLGEPPAAPSGLGSGTMAAGGGAPMADNNEGADGVGNASGNWHCDSTWLGDRVITTSTRTWALPTYNNHLYKQISSQSGATNDNHFFGYSTPWGYFDFNRFHCHFSPRDWQRLINNNWGFRPRKLRFKLFNIQVKEVTTNDGVTTIANNLTSTIQVFSDSEYQLPYVLGSAHQGCLPPFPADVFMIPQYGYLTLNNGSQSVGRSSFYCLEYFPSQMLRTGNNFEFSYTFEEVPFHSSYAHSQSLDRLMNPLIDQYLYYLARTQSTTGSTRELQFHQAGPNTMAEQSKNWLPGPCYRQQRLSKNIDSNNNSNFAWTGATKYHLNGRNSLTNPGVAMATNKDDEDQFFPINGVLVFGKTGAANKTTLENVLMTSEEEIKTTNPVATEEYGVVSSNLQSSTAGPQTQTVNSQGALPGMVWQNRDVYLQGPIWAKIPHTDGNFHPSPLMGGFGLKHPPPQILIKNTPVPANPPEVFTPAKFASFITQYSTGQVSVEIEWELQKENSKRWNPEIQYTSNYAKSNNVEFAVNNEGVYTEPRPIGTRYLTRNL

SEQ ID NO: 4830 - DNA, 3098 bp, Adeno-associated virus
gaattcgcccttcgcagagaccaaagttcaactgaaacgaatcaaccggtttattgattaacaagtaattacaggttacgggtgaggtaacgggtgccaatggggcgaggctcagtataaaccccttcgttgttgacagcaaattccacattattagacttggcataatttgaggtgtactgaatctctggattccagcgtttgctgttttctttctgcagttcccactcgatctccacgctgacctggccggtgctgtactgcgtgataaatgaggcaaactaggcaggagtaaacacccctggaggattagcaggtaccggggtgtttttgatgagaatttgaggaggcgggtgtttgagtccaaatccgcccatcaggggagacgggtgaaagttgccgtccgtgtgaggaattttggcccagatgggaccctgcaggtacacgtcccggttctgccagaccatgccgggcagagccccctggctgttgacagtctgtgtctggggtccggccgtagacgattgcaggttgctggagaccacaccgtattcttctgtagccacgggattggtggttttgatctcctcctcgctggtcattagcacgttttccagcgttgtcttgttggcagcccccgttttgccaaaaaccagcactccgttgatgggaaagaactggccctcgtcgtccttgttggtggccatggctacgcccgggttggttaatgaatttctaccattcagatggtatttagtggccccggtccaggcaaagttactgttgttgttgctgtctatgttttttgacagtctctgctgccgataacagggtccgggcagccagttctttgattgctcggccatggtgttgggcccagcctgatggaactgcagctcccttgtggaccccgtagtgctctgggtccgggccaggtagtacaggtactggtcgatgaggggattcatcagccggtccaggctctggctgtgcgcatagctgctgtggaaaggcacttcctcaaaggtgtagctgaattcaaagttattgcccgttctcagcatctgagaaggaaagtactccaggcagtagaaggaggaacgtcccatagactgactgccgttgtttagagtcagatatccgtactgaggaatcatgaacacgtccgcagggaacggagggaggcagccctggtgcgcagagccgaggacgtacggcagttggtactccgagtccgagaagacctgaatcgtgctggtaaggttattagcgatggtcgtaacgccgtcgttcgtcgtgacctccttgacctggatgttgaacaacttgaaccgcagctttctgggccggaatccccagttgttgttgatgagtcgctgccagtcacgtggtgagaagtggcagtggaatctgttgaagtcaaaatagccccagggggtgctgtagccgaagaagtggttgtcgttggtagccccgctctgacttgatatctgcttgtagaggtggttgttgtaggtgggcagggcccaggtgcgggtgctggtggtgatgactctgtcgcccagccatgtggaatcgcaatgccaatttccggaggcattacccactccgtcggcgccttcgttattgtctgccattggtgcgccaccgcctgcagccattgtaccagatcccagacctgagggcgcggcgggaggttctccgagaggttgggggtcgggcactgactctgagtcgccagtctgcccaaagttgagcttctttttagcgggctgctggcctttcttgccgatgcccgtggaggagtcgggggattctatgggtctcttctttccaggagccgtcttagcgccttcctcaaccagaccgagaggttcgagaacccgcttcttggcctggaagactgctcgcccgaggttgcccccaaaagacgtatcttcttgaagacgctcctgaaactcagcgtcggcgtggttgtacttgaggtacgggttgtccccctgctcgagctgcttgtcgtaggccttgtcgtgctcgagggccgcggcgtctgcctcgttgaccggctctcccttgtcgagtccgttgaagggtccgaggtacttgtagccaggaagcaccagaccccggccgtcgtcctgcttttgctggttggctttgggtttcggggctccaggtttcaagtcccaccactcgcgaatgccctcagagaggttgtcctcgagccaatctggaagataaccatcggcagccatacctggtttaagtcatttattgctcagaaacacagtcatccaggtccacgttgaccagatcgcaggccgagcaagcaatctcgggagcccgccccagcagatgatgaatggcacagagtttccgatacgtcctctttctgacgaccggttgagattctgacacgccggggaaacattctgaacagtctctggtcccgtgcgtgaagcaaatgttgaaattctgattcattctctcgcatgtcttgcagggaaacagcatctgaagcatgcccgcgtgacgagaacatttgttttggtacctgtcggcaaagtccaccggagctccttccgcgtctgacgtcgatggatccgcgactgaggggcaggcccgcttgggctcgcttttatccgcgtcatcgggggcgggcctcttgttggctccaccctttctgacgtagaactcatgcgccacctcggtcacgtgatcctgcgcccagcggaagaactctttgacttcctgctttgtcaccttgccaaagtcctgctccagacggcgggtgagttcaaatttgaacatccggtcttgtaacggctgctggtgctcgaaggtggtgctgttcccgtcaatcacggcgcacatgttggtgttggaagtgacgatcacgggggtgggatcgatctgggcggacgacttgcacttttggtccacgcgcaccttgctgccgccgagaatggccttggcggactccacgaccttggccgtcatcttgccctcctcccaccagatcaccatcttgtcgacgcaatcgttgaagggaaagttctcattggtccagttgacgcagccgtagaaagggcgaattc

SEQ ID NO: 4831 - protein, 729 aa, Adeno-associated virus
MAADGYLPDWLEDNLSEGIREWWDLKPGAPKPKANQQKQDDGRGLVLPGYKYLGPFNGLDKGEPVNAADAAALEHDKAYDQQLKAGDNPYLRYNHADAEFQERLQEDTSFGGNLGRAVFQAKKRVLEPLGLVEEGAKTAPGKKRPIDSPDSSTGIGKKGQQPAKKKLNFGQTGDSESVPDPQPLGEPPAAPSSVGSGTMAAGGGAPMADNNEGADGVGNASGNWHCDSTWLGDRVITTSTRTWALPTYNNHLYKQISSSSSGATNDNHYFGYSTPWGYFDFNRFHCHFSPRDWQRLINNNWGFRPKKLRFKLFNIQVKEVTTNDGVTTIANNLTSTVQVFSDSEYQLPYVLGSAHQGCLPPFPADVFMIPQYGYLTLNNGSQSVGRSSFYCLEYFPSQMLRTGNNFEFSYSFEDVPFHSSYAHSQSLDRLMNPLIDQYLYYLARTQSTTGSTRELQFHQAGPNTMAEQSKNWLPGPCYRQQGLSKNLDFNNNSNFAWTAATKYHLNGRNSLTNPGIPMATNKDDEDQFFPINGVLVFGKTGAANKTTLENVLMTSEEEIKTTNPVATEEYGVVSSNLQPSTAGPQSQTINSQGALPGMVWQNRDVYLQGPIWAKIPHTDGNFHPSPLMGGFGLKHPPPQILIKNTPVPANPPEVFTPAKFASFITQYSTGQVSVEIEWELQKENSKRWNPEIQYTSNYAKSNNVEFAVNPDGVYTEPRPIGTRYLPRNL

SEQ ID NO: 4832 - protein, 1458 aa, Adeno-associated virus
MAADGYLPDWLEDNLSEGIREWWDLKPGAPKPKANQQKQDDGRGLVLPGYKYLGPFNGLDKGEPVNAADAAALEHDKAYDQQLKAGDNPYLRYNHADAEFQERLQEDTSFGGNLGRAVFQAKKRVLEPLGLVEEGAKTAPGKKRPIDSPDSSTGIGKKGQQPAKKKLNFGQTGDSESVPDPQPLGEPPAAPSSVGSGTMAAGGGAPTADNNEGADGVGNASGNWHCDSTWLGDRVITTSTRTWALPTYNNHLYKQISSSSSGATNDNHYFGYSTPWGYFDFNRFHCHFSPRDWQRLINNNWGFRPKKLRFKLFNIQVKEVTTNDGVTTIANNLTSTVQVFSDSEYQLPYVLGSAHQGCLPPFPADVFMIPQYGYLTLNNGSQSVGRSSFYCLEYFPSQMLRTGNNFEFSYSFEDVPFHSSYAHSQSLDRLMNPLIDQYLYYLARTQSTTGSTRELQFHQAGPNTMAEQSKNWLPGPCYRQQRLSKNLDFNNNSNFAWTAATKYHLNGRNSLTNPGIPMATNKDDEDQFFPINGVLVFGKTGAANKTTLENVLMTSEEEIKTTNPVATEEYGVVSSNLQSSTAGPQSQTINSQGALPGMVWQNRDVYLQGPIWAKIPHTDGNFHPSPLMGGFGLEHPPPQILIKNTPVPANPPEVFTPAKFASFITQYSTGQVSVEIEWELQKENSKRWNPEIQYTSNYAKSNNVEFAVNPDGVYTEPRPIGTRYLTRNLMAADGYLPDWLEDNLSEGIREWWDLKPGAPKPKANQQKQDDGRGLVLPGYKYLGPFNGLDKGEPVNAADAAALEHDKAYDQQLKAGDNPYLRYNHADAEFQERLQEDTSFGGNLGRAVFQAKKRVLEPLGLVEEGAKTAPGKKRPIGSPDSSTGIGKKGQQPAKKKLNFGQTGDSESVPDPQPLGEPPAAPSSVGSGTMAAGGGAPMADNNEGADGVGNASGNWHCDSTWLGDRVITTSTRTWALPTYNNHLYKQISSSSSGATNDNHYFGYSTPWGYFDFNRFHCHFSPRDWQRLINNNWGFRPKKLRFKLLNIQVKEVTTNDGVTTIANNLTSTVQVFSDSEYQLPYVLGSAHQGCLPPFPADVFMIPQYGYLTLDNGSQSVGRSSFYCLEYFPSQMLRTGNNFEFSYSFEDVPFHSSYAHSQSLDRLMNPLIDQYLYYLARTQSTTGSTRELQFHQAGPNTMAEQSKNWLPGPCYRQQRLSKNLDFNNNSNFAWTAATKYHLNGRNSLTNPGIPMATNKDDEDQFFPINGVLVFGKTGAANKTTLENVLMTSEEEIKTTNPVATEEYGVVSSNLQSSTAGPQSQTINSQGALPGMVWQNRDVYLQGPIWAKIPHTDGNFHPSPLMGGFGLKHPPPQILIKNTPVPANPPEVFTPAKFASFITQYSTGQVSVEIEWELQKENSKRWNPEIQYTSNYAKSNNVEFAVNPDGVYTEPRPIGTRYLTRNL

SEQ ID NO: 4833 - protein, 729 aa, Adeno-associated virus
MAADGYLPDWLEDNLSEGIREWWDLKPGAPKPKANQQKQDDGRGLVLPGYKYLGPFNGLDKGEPVNAADAAALEHDKAYDQQLKAGDNPYLRYNHADAEFQERLQEDTSFGGNLGRAVFQAKKRVLEPLGLVEEGAKTAPGKKRPIDSPDSSTGIGKKGQQPAKKKLNFGQTGDSESVPDPQPLGEPPAAPSSVGSGTMAAGGGAPTADNNEGADGVGNASGNWHCDSTWLGDRVITTSTRTWALPTYNNHLYKQISSSSSGATNDNHYFGYSTPWGYFDFNRFHCHFSPRDWQRLINNNWGFRPKKLRFKLFNIQVKEVTTNDGVTTIANNLTSTVQVFSDSEYQLPYVLGSAHQGCLPPFPADVFMIPQYGYLTLNNGSQSVGRSSFYCLEYFPSQMLRTGNNFEFSYSFEDVPFHSSYAHSQSLDRLMNPLIDQYLYYLARTQSTTGSTRELQFHQAGPNTMAEQSKNWLPGPCYRQQRLSKNLDFNNNSNFAWTAATKYHLNGRNSLTNPGIPMATNKDDEDQFFPINGVLVFGKTGAANKTTLENVLMTSEEEIKTTNPVATEEYGVVSSNLQSSTAGPQSQTINSQGALPGMVWQNRDVYLQGPIWAKIPHTDGNFHPSPLMGGFGLEHPPPQILIKNTPVPANPPEVFTPAKFASFITQYSTGQVSVEIEWELQKENSKRWNPEIQYTSNYAKSNNVEFAVNPDGVYTEPRPIGTRYLTRNL

SEQ ID NO: 4834 - DNA, 3075 bp, Adeno-associated virus
tgagaactttcctttcaacgattgcgtcggacaagatggtgatctggtgggaggaggggaagatgaccgccaaggtcgtggagtcggccaaagccattcttggaggaagcaaggtgcgtgtggaccagaaatgcaagtcctcggcccagatagacccgactcccgtgatcgtcacctccaacaccaacatgtgcgccgtgattgacgggaactcaacgaccttcgagcaccagcagccgttgcaagaccggatgttcaaatttgaacttacccgccgtctggatcatgactttggaaaggtcaccaagcaggaagtgaaagactttttccggtgggcaaaggatcacgtggttgaggtggagcatgaattctacgtcaaaaagggtggagctaagaaaagacccgcccccagtgacgcagatataagtgagcccaaacgggcgcgcgagtcagttgcgcagccatcaacgtcagacgcggaagcttcgatcaactacgcggacaggtaccaaaaacaaatgttctcgtcacgtgggcatgaatctgatgctgtttccctgcagacaatgcgagagaatgaatcagaattcaaatatctgcttcactcacggacagaaagactgtttagagtgctttcccgtgtcagaatctcaacccgtttctgtcgtcaaaaaggcgtatcagaaactgtgctacattcatcatatcatgggaaaggtgccagacgcttgcactgcctgcgatctggtcaatgtggatttggatgactgcatctctgaacaataaatgatttaaatcaggtatggctgccgatggttatcctccagattggctcgaggacactctctctgaagggataagacagtggtggaagctcaaacctggcccaccaccaccaaagcccgcagagcggcataaggacgacagcaggggtcttgtgcttcctgggtacaagtacctcggacccttcaacggactcgacaagggggagccggtcaacgaggcagacgccgcggccctcgagcacgacaaggcctacgaccggcagctcgacagcggagacaacccgtacctcaagtacaaccacgccgacgcagagtttcaggagcgccttaaagaagatacgtcttttgggggcaacctcggacgagcagtcttccaggcgaaaaagagggttcttgaacctctgggcctggttgaggaacctgttaagacggctccgggaaaaaagaggccggtagagcactctcctgtggagccagactcctcctcgggaaccggaaaagcgggccagcggcctgcaagaaaaagattaaattttggtcagactggagacgcagactccgtacctgacccccagcctctcggacagccaccagcagccccctctggtctgggatctactacaatggctacaggcagtggcgcaccaatggcagacaataacgagggtgccgatggagtgggtaattcctcaggaaattggcattgcgattcccaatggctgggcgacagagtcatcaccaccagcacccgaacctgggccctgcccacatacaacaaccacctctacaagcaaatctccagccaatcaggagccagcaacgacaaccactactttggctacagcaccccctgggggtattttgacttcaacagattccactgccacttttcaccacgtgactggcaaagactcatcaacaacaactggggattccggcccaaaagactcaacttcaagctctttaatattcaagtcaaagaggtcacgcagaatgacggtacgacgacgattgccaataaccttaccagcacggttcaggtgtttactgactcggagtaccagctcccgtacgtcctgggctcggcgcatcaaggatgcctcccgccgtttccagcggacgtcttcatggtcccacagtatggatacctcaccctgaacaacgggagtcaggcggtaggacgctcttccttttactgcctggagtactttccttctcagatgctgcgtactggaaacaactttcagttcagctacacttttgaagacgtgcctttccacagcagctacgctcacagccagagtctggatcggctgatgaatcctctgatcgaccagtacctgtattatctgaacaagacacaaacaaatagtggaactcttcagcagtctcggctactgtttagccaagctggaccaaccaacatgtctcttcaagctaaaaactggctgcctggaccttgctacagacagcagcgtctgtcaaaacaggcaaacgacaacaacaacagcaactttccctggactgcagctacaaagtatcatctaaatggccgggactcgttggttaatccaggaccagctatggccagtcacaaggatgacgaagaaaagtttttccccatgcatggaaccctgatatttggtaaacaaggaacaaatgccaacgacgcggatttggaaaatgtcatgattacagatgaagaagaaatcagggccaccaatcccgtggctacggagcagtacgggactgtgtcaaataatttgcaaaactcaaacactggtccaactactggaactgtcaatcgccaaggagcgttacctggtatggtgtggcaggatcgagacgtgtacctgcagggacccatttgggccaagattcctcacaccgatggacactttcatccttctccactgatgggaggttttggactcaaacacccgcctcctcagatcatgatcaaaaacactcccgttccagccaatcctcccacaaacttcagttctgccaagtttgcttctttcatcacacagtattccacgggacaggtcagcgtggagatcgagtgggagctgcagaaggagaacagcaaacgctggaatcccgaaattcagtacacttccaactacaacaagtctgttaatgtggactttactgtggacactaatggtgtgtattcagagcctcgccccattggcaccagatacctgactcgtaatctgtaattgcttgttaatcaataaaccgtttaattcgtttcagttgaactttggtctctgcgaagggcgaa

SEQ ID NO: 4835 - DNA, 3142 bp, Adeno-associated virus
aaaacgacgggccagtgattgtaatacgactcactatagggcgaaattgaaattagcggccgcgaattcgcctttcgcagagaccaaagttcaactgaaacgaattaaacggtttattgattaacaagcaattacagattacgagtcaggtatctggtgccaatggggcgaggctctgaatacacaccattagtgtccacagtaaagtccacattaacagacttgttgtagttggaagtgtactgaatttcgggattccagcgtttgctgttctccttctgcagctcccactcgatctccacgctgacctgtcccgtggaatactgtgtgatgaaagaagcaaacttggcagaactgaagtttgtgggaggattggctggaacgggagtgtttttgatcatgatctgaggaggcgggtgtttgagtccaaaacctcccatcagtggagaaggatgaaagtgtccatcggtgtgaggaatcttggcccaaatgggtccctgcaggtacacgtctcgatcctgccacaccataccaggtaacgctccttggtgattgacagttccagtagttggaccagtgtttgagttttgcaaattatttgacacagtcccgtactgctccgtagccacgggattggtggccctgatttcttcttcatctgtaatcatgacattttccaaatccgcgtcgttggcatttgttccttgtttaccaaatatcagggttccatgcatggggaaaaacttttcttcgtcatccttgtgactggccatagctggtcctggattaaccaacgagtcccggccatttagatgatactttgtagctgcagtccagggaaagttgctgttgttgttgtcgtttgcctgttttgacagacgctgctgtctgtagcaaggtccaggcagccagtttttagcttgaagagacatgttggttggtccagcttggctaaacagtagccgagactgctgaagagttccactatttgtttgtgtcttgttcagataatacaggtactggtcgatcagaggattcatcagccgatccagactctggctgtgagcgtagctgctgtggaaaggcacgtcttcaaaagtgtagctgaactgaaagttgtttccagtacgcagcatctgagaaggaaagtactccaggcagtaaaaggaagagcgtcctaccgcctgactcccgttgttcagggtgaggtatccatactgtgggaccatgaagacgtccgctggaaacggcgggaggcatccttgatgcgccgagcccaggacgtacgggagctggtactccgagtcagtaaacacctgaaccgtgctggtaaggttattggcaatcgtcgtcgtaccgtcattctgcgtgacctctttgacttgaatattaaagagcttgaagttgagtcttttgggccggaatccccggttgttgttgacgagtctttgccagtcacgtggtgaaaagtggcagtggaatctgttgaagtcaaaatacccccagggggtgctgtagccaaagtagtggttgtcgttgctggctcctgattggctggagatttgcttgtagaggtggttgttgtatgtgggcagggcccaggttcgggtgctggtggtgatgactctgtcgcccagccattgggaatcgcaatgccaatttcctgaggaattacccactccatcggcaccctcgttattgtctgccattggtgcgccactgcctgtagccattgtagtagatcccagaccagagggggctgctggtggctgtccgagaggctgggggtcaggtacggagtctgcgtctccagtctgaccaaaatttaatctttttcttgcaggctgctggcccgcttttccggttcccgaggaggagtctggctccacaggagagtgctctaccggcctcttttttcccggagccgtcttaacaggctcctcaaccaggcccagaggttcaagaaccctctttttcgcctggaagactgctcgtccgaggttgcccccaaaagacgtatcttctttaaggcgctcctgaaactctgcgtcggcgtggttgtacttgaggtacgggttgtctccgctgtcgagctgccggtcgtaggccttgtcgtgctcgagggccgcggcgtctgcctcgttgaccggctcccccttgtcgagtccgttgaagggtccgaggtacttgtacccaggaagcacaagacccctgctgtcgtccttatgccgctctgcgggctttggtggtggtgggccaggtttgagcttccaccactgtcttattccttcagagagagtgtcctcgagccaatctggaagataaccatcggcagccatacctgatttaaatcatttattgttcagagatgcagtcatccaaatccacattgaccagatcgcaggcagtgcaagcgtctggcacctttcccatgatatgatgaatgtagcacagtttctgatacgcctttttgacgacagaaacgggttgagattctgacacgggaaagcactctaaacagtctttctgtccgtgagtgaagcagatatttgaattctgattcattctctcgcattgtctgcagggaaacagcatcagattcatgcccacgtgacgagaacatttgttttggtacctgtccgcgtagttgatcgaagcttccgcgtctgacgtcgatggctgcgcaactgactcgcgcgcccgtttgggctcacttatatctgcgtcactgggggcgggtcttttcttagctccaccctttttgacgtagaattcatgctccacctcaaccacgtgatcctttgcccaccggaaaaagtctttcacttcctgcttggtgacctttccaaagtcatgatccagacggcgggtaagttcaaatttgaacatccggtcttgcaacggctgctggtgctcgaaggtcgttgagttcccgtcaatcacggcgcacatgttggtgttggaggtgacgatcacgggagtcgggtctatctgggccgaggacttgcatttctggtccacacgcaccttgcttcctccaagaatggctttggccgactccacgaccttggcggtcatcttcccctcctcccaccagatcaccatcttgtcgacgcaatggtaaaaggaaagttctcattgg

SEQ ID NO: 4836 - DNA, 2208 bp, Adeno-associated virus
atggctgccgatggttatcttccagattggctcgaggacactctctctgaaggaataagacagtggtggaagctcaaacctggcccaccaccaccaaagcccgcagagcggcataaggacgacagcaggggtcttgtgcttcctgggtacaagtacctcggacccttcaacggactcgacaagggggagccggtcaacgaggcagacgccgcggccctcgagcacgacaaggcctacgaccggcagctcgacagcggagacaacccgtacctcaagtacaaccacgccgacgcagagtttcaggagcgccttaaagaagatacgtcttttgggggcaacctcggacgagcagtcttccaggcgaaaaagagggttcttgaacctctgggcctggttgaggaacctgttaagacggctccgggaaaaaagaggccggtagagcactctcctgtggagccagactcctcctcgggaaccggaaaagcgggccagcagcctgcaagaaaaagattaaattttggtcagactggagacgcagactccgtacctgacccccagcctctcggacagccaccagcagccccctctggtctgggatctactacaatggctacaggcagtggcgcaccaatggcagacaataacgagggtgccgatggagtgggtaattcctcaggaaattggcattgcgattcccaatggctgggcgacagagtcatcaccaccagcacccgaacctgggccctgcccacatacaacaaccacctctacaagcaaatctccagccaatcaggagccagcaacgacaaccactactttggctacagcaccccctgggggtattttgacttcaacagattccactgccacttttcaccacgtgactggcaaagactcatcaacaacaactggggattccggcccaaaagactcaacttcaagctctttaatattcaagtcaaagaggtcacgcagaatggcggtacgacgacgattgccaataaccttaccagcacggttcaggtgtttactgactcggagtaccagctcccgtacgtcctgggctcggcgcatcaaggatgcctcccgccgtttccagcggacgtcttcatggtcccacagtatggatacctcaccctgaacaacgggagtcaggcggtaggacgctcttccttttactgcctggagtactttccttctcagatgctgcgtactggaaacaactttcagttcagctacacttttgaagacgtgcctttccacagcagctacgctcacagccagagtctggatcggctgatgaatcctctgatcgaccagtacctgtattatctgaacaagacacaaacaaatagtggaactcttcagcagtctcggctactgtttagccaagctggaccaaccaacatgtctcttcaagctaaaaactggctgcctggaccttgctacagacagcagcgtctgtcaaaacaggcaaacggcaacaacaacagcaactttccctggactgcagctacaaagtatcatctaaatggccgggactcgttggttaatccaggaccagctatggccagtcacaaggatgacgaagaaaagtttttccccatgcatggaaccctgatatttggtaaacaaggaacaaatgccaacgacgcggatttggaaaatgtcatgattacagatgaagaagaaatcagggccaccaatcccgtggctacggagcagtacgggactgtgtcaaataatttgcaaaactcaaacactggtccaactactggaactgtcaatcaccaaggagcgttacctggtatggtgtggcaggatcgagacgtgtacctgcagggacccatttgggccaagattcctcacaccgatggacactttcatccttctccactgacgggaggttttggactcaaacacccgcctcctcagatcatgatcaaaaacactcccgttccagccaatcctcccacaaacttcagttctgccaagtttgcttctttcatcacacagtattccacgggacaggtcagcgtggagatcgagtgggagctgcagaaggagaacagcaaacgctggaatcccgaaattcagtacacttccaactacaacaagtctgttaatgtggactttactgtggacactaatggtgtgtattcagagcctcgccccattggcaccagatacctgactcgtaatctgtaa

SEQ ID NO: 4837 - protein, 735 aa, Adeno-associated virus
MAADGYLPDWLEDTLSEGIRQWWKLKPGPPPPKPAERHKDDSRGLVLPGYKYLGPFNGLDKGEPVNEADAAALEHDKAYDRQLDSGDNPYLKYNHADAEFQERLKEDTSFGGNLGRAVFQAKKRVLEPLGLVEEPVKTAPGKKRPVEHSPVEPDSSSGTGKAGQQPARKRLNFGQTGDADSVPDPQPLGQPPAAPSGLGSTTMATGSGAPMADNNEGADGVGNSSGNWHCDSQWLGDRVITTSTRTWALPTYNNHLYKQISSQSGASNDNHYFGYSTPWGYFDFNRFHCHFSPRDWQRLINNNWGFRPKRLNFKLFNIQVKEVTQNGGTTTIANNLTSTVQVFTDSEYQLPYVLGSAHQGCLPPFPADVFMVPQYGYLTLNNGSQAVGRSSFYCLEYFPSQMLRTGNNFQFSYTFEDVPFHSSYAHSQSLDRLMNPLIDQYLYYLNKTQTNSGTLQQSRLLFSQAGPTNMSLQAKNWLPGPCYRQQRLSKQANGNNNSNFPWTAATKYHLNGRDSLVNPGPAMASHKDDEEKFFPMHGTLIFGKQGTNANDADLENVMITDEEEIRATNPVATEQYGTVSNNLQNSNTGPTTGTVNHQGALPGMVWQDRDVYLQGPIWAKIPHTDGHFHPSPLTGGFGLKHPPPQIMIKNTPVPANPPTNFSSAKFASFITQYSTGQVSVEIEWELQKENSKRWNPEIQYTSNYNKSVNVDFTVDTNGVYSEPRPIGTRYLTRNL

SEQ ID NO: 4838 - DNA, 2208 bp, Adeno-associated virus
atggctgccgatggttatcttccagattggctcgaggacactctctctgaaggaataagacagtggtggaagctcaaacctggcccaccaccaccaaagctcgcagagcggcatcaggacgacagcaggggtcttgtgcttcctgggtacaagtacctcggacccttcaacggactcgacaaaggagagccggtcaacgaggcagacgccgcggccctcgagcacgacaaggcctacgaccggcagctcgacagcggagacaacccgtacctcaagtacaaccacgccgacgcggagtttcaggagcgtcttaaagaagatacgtcttttgggggcaacctcggacgagcagtcttccaggcgaaaaagagggttcttgaacctctgggcctggttgaggaacctgttaagacggctccgggaaaaaagaggccggtagagcactctcctgtggagccagactcctcctcgggaaccggaaaggcgggccatcagcctgcgagaaagagattgaattttggtcagactggagacgcagactccgtacctgacccccagcctctcggacagccaccagcagcccccacaagtctgggatctactacaatggctacaggcagtggcgcaccaatggcagacaataacgagggtgccgatggagtgggtaattcctcaggaaattggcattgcgattcccaatggctgggcgacagagtcatcaccaccagcacccgaacctgggccctgcccacctacaacaaccacctctacaagcaaatctccagccaatcaggagcctcgaacgacaaccactactttggctacagcaccccctgggggtattttgacttcaacagattccactgtcacttctccccacgtgattggcaaagactcatcaacaacaactggggattccgacccaagagactcaacttcaagctctttaacattcaagtcaaagaggtcacgcagaatgacggtacgacgacgattgccaataaccttaccagcacggttcaggtgtttactgactcggagtaccagctcccgtacgtcctcggctcggcgcatcaaggatgcctcccgccgtttccagcggacgtcttcacggtcccacagtatggatacctcaccctgaacaacgggagtcaggcggtaggacgctcttccttttactgcctggagtactttccttctcagatgctgcgtactggaaacaaccttaccttcagctacacctttgaggacgttcctttccacagcagctacgctcacagccagagtttggaccggctgatgaatcctctgatcgaccagtatctatattatctgaacaggacacaatcaaatagtggaactcttcagcagtctaggctactgtttagccaagctggacccaccagcatgtctcttcaagctaaaaactggctgcctggaccttgctacagacagcagcgtctttcaaagcaggcaaacgacaacaacaacagcaactttccctggactgcggctacaaagtatcatctaaatggccgggactcgttggttaatccaggaccagctatggccagccacaaagacgatgaagaaaagtttttccccatgcatggaaccctgatatttggtaaacaaggaacaaatgctaacgacgcggatttggagcatgttatgattacagatgaagaagaaatcaggaccaccaatcctgtggctacagagcagtacggaaacgtgtcaaataatttgcaaaactcaaatactggtccaactacagaaaatgtcaatcaccagggagcgttacctggtatggtgtggcaggatcgagacgtgtacctgcagggacccatttgggccaagattcctcacaccgacggacactttcacccttctccactgatgggaggttttggactcaaacacccgcctcctcaaatcatgatcaaaaacactcccgttccagccaatcctcccacaaactacagttctgccaagtttgcttctttcatcacacagtattccacgggccaggtcagcgtggagattgagtgggagctgcggaaggagaacagcaaacgctggaaccccgagatccagtatacttccaactacaacaaatctgttaatgtggactttactgtggacactaatggtgtgtattcagagcctcgccccattggcaccagatacctgactcgtaatctgtaa

SEQ ID NO: 4839 - protein, 735 aa, Adeno-associated virus
MAADGYLPDWLEDTLSEGIRQWWKLKPGPPPPKLAERHQDDSRGLVLPGYKYLGPFNGLDKGEPVNEADAAALEHDKAYDRQLDSGDNPYLKYNHADAEFQERLKEDTSFGGNLGRAVFQAKKRVLEPLGLVEEPVKTAPGKKRPVEHSPVEPDSSSGTGKAGHQPARKRLNFGQTGDADSVPDPQPLGQPPAAPTSLGSTTMATGSGAPMADNNEGADGVGNSSGNWHCDSQWLGDRVITTSTRTWALPTYNNHLYKQISSQSGASNDNHYFGYSTPWGYFDFNRFHCHFSPRDWQRLINNNWGFRPKRLNFKLFNIQVKEVTQNDGTTTIANNLTSTVQVFTDSEYQLPYVLGSAHQGCLPPFPADVFTVPQYGYLTLNNGSQAVGRSSFYCLEYFPSQMLRTGNNLTFSYTFEDVPFHSSYAHSQSLDRLMNPLIDQYLYYLNRTQSNSGTLQQSRLLFSQAGPTSMSLQAKNWLPGPCYRQQRLSKQANDNNNSNFPWTAATKYHLNGRDSLVNPGPAMASHKDDEEKFFPMHGTLIFGKQGTNANDADLEHVMITDEEEIRTTNPVATEQYGNVSNNLQNSNTGPTTENVNHQGALPGMVWQDRDVYLQGPIWAKIPHTDGHFHPSPLMGGFGLKHPPPQIMIKNTPVPANPPTNYSSAKFASFITQYSTGQVSVEIEWELRKENSKRWNPEIQYTSNYNKSVNVDFTVDTNGVYSEPRPIGTRYLTRNL

SEQ ID NO: 4840 - DNA, 2208 bp, Adeno-associated virus
atggctgccgatggttatcttccagattggctcgaggacactctctctgaaggaataagacagtggtggaagctcaaacctggcccaccaccaccaaagcccgcagagcggcatcaggacgacagcaggggtcttgtgcttcctgggtacaagtacctcggacccttcaacggactcgacaaaggagagccggtcaacgaggcagacgccgcggccctcgagcacgacaaggcctacgaccggcagctcgacagcggagacaacccgtacctcaagtacaaccacgccgacgcggagtttcaggagcgtcttaaagaagatacgtcttttgggggcaacctcggacgagcagtcttccaggcgaaaaagagggttcttgaacctctgggcctggttgaggaacctgttaagacggctccgggaaaaaagaggccggtagagcactctcctgtggagccagactcctcctcgggaaccggaaaagcgggccatcagcctgcgagaaagagattgaattttggtcagactggagacgcagactccgtacctgacccccagcctctcggacagccaccagcagcccccacaagtttgggatctactacaatggctacaggcagtggcgcaccaatggcagacaataacgagggtgccgatggagtgggtaattcctcaggaaattggcattgcgattcccaatggctgggcgacagagtcatcaccaccagcacccgaacctgggccctgcccacctacaacaaccacctctacaagcaaatctccagccaatcaggagcctcgaacgacaaccactactttggctacagcaccccctgggggtattttgacttcaacagattccactgtcacttctccccacgtgattggcaaagactcatcaacaacaactggggattccgacccaagagactcaacttcaagctctttaacattcaagtcaaggaggtcacgcagaatgacggtacgacgacgattgccaataaccttaccagcacggttcaggtgtttactgactcggagtaccagctcccgtacgtcctcggctcggcgcatcaaggatgcctcccgccgtttccagcggacgtcttcatggtcccacagtatggatacctcaccctgaacaacgggagtcaggcggtaggacgctcttccttttactgcctggagtactttccttctcagatgctgcgtactggaaacaactttaccttcagctacacctttgaggacgttcctttccacagcagctacgctcacagccagagtttggaccggctgatgaatcctctgatcgaccagtatctatattatctgaacaggacacaatcaaatagtggaactcttcagcagtctaggctactgtttagccaagctggacccaccagcatgtctcttcaagctaaaaactggctgcctggaccttgctacagacagcagcgtctttcaaagcaggcaaacgacaacaacaacagcaactttccctggactgcggctacaaagtatcgtctaaatggccgggactcgttggttaatccaggaccagctatggccagccacaaagacgatgaagaaaagtttttccccatgcatggaaccctgatatttggtaaacaaggaacaaatgctaacgacgcggatttggagcatgttatgattacagatgaagaagaaatcaggaccaccaatcctgtggctacagagcagtacggaaacgtgtcaaataatttgcaaaactcaaatactggtccaactacagaaaatgtcaatcaccagggagcgttacctggtatggtgtggcaggatcgagacgtgtacctgcagggacccatttgggccaagattcctcacaccgacggacactttcacccttctccactgatgggaggttttggactcaaacacccgcctcctcaaatcatgatcaaaaacactcccgttccagccaatcctcccacaaacttcagttctgccaagtttgcttctttcatcacacagtattccacgggccaggtcagcgtggagattgagtgggagctgcagaaggagaacagcaaacgctggaaccccgagatccagtatacttccaactacaacaaatctgttaatgtggactttactgtggacactaatggtgtgtattcagagcctcgccccattggcaccagatacctgactcgtaatctgtaa

SEQ ID NO: 4841 - protein, 735 aa, Adeno-associated virus
MAADGYLPDWLEDTLSEGIRQWWKLKPGPPPPKPAERHQDDSRGLVLPGYKYLGPFNGLDKGEPVNEADAAALEHDKAYDRQLDSGDNPYLKYNHADAEFQERLKEDTSFGGNLGRAVFQAKKRVLEPLGLVEEPVKTAPGKKRPVEHSPVEPDSSSGTGKAGHQPARKRLNFGQTGDADSVPDPQPLGQPPAAPTSLGSTTMATGSGAPMADNNEGADGVGNSSGNWHCDSQWLGDRVITTSTRTWALPTYNNHLYKQISSQSGASNDNHYFGYSTPWGYFDFNRFHCHFSPRDWQRLINNNWGFRPKRLNFKLFNIQVKEVTQNDGTTTIANNLTSTVQVFTDSEYQLPYVLGSAHQGCLPPFPADVFMVPQYGYLTLNNGSQAVGRSSFYCLEYFPSQMLRTGNNFTFSYTFEDVPFHSSYAHSQSLDRLMNPLIDQYLYYLNRTQSNSGTLQQSRLLFSQAGPTSMSLQAKNWLPGPCYRQQRLSKQANDNNNSNFPWTAATKYRLNGRDSLVNPGPAMASHKDDEEKFFPMHGTLIFGKQGTNANDADLEHVMITDEEEIRTTNPVATEQYGNVSNNLQNSNTGPTTENVNHQGALPGMVWQDRDVYLQGPIWAKIPHTDGHFHPSPLMGGFGLKHPPPQIMIKNTPVPANPPTNFSSAKFASFITQYSTGQVSVEIEWELQKENSKRWNPEIQYTSNYNKSVNVDFTVDTNGVYSEPRPIGTRYLTRNL

SEQ ID NO: 4842 - DNA, 2208 bp, Adeno-associated virus
atggctgccgatggttatcttccagattggctcgaggacactctctctgaaggaataagacagtggtggaagctcaaacctggcccaccaccaccaaagcccgcagagcggcatcaggacgacagcaggggtcttgtgcttcctgggtacaagtacctcggacccttcaacggactcgacaaaggagagccggtcaacgaggcagacgccgcggccctcgagcacgacaaggcctacgaccggcagctcgacagcggagacaacccgtacctcaagtacaaccacgccgacgcggagtttcaggagcgtcttaaagaagatacgtcttttgggggcaacctcggacgagcagtcttccaggcgaaaaagagggttcttgaacctctgggcctggttgaggaacctgttaagacggctccgggaaaaaagaggccggtagagcactctcctgtggagccagactcctcctcgggaaccggaaaagcgggccatcagcctgcgagaaagagattgaattttggtcagactggagacgcagactccgtacctgacccccagcctctcggacagccaccagcagcccccacaagtttgggatctactacaatggctacaggcagtggcgcaccaatggcagacaataacgagggtgccgatggagtgggtaattcctcaggaaattggcattgcgattcccaatggctgggcgacagagtcatcaccaccagcacccgaacctgggccctgcccacctacaacaaccacctctacaagcaaatctccagccaatcaggagcctcgaacgacaaccactactttggctacagcaccccctgggggtattttgacttcaacagattccactgtcacttctccccacgtgattggcaaagactcatcaacaacaactggggattccgacccaagagactcaacttcaagctctttaacattcaagtcaaagaggtcacgcagaatgacggtacgacgacgattgccaataaccttaccagcacggttcaggtgtttactgactcggagtaccagctcccgtacgtcctcggctcggcgcatcaaggatgcctcccgccgtttccagcggacgtcttcatggtcccacagtatggatacctcaccctgaacaacgggagtcaggcggtaggacgcccttccttttactgcctggagtactttccttctcagatgctgcgtactggaaacaactttaccttcagctacacctttgaggacgttcctttccacagcagctacgctcacagccagagtttggaccggctgatgaatcctctgatcgaccagtatctatattatctgaacaggacacaatcaaatagtggaactcttcagcagtctaggctactgtttagccaagctggacccaccagcatgtctcttcaagctaaaaactggctgcctggaccttgctacagacagcagcgtctttcaaagcaggcaaacgacaacaacaacagcaactttccctggactgcggctacaaagtatcatctaaatggccgggactcgttggttaatccaggaccagctatggccagccacaaagacgatgaagaaaagtttttccccatgcatgggaccctgatatttggtaaacaaggaacaaatgctaacgacgcggatttggagcatgttatgattacagatgaagaagaaatcaggaccaccaatcctgtggctacagagcagtacggaaacgtgtcaaataatttgcaaaactcaaatactggtccaactacagaaaatgtcaatcaccagggagcgttacctggtatggtgtggcaggatcgagacgtgtacctgcagggacccatttgggccaagattcctcacaccgacggacactttcacccttctccactgatgggaggttttggactcaaacacccgcctcctcaaatcatgatcaaaaacactcccgttccagccaatcctcccacaaacttcagttctgccaagtttgcttctttcatcacacagtattccacgggccaggtcagcgtggagattgagtgggagctgcagaaggagaacagcaaacgctggaaccccgagatccagtatacttccaactacaacaaatctgttaatgtggactttactgtggacactaatggtgtgtattcagagcctcgccccattggcaccagatacctgactcgtaatctgtaa

SEQ ID NO: 4843 - protein, 735 aa, Adeno-associated virus
MAADGYLPDWLEDTLSEGIRQWWKLKPGPPPPKPAERHQDDSRGLVLPGYKYLGPFNGLDKGEPVNEADAAALEHDKAYDRQLDSGDNPYLKYNHADAEFQERLKEDTSFGGNLGRAVFQAKKRVLEPLGLVEEPVKTAPGKKRPVEHSPVEPDSSSGTGKAGHQPARKRLNFGQTGDADSVPDPQPLGQPPAAPTSLGSTTMATGSGAPMADNNEGADGVGNSSGNWHCDSQWLGDRVITTSTRTWALPTYNNHLYKQISSQSGASNDNHYFGYSTPWGYFDFNRFHCHFSPRDWQRLINNNWGFRPKRLNFKLFNIQVKEVTQNDGTTTIANNLTSTVQVFTDSEYQLPYVLGSAHQGCLPPFPADVFMVPQYGYLTLNNGSQAVGRPSFYCLEYFPSQMLRTGNNFTFSYTFEDVPFHSSYAHSQSLDRLMNPLIDQYLYYLNRTQSNSGTLQQSRLLFSQAGPTSMSLQAKNWLPGPCYRQQRLSKQANDNNNSNFPWTAATKYHLNGRDSLVNPGPAMASHKDDEEKFFPMHGTLIFGKQGTNANDADLEHVMITDEEEIRTTNPVATEQYGNVSNNLQNSNTGPTTENVNHQGALPGMVWQDRDVYLQGPIWAKIPHTDGHFHPSPLMGGFGLKHPPPQIMIKNTPVPANPPTNFSSAKFASFITQYSTGQVSVEIEWELQKENSKRWNPEIQYTSNYNKSVNVDFTVDTNGVYSEPRPIGTRYLTRNL

SEQ ID NO: 4844 - DNA, 2208 bp, Adeno-associated virus
atggctgccgatggttatcttccagattggctcgaggacactctctctgaaggaataagacagtggtggaagctcaaacctggcccaccaccaccaaagcccgcagagcggcataaggacgacagcaggggtcttgtgcttcctgggtacaagtacctcggacccttcaacggactcgacaagggagagccggtcaacgaggcagacgccgcggccctcgagcacgacaaggcctacgaccggcagctcgacagcggagacaacccgtacctcaagtacaaccacgccgacgcggagtttcaggagcgccttaaagaagatacgtcttttgggggcaacctcggacgagcagtcttccaggcaaaaaagagggttcttgaacctctgggcctggttgaggagcctgttaaaacggctccgggaaaaaagaggccggtagagcactctcctgcggagccagactcctcctcgggaaccggaaaagcgggccagcagcctgcaagaaaaagattgaatttcggtcagactggagacgcagactccgtacctgacccccagcctctcggacagccaccagcagccccctctggtctgggaactaatacgatggcttcaggcagtggcgcaccaatggcagacaataacgagggcgccgacggagtgggtaattcctcgggaaattggcattgcgattccacatggatgggcgacagagtcatcaccaccagcacccgaacttgggccctgcccacctacaacaaccatctctacaagcaaatctccagccaatcaggagccagcaacgacaaccactactttggctacagcaccccttgggggtattttgacttcaacagattccactgccacttttcaccacgtgactggcaaagactcatcaacaacaactggggattccggcccaagagactcaacttcaagctctttaacattcaagtcaaagaggtcacgcagaatgacggtacgacgacgattgccaataaccttaccagcacggttcaggtgtttactgactcggagtaccagctcccgtacgtcctcggctcggcgcatcaaggatgcctcccgccgttcccagcagacgtcttcatggtgccacagtatggatacctcaccctgaacaacgggagtcaggcagtaggacgctcttcattttactgcctggagtactttccttctcagatgctgcgtaccggaaacaactttaccttcagctacacctttgaggacgttcctttccacagcagctacgctcacagccagagtttggaccgtctcatgaatcctctcatcgaccagtacctgtattacttgagcagaacaaacactccaagcggaaccaccacgcagtccaggcttcagttttctcaggccggagcaagtgacattcgggaccagtctaggaactggcttcctggaccctgttaccgccagcagcgagtatcaaagacatctgcggataacaacaacagtgaatactcgtggactggagctaccaagtaccacctcaatggcagagactctctggtgaatccgggcccggccatggccagccacaaggacgatgaagaaaagttttttcctcagagcggggttctcatctttgggaagcaaggctcagagaaaacaaatgtggacattgaaaaggtcatgattacagacgaagaggaaatcaggaccaccaatcccgtggctacggagcagtatggttctgtatctaccaacctgcagggcggcaacacacaagcagctaccgcagatgtcaacacacaaggcgttcttccaggcatggtctggcaggacagagacgtgtacctgcaggggcccatctgggcaaagattccacacacggacggacattttcacccctctcccctcatgggcggattcggacttaaacaccctcctccacagattctcatcaagaacaccccggtacctgcgaatccttcgaccaccttcagtgcggcaaagtttgcttctttcatcacacagtattccacggggcaggtcagcgtggagatcgagtgggagctgcagaaggagaacagcaaacgctggaatcccgagatccagtacacttccaactacaacaaatctgttaatgtggactttactgttgacactaatggcgtgtattcagagcctcgccccattggcaccagatacctgactcgtaatctgtaa

SEQ ID NO: 4845 - protein, 735 aa, Adeno-associated virus
MAADGYLPDWLEDTLSEGIRQWWKLKPGPPPPKPAERHKDDSRGLVLPGYKYLGPFNGLDKGEPVNEADAAALEHDKAYDRQLDSGDNPYLKYNHADAEFQERLKEDTSFGGNLGRAVFQAKKRVLEPLGLVEEPVKTAPGKKRPVEHSPAEPDSSSGTGKAGQQPARKRLNFGQTGDADSVPDPQPLGQPPAAPSGLGTNTMASGSGAPMADNNEGADGVGNSSGNWHCDSTWMGDRVITTSTRTWALPTYNNHLYKQISSQSGASNDNHYFGYSTPWGYFDFNRFHCHFSPRDWQRLINNNWGFRPKRLNFKLFNIQVKEVTQNDGTTTIANNLTSTVQVFTDSEYQLPYVLGSAHQGCLPPFPADVFMVPQYGYLTLNNGSQAVGRSSFYCLEYFPSQMLRTGNNFTFSYTFEDVPFHSSYAHSQSLDRLMNPLIDQYLYYLSRTNTPSGTTTQSRLQFSQAGASDIRDQSRNWLPGPCYRQQRVSKTSADNNNSEYSWTGATKYHLNGRDSLVNPGPAMASHKDDEEKFFPQSGVLIFGKQGSEKTNVDIEKVMITDEEEIRTTNPVATEQYGSVSTNLQGGNTQAATADVNTQGVLPGMVWQDRDVYLQGPIWAKIPHTDGHFHPSPLMGGFGLKHPPPQILIKNTPVPANPSTTFSAAKFASFITQYSTGQVSVEIEWELQKENSKRWNPEIQYTSNYNKSVNVDFTVDTNGVYSEPRPIGTRYLTRNL

SEQ ID NO: 4846 - DNA, 3161 bp, Adeno-associated virus
gattgaatttagcggccgcgaattcgcccttgctgcgtcaactggaccaatgagaactttccattcaatgattgcgtcgacaagatggtgatctggtgggaggagggaaagatgaccgccaaggtcatggagtcggccaaagccattctcggaggaagcaaggtgcgcgtggaccagaaatgtaagtcctcggcccagatagacccgactcccgtgattgtcacctccaacaccaacatgtgcgccgtgattgacgggaactcaacgaccttcgagcaccagcagccgttgcaagaccggatgttcaaatttgaactcacccgccgtctggatcatgactttgggaaggtcaccaagcaggaagtcaaagactttttccggtgggcaaaggatcacgtggttgaggtggagcatgaattctacgtcaaaaagggtggagccaagaaaagacccgcccccagtgacgcagatataagtgagcccaaacgggcgcgcgggtcagttgcgcagccatcgacgtcagacgcggaagcttcgatcaactacgcggacaggtaccaaaacaaatgttctcgtcacgtgggcatgaatctgatgctgtttccctgcagacaatgcgagagaatgaatcaaaattcaaatatctgcttcactcacggacagaaggactgtttagagtgctttcccgtgtcagaatctcaacccgtttctgtcgtcaaaaaggcgtatcagaaactttgctacattcatcatatcatgggaaaggtgccagacgcttgcactgcctgcgatctggtcaatgtggatttggatgactgcatctctgaacaataaatgatttaaatcaggtatggctgccgatggttatcttccagattggctcaaggacactctctctgaaggaataagacagtggtggaagctcaaacctggcccaccaccaccaaagcccgcagagcggcataaggacgacagcgggggtcttgtgcttcctgggtacaagtacctcggacccttcaacggactcgacaagggagagccggtcaacgaggcagacgccgcggccctcgagtacgacaaggcctacgaccggcagctcgacagcggagacaacccgtacctcaagtacaaccacgccgacgcggagtttcaggagcgccttaaagaagatacgtcttttgggggcaacctcggacgagcagtcttccaggcgaaaaagagggttcttgaacctctgggcctggttgaggaacctgttaagacggctccgggaaaaaagaggccggtagagcactctcctgtggagccagactcctcctcgggaacaggaaaagcgggccagcagcctgcgagaaagagattgaattttggtcagactggagacgcagactccgtacctgacccccagcctctcggacagccaccagcagccccctctggtctgggaactaatacgatggctacaggcagtggcgcaccaatggcagacaataacgagggcgccgacggagtgggtaattcctcgggaagttggcattgcgattccacatggatgggcgacagagtcatcaccaccagcacccgaacctgggctctgcccacctacaacaaccatctgtacaagcagatctccagccaatcaggagccagcaacgacaaccactactttggctacagcaccccttgggggtattttgacttcaacagattccactgccacttttcaccacgtgactggcaaagactcatcaacaacaactggggattccggcccaagagactcaacttcaagctctttaacattcaagtcaaggaggtcacgcagaatgacggtacgacgacgattgccaataaccttaccagcacggttcaggtgtttactgactcggagtaccagctcccgtacgtccccggctcggcgcatcaaggatgcctcccgccgttcccagcagacgtcttcatggtgccacagtatggatacctcaccctgaacaacgggagtcaggcagtaggacgctcttcattttactgcctggagtactttccttctcagatgcttcgtaccggaaacaactttaccttcagctacacctttgaggatgttcctttccacagcagctacgctcacagccagagtttggaccgtctcatgaatcctctcatcgaccagtacctgtattacttgagcagaacaaacactccaagcggaaccaccacgcagtccaggcttcagttttctcaggccggagcaagtgacattcgggaccagtctaggaactggcttcctggaccctgttaccgccagcagcgagtatcaaagacagctgcggacaacaacaacagtgaatactcgtggactggagctaccaagtaccacctcaatggcagagactctctggtgaatccgggcccggccatggccagccacaaggacgatgaagaaaagttttttcctcaaagcggggttctcatctttgggaagcaaggctcagagaaaacaaatgtggacattgaaaaggtcatgattacagacgaagaggaaatcagaaccaccaatcccgtggccacggagcagtatggttctgtatctaccaacctccagagcggcaacacacaagcagctactgcagatgtcaacacacaaggcgttcttccaggcatggtctggcaggacagagacgtgcacctgcaggggcctatctgggcaaagattccacacacggacggacattttcacccctctcccctcatgggcggatttggacttaaacaccctcctccacagattctcatcaagaacaccccggtacctgcaaatccttcgaccaccttcagtgcggcaaagtttgcttccttcatcacacagtattccacagggcaggtcagcgtggagatcgagtgggagctgcagaaggagaacagcaaacgctggaaccccgagatccagtacacttccaactacaacaaatctgttaatgtggactttactgtggacactaatggtgtgtattcagagcctcgccccattggcaccagatacctgactcgtaatctgtaattgcttgttaatcaataaaccgtttaattcgtttcagttgaactttggtctctgcgaagggcgaattcgtttaaaccctgcaggactagtccctttagtgagg

SEQ ID NO: 4847 - DNA, 3162 bp, Adeno-associated virus
gaattgaatttagcggccgcgaattcgcccttcgcagagaccaaagttcaactgaaacgaattaaacggtttattgattaacaagcaattacagattacgagtcaggtatctggtgccaatggggcgaggctctgaatacacgccattagtgtccacagtaaagtccacattaacagacttgttgtagttggaagtgtactgaatttcgggattccagcgtttgctgttttccttctgcagctcccactcgatctccacgctgacctgtcccgtggagtactgtgtgatgaaggaagcaaactttgccgcactgaaggtggtcgaaggattcgcaggtaccggggtgttcttgatgagaatctgtggaggagggtgtttaagtccgaatccacccatgaggggagaggggtgaaaatgtccgtccgtgtgtggaatctttgcccagatgggcccctgaaggtacacatctctgtcctgccagaccatgcctggaagaacgccttgtgtgttgacatctgcggtagctgcttgtctgttgcctctctggaggttggtagatacagaaccgtactgctccgtagccacgggattggttgtcctgatttcctcttcgtctgtaatcatgaccttttcaatgtccacatttgttttctctgagccttgcttcccaaagatgagaaccccgctctgaggaaaaaacttttcttcattgtccttgtggcttgccatggccgggcccggattcaccagagagtctctgccattgaggtggtacttggtagctccagtccacgagtattcactgttgttgttatccgcagatgtctttgatactcgctgctggcggtaacagggtccaggaagccagttcctagactggtcccgaatgtcactcgctccggcctgagaaaactgaagccttgactgcgtggtggttccacttggagtgtttgttgtgctcaagtaatacaggtactggtcgatgagaggattcatgagacggtccagactctggctgtgagcgtagccgctgtggaaaggaacgtcctcaaaagtgtagctgaaggtaaagttgtttccggtacgcagcatctgagaaggaaagtactccaggcagtaaaatgaagagcgtcctactgcctgactcccgttgttcagggtgaggtatccatactgtggcaccatgaagacgtctgctgggaacggcgggaggcatccttgatgcgccgagccgaggacgtacgggagctggtactccgagtcagtaaacacctgaaccgtgctggtaaggttattggcaatcgtcgtcgtaccgtcattctgcgtgacctctttgacttgaatgttaaagagcttgaagttgagtctcttgggtcggaatccccagttgttgttgatgagtctttgccagtcacgtggtgaaaagtggcagtggaatctgttgaagtcaaaatacccccaaggggtgctgtagccaaagtagtgattgtcgttcgaggctcctgattggctggaaatttgtttgtagaggtggttgttgtaggtgggcagggcccaggttcgggtgctggtggtgatgactctgtcgcccatccatgtggaatcgcaatgccaatttcccgaggaattacccactccgtcggcgccctcgttattgtctgccattggtgcgccactgcctgtagccatcgtattagttcccagaccagagggggctgctggtggctgtccgagaggctgggggtcaggtactgagtctgcgtctccagtctgaccaaaattcaatctttttcttgcaggctgctggcccgcctttccggttcccgaggaggagtctggctccacaggagagtgctctaccggcctcttttttcctggagccgtcttgacaggttccccaaccaggcccagaggttcaagaaccctctttttcgcctggaagactgctcgtccgaggttgcccccaaaagacgtatcttctttaaggcgctcctgaaactccgcgtcggcgtggttgtacttgaggtacgggttgtctccgctgtcgagctgccggtcgtaggctttgtcgtgctcgagggccgcggcgtctgcctcgttgaccggctctcccttgtcgagtccgttgaagggtccgaggtacttgtacccaggaagcacaagacccctgctgtcgtccttatgccgctctgcgggctttggtggtggtgggccaggtttgagcttccaccactgtcttattccttcagagagagtgtcctcgagccaatctggaagataaccatcggcagccatacctgatttaaatcatttattgttcaaagatgcagtcatccaaatccacattgaccagatcgcaggcagtgcaagcgtctggcacctttcccatgatatgatgaatgtagcacagtttctgatacgcctttttgacgacagaaacgggttgagattctgacacgggaaagcactctaaacagtctttctgtccgtgagtgaagcagatatttgaattctgattcattctctcgcattgtctgcagggaaacagcatcagattcatgcccacgtgacgagaacatttgttttggtacctgtctgcgtagttgatcgaagcttccgcgtctgacgtcgatggctgcgcaactgactcgcgcacccgtttgggctcacttatatctgcgtcactgggggcgggtcttttcttggctccaccctttttgacgtagaattcatgctccacctcaaccacgtgatcctttgcccaccggaaaaagtctttgacttcctgcttggtgaccttcccaaagtcatgatccagacggcgggtgagttcaaatttgaacatccggtcttgcaacggctgctggtgttcgaaggtcgttgagttcccgtcaatcacggcgcacatgttggtgttggaggtgacgatcacgggagtcgggtctatctgggccgaggacttgcatttctggtccacgcgcaccttgcttcctccgagaatggctttggccgactccacgaccttggcggtcatcttcccctcctcccaccagatcaccatcttgtcgacacagtcgttgaagggaaagttctcattggtccagttgacgcagcaagggcgaattcgtttaaacctgcaggactagtccctttagtgaggg

SEQ ID NO: 4848 - DNA, 3164 bp, Adeno-associated virus
gcgaattgaatttagcggccgcgaattcgcccttcgcagagaccaaagttcaactgaaacgaattaaacggtttattgattaacaagcaattacaaattacgagtcaggtatctggtgccaatggggcgaggctctgaatacacgccattagtgtccacagtaaagtccacattaacagacttgttgtagttggaagtgtactgaatttcgggattccagcgtttgctgttttccttctgcagctcccactcgatctccacgctgacctgtcccgtggagtactgtgtgatgaaggaagcaaactttgccgcactgaaggtggtcgaaggattcgcaggtaccggggtgttcttgatgagaatctgtggaggagggtgtttaggtccgaatccacccatgaggggagaggggtgaaaatgtccgtccgtgtgtggaatctttgcccagatgggcccctgaaggtacacatctctgtcctgccagaccatgcctggaagaacgccttgtgtgttgacatctgcggtagctgcttgtctgttgcctctctggaggttggtagatacagaaccatactgctccgtagccacgggattggttgtcctgatttcctcttcgtctgtaatcatgaccttttcaatgtccacatttgttttctctgagccttgcttcccaaagatgagaaccccgctctgaggaaaaaacttttcttcattgtccttgtggcttgccatggccgggcccggattcaccagagagtctctgccattgaggtggtacttggtagctccagtccacgagtattcactgttgttgttatccgcagatgtctttgatactcgctgctggcggtaacagggtccaggaagccagttcctagactggtcccgaatgtcactcgctccggcctgagaaaactgaagccttgactgcgtggtggttccacttggagtgtttgttgtgctcaagtaatacaggtactggtcgatgagaggattcatgagacggtccagactctggctgtgagcgtagctgctgtggaaaggaacgtcctcaaaagtgtagctgaaggtaaagttgtttccggtacgcagcatctgagaaggaaagtactccgggcagtaaaatgaagagcgtcctactgcctgactcccgttgctcagggtgaggtatccatactgtggcaccatgaagacgtctgctgggaacggcgggaggcatccttgatgcgccgagccgaggacgtacgggagctggtactccgagtcagtaaacacctgaaccgtgctggtaaggttattggcaatcgtcgtcgtaccgtcattctgcgtgacctctttgacttgaatgttaaagagcttgaagttgagtctcttgggtcggaatccccagttgttgttgatgagtctttgccagtcacgtggtgaaaagtggcagtggaatctgttgaagtcaaaatacccccaaggggtgctgtagccaaagtagtgattgtcgttcgaggctcctgattggctggaaatttgtctgtagaggtggttgttgtaggtgggcagggcccaggttcgggtgctggtggtgatgactctgtcgcccatccatgtggaatcgcaatgccgatttcccgaggaattacccactccgtcggcgccctcgttattgtctgccattggtgcgccactgcctgtagccatcgtattagttcccagaccagagggggctgctggtggctgtccgagaggctgggggtcaggtactgagtctgcgtctccagtctgaccaaaattcaatctttttcttgcaggctgctggcccgcctttccggttcccgaggaggagtctggctccacaggagagtgctctaccggcctcttttttcccggagccgtcttaacaggttccccaaccaggcccagaggttcaagaaccctctttttcgcctggaagactgctcgtccgaggttgcccccaaaagacgtatcttctttaaggcgctcctgaaactccgcgtcggcgtggttgtacttgaggtacgggttgtctccgctgtcgagctgccggtcgtaggctttgtcgtgctcgagggccgcggcgtctgcctcgttgaccggctctcccttgtcgagtccgttgaagggtccgaggtacttgtacccaggaagcacaagacccctgctgtcgtccttatgccgctctgcgggctttggtggtggtgggccaggtttgagcttccaccactgtcttattccttcagagagagtgtcctcgagccaatctggaagataaccatcggcagccatacctgatttaaatcatttattgttcaaagatgcagtcatccaaatccacattgaccagatcgcaggcagtgcaagcgtctggcacctttcccatgatatgatgaatgtagcacagtttctgatacgcctttttgacgacagaaacgggttgagattctgacacgggaaagcactctaaacagtctttctgtccgtgagtgaagcagatatttgaattctgattcattctctcgcattgtctgcagggaaacagcatcagattcatgcccacgtgacgagaacatttgttttggtacctgtctgcgtagttgatcgaagcttccgcgtctgacgtcgatggctgcgcaactgactcgcgcacccgtttgggcccacttatatctgcgtcactgggggcgggtcttttcttggctccaccctttttgacgtagaattcatgctccacctcaaccacgtgatcctttgcccaccggaaaaagtctttgacttcctgcttggtgaccttcccaaagtcatgatccagacggcgggtgagttcaaatttgaacatccggtcttgcaacggctgctggtgttcgaaggtcgttgagttcccgtcaatcacggcgcacatgttggtgttggaggtgacgatcacgggagtcgggtctatctgggccgaggacttgcatttctggtccacgcgcaccttgcttcctccgagaatggctttggccgactccacgaccttggcggtcatcttcccctcctcccaccagatcaccatcttgtcgacacagtcgttgaagggaaagttctcattggtccagttgacgcagcaagggcgaattcgtttaaacctgcaggactagtccctttagtgaggg

SEQ ID NO: 4849 - DNA, 3163 bp, Adeno-associated virus
accctcactaaagggactagtcctgcaggtttaaacgaattcgcccttgctgcgtcaactggagcaatgagaactttcccttcaacgactgtgtcgacaagatggtgatttggtgggaggaggggaagatgaccgccaaggtcgtggagtcggccaaagccattctcggaggaagcaaggtgcgcgtggaccagaaatgcaagtcctcggcccagatagatccgactcccgtgatcgtcacctccaacaccaacatgtgcgccgtgattgacgggaactcaacgaccttcgaacaccagcagccgttgcaagaccggatgttcaaatttgaactcacccgccgtctggatcatgactttgggaaggtcaccaagcaggaagtcaaagactttttccggtgggcaaaggatcacgtggttgaggtggagcatggattctacgtcaaaaagggtggagccaagaaaagacccgcccctagtgacgcagatataagtgagcccaaacgggtgcgcgagtcagttgcgcagccatcgacgtcggacgcggaagcttcgatcaactacgcggacaggtaccaaaacaaatgttctcgtcacgtgggcatgaatctgatgctgtttccctgcagacaatgcgagagaatgaatcaaaattcaaatatctgcttcactcacggacagaaagactgtttagagtgctttcccgtgtcagaatctcaacctgtttctgtcgtcaaaaaggcgtatcagaaactgcgctacattcatcatatcatgggaaaggtgccagacgcttgcactgcctgcgatctggtcaatgtggatttggatgactgcatctctgaacaataaatgatttaaatcaggtatggctgccgatggttatcttccagattggctcgaggacactctctctgaaggaataagacagtggtggaagctcaaacctggcccaccaccaccaaagcccgcagagcggcataaggacgacagcaggggtcttgtgcttcctgggtacaagtacctcggacccttcaacggactcgacaagggagagccggtcaacgaggcagacgccgcggccctcgagcacgacaaggcctacgaccggcagctcgacagcggagacaacccgtacctcaagtacaaccacgccgacgcggagtttcaggagcgtcttaaagaagatacgtcttttgggggcaacctcggacgagcagtcttccaggcgaaaaagagggttcttgaacctctgggcctggttgaggaacctgttaagacggctccgggaaaaaagaggccggtagagcactctcctgcggagccagactcctcctcgggaaccggaaaagcgggccagcagcctgcaagaaaaagactgaatttcggtcagactggagacgcagactccgtacctgacccccagcctctcggacagccaccagcagcccccacaagtttgggatctactacaatggctacaggcagtggcgcaccaatggcagacaataacgagggtgccgatggagtgggtaattcctcaggaaattggcattgcgattcccaatggctgggcgacagagtcatcaccaccagcacccgaacctgggccctgcccacctacaacaaccacctttacaagcaaatctccagccaatcaggagcctcaaacgacaaccactactttggctacagcaccccctgggggtattttgacttcaacagattccactgccacttttcaccacgtgactggcaaagactcatcaacaacaactggggattccgacccaagagactcaacttcaagctctttaacattcaagtcaaagaggtcacgcagaatgacggtacgacgacgattgccaataaccttaccagcacggttcaggtgtttactgactcggagtaccagctcccgtacgtcctcggctcggcgcatcaaggatgcctcccgccgtttccagcggacgtcttcatggtcccacagtatggatacctcaccctgaacaacgggagtcaggcggtaggacgctcttccttttactgcctggagtgctttccttctcagatgctgcgtactggaaacaactttcagttcagctacacttttgaagacgtgcctttccacagcagctacgctcacagccagagtttggatcggctgatgaatcctctgatcgaccagtacctgtattatctaaacagaacacaaacagctagtggaactcagcagtctcggctactgtttagccaagctggacccacaagcatgtctcttcaagctaaaaactggctgcctggaccgtgttatcgccagcagcgtttgtcaaagcaggcaaacgacaacaacaacagcaactttccctggactggagctaccaagtaccacctcaatggcagagactctttggtgaacccgggcccggccatggccagccacaaggacgatgaagaaaagtttttccccatgcatggaaccctaatatttggtaaagaaggaacaaatgctaccaacgcggaattggaaaatgtcatgattacagatgaagaggaaatcaggaccaccaatcccgtggctacagagcagtacggatatgtgtcaaataatttgcaaaactcaaatactgctgcaagtactgaaactgtgaatcaccaaggagcattacctggtatggtgtggcaggatcgagacgtgtacctgcagggacccatttgggccaagattcctcacaccgatggacactttcatccttctccactgatgggaggttttggactcaaacacccgcctcctcagattatgatcaaaaacactcccgttccagccaatcctcccacaaacttcagttctgccaagtttgcttccttcatcacacagtattccacgggacaggtcagcgtggagatcgagtgggagctgcagaaggagaacagcaaacgctggaatcccgaaattcagtacacttccaactacaacaaatctgttaatgtggactttactgtggacactaatggtgtgtattcagagcctcgccccattggcaccagatacctgactcgtaatctgtaattgcttgttaatcaataaaccgtttaattcgtttcagttgaactttggtctctgcgaagggcgaattcgcggccgctaaattcaattcgcc

SEQ ID NO: 4850 - protein, 735 aa, Adeno-associated virus
MAADGYLPDWLEDTLSEGIRQWWKLKPGPPPPKPAERHKDDSRGLVLPGYKYLGPFNGLYKGEPVDEADAAALEHDKAYDRQLDSGDNPYLKYNHADAEFQERLKEDTSFGGNLGRAVFQAKKRVLEPLGLVGEPVKTAPGKKRPVEHSPVEPDSSSGTGKAGNQPARKRLNFGQTGDADSVPDPQPLGQPPAAPSGLGSTTMATGSGAPVADNNEGADGVGNSSGNWHCDSQWLGDRVITTSTRTWALPTYNNHLYKQISSQSGASNDNHYFGYSTPWGYFDFNRFHCHFSPRDRQRLINNNWGFRPKRLNFKLFNIQVKEVTQNDGTTTIANNLTSTVQVFTDSGYQLPYVLGLAHQGCLPPFPADVFMVPQYGYLTLNNGSQAVGRSSFYCLEYFPSQMLRTGNNFQFSYTFEDVPFHSSYAHSQSLDRLMNPLIDQYLYYLNKTQSNSGTLQQSRLLFSQAGPTSMSLQAKNWLPGPCYRQQRLSKQANDNNNSNFPWTAATKYHLNGRDSLVNPGPAMASHKDDEEKFFPMHGTLIFGKQGTNANDADLDNVMITDEEEIRTTNPVATEQYGYVSNNLQNSNTGPTTGTVNHQGALPGMVWQDRDVYLQGPIWAKIPHTDGHFHPSPLMGGFGLKHPPPQIMIKNTPVPANPPTNFSSAKFASFITQYSTGQVSVEIEWELQKEDSKRWNPEIQYTSNYNKPVNVDFTVDTNGVYSEPRPIGTRYLTRNL

SEQ ID NO: 4851 - DNA, 2208 bp, Adeno-associated virus
atggctgccgatggttatcttccagattggctcgaggacactctctctgaaggaataagacagtggtggaagctcaaacctggcccaccaccaccaaagcccgcagagcggcataaggacgacagcaggggtcttgtgcttcctgggtacaagtacctcggacccttcaacggactctacaagggagagccggtcgacgaggcagacgccgcggccctcgagcacgacaaggcctacgaccggcagctcgacagcggagacaacccgtacctcaagtacaaccacgccgacgcggagtttcaggagcgccttaaagaagatacgtcttttgggggcaacctcggacgagcagtcttccaggccaaaaagagggttcttgaacctctgggcttggttggggagcctgttaaaacggctccgggaaaaaagaggccggtagagcactctcctgtggagccagactcctcctcgggaaccggaaaagcgggcaaccagcctgcaagaaaaagattgaattttggtcagactggagacgcagactccgtacctgacccccagcctctcggacagccaccagcagccccctctggtctgggatctactacaatggctacaggcagtggcgcaccagtggcagacaataacgagggtgccgatggagtgggtaattcctcaggaaattggcattgcgattcccaatggctgggcgacagagtcatcaccaccagcacccgaacctgggctctgcccacctacaataaccacctctacaagcaaatctccagccaatcaggagcctcaaacgacaaccactactttggctacagcaccccctgggggtattttgacttcaacagattccactgccacttttcaccacgtgaccggcaaagactcatcaacaacaactggggattccgaccaaaaagactcaacttcaagctctttaacattcaagtcaaagaggtcacgcagaatgacggtacgacgacgattgccaataaccttaccagcacggttcaggtgtttactgactcggggtaccagctcccgtacgtcctcggcttggcgcatcaaggatgcctcccgccgttcccagcagacgtcttcatggtgccacagtatggatacctcaccctgaacaacgggagtcaggcggtaggacgctcttccttttactgcctggagtactttccttctcagatgctgcgtactggaaacaactttcagttcagctacacctttgaagacgttcctttccacagcagctacgctcacagccagagtctggatcggctgatgaatcctctgatcgaccagtacctgtattatctgaacaagacacaatcaaatagtggaactcttcagcagtctcggctactgtttagccaagctggacccaccagcatgtctcttcaagctaaaaactggctgcctggaccttgctacagacagcagcgtctgtcaaagcaggcaaacgacaacaacaacagcaactttccctggactgcggctacaaagtatcatctaaatggccgggactcgttggttaatccaggaccagctatggccagccacaaagacgatgaagaaaagtttttccccatgcatggaaccctgatatttggtaaacaaggaacaaatgctaacgacgcggatttggacaatgtcatgattacagatgaagaagaaatccgcaccaccaatcccgtggctacggagcagtacggatatgtgtcaaataatttgcaaaactcaaatactggtccaactactggaactgtcaatcaccaaggagcgttacctggtatggtgtggcaggatcgagacgtgtacctgcagggacccatttgggccaagattcctcacaccgatggacactttcatccttctccacttatgggaggttttggactcaaacacccacctcctcagatcatgattaaaaacactcccgttccagccaatcctcccacaaacttcagttctgccaagtttgcttctttcatcacacagtattccacgggacaagtcagcgtggagatcgagtgggagctgcagaaggaggacagcaaacgctggaaccccgagatccagtacacttccaactataacaaacctgttaatgtggactttactgtggacactaatggtgtgtattcagagcctcgccccattggcaccagatacctgactcgtaatctgtaa

SEQ ID NO: 4852 - DNA, 3161 bp, Adeno-associated virus
cgaattgatttagcggccgcgaattcgcccttcgcagagaccaaagttcaactgaaacgaattaaacggtttattgattaacaagcaattacagattacgagtcaggtatctggtgccaatggggcgaggctctgaatacacaccattagtgtccacagtaaagtccacattaacagatttgttgtagttggaagtgtactggatctcgggattccagcgtttgctgttctccttctgtagctcccactcgatctccacgctgacccgccccgtggaatactgtgtgatgaaggaagcaaactttgccgcactgaaggtggtcgaaggattcgcaggtaccggggtgtttttgatgagaatctgtggaggagggtgtttaagtccgaatccgcccatgaggggagaggggtgaaaatgtccgtccgtgtgcggaatctttgcccagataggcccctgcaggtacacgtctctgtcctgccagaccatgcctggaagaacgccttgtgtgttgacatctgcagtagatgcttgtgtgttgccgctctggaggttggtagatacagaaccatactgctccgtggccacgggattggtggttctgatttcctcttcgtctgtaatcatgaccttttcaatgtccacatttgttttctctgatccttgttttccaaagatgagaaccccgctctgaggaaaaaacttttcttcatcgtccttgtggctggccattgccgggcccggattcaccagagagtctctgccattgaggtggtacttggtagctccaatccacgagtattcactgttgttgttgtccgcagatgtctttgatactcgctgctggcggtaacagggtccaggaagccagttcctagactgatcccgaatgtcactcgctccggcctgagaaaactgaagcctggactgcgtggtggttccgcttggagtgtttgttctgctcaagtaatacaggtactggtcgatgagaggattcatgagacggtccaaactctggctgtgagcgtagctgctgtggaaaggaacatcctcaaaggtgtagctgaaggtaaagttgtttccggtacgcagcatctgagaagggaagtactccaggcagtaaaatgaagagcgtcctactgcctgactcccgttgttcagggtgaggtatccatactgtggcaccatgaagacgtctgctgggaacggcgggaggcatccttgatgcgccgagccgaggacgtacgggagctggtactccgagtcagtaaacacctgaaccgtgctggtaaggttattggcaatcgtcgtcgtaccatcattctgcgtgacctctctgacttgaatgttaaagagcttgaagttgagtctcttgggccggaatccccagttgttgttgatgagtctttgccagtcacgtggtgaaaagtggcagtggaatctgttgaagtcaaaatacccccaaggggtgctgtagccaaagtagtggttgtcgttgctggctcctgattggctggaaatctgcttgtacagatggttgttgtaggtgggcagagcccaggttcgggtgctggtggtgatgactctgtcgcccatccatgtggaatcgcaatgccaatttcccgaggaattacccactccgtcggcgccatcgttattgtctgccattggtgcgccactgcctgtagccatcgtattagttcccagaccagagggggctgctggtggctgtccgagaggctgggggtcaggtacggagtctgcgtctccagtctgaccgaaattcaatctctttcttgcaggctggttgcccgcttttccggttcccgaggaggagtctggctccacaggagagtgctctaccggcctcttttttcccggagccgtcttaacaggctcctcaaccaggcccagaggttcaagaaccctcttttttgcctggaagactgctcgtccgaggttgcccccaaaagacgtatcttctttaaggcgctcctgaaactccgcgtcggcgtggtcgtacttgaggtacgggttgtctccgctgtcgagctgccggtcgtaggccttgtcgtgctcgagggccgcggcgtctgcctcgttgaccggctctcccttgtcgagtccgttgaagggtccgaggtacttgtacccaggaagcacaagacccctgctgtcgtccttatgccgctctgcgggctttggtggtggtgggccaggtttgagcttccaccactgtcttattccttcagagagagtgtcctcgagccaatctggaagataaccatcggcagccatacctgatttaaatcatttattgttcagagatgcagtcatccaaatccacattgaccagatcgcaggcagtgcaagcgtctggcacctttcccatgatatgatgaatgtagcaaagtttctgatacgcctttttgacgacagaaacgggttgagattctgacacgggaaagcactctaaacagtctttctgtccgtgagtgaagcagatatttgaattctgattcattctctcgcattgtctgcagggaaacagcatcagattcatgcccacgtgacgagaacatttgttttggtacctgtccgcgtagttgatcgaagcttccgcgtctgacgtcgatggctgcgcaactgactcgcgcgcccgtttgggctcacttatatctgcgtcactgggggcgggtcttttcttggctccaccctttttgacgtagaattcatgctccacctcaaccacgtgatcctttgcccaccggaaaaagtctttcacttcctgcttggtgaccttcccaaagtcatgatccagacggcgggttagttcaaatttgaacatccggtcttgcaacggctgctggtgttcgaaggtcgttgagttcccgtcaatcacggcgcacatgttggtgttggaggtggcgatcacgggagtcgggtctatctgggccgaggacttgcacttttggtccacgcgcaccttgcttcctccgagaatggcttcggccgattccacgaccttggcggtcatctttccctcctcccaccagatcaccatcttgtcgacacagtcgttgaagggaaagttctcattggtccagttgacgcagcaagggcgaattcgtttaaacctgcaggaactagtcccttagtgagg

SEQ ID NO: 4853 - protein, 735 aa, Adeno-associated virus
MAADGYLPDWLEDTLSEGIRQWWKLKPGPPPPKPAERHKDDSRGLVLPGYKYLGPFNGLYKGEPVNEADAAALEHDKAYDRQLDSGDNPYLKYNHAGAEFQERLKEDTSFGGNLGRAVFQAKKRVLEPLGLVEEPVKTAPGKKRPVEHSPVEPDSSSGTGKAGNQPARKRLNFGQTGDADSVPDPQPLGQPPAAPSGLGSTTMATGSGAPVADNNEGADGVGNSSGNWHCDSQWLGDRVITTSTRTWALPTYNNHLYKQISSQSGASNDNHYFGYSTPWGYFDFNRFHCHFSPRDWQRLINNNWGFRPKRLNFKLFNIQVKEVTQNDGTTTIANNLTSTVQVFTDSEYQLPYVLGSAHQGCLPPFPADVFMVPQYGYLTLNNGSQAVGRSSFYCLEYFPSQMLRTGNNFQFSYTFEDVPFHSSYAHSQSLDRLMNPLIDQYLYYLNKTQSNSGTLQQSRLLFSQAGPTSMSLQAKNWLPGPCYRQQRLSKQANDNNNSNFPWTAATKYHLNGRDSLVNPGPAMASHKDDEEKFFPMHGTLIFGKQGTNANDADLDNVMITDEEEIRTTNPVATEQYGYVSNNLQDSNTGPTTGTVNHQGALPGMVWQDRDVYLQGPIWAKIPHTDGHFHPSPLMGGFGLKHPPPQIMIKNTPVPANPPTNFSSAKFASFITQYSTGQVSVEIEWELQKENSKRWNPEIQYTSNYNKSVNVDFTVDTNGVYSEPRPIGTRYLTRNL

SEQ ID NO: 4854 - DNA, 2208 bp, Adeno-associated virus
atggctgccgatggttatcttccagattggctcgaggacactctctctgaaggaataagacagtggtggaagctcaaacctggcccaccaccgccaaagcccgcagagcggcataaggacgacagcaggggtcttgtgcttcctgggtacaagtacctcggacccttcaacggactctacaagggagagccggtcaacgaggcagacgccgcggccctcgagcacgacaaggcctacgaccggcagctcgacagcggagacaacccgtacctcaagtacaaccacgccggcgcggagtttcaggagcgccttaaagaagatacgtcttttgggggcaacctcggacgagcagtcttccaggccaaaaagagggttcttgaacctctgggcttggttgaggagcctgttaaaacggctccgggaaaaaagaggccggtagagcactctcctgtggagccagactcctcctcgggaaccggaaaagcgggcaaccagcctgcaagaaaaagattgaattttggtcagactggagacgcagactccgtacctgacccccagcctctcggacagccaccagcagccccctctggtctgggatctactacaatggctacaggcagtggcgcaccagtggcagacaataacgagggtgccgatggagtgggtaattcctcaggaaattggcattgcgattcccaatggctgggcgacagagtcatcaccaccagcacccgaacctgggctctgcccacctacaacaaccacctctacaagcaaatctccagccaatcaggagcctcaaacgacaaccactactttggctacagcaccccctgggggtattttgacttcaacagattccactgccacttttcaccacgtgactggcaaagactcatcaacaacaactggggattccgaccaaagagactcaacttcaagctctttaacattcaagtcaaagaggtcacgcagaatgacggtacgacgacgattgccaataaccttaccagcacggttcaggtgtttactgactcggagtaccagctcccgtacgtcctcggctcggcgcatcaaggatgcctcccgccgttcccagcagacgtcttcatggtgccacagtatggatacctcaccctgaacaacgggagtcaggcggtaggacgctcttccttttactgcctggagtactttccttctcagatgctgcgtactggaaacaactttcagttcagctacacctttgaagacgttcctttccacagcagctacgctcacagccagagtctggatcggctgatgaatcctctgatcgaccagtacctgtattatctgaacaagacacaatcaaatagtggaacccttcagcagtctcggctactgtttagccaagctggacccaccagcatgtctcttcaagctaaaaactggctgcctggaccttgctacagacagcagcgtctgtcaaagcaggcaaacgacaacaacaacagcaactttccctggactgcggctacaaagtatcatctaaatggccgggactcgttggttaatccaggaccagctatggccagccacaaagacgatgaagaaaagtttttccccatgcatggaaccctgatatttggtaaacaaggaacaaatgctaacgacgcggatttggacaatgtcatgattacagatgaagaagaaatccgcaccaccaatcccgtggctacggagcagtacggatatgtgtcaaataatttgcaagactcaaatactggtccaactactggaactgtcaatcaccaaggagcgttacctggtatggtgtggcaggatcgagacgtgtacctgcagggacccatttgggccaagattcctcacaccgatggacactttcatccttctccacttatgggaggttttggactcaaacacccacctcctcagatcatgattaaaaacactcccgttccagccaatcctcccacaaacttcagttctgccaagtttgcttctttcatcacacagtattccacgggacaagtcagcgtagagatcgagtgggagctgcagaaggagaacagcaaacgctggaaccccgagatccagtacacttccaactataacaaatctgttaatgtggactttactgtggacactaatggtgtgtattcagagcctcgccccattggcaccagatacctgactcgtaatctgtaa

SEQ ID NO: 4855 - protein, 738 aa, Adeno-associated virus
MAADGYLPDWLEDNLSEGIREWWDLKPGAPKPKANQQKQDDGRGLVLPGCKYLGPFNGLDKGEPVNAADAAALEHDKAYDQQLKAGDNPYLRYNHADAEFQERLQEDTSFGGNLGRAVFQAKKRVLEPLGLVEEGAKTAPGKKRPVEPSPQRSPDSSTGIGKTGQQPAKKRLNFGQTGDSESVPDPQPIGEPPAGPSGLGSGTMAAGGGAPMADNNEGADGVGSSSGNWHCDSTWLGDRVITTSTRTWALPTYNNHLYKQISNGTSGGSTNDNTYFGYSTPWGYFDFNRFHCHFSPRDWQRLINNNWGFRPKRLNFKLFNIQVKEVTQNEGTKTIANNLTSTIQVFTDSEYQLPYVLGSAHQGCPPPFPADVFMIPQYGYLTLNNGSQAVGRSSFYCLEYFPSQMRRTGNNFEFSYQFEDVPFHSSYAHSQSLDRLMNPLIDQYLYYLSRTQSTGGTAGTQQLLFSQAGPNNMSAQAKNWLPGPCYRQQRVSTTLSQNNNSNFAWTGATKYHLNGRDSLVNPGVAMATHKDDEERFFPSSGVLMFGKQGAGKDNVDYSSVMLTSEEEIKTTNPVATEQYGVVADNLQQQNAAPIVGAVNSQGALPGMVWQNRDVYLQGPIWAKIPHTDGNFHPSPLMGGFGLKHPPPQILIKNTPVPADPPTTFSQAKLASFITQYSTGQVSVEIEWELQKENSKRWNPEIQYTSNYNKSVNVDFTVDTNGVYSEPRPIGTRYLTRNL

SEQ ID NO: 4856 - DNA, 2217 bp, Adeno-associated virus
atggctgccgatggttatcttccagattggctcgaggacaacctctctgagggcattcgcgagtggtgggacttgaaacctggagccccgaaacccaaagccaaccagcaaaagcaggacgacggccggggtctggtgcttcctggctgcaagtacctcggacccttcaacggactcgacaagggggagcccgtcaacgcggcggacgcagcggccctcgagcacgacaaggcctacgaccagcagctcaaagcgggtgacaatccgtacctgcggtataaccacgccgacgccgagtttcaggagcgtctgcaagaagatacgtcttttgggggcaacctcgggcgagcagtcttccaggccaagaagcgggttctcgaacctctcggtctggttgaggaaggcgctaagacggctcctggaaagaagagaccggtagagccatcaccccagcgttctccagactcctctacgggcatcggcaagacaggccagcagcccgcgaaaaagagactcaactttgggcagactggcgactcagagtcagtgcccgaccctcaaccaatcggagaaccccccgcaggcccctctggtctgggatctggtacaatggctgcaggcggtggcgctccaatggcagacaataacgaaggcgccgacggagtgggtagttcctcaggaaattggcattgcgattccacatggctgggcgacagagtcatcaccaccagcacccgaacctgggccctccccacctacaacaaccacctctacaagcaaatctccaacgggacatcgggaggaagcaccaacgacaacacctacttcggctacagcaccccctgggggtattttgactttaacagattccactgccacttctcaccacgtgactggcagcgactcatcaacaacaactggggattccggcccaagagactcaacttcaagctcttcaacatccaggtcaaggaggtcacgcagaatgaaggcaccaagaccatcgccaataaccttaccagcacgattcaggtctttacggactcggaataccagctcccgtacgtcctcggctctgcgcaccagggctgcccgcctccgttcccggcggacgtcttcatgattcctcagtacgggtacctgactctgaacaacggcagtcaggccgtgggccgttcctccttctactgcctggagtactttccttctcaaatgcggagaacgggcaacaactttgagttcagctaccagtttgaggacgtgccttttcacagcagctacgcgcatagccaaagcctggaccggctgatgaaccccctcatcgaccagtacctgtactacctgtctcggactcagtccacgggaggtaccgcaggaactcagcagttgctattttctcaggccgggcctaataacatgtcggctcaggccaaaaactggctacccgggccctgctaccggcagcaacgcgtctccacgacactgtcgcaaaataacaacagcaactttgcttggaccggtgccaccaagtatcatctgaatggcagagactctctggtaaatcccggtgtcgctatggcaacgcacaaggacgacgaagagcgattttttccatccagcggagtcttgatgtttgggaaacagggagctggaaaagacaacgtggactatagcagcgttatgctaaccagtgaggaagaaatcaaaaccaccaacccagtggccacagaacagtacggcgtggtggccgataacctgcaacagcaaaacgccgctcctattgtaggggccgtcaacagtcaaggagccttacctggcatggtctggcagaaccgggacgtgtacctgcagggtcctatctgggccaagattcctcacacggacggcaactttcatccttcgccgctgatgggaggctttggactgaaacacccgcctcctcagatcctgattaagaatacacctgttcccgcggatcctccaactaccttcagtcaagccaagctggcgtcgttcatcacgcagtacagcaccggacaggtcagcgtggaaattgaatgggagctgcagaaagagaacagcaagcgctggaacccagagattcagtatacttccaactataacaaatctgttaatgtggactttactgtggacactaatggtgtgtattcagagcctcgccccattggcaccagatacctgactcgtaatctgtaa

SEQ ID NO: 4857 - DNA, 3167 bp, Adeno-associated virus
attgaatttagcggccgcgaattcgcccttcgcagagaccaaagttcaactgaaacgaattaaacggtttattgattaacaagcaattacagattacgagtcaggtacctggtgccaatggggcgaggctctgaatacacaccattagtgtccacagtaaagtccacattaacagatttgttgtagttggaagtgtactgaatctcgggattccagcgtttgctgttctccttctgcagctcccactcgatctccacgctgacctgccccgtggagtactgtgtaatgaaggaagcaaactttgccgcactgaaggtagtcgaaggattcgcaggtaccggggtgttcttgatgagaatctgcgggggagggtgtttaagtccgaatccgcccatgaggggagaggggtgaaaatgtccgtccgtgtgtggaatctttgcccagatgggcccctgcaggtacacgtctctgtcctgccacaccatgcctggaagaacgccttgtgtgttgacatctgaggtagctgcttgtgtgttgccgctctggaggttggtagatacagaaccatactgctccgtagccacgggattggtggtcctgatttcctcttcgtctgtaatcatgaccttttcaatgtccacattagtttttcccgagtcttgttttccaaagatgagaaccccgctctgaggaaaaaacttttcttcatcgtccttgtggctggccatggccgggcccggattcaccagagagtctcttccattaaggtggtacttggtagctccagtccacgagtattcactgttgttgttatccgcagatgtctttgatactcgctgctggcggtaacagggtccaggaagccagttcctagactggtcccgaatgtcacttgctccggcctgagaaaactgaagccttgactgcgtggtggttccgcttggagtgtttgttctgctcaagtaatacaggtactggtcgatgagaggattcatgagacggtccaaactctggctgtgggcgtagctgctgtggaaaggaacgtcctcaaaggtgtagctgaaggtaaagttgtttccggtacgcagcatctgagaaggaaagtactccaggcagtaaaatgaagagcgtcctactgcctgactcccgttgttcagggtgaggtatccatactgtggcaccatgaagacgtctgctgggaacggcgggaggcatccttgatgcgccgagccgaggacgtacgggagctggtactccgagtcagtaaacacctgaaccgtgctggtaaggttattggcaatcgtcgtcgtaccgtcattctgcgtgacctccttgacttgaatgttaaagagcttgaagttgagtcttttgggccggaatccccaattgttgttgatgagtctttgccagtcacgtggcgaaaagtggcagtggaatctgttgaagtcaaaatacccccaaggggtgctgtagccaaagtagtggttgtcgtttgaggctcctgattggctggaaatctgcttgtagaggtggttgttgtaggtgggcagagcccaggtgcgggtgctggtggtgatgactctgtcgcccatccatgtggaatcgcaatgccaatttcccgaggaattacccactccgtcggcgccctcgttattgtctgccattggtgcgccactgcctgtagccatcgtattagttcccagaccagagggggctgctggtggctgtccgagaggctgggggtcaggtacggagtctgcgtctccagtctgaccgaaattcaatctctttcttgcaggctgctggcccgcttttccggttcccgaggaggagtctggctccgcaggagagtgctctaccggcctcttttttcccggagccgtcttaacaggttcctcaaccaggcccagaggttcaagaaccctctttttcgcctggaagactgctcgtccgaggttgcccccaaaagacgtatcttctttaagacgctcctggaactccgcgtcggcgtggttgtacttggggtacgggttgtctccgctgtcgagctgccggtcgtaggccttgtcgtgctcgagggccgcggcgtctgcctcgttgaccggctctcccttgtcgagtccgttgaagggtccaaggtacttgtacccaggaagcacaagacccctgctgtcgtccttatgccgctctgcgggctttggtggtggtgggccaggtttgagcttccaccactgtcttattccttcagagagagtgtcctcgagccaatctggaagataaccatcggcagccatacctgatttaaatcatttattgttcagagatgcagtcatccaaatccacattgaccagatcgcaagcagtgcaagcgtctggcacctttcccatgatatgatgaatgtagcacagtttctgatacgcctttttgacgacagaaacgggttgagattctgacacgggaaagcactctaaacagtctttctgtccgtgagtgaagcagatatttgaattctgattcattctctcgcattgtctgcagggaaacagcatcagattcatgcccacgtgacgagaacatttgttttggtacctgtccgcgtagttgattgaagcttccgcgtctgacgtcgatggctgcgcaactgactcgcgcgcccgtttgggctcacttatatctgcgtcactgggggcgggtctttttttggctccaccctttttgacgtagaattcatgctctacctcaaccacgtgatcctttgcccaccggaaaaagtctttgacttcctgcttggtgaccttcccaaagtcatgatccagacggcgggtgagttcaaatttgaacatccggtcttgcaacggctgctggtgttcgaaggtcgttgagttcccgtcaatcactgcgcacatgttggtgttggaggtgacaatcacgggagtcgggtctatctgggccgaggacttgcatttctggtccacgcgcaccttgcttcctccgagaatggctttggccgactccacgaccttggcggtcatcttcccctcctcccaccagatcaccatcttgtcgacgcaatcattgaaaggaaagttctcattggtccagttgacgcagccgtagaaagggcgaattcgtttaaacctgcaggactagtccctttagtgagggt

SEQ ID NO: 4858 - DNA, 3161 bp, Adeno-associated virus
aattgaatttagcggccgcgaattcgcccttcgcagagaccaaagttcaactgaaacgaattaaacggtttattgattaacaagcaattacagattacgagtcaggtatctggtgccaatggggcgaggctctgaatacacaccattagtgtccacagtaaagtccacattaacagatttgttgtagttggaagtgtactgaatctcgggattccagcgtttgctgttctccttctgcagctcccactcgatctccacgctgacctgccccgtggagtactgtgtaatgaaggaagcaaactttgccgcactgaaggtagtcgaaggattcgcaggtaccggggtgttcttgatgagaatctgcgggggagggtgtttaagtccgaatccgcccatgaggggagaggggtgaaaatgtccgtccgtgtgtggaatctttgcccagatgggcccctgcaggtacacgtctctgtcctgccacaccatgcctggaagaacgccttgtgtgttgacatctgaggtagctgcttgtgtgttgccgctctggaggttggtagatacagaaccatactgctccgtagccacgggattggtggtcctgatttcctcttcgtctgtaatcatgaccttttcaatgtccacattagtttttcccgagtcttgttttccaaagatgagaaccccgctctgaggaaaaaacttttcttcatcgtccttgtggctggccatggccgggcccggattcaccagagagtctcttccattaaggtggtacttggtagctccagtccacgagtattcactgttgttgttatccgcagatgtctttgatactcgctgctggcggtaacagggtccaggaagccagttcctagactggtcccgaatgtcacttgctccggcctgagaaaactgaagccttgactgcgtggtggttccgcttggagtgtttgttctgctcaagtaatacaggtactggtcgacgagaggattcatgagacggtccaaactctggctgtgggcgtagctgctgtggaaaggaacgtcctcaaaggtgtagctgaaggtaaagttgtttccggtacgcagcatctgagaaggaaagtactccaggcagtaaaatgaagagcgtcctactgcctgactcccgttgttcagggtgaggtatccatactgtggcaccatgaagacgtctgctgggaacggcgggaggcatccttgatgcgccgagccgaggacgtacgggagctggtactccgagtcagtaaacacctgaaccgtgctggtaaggttattggcaatcgtcgtcgtaccgtcattctgcgtgacctccttgacttgaatgttaaagagcttgaagttgagtcttttgggccgggatccccaattgttgttgatgagtctttgccagtcacgtggcgaaaagtggcagtggaatctgttgaagtcaaaatacccccaaggggtgctgtagccaaagtagtggttgtcgtttgaggctcctgattggctggaaatctgcctgtagaggtggttgttgtaggtgggcagagcccaggtgcgggtgctggtggtgatgactctgtcgcccatccatgtggaatcgcaatgccaatttcccgaggaattacccactccgtcggcgccctcgttattgtctgccattggtgcgccactgcctgtagccatcgtattagttcccagaccagagggggctgctggtggctgtccgagaggctgggggtcaggtacggagtctgcgtctccagtctgaccgaaattcaatctccttcttgcaggctgctggcccgcttttccggttcccgaggaggagtctggctccgcaagagagtgctctaccggcctcttttttcccggagccgtcttaacaggttcctcaaccaggcccagaggttcaagaaccctctttttcgcctggaagactgctcgtccgaggttgcccccaaaagacgtatcttctttaagacgctcctggaactccgcgtcggcgtggttgtacttgaggtacgggttgtctccgccgtcgagctgccggtcgtaggccttgtcgtgctcgagggccgcggcgtctgcctcgttgaccggctctcccttgtcgagtccgttgaagggtccaaggtacttgtacccaggaagcacaagacccctgctgtcgtccttatgccgctctgcgggctttggtggtggtgggccaggtttgagcttccaccactgtcttattccttcagagagagtgtcctcgagccaatctggaagataaccatcggcagccatacctgatttaaatcatttattgttcagagatgcagtcatccaaatccacattgaccagatcgcaagcagtgcaagcgtctggcacctttcccatgatatgatgaatgtagcacagtttctgatacgcctttttgacgacagaaacgggttgagattctgacacgggaaagcactctaaacagtctttctgtccgtgagtgaagcagatatttgaattctgattcattctctcgcattgtctgcagggaaacagcatcagattcatgcccacgtgacgagaacatttgttttggtacctgtccgcgtagttgattgaagcttccgcgtctgacgtcgatggctgcgcaactgactcgcgcgcccgtttgggctcacttatatctgcgtcactgggggcgggtctttttttggctccaccctttttgacgtagaattcatgctctacctcaaccacgtgatcctttgcccaccggaaaaagtctttgacttcctgcttggtgaccttcccaaagtcatgatccagacggcgggtgagttcaaatttgaacatccggtcttgcaacggctgctggtgttcgaaggtcgttgagttcccgtcaatcactgcgcacatgttggtgttggaggtgacaatcacgggagtcgggtctatctgggccgaggacttgcatttctggtccacgcgcaccttgcttcctccgagaatggctttggccgactccacgaccttggcggtcatcttcccctcctcccaccagatcaccatcttgtcgacgcaatcattgaaaggaaagttctcattggtccagttgacgcagcaagggcgaattcgtttaaacctgcaggactagtccctttagtgaggg

SEQ ID NO: 4859 - DNA, 3172 bp, Adeno-associated virus
gattgaatttagcggccgcgaattcgcccttgctgcgtcaactggaccaatgagaactttcccttcaacgattgcgtcgacaagatggtgatctggtgggaggagggcaagatgaccgccaaggtcgtggagtccgccaaggccattctgggtggaagcaaggtgcgcgtggaccaaaagtgcaagtcatcggcccagatcgaccccacgcccgtgatcgtcacctccaacaccaacatgtgcgccgtgatcgacgggaacagcaccaccttcgagcaccagcagcccctgcaggaccgcatgttcaagttcgagctcacccgccgtctggagcacgactttggcaaggtgaccaagcaggaagtcaaagagttcttccgctgggctcaggatcacgtgactgaggtggcgcatgagttctacgtcagaaagggcggagccaccaaaagacccgcccccagtgacgcggatataagcgagcccaagcgggcctgcccctcagttgcggagccatcgacgtcagacgcggaagcaccggtggactttgcggacaggtaccaaaacaaatgttctcgtcacgcgggcatgcttcagatgctgtttccctgcaagacatgcgagagaatgaatcagaatttcaacgtctgcttcacgcacggggtcagagactgctcagagtgcttccccggcgcgtcggaatctcaacccgtcgtcagaaaaaagacgtatcagaaactgtgcgcgattcatcatctgctggggcgggcacccgagattgcgtgttcggcctgcgatctcgtcaacgtggacttggatgactgtgtttctgagcaataaatgacttaaaccaggtatggctgctgacggttatcttccagattggctcgaggacaacctctctgagggcattcgcgagtggtgggacctgaaacctggagcccccaagcccaaggccaaccagcagaagcaggacgacggccggggtctggtgcttcctggctacaagtacctcggacccttcaacggactcgacaagggggagcccgtcaacgcggcggacgcagcggccctcgagcacgacaaggcctacgaccagcagctcaaagcgggtgacaatccgtacctgcggtataaccacgccgacgccgagtttcaggagcgtctgcaagaagatacgtcttttgggggcaacctcgggcgagcagtcttccaggccaagaagcgggttctcgaacctctcggtctggttgaggaagctgctaagacggctcctggaaagaagagaccggtagaaccgtcacctcagcgttcccccgactcctccgcgggcatcggcaagaaaggccagcagcccgctaaaaagagactgaactttggtcagactggcgactcagagtcagtccccgaccctcaaccaatcggagaaccaccagcaggcccctctggtctgggatctggtacaatggctgcaggcggtggcgctccaatggcagacaataacgaaggcgccgacggagtgggtagttcctcaggaaattggcattgcgattccacatggctgggcgacagagtcatcaccaccagcacccgaacctgggccctgcccacctacaacaaccacctctacaagcaaatatccaatgggacatcgggaggaagcaccaacgacaacacctacttcggctacagcaccccctgggggtattttgacttcaacagattccactgccacttctcaccacgtgactggcagcgactcatcaacaacaactggggattccggccaaaaagactcagcttcaagctcttcaacatccaggtcaaggaggtcacgcagaatgaaggcaccgagaccatcgccaataaccttaccagcacgattcaggtatttacggactcggaataccagctgccgtacgtcctcggctccgcgcaccagggctgcctgcctccgttcccggcggacgtcttcatgattccccagtacggctaccttacactgaacaatggaagtcaagccgtaggccgttcctccttctactgcctggaatattttccatctcaaatgctgcgaactggaaacaattttgaattcagctacaccttcgaggacgtgcctttccacagcagctgcgcacacagccagagctcggaccgactgatgaatcctctcatcgaccagtacctgtactacttatccagaactcggtccacaggaggaactcaaggtacccagcaattgttattttctcaagctgggcctgcaaacatgtcggctcaggctaagaactggctacctggaccttgctaccggcagcagcgagtctctacgacactgtcgcaaaacaacaacagcaactttgcttggactggtgccaccaaatatcacctgaacggaagagactctttggtaaatcccggtgtcgccatggcaacccacaaggacgacgaggaacgcttcttcccgtcgagtggagtcctgatgtttggaaaacagggtgctggaagagacaatgtggactacagcagcgttatgctaaccagcgaagaagaaattaaaaccactaaccctgtagccacagaacaatacggtgtggtggctgacaacttgcagcaaaccaatacagggcctattgtgggaaatgtcaacagccaaggagccttacctggcatggtctggcagaaccgagacgtgtacctgcagggtcccatctgggccaagattcctcacacggacggcaacttccacccttcaccgctaatgggaggatttggactgaagcacccacctcctcagatcctgatcaagaacacgccggtacctgcggatcctccaacaacgttcagccaggcgaaattggcttccttcattacgcagtacagcaccggacaggtcagcgtggaaatcgagtgggagctgcagaaggagaacagcaaacgctggaacccagagattcagtacacttcaaactactacaaatctacaaatgtggactttgctgtcaatacagagggaacttattctgagcctcgccccattggtactcgttacctcacccgtaatctgtaattgctggttaatcaataaaccgtttgattcgtttcagttgaactttggtctctgcgaagggcgaattcgtttaaacctgcaggactagtccctttagtgagg

SEQ ID NO: 4860 - DNA, 3172 bp, Adeno-associated virus
gattgaatttagcggccgcgaattcgcccttgctgcgtcaactggaccaatgagaactttcccttcaacgattgcgtcgacaagatggtgatctggtgggaggagggcaagatgaccgccaaggtcgtggagtccgccaaggccattctgggtggaagcaaggtgcgcgtggaccaaaagtgcaagtcatcggcccagatcgaccccacgcccgtgatcgtcacctccaacaccaacatgtgcgccgtgatcggcgggaacagcaccaccttcgagcaccagcagcccctgcaggaccgcatgttcaagttcgagctcacccgccgtctggagcacgactttggcaaggtgaccaagcaggaagtcaaagagttcttccgctgggctcaggatcacgtgactgaggtggcgcatgagttctacgtcagaaagggcggagccaccaaaagacccgcccccagtgacgcggatataagcgagcccaagcgggcctgcccctcagttgcggagccatcgacgtcagacgcggaagcaccggtggactttgcggacaggtaccaaaacaaatgttctcgtcacgcgggcatgcttcagatgctgtttccctgcaagacatgcgagagaatgaatcagaatttcaacgtctgcttcacgcacggggtcagagactgctcagagtgcctccccggcgcgtcagaatctcaacccgtcgtcagaaaaaagacgtatcagaaactgtgcgcgattcatcatctgctggggcgggcacccgagattgcgtgttcggcctgcgatctcgtcaacgtggacttggatgactgtgtttctgagcaataaatgacttaaaccaggtatggctgctgacggttatcttccagattggctcgaggacaacctctctgagggcattcgcgagtggtgggacctgaaacctggagcccccaagcccaaggccaaccagcagaagcaggacgacggccggggtctggtgcttcttggctacaagtacctcggacccttcaacggactcgacaagggggagcccgtcaatgcggcggacgcagcggccctcgagcacgacaaggcctacgaccagcagctcaaagcgggtgacaatccgtacctgcggtataaccacgccgacgccgagtttcaggagcgtctgcaagaagatacgtcttttgggggcaacctcgggcgagcagtcttccaggccaagaagcgggttctcgaacctctcggtctggttgaggaagctgctaagacggctcctggaaagaagagaccggtagaaccgtcacctcagcgttcccccgactcctccacgggcatcggcaagaaaggccagcagcccgctaaaaagagactgaactttggtcagactggcgactcagagtcagtccccgaccctcaaccaatcggagaaccaccagcaggcccctctggtctgggatctggtacaatggctgcaggcggtggcgctccaatggcagacaataacgaaggcgccgacggagtgggtagttcctcaggaaattggcattgcgattccacatggctgggcgacagagtcatcaccaccagcacccgaacctgggccctgcccacctacaacaaccacctctacaagcaaatatccaatgggacatcgggaggaagcaccaacgacaacacctacttcggctacagcaccccctgggggtattttgacttcaacagattccactgccacttctcaccacgtgactggcagcgactcatcaacaacaactggggattccggccaaaaagactcagcttcaagctcttcaacatccaggtcaaggaggtcacgcagaatgaaggcaccaagaccatcgccaataaccttaccagcacgattcaggtatttacggactcggaataccagctgccgtacgtcctcggctccgcgcaccagggctgcctgcctccgttcccggcggacgtcttcatgattccccagtacggctaccttacactgaacaatggaagtcaagccgtaggccgttcctccttctactgcctggaatattttccatctcaaatgctgcgaactggaaacaattttgaattcagctacaccttcgaggacgtgcctttccacagcggctacgcacacagccagagcttggaccgactgatgaatcctctcatcgaccagtacctgtactacttatccagaactcagtccacaggaggaactcaaggtacccagcaattgttattttctcaagctgggcctgcaaacatgtcggctcaggctaagaactggctacctggaccttgctaccggcagcagcgagtctctacgacactgtcgcaaaacaacaacagcaactttgcttggactggtgccaccaaatatcacctgaacggaagagactctttggtaaatcccggtgtcgccatggcaacccacaaggacgacgaggaacgcttcttcccgtcgagtggagtcctgatgtttggaaaacagggtgctggaagagacaatgtggactacagcagcgttatgctaaccagcgaagaagaaattaaaaccactaaccctgtagccacagaacaatacggtgtggtggctgacaacttgcagcaaaccaatacagggcctattgtgggaaatgtcaacagccaaggagccttacctggcatggtctggcagaaccgagacgtgtacctgcagggtcccatctgggccaagattcctcacacggacggcaacttccacccttcaccgctaatgggaggatttggactgaagcacccacctcctcagatcctgatcaagaacacgccggtacctgcggatcctccaacgacgttcagccaggcgaaattggcttccttcattacgcagtacagcaccggacaggtcagcgtggaaatcgagtgggagctgcagaaggagaacagcaaacgctggaacccagagattcagtacacttcaaactactacaaatctacaaatgtggactttgctgtcaatacagagggaacttattctgagcctcgccccattggtactcgttacctcacccgtaatctgtaattgctggttaatcaataaaccgtttgattcgtttcagttgaactttggtctctgcgaagggcgaattcgtttaaacctgcaggactagtccctttagtgagg

SEQ ID NO: 4861 - DNA, 2208 bp, Adeno-associated virus
atggctgccgatggttatcttccagattggctcgaggacactctctctgaaggaataagacagtggtggaagctcaaacctggcccaccaccaccaaagcccgcagagcggcataaggacgacagcaggggtcttgtgcttcctgggtacaagtacctcggacccttcaacggactcgacaagggagagccggtcaacgaggcagacgccgcggccctcgagcacgacaaggcctacgaccggcagctcgaaagcggagacaacccgtacctcaagtacaaccacgccgacgcggagtttcaggagcgtcttaaagaagatacgtcttttgggggcaacctcggacgagcagtcttccaggcgaaaaagagggttcttgaacctctgggcctggttgaggagcctgttaaaacggctccgggaaaaaagaggccggtagagcactctcctgtggagccagactcctcctcgggaaccggaaaagcgggccagcagcctgcgagaaaaagattgaattttggtcagactggagacgcagactccgtacctgacccccagcctctcggacagccaccagcagccccctctggtctgggatctactacaatggcttcaggcagtggcgcaccagtggcagacaataacgagggtgccgatggagtgggtaattcctcaggaaattggcattgcgattcccaatggctgggcgacagagtcatcaccaccagcacccgaacctgggccctgcccacctacaacaaccacctctacaagcaaatctccagccaatcaggagcctcaaacgacaaccactactttggctacagcaccccctgggggtattttgacttcaacagattccactgccacttttcaccacgtgactggcaaagactcatcaacaacagctggggattccgacccaaaagactcaacttcaagctctttaacattcaagtcaaagaggtcacgcagaatgacggtacgacgacgattgccaataaccttaccagcacggttcaagtgtttaccgactcggagtaccagctcccgtacgtcctcggctcggcgcatcaaggatgcctcccgccgttcccagcagacgtctttatggtcccacagtatggatacctcaccctgaacaacgggagtcaggcggtaggacgctcttccttttactgcctggagtactttccttctcagatgctgcgtactggaaacaactttcagttcagctacacctttgaagacgttcccttccacagcagctacgctcacagccagagtctggatcggctgctgaatcctctgatcgaccagtacctatattatctgaacaagacacaatcaaatagtggaactcttcagcagtctcggctactgtttagccaagctggacccaccagcatgtctcttcaagctaaaaactggctgcctggaccttgctacagacagcagcgtctgtcaaagcaggcaaacgacaacaacaacagcaactttccctggactgcggctacaaagtatcatctaaatggccgggactcgttggttaatccaggaccagctatggccagccacaaagacgatgaagaaaagtttttccccatgcatggaaccctgatatttggtaaacaaggaacaaatgctaacgacgcggatttggacaatgtcatgattacagatgaagaagaaatccgcaccaccaatcccgtggctacggagcagtacggatatgtgtcaaataatttgcaaaactcaaatactggtccaactactggaactgtcaatcaccaaggagcgttacctggtatggtgtggcaggatcgagacgtgtacctgcagggacccatttgggccaagattcctcacacggacgggcactttcatccttctccactaatgggaggttttgggctcaaacacccgcctcctcagatcatgatcaaaaacactcccgttccagccaatcctcctacaaacttcagttcttccaagtttgcttctttcatcacacagtattccacggggcaggtcagcgtggagatcgagtgggagctgcagaaggagaacagcaaacgctggaatcccgaaattcagtatacttccaactacaacaaatctgttaatgtggactttactgtggacactaatggtgtgtattcagagcctcgccccattggcaccagatacccgactcgtaatctgtaa

SEQ ID NO: 4862 - protein, 735 aa, Adeno-associated virus
MAADGYLPDWLEDTLSEGIRQWWKLKPGPPPPKPAERHKDDSRGLVLPGYKYLGPFNGLDKGEPVNEADAAALEHDKAYDRQLESGDNPYLKYNHADAEFQERLKEDTSFGGNLGRAVFQAKKRVLEPLGLVEEPVKTAPGKKRPVEHSPVEPDSSSGTGKAGQQPARKRLNFGQTGDADSVPDPQPLGQPPAAPSGLGSTTMASGSGAPVADNNEGADGVGNSSGNWHCDSQWLGDRVITTSTRTWALPTYNNHLYKQISSQSGASNDNHYFGYSTPWGYFDFNRFHCHFSPRDWQRLINNSWGFRPKRLNFKLFNIQVKEVTQNDGTTTIANNLTSTVQVFTDSEYQLPYVLGSAHQGCLPPFPADVFMVPQYGYLTLNNGSQAVGRSSFYCLEYFPSQMLRTGNNFQFSYTFEDVPFHSSYAHSQSLDRLLNPLIDQYLYYLNKTQSNSGTLQQSRLLFSQAGPTSMSLQAKNWLPGPCYRQQRLSKQANDNNNSNFPWTAATKYHLNGRDSLVNPGPAMASHKDDEEKFFPMHGTLIFGKQGTNANDADLDNVMITDEEEIRTTNPVATEQYGYVSNNLQNSNTGPTTGTVNHQGALPGMVWQDRDVYLQGPIWAKIPHTDGHFHPSPLMGGFGLKHPPPQIMIKNTPVPANPPTNFSSSKFASFITQYSTGQVSVEIEWELQKENSKRWNPEIQYTSNYNKSVNVDFTVDTNGVYSEPRPIGTRYPTRNL

SEQ ID NO: 4863 - DNA, 2208 bp, Adeno-associated virus
atggctgccgatggttatcttccagattggctcgaggacactctctctgaaggaataagacagtggtggaagctcaaacctggcccaccaccaccaaagcccgcagagcggcataaggacgacagcaggggtcttgtgcttcctgggtacaagtacctcggacccttcaacggactcgacaagggagagccggtcaacgaggcagacgccgcggccctcgagcacgacaaggcctacgaccggcagctcgacagcggagacaacccgtacctcaagtacaaccacgccgacgcggagtttcaggagcgtcttaaagaagatacgtcttttgggggcaacctcggacgagcagtcttccaggccaaaaagaggattcttgaacctctgggcctggttgaggaacctgttaagacggctccgggagaaaagaggccggtagagcactctcctgcggagccagactcctcctcgggaaccggaaaagcgggccagcagcctgcaagaaagagattgaattttggccagactggagacgcagactcagtacctgacccccagcctctcggacagccaccagcagccccctctggtctgggaactaatacgatggcttcaggcagtggcgcaccaatggcagacaataacgagggcgccgacggagtgggtaattcctcgggaaattggtattgcgattccacatggatgggcgacagagtcatcaccaccagcacccgcacctgggccctgcccacctacaacaaccatctgtacaagcaaatctccagccagtctggagccagcaacgacaaccactactttggctacagcaccccctgggggtattttgacttcaacagattccactgccacttctccccacgtgactggcaaagactcatcaacaacaactggggattccggcccaagagactcagcttcaagctctttaacattcaagtcaaagaggtcacgcagaatgacggtacgacgacgattgccaataaccttaccagcacggttcaggtgtttactgactcggagtaccagctcccgtacgtcctcggctcggcgcatcaaggatgcctcccgccgttcccagcagacgtcttcatggtgccacagtatggatacctcaccctgaacaacggcagtcaggcggtaggacgctcttccttttactgcctggagtactttccttctcagatgcttcgtaccggaaacaactttaccttcagctacacctttgaagacgttcctttccatagcagctacgctcacagccaaagtctggaccgtctcatgaatcctctcatcgaccagtacctgtattacttgagcagaacaaacactccaagcggaaccaccacgatgtccaggcttcagttttctcaggccggagcaagtgacattcgggaccagtctagaaactggcttcctggaccctgttaccgccagcagcgagtatcaaagacagctgcggacaacaacaacagtgattactcgtggactggagctaccaagtaccacctcaatggaagagactctctggtgaatccgggcccagctatggccagccacaaggacgatgaagaaaaatattttcctcagagcggggttctcatctttggaaaacaagactcgggaaaaactaatgtggacattgaaaaggttatgattacagacgaagaggaaatcaggaccaccaatcccgtggctacggagcagtatggttctgtatctaccaacctccagagcggcaacacacaagcagctacctcagatgtcaacacacaaggcgttcttccaggcatggtctggcaggacagagacgtgtacctgcaggggcccatctgggcaaagattccacacacggacggacattttcacccctctcccctcgtgggcggattcggacttaaacaccctcctccacaaattctcatcaagaacaccccggtacctgcgaatccttcgaccactttcagtgcggcaaagtttgcttccttcatcacacagtactccacggggcaggtcagcgtggagatcgagtgggagctgcagaaggagaacagcaaacgctggaatcccgaaattcagtacacttccaactacaacaaatctgttaatgtggactttactgtggacactaatggtgtgtattcagagcctcgccccattggcaccagatacctgactcgtaatctgtaa

SEQ ID NO: 4864 - protein, 735 aa, Adeno-associated virus
MAADGYLPDWLEDTLSEGIRQWWKLKPGPPPPKPAERHKDDSRGLVLPGYKYLGPFNGLDKGEPVNEADAAALEHDKAYDRQLDSGDNPYLKYNHADAEFQERLKEDTSFGGNLGRAVFQAKKRILEPLGLVEEPVKTAPGEKRPVEHSPAEPDSSSGTGKAGQQPARKRLNFGQTGDADSVPDPQPLGQPPAAPSGLGTNTMASGSGAPMADNNEGADGVGNSSGNWYCDSTWMGDRVITTSTRTWALPTYNNHLYKQISSQSGASNDNHYFGYSTPWGYFDFNRFHCHFSPRDWQRLINNNWGFRPKRLSFKLFNIQVKEVTQNDGTTTIANNLTSTVQVFTDSEYQLPYVLGSAHQGCLPPFPADVFMVPQYGYLTLNNGSQAVGRSSFYCLEYFPSQMLRTGNNFTFSYTFEDVPFHSSYAHSQSLDRLMNPLIDQYLYYLSRTNTPSGTTTMSRLQFSQAGASDIRDQSRNWLPGPCYRQQRVSKTAADNNNSDYSWTGATKYHLNGRDSLVNPGPAMASHKDDEEKYFPQSGVLIFGKQDSGKTNVDIEKVMITDEEEIRTTNPVATEQYGSVSTNLQSGNTQAATSDVNTQGVLPGMVWQDRDVYLQGPIWAKIPHTDGHFHPSPLVGGFGLKHPPPQILIKNTPVPANPSTTFSAAKFASFITQYSTGQVSVEIEWELQKENSKRWNPEIQYTSNYNKSVNVDFTVDTNGVYSEPRPIGTRYLTRNL

SEQ ID NO: 4865 - DNA, 2209 bp, Adeno-associated virus
atggctgccgatggttatcctccagattggctcgaggacactctctctgaagggataagacagtggtggaagctcaaacctggcccaccaccaccaaagcccgcagagcggcataaggacgacagcaggggtcttgtgcttcctgggtacaagtacctcggacccttcaacggactcgacaagggggagccggtcaacgaggcagacgccgcggccctcgagcacgacaaggcctacgaccggcagctcgacagcggagacaacccgtacctcaagtacaaccacgccgacgcagagtttcaggagcgccttaaagaagatacgtcttttgggggcaacctcggacgagcagtcttccaggcgaaaaagagggttcttgaacctctgggcctggttgaggaacctgttaagacggctccgggaaaaaagaggccggtagagcactctcctgtggagccagactcctcctcgggaaccggaaaagcgggccagcggcctgcaagaaaaagattaaattttggtcagactggagacgcagactccgtacctgacccccagcctctcggacagccaccagcagccccctctggtctgggatctactacaatggctacaggcagtggcgcaccaatggcagacaataacgagggtgccgatggagtgggtaattcctcaggaaattggcattgcgattcccaatggctgggcgacagagtcatcaccaccagcacccgaacctgggccctgcccacatacaacaaccacctctacaagcaaatctccagccaatcaggagccagcaacgacaaccactactttggctacagcaccccctgggggtattttgacttcaacagattccactgccacttttcaccacgtgactggcaaagactcatcaacaacaactggggattccggcccaaaagactcaacttcaagctctttaatattcaagtcaaagaggtcacgcagaatgacggtacgacgacgattgccaataaccttaccagcacggttcaggtgtttactgactcggagtaccagctcccgtacgtcctgggctcggcgcatcaaggatgcctcccgccgtttccagcggacgtcttcatggtcccacagtatggatacctcaccctgaacaacgggagtcaggcggtaggacgctcttccttttactgcctggagtactttccttctcagatgctgcgtactggaaacaactttcagttcagctacacttttgaagacgtgcctttccacagcagctacgctcacagccagagtctggatcggctgatgaatcctctgatcgaccagtacctgtattatctgaacaagacacaaacaaatagtggaactcttcagcagtctcggctactgtttagccaagctggaccaaccaacatgtctcttcaagctaaaaactggctgcctggaccttgctacagacagcagcgtctgtcaaaacaggcaaacgacaacaacaacagcaactttccctggactgcagctacaaagtatcatctaaatggccgggactcgttggttaatccaggaccagctatggccagtcacaaggatgacgaagaaaagtttttccccatgcatggaaccctgatatttggtaaacaaggaacaaatgccaacgacgcggatttggaaaatgtcatgattacagatgaagaagaaatcagggccaccaatcccgtggctacggagcagtacgggactgtgtcaaataatttgcaaaactcaaacactggtccaactactggaactgtcaatcgccaaggagcgttacctggtatggtgtggcaggatcgagacgtgtacctgcagggacccatttgggccaagattcctcacaccgatggacactttcatccttctccactgatgggaggttttggactcaaacacccgcctcctcagatcatgatcaaaaacactcccgttccagccaatcctcccacaaacttcagttctgccaagtttgcttctttcatcacacagtattccacgggacaggtcagcgtggagatcgagtgggagctgcagaaggagaacagcaaacgctggaatcccgaaattcagtacacttccaactacaacaagtctgttaatgtggactttactgtggacactaatggtgtgtattcagagcctcgccccattggcaccagatacctgactcgtaatctgtaat

SEQ ID NO: 4866 - protein, 735 aa, Adeno-associated virus
MAADGYPPDWLEDTLSEGIRQWWKLKPGPPPPKPAERHKDDSRGLVLPGYKYLGPFNGLDKGEPVNEADAAALEHDKAYDRQLDSGDNPYLKYNHADAEFQERLKEDTSFGGNLGRAVFQAKKRVLEPLGLVEEPVKTAPGKKRPVEHSPVEPDSSSGTGKAGQRPARKRLNFGQTGDADSVPDPQPLGQPPAAPSGLGSTTMATGSGAPMADNNEGADGVGNSSGNWHCDSQWLGDRVITTSTRTWALPTYNNHLYKQISSQSGASNDNHYFGYSTPWGYFDFNRFHCHFSPRDWQRLINNNWGFRPKRLNFKLFNIQVKEVTQNDGTTTIANNLTSTVQVFTDSEYQLPYVLGSAHQGCLPPFPADVFMVPQYGYLTLNNGSQAVGRSSFYCLEYFPSQMLRTGNNFQFSYTFEDVPFHSSYAHSQSLDRLMNPLIDQYLYYLNKTQTNSGTLQQSRLLFSQAGPTNMSLQAKNWLPGPCYRQQRLSKQANDNNNSNFPWTAATKYHLNGRDSLVNPGPAMASHKDDEEKFFPMHGTLIFGKQGTNANDADLENVMITDEEEIRATNPVATEQYGTVSNNLQNSNTGPTTGTVNRQGALPGMVWQDRDVYLQGPIWAKIPHTDGHFHPSPLMGGFGLKHPPPQIMIKNTPVPANPPTNFSSAKFASFITQYSTGQVSVEIEWELQKENSKRWNPEIQYTSNYNKSVNVDFTVDTNGVYSEPRPIGTRYLTRNL

SEQ ID NO: 4867 - DNA, 2208 bp, Adeno-associated virus
atggctgccgatggttatcttccagattggctcgaggacactctctctgaaggaataagacagtggtggaagctcaaacctggcccaccaccaccaaagcccgcagagcggcataaggacgacagcaggggtcttgtgcttcctgggtacaggtacctcggacccttcaacggactcgacaagggagagccggtcaacgaggcagacgccgcggccctcgagcacgacaaggcctacgaccggcagctcgacagcggagacaacccgtacctcaagtacaaccacgtcgacgcggagtttcaggagcgtcttaaagaagatacgtcttttgggggcaacctcggacgagcagtcttccaggccaaaaagaggattcttgaacctctgggcctggttgaggaacctgttaaggcggctccgggagaaaagaggccggtagagcactctcctgcggagccagactcctcctcgggaaccggaaaagcgggccagcagcctgcaagaaagagattgaattttggtcagactggagacgcagactcagtacctgacccccagcctctcggacagccaccagcagccccctctggtctgggaactaatacgatggcttcaggcagtggcgcaccaatggcagacaataacgagggcgccgacggagtgggtaattcctcgggaaattggcattgcgattccacatggatgggcgacagagtcatcaccaccagcacccgcacctgggccctgcccacctacaacaaccatctgtacaagcaaatctccagccagtctggagccagcaacgacaaccactactttggctacagcaccccctgggggcattttgacttcaacagattccactgccacttctccccacgtgactggcaaagactcatcaacaacaactggggattccggcccaagagactcagcttcaagctctttaacattcaagtcaaagaggtcacgcagaatgacggtacgacgacgattgccaataaccttaccagcacggttcaggtgtttactgactcggagtaccagctcccgtacgtcctcggctcggcgcatcaaggatgcctcccgccgttcccagcagacgtcttcatggtgccacagtatggatacctcaccctgaacaacggcagtcaggcggtaggacgctcttccttttactgcctggagtactttccttctcagatgcttcgtaccggaaacaactttaccttcagctacacctttgaagacgttcctttccatagcagctacgctcacagccaaagtctggaccgtctcatgaatcctctcatcgaccagtacctgtattacttgagcagaacaaacactccaagcggaaccaccacgatgtccaggcttcagttttctcaggccggagcaagtgacattcgggaccagtctagaaactggcttcctggaccctgttaccgccagcagcgagtatcaaagacagctgcggacaacaacaacagtgattactcgtggactggagctaccaagtaccacctcaatggaagagactctctggtgaatccgggcccagctatggccagccacaaggacgatgaagaaaaatattttcctcagagcggggttctcatctttggaaaacaagactcgggaaaaactaatgtggacattgaaaaggttatgattacagacgaagaggaaatcaggaccaccaatcccgtggctacggagcagtatggttctgtatctaccaacctccagagcggcaacacacaagcagctacctcagatgtcaacacacaaggcgttcttccaggcatggtctggcaggacagagacgtgtacctgcaggggcccatctgggcaaagattccacacacggacggacattttcacccctctccccccatgggcggattcggacttaaacaccctcctccacaaattctcatcaagaacaccccggtacctgcgaatccttcgaccactttcagtgcggcaaagtttgcttccttcatcacacagtactccacggggcaggtcagcgtggagatcgagtgggagctgcagaaggagaacagcaaacgctggaatcccgaaattcagtacacttccaactacaacaaatctgttaatgtggactttactgtggacactaatggtgtgtattcagagcctcgccccattggcgccagatacctgactcgtaatctgtaa

SEQ ID NO: 4868 - protein, 735 aa, Adeno-associated virus
MAADGYLPDWLEDTLSEGIRQWWKLKPGPPPPKPAERHKDDSRGLVLPGYRYLGPFNGLDKGEPVNEADAAALEHDKAYDRQLDSGDNPYLKYNHVDAEFQERLKEDTSFGGNLGRAVFQAKKRILEPLGLVEEPVKAAPGEKRPVEHSPAEPDSSSGTGKAGQQPARKRLNFGQTGDADSVPDPQPLGQPPAAPSGLGTNTMASGSGAPMADNNEGADGVGNSSGNWHCDSTWMGDRVITTSTRTWALPTYNNHLYKQISSQSGASNDNHYFGYSTPWGHFDFNRFHCHFSPRDWQRLINNNWGFRPKRLSFKLFNIQVKEVTQNDGTTTIANNLTSTVQVFTDSEYQLPYVLGSAHQGCLPPFPADVFMVPQYGYLTLNNGSQAVGRSSFYCLEYFPSQMLRTGNNFTFSYTFEDVPFHSSYAHSQSLDRLMNPLIDQYLYYLSRTNTPSGTTTMSRLQFSQAGASDIRDQSRNWLPGPCYRQQRVSKTAADNNNSDYSWTGATKYHLNGRDSLVNPGPAMASHKDDEEKYFPQSGVLIFGKQDSGKTNVDIEKVMITDEEEIRTTNPVATEQYGSVSTNLQSGNTQAATSDVNTQGVLPGMVWQDRDVYLQGPIWAKIPHTDGHFHPSPPMGGFGLKHPPPQILIKNTPVPANPSTTFSAAKFASFITQYSTGQVSVEIEWELQKENSKRWNPEIQYTSNYNKSVNVDFTVDTNGVYSEPRPIGARYLTRNL

SEQ ID NO: 4869 - DNA, 2208 bp, Adeno-associated virus
atggctgccgatggttatcttccagattggctcgaggacaccctctctgaaggaataagacagtggtggaagctcaaacctggcccaccaccaccaaagcccgcagagcggcataaggacgacagcaggggtcttgtgcttcctgggtacaagtacctcggacccttcaacggactcgacaagggagagccggtcaacgaggcagacgccgcggccctcgagcacgacaaggcctacgaccggcagctcgacagcggagataacccgtacctcaagtacaaccacgccgacgcggagtttcaggagcgccttaaagaggatacgtcttttgggggcaacctcggacgagcagtcttccaggccaaaaagaggattcttgaacctctgggcctggttgaggaacctgttaagacggctccgggaaaaaagaggccggtagagcactctcctgcggagccagactcctcctcgggaaccggaaaagcgggccagcagcctgcaagaaagagattgaattttggtcagactggagacgcagactcagtacctgacccccggcctctcggacagccaccagcagccccctctggtctgggaactaatacgatggcttcaggcagtggcgcaccaatggcagacaataacgagggcgccgacggagtgggtaattcctcgggaaattggcattgcgattccacatggatgggcgacagagtcatcaccaccagcacccgcacctgggccctgcccacctacaacaaccatctgtacaagcaaatctccagccagtctggagccagcaacgacaaccactactttggctacagcaccccctgggggtattttgacttcaacagattccactgccacttctccccacgtgactggcaaagactcatcaacaacaactggggattccggcccaagagactcagcttcaagctctttaacattcaagtcaaagaggtcacgcagaatgacggtacgacgacgattgccaataaccttaccagcacggttcaggtgtttactgactcggagtaccagctcccgtacgtcctcggctcggcgcatcaaggatgcctcccgccgttcccagcagacgtcttcatggtgccacagtatggatacctcaccctgaacaacggcagtcaggcggtaggacgctcttccttttactgcctggagtactttccttctcagatgcttcgtaccggaaacaactttaccttcagctacacctttgaagacgttcctttccatagcagctacgctcacagccaaagtctggaccgtctcatgaatcctctcatcgaccagtacctgtattacttgagcagaacaaacactccaagcggaaccaccacgatgtccaggcttcagttttctcaggccggagcaagtgacattcgggaccagtctagaaactggcttcctggaccctgttaccgccagcagcgagtatcaaagacagctgcggacaacaacaacagtgattactcgtggactggagctaccaagtaccacctcaatggaagagactctctggtgaatccgggcccagctatggccagccacaaggacgatgaagaaaaatattttcctcagagcggggttctcatctttggaaaacaagactcgggaaaaactaatgtggacattgaaaaggttatgattacagacgaagaggaaatcaggaccaccaatcccgtggctacggagcagtatggttctgtatctaccaacctccagagcggcaacacacaagcagctacctcagatgtcaacacacaaggcgttcttccaggcatggtctggcaggacagagacgtgtacctgcaggggcccatctgggcaaagattccacacacggacggacattttcacccctctcccctcatgggcggattcggacttaaacaccctcctccacaaattctcatcaagaacaccccggtacctgcgaatccttcgaccactttcagtgcggcaaagtttgcttccttcatcacacagtactccacggggcaggtcagcgtggagatcgagtgggagctgcagaaggagaacagcaaacgctggaatcccgaaattcagtacacttccaactacaacaaatctgttaatgtggactttactgtggacactaatggtgtgtattcagagcctcgccccattggcaccagatacctgactcgtaatctgtaa

SEQ ID NO: 4870 - protein, 735 aa, Adeno-associated virus
MAADGYLPDWLEDTLSEGIRQWWKLKPGPPPPKPAERHKDDSRGLVLPGYKYLGPFNGLDKGEPVNEADAAALEHDKAYDRQLDSGDNPYLKYNHADAEFQERLKEDTSFGGNLGRAVFQAKKRILEPLGLVEEPVKTAPGKKRPVEHSPAEPDSSSGTGKAGQQPARKRLNFGQTGDADSVPDPRPLGQPPAAPSGLGTNTMASGSGAPMADNNEGADGVGNSSGNWHCDSTWMGDRVITTSTRTWALPTYNNHLYKQISSQSGASNDNHYFGYSTPWGYFDFNRFHCHFSPRDWQRLINNNWGFRPKRLSFKLFNIQVKEVTQNDGTTTIANNLTSTVQVFTDSEYQLPYVLGSAHQGCLPPFPADVFMVPQYGYLTLNNGSQAVGRSSFYCLEYFPSQMLRTGNNFTFSYTFEDVPFHSSYAHSQSLDRLMNPLIDQYLYYLSRTNTPSGTTTMSRLQFSQAGASDIRDQSRNWLPGPCYRQQRVSKTAADNNNSDYSWTGATKYHLNGRDSLVNPGPAMASHKDDEEKYFPQSGVLIFGKQDSGKTNVDIEKVMITDEEEIRTTNPVATEQYGSVSTNLQSGNTQAATSDVNTQGVLPGMVWQDRDVYLQGPIWAKIPHTDGHFHPSPLMGGFGLKHPPPQILIKNTPVPANPSTTFSAAKFASFITQYSTGQVSVEIEWELQKENSKRWNPEIQYTSNYNKSVNVDFTVDTNGVYSEPRPIGTRYLTRNL

SEQ ID NO: 4871 - DNA, 2208 bp, Adeno-associated virus
atggctgccgatggttatcttccagattggctcgaggacactctctctgaaggaataagacagtggtggaagctcaaacctggcccaccaccaccaaagcccgcagagcggcataaggacgacagcaggggtcttgtgcttcctgggtacaagtacctcggacccttcaacggactcgacaagggagagccggtcaacgaggcagacgccgcggccctcgagcacgacaaggcctacgaccggcagctcgacagcggagacaacccgtacctcaagtacaaccacgccgacgcggagtttcaggagcgccttaaaggagatacgtcttttgggggcaacctcggacgagcagtcttccaggccaaaaagaggattcttgaacctctgggcctggttgaggaacctgttaagacggctccgggaaaaaagaggccggtagagcactctcctgcggagccagactcctcctcgggaaccggaaaagcgggccagcagcctgcaagaaagagattgaattttggtcagactggagacgcagactcagtacctgacccccagcctctcggacagccaccagcagccccctctggtctgggaactaatacgatggcttcaggcagtggcgcaccaatggcagacaataacgagggcgccgacggagtgggtaattcctcgggaaattggcattgcgattccacatggatgggcggcagagtcatcaccaccagcacccgcacctgggccctgcccacctacaacaaccatctgtacaagcaaatctccagccagtctggagccagcaacgacaaccactactttggctacagcaccccctgggggtattttgacttcaacagattccactgccacttctccccacgtgactggcaaagactcatcaacaacaactggggattccggcccaagagactcagcttcaagctctttaacattcaagtcaaagaggtcacgcagaatgacggtacgacgacgattgccaataaccttaccagcacggttcaggtgtttactgactcggagtaccagctcccgtacgtcctcggctcggcgcatcaaggatgcctcccgccgttcccagcagacgtcttcatggtgccacagtatggatacctcaccctgaacaacggcagtcaggcggtaggacgctcttccttttactgcctggagtactttccttctcagacgcttcgtaccggaaacaactttaccttcagctacacctttgaagacgttcctttccatagcagctacgctcacagccaaagtctggaccgtctcatgaatcctctcatcgaccagtacctgtattacttgagcagaacaaacactccaagcggaaccaccacgatgtccaggcttcagttttctcaggccggagcaagtgacattcgggaccagtctagaaactggcttcctggaccctgttaccgccagcagcgagtatcaaagacagctgcggacaacaacaacagtgattactcgtggactggagctaccaagtaccacctcaatggaagagactctctggtgaatccgggcccagctatggccagccacaaggacgatgaagaaaaatattttcctcagagcggggttctcatctttggaaaacaagactcgggaaaaactaatgtggacattgaaaaggttatgattacagacgaagaggaaatcaggaccaccaatcccgtggctacggagcagtatggttctgtatctaccaacctccagagcggcaacacacaagcagctacctcagatgtcaacacacaaggcgttcttccaggcatggtctggcaggacagagacgtgtacctgcaggggcccatctgggcaaagattccacacacggacggacattttcacccctctcccctcatgggcggattcggacttaaacaccctcctccacaaattctcatcaagaacaccccggtacctgcgaatccttcgaccactttcagtgcggcaaagtttgcttccttcatcacacagtactccacggggcaggtcagcgtggagatcgagtgggagctgcagaaggagaacagcaaacgctggaatcccgaaattcagtacacttccaactacaacaaatctgttaatgtggactttactgtggacactaatggtgtgtattcagagcctcgccccattggcaccagatacctgactcgtaatctgtaa

SEQ ID NO: 4872 - protein, 735 aa, Adeno-associated virus
MAADGYLPDWLEDTLSEGIRQWWKLKPGPPPPKPAERHKDDSRGLVLPGYKYLGPFNGLDKGEPVNEADAAALEHDKAYDRQLDSGDNPYLKYNHADAEFQERLKGDTSFGGNLGRAVFQAKKRILEPLGLVEEPVKTAPGKKRPVEHSPAEPDSSSGTGKAGQQPARKRLNFGQTGDADSVPDPQPLGQPPAAPSGLGTNTMASGSGAPMADNNEGADGVGNSSGNWHCDSTWMGGRVITTSTRTWALPTYNNHLYKQISSQSGASNDNHYFGYSTPWGYFDFNRFHCHFSPRDWQRLINNNWGFRPKRLSFKLFNIQVKEVTQNDGTTTIANNLTSTVQVFTDSEYQLPYVLGSAHQGCLPPFPADVFMVPQYGYLTLNNGSQAVGRSSFYCLEYFPSQTLRTGNNFTFSYTFEDVPFHSSYAHSQSLDRLMNPLIDQYLYYLSRTNTPSGTTTMSRLQFSQAGASDIRDQSRNWLPGPCYRQQRVSKTAADNNNSDYSWTGATKYHLNGRDSLVNPGPAMASHKDDEEKYFPQSGVLIFGKQDSGKTNVDIEKVMITDEEEIRTTNPVATEQYGSVSTNLQSGNTQAATSDVNTQGVLPGMVWQDRDVYLQGPIWAKIPHTDGHFHPSPLMGGFGLKHPPPQILIKNTPVPANPSTTFSAAKFASFITQYSTGQVSVEIEWELQKENSKRWNPEIQYTSNYNKSVNVDFTVDTNGVYSEPRPIGTRYLTRNL

SEQ ID NO: 4873 - DNA, 2208 bp, Adeno-associated virus
atggctgccgatggttatcttccagattggctcgaggacactctctctgaaggaataagacagtggtggaagctcaaacctggcccaccaccaccaaagcccgcagagcggcataaggacgacagcaggggtcttgtgcttcctgggtacaagtacctcggacccttcaacggactcgacaagggagagccggtcaacgaggcagacgccgcggccctcgagcacgacaaggcctacgaccggcagctcgacagcggagacaacccgtacctcaagtacaaccacgccgacgcggagtttcaggagcgtcttaaagaagatacgtcttttgggggcaacctcggacgagcagtcttccaggccaaaaagaggattcttgaacctctgggcctggttgaggaacctgttaagacggctccgggaaaaaagaggccggtagagcactctcctgcggagccagactcctcctcgggaaccggaaaagcgggccagcagcctgcaagaaagagattgaattttggtcagactggagacgcagactcagtacctgacccccagcctctcggacagccaccagcagccccctctggtctgggaactaatacgatggcttcaggcagtggcgcaccaatggcagacaataacgagggcgccgacggagtgggtaattcctcgggaaattggcattgcgattccacatggatgggcgacagagtcatcaccaccagcacccgcacctgggccctgcccacctgcaacaaccatctgtacaagcaaatctccagccagtctggagccagcaacgacaaccactactttggctacagcaccccctgggggtattttgacttcaacagattccactgccacttctccccacgtgactggcaaagactcatcaacaacaactggggattccggcccaagagactcagcttcaagctctttaacattcaagtcaaagaggtcacgcagaatgacggtacgacgacgattgccaataaccttaccagcacggttcaggtgtttactgactcggagtaccagctcccgtacgtcctcggctcggcgcatcaaggatgcctcccgccgttcccagcagacgtcttcatggtgccacagtatggatacctcaccctgaacaacggcagtcaggcggtaggacgctcttccttttactgcctggagtattttccttctcagatgcttcgtaccggaaacaactttaccttcagctacacctttgaagacgttcctttccatagcagctacgctcacagccaaagtctggaccgtctcatgaatcctctcatcgaccagtacctgtattacttgagcagaacaaacactccaagcggaaccaccacgatgtccaggcttcagttttctcaggccggagcaagtgacattcgggaccagtctagaaactggcttcctggaccctgttaccgccagcagcgagtatcaaagacagctgcggacaacaacaacagtgattactcgtggactggagctaccaagtaccacctcaatggaagagactctctggtgaatccgggcccagctatggccagccacaaggacgatgaagaaaaatattttcctcagagcggggttctcatctttggaaaacaagactcgggaaaaactaatgtggacattgaaaaggttatgattacagacgaagaggaaatcaggaccaccaatcccgtggctacggagcagtatggttctgtatctacctacctccagagcggcaacacacaagcagctacctcagatgtcaacacacaaggcgttcttccaggcatggtctggcaggacagagacgtgtacctgcgggggcccatctgggcaaagattccacacacggacggacattttcacccctctcccctcatgggcggatttggacttaaacaccctcctccacaaattctcatcaagaacaccccggtacctgcgaatccttcgaccactttcagtgcggcaaagtttgcttccttcatcacacagtactccacggggcaggtcagcgtggagatcgagtgggagctgcagaaggagaacagcaaacgctggaatcccgaaattcagtacacttccaactacaacaaatctgttaatgtggactttactgtggacactaatggtgtgtattcagagcctcgccccattggcaccagatacctgactcgtaatctgtaa

SEQ ID NO: 4874 - protein, 735 aa, Adeno-associated virus
MAADGYLPDWLEDTLSEGIRQWWKLKPGPPPPKPAERHKDDSRGLVLPGYKYLGPFNGLDKGEPVNEADAAALEHDKAYDRQLDSGDNPYLKYNHADAEFQERLKEDTSFGGNLGRAVFQAKKRILEPLGLVEEPVKTAPGKKRPVEHSPAEPDSSSGTGKAGQQPARKRLNFGQTGDADSVPDPQPLGQPPAAPSGLGTNTMASGSGAPMADNNEGADGVGNSSGNWHCDSTWMGDRVITTSTRTWALPTCNNHLYKQISSQSGASNDNHYFGYSTPWGYFDFNRFHCHFSPRDWQRLINNNWGFRPKRLSFKLFNIQVKEVTQNDGTTTIANNLTSTVQVFTDSEYQLPYVLGSAHQGCLPPFPADVFMVPQYGYLTLNNGSQAVGRSSFYCLEYFPSQMLRTGNNFTFSYTFEDVPFHSSYAHSQSLDRLMNPLIDQYLYYLSRTNTPSGTTTMSRLQFSQAGASDIRDQSRNWLPGPCYRQQRVSKTAADNNNSDYSWTGATKYHLNGRDSLVNPGPAMASHKDDEEKYFPQSGVLIFGKQDSGKTNVDIEKVMITDEEEIRTTNPVATEQYGSVSTYLQSGNTQAATSDVNTQGVLPGMVWQDRDVYLRGPIWAKIPHTDGHFHPSPLMGGFGLKHPPPQILIKNTPVPANPSTTFSAAKFASFITQYSTGQVSVEIEWELQKENSKRWNPEIQYTSNYNKSVNVDFTVDTNGVYSEPRPIGTRYLTRNL

SEQ ID NO: 4875 - DNA, 2208 bp, Adeno-associated virus; identical to SEQ ID NO: 4869

SEQ ID NO: 4876 - protein, 735 aa, Adeno-associated virus; identical to SEQ ID NO: 4870

SEQ ID NO: 4877 - DNA, 2208 bp, Adeno-associated virus
atggctgccgatggttatcttccagattggctcgaggacactctctctgaaggaataagacagtggtggaagctcaaacctggcccaccaccaccaaagcccgcagagcggcataaggacggcagcaggggtcttgtgcttcctgggtacaagtacctcggacccttcaacggactcgacaagggagagccggtcaacgaggcagacgccgcggccctcgagcacgacaaggcctacgaccggcagctcaacagcggagacaacccgtacctcaagtacaaccacgccgacgcggagtttcaggagcgccttaaagaagatacgtcttttgggggcaacctcggacgagcagtcttccaggcaaaaaagagggttcttgaacctctgggcctggttgaggagcctgttaaaacggctccgggaaaaaagagaccggtagagcactctcctgcggagccagactcctcctcgggaaccggaaaagcgggccagcagcctgcaagaaagagattgaattttggtcagactggagacgcagactccgtacctgacccccagcctctcggacagccaccagcagccccctctggtctgggatctactacaatggctacaggcagtggcgcaccaatggcagacaataacgagggtgccgatggagtgggtaattcctcaggaaattggcattgcgattcccaatggctgggcgacagagtcatcaccacaagcactcgaacctgggccctgcccacctacaacaaccacctctacaagcaaatctccagccaatcaggagcctcaaacgacaaccactattttggctacagcaccccttgggggtattttgacttcaacagattccactgccacttttcaccacgtgactggcaaagactcatcaacaacaactggggattccgacccaagagactcaacttcaagctctttaacattcaagtcaaagaggtcacgcagaatgacggtacgacgacgattgccaataaccttaccagcacggttcaggtgtttactgactcggagtaccagctcccgtacgtcctcggctcggcgcatcaaggatgcctcccgccgttcccagcggacgtcttcatggtcccacagtatggatacctcaccctgaacaacgggagtcaggcggtaggacgctctcccttttactgcctggagtactttccttctcagatgctgcgtactggaaacaactttcagttcagctacacttttgaagacgtgcctttccacagcagctacgctcacagccagagtctggatcggctgatgaatcctctgatcgaccagtacctgtattatctgaacaagacacaaacaaatagtggaactcttcagcagtctcggctactgtttagccaagctggacccaccaacatgtctcttcaagctaaaaactggctgcctggaccttgctacagacagcagcgtctgtcaaagcaggcaaacgacaacaacaacagcaactttccctggactgcagctacaaagtatcatctaaatggccgggactcgttggttaatccaggaccagctatggccagtcacaaggatgacgaagaaaagtttttccccatgcatggaaccctgatatttggtaaacaaggaacaaatgccaacgacgcggatttggaaaatgtcatgattacagatgaagaagaaatcaggaccaccaatcccgtggctacggagcagtacgggactgtgtcaaataatttgcaaaactcaaacactggtccaactactggaactgtcaatcaccaaggagcgttacctggtatggtgtggcaggatcgagatgtgtaccttcagggacccatttgggccaagattcctcacaccgatggacactttcatccttctccactgatgggaggttttggactcaaacacccgcctcctcagattatgatcaaaaacactcccgttccagccaatcctcctacaaacttcagttctgccaagtttgcttctttcatcacacagtattccacggggcaggtcagcgtggagatcgagtgggagctgcagaaggagaacagcaaacgctggaatcccgaaattcagtacacttccaactacaacaaatctgttaatgtggactttactgtggacaataatggcgtgtactcagagcctcgccccattggcaccagatacctgactcgtaatctgtaa

SEQ ID NO: 4878 - protein, 735 aa, Adeno-associated virus
MAADGYLPDWLEDTLSEGIRQWWKLKPGPPPPKPAERHKDGSRGLVLPGYKYLGPFNGLDKGEPVNEADAAALEHDKAYDRQLNSGDNPYLKYNHADAEFQERLKEDTSFGGNLGRAVFQAKKRVLEPLGLVEEPVKTAPGKKRPVEHSPAEPDSSSGTGKAGQQPARKRLNFGQTGDADSVPDPQPLGQPPAAPSGLGSTTMATGSGAPMADNNEGADGVGNSSGNWHCDSQWLGDRVITTSTRTWALPTYNNHLYKQISSQSGASNDNHYFGYSTPWGYFDFNRFHCHFSPRDWQRLINNNWGFRPKRLNFKLFNIQVKEVTQNDGTTTIANNLTSTVQVFTDSEYQLPYVLGSAHQGCLPPFPADVFMVPQYGYLTLNNGSQAVGRSPFYCLEYFPSQMLRTGNNFQFSYTFEDVPFHSSYAHSQSLDRLMNPLIDQYLYYLNKTQTNSGTLQQSRLLFSQAGPTNMSLQAKNWLPGPCYRQQRLSKQANDNNNSNFPWTAATKYHLNGRDSLVNPGPAMASHKDDEEKFFPMHGTLIFGKQGTNANDADLENVMITDEEEIRTTNPVATEQYGTVSNNLQNSNTGPTTGTVNHQGALPGMVWQDRDVYLQGPIWAKIPHTDGHFHPSPLMGGFGLKHPPPQIMIKNTPVPANPPTNFSSAKFASFITQYSTGQVSVEIEWELQKENSKRWNPEIQYTSNYNKSVNVDFTVDNNGVYSEPRPIGTRYLTRNL

SEQ ID NO: 4879 - DNA, 2208 bp, Adeno-associated virus
atggctgccgatggttatcttccagattggctcgaggacactctctctgaaggaataagacagtggtggaagctcaaacctggcccaccaccaccaaagcccgcagagcggcataaggacgacagcaggggtcttgtgcttcctgggtacaagtacctcggacccttcaacggactcgacaagggagagccggtcaacgaggcagacgccgcggccctcgagcacgacaaggcctacgaccggcagctcgacagcggagacaacccgtacctcaagtacaaccacgccgacgcggagtttcaggagcgtcttaaagaagatacgtcttttgggggcaacctcggacgagcagtcttccaggccaaaaagaggattcttgaacctctgggcctggttgaggaacctgttaagacggctccgggaaaaaagaggccggtagagcactctcctgcggagccagactcctcctcgggaaccggaaaagcgggccagcagcctgcaagaaagagattgaattttggtcagactggagacgcagactcagtacctgacccccagcctctcggacagccaccagcagccccctctggtctgggaactaatacgatggcttcaggcagtggcgcaccaatggcagacaataacgagggcgccgacggagtgggtaattcctcgggaaattggcattgcgattccacatggatgggcgacagagtcatcaccaccagcacccgcacctgggccctgcccacctacaacaaccatctgtacaagcaaatctccagccagtctggagccagcaacgacaaccactactttggctacagcaccccctgggggtattttgacttcaacagattccactgccacttctccccacgtgactggcaaagactcatcaacaacaactggggattccggcccaagagactcagcttcaagctctttaacattcaagtcaaagaggtcacgcagaatgacggtacgacgacgattgccaataaccttaccagcacggttcaggtgtttactgactcggagtaccagctcccgtacgtcctcggctcggcgcatcaaggatgcctcccgccgttcccagcagacgtcttcatggtgccacagtatggatacctcaccctgaacaacggcagtcaggcggtaggacgctcttccttttactgcctggagtactttccttctcagatgcttcgtaccggaaacaactttaccttcagctacacctttgaagacgttcctttccatagcagctacgctcacagccaaagtctggaccgtctcatgaatcctctcatcgaccagtacctgtattacttgagcagaacaaacactccaagcggaaccaccacgatgtccaggcttcagttttctcaggccggagcaagtgacattcgggaccagtctagaaactggcttcctggaccctgttaccgccagcagcgagtatcaaagacagctgcggacaacaacaacagtgattactcgtggactggagctaccaagtaccacctcaatggaagagactctctggtgaatccgggcccagctatggccagccacaaggacgatgaagaaaaatattttcctcagagcggggttctcatctttggaaaacaagactcgggaaaaactaatgtggacattgaaaaggttatgattacagacgaagaggaaatcaggaccaccaatcccgtggctacggagcagtatggttctgtatctaccaacctccagagcggcaacacacaagcagctacctcagatgtcaacacacaaggcgttcttccaggcatggtctggcaggacagagacgtgtacctgcaggggcccatctgggcaaagattccacacacggacggacattttcacccctctcccctcatgggcggattcggacttaaacaccctcctccacaaattctcatcaagaacaccccggtacctgcgaatccttcgaccactttcagtgcggcaaagtttgcttccttcatcacacagtactccacggggcaggtcagcgtggagatcgagtgggagctgcagaaggagaacagcaaacgctggaatcccgaaattcagtacacttccaactacaacaaatctgttaatgtggactttactgtggacactaatggtgtgtattcagagcctcgccccattggcaccagatacctgactcgtaatctgtaa

SEQ ID NO: 4880 - protein, 735 aa, Adeno-associated virus
MAADGYLPDWLEDTLSEGIRQWWKLKPGPPPPKPAERHKDDSRGLVLPGYKYLGPFNGLDKGEPVNEADAAALEHDKAYDRQLDSGDNPYLKYNHADAEFQERLKEDTSFGGNLGRAVFQAKKRILEPLGLVEEPVKTAPGKKRPVEHSPAEPDSSSGTGKAGQQPARKRLNFGQTGDADSVPDPQPLGQPPAAPSGLGTNTMASGSGAPMADNNEGADGVGNSSGNWHCDSTWMGDRVITTSTRTWALPTYNNHLYKQISSQSGASNDNHYFGYSTPWGYFDFNRFHCHFSPRDWQRLINNNWGFRPKRLSFKLFNIQVKEVTQNDGTTTIANNLTSTVQVFTDSEYQLPYVLGSAHQGCLPPFPADVFMVPQYGYLTLNNGSQAVGRSSFYCLEYFPSQMLRTGNNFTFSYTFEDVPFHSSYAHSQSLDRLMNPLIDQYLYYLSRTNTPSGTTTMSRLQFSQAGASDIRDQSRNWLPGPCYRQQRVSKTAADNNNSDYSWTGATKYHLNGRDSLVNPGPAMASHKDDEEKYFPQSGVLIFGKQDSGKTNVDIEKVMITDEEEIRTTNPVATEQYGSVSTNLQSGNTQAATSDVNTQGVLPGMVWQDRDVYLQGPIWAKIPHTDGHFHPSPLMGGFGLKHPPPQILIKNTPVPANPSTTFSAAKFASFITQYSTGQVSVEIEWELQKENSKRWNPEIQYTSNYNKSVNVDFTVDTNGVYSEPRPIGTRYLTRNL

SEQ ID NO: 4881 - DNA, 2208 bp, Adeno-associated virus
atggctgccgatggttatcttccagattggctcgaggacactctctctgaaggaataagacagtggtggaagctcaaacctggcccaccaccaccaaagcccgcagagcggcataaggacgacagcaggggtcttgtgcttcctgggtacaagtacctcggacccttcaacggactcgacaagggagagccggtcaacgaggcagacgccgcggccctcgagcacgacaaggcctacgaccggcagctcgacagcggagacaacccgtacctcaagtacaaccacgccgacgcggagtttcaggagcgtcttaaagaagatacgtcttttgggggcaacctcggacgagcagtcttccaggccaaaaagaggattcttgaacctctgggcctggttgaggaacctgttaagacggctccgggaaaaaagaggccggtagagcactctcctgcggagccagactcctcctcgggaaccggaaaagcgggccagcagcctgcaagaaagagattgaattttggtcagactggagacgcagactcagtacctgacccccagcctctcggacagccaccagcagccccctctggtctgggaactaatacgatggcttcaggcagtggcgcaccaatggcagacaataacgagggcgccgacggagtgggtaattcctcgggaaattggcattgcgattccacatggatgggcgacagagtcatcaccaccagcacccgcacctgggccctgcccacctacaacaaccatctgtacaagcaaatctccagccagtctggagccagcaacgacaaccactactttggctacagcaccccctgggggtatttcgacttcaacagattccactgccacttctccccacgtgactggcaaagactcatcaacaacaactggggattccggcccaagagactcagcttcaagctctttaacattcaagtcaaagaggtcacgcagaatgacggtacgacgacgattgccaataaccttaccagcacggttcaggtgtttactgactcggggtaccagctcccgtacgtcctcggctcggcgcatcaaggatgccttccgccgttcccagcagacgtcttcatggtgccacagtatggatacctcaccctgaacaacggcagtcaggcggtaggacgctcttccttttactgcctggagtactttccttctcagatgcttcgtaccggaaacaactttaccttcagctacacctttgaagacgttcctttccatagcagctacgctcacggccaaagtctggaccgtctcatgaatcctctcatcgaccagtacctgtattacttgagcagaacaaacactccaagcggaaccaccacgatgtccaggcttcagttttctcaggccggagcaagtgacgttcgggaccagtctagaaactggcttcctggaccctgttaccgccagcagcgagtatcaaagacagctgcggacaacaacaacagtgattactcgtggactggagctaccaagtaccacctcaatggaagagactctctggtgaatccgggcccagctatggccagccacaaggacgatgaagaaaaatattttcctcagagcggggttctcgtctttggaaaacaagactcgggaaaaactaatgtggacattgaaaaggttatgattacagacgaagaggaaatcaggaccaccaatcccgcggctacggagcagtatggttctgtatctaccaacctccagagcggcaacacacaagcagctacctcagatgtcaacacacaaggcgttcttccaggcatggtctggcaggacagagacgtgtacctgcaggggcccatctgggcaaagattccacacacggacggacattttcacccctctcccctcatgggcggattcggacttaaacaccctcctccacaaattctcatcaagaacaccccggtacctgcgaatccttcgaccactttcagtgcggcaaagtttgtttccttcatcacacagtactccacggggcaggtcagcgtggagatcgagtgggagctgcagaaggagaacagcaaacgctggaatcccgaaattcagtacacttccaactacaacaaatctgttaatgtggactttactgtggacactaatggtgtgtattcagagcctcgccccattggcaccagatacctgactcgtaatctgtaa

SEQ ID NO: 4882 - protein, 735 aa, Adeno-associated virus
MAADGYLPDWLEDTLSEGIRQWWKLKPGPPPPKPAERHKDDSRGLVLPGYKYLGPFNGLDKGEPVNEADAAALEHDKAYDRQLDSGDNPYLKYNHADAEFQERLKEDTSFGGNLGRAVFQAKKRILEPLGLVEEPVKTAPGKKRPVEHSPAEPDSSSGTGKAGQQPARKRLNFGQTGDADSVPDPQPLGQPPAAPSGLGTNTMASGSGAPMADNNEGADGVGNSSGNWHCDSTWMGDRVITTSTRTWALPTYNNHLYKQISSQSGASNDNHYFGYSTPWGYFDFNRFHCHFSPRDWQRLINNNWGFRPKRLSFKLFNIQVKEVTQNDGTTTIANNLTSTVQVFTDSGYQLPYVLGSAHQGCLPPFPADVFMVPQYGYLTLNNGSQAVGRSSFYCLEYFPSQMLRTGNNFTFSYTFEDVPFHSSYAHGQSLDRLMNPLIDQYLYYLSRTNTPSGTTTMSRLQFSQAGASDVRDQSRNWLPGPCYRQQRVSKTAADNNNSDYSWTGATKYHLNGRDSLVNPGPAMASHKDDEEKYFPQSGVLVFGKQDSGKTNVDIEKVMITDEEEIRTTNPAATEQYGSVSTNLQSGNTQAATSDVNTQGVLPGMVWQDRDVYLQGPIWAKIPHTDGHFHPSPLMGGFGLKHPPPQILIKNTPVPANPSTTFSAAKFVSFITQYSTGQVSVEIEWELQKENSKRWNPEIQYTSNYNKSVNVDFTVDTNGVYSEPRPIGTRYLTRNL

SEQ ID NO: 4883 - DNA, 2208 bp, Adeno-associated virus
atggctgccgatggttatcttccagattggctcgaggacactctctctgaaggaataagacagtggtggaaactcaaacctggcccaccaccaccaaagcccgcagagcggcataaggacgacagcaggggtcttgtgcttcctgggtacaagtacctcggacccttcaacggactcgacaagggagagccggtcaacgaggcagacgccgcggccctcgagcacgacaaggcctacgaccggcagctcgacagcggagacaacccgtacctcaagtacaaccacgccgacgcggagtttcaggagcgccttaaagaagatacgtcttttgggggcaacctcggacgagcagtcttccaggcaaaaaagagggttctggaacctctgagcctggttgaggagcctgttaagacggctccgggaaaaaagaggccggtagagcactctcccgcagagccagattcctcctccggaactggaaagtcgggcaaccagcctgcaagaaagagattgaatttcggtcagactggagactcagactccgtacctgacccccagcctctcggacagccaccagcagccccctctggtctgggaactaatacgatggctacaggcagtggcgcaccaatggcagacaataacgagggcgccgacggagtgggtaattcctcgggaaattggcattgcgattccacatggatgggcgacagagtcatcaccaccagcacccgaacctgggccctgcccacctacaacaaccatctgtacaagcaaatatccagccagtctggagccagcaacgacaatcactactttggctacagcaccccctgggggtattttgacttcaacagattccactgccacttttcaccacgtgactggcaaagactcatcaacaacaactggggattccgacccaagagactcaacttcaagctctttaacattcaagtcaaagaggtcacgcagaatgacggtacgacgacgattgccaataaccttaccagcacggttcaggtgtttactgactcggagtaccagctcccgtacgtcctcggctcggcgcatcaaggatgcctcccgccgttcccagcagacgtcttcatggtgccacagtatggatacctcaccctgaacaacgggagtcaggcagtaggacgctcttcattttactgcctagagtactttccttctcagatgctgcgtaccggaaacaactttaccttcagctacacctttgaggacgttcctttccacagcagctacgctcacagccagagtttggaccgtctcatgaatcctctcatcgaccagtacctgtattacttgagcagaacaaacactccaagcggaaccaccacgcagtccaggcttcagttttctcaggccggagcgagtgacattcaggaccagtctaggaactggcttcctggaccctgttaccgtcagcagcgagtatcaaagacatctgcggataacaacaacagtgaatactcgtggactggagctaccaagtaccacctcaatggcagagactctctggtgaatccgggcccggccatggccagccacaaagacgatgaagaaaagttttttcctcagagcggggttcttatctttgggaagcaaggctcagagaaaacaaatgtggatattgaaaaggtcatgattacagacgaagaggaaatcaggaccaccaatcccgtggctacggagcagtatggttctgtatctaccaacctccagagcggcaacacacaagcagctaccgcagatgtcaacacacaaggcgttcttccaggcatggtcgggcaagacagagacgtgtacctgcaggggcctacttgggcaaagattccacacacggacggacattttcacccctctcccctcatgggcggatttggacttaaacaccctcctccacagattctcatcaagaacaccccggtacctgcgaatccttcgaccaccttcagtgcggcaaagtttgcttccttcattacacagtactccacggggcaggtcagcgtggagatcgagtgggagctgcagaaggagaacagcaaacgctggaatcccgagatccagtacacttccaactacaacaagtctgttaatgtggactttactgtggacactaatggcgtgtattcagagcctcgccccattggcaccagatacctgactcgtaatctgtaa

SEQ ID NO: 4884 - protein, 735 aa, Adeno-associated virus
MAADGYLPDWLEDTLSEGIRQWWKLKPGPPPPKPAERHKDDSRGLVLPGYKYLGPFNGLDKGEPVNEADAAALEHDKAYDRQLDSGDNPYLKYNHADAEFQERLKEDTSFGGNLGRAVFQAKKRVLEPLSLVEEPVKTAPGKKRPVEHSPAEPDSSSGTGKSGNQPARKRLNFGQTGDSDSVPDPQPLGQPPAAPSGLGTNTMATGSGAPMADNNEGADGVGNSSGNWHCDSTWMGDRVITTSTRTWALPTYNNHLYKQISSQSGASNDNHYFGYSTPWGYFDFNRFHCHFSPRDWQRLINNNWGFRPKRLNFKLFNIQVKEVTQNDGTTTIANNLTSTVQVFTDSEYQLPYVLGSAHQGCLPPFPADVFMVPQYGYLTLNNGSQAVGRSSFYCLEYFPSQMLRTGNNFTFSYTFEDVPFHSSYAHSQSLDRLMNPLIDQYLYYLSRTNTPSGTTTQSRLQFSQAGASDIQDQSRNWLPGPCYRQQRVSKTSADNNNSEYSWTGATKYHLNGRDSLVNPGPAMASHKDDEEKFFPQSGVLIFGKQGSEKTNVDIEKVMITDEEEIRTTNPVATEQYGSVSTNLQSGNTQAATADVNTQGVLPGMVGQDRDVYLQGPTWAKIPHTDGHFHPSPLMGGFGLKHPPPQILIKNTPVPANPSTTFSAAKFASFITQYSTGQVSVEIEWELQKENSKRWNPEIQYTSNYNKSVNVDFTVDTNGVYSEPRPIGTRYLTRNL

SEQ ID NO: 4885 - DNA, 2208 bp, Adeno-associated virus
atggctgccgatggttatcttccagattggctcgaggacactctctctgaaggaataagacagtggtggaagctcaaacctggcccaccaccaccaaagcccgcagagcggcataaggacgacagcaggggtcttgtgcttcctgggtacaagtacctcggacccttcaacggactcgacaagggagagccggtcaacgaggcagacgccgcggccctcgagcacgacaaggcctacgaccggcagctcgacagcggagacaacccgtacctcaagtacaaccacgccgacgcagagtttcaggagcgccttaaagaagatacgtcttttgggggcaacctcggacgagcagtcttccaggcaaaaaagagggttctggaacctctgggcctggttgaggagcctgttaagacggctccgggaaaaaagaggccggtagagcactctcctgcagagccagattcctcctccggaactggaaagtcgggcaaccagcctgcaagaaagagattgaatttcggtcagactggagactcagactccgtacctgacccccagcctctcggacagccaccagcagccccctctggtctgggaactaatacgatggctacaggcagtggcgcaccaatggcagacaataacgagggcgccgacggagtgggtaattcctcgggaaattggcattgcgattccacatggatgggcgacagagtcatcaccaccagcacccgaacctgggccctgcccacctacaacaaccatctgtacaagcaaatatccagccagtctggagccagcaacgacaatcactactttggctacagcaccccctgggggtattttgacttcaacagattccactgccacttttcaccacgtgactggcaaagactcatcaacaacaactggggattccgacccaagagactcaacttcaagctctttaacattcaagtcaaagaggtcacgcagaatgacggtacgacgacgattgccaataaccttaccagcacggttcaggtgtttactgactcggagtaccagctcccgtacgtcctcggctcggcgcatcaaggatgcctcccgccgttcccagcagacgtcttcatggtgccacagtatggatacctcaccctgaacaacgggagtcaggcagtaggacgctcttcattttactgcctagggtactttccttctcagatgctgcgtaccggaaacaactttaccttcagctacacctttgaggacgttcctttccacagcagctacgctcacagccagagtttggaccgtctcatgaatcctctcatcgaccagtacctgtattacttgagcagaacaaacactccaagcggaaccaccacgcagtccaggcttcagttttctcaggccggagcgagtgacattcgggaccagtctaggaactggcttcctggaccctgttaccgtcagcagcgagtatcaaagacatctgcggataacaacaacagtgaatactcgtggactggagctaccaagtaccacctcaatggcagagactctctggtgaatccgggcccggccatggccagccacaaagacgatgaagaaaagttttttcctcagagcggggttcttatctttgggaagcaaggcccagagaaaacaaatgtggatattgaaaaggtcatgattacagacgaagaggaaatcaggaccaccaatcccgtggctacggagcagtatggttctgtatctaccaacctccagagcggcaacacacaagcagctaccgcagatgtcaacacacaaggcgttcttccaggcatggtctggcaagacagagacgtgtacctgcaggggcctatttgggcaaagattccacacacggacggacattttcacccctctcccctcatgggcggatttggacttaaacaccctcctccacagattctcatcaagaacaccccggtacctgcgaatccttcgaccaccttcagtgcggcaaagtttgcttccttcattacacagtactccacggggcaggtcagcgtggagatcgagtgggagctgcagaaggagaacagcaaacgctggaatcccgagatccagtacacttccaactacaacaagtctgttaatgtggactttactgtggacactaatggcgtgtattcagagcctcgccccattggcaccagatacctgactcgtaatctgtaa

SEQ ID NO: 4886 - protein, 735 aa, Adeno-associated virus
MAADGYLPDWLEDTLSEGIRQWWKLKPGPPPPKPAERHKDDSRGLVLPGYKYLGPFNGLDKGEPVNEADAAALEHDKAYDRQLDSGDNPYLKYNHADAEFQERLKEDTSFGGNLGRAVFQAKKRVLEPLGLVEEPVKTAPGKKRPVEHSPAEPDSSSGTGKSGNQPARKRLNFGQTGDSDSVPDPQPLGQPPAAPSGLGTNTMATGSGAPMADNNEGADGVGNSSGNWHCDSTWMGDRVITTSTRTWALPTYNNHLYKQISSQSGASNDNHYFGYSTPWGYFDFNRFHCHFSPRDWQRLINNNWGFRPKRLNFKLFNIQVKEVTQNDGTTTIANNLTSTVQVFTDSEYQLPYVLGSAHQGCLPPFPADVFMVPQYGYLTLNNGSQAVGRSSFYCLGYFPSQMLRTGNNFTFSYTFEDVPFHSSYAHSQSLDRLMNPLIDQYLYYLSRTNTPSGTTTQSRLQFSQAGASDIRDQSRNWLPGPCYRQQRVSKTSADNNNSEYSWTGATKYHLNGRDSLVNPGPAMASHKDDEEKFFPQSGVLIFGKQGPEKTNVDIEKVMITDEEEIRTTNPVATEQYGSVSTNLQSGNTQAATADVNTQGVLPGMVWQDRDVYLQGPIWAKIPHTDGHFHPSPLMGGFGLKHPPPQILIKNTPVPANPSTTFSAAKFASFITQYSTGQVSVEIEWELQKENSKRWNPEIQYTSNYNKSVNVDFTVDTNGVYSEPRPIGTRYLTRNL

SEQ ID NO: 4887 - protein, 735 aa, Adeno-associated virus
MAADGYLPDWLEDTLSEGIRQWWKLKPGPPPPKPAERHKDDSRGLVLPGYKYLGPFNGLDKGEPVNEADAAALEHDKAYDRQLDSGDNPYLKYNHADAEFQERLKEDTSFGGNLGRAVFQAKKRVLEPLGLVEEPVKTAPGKKRPVEHSPAEPDSSSGTGKSGNQPARKRLNFGQTGDSDSVPDPQPLGQPPAAPSGLGTNTMATGSGAPMADNNEGADGVGNSSGNWHCDSTWMGDRVITTSTRTWALPTYNNHLYKQISSQSGASNDNHYFGYSTPWGYFDFNRFHCHFSPRDWQRLINNNWGFRPKRLNFKLFNIQVKEVTQNDGTTTIANNLTSTVQVFTDSEYQLPYVLGSAHQGCLPPFPADVFMVPQYGYLTLNNGSQAVGRSSFYCLEYFPSQMLRTGNNFTFSYTFEDVPFHSSYAHSQSLDRLMNPLIDQYLYYLSRTNTPSGTTTQSRLQFSQAGASDIRDQSRNWLPGPCYRQQRVSKTSADNNNSEYSWTGATKYHLNGRDSLVNPGPAMASHKDDEEKFFPQSGVLIFGKQGPEKTNVDIEKVMITDEEEIRTTNPVATEQYGSVSTNLQSGNTQAATADVNTQGVLPGMVWQDRDVYLQGPIWAKIPHTDGHFHPSPLMGGFGLKHPPPQILIKNTPVPANPSTTFSAAKFASFITQYSTGQVSVEIEWELQKENSKRWNPEIQYTSNYNKSVNVDFTVDTNGVYSEPRPIGTRYLTRNL

SEQ ID NO: 4888 - protein, 735 aa, Adeno-associated virus; identical to SEQ ID NO: 4887

SEQ ID NO: 4889 - DNA, 2211 bp, Adeno-associated virus
atggctgccgatggttatcttccagattggctcgaggacactctctctgaaggaataagacagtggtggaagctcaaacctggcccaccaccaccaaagcccgcagagcggcataaggacgacagcaggggtcttgtgcttcctgggtacaagtacctcggacccttcaacggactcgacaagggggagccggtcaacgaggcagacgccgcggccctcgagcacgacaaggcctacgaccggcagctcgacagcggagacaacccgtacctcaagtacaaccacgccgacgcagagtttcaggagcgccttaaagaagatacgtcttttgggggcaacctcggacgagcagtcttccaggcgaaaaagagggttcttgaacctctgcggcctggtttgaggaaacctgttaagacggctccgggaaaaaagaggccggtagagcactctcctgtggagccagactcctcctcgggaaccggaaaagcgggccagcagcctgcaagaaaaagattaaattttggtcagactggagacgcagactccgtacctgacccccagcctctcggacagccaccagcagccccctctggtctgggatctactacaatggctacaggcagtggcgcaccaatggcagacaataacgagggtgccgatggagtgggtaattcctcaggaaattggcattgcgattcccaatggctggacgacagagtcatcgccaccagcacccgaacctgggccctgcccacatacaacaaccacctctacaagcaaatctccagccaatcaggagcctgcaacgacaaccactactttggctacagcaccccctgggggtattttgacttcaacagattccactgccacttttcaccacgtgactggcaaagactcatcaacagcaactggggattccggcccaaaagactcaacttcaagctctttaatattcaagtcaaagaggtcacgcagaatgacggtacgacgacgattgccaataaccttaccagcacggttcaggtgtttactgactcggagtaccagctcccgtacgtcccgggctcggcgcatcaaggatgcctcccgccgtttccagcggacgtcttcatggtcccacagtatggatacctcaccctgaacaacgggagtcaggcggtaggacgctcttccttttactgcctggagtactttccttctcagatgctgcgtactggaaacaactttcagttcagctacacttttgaagacgtgcctttccacagcagctacgctcactgccagagtctggatcggctgatgaatcctctgatcgaccagtacctgtattatctgaacaagacacaaacaaatagtggaactcttcagcagtctcggctactgtttagccaagctggaccaaccaacatgtctcttcaagctaaaaactggctgcctggaccttgctacagacagcagcgtctgtcaaaacaggcaaacgacaataacaactgcaactttccctggactgcagctacaaagtatcatctaaatggccgggactcgttggttaatccaggaccagctatggccagtcacaaggatgacgaagaaaagtttttccccatgcatggaaccctgatatttggtaaacaaggaacaaatgccaacgacgcggatttggaaaatgtcatgattacagatgaagaagaaatcaggcccaccaatcccgtggctacggagcagtacgggactgtgtcaaataatttgcaaaactcaaacactggtccaactacaggaactgtcaatcaccaaggagcgttacctggtatggtgtggcaggatcgagacgtgtacctgcagggacccatttgggccaagattcctcacaccgatggacactttcatccttctccactgatgggaggttttggactcaaacacccgcctcctcagatcatgatcaaaagcactcccgttccagccaatcctcccacaaacttcagttctgccaagtttgcttcttccatcacacagtattccacgggacaggtcagcgtggagatcgagtgggagctgcagaaggagaacagcaaacgctggaatcccgaaattcagtacacttccaactacaacaagtctgttaatgtggactttactgtggacactaatggtgtgtattcagagcctcgccccattggcaccagatacctgactcgtaatctgtaa

SEQ ID NO: 4890 - protein, 736 aa, Adeno-associated virus
MAADGYLPDWLEDTLSEGIRQWWKLKPGPPPPKPAERHKDDSRGLVLPGYKYLGPFNGLDKGEPVNEADAAALEHDKAYDRQLDSGDNPYLKYNHADAEFQERLKEDTSFGGNLGRAVFQAKKRVLEPLRPGLRKPVKTAPGKKRPVEHSPVEPDSSSGTGKAGQQPARKRLNFGQTGDADSVPDPQPLGQPPAAPSGLGSTTMATGSGAPMADNNEGADGVGNSSGNWHCDSQWLDDRVIATSTRTWALPTYNNHLYKQISSQSGACNDNHYFGYSTPWGYFDFNRFHCHFSPRDWQRLINSNWGFRPKRLNFKLFNIQVKEVTQNDGTTTIANNLTSTVQVFTDSEYQLPYVPGSAHQGCLPPFPADVFMVPQYGYLTLNNGSQAVGRSSFYCLEYFPSQMLRTGNNFQFSYTFEDVPFHSSYAHCQSLDRLMNPLIDQYLYYLNKTQTNSGTLQQSRLLFSQAGPTNMSLQAKNWLPGPCYRQQRLSKQANDNNNCNFPWTAATKYHLNGRDSLVNPGPAMASHKDDEEKFFPMHGTLIFGKQGTNANDADLENVMITDEEEIRPTNPVATEQYGTVSNNLQNSNTGPTTGTVNHQGALPGMVWQDRDVYLQGPIWAKIPHTDGHFHPSPLMGGFGLKHPPPQIMIKSTPVPANPPTNFSSAKFASSITQYSTGQVSVEIEWELQKENSKRWNPEIQYTSNYNKSVNVDFTVDTNGVYSEPRPIGTRYLTRNL

SEQ ID NO: 4891 - DNA, 2208 bp, Adeno-associated virus
atggctgccgatggttatcttccagattggctcgaggacactctctctgaaggaataagacagtggtggaagctcaaacctggcccaccaccaccaaagcccgcagagcggcataaggacgacagcaggggtcttgtgcttcctgggtacaagtacctcggacccttcaacggactcgacaagggagagccggtcaacgaggcagacgccgcggccctcgagcacgacaaggcctacgaccggcagctcgacagcggagacaacccgtacctcaagtacaaccacgccgacgcggagtttcaggagcgccttaaagaggatacgtcttttgggggcaacctcggacgagcagtcttccaggcaaaaaagagggttctggaacctctgggcctggttgaggagcctgttaagacggctccgggaaaaaagaggccggtagagcactctcctgcagagccagattcctcctccggaactggaaagtcgggcaaccagcctgcaagaaagagattgaatttcggtcagactggagactcagactccgtacctgacccccagcctctcggacagccaccagcagccccctctggtctgggaactaatacgatggctacaggcagtggcgcaccaatggcagacaataacgagggcgccgacggagtgggtaattcctcgggaaattggcattgcgattccacatggatgggcgacagagtcatcaccaccagcacccgaacctgggccctgcccacctacaacaaccatctgtacaagcaaatatccagccagtctggagccagcaacgacaatcactactttggctacagcaccccctgggggtattttgacttcaacagattccactgccacttttcaccacgtgactggcaaagactcatcaacaacaactggggattccgacccaagagactcaacttcaagctctttaacattcaagtcaaagaggtcacgcagaatgacggtacgacgacgattgccaataaccttaccagcacggttcaggtgtttactgactcggagtaccagctcccgtacgtcctcggctcggcgcatcaaggatgcctcccgccgttcccagcagacgtcttcatggtgccacagtatggatacctcaccctgaacaacgggagtcaggcagtaggacgctcttcattttactgcctagagtactttccttctcagatgctgcgtaccggaaacagctttaccttcagctacacctttgaggacgttcctttccacagcagctacgctcacagccagagtttggaccgtctcatgaatcctctcatcgaccagtacctgtattacttgagcagaacaaacactccaagcggaaccaccacgcagtccaggcttcagttttctcaggccggagcgagtgacattcgggaccagtctaggaactggcttcctggaccctgttaccgtcagcagcgagtatcaaagacatctgcggataacaacaacagtgaatactcgtggactggagctaccaagtaccacctcaatggcagagactctctggtgaatccgggcccggccatggccagccacaaagacgatgaagaaaagttctttcctcagagcggggttcttatctttgggaagcaaggctcagagaaaacaaatgtggatattgaaaaggtcatgattacagacgaagaggaaatcaggaccaccaatcccgtggctacggagcagtatggttctgtatctaccaacctccagagcggcaacacacaagcagctaccgcagatgtcaacacacaaggcgttcttccaggcatggtctggcaagacagagacgtgtacctgcaggggcctatttgggcaaagattccacacacggacggacattttcacccctctcccctcatgggcggatttggacttaaacaccctcctccacagattctcatcaagaacaccccggtacctgcgaatccttcgaccaccttcagtgcggcaaagtttgcttccttcattacacagtactccacggggcaggtcagcgtggagatcgagtgggagctgcagaaggagaacagcaaacgctggaatcccgagatccagtacacttccaactacaacaagtctgttaatgtggactttactgtggacactaatggcgtgtattcagagcctcgccccattggcaccagatacctgactcgtaatctgtaa

SEQ ID NO: 4892 - protein, 735 aa, Adeno-associated virus
MAADGYLPDWLEDTLSEGIRQWWKLKPGPPPPKPAERHKDDSRGLVLPGYKYLGPFNGLDKGEPVNEADAAALEHDKAYDRQLDSGDNPYLKYNHADAEFQERLKEDTSFGGNLGRAVFQAKKRVLEPLGLVEEPVKTAPGKKRPVEHSPAEPDSSSGTGKSGNQPARKRLNFGQTGDSDSVPDPQPLGQPPAAPSGLGTNTMATGSGAPMADNNEGADGVGNSSGNWHCDSTWMGDRVITTSTRTWALPTYNNHLYKQISSQSGASNDNHYFGYSTPWGYFDFNRFHCHFSPRDWQRLINNNWGFRPKRLNFKLFNIQVKEVTQNDGTTTIANNLTSTVQVFTDSEYQLPYVLGSAHQGCLPPFPADVFMVPQYGYLTLNNGSQAVGRSSFYCLEYFPSQMLRTGNSFTFSYTFEDVPFHSSYAHSQSLDRLMNPLIDQYLYYLSRTNTPSGTTTQSRLQFSQAGASDIRDQSRNWLPGPCYRQQRVSKTSADNNNSEYSWTGATKYHLNGRDSLVNPGPAMASHKDDEEKFFPQSGVLIFGKQGSEKTNVDIEKVMITDEEEIRTTNPVATEQYGSVSTNLQSGNTQAATADVNTQGVLPGMVWQDRDVYLQGPIWAKIPHTDGHFHPSPLMGGFGLKHPPPQILIKNTPVPANPSTTFSAAKFASFITQYSTGQVSVEIEWELQKENSKRWNPEIQYTSNYNKSVNVDFTVDTNGVYSEPRPIGTRYLTRNL

SEQ ID NO: 4893 - DNA, 2211 bp, Adeno-associated virus; identical to SEQ ID NO: 4804

SEQ ID NO: 4894 - protein, 736 aa, Adeno-associated virus
MAADGYLPDWLEDTLSEGIRQWWKLKPGPPPPKPAERHKDDSRGLVLPGYKYLGPGNGLDKGEPVNAADAAALEHDKAYDQQLKAGDNPYLKYNHADAEFQERLKEDTSFGGNLGRAVFQAKKRLLEPLGLVEEAAKTAPGKKRPVEQSPQEPDSSAGIGKSGSQPAKKKLNFGQTGDTESVPDPQPIGEPPAAPSGVGSLTMASGGGAPVADNNEGADGVGSSSGNWHCDSQWLGDRVITTSTRTWALPTYNNHLYKQISNSTSGGSSNDNAYFGYSTPWGYFDFNRFHCHFSPRDWQRLINNNWGFRPKRLNFKLFNIQVKEVTDNNGVKTIANNLTSTVQVFTDSDYQLPYVLGSAHEGCLPPFPADVFMIPQYGYLTLNDGGQAVGRSSFYCLEYFPSQMLRTGNNFQFSYEFENVPFHSSYAHSQSLDRLMNPLIDQYLYYLSKTINGSGQNQQTLKFSVAGPSNMAVQGRNYIPGPSYRQQRVSTTVTQNNNSEFAWPGASSWALNGRNSLMNPGPAMASHKEGEDRFFPLSGSLIFGKQGTGRDNVDADKVMITNEEEIKTTNPVATESYGQVATNHQSAQAQAQTGWVQNQGILPGMVWQDRDVYLQGPIWAKIPHTDGNFHPSPLMGGFGMKHPPPQILIKNTPVPADPPTAFNKDKLNSFITQYSTGQVSVEIEWELQKENSKRWNPEIQYTSNYYKSNNVEFAVSTEGVYSEPRPIGTRYLTRNL

SEQ ID NO: 4895 - DNA, 2211 bp, Adeno-associated virus
atggctgccgatggttatcttccagattggctcgaggacactctctctgaaggaataagacagtggtggaagctcaaacctggcccaccaccaccaaagcccgcagagcggcataaggacgacagcaggggtcttgtgcttcctgggtacaagtacctcggacccggcaacggactcgacaagggggagccggtcaacgcagcagacgcggcggccctcgagcacgacaaggcctacgaccagcagctcaaggccggagacaacccgtacctcaagtacaaccacgccgacgccgagttccaggagcggctcaaagaagatacgtcttttgggggcaacctcgggcgagcagtcttccaggccaaaaagaggcttcttgaacctcttggtctggttgaggaagcggctaagacggctcctggaaagaagaggcctgtagagcagtctcctcaggaaccggactcctccgcgggtattggcaaatcgggttcacagcccgctaaaaagaaactcaatttcggtcagactggcgacacagagtcagtccccgaccctcaaccaatcggagaacctcccgcagccccctcaggtgtgggatctcttacaatggcttcaggtggtggcgcaccagtggcagacaataacgaaggtgccgatggagtgggtagttcctcgggaaattggcattgcgattcccaatggctgggggacagagtcatcaccaccagcacccgaacctgggccctgcccacctacaacaatcacctctacaagcaaatctccaacagcacatctggaggatcttcaaatgacaacgcctacttcggctacagcaccccctgggggtattttgacttcaacagattccactgccacttctcaccacgtgactggcagcgactcatcaacaacaactggggattccggcctaagcgactcaacttcaagctcttcaacattcaggtcaaagaggttacggacaacaatggagtcaagaccatcgccaataaccttaccagcacggtccaggtcttcacggactcagactatcagctcccgtacgtgctcgggtcggctcacgagggctgcctcccgccgttcccagcggacgttttcatgattcctcagtacgggtatctgacgcttaatgatgggagccaggccgtgggtcgttcgtccttttactgcctggaatatttcccgtcgcaaatgctaagaacgggtaacaacttccagttcagctacgagtttgagaacgtacctttccatagcagctacgctcacagccaaagcctggaccgactaatgaatccactcatcgaccaatacttgtactatctctcaaagactattaacggttctggacagaatcaacaaacgctaaaattcagcgtggccggacccagcaacatggctgtccagggaagaaactacatacctggacccagctaccgacaacaacgtgtctcaaccactgtgactcaaaacaacaacagcgaatttgcttggcctggagcttcttcttgggctctcaatggacgtaatagcttgatgaatcctggacctgctatggccagccacaaagaaggagaggaccgtttctttcctttgtctggatctttaatttttggcaaacaaggaactggaagagacaacgtggatgcggacaaagtcatgataaccaacgaagaagaaattaaaactactaacccggtagcaacggagtcctatggacaagtggccacaaaccaccagagtgcccaagcacaggcgcagaccggctgggttcaaaaccaaggaatacttccgggtatggtttggcaggacagagatgtgtacctgcaaggacccatttgggccaaaattcctcacacggacggcaactttcacccttctccgctaatgggagggtttggaatgaagcacccgcctcctcagatcctcatcaaaaacacacctgtacctgcggatcctccaacggctttcaataaggacaagctgaactctttcatcacccagtattctactggccaagtcagcgtggagattgagtgggagctgcagaaggaaaacagcaagcgctggaacccggagatccagtacacttccaactattacaagtctaataatgttgaatttgctgttaatactgaaggtgtatatagtgaaccccgccccattggcaccagatacctgactcgtaatctgtaa

SEQ ID NO: 4896 - protein, 736 aa, Adeno-associated virus
MAADGYLPDWLEDTLSEGIRQWWKLKPGPPPPKPAERHKDDSRGLVLPGYKYLGPGNGLDKGEPVNAADAAALEHDKAYDQQLKAGDNPYLKYNHADAEFQERLKEDTSFGGNLGRAVFQAKKRLLEPLGLVEEAAKTAPGKKRPVEQSPQEPDSSAGIGKSGSQPAKKKLNFGQTGDTESVPDPQPIGEPPAAPSGVGSLTMASGGGAPVADNNEGADGVGSSSGNWHCDSQWLGDRVITTSTRTWALPTYNNHLYKQISNSTSGGSSNDNAYFGYSTPWGYFDFNRFHCHFSPRDWQRLINNNWGFRPKRLNFKLFNIQVKEVTDNNGVKTIANNLTSTVQVFTDSDYQLPYVLGSAHEGCLPPFPADVFMIPQYGYLTLNDGSQAVGRSSFYCLEYFPSQMLRTGNNFQFSYEFENVPFHSSYAHSQSLDRLMNPLIDQYLYYLSKTINGSGQNQQTLKFSVAGPSNMAVQGRNYIPGPSYRQQRVSTTVTQNNNSEFAWPGASSWALNGRNSLMNPGPAMASHKEGEDRFFPLSGSLIFGKQGTGRDNVDADKVMITNEEEIKTTNPVATESYGQVATNHQSAQAQAQTGWVQNQGILPGMVWQDRDVYLQGPIWAKIPHTDGNFHPSPLMGGFGMKHPPPQILIKNTPVPADPPTAFNKDKLNSFITQYSTGQVSVEIEWELQKENSKRWNPEIQYTSNYYKSNNVEFAVNTEGVYSEPRPIGTRYLTRNL

SEQ ID NO: 4897 - DNA, 2208 bp, Adeno-associated virus
atggctgccgatggttatcttccagattggctcgaggacactctctctgaaggaataagacagcggtggaagctcaaacctggcccaccaccaccagagcccgcagagcggcataaggacgacagcaggggtcttgtgcttcctgggtacaagtacctcggacccttcaacggactcgacaagggagagccggtcaacgaggcagacgccgcggccctcgagcacgacaaagcctacgaccggcagctcgacagcggagacaacccgtacctcaagtacaaccacgccgacgcggagtttcaggagcgccttaaagaagatacgtcttttgggggcaacctcggacgagcagtcttccaggcgaaaaagagggtacttgaacctctgggcctggttgaggaacctgttaagacggctccgggaaaaaagaggccggtagagcactctcctgtggagccagactcctcctcgggaaccggaaaggcgggccagcagcctgcaagaaaaagattgaattttggtcagactggagacgcagactcagtacctgacccccagcctctcggacagccaccagcagccccctctggtctgggaactaatacgatggctacaggcagtggcgcaccaatggcagacaataacgagggcgccgacggagtgggtaattcctcgggaaattggcattgcgattccacatggatgggcgacagagtcatcaccaccagcacccgaacctgggccctgcccacctacaacaaccacctctacaaacaaatttccagccaatcaggagcctcgaacgacaatcactactttggctacagcaccccttgggggtattttgacttcaacagattccactgccacttttcaccacgtgactggcaaagactcatcaacaacaactggggattccgacccaagagactcaacttcaagctctttaacattcaagtcaaagaggtcacgcagaatgacggtacgacgacgattgccaataaccttaccggcacggttcaggtgtttactgactcggagtaccagctcccgtacgtcctcggctcggcgcatcaaggatgcctcccgccgttcccagcagacgtcttcatggtgccacagtatggatacctcaccctgaacaacgggagtcaggcagtaggacgctcttcattttactgcctggagtactttccttctcagatgctgcgtaccggaaacaactttaccttcagctacacttttgaggacgttcctttccacagcagctacgctcacagccagagtctgggccgtctcatgaatcctctcatcgaccagtacctgtattacttgagcagaacaaacactccaagtggaaccaccacgcagtcaaggcttcagttttctcaggccggagcgagtgacattcgggaccagtctaggaactggcttcctggaccctgttaccgccagcagcgagtatcaaagacatctgcggataacaacaacagtgaatactcgtggactggagctaccaagtaccacctcaatggcagagactctctggtgaatccgggcccggccatggcaagccacaaggacgatgaagaaaagttttttcctcagagcggggttctcatctttgggaagcaaggctcagagaaaacaaatgtggacattgaaaaggtcatgattacagacgaagaggaaatcaggacaaccaatcccgtggctacggagcagtatggttctgtatctaccaacctccagagaggcaacagacaagcagctaccgcagatgtcaacacacaaggcgttcttccaggcatggtctggcaggacagagatgtgtaccttcaggggcccatctgggcaaagattccacacacggacggacattttcacccctctcccctcatgggtggattcggacttaaacaccctcctccacagattctcatcaagaacaccccggtacctgcgaatccttcgaccaccttcagtgcggcaaagtttgcttccttcatcacacagtactccacgggacaggtcagcgtggagatcgagtgggagctgcagaaggaaaacagcaaacgctggaatcccgaaattcagtacacttccaactacaacaagtctgttaatgtggactttactgtggacactaatggcgtgtattcagagcctcgccccattggcaccagatacctgactcgtaatctgtaa

SEQ ID NO: 4898 - protein, 735 aa, Adeno-associated virus
MAADGYLPDWLEDTLSEGIRQRWKLKPGPPPPEPAERHKDDSRGLVLPGYKYLGPFNGLDKGEPVNEADAAALEHDKAYDRQLDSGDNPYLKYNHADAEFQERLKEDTSFGGNLGRAVFQAKKRVLEPLGLVEEPVKTAPGKKRPVEHSPVEPDSSSGTGKAGQQPARKRLNFGQTGDADSVPDPQPLGQPPAAPSGLGTNTMATGSGAPMADNNEGADGVGNSSGNWHCDSTWMGDRVITTSTRTWALPTYNNHLYKQISSQSGASNDNHYFGYSTPWGYFDFNRFHCHFSPRDWQRLINNNWGFRPKRLNFKLFNIQVKEVTQNDGTTTIANNLTGTVQVFTDSEYQLPYVLGSAHQGCLPPFPADVFMVPQYGYLTLNNGSQAVGRSSFYCLEYFPSQMLRTGNNFTFSYTFEDVPFHSSYAHSQSLGRLMNPLIDQYLYYLSRTNTPSGTTTQSRLQFSQAGASDIRDQSRNWLPGPCYRQQRVSKTSADNNNSEYSWTGATKYHLNGRDSLVNPGPAMASHKDDEEKFFPQSGVLIFGKQGSEKTNVDIEKVMITDEEEIRTTNPVATEQYGSVSTNLQRGNRQAATADVNTQGVLPGMVWQDRDVYLQGPIWAKIPHTDGHFHPSPLMGGFGLKHPPPQILIKNTPVPANPSTTFSAAKFASFITQYSTGQVSVEIEWELQKENSKRWNPEIQYTSNYNKSVNVDFTVDTNGVYSEPRPIGTRYLTRNL

SEQ ID NO: 4899 - DNA, 2208 bp, Adeno-associated virus
atggctgccgatggttatcttccagattggctcgaggacactctctctgaaggaataagacagcggtggaagctcaaacctggcccaccaccaccagagcccgcagagcggcataaggacgacagcaggggtcttgtgcttcctgggtacaagtacctcggacccttcaacggactcgacaagggagagccggtcaacgaggcagacgccgcggccctcgagcacgacaaagcctacgaccggcagctcgacagcggagacaacccgtacctcaagtacaaccacgccgacgcggagtttcaggagcgccttaaagaagatacgtcctttgggggcaacctcggacgagcagtcttccaggcgaaaaagagggtacttgaacctctgggcctggttgaggaacctgttaagacggctccgggaaaaaagaggccggtagagcactctcctgtggagccagactcctcctcgggaaccggaaaggcgggccagcagcctgcaagaaaaagattgaattttggtcagactggagacgcagactcagtacctgacccccagcctctcggacagccaccagcagccccctctggtctgggaactaatacgatggctacaggcagtggcgcaccaatggcagacaataacgagggcgccgacggagtgggtaattcctcgggaaattggcattgcgattccacatggatgggcgacagagtcatcaccaccagcacccgaacctgggccctgcccacctacaacaaccacctctacaaacaaatttccagccaatcaggagcctcgaacgacaatcactactttggctacagcaccccttgggggtattttgacttcaacagattccactgccacttttcaccacgtgactggcaaagactcatcaacaacaactggggattccgacccaagagactcaacttcaagctctttaacattcaagtcaaagaggtcacgcagaatgacggtacgacgacgattgccaataaccttaccagcacggttcaggtgtttactgactcggagtaccagctcccgtacgtcctcggctcggcgcatcaaggatgcctcccgccgttcccagcagacgtcttcatggtgccacagtatggatacctcaccctgaacaacgagagtcaggcagtaggacgctcttcattttactgcctggagtactttccttctcagatgctgcgtaccggaaacaactttaccttcagctacacttttgaggacgttcctttccacagcagctacgctcacagccagagtctgggccgtctcatgaatcctctcatcgaccagtacctgtattacttgagcagaacaaacactccaagtggaaccaccacgcagtcaaggcttcagttttctcaggccggagcgagtgacattcgggaccagtctaggaactggcttcctggaccctgttaccgccagcagcgagtatcaaagacatctgcggataacaacaacagtgaatactcgtggactggagctaccaagtaccacctcaatggcagagactctctggtgaatccgggcccggccatggcaagccacaaggacgatgaagaaaagttttttcctcagagcggggttctcatctttgggaagcaaggctcagagaaaacaaatgtggacattgaaaaggtcatgattacagacgaagaggaaatcaggacaaccaatcccgtggctacggagcagtatggttctgtatctaccaacctccagagaggcaacagacaagcagctaccgcagatgtcaacacacaaggcgttcttccaggcatggtctggcaggacagagatgtgtaccttcaggggcccatctgggcaaagattccacacacggacggacattttcacccctctcccctcatgggtggattcggacttaaacaccctcctccacagattctcatcaagaacaccccggtacctgcgaatccttcgaccaccttcagtgcggcaaagtttgcttccttcatcacacagtactccacgggacaggtcagcgtggagatcgagtgggagctgcagaaggaaaacagcaaacgctggaatcccgaaattcagtacacttccaactacaacaagtctgttaatgtggactttactgtggacactaatggcgtgtattcagagcctcgccccattggcaccagatacctgactcgtaatctgtaa

SEQ ID NO: 4900 - protein, 735 aa, Adeno-associated virus
MAADGYLPDWLEDTLSEGIRQRWKLKPGPPPPEPAERHKDDSRGLVLPGYKYLGPFNGLDKGEPVNEADAAALEHDKAYDRQLDSGDNPYLKYNHADAEFQERLKEDTSFGGNLGRAVFQAKKRVLEPLGLVEEPVKTAPGKKRPVEHSPVEPDSSSGTGKAGQQPARKRLNFGQTGDADSVPDPQPLGQPPAAPSGLGTNTMATGSGAPMADNNEGADGVGNSSGNWHCDSTWMGDRVITTSTRTWALPTYNNHLYKQISSQSGASNDNHYFGYSTPWGYFDFNRFHCHFSPRDWQRLINNNWGFRPKRLNFKLFNIQVKEVTQNDGTTTIANNLTSTVQVFTDSEYQLPYVLGSAHQGCLPPFPADVFMVPQYGYLTLNNESQAVGRSSFYCLEYFPSQMLRTGNNFTFSYTFEDVPFHSSYAHSQSLGRLMNPLIDQYLYYLSRTNTPSGTTTQSRLQFSQAGASDIRDQSRNWLPGPCYRQQRVSKTSADNNNSEYSWTGATKYHLNGRDSLVNPGPAMASHKDDEEKFFPQSGVLIFGKQGSEKTNVDIEKVMITDEEEIRTTNPVATEQYGSVSTNLQRGNRQAATADVNTQGVLPGMVWQDRDVYLQGPIWAKIPHTDGHFHPSPLMGGFGLKHPPPQILIKNTPVPANPSTTFSAAKFASFITQYSTGQVSVEIEWELQKENSKRWNPEIQYTSNYNKSVNVDFTVDTNGVYSEPRPIGTRYLTRNL

SEQ ID NO: 4901 - DNA, 2208 bp, Adeno-associated virus
atggctgccgatggttatcttccagattggctcgaggacactctctctgaaggaataagacagcggtggaagctcaaacctggcccaccaccaccagagcccgcagagcggcataaggacgacagcaggggtcttgtgcttcctgggtacaagtacctcggacccttcaacggactcgacaagggagagccggtcaacgaggcagacgccgcggccctcgagcacgacaaagcctacgaccggcagctcgacagcggagacaacccgtacctcaagtacaaccacgccgacgcggagtttcaggagcgccttaaagaagatacgtcttttgggggcaacctcggacgagcagtcttccaggcgaaaaagagggtacttgaacctctgggcctggttgaggaacctgttaagacggctccgggaaaaaagaggccggtagagcactctcctgtggagccagactcctcctcgggaaccggaaaggcgggccagcagcctgcaagaaaaagattgaattttggtcagactggagacgcagactcagtacctgacccccagcctctcggacagccaccagcagccccctctggtctgggaactaatacgatggctacaggcagtggcgcaccaatggcagacaataacgagggcgccgacggagtgggtaattcctcgggaaattggcattgcgattccacatggatgggcgacagagtcatcaccaccagcacccgaacctgggccctgcccacctacaacaaccacctctacaaacaaatttccagccaatcaggagcctcgaacgacaatcactactttggctacagcaccccttgggggtattttgacttcaacagattccactgccacttttcaccacgtgactggcaaagactcatcaacaacaactggggattccgacccaagagactcaacttcaagctctttaacattcaagtcaaagaggtcacgcagaatgacggtacgacgacgattgccaataaccttaccagcacggttcaggtgtttactgactcggagtaccagctcccgtacgtcctcggctcggcgcatcaaggatgcctcccgccgttcccagcagacgtcttcatggtaccacagtatggatacctcaccctgaacaacgggagtcaggcagtaggacgctcttcattttactgcctggagtactttccttctcagatgctgcgtaccggaaacaactttaccttcagctacacttttgaggacgttcctttccacagcagctacgctcacagccagagtctgggccgtctcatgaatcctctcatcgaccagtacctgtattacttgagcagaacaaacactccaagtggaaccaccacgcagtcaaggcttcagttttctcaggccggagcgagtgacattcgggaccagtctaggaactggcttcctggaccctgttaccgccagcagcgagtatcaaagacatctgcggataacaacaacagtgaatactcgtggactggagctaccaagtaccacctcaatggcagagactctctggtgaatccgggcccggccatggcaagccacaaggacgatgaagaaaagttttttcctcagagcggggttctcatctttgggaagcaaggctcagagaaaacaaatgtggacattgaaaaggtcatgattacagacgaagaggaaatcaggacaaccaatcccgtggctacggagcagtatggttctgtatctaccaacctccagagaggcaacagacaagcagctaccgcagatgtcaacacacaaggcgttcttccaggcatggtctggcaggacagagatgtgtaccttcaggggcccatctgggcaaagattccacacacggacggacattttcacccctctcccctcatgggtggattcggacttaaacaccctcctccacagattctcatcaagaacaccccggtacctgcgaatccttcgaccaccttcagtgcggcaaagtttgcttccttcatcacacagtactccacgggacaggtcagcgtggagatcgagtgggagctgcagaaggaaaacagcaaacgctggaatcccgaaattcagtacacttccaactacaacaagtctgttaatgtggactttactgtggacactaatggcgtgtattcagagcctcgccccattggcaccagatacctgactcgtaatctgtaa

SEQ ID NO: 4902 - protein, 735 aa, Adeno-associated virus
MAADGYLPDWLEDTLSEGIRQRWKLKPGPPPPEPAERHKDDSRGLVLPGYKYLGPFNGLDKGEPVNEADAAALEHDKAYDRQLDSGDNPYLKYNHADAEFQERLKEDTSFGGNLGRAVFQAKKRVLEPLGLVEEPVKTAPGKKRPVEHSPVEPDSSSGTGKAGQQPARKRLNFGQTGDADSVPDPQPLGQPPAAPSGLGTNTMATGSGAPMADNNEGADGVGNSSGNWHCDSTWMGDRVITTSTRTWALPTYNNHLYKQISSQSGASNDNHYFGYSTPWGYFDFNRFHCHFSPRDWQRLINNNWGFRPKRLNFKLFNIQVKEVTQNDGTTTIANNLTSTVQVFTDSEYQLPYVLGSAHQGCLPPFPADVFMVPQYGYLTLNNGSQAVGRSSFYCLEYFPSQMLRTGNNFTFSYTFEDVPFHSSYAHSQSLGRLMNPLIDQYLYYLSRTNTPSGTTTQSRLQFSQAGASDIRDQSRNWLPGPCYRQQRVSKTSADNNNSEYSWTGATKYHLNGRDSLVNPGPAMASHKDDEEKFFPQSGVLIFGKQGSEKTNVDIEKVMITDEEEIRTTNPVATEQYGSVSTNLQRGNRQAATADVNTQGVLPGMVWQDRDVYLQGPIWAKIPHTDGHFHPSPLMGGFGLKHPPPQILIKNTPVPANPSTTFSAAKFASFITQYSTGQVSVEIEWELQKENSKRWNPEIQYTSNYNKSVNVDFTVDTNGVYSEPRPIGTRYLTRNL

SEQ ID NO: 4903 - DNA, 2208 bp, Adeno-associated virus
atggctgccgatggttatcttccagattggctcgaggacactctctctgaaggaataagacagcggtggaagctcaaacctggcccaccaccaccagagcccgcagagcggcataaggacgacagcaggggtcttgtgcttcctgggtacaagtacctcggacccttcaacggactcgacaagggagagccggtcaacgaggcagacgccgcggccctcgagcacgacaaagcctacgaccggcagctcgacagcggagacaacccgtacctcaagtacaaccacgccgacgcggagtttcaggagcgccttaaagaagatacgtcttttgggggcaacctcggacgagcagtcttccaggcgaaaaagagggtactcgaacctctgggcctggttgaggaacctgttaagacggctccgggaaaaaagaggccggtagagcactctcctgtggagccagactcctcctcgggaaccggaaaggcgggccagcagcctgcaagaaaaagattgaattttggtcagactggagacgcagactcagtacctgacccccagcctctcggacagccaccagcagccccctctggtctgggaactaatacgatggctacaggcagtggcgcaccaatggcagacaataacgagggcgccgacggagtgggtaattcctcgggaaattggcattgcgattccacatggatgggcgacagagtcatcaccaccagcacccgaacctgggccctgcccacctacaacaaccacctctacaaacaaatttccagccaatcaggagcctcgaacgacaatcactactttggctacagcaccccttgggggtattttgacttcaacagattccactgccacttttcaccacgtgactggcaaagactcatcaacaacaactggggattccgacccaagagactcaacttcaagctctttaacattcaagtcaaagaggtcacgcagaatgacggtacgacgacgattgccaataaccttaccagcacggttcaggtgtttactgactcggagtaccagctcccgtacgtcctcggctcggcgcatcaaggatgcctcccgccgttcccagcagacgtcttcatggtgccacagtatggatacctcaccctgaacaacgggagtcaggcagcaggacgctcttcattttactgcctggagtactttccttctcagatgctgcgtaccggaaacaactttaccttcagctacacttttgaggacgttcctttccacagcagctacgctcacagccagagtctgggccgtctcatgaatcctctcatcgaccagtacctgtattacttgagcagaacaaacactccaagtggaaccaccacgcagtcaaggcttcagttttctcaggccggagcgagtgacattcgggaccagtctaggaactggcttcctggaccctgttaccgccagcagcgagtatcaaagacatctgcggataacaacaacagtgaatactcgtggactggagctaccaagtaccacctcaatggcagagactctctggtgaatccgggcccggccatggcaagccacaaggacgatgaagaaaagttttttcctcagagcggggttctcatctttgggaagcaaggctcagagaaaacaaatgtggacattgaaaaggtcatgattacagacgaagaggaaatcaggacaaccaatcccgtggctacggagcagtatggttctgtatctaccaacctccagagaggcaacagacaagcagctaccgcagatgtcaacacacaaggcgttcttccaggcatggtctggcaggacagagatgtgtaccttcaggggcccatctgggcaaagattccacacacggacggacattttcacccctctcccctcatgggtggattcggacttaaacaccctcctccacagattctcatcaagaacaccccggtacctgcgaatccttcgaccaccttcagtgcggcaaagtttgcttccttcatcacacagtactccacgggacaggtcagcgtggagatcgagtgggagctgcagaaggaaaacagcaaacgctggaatcccgaaattcagtacacttccaactacaacaagtccgttaatgtggactttactgtggacactaatggcgtgtattcagagcctcgccccattggcaccagatacctgactcgtaatctgtaa

SEQ ID NO: 4904 - protein, 735 aa, Adeno-associated virus
MAADGYLPDWLEDTLSEGIRQRWKLKPGPPPPEPAERHKDDSRGLVLPGYKYLGPFNGLDKGEPVNEADAAALEHDKAYDRQLDSGDNPYLKYNHADAEFQERLKEDTSFGGNLGRAVFQAKKRVLEPLGLVEEPVKTAPGKKRPVEHSPVEPDSSSGTGKAGQQPARKRLNFGQTGDADSVPDPQPLGQPPAAPSGLGTNTMATGSGAPMADNNEGADGVGNSSGNWHCDSTWMGDRVITTSTRTWALPTYNNHLYKQISSQSGASNDNHYFGYSTPWGYFDFNRFHCHFSPRDWQRLINNNWGFRPKRLNFKLFNIQVKEVTQNDGTTTIANNLTSTVQVFTDSEYQLPYVLGSAHQGCLPPFPADVFMVPQYGYLTLNNGSQAAGRSSFYCLEYFPSQMLRTGNNFTFSYTFEDVPFHSSYAHSQSLGRLMNPLIDQYLYYLSRTNTPSGTTTQSRLQFSQAGASDIRDQSRNWLPGPCYRQQRVSKTSADNNNSEYSWTGATKYHLNGRDSLVNPGPAMASHKDDEEKFFPQSGVLIFGKQGSEKTNVDIEKVMITDEEEIRTTNPVATEQYGSVSTNLQRGNRQAATADVNTQGVLPGMVWQDRDVYLQGPIWAKIPHTDGHFHPSPLMGGFGLKHPPPQILIKNTPVPANPSTTFSAAKFASFITQYSTGQVSVEIEWELQKENSKRWNPEIQYTSNYNKSVNVDFTVDTNGVYSEPRPIGTRYLTRNL

SEQ ID NO: 4905 - protein, 738 aa, Adeno-associated virus; identical to SEQ ID NO: 4797

SEQ ID NO: 4906 - DNA, 2217 bp, Adeno-associated virus
atggctgctgacggttatcttccagattggctcgaggacaacctctctgagggcattcgcgagtggtgggacctgaaacctggagcccccaagcccaaggccaaccagcagaagcaggacgacggccggggtctggtgcttcctggctacaagtacctcggacccttcaacggactcgacaagggggagcccgtcaacgcggcggacgcagcggccctcgagcacgacaaggcctacgaccagcagctcaaagcgggtgacaatccgtacctgcggtataaccacgccgacgccgagtttcaggagcgtctgcaagaagatacgtcttttgggggcaacctcgggcgagcagtcttccaggccaagaagcgggttctcgaacctctcggtctggttgaggaagctgctaagacggctcctggaaagaagagaccggtagaaccgtcacctcagcgttcccccgactcctccacgggcatcggcaagaaaggccagcagcccgctaaaaagagactgaactttggtcagactggcgactcagagtcagtccccgaccctcaaccaatcggagaaccaccagcaggcccctctggtctgggatctggtacaatggctgcaggcggtggcgctccaatggcagacaataacgaaggcgccgacggagtgggtagttcctcaggaaattggcattgcgattccacatggctgggcgacagagtcatcaccaccagcacccgaacctgggccctgcccacctacaacaaccacctctacaagcaaatatccaatgggacatcgggaggaagcaccaacgacaacacctacttcggctacagcaccccctgggggtattttgacttcaacagattccactgccacttctcaccacgtgactggcagcgactcatcaacaacaactggggattccggccaaaaagactcagcttcaagctcttcaacatccaggtcaaggaggtcacgcagaatgaaggcaccaagaccatcgccaataaccttaccagcacgattcaggtatttacggactcggaataccagctgccgtacgtcctcggctccgcgcaccagggctgcctgcctccgttcccggcggacgtcttcatgattccccagtacggctaccttacactgaacaatggaagtcaagccgtaggccgttcctccttctactgcctggaatattttccatctcaaatgctgcgaactggaaacaattttgaattcagctacaccttcgaggacgtgcctttccacagcagctacgcacacagccagagcttggaccgactgatgaatcctctcatcgaccagtacctgtactacttatccagaactcagtccacaggaggaactcaaggtacccagcaattgttattttctcaagctgggcctgcaaacatgtcggctcaggctaagaactggctacctggaccttgctaccggcagcagcgagtctctacgacactgtcgcaaaacaacaacagcaactttgcttggactggtgccaccaaatatcacctgaacggaagagactctttggtaaatcccggtgtcgccatggcaacccacaaggacgacgaggaacgcttcttcccgtcgagtggagtcctgatgttcggaaaacagggtgctggaagagacaatgtggactacagcagcgttatgctaaccagcgaagaagaaattaaaaccactaaccccgtagccacagaacaatacggtgtggtggctgacaacttgcagcaaaccaatacagggcctattgtgggaaatgtcaacagccaaggagccttacctggcatggtctggcagaaccgagacgtgtacctgcagggtcccatctgggccaagattcctcacacggacggcaacttccacccttcaccgctaatgggaggatttggactgaagcacccacctcctcagatcctgatcaagaacacgccggtacctgcggatcctccaacaacgttcagccaggcgaaattggcttccttcattacgcagtacagcaccggacaggtcagcgtggaaatcgagtgggagctgcagaaggagaacagcaaacgctggaacccagagattcagtacacttcaaactactacaaatctacaaatgtggactttgctgtcaatacagagggaacttattctgagcctcgccccattggtactcgttacctcacccgtaatctgtaa

SEQ ID NO: 4907 - protein, 738 aa, Adeno-associated virus
MAADGYLPDWLEDNLSEGIREWWDLKPGAPKPKANQQKQDDGRGLVLPGYKYLGPFNGLDKGEPVNAADAAALEHDKAYDQQLKAGDNPYLRYNHADAEFQERLQEDTSFGGNLGRAVFQAKKRVLEPLGLVEEAAKTAPGKKRPVEPSPQRSPDSSTGIGKKGQQPAKKRLNFGQTGDSESVPDPQPIGEPPAGPSGLGSGTMAAGGGAPMADNNEGADGVGSSSGNWHCDSTWLGDRVITTSTRTWALPTYNNHLYKQISNGTSGGSTNDNTYFGYSTPWGYFDFNRFHCHFSPRDWQRLINNNWGFRPKRLSFKLFNIQVKEVTQNEGTKTIANNLTSTIQVFTDSEYQLPYVLGSAHQGCLPPFPADVFMIPQYGYLTLNNGSQAVGRSSFYCLEYFPSQMLRTGNNFEFSYTFEDVPFHSSYAHSQSLDRLMNPLIDQYLYYLSRTQSTGGTQGTQQLLFSQAGPANMSAQAKNWLPGPCYRQQRVSTTLSQNNNSNFAWTGATKYHLNGRDSLVNPGVAMATHKDDEERFFPSSGVLMFGKQGAGRDNVDYSSVMLTSEEEIKTTNPVATEQYGVVADNLQQTNTGPIVGNVNSQGALPGMVWQNRDVYLQGPIWAKIPHTDGNCHPSPLMGGFGLKHPPPQILIKNTPVPADPPTTFSQAKLASFITQYSTGQVSVEIEWELQKENSKRWNPEIQYTSNYYKSTNVDFAVNTEGTYSEPRPIGTRYLTRNL

SEQ ID NO: 4908 - protein, 738 aa, Adeno-associated virus
MAADGYLPDWLEDNLSEGIREWWDLKPGAPKPKANQQKQDDGRGLVLPGYKYLGPFNGLDKGEPVNAADAAALEHDKAYDQQLKAGDNPYLRYNHADAEFQERLQEDTSFGGNLGRAVFQAKKRVLEPLGLVEEGAKTAPGKKRPVEPSPQRSPDSSTGIGKKGQQPARKRLNFGRTGDSESVPDPQPIGEPPAAPSSVGSGTMAAGGGAPMADNNEGADGVGSSSGNWHCDSTWLGDRVITTSTRTWALPTYNNHLYKQISNGTSGGSTNDNTYFGYSTPWGYLDFNRFHCHFSPRDWQRLINNNWGFRPKRLSFKLFNIQVKEVTQNEGTKTIANNLASTIQVFTDSEYQPPYVLGSAHQGCLPPFPADVFMIPQYGYLTLNNGSQAVGRSSFYCLEYFPSQMLRTGNNFSFSYTFEDVPFHSSYAHSQSLDRLMNPLIDQYLYYLSRTQSTGGTAGTQQLLFSRAGPSNMSAQARNWLPGPCYRQQRVSTTLSQNNNSNFAWTGATKYHLNGRDSLVNPGVAMATNKDDEDRFFPSSGILMFGKQGAGKDNVDYSNVMLTSEEEIKTTNPVATEQYGVVADNLQQQNTAPTVGAVNSQGALPGMVWQNRDVYLQGPIWAKIPHTDGNFHPSPLMGGFGLKHPPPQILIKNTPVPADPPTAFNQAKLNSFIAQYSTGQVSVEIEWELQKENSKRWNPEIQYTSNYYKSTNADFAVNTEGVYSEPRPIGTRYLTRNL

SEQ ID NO: 4909 - DNA, 2217 bp, Adeno-associated virus
atggctgccgatggttatcttccagattggctcgaggacaacctctctgagggcattcgcgagtggtgggacctgaaacctggagccccgaaacccaaagccaaccagcaaaagcaggacgacggccggggtctggtgcttcctggctacaagtacctcggacccttcaacggactcgacaagggggagcccgtcaacgcggcggacgcagcggccctcgagcacgacaaggcctacgaccagcagctcaaagcgggtgacaatccgtacctgcggtataatcacgccgacgccgagtttcaggagcgtctgcaagaagatacgtcttttgggggcaacctcgggcgagcagtcttccaggccaagaagcgggttctcgaacctctcggtctggttgaggaaggcgctaagacggctcctggaaagaagagaccggtagagccgtcaccacagcgttcccccgactcctccacgggcatcggcaagaaaggccagcagcccgccagaaagagactcaatttcggtcggactggcgactcagagtcagtccccgaccctcaacctatcggagaacctccagcagcgccctctagtgtgggatctggtacaatggctgcaggcggtggcgcaccaatggcagacaataacgaaggtgccgacggagtgggtagttcctcgggaaattggcattgcgattccacatggctgggcgacagagttatcaccaccagcacccgaacctgggccctgcccacctacaacaaccacctctacaagcaaatctccaacgggacctcgggaggcagcaccaacgacaacacctactttggctacagcaccccctgggggtatcttgactttaacagattccactgccacttctcaccacgtgactggcagcgactcatcaacaacaactggggattccggcccaagagactcagcttcaagctcttcaacatccaggtcaaagaggtcacgcagaatgaaggcaccaagaccatcgccaataacctcgccagcaccatccaggtgtttacggactcggaataccagccgccgtacgtcctcggctctgcccaccagggctgcctgcctccgttcccggcggacgtcttcatgattcctcagtacggctacctgactctcaacaacggtagtcaggccgtgggacgttcctccttctactgcctggagtacttcccctctcagatgctgagaacgggcaacaacttttccttcagctacactttcgaggacgtgcctttccacagcagctacgcgcacagccagagtttggacaggctgatgaatcctctcatcgaccagtacctgtactacctgtcaagaacccagtctacgggaggcacagcgggaacccagcagttgctgttttctcgggccgggcctagcaacatgtcggctcaggccagaaactggctgcctggaccctgctacagacagcagcgcgtctccacgacactgtcgcaaaacaacaacagcaactttgcctggactggtgccaccaagtatcatctgaacggcagagactctctggtgaatccgggcgtcgccatggcaaccaacaaggacgacgaggaccgcttcttcccatccagcggcatcctcatgtttggcaagcagggagctggaaaagacaacgtggactatagcaacgtgatgctaaccagcgaggaagaaatcaagaccaccaaccccgtggccacagaacagtatggcgtggtggctgataacctacagcagcaaaacaccgctcctactgtgggggccgtcaacagccagggagccttacctggcatggtctggcagaaccgggacgtgtacctgcagggtcctatttgggccaagattcctcacacagatggcaactttcacccgtctcctttaatgggcggctttggacttaaacatccgcctcctcagatcctcatcaaaaacactcctgttcctgcggatcctccaacagcgttcaaccaggccaagctgaattctttcatcgcgcagtacagcaccggacaagtcagcgtggagatcgagtgggagctgcagaaggagaacagcaagcgctggaacccagagattcagtatacttccaactactacaaatctacaaatgcggactttgctgttaatactgagggtgtttactctgagcctcgccccattggcactcgttacctcacccgtaatctgtaa

SEQ ID NO: 4910 - DNA, 2208 bp, Adeno-associated virus
atggctgccgatggttatcttccagattggctcgaggacactctctctgaaggaataagacagtggtggaagctcaaacctggcccaccaccaccaaagcccgcagagcggcataaggacgacagcaggggtcttgtgcttcctgggtacaagtacctcggacccttcaacggactcgacaagggggagccggtcaacgaggcagacgccgcggccctcgagcacgacaaggcctacgaccggcagctcgacagcggagacaacccgtacctcaagtacaaccacgccgacgcagagtttcaggagcgccttaaagaagatacgtcttttgggggcaacctcggacgagcagtcttccaggcgaaaaagagggttcttgaacctctgggcctggttgaggagcctgttaagacggctccgggaaaaaagaggccggtagagcactctcctgtggagccagactcctcctcgggaaccggaaaagcgggccagcagcctgcaagaaaaagattaaattttggtcagactggagacgcagactccgtacctgacccccagcctctcggacagccaccagcagccccctctggtctgggatctactacaatggctacaggcagtggcgcaccaatggcagacaataacgagggtgccgatggagtgggtaattcctcaggaaattggcattgcgattcccaatggctgggcgacagagtcatcaccaccagcacccgaacctgggccctgcccacatacaacaaccacctctacaagcaaatctccagccaatcaggagccagcaacgacaaccactactttggctacagcaccccctgggggtattttgacttcaacagattccactgccacttttcaccacgtgactggcaaagactcgtcaacaacaaccggggattccggcccaaaagactcaacttcaagctctttaatattcaagtcaaagaggtcacgcagaatgacggtacgacgacgattgccaataaccttaccagcacggttcaggtgtttactgactcggagtaccagctcccgtacgtcctgggctcggcgcatcaaggatgcctcccgccgtttccagcggacgtcttcatggtcccacagtatggatacctcaccctgaacaacgggagtcaggcggtaggacgctcttccttttactgcctggagtactttccttctcagatgctgcgtactggaaacaactttcagttcagctacacttttgaagacgtgcctttccacagcagctacgctcacagccagagtctggatcggctgatgaatcctctgatcgaccagtacctgtattatctgaacaagacacaaacaaatagtggaactcttcagcagtctcggctactgtttagccaagctggaccaaccaacatgtctcttcaagctaaaaactggctgcctggaccttgctacagacagcagcgtctgtcaaaacaggcaaacgacaacaacaacagcaactttccctggactgcagctacaaagtatcatctaaatggccgggactcgttggttaatccaggaccagctatggccagtcacaaggatgacgaagaaaagtttttccccatgcatggaaccctgatatttggtaaacaaggaacaaatgccaacgacgcggatttggaaaatgtcatgattacagatgaagaagaaatcagggccaccaatcccgtggctacggagcagtacgggactgtgtcaaataatttgcaaaactcaaacactggtccaactactggaactgtcaatcaccaaggagcgttacctggtatggtgtggcaggatcgagacgtgtacctgcagggacccatttgggccaagattcctcacaccgatggacactttcatccttctccactgatgggaggttttggactcaaacacccgcctcctcagatcatgatcaaaaacactcccgttccagccaatcctcccacaaacttcagttctgccaagtttgcttctttcatcacacagtattccacgggacaggtcagcgtggagatcgagtgggagctgcagaaggagaacagcaaacgctggaatcccgaaattcagtacacttccaactacaacaagtctgttaatgtggactttactgtggacactaatggtgtgtattcagagcctcgccccattggcaccagatacctgactcgtaatctgtaa

SEQ ID NO: 4911 - protein, 735 aa, Adeno-associated virus
MAADGYLPDWLEDTLSEGIRQWWKLKPGPPPPKPAERHKDDSRGLVLPGYKYLGPFNGLDKGEPVNEADAAALEHDKAYDRQLDSGDNPYLKYNHADAEFQERLKEDTSFGGNLGRAVFQAKKRVLEPLGLVEEPVKTAPGKKRPVEHSPVEPDSSSGTGKAGQQPARKRLNFGQTGDADSVPDPQPLGQPPAAPSGLGSTTMATGSGAPMADNNEGADGVGNSSGNWHCDSQWLGDRVITTSTRTWALPTYNNHLYKQISSQSGASNDNHYFGYSTPWGYFDFNRFHCHFSPRDWQRLVNNNRGFRPKRLNFKLFNIQVKEVTQNDGTTTIANNLTSTVQVFTDSEYQLPYVLGSAHQGCLPPFPADVFMVPQYGYLTLNNGSQAVGRSSFYCLEYFPSQMLRTGNNFQFSYTFEDVPFHSSYAHSQSLDRLMNPLIDQYLYYLNKTQTNSGTLQQSRLLFSQAGPTNMSLQAKNWLPGPCYRQQRLSKQANDNNNSNFPWTAATKYHLNGRDSLVNPGPAMASHKDDEEKFFPMHGTLIFGKQGTNANDADLENVMITDEEEIRATNPVATEQYGTVSNNLQNSNTGPTTGTVNHQGALPGMVWQDRDVYLQGPIWAKIPHTDGHFHPSPLMGGFGLKHPPPQIMIKNTPVPANPPTNFSSAKFASFITQYSTGQVSVEIEWELQKENSKRWNPEIQYTSNYNKSVNVDFTVDTNGVYSEPRPIGTRYLTRNL

SEQ ID NO: 4912 - protein, 738 aa, Adeno-associated virus
MAADGYLPDWLEDNLSEGIREWWDLKPGAPKPKANQQKQDDGRGLVLPGYKYLGPFNGLDKGEPVNAADAAALEHDKAYDQQLKAGDNPYLRYNHADAEFQERLQEDTSFGGNLGRAVFQAKKRVLEPLGLVEEAAKTAPGKKRPVEPSPQRSPDSSTGIGKKGQQPAKKRLSFGQTGDSESVPDPQPIGEPPAGPSGLGSGTMAAGGGAPMADNNEGADGVGSSSGNWHCDSTWLGDRVITTSTRTWALPTYNNHLYKQISNGTSGGSTNDNTYFGYSTPWGYFDFNRFHCHFSPRDWQRLINNNWGFRPKRLSFKLFNIQVKEVTQNEGTKTIANNLTSTIQVFTDSEYQLPYVLGSAHQGCLPPFPADVFMIPQYGYLTLNNGSQAVGRSSFYCLEYFPSQMLRTGNNSEFSYTFEDVPFHSSYAHSQSLDRLMNPLIDQYLYYLSRTQSTGGTQGTQQLLFSQAGPANMSAQAKNWLPGPCYRQQRVSTTLSQNNNSNFAWTGATKYHLNGRDSLVNPGVAMATHKDDEERFFPSSGVLMFGKQGAGRDNVDYSSVMLTSEEEIKTTNPVATEQYGVVADNLQQTNTGPIVGNVNSQGALPGMVWQNRDVYLQGPIWAKIPHTDGNFHPSPLMGGFGLKHPPPQILIKNTPVPADPPTTFSQAKLASFITQYSTGQVSVEIEWELQKENSKRWNPEIQYTSNYYKSTNVDFAVNTEGTYSEPRPIGTRYLTRNL

SEQ ID NO: 4913 - DNA, 2217 bp, Adeno-associated virus
atggctgctgacggttatcttccagattggctcgaggacaacctctctgagggcattcgcgagtggtgggacctgaaacctggagcccccaagcccaaggccaaccagcagaagcaggacgacggccggggtctggtgcttcctggctacaagtacctcggacccttcaacggactcgacaagggggagcccgtcaacgcggcggacgcagcggccctcgagcacgacaaggcctacgaccagcagctcaaagcgggtgacaatccgtacctgcggtataaccacgccgacgccgagtttcaggagcgtctgcaagaagatacgtcttttgggggcaacctcgggcgagcagtcttccaggccaagaagcgggttctcgaacctctcggtctggttgaggaagctgctaagacggctcctggaaagaagagaccggtagaaccgtcacctcagcgttcccccgactcctccacgggcatcggcaagaaaggccagcagcccgctaaaaagagactgagctttggtcagactggcgactcagagtcagtccccgaccctcaaccaatcggagaaccaccagcaggcccctctggtctgggatctggtacaatggctgcaggcggtggcgctccaatggcagacaataacgaaggcgccgacggagtgggtagttcctcaggaaattggcattgcgattccacatggctgggcgacagagtcatcaccaccagcacccgaacctgggccctgcccacctacaacaaccacctctacaagcaaatatccaatgggacatcgggaggaagcaccaacgacaacacctacttcggctacagcaccccctgggggtattttgacttcaacagattccactgccacttctcaccacgtgactggcagcgactcatcaacaacaactggggattccggccaaaaagactcagcttcaagctcttcaacatccaggtcaaggaggtcacgcagaatgaaggcaccaagaccatcgccaataaccttaccagcacgattcaggtatttacggactcggaataccagctgccgtacgtcctcggctccgcgcaccagggctgcctgcctccgttcccggcggacgtcttcatgattccccagtacggctaccttacactgaacaatggaagtcaagccgtaggccgttcctccttctactgcctggaatattttccatctcaaatgctgcgaactggaaacaattctgaattcagctacaccttcgaggacgtgcctttccacagcagctacgcacacagccagagcttggaccgactgatgaatcctctcatcgaccagtacctgtactacttatccagaactcagtccacaggaggaactcaaggtacccagcaattgttattttctcaagctgggcctgcaaacatgtcggctcaggctaagaactggctacctggaccttgctaccggcagcagcgagtctctacgacactgtcgcaaaacaacaacagcaactttgcttggactggtgccaccaaatatcacctgaacggaagagactctttggtaaatcccggtgtcgccatggcaacccacaaggacgacgaggaacgcttcttcccgtcgagtggagtcctgatgtttggaaaacagggtgctggaagagacaatgtggactacagcagcgttatgctaaccagcgaagaagaaattaaaaccactaaccctgtagccacagaacaatacggtgtggtggctgacaacttgcagcaaaccaatacagggcctattgtgggaaatgtcaacagccaaggagccttacctggcatggtctggcagaaccgagacgtgtacctgcagggtcccatctgggccaagattcctcacacggacggcaacttccacccttcaccgctaatgggaggatttggactgaagcacccacctcctcagatcctgatcaagaacacgccggtacctgcggatcctccaacaacgttcagccaggcgaaattggcttccttcattacgcagtacagcaccggacaggtcagcgtggaaatcgagtgggagctgcagaaggagaacagcaaacgctggaacccagagattcagtacacttcaaactactacaaatctacaaatgtggactttgctgtcaatacagagggaacttattctgagcctcgccccattggtactcgttacctcacccgtaatctgtaa

SEQ ID NO: 4914 - protein, 738 aa, Adeno-associated virus
MAADGYLPDWLEDNLSEGIREWWDLKPGAPKPKANQQKQDDGRGLVLPGYKYLGPFNGLDKGEPVNAADAAALEHDKAYDQQLKAGDNPYLRYNHADAEFQERLQEDTSFGGNLGRAVFQAKKRVLEPLGPVEEAAKTAPGKKRPVEPPPQRSPDSSTGIGKKGQQPAKKRLNFGQTGDSESVPDPQPIGEPPAGPSGLGSGTMAAGGGAPMADNNEGADGVGSSSGNWHCDSTWLGDRVITTSTRTWALPTYNNHLYKQISNGTSGGSTNDNTYFGYSTPWGYFDFNRFHCHFSPRDWQRLINNNWGFRPKRLSFKLFNIQVKEVTQNEGTKTVANNLTSTIQVFTDSEYQLPYVLGSAHQGCLPPFPADVFMIPQYGYLTLNNGSQAVGRSSFYCLEYFPSQMLRTGNNFEFSYTFEDVPFHSSYAHSQSLDRLMNPLIDQYLYYLSRTQSTGGTQGTQQLLFSQAGPANMSAQAKNWLPGPCYRQQRVSTTLSQNNNSNFAWTGATKYHLNGRDSLVNPGVAMATHKDDEERFFPSSGVLMFGKQGAGRDNVDYSSVMLTSEEEIKTTNPVATEQYGVVADNLQQTNTGPIVGNVNSQGALPGMVWQNRDVYLQGPIWAKIPHTDGNFHPSPLMGGFGLKHPPPQILIKNTPVPADPPTTFSQAKLASFITQYSTGQVSVEIEWELQKENSKRWNPEIQYTSNYYKSTNVDFAVNTEGTYSEPRPIGTRYLTRNL

SEQ ID NO: 4915 - DNA, 2217 bp, Adeno-associated virus
atggctgctgacggttatcttccagattggctcgaggacaacctctctgagggcattcgcgagtggtgggacctgaaacctggagcccccaagcccaaggccaaccagcagaagcaggacgacggccggggtctggtgcttcctggctacaagtacctcggacccttcaacggactcgacaagggggagcccgtcaacgcggcggacgcagcggccctcgagcacgacaaggcctacgaccagcagctcaaagcgggtgacaatccgtacctgcggtataaccacgccgacgccgagtttcaggagcgtctacaagaagatacgtcttttgggggcaacctcgggcgagcagtcttccaggccaagaagcgggttctcgaacctctcggtccggttgaggaagctgctaagacggctcctggaaagaagagaccggtagaaccgccacctcagcgttcccccgactcctccacgggcatcggcaagaaaggccagcagcccgctaaaaagagactgaactttggtcagactggcgactcagagtcagtccccgaccctcaaccaatcggagaaccaccagcaggcccctctggtctgggatctggtacaatggctgcaggcggtggcgctccaatggcagacaataacgaaggcgccgacggagtgggtagttcctcaggaaattggcattgcgattccacatggctgggcgacagagtcatcaccaccagcacccgaacctgggccctgcccacctacaacaaccacctctacaagcaaatatccaatgggacatcgggaggaagcaccaacgacaacacctacttcggctacagcaccccctgggggtattttgacttcaacagattccactgccacttctcaccacgtgactggcagcgactcatcaacaacaactggggattccggccaaaaagactcagcttcaagctcttcaacatccaggtcaaggaggtcacgcagaatgaaggcaccaagaccgtcgccaataaccttaccagcacgattcaggtatttacggactcggaataccagctgccgtacgtcctcggctccgcgcaccagggctgcctgcctccgttcccggcggacgtcttcatgattccccagtacggctaccttacactgaacaatggaagtcaagccgtaggccgttcctccttctactgcctggaatattttccatctcaaatgctgcgaactggaaacaattttgaattcagctacaccttcgaggacgtgcctttccacagcagctacgcacacagccagagcttggaccgactgatgaatcctctcatcgaccagtacctgtactacttatccagaactcagtccacaggaggaactcaaggtacccagcaattgttattttctcaagctgggcctgcaaacatgtcggctcaggctaagaactggctacctggaccttgctaccggcagcagcgagtctctacgacactgtcgcaaaacaacaacagcaactttgcttggactggtgccaccaaatatcacctgaacggaagagactctttggtaaatcccggtgtcgccatggcaacccacaaggacgacgaggaacgcttcttcccgtcgagtggagtcctgatgtttggaaaacagggtgctggaagagacaatgtggactacagcagcgttatgctaaccagcgaagaagaaattaaaaccactaaccctgtagccacagaacaatacggtgtggtggctgacaacttgcagcaaaccaatacagggcctattgtgggaaatgtcaacagccaaggagccttacctggcatggtctggcagaaccgagacgtgtacctgcagggtcccatctgggccaagattcctcacacggacggcaacttccacccttcaccgctaatgggaggatttggactgaagcacccacctcctcagatcctgatcaagaacacgccggtacctgcggatcctccaacaacgttcagccaggcgaaattggcttccttcattacgcagtacagcaccggacaggtcagcgtggaaatcgagtgggagctgcagaaggagaacagcaaacgttggaacccagagattcagtacacttcaaactactacaaatctacaaatgtggactttgctgtcaatacagagggaacttattctgagcctcgccccattggtactcgttacctcacccgtaatctgtaa

SEQ ID NO: 4916 - protein, 738 aa, Adeno-associated virus
MAADGYLPDWLEDNLSEGIREWWDLKPGAPKPKANQQKQDDGRGLVLPGYKYLGPFNGLDKGEPVNAADAAALEHDKAYDQQLKAGDNPYLRYNHADAEFQERLQEDTSFGGNLGRAVFQAKKRVLEPLGLVEEAAKTAPGKKRPVEPSPQRSPDSSTGIGKKGQQPAKKRLNFGQTGDSESVPDPQPIGEPPAGPSGLGSGTMAAGGGAPMADNNEGADGVGSSSGNWHCDSTWLGDRVITTSTRTWALPTYNNHLYKQISNGTSGGSTNDNTYFGYSTPWGYFDFNRFHCHFSPRDWQRLINNNWGFRPKRLSFKLFNIQVKEVTQNEGTKTIANNLTSTIQVFTDSEYQLPYVLGSAHQGCLPPFPADVFMIPQYGYLTLNNGSQAVGRSSFYCLEYFPSQMLRTGNNFEFSYTFEDVPFHSSYAHSQSLDRLMNPLIDQYLYYLSRTQSTGGTQGTQQLLFSQAGPANMSAQAKNWLPGPCYRQQRVSTTLSQSNNSNFAWTGATKYHLNGRDSLVNPGVAMATHKDDEERFFPSSGVLMFGKQGAGRDNVDYSSVMLTSEEEIKTTNPVATEQYGVVADNLQQTNTGPIVGNVNSQGALPGMVWQNRDVYLQGPIWAKIPHTDGNFHPSPLMGGLGLKHPPPQILIKNTPVPADPPTTFSQAKLASFITQYSTGQVSVEIEWELQKENSKRWNPEIQYTSNYYKSTNVDFAVNTEGTYSEPRPIGTRYLTRNL

SEQ ID NO: 4917 - DNA, 2217 bp, Adeno-associated virus
atggctgctgacggttatcttccagattggctcgaggacaacctctctgagggcattcgcgagtggtgggacctgaaacctggagcccccaagcccaaggccaaccagcagaagcaggacgacggccggggtctggtgcttcctggctacaagtacctcggacccttcaacggactcgacaagggggagcccgtcaacgcggcggacgcagcggccctcgagcacgacaaggcctacgaccagcagctcaaagcgggtgacaatccgtacctgcggtataaccacgccgacgccgagtttcaggagcgtctgcaagaagatacgtcttttgggggcaacctcgggcgagcagtcttccaggccaagaagcgggttctcgaacctctcggtctggttgaggaagcggctaagacggctcctggaaagaagagaccggtagaaccgtcacctcagcgttcccccgactcctccacgggcatcggcaagaaaggccagcagcccgctaaaaagagactgaactttggtcagactggcgactcagagtcagtccccgaccctcaaccaatcggagaaccaccagcaggcccctctggtctgggatctggtacaatggctgcaggcggtggcgctccaatggcagacaataacgaaggcgccgacggagtgggtagttcctcaggaaattggcattgcgattccacatggctgggcgacagagtcatcaccaccagcacccgaacctgggccctgcccacctacaacaaccacctctacaagcaaatatccaatgggacatcgggaggaagcaccaacgacaacacctacttcggctacagcaccccctgggggtattttgacttcaacagattccactgccacttctcaccacgtgactggcagcgactcatcaacaacaactggggattccggccaaaaagactcagcttcaagctcttcaacatccaggtcaaggaggtcacgcagaatgaaggcaccaagaccatcgccaataaccttaccagcacgattcaggtatttacggactcggaataccagctgccgtacgtcctcggctccgcgcaccagggctgcctgcctccgttcccggcggacgtcttcatgattccccagtacggctaccttacactgaacaatggaagtcaagccgtaggccgttcctccttctactgcctggaatattttccatctcaaatgctgcgaactggaaacaattttgaattcagctacaccttcgaggacgtgcctttccacagcagctacgcacacagccagagcttggaccgactgatgaatcctctcatcgaccagtacctgtactacttatccagaactcagtccacaggaggaactcaaggtacccagcaattgttattttctcaagctgggcctgcaaacatgtcggctcaggctaagaactggctacctggaccttgctaccggcagcagcgagtctctacgacactgtcgcaaagcaacaacagcaactttgcttggactggtgccaccaaatatcacctgaacggaagagactctttggtaaatcccggtgtcgccatggcaacccacaaggacgacgaggaacgcttcttcccgtcgagtggagtcctgatgtttggaaaacagggtgctggaagagacaatgtggactacagcagcgttatgctaaccagcgaagaagaaattaaaaccactaaccctgtagccacagaacaatacggtgtggtggctgacaacttgcagcaaaccaatacagggcctattgtgggaaatgtcaacagccaaggagccttacctggcatggtctggcagaaccgagacgtgtacctgcagggtcccatctgggccaagattcctcacacggacggcaacttccacccttcaccgctaatgggaggacttggactgaagcacccacctcctcagatcctgatcaagaacacgccggtacctgcggatcctccaacaacgttcagccaggcgaaattggcttccttcattacgcagtacagcaccggacaggtcagcgtggaaatcgagtgggagctgcagaaggagaacagcaaacgctggaacccagagattcagtacacttcaaactactacaaatctacaaatgtggactttgctgtcaatacagagggaacttattctgagcctcgccccattggtactcgttacctcacccgtaatctgtaa

SEQ ID NO: 4918 - protein, 737 aa, Adeno-associated virus
MAADGYLPDWLEDNLSEGIREWWDLKPGAPKPKANQQKQDDGRGLVLPGYKYLGPFNGLDKGEPVNAADAAALEHDKAYDQQLKAGDNPYPRYNHADAEFQERLQEDTPFGGNLGRAVFQAKKRVLEPLGLVEEAAKTAPGKKRPVEPSPQRSPDSSTGIGKKGQQPAKKRLNFGQTGDSESVPDPQPIGEPPAGPSGLGSGTMAAGGGAPMADNNEGADGVGNASGNWHCDSTWLGDRVITTSTRTWALPTYNNHLYKQISSASTGASNDNHYFGYSTPWGYFDFNRFHCHFSPRDWQRLINNNWGFRPKRLNFKLFNIQVKEVTTNDGVTTIANNLTSTVQVFSDSEYQLPYVLGSAHQGCLPPFPADVFMIPQYGYLTLNNGSQAVGRSSFYCLEYFPSQMLRTGNNFTFSYTFEEVPLHSSYAHSQSLDRLMNPLIVQYLYYLNRTQNQSGSAQNKDLLFSRGSPAGMSVQPKNWLPGPCYRQQRVSKTKTDNNNSNFTWTGASKYNLNGRESIINPGTAMASHKDDEDKFFPMSGVMIFGKESAGASNTALDNVMITDEEEIKATNPVATERFGTVAVNFQSSSTDPATGDVHAMGALPGMVWQDRDVYLQGPIWAKIPHTDGHFHPSPLMGGFGLKNPPPQILIKNTPVPANPPAEFSATKFASFITQYSTGQVSVEIEWELQKENSKRWNPEVQYTSNYAKSASVDFTVDNNGLYTEPRPIGTRYLTRPL

SEQ ID NO: 4919 - protein, 737 aa, Adeno-associated virus
MAADGYLPDWLEDNLSEGIREWWDLKPGAPKPKANQQKQDDGRGLVLPGYKYLGPFNGLDKGEPVNAADAAALEHDKAYDQQLKAGDNPYPRYNHADAEFQERLQEDTSFGGNLGRAVFQAKKRVLEPLGLVEEAAKTAPGKKRPVEPSPQRSPDSSTGIGKKGQQPAKKRLNFGQTGDSESVPDPQPIGEPPAGPSGLGSGTMAAGGGAPMADNNEGADGVGNASGNWHCDSTWLGDRVITTSTRTWALPTYNNHLYKQISSASTGASNDNHYFGYSTPWGYFDFNRFHCHFSPRDWQRLINNNWGFRPKRLNFKLFNIQVKEVTTNDGVTTIANNLTSTVQVFSDSEYQLPYVLGSAHQGCLPPFPADVFMIPQYGYLTLNNGSQAVGRSSFYCLEYFPSQMLRTGNNFTFSYTFEEVPLHSSYAHSQSLDRLMNPLIDQYLYYLNRTQNQSGSAQNKDLLFSRGSPAGMSVQPKNWLPGPCYRQQRVSKTKTDNNNSNFTWTGASKYNLNGRESIINPGTAMASHKDDEDKFFPMSGVMIFGKESAGASNTALDNVMITDEEEIKATNPVATERFGTVAVNFQSSSTDPATGDVHAMGALPGMVWQDRDVYLQGPIWAKIPHTDGHFHPSPLMGGFGLKNPPPQILIKNTPVPANPPAEFSATKFASFITQYSTGQVSVEIEWELQKENSKRWNPEVQYTSNYAKSASVDFTVDNNGLYTEPRPIGTRYLTRPL

SEQ ID NO: 4920 - DNA, 2214 bp, Adeno-associated virus
atggctgctgacggttatcttccagattggctcgaggacaacctctctgagggcattcgcgagtggtgggacctgaaacctggagcccccaagcccaaggccaaccagcagaagcaggacgacggccggggtctggtgcttcctggctacaagtacctcggacccttcaacggactcgacaagggggagcccgtcaacgcggcggacgcagcggccctcgagcacgacaaggcctacgaccagcagctcaaagcgggtgacaatccgtacccgcggtataaccacgccgacgccgagtttcaggagcgtctgcaagaagatacgccttttgggggcaacctcgggcgagcagtcttccaggccaagaagcgggttctcgaacctctcggtctggttgaggaagctgctaagacggctcctggaaagaagagaccggtagaaccgtcacctcagcgttcccccgactcctccacgggcatcggcaagaaaggccagcagcccgctaaaaagagactgaactttggtcagactggcgactcagagtcagtccccgaccctcaaccaatcggagaaccaccagcaggcccctctggtctgggatctggtacaatggctgcaggcggtggcgctccaatggcagacaataacgaaggcgccgacggagtgggtaatgcctcaggaaattggcattgcgattccacatggctgggcgacagagtcatcaccaccagcacccgcacctgggccttgcccacctacaataaccacctctacaagcaaatctccagtgcttcaacgggggccagcaacgacaaccactacttcggctacagcaccccctgggggtattttgatttcaacagattccactgccacttttcaccacgtgactggcagcgactcatcaacaacaattggggattccggcccaagagactcaacttcaaactcttcaacatccaagtcaaggaggtcacgacgaatgatggcgtcacaaccatcgctaataaccttaccagcacggttcaagtcttctcggactcggagtaccagcttccgtacgtcctcggctctgcgcaccagggctgcctccctccgttcccggcggacgtgttcatgattccgcaatacggctacctgacgctcaacaatggcagccaagccgtgggacgttcatccttttactgcctggaatatttcccttctcagatgctgagaacgggcaacaactttaccttcagctacacctttgaggaagtgcctctccacagcagctacgcgcacagccagagcctggaccggctgatgaatcctctcatcgtccaatacctgtattacctgaacagaactcaaaatcagtccggaagtgcccaaaacaaggacttgctgttcagccgtgggtctccagctggcatgtctgttcagcccaaaaactggctacctggaccctgttatcggcagcagcgcgtttctaaaacaaaaacagacaacaacaacagcaattttacctggactggtgcttcaaaatataacctcaatgggcgtgaatccatcatcaaccctggcactgctatggcctcacacaaagacgacgaagacaagttctttcccatgagcggtgtcatgatttttggaaaagagagcgccggagcttcaaacactgcattggacaatgtcatgattacagacgaagaggaaattaaagccactaaccctgtggccaccgaaagatttgggaccgtggcagtcaatttccagagcagcagcacagaccctgcgaccggagatgtgcatgctatgggagcattacctggcatggtgtggcaagatagagacgtgtacctgcagggtcccatttgggccaaaattcctcacacagatggacactttcacccgtctcctcttatgggcggctttggactcaagaacccgcctcctcagatcctcatcaaaaacacgcctgttcctgcgaatcctccggcggagttttcagctacaaagtttgcttcattcatcacccaatactccacaggacaagtgagtgtggaaattgaatgggagctgcagaaagaaaacagcaagcgctggaatcccgaagtgcagtacacatccaattatgcaaaatctgccagcgttgattttactgtggacaacaatggactttatactgagcctcgccccattggcacccgttaccttacccgtcccctgtaa

SEQ ID NO: 4921 - protein, 736 aa, Adeno-associated virus
MAADGYLPDWLEDTLSEGIRQWWKLRPGPPPPKPAERHKDDSRGLVLPGYKYLGPFNGLDKGEPVNEADAAALEHDKAYDRQLDSGDNPYLKYNHADAEFQERLKEDTSFGGNLGRAVFQAKKRVLEPLGLVEEGAETAPGKKRPVEQSPQGPDSSSGIGKTGQQPAKKRLNFGQTGDSESVPDPQPLGEPPATPAAVGPTTMASGGGAPMADNNEGADGVGNASGNWHCDSTWLGDRVITTSTRTWALPTYNNHLYKQISSASTGASNDNHYFGYSTPWGYFDFNRFHCHFSPRDWQRLINNNWGFRPKRLNFKLFNIQVKEVTTNDGVTTIANNLTSTVQVFSDSEYQLPYVLGSAHQGCLPPFPADVFMIPQYGYLTLNNGSQAVGRSSFYCLEYFPSQMLRTGNNFTFSYTFEEVPFHSSYAHSQSLDRLMNPLIDQYLYYPNRTQNQSGSAQNKDLLFSRGSPAGMSVQPKNWLPGPCYRQQRVSKTKTDNNNSNFTWTGASKYNLNGRESIINPGTAMASHKDDEDKFFPMSGVMIFGKESAGASNTALDNVMITDEEEIKATNPVATERFGTVAVNFQSSSTDPATGDVHAMGALPGMVWQGRDVYLQGPIWAKIPHTDGHFHPSPLMGGFGLKNPPPQILIKNTPVPANPPAEFSATKFASFITQYSTGQVSVEIEWELQKENSKRWNPEVQYTSNYAKSANVDFTVDNNGLYTEPRPIGTRYLTRPL

SEQ ID NO: 4922 - DNA, 2211 bp, Adeno-associated virus
atggctgccgatggttatcttccagattggctcgaggacactctctctgaaggaataagacagtggtggaagctcagacctggcccaccaccaccaaagcccgcagagcggcataaggacgacagcaggggtcttgtgcttcctgggtacaagtacctcggacccttcaacggactcgacaagggagagccggtcaacgaggcagacgccgcggccctcgagcacgacaaagcctacgaccggcagctcgacagcggagacaacccgtacctcaagtacaaccacgccgacgcggagtttcaggagcgccttaaagaagatacgtcttttgggggcaacctcgggcgagcagtcttccaggccaagaagcgggttctcgaacctctcggtctggttgaggaaggcgctgagacggctcctggaaagaaacgtccggtagagcagtcgccacaagggccagactcctcctcgggcatcggcaagacaggccagcagcccgctaaaaagagactcaattttggtcagactggcgactcagagtcagtccccgatccacaacctctcggagaacctccagcaacccccgctgctgtgggacctactacaatggcttcaggcggtggcgcaccaatggcagacaataacgaaggcgccgacggagtgggtaatgcctcaggaaattggcattgcgattccacatggctgggcgacagagtcatcaccaccagcacccgcacctgggccttgcccacctacaataaccacctctacaagcaaatctccagtgcttcaacgggggccagcaacgacaaccactacttcggctacagcaccccctgggggtattttgatttcaacagattccactgccacttttcaccacgtgactggcagcgactcatcaacaacaattggggattccggcccaagagactcaacttcaaactcttcaacatccaagtcaaggaggtcacgacgaatgatggcgtcacaaccatcgctaataaccttaccagcacggttcaagtcttctcggactcggagtaccagcttccgtacgtcctcggctctgcgcaccagggctgcctccctccgttcccggcggacgtgttcatgattccgcaatacggctacctgacgctcaacaatggcagccaagccgtgggacgttcatccttttactgcctggaatatttcccttctcagatgctgagaacgggcaacaactttaccttcagctacacctttgaggaagtgcctttccacagcagctacgcgcacagccagagcctggaccggctgatgaatcctctcatcgaccaatacctgtattacccgaacagaactcaaaatcagtccggaagtgcccaaaacaaggacttgctgtttagccgtgggtctccagctggcatgtctgttcagcccaaaaactggctacctggaccctgttatcggcagcagcgcgtttctaaaacaaaaacagacaacaacaacagcaattttacctggactggtgcttcaaaatataacctcaatgggcgtgaatccatcatcaaccctggcactgctatggcctcacacaaagacgacgaagacaagttctttcccatgagcggtgtcatgatttttggaaaagagagcgccggagcttcaaacactgcattggacaatgtcatgattacagacgaagaggaaattaaagccactaaccctgtggccaccgaaagatttgggaccgtggcagtcaatttccagagcagcagcacagaccctgcgaccggagatgtgcatgctatgggagcattacctggcatggtgtggcaaggtagagacgtgtacctgcagggtcccatttgggccaaaattcctcacacagatggacactttcacccgtctcctcttatgggcggctttggactcaagaacccgcctcctcagatcctcatcaaaaacacgcctgttcctgcgaatcctccggcggagttttcagctacaaagtttgcttcattcatcacccaatactccacaggacaagtgagtgtggaaattgaatgggagctgcagaaagaaaacagcaagcgctggaatcccgaagtgcagtacacatccaattatgcaaaatctgccaacgttgattttactgtggacaacaatggactttatactgagcctcgccccattggcacccgttaccttacccgtcccctgtaa

SEQ ID NO: 4923 - protein, 736 aa, Adeno-associated virus
MAADGYLPDWLEDTLSEGIRQWWKLRPGPPPPKPAERHKDDSRGLVLPGYKYLGPFNGLDKGEPVNEADAAALEHDKAYDRQLDSGDNPYLKYNHADAEFQERLKEDTSFGGNLGRAVFQAKKRVLEPLGLVEEGAKTAPGKKRPVEQSPQGPDSSSGIGKTGQQPAKKRLNFGQTGDSESVPDPQPLGEPPATPAAVGPTTMASGGGAPMADNNEGADGVGNASGNWHCDSTWLGDRVITTSTRTWALPTYNNHLYKQISSASTGASNDNHYFGYSTPWGYFDFNRFHCHFSPRDWQRLINNNWGFRPKRLNFKLFNIQVKEVTTNDGVTTIANNLTSTVQVFSDSEYQLPYVLGSAHQGCLPPFPADVFMIPQYGYLTLNNGSQAVGRSSFYCLEYFPSQMLRTGNNFTFSYTFEEVPFHSSYAHSQSLDRLMNPLIDQYLYYPNRTQNQSGSAQNKDLLFSRGSPAGMSVQPKNWLPGPCYRQQRVSKTKTDNNNSNFTWTGASKYNLNGRESIINPGTAMASHKDDEDKFFPMSGVMIFGKESAGASNTALDNVMITDEEEIKATNPVATERFGTVAVNFQSSSTDPATGDVHAMGALPGMVWQGRDVYLQGPIWAKIPHTDGHFHPSPLMGGFGLKNPPPQILIKNTPVPANPPAEFSATKFASFITQYSTGQVSVEIEWELQKENSKRWNPEVQYTSNYAKSANVDFTVDNNGLYTEPRPIGTRYLTRPL

SEQ ID NO: 4924 - protein, 736 aa, Adeno-associated virus
MAADGYLPDWLEDTLSEGIRQWWKLRPGPPPPKPAERHKDDSRGLVLPGYKYLGPFNGLDKGEPVNEADAAALEHDKAYDRQLDSGDNPYLKYNHADAEFQERLKEDTSFGGNLGRAVFQAKKRVLEPLGLVEEGAKTAPGKKRPVEQSPQGPDSSSGIGKTGQQPAKKRLNFGQTGDSESVPDPQPLGEPPATPAAVGPTTMASGGGAPMADNNEGADGVGNASGNWHCDSTWLGDRVITTSTRTWALPTYNNHLYKQISSASTGASNDNHYFGYSTPWGYFDFNRFHCHFSPRDWQRLINNNWGFRPKRLNFKLFNIQVKEVTTNDGVTTIANNLTSTVQVFSDSEYQLPYVLGSAHQGCLPPFPADVFMIPQYGYLTLNNGSQAVGRSSFYCLEYFPSQMLRTGNNFTFSYTFEEVPFHSSYAHSQSLDRLMNPLIDQYLYYLNRTQNQSGSAQNKDLLFSRGSPAGMSVQPKNWLPGPCYRQQRVSKTKTDNNNSNFTWTGASKYNLNGRESIINPGTAMASHKDDEDKFFPMSGVMIFGKESAGASNTALDNVMITDEEEIKATNPVATERFGTVAVNFQSSSTDPATGDVHAMGALPGMVWQGRDVYLQGPIWAKIPHTDGHFHPSPLMGGFGLKNPPPQILIKNTPVPANPPAEFSATKFASFITQYSTGQVSVEIEWELQKENSKRWNPEVQYTSNYAKSANVDFTVDNNGLYTEPRPIGTRYLTRPL

SEQ ID NO: 4925 - protein, 736 aa, Adeno-associated virus
MAADGYLPDWLEDTLSEGIRQWWKLRPGPPPPKPAERHKDDSRGLVLPGYKYLGPFNGLDKGEPVNEADAAALEHDKAYDRQLDSGDNPYLKYNHADAEFQERLKEDTSFGGNLGRAVFQAKKRVLEPLGLVEEGAKTAPGKKRPVEQSPQGPDSSSGIGKTGQQPAKKRLNFGQTGDSESVPDPQPLGEPPATPAAVGPTTMASGGGAPMADNNEGADGVGNASGNWHCDSTWLGDRVITTSTRTWALPTYNNHLYKQISSASTGASNDNHYFGYSTPWGYFDFNRFHCHFSPRDWQRLINNNWGFRPKRLNFKLFNIQVKEVTTNDGVTTIANNLTSTVQVFSDSEYQLPYVLGSAHQGCLPPFPADVFMIPQYGYLTLNNGSQAVGRSSFYCLEYFPSQMLRTGNNFTFSYTFEEVPFHSSYAHSQSLDRLMNPLIDQYLYYLNRTQNQSGSAQNKDLLFSRGSPAGMSVQPKNWLPGPCYRQQRVSKTKTDNNNSNFTWTGASKYNLNGRESIINPGTAMASHKDDEDKFFPMSGVMIFGKESAGASNTALDNVMITDEEEIKATNPVATERFGTVAVNFQSSSTDPATGDVHAMGALPGMVWQDRDVYLQGPIWAKIPHTDGHFHPSPLMGGFGLKNPPPQILIKNTPVPANPPAEFSATKFASFITQYSTGQVSVEIEWELQKENSKRWNPEVQYTSNYAKSANVDFTVDNNGLYTEPRPIGTRYLTRPL

SEQ ID NO: 4926 - DNA, 2208 bp, Adeno-associated virus
atggctgccgatggctatcttccagattggctcgaggacactctctctgaaggaataagacagtggtggaagctcaaacctggcccaccaccaccaaagcccgcagagcggcatagggacgacagcaggggtcttgtgcttcctgggtacaagtacctcggacccttcaacggactcgacaagggagagccggtcaacgaggcagacgccgcggccctcgagcacgacaaagcctacgaccggcagctcgacagcggagacaacccgtacctcaagtacaaccacgccgacgcggagtttcaggagcgccttaaagaagatacgtcttttgggggcaacctcggacgagcagtcttccaggcgaaaaagagggttcttgaacctctgggcctggttgaggaacctgttaagacggctccgggaaaaaagaggccggtagagcactctcctgtggagccagactcctcctcgggaaccggaaaggcgggccagcagcctgcaagaaaaagattgaattttggtcagactggagacgcagactcagtacctgacccccagcctctcggacagccaccagcagccccctctggtctgggaactaatacgatggctacaggcagtggcgcaccaatggcagacaataacgagggcgccgacggagtgggtaattcctcgggaaattggcattgcgattccacatggatgggcgacagagtcatcaccaccagcacccgaacctgggccctgcccacctacaacaaccacctctacaaacaaatttccagccaatcaggagcctcgaacgacaatcactactttggctacagcaccccttgggggtattttgacttcaacagattccactgccacttttcaccacgtgactggcaaagactcatcaacaacaactggggattccgacccaagagactcaacttcaagctctttaacattcaagtcaaagaggtcacgcagaatgacggtacgacgacgattgccaataaccttaccagcacggttcaggtgtttactgactcggggtaccagctcccgtacgtcctcggctcggcgcatcaaggatgcctcccgccgttcccagcagacgtcttcatggtgccacagtatggataccccaccctgaacaacgggagtcaggcagtaggacgctcttcattttactgcctggagtactttccttctcagatgctgcgtaccggaaacaactttaccttcagctacacttttgaggacgttcctttccacagcagctacgctcacagccagagtctggaccgtctcatgaatcctctcatcgaccagtacctgtattacttgagcacaacaaacactccaagtggaaccaccacgcagtcaaggcttcagttttctcaggccggagcgagtgacattcgggaccagtctaggaactggcttcctggaccctgttaccgccagcagcgagtatcaaagacatctgcggataacaacaacagtgaatactcgtggactggagctaccaagtaccacctcaatggcagagactctctggtgaatccgggcccggccgtggcaagccacaaggacgatgaagaaaagttttttcctcagagcggggttctcatctttgggaagcaaggctcagagaaaacaaatgtggacattgaaaaggtcatgattacagacgaagaggaaatcaggacaaccaatcccgtggctacggagcagtatggttctgtatctaccaacctccagagaggcaacagacaagcagctaccgcagatgtcaacacacaaggcgttcttccaggcatggtctggcaggacagagatgtgtaccttcaggggcccatctgggcaaagattccacacacggacggacattttcacccctctcccctcatgggtggattcggacttaaacaccctcctccacagattctcatcaagaacaccccggtacctgcgaatccttcgaccaccttcagtgcggcaaagtttgcttccttcatcacacagtactccacgggacaggtcagcgtggagatcgagtgggagctgcagaaggaaaacagcaaacgctggaatcccgaaattcagtacacttccaactacaacaagtctgttaatgtggactttactgtggacactaatggcgtgtattcagagcctcgccccattggcaccagatacctgactcgtaatctgtaa

SEQ ID NO: 4927 - protein, 735 aa, Adeno-associated virus
MAADGYLPDWLEDTLSEGIRQWWKLKPGPPPPKPAERHRDDSRGLVLPGYKYLGPFNGLDKGEPVNEADAAALEHDKAYDRQLDSGDNPYLKYNHADAEFQERLKEDTSFGGNLGRAVFQAKKRVLEPLGLVEEPVKTAPGKKRPVEHSPVEPDSSSGTGKAGQQPARKRLNFGQTGDADSVPDPQPLGQPPAAPSGLGTNTMATGSGAPMADNNEGADGVGNSSGNWHCDSTWMGDRVITTSTRTWALPTYNNHLYKQISSQSGASNDNHYFGYSTPWGYFDFNRFHCHFSPRDWQRLINNNWGFRPKRLNFKLFNIQVKEVTQNDGTTTIANNLTSTVQVFTDSGYQLPYVLGSAHQGCLPPFPADVFMVPQYGYPTLNNGSQAVGRSSFYCLEYFPSQMLRTGNNFTFSYTFEDVPFHSSYAHSQSLDRLMNPLIDQYLYYLSTTNTPSGTTTQSRLQFSQAGASDIRDQSRNWLPGPCYRQQRVSKTSADNNNSEYSWTGATKYHLNGRDSLVNPGPAVASHKDDEEKFFPQSGVLIFGKQGSEKTNVDIEKVMITDEEEIRTTNPVATEQYGSVSTNLQRGNRQAATADVNTQGVLPGMVWQDRDVYLQGPIWAKIPHTDGHFHPSPLMGGFGLKHPPPQILIKNTPVPANPSTTFSAAKFASFITQYSTGQVSVEIEWELQKENSKRWNPEIQYTSNYNKSVNVDFTVDTNGVYSEPRPIGTRYLTRNL

SEQ ID NO: 4928 - DNA, 2211 bp, Adeno-associated virus
atggctgccgacggttatcttccagattggctcgaggacactctctctgaaggaataagacagtggtggaagctcaaacctggcccaccaccaccaaagcccgcagagcggcataaggacgacagcaggggtcttgtgcttcctgggtacaagtacctcggacccttcaacggactcgacaagggagagccggtcaacgaggcagacgccgcggccctcgagcacgacaaagcctacgaccggcagctcgacagcggagacaacccgtacctcaagtacaaccacgccgacgcggagtttcaggagcgccttaaagaagatacgtcttttgggggcaacctcgggcgggcagtcttccaggccaagaagcgggttctcgaacctctcggtctggttgaggaaggcgctaagacggctcctggaaagaaacgtccggtagagcagtcgccacaagagccagactccccctcgggcatcggcaagacaggccagcagcccgctaaaaagagactcaattttggtcagactggcgactcagagtcagtccccgatccacaacctctcggagaacctccagcaacccccgctgctgtgggacctactacaatggcttcaggcggtggcgcaccaatggcagacaataacgaaggcgccgacggagtgggtaatgcctcaggaaattggcactgcgattccacatggctgggcgacagagtcatcaccaccagcacccgcacctgggccttgcccacctacaataaccacctctacaagcaaatctccagtgcttcaacgggggccagcaacgacaaccactacttcggctacagcaccccctgggggtattttgatttcaacagattccactgccacttttcaccacgtgactggcagcgactcatcaacaacaattggggattccggcccaagagactcaacttcaaactcttcaacatccaagtcaaggaggtcacgacgaatgatggcgtcacaaccatcgctaataaccttaccagcacggttcaagtcttctcggactcggagtaccagcttccgtacgtcctcggctctgcgcaccagggccgcctccctccgttcccggcggacgtgttcatgattccgcaatacggctacctgacgctcaacaatggcagccaagccgtgggacgttcatcctcttactgcctggaatatttcccttctcagatgctgagaacgggcaacaactttaccttcagctacacctttgaggaagtgcctctccacagcagctgcgcgcacagccagagcctggaccggctgatgaatcctctcatcgaccaatacctgtattacctgaacagaactcaaaatcagtccggaagtgcccaaaacagggacttgctgttcagccgtgggtctccagctggcatgtctgttcagcccaaaaactggctacctggaccctgttatcggcagcagcgcgtttctaaaacaaaaacagacaacaacaacagcaattttacctggactggtgcttcaaaatataacctcaatgggcgtgaatccatcatcaaccctggcactgctatggcctcacacaaagacgacgaagacaagttctttcccatgagcggtgtcatgatttttggaaaagagagcgccggagcttcaaacactgcattggacaatgtcatgattacagacgaagaggaaattaaagccactaaccctgtggccaccgaaagatttgggaccgtggcagtcaatttccagagcagcagcacagaccctgcgaccggagatgtgcatgctatgggagcattacctggcatggtgtggcaagatagagacgtgtacctgcagggtcccatttgggccaaaattcctcacacagatggacactttcacccgtctcctcttatgggcggctttggactcaagaacccgcctcctcagatcctcatcaaaaacacgcctgttcctgcgaatcctccggcggagttttcagctacaaagtttgcttcattcatcacccaatactccgcaggacaagtgagtgtggaaattgaatgggagctgcagaaagaaaacagcaagcgctggaatcccgaagtgcagtacacatccaattatgcaaaatctgccaacgttgattttactgtggacaacaatggactttatactgagcctcgccccattggcacccgttaccttacccgtcccctgtaa

SEQ ID NO: 4929 - protein, 736 aa, Adeno-associated virus
MAADGYLPDWLEDTLSEGIRQWWKLKPGPPPPKPAERHKDDSRGLVLPGYKYLGPFNGLDKGEPVNEADAAALEHDKAYDRQLDSGDNPYLKYNHADAEFQERLKEDTSFGGNLGRAVFQAKKRVLEPLGLVEEGAKTAPGKKRPVEQSPQEPDSPSGIGKTGQQPAKKRLNFGQTGDSESVPDPQPLGEPPATPAAVGPTTMASGGGAPMADNNEGADGVGNASGNWHCDSTWLGDRVITTSTRTWALPTYNNHLYKQISSASTGASNDNHYFGYSTPWGYFDFNRFHCHFSPRDWQRLINNNWGFRPKRLNFKLFNIQVKEVTTNDGVTTIANNLTSTVQVFSDSEYQLPYVLGSAHQGRLPPFPADVFMIPQYGYLTLNNGSQAVGRSSSYCLEYFPSQMLRTGNNFTFSYTFEEVPLHSSCAHSQSLDRLMNPLIDQYLYYLNRTQNQSGSAQNRDLLFSRGSPAGMSVQPKNWLPGPCYRQQRVSKTKTDNNNSNFTWTGASKYNLNGRESIINPGTAMASHKDDEDKFFPMSGVMIFGKESAGASNTALDNVMITDEEEIKATNPVATERFGTVAVNFQSSSTDPATGDVHAMGALPGMVWQDRDVYLQGPIWAKIPHTDGHFHPSPLMGGFGLKNPPPQILIKNTPVPANPPAEFSATKFASFITQYSAGQVSVEIEWELQKENSKRWNPEVQYTSNYAKSANVDFTVDNNGLYTEPRPIGTRYLTRPL

SEQ ID NO: 4930 - protein, 736 aa, Adeno-associated virus
MAADGYLPDWLEDTLSEGIRQWWKLKPGPPPPKPAERHKDDSRGLVLPGYKYLGPFNGLDKGEPVNEADAAALEHDKAYDRQLDSGDNPYLKYNHADAEFQERLKEDTSFGGNLGRAVFQAKKRVLEPLGLVEEGAKTAPGKKRPVEQSPQEPDSSSGIGKTGQQPAKKRLNFGQTGDSESVPDPQPLGEPPATPAAVGPTTMASGGGAPMADNNEGADGVGNASGNWHCDSTWLGDRVITTSTRTWALPTYNNHLYKQISSASTGASNDNHYFGYSTPWGYFDFNRFHCHFSPRDWQRLINNNWGFRPKRLNFKLFNIQVKEVTTNDGVTTIANNLTSTVQVFSDSEYQLPYVLGSAHQGCLPPFPADVFMIPQYGYLTLNNGSQAVGRSSFYCLEYFPSQMLRTGNNFTFSYTFEEVPLHSSCAHSQSLDRLMNPLIDQYLYYLNRTQNQSGSAQNRDLLFSRGSPAGMSVQPKNWLPGPCYRQQRVSKTKTDNNNSNFTWTGASKYNLNGRESIINPGTAMASHKDDEDKFFPMSGVMIFGKESAGASNTALDNVMITDEEEIKATNPVATERFGTVAVNFQSSSTDPATGDVHAMGALPGMVWQDRDVYLQGPIWAKIPHTDGHFHPSPLMGGFGLKNPPPQILIKNTPVPANPPAEFSATKFASFITQYSTGQVSVEIEWELQKENSKRWNPEVQYTSNYAKSANVDFTVDNNGLYTEPRPIGTRYLTRPL

SEQ ID NO: 4931 - DNA, 2208 bp, Adeno-associated virus
atggctgccgatggctatcttccagattggctcgaggacactctctctgaaggaataagacagtggtggaagctcaaacctggcccaccaccaccaaagcccgcagagcggcatagggacgacagcaggggtcttgtgcttcctgggtacaagtacctcggacccttcaacggactcgacaagggagagccggtcaacgaggcagacgccgcggccctcgagcacgacaaagcctacgaccggcagctcgacagcggagacaacccgtacctcaagtacaaccacgccgacgcggagtttcaggagcgccttaaagaagatacgtcttttgggggcaacctcggacgagcagtcttccaggcgaaaaagagggttcttgaacctctgggcctggttggggaacctgttaagacggctccgggaaaaaagaggccggtagagcactctcctgtggagccagactcctcctcgggaaccggaaaggcgggccagcagcctgcaagaaaaagattgaattttggtcagactggagacgcagactcagtacctgacccccagcctctcggacagccaccagcagccccctctggtctgggaactaatacgatggctacaggcagtggcgcaccaatggcagacaataacgagggcgccgacggagtgggtaattcctcgggaaattggcattgcgattccacatggatgggcgacagagtcatcaccaccagcacccgaacctgggccctgcccacctacaacaaccacctctacaaacaaatttccagccaatcaggagcctcgaacgacagtcactactttggctacagcaccccttgggggtattttgacttcaacagattccactgccacttttcaccacgtgactggcaaagactcatcaacaacaactggggattccgacccaagagactcaacttcaagctctttaacattcaagtcaaagaggtcacgcagaatgacggtacgacgacgattgccaataaccttaccagcacggttcaggtgtttactgactcggagtaccagctcccgtacgtcctcggctcggcgcatcaaggatgcctcccgccgttcccagcagacgtcttcatggtgccacagtatggatacctcaccctgaacaacgggagtcaggcagtaggacgctcttcattttactgcctggagtactttccttctcagatgctgcgtaccggaaacaactttaccttcagctacacttttgaggacgttcctttccacagcagctacgctcacagccagagtctggaccgtctcatgaatcctctcatcgaccagtacctgtattacttgagcacaacaaacactccaagtggaaccaccacgcagtcaaggctccagttttctcaggccggagcgagtgacattcgggaccagtctaggaactggcttcctggaccctgttaccgccagcagcgagtatcaaagacatctgcggataacaacaacagtgaatactcgtggactggagctaccaagtaccacctcaatggcagagactctctggtgaatccgggcccggccatggcaagccacaaggacaatgaagaaaagttttttcctcagagcggggttctcatctttgggaagcaaggctcagagaaaacaaatgtggacattgaaaaggtcatgattacagacgaagaggaaatcaggacaaccaatcccgtggctacggagcagtatggttctgtatctaccaacctccagagaggcaacagacaagcagctaccgcagatgtcaacacacaaggcgttcttccaggcatggtctggcaggacagagatgtgtaccttcaggggcccatctgggcaaagattccacacacggacggacattttcacccctctcccctcatgggtggattcggacttaaacaccctcctccacagattctcatcaagaacaccccggtacctgcgaatccttcgaccaccttcagtgcggcaaagtttgcttccttcatcacacagtactccacgggacaggtcagcgtggagatcgagtgggagctgcagaaggaaaacagcaaacgctggaatcccgaaattcagtacacttccaactacaacaagtctgttaatgtggactttactgtggacactaatggcgtgtattcagagcctcgccccattggcaccagatacctgactcgtaatctgtaa

SEQ ID NO: 4932 - protein, 735 aa, Adeno-associated virus
MAADGYLPDWLEDTLSEGIRQWWKLKPGPPPPKPAERHRDDSRGLVLPGYKYLGPFNGLDKGEPVNEADAAALEHDKAYDRQLDSGDNPYLKYNHADAEFQERLKEDTSFGGNLGRAVFQAKKRVLEPLGLVGEPVKTAPGKKRPVEHSPVEPDSSSGTGKAGQQPARKRLNFGQTGDADSVPDPQPLGQPPAAPSGLGTNTMATGSGAPMADNNEGADGVGNSSGNWHCDSTWMGDRVITTSTRTWALPTYNNHLYKQISSQSGASNDSHYFGYSTPWGYFDFNRFHCHFSPRDWQRLINNNWGFRPKRLNFKLFNIQVKEVTQNDGTTTIANNLTSTVQVFTDSEYQLPYVLGSAHQGCLPPFPADVFMVPQYGYLTLNNGSQAVGRSSFYCLEYFPSQMLRTGNNFTFSYTFEDVPFHSSYAHSQSLDRLMNPLIDQYLYYLSTTNTPSGTTTQSRLQFSQAGASDIRDQSRNWLPGPCYRQQRVSKTSADNNNSEYSWTGATKYHLNGRDSLVNPGPAMASHKDNEEKFFPQSGVLIFGKQGSEKTNVDIEKVMITDEEEIRTTNPVATEQYGSVSTNLQRGNRQAATADVNTQGVLPGMVWQDRDVYLQGPIWAKIPHTDGHFHPSPLMGGFGLKHPPPQILIKNTPVPANPSTTFSAAKFASFITQYSTGQVSVEIEWELQKENSKRWNPEIQYTSNYNKSVNVDFTVDTNGVYSEPRPIGTRYLTRNL

SEQ ID NO: 4933 - protein, 737 aa, Adeno-associated virus
RMAADGYLPDWLEDNLSEGIREWWDLKPGAPKPKANQQKQDDGRGLVLPGYKYLGPFNGLDKGEPVNAADAAALEHDKAYDQQLKAGDNPYLRYNHADAEFQERLQEDTSFGGNLGRAVFQAKKRVLEPLGLVEEGAKTAPGKKRPVEQSPQEPDSSSGIGKTGQQPAKKRLNFGQTGDSESVPDPQPLGEPPATPAAVGPTTMASGGGAPMADNNEGADGVGNASGNWHCDSTWLGDRVITTSTRTWALPTYNNHLYKQISSTSTGASNDNHYFGYGTPWGYFDFNRFHCHFSPRDWQRLINNNWGFRPKRLNFKLFNIQVEEVTTNDGVTTIANNLTSTVQVFSDSEYQLPYVLGSAHQGCLPPFPADVFMIPQYGYLTLNNGSQAVGRSSFYCLEYFPSQMLRTGNNFTFSYTFEEVPFHSSYAHSQSLDRLMNPLIDQYLYYLNRTQNQSGSAQNKDLLFSRGSPAGMSVQPKNWLPGPCYRQQRVSKTKTDNNNSNFTWTGASKYNLNGRESIINPGTAVASHKDDEDKFFPMSGVMIFGKESAGASSTALDNVMITDEEEIKATNPVATERFGTVAVNFQSSSTDPATGDVHAMGALPGMVWQDRDVYLQGPIWAKIPHTDGHFHPSPLMGGFGLKNPPPQILIKNTPVPANPPAEFSATKFASFITQYSTGQVSVEIEWELQKENSKRWNPEVQYTSNYAKSANVDFTVDNNGLYTEPRPIGTRYLTRPL

SEQ ID NO: 4934 - protein, 736 aa, Adeno-associated virus
MAADGYLPDWLEDNLSEGIREWWDLKPGAPKPKANQQKQDDGRGLVLPGYKYLGPFNGLDKGEPVNAADAAALEHDKAYDQQLKAGDNPYLRYNHADAEFQERLQEDTSFGGNLGRAVFQAKKRVLEPLGLVEEGAKTAPGKKRPVEQSPQEPDSSSGIGKTGQQPAKKRLNFGQTGDSESVPDPQPLGEPPATPAAVGPTTMASGGGAPMADNNEGADGVGNASGNWHCDSTWLGDRVITTSTRTWALPTYNNHLYKQISSTSTGASNDNHYFGYGTPWGYFDFNRFHCHFSPRDWQRLINNNWGFRPKRLNFKLFNIQVEEVTTNDGVTTIANNLTSTVQVFSDSEYQLPYVLGSAHQGCLPPFPADVFMIPQYGYLTLNNGSQAVGRSSFYCLEYFPSQMLRTGNNFTFSYTFEEVPFHSSYAHSQSLDRLMNPLIDQYLYYLNRTQNQSGSAQNKDLLFSRGSPAGMSVQPKNWLPGPCYRQQRVSKTKTDNNNSNFTWTGASKYNLNGRESIINPGTAVASHKDDEDKFFPMSGVMIFGKESAGASSTALDNVMITDEEEIKATNPVATERFGTVAVNFQSSSTDPATGDVHAMGALPGMVWQDRDVYLQGPIWAKIPHTDGHFHPSPLMGGFGLKNPPPQILIKNTPVPANPPAEFSATKFASFITQYSTGQVSVEIEWELQKENSKRWNPEVQYTSNYAKSANVDFTVDNNGLYTEPRPIGTRYLTRPL

SEQ ID NO: 4935 - DNA, 2211 bp, Adeno-associated virus
atggctgccgatggttatcttccagattggctcgaggacaacctctctgagggcattcgcgagtggtgggacttgaaacctggagccccgaagcccaaagccaaccagcaaaagcaggacgacggccggggtctggtgcttcctggctacaagtacctcggacccttcaacggactcgacaagggggagcccgtcaacgcggcggacgcagcggccctcgagcacgacaaggcctacgaccagcagctcaaagcgggtgacaatccgtacctgcggtataaccacgccgacgccgagtttcaggagcgtctgcaagaagatacgtcttttgggggcaacctcgggcgagcagtcttccaggccaagaagcgggttctcgaacctctcggtctggttgaggaaggcgctaagacggctcctggaaagaaacgtccggtagagcagtcgccacaagagccagactcctcctcgggcatcggcaagacaggccagcagcccgctaaaaagagactcaattttggccagactggcgactcagagtcagtccccgatccacaacctctcggagaacctccagcaacccccgctgctgtgggacctactacaatggcttcaggcggtggcgcaccaatggcagacaataacgaaggcgccgacggagtgggtaatgcctcaggaaattggcattgcgattccacatggctgggcgacagagtcatcaccaccagcacccgcacctgggccttgcccacctacaataaccacctctacaagcaaatctccagtacttcaacgggggccagcaacgacaaccactacttcggctacggcaccccctgggggtattttgatttcaacagattccactgccacttttcaccacgtgactggcagcgactcatcaacaacaattggggattccggcccaagagactcaacttcaaactcttcaacatccaagtcgaggaggtcacgacgaatgatggcgtcacaaccatcgctaataaccttaccagcacggttcaagtcttctcggactcggagtaccagcttccgtacgtcctcggctctgcgcaccagggctgcctccctccgttcccggcggacgtgttcatgattccgcaatacggctacctgacgctcaacaatggcagccaagccgtgggacgttcatccttttactgcctggaatatttcccttctcagatgctgagaacgggcaacaactttaccttcagctacacctttgaggaagtgcctttccacagcagctacgcgcacagccagagcctggaccggctgatgaatcctctcatcgaccaatacctgtattacctgaacagaacacaaaatcagtccggaagtgcccaaaacaaggacttgctgtttagccgtgggtctccagctggcatgtctgttcagcccaaaaactggctacctggaccctgttatcggcagcagcgcgtttctaaaacaaaaacagacaacaacaacagcaattttacctggactggtgcttcaaaatataacctcaatgggcgtgaatccatcatcaaccctggcaccgctgtggcctcacacaaagacgacgaagacaagttctttcccatgagcggtgtcatgatttttggaaaagagagcgccggagcttcaagcactgcattggacaatgtcatgattacagacgaagaggaaattaaagccactaaccctgtggccaccgaaagatttgggaccgtggcagtcaatttccagagcagcagcacagaccctgcgaccggagatgtgcatgctatgggagcattacctggcatggtgtggcaagatagagacgtgtacctgcagggtcccatttgggccaaaattcctcacacagatggacactttcacccgtctcctcttatgggcggctttggactcaagaacccgcctcctcagatcctcatcaaaaacacgcctgttcctgcgaatcctccggcggagttttcagctacaaagtttgcttcattcatcacccaatactccacaggacaagtgagtgtggaaattgaatgggagctgcagaaagaaaacagcaagcgctggaatcccgaagtgcagtacacatccaattatgcaaaatctgccaacgttgattttactgtggacaacaatggactttatactgagcctcgccccattggcacccgttaccttacccgtcccctgtaa

SEQ ID NO: 4936 - protein, 737 aa, Adeno-associated virus
RMAADGYLPDWLEDNLSEGIREWWDLKPGAPKPKANQQKQDDGRGLVLPGYKYLGPFNGLDKGEPVNAADAAALEHDKAYDQQLKAGDNPYLRYNHADAEFQERLQEDTSFGGNLGRAVFQAKKRVLEPLGLVEEGAKTAPGKKRPVEQSPQEPDSSSGIGKTGQQPAKKRLNFGQTGDSESVPDPQPLGEPPATPAAVGPTTMASGGGAPMADNNEGADGVGNASGNWHCDSTWLGDRVITTSTRTWALPTYNNHLYKQISSTSTGASNDNHYFGYSTPWGYFDFNRFHCHFSPRDWQRLINNNWGFRPKRLNFKLFNIQVEEVTTNDGVTTIANNLTSTVQVFSDSEYQLPYVLGSAHQGCLPPFPADVFMIPQYGYLTLNNGSQAVGRSSFYCLEYFPSQMLRTGNNFTFSYTFEEVPFHSSYAHSQSLDRLMNPLIDQYLYYLNRTQNQSGSAQNKDLLFSRGSPAGMSVQPKNWLPGPCYRQQRVSKTKTDNNNSNFTWTGASKYNLNGRESIINPGTAVASHKDDEDKFFPMSGVMIFGKESAGASSTALDNVMITDEEEIKATNPVATERFGTVAVNFQSSSTDPATGDVHAMGALPGMVWQDRDVYLQGPIWAKIPHTDGHFHPSPLMGGFGLKNPPPQILIKNTPVPANPPAEFSATKFASFITQYSTGQVSVEIEWELQKENSKRWNPEVQYTSNYAKSANVDFTVDNNGLYTEPRPIGTRYLTRPL

SEQ ID NO: 4937 - protein, 737 aa, Adeno-associated virus
RMAADGYLPDWLEDNLSEGIREWWDLKPGAPKPKANQQKQDDGRGLVLPGYKYLGPFNGLDKGEPVNAADAAALEHDKAYDQQLKAGDNPYLRYNHADAEFQERLQEDTSFGGNLGRAVFQAKKRVLEPLGLVEEGAKTAPGKKRPVEQSPQEPDSSSGIGKTGQQPAKKRLNFGQTGDSESVPDPQPLGEPPATPAAVGPTTMASGGGAPMADNNEGADGVGNASGNWHCDSTWLGDRVITTSTRTWALPTYNNHLYKQISSTSTGASNDNHYFGYSTPWGYFDFNRFHCHFSPRDWQRLINNNWGFRPKRLNFKLFNIQVKEVTTNDGVTTIANNLTSTVQVFSDSEYQLPYVLGSAHQGCLPPFPADVFMIPQYGYLTLNNGSQAVGRSSFYCLEYFPSQMLRTGNNFTFSYTFEEVPFHSSYAHSQSLDRLMNPLIDQYLYYLNRTQNQSGSAQNKDLLFSRGSPAGMSVQPKNWLPGPCYRQQRVSKTKTDNNNSNFTWTGASKYNLNGRESIINPGTAVASHKDDEDKFFPMSGVMIFGKESAGASSTALDNVMITDEEEIKATNPVATERFGTVAVNFQSSSTDPATGDVHAMGALPGMVWQDRDVYLQGPIWAKIPHTDGHFHPSPLMGGFGLKNPPPQILIKNTPVPANPPAEFSATKFASFITQYSTGQVSVEIEWELQKENSKRWNPEVQYTSNYAKSANVDFTVDNNGLYTEPRPIGTRYLTRPL

SEQ ID NO: 4938 - protein, 737 aa, Adeno-associated virus
RMAADGYLPDWLEDNLSEGIREWWDLKPGAPKPKANQQKQDDGRGLVLPGYKYLGPFNGLDKGEPVNAADAAALEHDKAYDQQLKAGDNPYLRYNHADAEFQERLQEDTSFGGNLGRAVFQAKKRVLEPLGLVEEGAKTAPGKKRPVEQSPQEPDSSSGIGKTGQQPAKKRLNFGQTGDSESVPDPQPLGEPPATPAAVGPTTMASGGGAPMADNNEGADGVGNASGNWHCDSTWLGDRVITTSTRTWALPTYNNHLYKQISSTSTGASNDNHYFGYSTPWGYFDFNRFHCHFSPRDWQRLINNNWGFRPKRLNFKLFNIQVKEVTTNDGVTTIANNLTSTVQVFSDSEYQLPYVLGSAHQGCLPPFPADVFMIPQYGYLTLNNGSQAVGRSSFYCLEYFPSQMLRTGNNFTFSYTFEEVPFHSSYAHSQSLDRLMNPLIDQYLYYLNRTQNQSGSAQNKDLLFSRGSPAGMSVQPKNWLPGPCYRQQRVSKTKTDNNNSNFTWTGASKYNLNGRESIINPGTAVASHKDDEDKFFPMSGVMIFGKESAGANSTALDNVMITDEEEIKATNPVATERFGTVAVNFQSSSTDPATGDVHAMGALPGMVWQDRDVYLQGPIWAKIPHTDGHFHPSPLMGGFGLKNPPPQILIKNTPVPANPPAEFSATKFASFITQYSTGQVSVEIEWELQKENSKRWNPEVQYTSNYAKSANVDFTVDNNGLYTEPRPIGTRYLTRPL

SEQ ID NO: 4939 - DNA, 2208 bp, Adeno-associated virus
atggctgccgatggttatcttccagattggctcaaggacactctctctgaaggaataagacagtggtggaagctcaaacctggcccaccaccaccaaagcccgcagagcggcataaggacgacagcgggggtcttgtgcttcctgggtacaagtacctcggacccttcaacggactcgacaagggagagccggtcaacgaggcagacgccgcggccctcgagtacgacaaggcctacgaccggcagctcgacagcggagacaacccgtacctcaagtacaaccacgccgacgcggagtttcaggagcgccttaaagaagatacgtcttttgggggcaacctcggacgagcagtcttccaggcgaaaaagagggttcttgaacctctgggcctggttgaggaacctgttaagacggctccgggaaaaaagaggccggtagagcactctcctgtggagccagactcctcctcgggaacaggaaaagcgggccagcagcctgcgagaaagagattgaattttggtcagactggagacgcagactccgtacctgacccccagcctctcggacagccaccagcagccccctctggtctgggaactaatacgatggctacaggcagtggcgcaccaatggcagacaataacgagggcgccgacggagtgggtaattcctcgggaagttggcattgcgattccacatggatgggcgacagagtcatcaccaccagcacccgaacctgggctctgcccacctacaacaaccatctgtacaagcagatctccagccaatcaggagccagcaacgacaaccactactttggctacagcaccccttgggggtattttgacttcaacagattccactgccacttttcaccacgtgactggcaaagactcatcaacaacaactggggattccggcccaagagactcaacttcaagctctttaacattcaagtcaaggaggtcacgcagaatgacggtacgacgacgattgccaataaccttaccagcacggttcaggtgtttactgactcggagtaccagctcccgtacgtccccggctcggcgcatcaaggatgcctcccgccgttcccagcagacgtcttcatggtgccacagtatggatacctcaccctgaacaacgggagtcaggcagtaggacgctcttcattttactgcctggagtactttccttctcagatgcttcgtaccggaaacaactttaccttcagctacacctttgaggatgttcctttccacagcagctacgctcacagccagagtttggaccgtctcatgaatcctctcatcgaccagtacctgtattacttgagcagaacaaacactccaagcggaaccaccacgcagtccaggcttcagttttctcaggccggagcaagtgacattcgggaccagtctaggaactggcttcctggaccctgttaccgccagcagcgagtatcaaagacagctgcggacaacaacaacagtgaatactcgtggactggagctaccaagtaccacctcaatggcagagactctctggtgaatccgggcccggccatggccagccacaaggacgatgaagaaaagttttttcctcaaagcggggttctcatctttgggaagcaaggctcagagaaaacaaatgtggacattgaaaaggtcatgattacagacgaagaggaaatcagaaccaccaatcccgtggccacggagcagtatggttctgtatctaccaacctccagagcggcaacacacaagcagctactgcagatgtcaacacacaaggcgttcttccaggcatggtctggcaggacagagacgtgcacctgcaggggcctatctgggcaaagattccacacacggacggacattttcacccctctcccctcatgggcggatttggacttaaacaccctcctccacagattctcatcaagaacaccccggtacctgcaaatccttcgaccaccttcagtgcggcaaagtttgcttccttcatcacacagtattccacagggcaggtcagcgtggagatcgagtgggagctgcagaaggagaacagcaaacgctggaaccccgagatccagtacacttccaactacaacaaatctgttaatgtggactttactgtggacactaatggtgtgtattcagagcctcgccccattggcaccagatacctgactcgtaatctgtaa

SEQ ID NO: 4940 - protein, 735 aa, Adeno-associated virus
MAADGYLPDWLKDTLSEGIRQWWKLKPGPPPPKPAERHKDDSGGLVLPGYKYLGPFNGLDKGEPVNEADAAALEYDKAYDRQLDSGDNPYLKYNHADAEFQERLKEDTSFGGNLGRAVFQAKKRVLEPLGLVEEPVKTAPGKKRPVEHSPVEPDSSSGTGKAGQQPARKRLNFGQTGDADSVPDPQPLGQPPAAPSGLGTNTMATGSGAPMADNNEGADGVGNSSGSWHCDSTWMGDRVITTSTRTWALPTYNNHLYKQISSQSGASNDNHYFGYSTPWGYFDFNRFHCHFSPRDWQRLINNNWGFRPKRLNFKLFNIQVKEVTQNDGTTTIANNLTSTVQVFTDSEYQLPYVPGSAHQGCLPPFPADVFMVPQYGYLTLNNGSQAVGRSSFYCLEYFPSQMLRTGNNFTFSYTFEDVPFHSSYAHSQSLDRLMNPLIDQYLYYLSRTNTPSGTTTQSRLQFSQAGASDIRDQSRNWLPGPCYRQQRVSKTAADNNNSEYSWTGATKYHLNGRDSLVNPGPAMASHKDDEEKFFPQSGVLIFGKQGSEKTNVDIEKVMITDEEEIRTTNPVATEQYGSVSTNLQSGNTQAATADVNTQGVLPGMVWQDRDVHLQGPIWAKIPHTDGHFHPSPLMGGFGLKHPPPQILIKNTPVPANPSTTFSAAKFASFITQYSTGQVSVEIEWELQKENSKRWNPEIQYTSNYNKSVNVDFTVDTNGVYSEPRPIGTRYLTRNL

SEQ ID NO: 4941 - DNA, 2208 bp, Adeno-associated virus
atggctgccgatggttatcttccagattggctcgaggacactctctctgaaggaataagacagtggtggaagctcaaacctggcccaccaccaccaaagcccgcagagcggcataaggacgacagcaggggtcttgtgcttcctgggtacaagtacctcggacccttcaacggactcgacaagggggagccggtcaacgaggcagacgccgcggccctcgagcacgacaaggcctacgaccggcagctcgacagcggagacaacccgtacctcaagtacaaccacgccgacgcagagtttcaggagcgccttaaagaagatacgtcttttgggggcaacctcggacgagcagtcttccaggcgaaaaagagggttcttgaacctctgggcctggttgaggaacctgttaagacggctccgggaaaaaagaggccggtagagcactctcctgtggagccagactcctcctcgggaaccggaaaagcgggccagcagcctgcaagaaaaagattaaattttggtcagactggagacgcagactccgtacctgacccccagcctctcggacagccaccagcagccccctctggtctgggatctactacaatggctacaggcagtggcgcaccaatggcagacaataacgagggtgccgatggagtgggtaattcctcaggaaattggcattgcgattcccaatggctgggcgacagagtcatcaccaccagcacccgaacctgggccctgcccacatacaacaaccacctctacaagcaaatctccagccaatcaggagccagcaacgacaaccactactttggctacagcaccccctgggggtattttgacttcaacagattccactgccacttttcaccacgtgactggcaaagactcatcaacaacaactggggattccggcccaaaagactcaacttcaagctctttaatattcaagtcaaagaggtcacgcagaatgacggtacgacgacgattgccaataaccttaccagcacggttcaggtgtttactgactcggagtaccagctcccgtacgtcctgggctcggcgcatcaaggatgcctcccgccgtttccagcggacgtcttcatggtcccacagtatggatacctcaccctgaacaacgggagtcaggcggtaggacgctcttccttttactgcctggagtactttccttctcagatgctgcgtactggaaacaactttcagttcagctacacttttgaagacgtgcctttccacagcagctacgctcacagccagagtctggatcggctgatgaatcctctgatcgaccagtacctgtattatctgaacaagacacaaacaaatagtggaactcttcagcagtctcggctactgtttagccaagctggaccaaccaacatgtctcttcaagctaaaaactggctgcctggaccttgctacagacagcagcgtctgtcaaaacaggcaaacgacaacaacaacagcaactttccctggactgcagctacaaagtatcatctaaatggccgggactcgttggttaatccaggaccagctatggccagtcgcaaggatgacgaagaaaagtttttccccatgcatggaaccctgatatttggtaaacaaggaacaaatgccaacgacgcggatttggaaaatgtcatgattacagatgaagaagaaatcagggccaccaatcccgtggctacggagcagtacgggactgtgtcaaataatttgcaaaactcaaacactggtccaactactggaactgtcaatcaccaaggagcgttacctggtatggtgtggcaggatcgagacgtgtacctgcagggacccatttgggccaagattcctcacaccgatggacactttcatccttctccactgatgggaggttttggactcaaacacccgcctcctcagatcatgatcaaaaacactcccgttccagccaatcctcccacaaacttcagttctgccaagtttgcttctttcatcacacagtattccacgggacaggtcagcgtggagatcgagtgggagctgcagaaggagaacagcaaacgctggaatcccgaaattcagtacacttccaactacaacaagtctgttaatgtggactttactgtggacactaatggtgtgtattcagagcctcgccccattggcaccagatacctgactcgtaatctgtaa

SEQ ID NO: 4942 - protein, 735 aa, Adeno-associated virus
MAADGYLPDWLEDTLSEGIRQWWKLKPGPPPPKPAERHKDDSRGLVLPGYKYLGPFNGLDKGEPVNEADAAALEHDKAYDRQLDSGDNPYLKYNHADAEFQERLKEDTSFGGNLGRAVFQAKKRVLEPLGLVEEPVKTAPGKKRPVEHSPVEPDSSSGTGKAGQQPARKRLNFGQTGDADSVPDPQPLGQPPAAPSGLGSTTMATGSGAPMADNNEGADGVGNSSGNWHCDSQWLGDRVITTSTRTWALPTYNNHLYKQISSQSGASNDNHYFGYSTPWGYFDFNRFHCHFSPRDWQRLINNNWGFRPKRLNFKLFNIQVKEVTQNDGTTTIANNLTSTVQVFTDSEYQLPYVLGSAHQGCLPPFPADVFMVPQYGYLTLNNGSQAVGRSSFYCLEYFPSQMLRTGNNFQFSYTFEDVPFHSSYAHSQSLDRLMNPLIDQYLYYLNKTQTNSGTLQQSRLLFSQAGPTNMSLQAKNWLPGPCYRQQRLSKQANDNNNSNFPWTAATKYHLNGRDSLVNPGPAMASRKDDEEKFFPMHGTLIFGKQGTNANDADLENVMITDEEEIRATNPVATEQYGTVSNNLQNSNTGPTTGTVNHQGALPGMVWQDRDVYLQGPIWAKIPHTDGHFHPSPLMGGFGLKHPPPQIMIKNTPVPANPPTNFSSAKFASFITQYSTGQVSVEIEWELQKENSKRWNPEIQYTSNYNKSVNVDFTVDTNGVYSEPRPIGTRYLTRNL

SEQ ID NO: 4943 - DNA, 2208 bp, Adeno-associated virus
atggctgccgatggttatcttccagattggctcgaggacactctctctgaaggaataagacagtggtggaagctcaaacctggcccaccaccaccaaagcccgcagagcggcataaggacgacagcaggggtcttgtgcttcctgggtacaagtacctcggacccttcaacggactcgacaagggagagccggtcaacgaggcagacgccgcggccctcgagcacgacaaagcctacgaccggcagctcgacagcggagacaacccgtacctcaagtacaaccacgccgacgcggagtttcaggagcgccttaaagaagatacgtcttttgggggcaacctcggacgagcagtcttccaggcgaaaaagagggttcttgaacctctgggcctggttggggaacctgtcaagacggctccaggaaaaaagaggccggtagagcactctcctgtggagccagactcctcctcgggaaccggaaaggcgggccagcagcctgcaagaaaaagattgaattttggtcagactggagacgcagactcagtacctgacccccagcctctcggacagccaccagcagccccctctggtctgggaactaatacgatggctacaggcagtggcgcaccaatggcagacaataacgagggcgccgacggagtgggtaattcctcgggaaattggcattgcgattccacatggatgggcgacagagtcatcaccaccagcacccgaacctgggccctgcccacctacaacaaccacctctacaaacaaatttccagccaatcaggagcctcgaacgacaatcactactttggctacagcaccccttgggggtattttgacttcaacagattccactgccacttttcaccacgtgactggcaaagactcatcaacaacaactggggattccgacccaagagactcaacttcaagctctttaacattcaagtcaaagaggtcacgcagaatgacggtacgacgacgattgccaataaccttaccagcacggttcaggtgtttactgactcggagtaccagctcccgtacgtcctcggctcggcgcatcaaggatgcctcccgccgttcccagcagacgtcttcatggtgccacagtatggatacctcaccctgaacaacgggagtcaggcagtaggacgctcttcattttactgcctggagtactttccttctcagatgctgcgtaccggaaacaactttaccttcagctacacttttgaggacgttcctttccacagcggctacgctcacagccagagtctggaccgtctcatgaatcctctcatcgaccagtacctgtattacttgagcacaacaaacactccaagtggaaccaccacgcagtcaaggcttcagttttctcaggccggagcgagtgacattcgggaccagtctaggaactggcttcctggaccctgttaccgccagcagcgagtatcaaagacatctgcggataacaacaacagtgaatactcgtggactggagctaccaagtaccacctcaatggcagagactctctggtgaatccgggcccggccatggcaagccacaaggacaatgaagaaaagttttttcctcagagcggggttctcatctttgggaagcaaggctcagagaaaacaaatgtggacattgaaaaggtcatgattacagacgaagaggaaatcaggacaaccaatcccgtggctacggagcagtacggttctgtatctaccaacctccagagaggcaacagacaagcagctaccgcagatgtcaacacacaaggcgttcttccaggcatggtctggcaggacagagatgtgtaccttcaggggcccatctgggcaaagattccacacacggacggacattttcacccctctcccctcatgggtggattcggacttaaacaccctcctccacagattctcatcaagaacaccccggtacctgcgaatccttcgaccaccttcagtgcggcaaagtttgcttccttcatcacacagtactccacgggacaggtcagcgtggagatcgagtgggagctgcagaaggaaaacagcaaacgctggaatcccgaaattcagtacacttccaactacaacaagtctgttaatgtggactttactgtggacactaatggcgtgtattcagagcctcgccccattggcaccagatacctgactcgtaatctgtaa

SEQ ID NO: 4944 - protein, 735 aa, Adeno-associated virus
MAADGYLPDWLEDTLSEGIRQWWKLKPGPPPPKPAERHKDDSRGLVLPGYKYLGPFNGLDKGEPVNEADAAALEHDKAYDRQLDSGDNPYLKYNHADAEFQERLKEDTSFGGNLGRAVFQAKKRVLEPLGLVGEPVKTAPGKKRPVEHSPVEPDSSSGTGKAGQQPARKRLNFGQTGDADSVPDPQPLGQPPAAPSGLGTNTMATGSGAPMADNNEGADGVGNSSGNWHCDSTWMGDRVITTSTRTWALPTYNNHLYKQISSQSGASNDNHYFGYSTPWGYFDFNRFHCHFSPRDWQRLINNNWGFRPKRLNFKLFNIQVKEVTQNDGTTTIANNLTSTVQVFTDSEYQLPYVLGSAHQGCLPPFPADVFMVPQYGYLTLNNGSQAVGRSSFYCLEYFPSQMLRTGNNFTFSYTFEDVPFHSGYAHSQSLDRLMNPLIDQYLYYLSTTNTPSGTTTQSRLQFSQAGASDIRDQSRNWLPGPCYRQQRVSKTSADNNNSEYSWTGATKYHLNGRDSLVNPGPAMASHKDNEEKFFPQSGVLIFGKQGSEKTNVDIEKVMITDEEEIRTTNPVATEQYGSVSTNLQRGNRQAATADVNTQGVLPGMVWQDRDVYLQGPIWAKIPHTDGHFHPSPLMGGFGLKHPPPQILIKNTPVPANPSTTFSAAKFASFITQYSTGQVSVEIEWELQKENSKRWNPEIQYTSNYNKSVNVDFTVDTNGVYSEPRPIGTRYLTRNL

SEQ ID NO: 4945 - DNA, 2208 bp, Adeno-associated virus
atggctgccgatggttatcttccagattggctcgaggacactctctctgaaggaataagacagtggtggaagctcaaacctggcccaccaccaccaaagcccgcagagcggcataaggacgacagcaggggtcttgtgcttcctgggtacaagtacctcggacccttcaacggactcgacaagggagagccggtcaacgaggcagacgccgcggccctcgagcacgacaaagcctacgaccggcagctcgacagcggagacaacccgtacctcaagtacaaccacgccgacgcggagtttcaggagcgccttaaagaagatacgtcttttgggggcaacctcggacgagcagtcttccaggcgaaaaagagggttcttgaacctctgggcctggttggggaacctgttaagacggctccgggaaaaaagaggccggtagagcactctcctgtggagccagactcctcctcgggaaccggaaaggcgggccagcagcctgcaagaaaaagattgaattttggtcagactggagacgcagactcagtacctgacccccagcctctcggacagccaccagcagccccctctggtctgggaactaatacgatggctacaggcagtggcgcaccaatggcagacaataacgagggcgccgacggagtgggtaattcctcgggaaatcggcattgcgattccacatggatgggcgacagagtcatcaccaccagcacccgaacctgggccctgcccacctacaacaaccacctctacagacaaatttccagccaatcaggagcctcgaacgacaatcactactttggctacagcaccccttgggggtattttgacttcaacagattccactgccacttttcaccacgtgactggcaaagactcatcaacaacaactggggattccgacccaagagactcaacttcaagctctttaacattcaagtcaaagaggtcacgcagaatgacggtacgacgacgattgccaataaccttaccagcacggttcaggtgtttactgactcggagtaccagctcccgtacgtcctcggctcggcgcatcaaggatgcctcccgccgttcccagcagacgtcttcatggtgccacagtatggatacctcaccctgagcaacgggagtcaggcagtaggacgctcttcattttactgcccggagtactttccttctcagatgctgcgtaccggaaacaactttaccttcagctacacttttgaggacgttcctttccacagcagctacgctcacagccagagtctggaccgtctcatgaatcctctcatcgaccagtacctgtattacttgagcacaacaaacactccaagtggaaccaccacgcagtcaaggcttcagttttctcaggccggagcgagtgacattcgggaccagtctaggaactggcttcctggaccctgttaccgccagcagcgagtatcaaagacatctgcggataacaacaacagtgaatactcgtggactggagctaccaagtaccacctcaatggcagagactctctggtgaatccgggcccggccatggcaagccacaaggacaatgaagaaaagttttttcctcagagcggggttctcatctttgggaagcaaggctcagagaaaacaaatgtggacattgaaaaggtcatgattacagacgaagaggaaatcaggacaaccaatcccgtggctacggagcagtatggttctgtatctaccaacctccagagaggcaacagacaagcagctaccgcagatgtcaacacacaaggcgttcttccaggcatggtctggcaggacagagatgtgtaccttcaggggcccatctgggcaaagattccacacacggacggacattttcacccctctcccctcatgggtggattcggacctaaacaccctcctccacagattctcatcaagaacaccccggtacctgcgaatccttcgaccaccttcagtgcggcaaagtttgcttccttcatcacacagtactccacgggacaggtcagcgtggagatcgagtgggagctgcagaaggaaaacagcaaacgctggaatcccgaaattcagtacacttccaactacaacaagtctgttaatgtggactttactgtggacactaatggcgtgtattcagagcctcgccccattggcaccagatacctgactcgtaatttgtaa

SEQ ID NO: 4946 - protein, 735 aa, Adeno-associated virus
MAADGYLPDWLEDTLSEGIRQWWKLKPGPPPPKPAERHKDDSRGLVLPGYKYLGPFNGLDKGEPVNEADAAALEHDKAYDRQLDSGDNPYLKYNHADAEFQERLKEDTSFGGNLGRAVFQAKKRVLEPLGLVGEPVKTAPGKKRPVEHSPVEPDSSSGTGKAGQQPARKRLNFGQTGDADSVPDPQPLGQPPAAPSGLGTNTMATGSGAPMADNNEGADGVGNSSGNRHCDSTWMGDRVITTSTRTWALPTYNNHLYRQISSQSGASNDNHYFGYSTPWGYFDFNRFHCHFSPRDWQRLINNNWGFRPKRLNFKLFNIQVKEVTQNDGTTTIANNLTSTVQVFTDSEYQLPYVLGSAHQGCLPPFPADVFMVPQYGYLTLSNGSQAVGRSSFYCPEYFPSQMLRTGNNFTFSYTFEDVPFHSSYAHSQSLDRLMNPLIDQYLYYLSTTNTPSGTTTQSRLQFSQAGASDIRDQSRNWLPGPCYRQQRVSKTSADNNNSEYSWTGATKYHLNGRDSLVNPGPAMASHKDNEEKFFPQSGVLIFGKQGSEKTNVDIEKVMITDEEEIRTTNPVATEQYGSVSTNLQRGNRQAATADVNTQGVLPGMVWQDRDVYLQGPIWAKIPHTDGHFHPSPLMGGFGPKHPPPQILIKNTPVPANPSTTFSAAKFASFITQYSTGQVSVEIEWELQKENSKRWNPEIQYTSNYNKSVNVDFTVDTNGVYSEPRPIGTRYLTRNL

SEQ ID NO: 4947 - DNA, 2205 bp, Adeno-associated virus
atggctgccgatggttatcttccagattggctcgaggacactctctctgaaggaataagacagtggtggaagctcaaacctggcccaccaccaccaaagcccgcagagcggcataaggacgacagcaggggtcttgtgcttcctgggtacaagtacctcggacccttcaacggactcgacaagggagagccggtcaacgaggcagacgccgcggccctcgagcacgacaaggcctacgaccggcagctcgacagcggagacaacccgtacctcaagtacaaccacgccgacgcggagtttcaggagcgtcttaaagaagatacgtcttttgggggcaacctcggacgagcagtcttccaggcgaaaaagagggttcttgaacctctgggcctggttgaggaacctgttaagacggctccgggaaaaaagaggccggtagagcactctcctgcggagccagactcctcctcgggaaccggaaaagcgggccagcagcctgcaagaaaaagactgaatttcggtcagactggagacgcagactccgtacctgacccccagcctctcagacagccaccagcagcccccacaagtttgggatctactacaatggctacaggcagtggcgcaccaatggcagacaataacgagggtgccgatggagtgggtaattcctcaggaaattggcattgcgattcccaatggctgggcgacagagtcatcaccaccagcacccgaacctgggccctgcccacctacaacaaccacctttacaagcaaatctccagccaatcaggagcctcaaacgacaaccactactttggctacagcaccccctgggggtattttgacttcaacagattccactgccacttttcaccacgtgactggcaaagactcatcaacaacaactggggattccgacccaagagactcaacttcaagctctttaacattcaagtcaaagaggtcacgcagaatgacggtacgacgacgattgccaataaccttaccagcacggttcaggtgtttactgactcggagtaccagctcccgtacgtcctcggctcggcgcatcaaggatgcctcccgccgtttccagcggacgtcttcatggtcccacagtatggatacctcaccctgaacaacgggagtcaggcggtaggacgctcttccttttactgcctggagtactttccttctcagatgctgcgtactggaaacaactttcagttcagctacacttttgaagacgtgcctttccacagcagctacgctcacagccagagtttggatcggctgatgaatcctctgatcgaccagtacctgtattatctaaacagaacacaaacagctagtggaactcagcagtctcggctactgtttagccaagctggacccacaagcatgtctcttcaagctaaaaactggctgcctggaccgtgttatcgccagcagcgtttgtcaaagcaggcaaacgacaacaacaacagcaactttccctggactggagctaccaagtactacctcaatggcagagactctttggtgaacccgggcccggccatggccagccacaaggacgatgaagaaaagtttttccccatgcatggaaccctaatatttggtaaagaaggaacaaatgctaccaacgcggaattggaaaatgtcatgattacagatgaagaggaaatcaggaccaccaatcccgtggctacagagcagtacggatatgtgtcaaataatttgcaaaactcaaatactgctgcaagtactgaaactgtgaatcaccaaggagcattacctggtatggtgtggcaggatcgagacgtgtacctgcagggacccatttgggccaagattcctcacaccgatggacactttcatccttctccactgatgggaggttttggactcaaacacccgcctcctcagattatgatcaaaaacactcccgttccagccaatcctcccacaaacttcagttctgccaagtttgcttccttcatcacacagtattccacgggacaggtcagcgtggagatcgagtgggagctgcagaaggagaacagcaaacgctggaatcccgaaattcagtacacttccaactacaacaaatctgttaatgtggactttactgtggacactaatggtgtgtattcagagcctcgccccattggcaccagatacctgactcgtaatctgtaa

SEQ ID NO: 4948 - protein, 734 aa, Adeno-associated virus
MAADGYLPDWLEDTLSEGIRQWWKLKPGPPPPKPAERHKDDSRGLVLPGYKYLGPFNGLDKGEPVNEADAAALEHDKAYDRQLDSGDNPYLKYNHADAEFQERLKEDTSFGGNLGRAVFQAKKRVLEPLGLVEEPVKTAPGKKRPVEHSPAEPDSSSGTGKAGQQPARKRLNFGQTGDADSVPDPQPLRQPPAAPTSLGSTTMATGSGAPMADNNEGADGVGNSSGNWHCDSQWLGDRVITTSTRTWALPTYNNHLYKQISSQSGASNDNHYFGYSTPWGYFDFNRFHCHFSPRDWQRLINNNWGFRPKRLNFKLFNIQVKEVTQNDGTTTIANNLTSTVQVFTDSEYQLPYVLGSAHQGCLPPFPADVFMVPQYGYLTLNNGSQAVGRSSFYCLEYFPSQMLRTGNNFQFSYTFEDVPFHSSYAHSQSLDRLMNPLIDQYLYYLNRTQTASGTQQSRLLFSQAGPTSMSLQAKNWLPGPCYRQQRLSKQANDNNNSNFPWTGATKYYLNGRDSLVNPGPAMASHKDDEEKFFPMHGTLIFGKEGTNATNAELENVMITDEEEIRTTNPVATEQYGYVSNNLQNSNTAASTETVNHQGALPGMVWQDRDVYLQGPIWAKIPHTDGHFHPSPLMGGFGLKHPPPQIMIKNTPVPANPPTNFSSAKFASFITQYSTGQVSVEIEWELQKENSKRWNPEIQYTSNYNKSVNVDFTVDTNGVYSEPRPIGTRYLTRNL

SEQ ID NO: 4949 - DNA, 3160 bp, Adeno-associated virus
acccttcactaaagggactagtcctgcaggtttaaacgaattcgcccttgctgcgtcaactggaccaatgagaactttcccttcaacgactgtgtcgacaagatggtgatttggtgggaggaggggaagatgaccgccaaggtcgtggagtcggccaaagccattctcggaggaagcaaggtgcgcgtggaccagaaatgcaagtcctcggcccagatagatccgactcccgtgatcgtcacctccaacaccaacatgtgcgccgtgattgacgggaactcaacgaccttcgaacaccagcagccgttgcaagaccggatgttcaaatttgaactcacccgccgtctggatcatgactttgggaaggtcaccaagcgggaagtcaaagactttttccggtgggcaaaggatcacgtggttgaggtggagcatgaattctacgtcaaaaagggtggagccaagaaaagacccgcccctagtgacgcagatataagtgagcccaaacgggtgcgcgagtcagttgcgcagccatcgacgtcagacgcggaagcttcgatcaactacgcggacaggtaccaaaacaaatgttctcgtcacgtgggcatgaatctgatgctgtttccctgcagacaatgcgagagaatgaatcaaaattcaaatatctgcttcactcacggacagaaagactgtttagagtgctttcccgtgtcagaatctcaacctgtttctgtcgtcaaaaaggcgtatcagaaactgtgctacattcatcatatcatgggaaaggtgccagacgcttgcactgcctgcgatctggtcaatgtggatttggatgactgcatctctgaacaataaatgatttaaatcaggtatggctgccgatggttatcttccagattggctcgaggacactctctctgaaggaataagacagtggtggaagctcaaacctggcccaccaccaccaaagcccgcagagcggcataaggacgacagcaggggtcttgtgcttcctgggtacaagtacctcggacccttcaacggactcgacaagggagagccggtcaacgaggcagacgccgcggccctcgagcacgacaaggcctacgaccggcagctcgacagcggagacaacccgtacctcaagtacaaccacgccgacgcggagtttcaggagcgtcttaaagaagatacgtcttttgggggcaacctcggacgagcagtcttccaggcgaaaaagagggttcttgaacctctgggcctggttgaggaacctgttaagacggctccgggaaaaaagaggccggtagagcactctcctgcggagccagactcctcctcgggaaccggaaaagcgggccagcagcctgcaagaaaaagactgaatttcggtcagactggagacgcagactccgtacctgacccccagcctctcagacagccaccagcagcccccacaagtttgggatctactacaatggctacaggcagtggcgcaccaatggcagacaataacgagggtgccgatggagtgggtaattcctcaggaaattggcattgcgattcccaatggctgggcgacagagtcatcaccaccagcacccgaacctgggccctgcccacctacaacaaccacctttacaagcaaatctccagccaatcaggagcctcaaacgacaaccactactttggctacagcaccccctgggggtattttgacttcaacagattccactgccacttttcaccacgtgactggcaaagactcatcaacaacaactggggattccgacccaagagactcaacttcaagctctttaacattcaagtcaaagaggtcacgcagaatgacggtacgacgacgattgccaataaccttaccagcacggttcaggtgtttactgactcggagtaccagctcccgtacgtcctcggctcggcgcatcaaggatgcctcccgccgtttccagcggacgtcttcatggtcccacagtatggatacctcaccctgaacaacgggagtcaggcggtaggacgctcttccttttactgcctggagtactttccttctcagatgctgcgtactggaaacaactttcagttcagctacacttttgaagacgtgcctttccacagcagctacgctcacagccagagtttggatcggctgatgaatcctctgatcgaccagtacctgtattatctaaacagaacacaaacagctagtggaactcagcagtctcggctactgtttagccaagctggacccacaagcatgtctcttcaagctaaaaactggctgcctggaccgtgttatcgccagcagcgtttgtcaaagcaggcaaacgacaacaacaacagcaactttccctggactggagctaccaagtactacctcaatggcagagactctttggtgaacccgggcccggccatggccagccacaaggacgatgaagaaaagtttttccccatgcatggaaccctaatatttggtaaagaaggaacaaatgctaccaacgcggaattggaaaatgtcatgattacagatgaagaggaaatcaggaccaccaatcccgtggctacagagcagtacggatatgtgtcaaataatttgcaaaactcaaatactgctgcaagtactgaaactgtgaatcaccaaggagcattacctggtatggtgtggcaggatcgagacgtgtacctgcagggacccatttgggccaagattcctcacaccgatggacactttcatccttctccactgatgggaggttttggactcaaacacccgcctcctcagattatgatcaaaaacactcccgttccagccaatcctcccacaaacttcagttctgccaagtttgcttccttcatcacacagtattccacgggacaggtcagcgtggagatcgagtgggagctgcagaaggagaacagcaaacgctggaatcccgaaattcagtacacttccaactacaacaaatctgttaatgtggactttactgtggacactaatggtgtgtattcagagcctcgccccattggcaccagatacctgactcgtaatctgtaattgcttgttaatcaataaaccgtttaattcgtttcagttgaactttggtctctgcgaagggcgaattcgcggccgctaaatcaatcg

SEQ ID NO: 4950 - protein, 734 aa, Adeno-associated virus
MAADGYLPDWLEDTLSEGIRQWWKLKPGPPPPKPAERHKDDSRGLVLPGYKYLGPFNGLDKGEPVNEADAAALEHDKAYDRQLDSGDNPYLKYNHADAEFQERLKEDTSFGGNLGRAVFQAKKRVLEPLGLVEEPVKTAPGKKRPVEHSPAEPDSSSGTGKAGQQPARKRLNFGQTGDADSVPDPQPLGQPPAAPTSLGSTTMATGSGAPMADNNEGADGVGNSSGNWHCDSQWLGDRVITTSTRTWALPTYNNHLYKQISSQSGASNDNHYFGYSTPWGYFDFNRFHCRFSPRDWQRLINNNWGFRPKRLNFKLFNIQVKEVTQNDGTTTIANNLTSTVQVFTDSEYQLPYVLGSAHQGCLPPFPADVFMVPQYGYLTLNNGSQAVGRSSFYCLEYFPSQMLRTGNNFQFSYTFEDVPFHSSYAHSQGLDRLMNPLIDQYLYYLNRTQTASGTQQSRLLFSQAGPTSMSLQAKNWLPGPCYRQQRLSKQANDNNNSNFPWTGATKYHLNGGDSLVNPGPAMASHKDDEEKFFPMHGTLIFGKEGTNATNAELENVMITDEEEIRTTNPVATEQYGYVSNNLQNSNTAASTETVNHQGALPGMVWQDRDVYLRGPIWAKIPHADGHFHPSPLMGGFGLKHPPPQIMIKNTPVPANPPTNFSSAKFASFITQYSTGQVSVEIEWELQKENSKRWNPEIQYTSNYNKSVNVDFTVDTNGVYSEPRPIGTRYLTRNL

SEQ ID NO: 4951 - DNA, 3157 bp, Adeno-associated virus
ctcactaagggactagtcctgcaggtttaaacgaattcgcccttgctgcgtcaactggaccaatgagaactttcccttcaacgactgtgtcgacaagatggtgatttggtgggaggaggggaagatgaccgccaaggtcgtggagtcggccaaagccactctcggaggaagcaaggtgcgcgtggaccagaaacgcaagtcctcggcccagatagatccgactcccgtgatcgtcacctccaacaccaacatgtgcgccgtgattgacgggaactcaacgaccttcgaacaccagcagccgttgcaagaccgaatgttcaaatttgaactcacccgccgtctggatcatgacttcgggaaggtcaccaagcaggaagtcaaagactttttccggtgggcaaaggatcacgtggttgaggtggagcatgaattctacgtcaaaaagggtggagccaagaaaagacccgcccctagtgacgcagatataagtgagcccaaacgggtgcgcgagtcagttgcgcagccatcgacgtcagacgcggaagcttcgatcaactacgcggacaggtaccaaaacaaatgttctcgtcacgtgggcatgaatctgatgctgtttccctgcagacaatgcgagagaatgaatcaaaattcaaatatctgcttcactcacggacagaaagactgtttagagtgctttcccgtgtcagaatctcaacctgtttctgtcgtcaaaaaggcgtatcagaaactgtgctacattcatcatatcatgggaaaggtgccagacgcttgcactgcctgcgatctggtcaatgtggatttggatgactgcatctctgaacaataaatgatttaaatcaggtatggctgccgatggttatcttccagattggctcgaggacactctctctgaaggaataagacagtggtggaagctcaaacctggcccaccaccaccaaagcccgcagagcggcataaggacgacagcaggggtcttgtgcttcctgggtacaagtacctcggacccttcaacggactcgacaagggagagccggtcaacgaggcagacgccgcggctctcgagcacgacaaggcctacgaccggcagctcgacagcggagacaacccgtacctcaagtacaaccacgccgacgcggagtttcaggagcgtcttaaagaagatacgtcttttgggggcaacctcggacgagcagtcttccaggcgaaaaagagggttcttgaacctctgggcctggttgaggaacctgttaagacggctccgggaaaaaagaggccggtagagcactctcctgcggagccagactcctcctcgggaaccggaaaagcgggccagcagcctgcaagaaaaagactgaatttcggtcagactggagacgcagactccgtacctgacccccagcctctcggacagccaccagcagcccccacaagtttgggatctactacaatggctacaggcagtggcgcaccaatggcagacaataacgagggtgccgatggagtgggtaattcctcaggaaattggcattgcgattcccaatggctgggcgacagagtcatcaccaccagcacccgaacctgggccctgcccacctacaacaaccacctttacaagcaaatctccagccaatcaggagcctcaaacgacaaccactactttggctacagcaccccctgggggtattttgacttcaacagattccactgccgcttttcaccacgtgactggcaaagactcatcaacaacaactggggattccgacccaagagactcaacttcaagctctttaacattcaagtcaaagaggtcacgcagaatgacggtacgacgacgattgccaataaccttaccagcacggttcaggtgtttactgactcggagtaccagctcccgtacgtcctcggctcggcgcatcaaggatgcctcccgccgtttccagcggacgtcttcatggtcccacagtatggatacctcaccctgaacaacgggagtcaggcggtaggacgctcttccttttactgcctggagtactttccttctcagatgctgcgtactggaaacaactttcagttcagctacacttttgaagacgtgcctttccacagcagctacgctcacagccagggtttggatcggctgatgaatcctctgatcgaccagtacctgtattatctaaacagaacacaaacagctagtggaactcagcagtctcggctactgtttagccaagctggacccacaagcatgtctcttcaagctaaaaactggctgcctggaccgtgttatcgccagcagcgtttgtcaaagcaggcaaacgacaacaacaacagcaactttccctggactggagctaccaagtaccacctcaatggcggagactctttggtgaacccgggcccggccatggccagccacaaggacgatgaagaaaagtttttccccatgcatggaaccctaatatttggtaaagaaggaacaaatgctaccaacgcggaattggaaaatgtcatgattacagatgaagaggaaatcaggaccaccaatcccgtggctacagagcagtacggatatgtgtcaaataatttgcaaaactcaaatactgctgcaagtactgaaactgtgaatcaccaaggagcattacctggtatggtgtggcaggatcgagacgtgtacctgcggggacccatttgggccaagattcctcacgccgatggacactttcatccttctccactgatgggaggttttggactcaaacacccgcctcctcagattatgatcaaaaacactcccgttccagccaatcctcccacaaacttcagttctgccaagtttgcttccttcatcacacagtattccacgggacaggtcagcgtggagatcgagtgggagctgcagaaggagaacagcaaacgctggaatcccgaaattcagtacacttccaactacaacaaatctgttaatgtggactttactgtggacactaatggtgtgtattcagagcctcgccccattggcaccagatacctgactcgtaatctgtaattgcttgttaatcaataaaccgtttaattcgtttcagttgaactttggtctctgcgaagggcgaattcgcggccgctaaattcaattcg

SEQ ID NO: 4952 - protein, 734 aa, Adeno-associated virus
MAADGYLPDWLEDTLSEGIRQWWKLKPGPPPPKPAERHKDDSRGLVLPGYKYLGPFNGLDKGEPVNEADAAALEHDKAYDRQLDSGDNPYLKYNHADAEFQERLKEDTSFGGNLGRAVFQAKKRVLEPLGLVEEPVKTAPGKKRPVEHSPAEPDSSSGTGKAGQQPARKRLNFGQTGDADSVPDPQPLGQPPAAPTSLGSTTMATGSGAPMADNNEGADGVGNSSGNWHCDSQWLGDRVITTSTRTWALPTYNNHLYKQISSQSGASNDNHYFGYSTPWGYFDFNRFHCHFSPRDWQRLINNNWGFRPKRLNFKLFNIQVKEVTQNDGTTTIANNLTSTVQVFTDSEYQLPYVLGSAHQGCLPPFPADVFMVPQYGYLTLNNGSQAVGRSSFYCLECFPSQMLRTGNNFQFSYTFEDVPFHSSYAHSQSLDRLMNPLIDQYLYYLNRTQTASGTQQSRLLFSQAGPTSMSLQAKNWLPGPCYRQQRLSKQANDNNNSNFPWTGATKYHLNGRDSLVNPGPAMASHKDDEEKFFPMHGTLIFGKEGTNATNAELENVMITDEEEIRTTNPVATEQYGYVSNNLQNSNTAASTETVNHQGALPGMVWQDRDVYLQGPIWAKIPHTDGHFHPSPLMGGFGLKHPPPQIMIKNTPVPANPPTNFSSAKFASFITQYSTGQVSVEIEWELQKENSKRWNPEIQYTSNYNKSVNVDFTVDTNGVYSEPRPIGTRYLTRNL

SEQ ID NO: 4953 - DNA, 2208 bp, Adeno-associated virus
atggctgccgatggttatcttccagattggctcgaggacactctctctgaaggaataagacagtggtggaagctcaaacctggcccaccaccaccaaagcccgcagagcggcataaggacgacagcaggggtcttgtgcttcctggatacaagtacctcggacccttcaacggactcgacaagggagagccggtcaacgaggcagacgccgcggccctcgagcacgacaaggcctacgaccggcagctcgacagcggagacaacccgtacctcaagtacaaccacgccgacgcggagtttcaggagcgccttaaagaagatacgtcttttgggggcaacctcggacgagcagtcttccaggcgaaaaagagggttcttgaacctctgggcctggttgaggaacctgttaagacggctccgggaaaaaagaggccggtagagcactctcctgtggagccagactcctcctcgggaaccggaaaagcgggcaaccagcctgcaagaaaaagattgaatttcggtcagactggagacgcagactccgtacctgacccccagcctctcggacagccaccagcatccccctctggtctgggaactaatacgatggctacaggcagtggcgcaccaatggcagacaataacgagggcgccgacggagtgggtaattcctcgggaaattggcattgcgattccacatggatgggcgacagagtcgtcaccaccagcacccgcacctgggccctgcccacctacaacaaccacctctacaagcagatttccagccaatcaggagccagcaacgacaaccactactttggctacagcaccccttgggggtattttgacttcaacagattccactgccacttttcgccacgcgactggcagagactcatcaacaacaactggggattccggcccaaaagactcaacttcaagctgtttaacattcaagtcaaggaggtcacgcagaatgacggtacgacgacgattgccaataaccttaccagcacggttcaggtgtttactgacttggagtaccagctcccgtacgtcctcggctcggcgcatcaaggatgcctcccgccgttcccagcagacgtcttcatggtgccacagtatggatacctcaccctgaacaacgggagtcaggcggtaggacgctcttccttttactgcctggagtactttccttctcagatgcttcgcaccggaaacaactttaccttcagctacacttttgaagacgttcctttccacagcagctacgctcacagtcaaagtctggaccgtctcatgaatcctctcatcgaccagtacctgtattacttgagcagaacaaacactccaagcggaaccactacgcagtccaggcttcagttttctcaggccggagcgagtgacattcgggaccagtctaggaactggcttcctggaccctgttaccgccagcagcgagtatcaaagacagctgcggataacaacaacagtgaatactcgtggactggagctaccaagtaccacctcaatggcagagactctctggtgaatccgggcccggccatggccagccacaaggacgatgaagaaaagttttttcctcaaagcggggttctcatctttgggaagcaaggctcagagaaaacaaatgtggacattgaaaaggtcatgattacagacgaagaggaaatcaggaccaccaatcccgtggctacggagcagtatggttctgtatctaccaacctccagagcggcaacacacaagcagctacctcagatgtcaacacacaaggcgttcttccaggcatggtctggcaggacagagacgtgtacctgcaggggcccatctgggcaaaaattccacacacggacggacattttcacccctctcccctcatgggcggatttggacttaaacaccctcctccacagattctcattaagaataccccggtacctgcgaatccttcgaccaccttcagcgcggcaaagtttgcttccttcatcacacagtattccacggggcaggtcagcgtggagatcgagtgggagctgcagaaggagaacagcaaacgctggaatcccgaaattcagtacacttccaactacaacaaatctgttaatgtggactttactgtggacactaatggggtgtattcagagcctcgccctattggcaccagatacctgactcgtaatctgtaa

SEQ ID NO: 4954 - DNA, 3159 bp, Adeno-associated virus
gattgatttagcggccgcgaattcgcccttgctgcgtcaactggaccaatgagaactttcccttcaacgattgcgtcgacaagatggtgatctggtgggaggagggaaagatgaccgccaaggtcgtggagtcggccaaagccattctcggaggaagcaaggtgcgtgtggaccaaaagtgcaagtcttcggcccagatcgacccgactcccgtgatcgtcacctccaacaccaacatgtgcgccgtgattgatggaaactcaacgaccttcgagcaccagcagccgttgcaagaccggatgttcaaatttgaacttacccgccgtctggatcatgactttggaaaggtcaccaagcaggaagtgaaagactttttccggtgggcaaaggatcacgtggttgaggtggagcatgagttctacgtcaaaaagggtggagccaaaaaaagacccgcccccagtgacgcagatataagtgagcccaaacgggcgcgcgagtcagttgcgcagccatcgacgtcagacgcggaagcttcgatcaactacgcggacaggtaccaaaacaaatgttctcgtcacgtgggcatgaatctgatgctgtttccctgcagacaatgcgagagaatgaatcagaattcaaatatctgcttcactcacggacagaaagactgtccatagtgctttcccgtgtcagaatctcaacccgtttctgtcgtcaaaaaggcgtatcagaaactgtgctacattcatcacatcatgggaaaggtgccagacgcttgcactgcttgcgacctggtcaatgtggatttggatgactgcatctctgaacaataaatgatttaaatcaggtatggctgccgatggttatcttccagattggctcgaggacactctctctgaaggaataagacagtggtggaagctcaaacctggcccaccaccaccaaagcccgcagagcggcataaggacgacagcaggggtcttgtgcttcctggatacaagtacctcggacccttcaacggactcgacaagggagagccggtcaacgaggcagacgccgcggccctcgagcacgacaaggcctacgaccggcagctcgacagcggagacaacccgtacctcaagtacaaccacgccgacgcggagtttcaggagcgccttaaagaagatacgtcttttgggggcaacctcggacgagcagtcttccaggcgaaaaagagggttcttgaacctctgggcctggttgaggaacctgttaagacggctccgggaaaaaagaggccggtagagcactctcctgtggagccagactcctcctcgggaaccggaaaagcgggcaaccagcctgcaagaaaaagattgaatttcggtcagactggagacgcagactccgtacctgacccccagcctctcggacagccaccagcatccccctctggtctgggaactaatacgatggctacaggcagtggcgcaccaatggcagacaataacgagggcgccgacggagtgggtaattcctcgggaaattggcattgcgattccacatggatgggcgacagagtcgtcaccaccagcacccgcacctgggccctgcccacctacaacaaccacctctacaagcagatttccagccaatcaggagccagcaacgacaaccactactttggctacagcaccccttgggggtattttgacttcaacagattccactgccacttttcgccacgcgactggcagagactcatcaacaacaactggggattccggcccaaaagactcaacttcaagctgtttaacattcaagtcaaggaggtcacgcagaatgacggtacgacgacgattgccaataaccttaccagcacggttcaggtgtttactgacttggagtaccagctcccgtacgtcctcggctcggcgcatcaaggatgcctcccgccgttcccagcagacgtcttcatggtgccacagtatggatacctcaccctgaacaacgggagtcaggcggtaggacgctcttccttttactgcctggagtactttccttctcagatgcttcgcaccggaaacaactttaccttcagctacacttttgaagacgttcctttccacagcagctacgctcacagtcaaagtctggaccgtctcatgaatcctctcatcgaccagtacctgtattacttgagcagaacaaacactccaagcggaaccactacgcagtccaggcttcagttttctcaggccggagcgagtgacattcgggaccagtctaggaactggcttcctggaccctgttaccgccagcagcgagtatcaaagacagctgcggataacaacaacagtgaatactcgtggactggagctaccaagtaccacctcaatggcagagactctctggtgaatccgggcccggccatggccagccacaaggacgatgaagaaaagttttttcctcaaagcggggttctcatctttgggaagcaaggctcagagaaaacaaatgtggacattgaaaaggtcatgattacagacgaagaggaaatcaggaccaccaatcccgtggctacggagcagtatggttctgtatctaccaacctccagagcggcaacacacaagcagctacctcagatgtcaacacacaaggcgttcttccaggcatggtctggcaggacagagacgtgtacctgcaggggcccatctgggcaaaaattccacacacggacggacattttcacccctctcccctcatgggcggatttggacttaaacaccctcctccacagattctcattaagaataccccggtacctgcgaatccttcgaccaccttcagcgcggcaaagtttgcttccttcatcacacagtattccacggggcaggtcagcgtggagatcgagtgggagctgcagaaggagaacagcaaacgctggaatcccgaaattcagtacacttccaactacaacaaatctgttaatgtggactttactgtggacactaatggggtgtattcagagcctcgccctattggcaccagatacctgactcgtaatctgtaattgcttgttaatcaataaaccgtttaattcgtttcagttgaactttggtctctgcgaagggcgaattcgtttaaacctgcaggactagtccctttagtgagg

SEQ ID NO: 4955 - protein, 735 aa, Adeno-associated virus
MAADGYLPDWLEDTLSEGIRQWWKLKPGPPPPKPAERHKDDSRGLVLPGYKYLGPFNGLDKGEPVNEADAAALEHDKAYDRQLDSGDNPYLKYNHADAEFQERLKEDTSFGGNLGRAVFQAKKRVLEPLGLVEEPVKTAPGKKRPVEHSPVEPDSSSGTGKAGNQPARKRLNFGQTGDADSVPDPQPLGQPPASPSGLGTNTMATGSGAPMADNNEGADGVGNSSGNWHCDSTWMGDRVVTTSTRTWALPTYNNHLYKQISSQSGASNDNHYFGYSTPWGYFDFNRFHCHFSPRDWQRLINNNWGFRPKRLNFKLFNIQVKEVTQNDGTTTIANNLTSTVQVFTDLEYQLPYVLGSAHQGCLPPFPADVFMVPQYGYLTLNNGSQAVGRSSFYCLEYFPSQMLRTGNNFTFSYTFEDVPFHSSYAHSQSLDRLMNPLIDQYLYYLSRTNTPSGTTTQSRLQFSQAGASDIRDQSRNWLPGPCYRQQRVSKTAADNNNSEYSWTGATKYHLNGRDSLVNPGPAMASHKDDEEKFFPQSGVLIFGKQGSEKTNVDIEKVMITDEEEIRTTNPVATEQYGSVSTNLQSGNTQAATSDVNTQGVLPGMVWQDRDVYLQGPIWAKIPHTDGHFHPSPLMGGFGLKHPPPQILIKNTPVPANPSTTFSAAKFASFITQYSTGQVSVEIEWELQKENSKRWNPEIQYTSNYNKSVNVDFTVDTNGVYSEPRPIGTRYLTRNL

SEQ ID NO: 4956 - DNA, 2205 bp, Adeno-associated virus
atggctgccgatggttatcttccagattggctcgaggacactctctctgaaggaataagacagtggtggaagctcaaacctggcccaccaccaaagcccgcagagcggcataaggacgacagcaggggtcttgtgcttcctggatacaagtacctcggacccttcaacggactcgacaagggagagccggtcaacgaggcagacgccgcggccctcgagcacgacaaggcctacgaccggcagctcgacagcggagacaacccgtacctcaagtacaaccacgccgacgcggagtttcaggagcgccttaaagaagatacgtcttttgggggcaacctcggacgagcagtcttccaggcgaaaaagagggttcttgaacctctgggcctggttgaggaacctgttaagacggctccgggaaaaaagaggcccgtagagcactctcctgtggagccagactcctcctcgggaaccggaaaagcgggcaaccagcctgcaagaaaaagattgaatttcggtcagactggagacgcagactccgtacctgacccccagcctctcggacagccaccagcagccccctctggtctgggaactaatacgatggctacaggcagtggcgcaccaatggcagacaataacgagggcgccgacggagtgggtaattcctcgggagattggcattgcgattccacatggatgggcgacagagtcatcaccaccagcacccgcacctgggccctgcccacctacaacaaccacctctacaagcagatttccagccaatcaggagccagcaatgacaaccactactttggctacagcaccccttgggggtattttgacttcaacagattccactgccacttttcgccacgcgactggcagagactcatcaacaacaactggggattccggcccaaaagactcaacctcaagctgtttaacattcaagtcaaggaggtcacgcagaatgacggtacgacgacgattgccaataaccttaccagcacggttcaggtgtttactgacttggagtaccagctcccgtacgtcctcggctcggcgcatcaaggatgcctcccgccgttcccagcagacgtcttcatggtgccacagtatggatacctcaccctgaacaacgggagtcaggcggtaggacgctcttccttttactgcctggagtactttccttctcagatgcttcgtaccggaaacaactttaccttcagctacacttttgaagacgttcctttccacagcagctacgctcacagtcaaagtctggaccgtctcatgaatcctctcatcgaccagtacctgtattacttgagcagaacaaacactccaagcggaaccactacgcagtccaggcttcagttttctcaggccggagcgagtgacattcgggaccagtctaggaactggcttcctggaccctgttaccgccagcagcgagtatcaaagacagctgcggataacaacaacggtgaatactcgtggactggagctaccaagtaccacctcaatggcagagactctctggtgaatccgggcccggccatggccagccacaaggacgatgaagaaaagttttttcctcaaagcggggttctcatctttgggaagcaaggctcagagaaaacaaatgtggacattgaaaaggtcatgattacagacgaagaggaaatcaggaccaccaatcccgtggctacggagcagtatggttctgtatctaccaacctccagagcggcaacacacgagcagctacctcagatgtcaacacacaaggcgttcttccaggcatggtctggcaggacagagacgtgtacctgcaggggcccatctgggcaaaaattccacacacggacggacattttcacccctctcccctcatgggcggatttggacttaaacaccctcctccacagattctcattaagaataccccggtacctgcgaatccttcgaccaccttcagcgcggcaaagtttgcttccttcatcacacagtattccacggggcaggtcagcgtggagatcgagtgggagctgcagaaggagaacagcaaacgctggaatcccgaaattcagtacacttccaactacaacaaatctgttaatgtggactttactgtggacactaatggggtgtattcagagcctcgccctattggcaccagatacctgactcgtaatctgtaa

SEQ ID NO: 4957 - DNA, 3156 bp, Adeno-associated virus
cgattgaatttagcggccgcgaattcgcccttgctgcgtcaacggaccaatgagaactttcccttcaacgattgcgtcgacaagatggtgatctggtgggaggagggaaagatgaccgccaaggtcgtggagtcggccaaagccattctcggaggaagcaaggtgcgtgtggaccaaaagtgcaagtcttcggcccagatcgacccgactcccgtgatcgtcacctccaacaccaacatgtgcgccgtgattgatggaaactcaacgaccttcgagcaccagcagccgttgcaagaccggatgttcaaatttgaacttacccgccgtctggatcatgactttggaaaggtcaccaagcaggaagtgaaagactttttccggtgggcaaaggatcacgtggttgaggtggagcatgagttctacgtcaaaaagggtggagccaaaaaaagacccgcccccagtgacgcagatataagtgagcccaaacgggcgcgcgagtcagttgcgcagccatcgacgtcagacgcggaagcttcgatcaactacgcggacaggtaccaaaacaaatgttctcgtcacgtgggcatgaatctgatgctgtttccctgcagacaatgcgagcgaatgaatcagaattcaaatatctgcttcactcacggacagaaagactgtttagagtgctttcccgtgtcagaatctcaacccgtttctgtcgtcaaaaaggcgtatcagaaactgtgctacattcatcacatcatgggaaaggtgccagacgcttgcactgcttgcgacctggtcaatgtggatttggatgactgcatctctgaacaataaatgatttaaatcaggtatggctgccgatggttatcttccagattggctcgaggacactctctctgaaggaataagacagtggtggaagctcaaacctggcccaccaccaaagcccgcagagcggcataaggacgacagcaggggtcttgtgcttcctggatacaagtacctcggacccttcaacggactcgacaagggagagccggtcaacgaggcagacgccgcggccctcgagcacgacaaggcctacgaccggcagctcgacagcggagacaacccgtacctcaagtacaaccacgccgacgcggagtttcaggagcgccttaaagaagatacgtcttttgggggcaacctcggacgagcagtcttccaggcgaaaaagagggttcttgaacctctgggcctggttgaggaacctgttaagacggctccgggaaaaaagaggcccgtagagcactctcctgtggagccagactcctcctcgggaaccggaaaagcgggcaaccagcctgcaagaaaaagattgaatttcggtcagactggagacgcagactccgtacctgacccccagcctctcggacagccaccagcagccccctctggtctgggaactaatacgatggctacaggcagtggcgcaccaatggcagacaataacgagggcgccgacggagtgggtaattcctcgggagattggcattgcgattccacatggatgggcgacagagtcatcaccaccagcacccgcacctgggccctgcccacctacaacaaccacctctacaagcagatttccagccaatcaggagccagcaatgacaaccactactttggctacagcaccccttgggggtattttgacttcaacagattccactgccacttttcgccacgcgactggcagagactcatcaacaacaactggggattccggcccaaaagactcaacctcaagctgtttaacattcaagtcaaggaggtcacgcagaatgacggtacgacgacgattgccaataaccttaccagcacggttcaggtgtttactgacttggagtaccagctcccgtacgtcctcggctcggcgcatcaaggatgcctcccgccgttcccagcagacgtcttcatggtgccacagtatggatacctcaccctgaacaacgggagtcaggcggtaggacgctcttccttttactgcctggagtactttccttctcagatgcttcgtaccggaaacaactttaccttcagctacacttttgaagacgttcctttccacagcagctacgctcacagtcaaagtctggaccgtctcatgaatcctctcatcgaccagtacctgtattacttgagcagaacaaacactccaagcggaaccactacgcagtccaggcttcagttttctcaggccggagcgagtgacattcgggaccagtctaggaactggcttcctggaccctgttaccgccagcagcgagtatcaaagacagctgcggataacaacaacggtgaatactcgtggactggagctaccaagtaccacctcaatggcagagactctctggtgaatccgggcccggccatggccagccacaaggacgatgaagaaaagttttttcctcaaagcggggttctcatctttgggaagcaaggctcagagaaaacaaatgtggacattgaaaaggtcatgattacagacgaagaggaaatcaggaccaccaatcccgtggctacggagcagtatggttctgtatctaccaacctccagagcggcaacacacgagcagctacctcagatgtcaacacacaaggcgttcttccaggcatggtctggcaggacagagacgtgtacctgcaggggcccatctgggcaaaaattccacacacggacggacattttcacccctctcccctcatgggcggatttggacttaaacaccctcctccacagattctcattaagaataccccggtacctgcgaatccttcgaccaccttcagcgcggcaaagtttgcttccttcatcacacagtattccacggggcaggtcagcgtggagatcgagtgggagctgcagaaggagaacagcaaacgctggaatcccgaaattcagtacacttccaactacaacaaatctgttaatgtggactttactgtggacactaatggggtgtattcagagcctcgccctattggcaccagatacctgactcgtaatctgtaattgcttgttaatcaataaaccgtttaattcgtttcagttgaactttggtctctgcgaagggcgaattcgtttaaacctgcaggactagtccctttagtgag

SEQ ID NO: 4958 - protein, 734 aa, Adeno-associated virus
MAADGYLPDWLEDTLSEGIRQWWKLKPGPPPKPAERHKDDSRGLVLPGYKYLGPFNGLDKGEPVNEADAAALEHDKAYDRQLDSGDNPYLKYNHADAEFQERLKEDTSFGGNLGRAVFQAKKRVLEPLGLVEEPVKTAPGKKRPVEHSPVEPDSSSGTGKAGNQPARKRLNFGQTGDADSVPDPQPLGQPPAAPSGLGTNTMATGSGAPMADNNEGADGVGNSSGDWHCDSTWMGDRVITTSTRTWALPTYNNHLYKQISSQSGASNDNHYFGYSTPWGYFDFNRFHCHFSPRDWQRLINNNWGFRPKRLNLKLFNIQVKEVTQNDGTTTIANNLTSTVQVFTDLEYQLPYVLGSAHQGCLPPFPADVFMVPQYGYLTLNNGSQAVGRSSFYCLEYFPSQMLRTGNNFTFSYTFEDVPFHSSYAHSQSLDRLMNPLIDQYLYYLSRTNTPSGTTTQSRLQFSQAGASDIRDQSRNWLPGPCYRQQRVSKTAADNNNGEYSWTGATKYHLNGRDSLVNPGPAMASHKDDEEKFFPQSGVLIFGKQGSEKTNVDIEKVMITDEEEIRTTNPVATEQYGSVSTNLQSGNTRAATSDVNTQGVLPGMVWQDRDVYLQGPIWAKIPHTDGHFHPSPLMGGFGLKHPPPQILIKNTPVPANPSTTFSAAKFASFITQYSTGQVSVEIEWELQKENSKRWNPEIQYTSNYNKSVNVDFTVDTNGVYSEPRPIGTRYLTRNL

SEQ ID NO: 4959 - DNA, 2208 bp, Adeno-associated virus
atggctgccgatggttatcttccagattggctcgaggacactctctctgaaggaataagacagtggtggaagctcaaacctggcccaccaccaccaaagcccgcagagcggcataaggacgacagcaggggtcttgtgcttcctgggtacaagtacctcggacccttcaacggactcgacaagggagagccggtcaacgaggcagacgccgcggccctcgagcacgacaaggcctacgaccggcagctcgacagcggagacaacccgtacctcaagtacgaccacgccgacgcggagtttcaggagcgccttaaagaagatacgtcttttgggggcaacctcggacgagcagtcttccaggcaaaaaagagggttcttgaacctctgggcctggttgaggagcctgttaagacggctccgggaaaaaagaggccggtagagcactctcctgtggagccagactcctcctcgggaaccggaaaagcgggcaaccagcctgcaagaaagagattgaatttcggtcagactggagacgcagactccgtacctgacccccagcctctcggacagccaccagcagccccctctggtctgggaactaatacgatggctacaggcagtggcgcaccaatggcagacaataacgatggcgccgacggagtgggtaattcctcgggaaattggcattgcgattccacatggatgggcgacagagtcatcaccaccagcacccgaacctgggctctgcccacctacaacaaccatctgtacaagcagatttccagccaatcaggagccagcaacgacaaccactactttggctacagcaccccttgggggtattttgacttcaacagattccactgccacttttcaccacgtgactggcaaagactcatcaacaacaactggggattccggcccaagagactcaacttcaagctctttaacattcaagtcagagaggtcacgcagaatgatggtacgacgacgattgccaataaccttaccagcacggttcaggtgtttactgactcggagtaccagctcccgtacgtcctcggctcggcgcatcaaggatgcctcccgccgttcccagcagacgtcttcatggtgccacagtatggatacctcaccctgaacaacgggagtcaggcagtaggacgctcttcattttactgcctggagtacttcccttctcagatgctgcgtaccggaaacaactttaccttcagctacacctttgaggatgttcctttccacagcagctacgctcacagccagagtttggaccgtctcatgaatcctctcatcgaccagtacctgtattacttgagcagaacaaacactccaagcggaaccaccacgcagtccaggcttcagttttctcaggccggagcgagtgacattcgggatcagtctaggaactggcttcctggaccctgttaccgccagcagcgagtatcaaagacatctgcggacaacaacaacagtgaatactcgtggattggagctaccaagtaccacctcaatggcagagactctctggtgaatccgggcccggcaatggccagccacaaggacgatgaagaaaagttttttcctcagagcggggttctcatctttggaaaacaaggatcagagaaaacaaatgtggacattgaaaaggtcatgattacagacgaagaggaaatcagaaccaccaatcccgtggccacggagcagtatggttctgtatctaccaacctccagagcggcaacacacaagcatctactgcagatgtcaacacacaaggcgttcttccaggcatggtctggcaggacagagacgtgtacctgcaggggcctatctgggcaaagattccgcacacggacggacattttcacccctctcccctcatgggcggattcggacttaaacaccctcctccacagattctcatcaaaaacaccccggtacctgcgaatccttcgaccaccttcagtgcggcaaagtttgcttccttcatcacacagtattccacggggcgggtcagcgtggagatcgagtgggagctacagaaggagaacagcaaacgctggaatcccgagatccagtacacttccaactacaacaaatctgttaatgtggactttactgtggacactaatggtgtgtattcagagcctcgccccattggcaccagatacctgactcgtaatctgtaa

SEQ ID NO: 4960 - protein, 735 aa, Adeno-associated virus
MAADGYLPDWLEDTLSEGIRQWWKLKPGPPPPKPAERHKDDSRGLVLPGYKYLGPFNGLDKGEPVNEADAAALEHDKAYDRQLDSGDNPYLKYDHADAEFQERLKEDTSFGGNLGRAVFQAKKRVLEPLGLVEEPVKTAPGKKRPVEHSPVEPDSSSGTGKAGNQPARKRLNFGQTGDADSVPDPQPLGQPPAAPSGLGTNTMATGSGAPMADNNDGADGVGNSSGNWHCDSTWMGDRVITTSTRTWALPTYNNHLYKQISSQSGASNDNHYFGYSTPWGYFDFNRFHCHFSPRDWQRLINNNWGFRPKRLNFKLFNIQVREVTQNDGTTTIANNLTSTVQVFTDSEYQLPYVLGSAHQGCLPPFPADVFMVPQYGYLTLNNGSQAVGRSSFYCLEYFPSQMLRTGNNFTFSYTFEDVPFHSSYAHSQSLDRLMNPLIDQYLYYLSRTNTPSGTTTQSRLQFSQAGASDIRDQSRNWLPGPCYRQQRVSKTSADNNNSEYSWIGATKYHLNGRDSLVNPGPAMASHKDDEEKFFPQSGVLIFGKQGSEKTNVDIEKVMITDEEEIRTTNPVATEQYGSVSTNLQSGNTQASTADVNTQGVLPGMVWQDRDVYLQGPIWAKIPHTDGHFHPSPLMGGFGLKHPPPQILIKNTPVPANPSTTFSAAKFASFITQYSTGRVSVEIEWELQKENSKRWNPEIQYTSNYNKSVNVDFTVDTNGVYSEPRPIGTRYLTRNL

SEQ ID NO: 4961 - DNA, 2217 bp, Adeno-associated virus
atggctgccgatggttatcttccagattggctcgaggacaacctctctgagggcattcgcgagtggtgggacttgaaacctggagccccgaaacccaaagccaaccagcaaaagcaggacgacggccggggtctggtgcttcctggctacaagtacctcggacccttcaacggactcgacaagggggagcccgtcaacgcggcggacgcagcggccctcgagcacgacaaggcctacgaccagcagctcaaagcgggtgacaatccgtacctgcggtataaccacgccgacgccgagtttcaggagcgtctgcaagaagatacgtcttttgggggcaacctcgggcgagcagtcttccaggccaagaagcgggttctcgaacctctcggtctggttgaggaaggcgctaagacggctcctggaaagaagagaccggtagagccatcaccccagcgttctccagactcctctacgggcatcggcaagacaggccagcagcccgcgaaaaagagactcaactttgggcagactggcgactcagagtcagtgcccgaccctcaaccaatcggagaaccccccgcaggcccctctggtctgggatctggtacaatggctgcaggcggtggcgctccaatggcagacaataacgaaggcgccgacggagtgggtagttcctcaggaaattggcattgcgattccgcatggctgggcgacagagtcatcaccaccagcacccgaccctgggccctccccacctacaacaaccacctctacaagcaaatctccaacgggacatcgggaggaagcaccaacgacaacacctacttcggctacagcaccccctgggggtattttgactttaacagattccactgccacttctcaccacgtgactggcagcgactcatcaacaacaactggggattccggcccaagagactcaacttcaagctcttcaacatccaggtcaaggaggtcacgcagaatgaaggcaccaagaccatcgccaataaccttaccagcacgattcaggtctttacggactcggaataccagctcccgtacgtcctcggctctgcgcaccagggctgcccgcctccgttcccggcggacgtcttcatgattcctcagtacgggtacctgactctgaacaacggcagtcaggccgtgggccgttcctccttctactgcctggagtactttccttctcaaatgcggagaacgggcaacaactttgagttcagctaccagtttgaggacgtgccttttcacagcagctacgcgcatagccaaagcctggaccggctgatgaaccccctcatcgaccagtacctgtactacctgtctcggactcagtccacgggaggtaccgcaggaactcagcagttgctattttctcaggccgggcctaataacatgtcggctcaggccaaaaactggctacccgggccctgctaccggcagcaacgcgtctccacgacactgtcgcaaaataacaacagcaactttgcttggaccggtgccaccaagtatcatctgaatggcagagactctctggtaaatcccggtgtcgctatggcaacgcacaaggacgacgaagagcgattttttccatccagcggagtcttgatgtttgggaaacagggagctggaaaagacaacgtggactatagcagcgttatgctaaccagtgaggaagaaatcaaaaccaccaacccagtggccacagaacagtacggcgtggtggccgataacctgcaacagcaaaacgccgctcctattgtaggggccgtcaacagtcaaggagccttacctggcatggtctggcagaaccgggacgtgtacctgcagggtcctatctgggccaagattcctcacacggacggcaactttcatccttcgccgctgatgggaggctttggactgaaacacccgcctcctcagatcctgattaagaatacacctgttcccgcggatcctccaactaccttcagtcaagccaagctggcgtcgttcatcacgcagtacagcaccggacaggtcagcgtggaaattgaatgggagctgcagaaagagaacagcaagcgctggaacccagagattcagtatacttccaactactacaaatctacaaatgtggactttgctgtcaatactgagggtacttattcagagcctcgccccattggcacccgttacctcacccgtaacctgtaa

SEQ ID NO: 4962 - protein, 738 aa, Adeno-associated virus
MAADGYLPDWLEDNLSEGIREWWDLKPGAPKPKANQQKQDDGRGLVLPGYKYLGPFNGLDKGEPVNAADAAALEHDKAYDQQLKAGDNPYLRYNHADAEFQERLQEDTSFGGNLGRAVFQAKKRVLEPLGLVEEGAKTAPGKKRPVEPSPQRSPDSSTGIGKTGQQPAKKRLNFGQTGDSESVPDPQPIGEPPAGPSGLGSGTMAAGGGAPMADNNEGADGVGSSSGNWHCDSAWLGDRVITTSTRPWALPTYNNHLYKQISNGTSGGSTNDNTYFGYSTPWGYFDFNRFHCHFSPRDWQRLINNNWGFRPKRLNFKLFNIQVKEVTQNEGTKTIANNLTSTIQVFTDSEYQLPYVLGSAHQGCPPPFPADVFMIPQYGYLTLNNGSQAVGRSSFYCLEYFPSQMRRTGNNFEFSYQFEDVPFHSSYAHSQSLDRLMNPLIDQYLYYLSRTQSTGGTAGTQQLLFSQAGPNNMSAQAKNWLPGPCYRQQRVSTTLSQNNNSNFAWTGATKYHLNGRDSLVNPGVAMATHKDDEERFFPSSGVLMFGKQGAGKDNVDYSSVMLTSEEEIKTTNPVATEQYGVVADNLQQQNAAPIVGAVNSQGALPGMVWQNRDVYLQGPIWAKIPHTDGNFHPSPLMGGFGLKHPPPQILIKNTPVPADPPTTFSQAKLASFITQYSTGQVSVEIEWELQKENSKRWNPEIQYTSNYYKSTNVDFAVNTEGTYSEPRPIGTRYLTRNL

SEQ ID NO: 4963 - protein, 735 aa, Adeno-associated virus
MAADGYLPDWLEDTLSEGIRQWWKLKPGPPPPKPAERHKDDSRGLVLPGYKYLGPFNGLDKGEPVNEADAAALEHDKAYDRQLDSGDNPYLKYNHADAEFQERLKEDTSFGGNLGRAVFQAKKRVLEPLGLVEEPVKTAPGKKRPVEHSPVEPDSSSGTGKAGQQPARKRLNFGQTGDADSVPDPQPLGQPPAAPSGLGSTTMATGSGAPMADNNEGADGVGNSSGNWHCDSQWLGDRVITTSTRTWALPTYNNHLYKQISSQSGASNDNHYFGYSTPWGYFDFNRFHCHFSPRDWQRLINNNWGFRPKRLNFKLFNIQVKEVTQNDGTTTIANNLTSTVQVFTDSEYQLPYVLGSAHQGCLPPFPADVFMVPQYGYLTLNNGSQAVGRSSFYCLEYFPSQMLRTGNNFQFSYTFEDVPFHSSYAHSQSLDRLMNPLVDQYLYYLNKTQTNSGTLQQSRLLFSQAGPTNMSLQAKNWLPGPCYRQQRLSKQANDNNNSNFPWTAATKYHLNGRDSLVNPGPAMASHKDDEEKFFPMHGTLIFGKQGTNANDADLENVMITDEEEIRTTNPVATEQYGTVSNNLQNSNTGPTTGTVNHQGALPGMVWQDRDVYLQGPIWAKIPHTDGHFHPSPLMGGFGLKHPPPQIMIKNTPVPANPPTNFSSAKFASFITQYSTGQVSVEIEWELQKENSKRWNPEIQYTSNYNKSVNVDFTVDTNGVYSEPRPIGTRYLTRNL

SEQ ID NO: 4964 - DNA, 3158 bp, Adeno-associated virus
gattgaatttagcggccgcgaattcgcccttgctgcgtcaactggaccaatgagaactttcctttcaatgattgcgtcgacaagatggtgatctggtgggaggagggaaagatgaccgccaaggtcgtggagtcggccaaagccattctcggaggaagcaaggtgcgcgcggaccagaaatgcaagtcctcggcccagatagacccgactcccgtgattgtcacctccaacaccaacatgtgcgccgtgattgacgggaactcaacgaccttcgaacaccagcagccgttgcaagaccggatgttcaaatttgaactcacccgccgtctggatcatgactttgggaaggtcaccaagcaggaagtcaaagactttttccggtgggcaaaggatcacgtggttgaggtggagcatgaattctacgtcaaaaagggtggagctaagaaaagacccgcccccagtgacgcagatataagtgagcccaaacgggcgcgcgagtcagttgcgcagccatcgacgtcagacgcggaagcttcgatcaactacgcgggcaggtaccaaaacaaatgttctcgtcacgtgggcatgaatctgatgctgtttccctgcagacaatgcgagagaatgaatcagaattcaaatatctgcttcactcacggacagaaagactgtttagagtgctttcccgtgtcagaatctcaacccgtttctgtcgtcaaaaaggcgtatcagaaactttgctacattcatcatatcatgggaaaggtgccagacgcttgcactgcctgcgatctggtcaatgtggatttggatgactgcatctctgaacaataaatgatttaaatcaggtatggctgccgatggttatcttccagattggctcgaggacactctctctgaaggaataagacagtggtggaagctcaaacctggcccaccaccaccaaagcccgcagagcggcataaggacgacagcaggggtcttgtgcttcctgggtacaagtacctcggacccttcaacggactcgacaagggggagccggtcaacgaggcagacgccgcggccctcgagcacgacaaggcctacgaccggcagctcgacagcggagacaacccgtacctcaagtacaaccacgccgacgcggagtttcaggagcgccttaaagaagatacgtcttttgggggcaacctcggacgagcagtcttccaggcaaaaaagagggttcttgaacctctgggcctggttgaggaacctgttaaaacggctccgggaaaaaagaggccggtagagcactctcctgtggagccagactcctcctcgggaaccggaaaagcgggccagcagcctgcaagaaaaagattgaatttcggtcagactggagacgcagactccgtacctgacccccagcctctcggacagccaccagcagccccctctggtctgggatctactacaatggctacaggcagtggcgcaccaatggcagacaataacgagggtgccgatggagtgggtaattcctcgggaaattggcattgcgattcccaatggctgggcgacagagtcatcaccaccagcacccgcacctgggccctgcccacctacaacaaccacctctacaagcaaatctccagccaatcaggagcctcaaacgacaaccactactttggctacagcaccccctgggggtattttgacttcaacagattccactgccacttttcaccacgtgactggcaaagactcatcaacaacaactggggattccgacccaagagactcaacttcaagctctttaacattcaagtcaaagaggtcacgcagaatgacggtacgacgacgattgccaataaccttaccagcacggttcaggtgtttactgactcggagtaccagctcccgtacgtcctcggctcggcgcatcaaggatgcctcccgccgtttccagcggacgtcttcatggtcccacagtatggatacctcaccctgaacaacgggagtcaggcagtaggacgctcttcattttactgcctggagtactttccttctcagatgctgcgtaccggaaacaactttcaattcagctacacttttgaagacgtgcctttccacagcagctacgctcacagccagagtctggatcggctgatgaatcctctggtcgaccagtacctgtattatctgaacaagacacaaacaaatagtggaactcttcagcagtctcggctactgtttagccaagctggacccaccaacatgtctcttcaagctaaaaactggctgcctggaccttgctacagacagcagcgtctgtcaaagcaggcaaacgacaacaacaacagcaactttccctggactgcagctacaaagtatcatctaaatggccgggactcgttggttaatccaggaccagctatggccagtcacaaggatgacgaagaaaagtttttccccatgcatggaacccttatatttggtaaacaaggaacaaatgccaacgacgcggatttggaaaatgtcatgattacagatgaagaagaaatcaggaccaccaatcccgtggctacggagcagtacggaactgtatcaaataatttgcaaaactcaaacactggtccaactactggaactgtcaatcaccaaggagcgttacctggtatggtgtggcaggatcgagacgtgtacctgcagggacccatttgggccaagattcctcacaccgatggacactttcatccttctccactgatgggaggttttggactcaaacacccacctcctcaaatcatgatcaaaaacactcccgttccagccaatcctcccacaaacttcagttctgccaagtttgcttctttcatcacacagtattccacggggcaggtcagcgtggagatcgagtgggagctgcagaaggagaacagcaaacgctggaatcccgaaattcagtacacttccaactacaacaaatctgttaatgtggactttactgtggacactaatggtgtgtattcagagcctcgccccattggcaccagatacctgactcgtaatctgtaattgcttgttaatcaataaaccgtttaattcgtttcagttgaactttggtctctgcgaagggcgaattcgtttaaacctgcaggactagtccctttagtga

SEQ ID NO: 4965 - protein, 735 aa, Adeno-associated virus
MAADGYLPDWLEDTLSEGIRQWWKLKPGPPPPKPAERHKDDSRGLVLPGYKYLGPFNGLDKGEPVNEADAAALEHDKAYDRQLDSGDNPYLKYNHADAEFQERLKEDTSFGGNLGRAVFQAKKRVLEPLGLVEEPVKTAPGKKRPVEHPPVEPDSSSGTGKAGQQPARKRLNFGQTGDADSVPDPQPLGQPPAAPSGLGSTTMATGSGAPMADNNEGADGVGNSSGNWHCDSQWLGDRVITTSTRTWALPTYNNHLYKQISSQSGASNDNHYFGYSTPWGYFDFNRFHCHFSPRDWQRLINNNWGFRPKRLNFKLFNIQVKEVTQNDGTTTIANNLTSTVQVFTDSEYQLPYVLGSAHQGCLPPFPADVFMVPQYGYLTLNNGSQAVGRSSFYCLEYFPSQMLRTGNNFQFSYTFEDVPFHSSYAHSQSLDRLMNPLIDQYLYYLNKTQTNSGTLQQSRLLFSQAGPTNMSLQAKNRLPGPCYRQQRLSKQANDNNNSNFPWTAATKYHLNGRDSLVNPGPAMASHKDDEEKFFPMHGTLIFGKQGTNANDADLENVMITDEEEIRTTNPVATEQYGTVSNNLQNSNTGPTTGTVNHQGALPGMVWQDRDVYLQGPIWAKIPHTDGHFHPSPLVGGFGLKHPPPQIMIKNTPVPANPPTNFSSAKFASFITQYSTGQVSVEIEWELQKENSKRWNPEIQYTSNYNKSVNVDFTVDTNGVYSEPRPIGTRYLTRNL

SEQ ID NO: 4966 - DNA, 3159 bp, Adeno-associated virus
gattgaatttagcggccgcgaattcgcccttgctgcgtcaactggaccaatgagaactttcctttcaatgattgcgtcgacaagatggtgatctggtgggaggagggaaagatgaccgccaaggtcgtggagtcggccaaagccattctcggaggaagcaaggtgcgcgtggaccagaaatgcaagtcctcggcccagatagacccgactcccgtgattgtcacctccaacaccgacatgtgcgccgtgattgacgggaactcaacgaccttcgaacaccagcagccgttgcaagaccggatgttcaaatttgaactcacccgccgtctggatcatgactttgggaaggtcaccaagcaggaagtcaaagactttttccggtgggcaaaggatcacgtggttgaggtggagcatgaattctacgtcaaaaagggtggagctaagaaaagacccgcccccagtgacgcagatataagtgagcccaaacgggcgcgcgagtcagttgcgcagccatcgacgtcagacgcggaagcttcgatcaactacgcggacaggtaccaaaacaaatgttctcgtcacgtgggcatgaatctgatgctgtttccctgcagacaatgcgagagaatgaatcagaattcaaatatctgcttcactcacggacagaaagactgtttagagtgctttcccgtgtcagaatctcaacccgtttctgtcgtcaaaaaggcgtatcagaaactttgctacattcatcatatcatgggaaaggtgccagacgcttgcactgcctgcgatctggtcaatgtggatttggatgactgcatctctgaacaataaatgatttaaatcaggtatggctgccgatggttatcttccagattggctcgaggacactctctctgaaggaataagacagtggtggaagctcaaacctggcccaccaccaccaaagcccgcagagcggcataaggacgacagcaggggtcttgtgcttcctgggtacaagtacctcggacccttcaacggactcgacaagggggagccggtcaacgaggcagacgccgcggccctcgagcacgacaaggcctacgaccggcagctcgacagcggagacaacccgtacctcaagtacaaccacgccgacgcggagtttcaggagcgccttaaagaagatacgtcttttgggggcaacctcggacgagcagtcttccaggcaaaaaagagggttcttgaacctctgggcctggttgaggaacctgttaaaacggctccgggaaaaaagaggccggtagagcaccctcctgtggagccagactcctcctcgggaaccggaaaagcgggccagcagcctgcaagaaaaagattgaatttcggtcagactggagacgcagactccgtacctgacccccagcctctcggacagccaccagcagccccctctggtctgggatctactacaatggctacaggcagtggcgcaccaatggcagacaataacgagggtgccgatggagtgggtaattcctcgggaaattggcattgcgattcccaatggctgggcgacagagtcatcaccaccagcacccgcacctgggccctgcccacctacaacaaccacctctacaagcaaatctccagccaatcaggagcctcaaacgacaaccactactttggctacagcaccccctgggggtattttgacttcaacagattccactgccacttttcaccacgtgactggcaaagactcatcaacaacaactggggattccgacccaagagactcaacttcaagctctttaacattcaagtcaaagaggtcacgcagaatgacggtacgacgacgattgccaataaccttaccagcacggttcaggtgtttactgactcggagtaccagctcccgtacgtcctcggctcggcgcatcaaggatgcctcccgccgtttccagcggacgtcttcatggtcccacagtatggatacctcaccctgaacaacgggagtcaggcagtaggacgctcttcattttactgcctggagtactttccttctcagatgctgcgtaccggaaacaactttcagttcagctacacttttgaagacgtgcctttccacagcagctacgctcacagccagagtctggatcggctgatgaatcctctgatcgaccagtacctgtattatctgaacaagacacaaacaaatagtggaactcttcagcagtctcggctactgtttagccaagctggacccaccaacatgtctcttcaagctaaaaaccggctgcctggaccttgctacagacagcagcgtctgtcaaagcaggcaaacgacaacaacaacagcaactttccctggaccgcagctacaaagtatcatctaaatggccgggactcgttggttaatccaggaccagctatggccagtcacaaggatgacgaagaaaagtttttccccatgcatggaacccttatatttggtaaacaaggaacaaatgccaacgacgcggatttggaaaatgtcatgattacagatgaagaagaaatcaggaccaccaatcccgtggctacggagcagtacggaactgtatcaaataatttgcaaaactcaaacactggtccaactactggaactgtcaatcaccaaggagcgttacctggtatggtgtggcaggatcgagacgtgtacctgcagggacccatttgggccaagattcctcacaccgatggacactttcatccttctccactggtgggaggttttggactcaaacacccacctcctcaaatcatgatcaaaaacactcccgttccagccaatcctcccacaaacttcagttctgccaagtttgcttctttcatcacacagtattccacggggcaggtcagcgtggagatcgagtgggagctgcagaaggagaacagcaaacgctggaatcccgaaattcagtacacttccaactacaacaaatctgttaatgtggactttactgtggacactaatggtgtgtattcagagcctcgccccattggcaccagatacctgactcgtaatctgtaattgcttgttaatcaataaaccgtttaattcgtttcagttgaactttggtctctgcgaagggcgaattcgtttaaacctgcaggactagtccctttagtgag

SEQ ID NO: 4967 - DNA, 2208 bp, Adeno-associated virus
atggctgccgatggttatcttccagattggctcgaggacactctctctgaaggaataagacagtggtggaagctcaaacctggcccaccaccaccaaagcccgcagagcggcataaggacgacagcaggggtcttgtgcttcctgggtacaagtaccttggacccttcaacggactcgacaagggagagccggtcaacgaggcagacgccgcggccctcgagcacgacaaggcctacgaccggcagctcgacagcggagacaacccgtaccccaagtacaaccacgccgacgcggagttccaggagcgtcttaaagaagatacgtcttttgggggcaacctcggacgagcagtcttccaggcgaaaaagagggttcttgaacctctgggcctggttgaggaacctgttaagacggctccgggaaaaaagaggccggtagagcactctcctgcggagccagactcctcctcgggaaccggaaaagcgggccagcagcctgcaagaaagagattgaatttcggtcagactggagacgcagactccgtacctgacccccagcctctcggacagccaccagcagccccctctggtctgggaactaatacgatggctacaggcagtggcgcaccaatggcagacaataacgagggcgccgacggagtgggtaattcctcgggaaattggcattgcgattccacatggatgggcgacagagtcatcaccaccagcacccgcacctgggctctgcccacctacaacaaccacctctacaagcagatttccagccaatcaggagcctcaaacgacaaccactactttggctacagcaccccttgggggtattttgacttcaacagattccactgccacttttcgccacgtgactggcaaagactcatcaacaacaattggggattccggcccaaaagactcaacttcaagctctttaacattcaagtcaaggaggtcacgcagaatgacggtacgacgacgattgccaataaccttaccagcacggttcaggtgtttactgactcggagtaccagctcccgtacgtcctcggctcggcgcatcaaggatgcctcccgccgttcccagcagacgtcttcatggtgccacagtatggatacctcaccctgaacaacgggagtcaggcagtaggacgctcttcattttactgcctggagtactttccttctcagatgctgcgtaccggaaacaactttaccttcagctacacctttgaggacgttcctttccacagcagctacgcccacagccagagtttggaccgtctcatgaatcctctcatcgaccagtacctgtattacttgagcagaacaaacactccaagcggaaccaccacgcagtcaaggcttcagttttctcaggccggagcaagtgacattcgggaccagtctaggaactggcttcctggaccctgttaccgccagcagcgagtatcaaagacatctgcggataacaacaacagtgaatactcgtggactggagctaccaagtaccaccttaatggaagagactctctggtgaatccgggcccggccatggccagccacaaggacgatgaagaaaagttttttcctcagagcggggttctcatctttggaaaacaagactcgggaaaaactaatgtggacattgaaaaggtcatgattacagacgaagaggaaatcaggaccaccaatcccgtggctacggagcagtatggttctgtatctaccaacctccagagcggcaacacacaagcagctacctcagatgtcaacacacaaggcgttcttccaggcatggtgtggcaggacagagacgtgtacctgcaggggcccatctgggcaaagattccacacacggacggacattttcacccctctcccctcatgggcggattcggacttaaacaccctcccccgcagattctcatcaagaacaccccggtacctgcgaatccttcgactaccttcagtgcggcaaagtttgcttccttcattacacagtactccacggggcaggtcagcgtggagatcgagtgggagctgcagaaggagaacagcaaacgctggaatcccgagattcagtacacttccaactacaacaaatctgttaatgtggactttactgtggacactaatggtgtgtattcagagcctcgccccattggcaccaggtacctgactcgtaatctgtaa

SEQ ID NO: 4968 - protein, 735 aa, Adeno-associated virus
MAADGYLPDWLEDTLSEGIRQWWKLKPGPPPPKPAERHKDDSRGLVLPGYKYLGPFNGLDKGEPVNEADAAALEHDKAYDRQLDSGDNPYPKYNHADAEFQERLKEDTSFGGNLGRAVFQAKKRVLEPLGLVEEPVKTAPGKKRPVEHSPAEPDSSSGTGKAGQQPARKRLNFGQTGDADSVPDPQPLGQPPAAPSGLGTNTMATGSGAPMADNNEGADGVGNSSGNWHCDSTWMGDRVITTSTRTWALPTYNNHLYKQISSQSGASNDNHYFGYSTPWGYFDFNRFHCHFSPRDWQRLINNNWGFRPKRLNFKLFNIQVKEVTQNDGTTTIANNLTSTVQVFTDSEYQLPYVLGSAHQGCLPPFPADVFMVPQYGYLTLNNGSQAVGRSSFYCLEYFPSQMLRTGNNFTFSYTFEDVPFHSSYAHSQSLDRLMNPLIDQYLYYLSRTNTPSGTTTQSRLQFSQAGASDIRDQSRNWLPGPCYRQQRVSKTSADNNNSEYSWTGATKYHLNGRDSLVNPGPAMASHKDDEEKFFPQSGVLIFGKQDSGKTNVDIEKVMITDEEEIRTTNPVATEQYGSVSTNLQSGNTQAATSDVNTQGVLPGMVWQDRDVYLQGPIWAKIPHTDGHFHPSPLMGGFGLKHPPPQILIKNTPVPANPSTTFSAAKFASFITQYSTGQVSVEIEWELQKENSKRWNPEIQYTSNYNKSVNVDFTVDTNGVYSEPRPIGTRYLTRNL

SEQ ID NO: 4969 - DNA, 2208 bp, Adeno-associated virus
atggctgccgatggttatcttccagattggctcgaggacactctctctgaaggaataagacagtggtggaagctcaaacctggcccaccaccaccaaagcccgcagagcggcataaggacgacagcaggggtcttgtgcttcctgggtacaagtaccttggacccttcaacggactcgacaagggagagccggtcaacgaggcagacgccgcggccctcgagcacgacaaggcctacgaccggcagctcgacggcggagacaacccgtacctcaagtacaaccacgccgacgcggagttccaggagcgtcttaaagaagatacgtcttttgggggcaacctcggacgagcagtcttccaggcgaaaaagagggttcttgaacctctgggcctggttgaggaacctgttaagacggctccgggaaaaaagaggccggtagagcactctcttgcggagccagactcctcctcgggaaccggaaaagcgggccagcagcctgcaagaaggagattgaatttcggtcagactggagacgcagactccgtacctgacccccagcctctcggacagccaccagcagccccctctggtctgggaactaatacgatggctacaggcagtggcgcaccaatggcagacaataacgagggcgccgacggagtgggtaattcctcgggaaattggcattgcgattccacatggatgggcgacagagtcatcaccaccagcacccgcacctgggctctgcccacctacaacaaccacctctacaggcagatttccagccaatcaggagcctcaaacgacaaccactactttggctacagcaccccttgggggtattttgacttcaacagattccactgccacttttcgccacgtgactggcaaagactcatcaacaacaattggggatcccggcccaaaagactcaacttcaagctctttaacattcaagtcaaggaggtcacgcagaatgacggtacgacgacgattgccaataaccttaccagcacggttcaggtgtttactgactcggagtaccagctcccgtacgtcctcggctcggcgcatcaaggatgcctcccgccgttcccagcagacgtcttcatggtgccacagtatggatacctcaccctgaacaacgggagtcaggcagtaggacgctcttcattttactgcctggagtactttccttctcagatgctgcgtaccggaaacaactttaccttcagctacacctttgaggacgttcctttccacagcagctacgcccacagccagagtttggaccgtctcatgaatcctctcgtcgaccagtacctgtattacttgagcagaacaaacactccaagcggaaccaccacgcagtcaaggcttcagttttctcaggccggagcaagtgacattcgggaccagtctaggaactggcttcctggaccctgttaccgccagcagcgagtatcaaagacatctgcggataacaacaacagtgaatactcgtggactggagctaccaagtaccaccttaatggaagagactctctggtgaatccgggcccggccatggccagccacaaggacgatgaagaaaagttttttcctcagagcggggttctcatctttggaaaacaagactcgggaaaaactaatgtggacattgaaaaggtcatgattacagacgaagaggaaatcaggaccaccaatcccgtggctacggagcagtatggttctgtatctaccaacctccagagcggcaacacacaagcagctacctcagatgtcaacacacaaggcgttcttccaggcatggtgtggcaggacagagacgtgtacctgcaggggcccatctgggcaaagattccacacacggacggacattttcacccctctcccctcatgggcggattcggacttaaacaccctcccccgcagattctcatcaagaacaccccggtacctgcgaatccttcgactaccttcagtgcggcaaagtttgcttccttcattacacagtactccacggggcaggtcagcgtggagatcgagtgggagctgcagaaggagaacagcaaacgctggaatcccgagattcagtacacttccaactacaacaaatctgttaatgtggactttactgtggacactaatggtgtgtattcagagcctcgccccattggcaccagatacctgactcgtaatctgtaa

SEQ ID NO: 4970 - protein, 735 aa, Adeno-associated virus
MAADGYLPDWLEDTLSEGIRQWWKLKPGPPPPKPAERHKDDSRGLVLPGYKYLGPFNGLDKGEPVNEADAAALEHDKAYDRQLDGGDNPYLKYNHADAEFQERLKEDTSFGGNLGRAVFQAKKRVLEPLGLVEEPVKTAPGKKRPVEHSLAEPDSSSGTGKAGQQPARRRLNFGQTGDADSVPDPQPLGQPPAAPSGLGTNTMATGSGAPMADNNEGADGVGNSSGNWHCDSTWMGDRVITTSTRTWALPTYNNHLYRQISSQSGASNDNHYFGYSTPWGYFDFNRFHCHFSPRDWQRLINNNWGSRPKRLNFKLFNIQVKEVTQNDGTTTIANNLTSTVQVFTDSEYQLPYVLGSAHQGCLPPFPADVFMVPQYGYLTLNNGSQAVGRSSFYCLEYFPSQMLRTGNNFTFSYTFEDVPFHSSYAHSQSLDRLMNPLVDQYLYYLSRTNTPSGTTTQSRLQFSQAGASDIRDQSRNWLPGPCYRQQRVSKTSADNNNSEYSWTGATKYHLNGRDSLVNPGPAMASHKDDEEKFFPQSGVLIFGKQDSGKTNVDIEKVMITDEEEIRTTNPVATEQYGSVSTNLQSGNTQAATSDVNTQGVLPGMVWQDRDVYLQGPIWAKIPHTDGHFHPSPLMGGFGLKHPPPQILIKNTPVPANPSTTFSAAKFASFITQYSTGQVSVEIEWELQKENSKRWNPEIQYTSNYNKSVNVDFTVDTNGVYSEPRPIGTRYLTRNL

SEQ ID NO: 4971 - protein, 738 aa, Adeno-associated virus
MAADGYLPDWLEDNLSEGIREWWDLKPGAPKPKANQQKQDDGRGLVLPGYKYLGPFNGLDKGEPVNAADAAALEHDKAYDQQLKAGDNPYLRYNHADAEFQERLQEDTSFGGNLGRAVFQAKKRVLEPLGLVEEAAKTAPGKKRPVEPSPQRSPDSSAGIGKKGQQPAKKRLNFGQTGDSESVPDPQPIGEPPAGPSGLGSGTMAAGGGAPMADNNEGADGVGSSSGNWHCDSTWLGDRVITTSTRTWALPTYNNHLYKQISNGTSGGSTNDNTYFGYSTPWGYFDFNRFHCHFSPRDWQRLINNNWGFRPKRLSFKLFNIQVKEVTQNEGTETIANNLTSTIQVFTDSEYQLPYVLGSAHQGCLPPFPADVFMIPQYGYLTLNNGSQAVGRSSFYCLEYFPSQMLRTGNNFEFSYTFEDVPFHSSCAHSQSSDRLMNPLIDQYLYYLSRTRSTGGTQGTQQLLFSQAGPANMSAQAKNWLPGPCYRQQRVSTTLSQNNNSNFAWTGATKYHLNGRDSLVNPGVAMATHKDDEERFFPSSGVLMFGKQGAGRDNVDYSSVMLTSEEEIKTTNPVATEQYGVVADNLQQTNTGPIVGNVNSQGALPGMVWQNRDVYLQGPIWAKIPHTDGNFHPSPLMGGFGLKHPPPQILIKNTPVPADPPTTFSQAKLASFITQYSTGQVSVEIEWELQKENSKRWNPEIQYTSNYYKSTNVDFAVNTEGTYSEPRPIGTRYLTRNL

SEQ ID NO: 4972 - DNA, 2217 bp, Adeno-associated virus
atggctgctgacggttatcttccagattggctcgaggacaacctctctgagggcattcgcgagtggtgggacctgaaacctggagcccccaagcccaaggccaaccagcagaagcaggacgacggccggggtctggtgcttcttggctacaagtacctcggacccttcaacggactcgacaagggggagcccgtcaatgcggcggacgcagcggccctcgagcacgacaaggcctacgaccagcagctcaaagcgggtgacaatccgtacctgcggtataaccacgccgacgccgagtttcaggagcgtctgcaagaagatacgtcttttgggggcaacctcgggcgagcagtcttccaggccaagaagcgggttctcgaacctctcggtctggttgaggaagctgctaagacggctcctggaaagaagagaccggtagaaccgtcacctcagcgttcccccgactcctccacgggcatcggcaagaaaggccagcagcccgctaaaaagagactgaactttggtcagactggcgactcagagtcagtccccgaccctcaaccaatcggagaaccaccagcaggcccctctggtctgggatctggtacaatggctgcaggcggtggcgctccaatggcagacaataacgaaggcgccgacggagtgggtagttcctcaggaaattggcattgcgattccacatggctgggcgacagagtcatcaccaccagcacccgaacctgggccctgcccacctacaacaaccacctctacaagcaaatatccaatgggacatcgggaggaagcaccaacgacaacacctacttcggctacagcaccccctgggggtattttgacttcaacagattccactgccacttctcaccacgtgactggcagcgactcatcaacaacaactggggattccggccaaaaagactcagcttcaagctcttcaacatccaggtcaaggaggtcacgcagaatgaaggcaccaagaccatcgccaataaccttaccagcacgattcaggtatttacggactcggaataccagctgccgtacgtcctcggctccgcgcaccagggctgcctgcctccgttcccggcggacgtcttcatgattccccagtacggctaccttacactgaacaatggaagtcaagccgtaggccgttcctccttctactgcctggaatattttccatctcaaatgctgcgaactggaaacaattttgaattcagctacaccttcgaggacgtgcctttccacagcggctacgcacacagccagagcttggaccgactgatgaatcctctcatcgaccagtacctgtactacttatccagaactcagtccacaggaggaactcaaggtacccagcaattgttattttctcaagctgggcctgcaaacatgtcggctcaggctaagaactggctacctggaccttgctaccggcagcagcgagtctctacgacactgtcgcaaaacaacaacagcaactttgcttggactggtgccaccaaatatcacctgaacggaagagactctttggtaaatcccggtgtcgccatggcaacccacaaggacgacgaggaacgcttcttcccgtcgagtggagtcctgatgtttggaaaacagggtgctggaagagacaatgtggactacagcagcgttatgctaaccagcgaagaagaaattaaaaccactaaccctgtagccacagaacaatacggtgtggtggctgacaacttgcagcaaaccaatacagggcctattgtgggaaatgtcaacagccaaggagccttacctggcatggtctggcagaaccgagacgtgtacctgcagggtcccatctgggccaagattcctcacacggacggcaacttccacccttcaccgctaatgggaggatttggactgaagcacccacctcctcagatcctgatcaagaacacgccggtacctgcggatcctccaacgacgttcagccaggcgaaattggcttccttcattacgcagtacagcaccggacaggtcagcgtggaaatcgagtgggagctgcagaaggagaacagcaaacgctggaacccagagattcagtacacttcaaactactacaaatctacaaatgtggactttgctgtcaatacagagggaacttattctgagcctcgccccattggtactcgttacctcacccgtaatctgtaa

SEQ ID NO: 4973 - protein, 738 aa, Adeno-associated virus
MAADGYLPDWLEDNLSEGIREWWDLKPGAPKPKANQQKQDDGRGLVLLGYKYLGPFNGLDKGEPVNAADAAALEHDKAYDQQLKAGDNPYLRYNHADAEFQERLQEDTSFGGNLGRAVFQAKKRVLEPLGLVEEAAKTAPGKKRPVEPSPQRSPDSSTGIGKKGQQPAKKRLNFGQTGDSESVPDPQPIGEPPAGPSGLGSGTMAAGGGAPMADNNEGADGVGSSSGNWHCDSTWLGDRVITTSTRTWALPTYNNHLYKQISNGTSGGSTNDNTYFGYSTPWGYFDFNRFHCHFSPRDWQRLINNNWGFRPKRLSFKLFNIQVKEVTQNEGTKTIANNLTSTIQVFTDSEYQLPYVLGSAHQGCLPPFPADVFMIPQYGYLTLNNGSQAVGRSSFYCLEYFPSQMLRTGNNFEFSYTFEDVPFHSGYAHSQSLDRLMNPLIDQYLYYLSRTQSTGGTQGTQQLLFSQAGPANMSAQAKNWLPGPCYRQQRVSTTLSQNNNSNFAWTGATKYHLNGRDSLVNPGVAMATHKDDEERFFPSSGVLMFGKQGAGRDNVDYSSVMLTSEEEIKTTNPVATEQYGVVADNLQQTNTGPIVGNVNSQGALPGMVWQNRDVYLQGPIWAKIPHTDGNFHPSPLMGGFGLKHPPPQILIKNTPVPADPPTTFSQAKLASFITQYSTGQVSVEIEWELQKENSKRWNPEIQYTSNYYKSTNVDFAVNTEGTYSEPRPIGTRYLTRNL

SEQ ID NO: 4974 - protein, 735 aa, Adeno-associated virus
MAADGYLPDWLEDTLSEGIRQWWKLKPGPPPPKPAERHKDDSRGLVLPGYKYLGPFNGLDKGEPVNEADAAALEHDKAYDRQLDSGDNPYLKYNHADAEFQERLKEDTSFGGNLGRAVFQAKKRVLEPLGLVEPPVKTAPGKKRPVEHSPAEPDSSSGTGKAGQQPARKRLNFGQTGDADSVPDPQPLGQPPAAPSGLGSTTMATGSGAPMADNNEGADGVGNSSGNWHCDSQWLGDRVITTSTRTWALPTYNNHLYKQISSQSGASNDNHYFGYSTPWGYFDFNRFHCHFSPRDWQRLINNNWGFRPKRLNFKLFNIQVKEVTQNDGTTTIANNLTSTVQVFTDSEYQLPYVLGSAHQGCLPPFPADVFMVPQYGYLTLNNGSQAVGRSSFYCLEYFPSQMLRTGNNFQFSYTFEDVPFHSSYAHSQSLDRLMNPLIDQYLYYLNKTQSNSGTLQQSRLLFSQAGPTSMSLQAKNWLPGPCYRQQRLSKQANDNNNSNFPWTAATKYHLNGRDSLVNPGPAMASHKDDEEKFFPMHGTLIFGKQGTNANDADLDNVMITDEEEIRTTNPVATEQYGYVSNNLQNSNTGPTTGTVNHQGALPGMVWQDRDVYLQGPIWAKIPHTDGHFHPSPLMGGFGLKHPPPQIMIKNTPVPANPPTNFSSAKFASFITQYSTGQVSVEIEWELQKENSKRWNPEIQYTSNYNKSVNVDFTVDTNGVYSEPRPIGTRYLTRNL

SEQ ID NO: 4975 - protein, 735 aa, Adeno-associated virus
MAADGYLPDWLEDTLSEGIRQWWKLKPGPPPPKPAERHKDDSRGLVLPGYKYLGPFNGLDKGEPVNEADAAALEHDKAYDRQLDSGDNPYLKYNHADAEFQERLKEDTSFGGNLGRAVFQAKKRVLEPLGLVEGPVKTAPGKKRPVEHSPAEPDSSSGTGKAGQQPARKRLNFGQTGDADSVPDPQPLGQPPAAPSGLGSTTMATGSGAPMADNNEGADGVGNSSGNWHCDSQWLGDRVITTSTRTWALPTYNNHLYKQISSQSGASNDNHYFGYSTPWGYFDFNRFHCHFSPRDWQRLINNNWGFRPKRLNFKLFNIQVKEVTQNDGTTTIANNLTSTVQVFTDSEYQLPYVLGSAHQGCLPPFPADVFMVPQYGYLTLNNGSQAVGRSSFYCLEYFPSQMLRTGNNFQFSYTFEDVPFHSSYAHSQSLDRLMNPLIDQYLYYLNKTQSNSGTLQQSRLLFSQAGPTSMSLQAKNWLPGPCYRQQRLSKQANDNNNSNFPWTAATKYHLNGRDSLVNPGPAMASHKDDEEKFFPMHGTLIFGKQGTNANDADLDNVMITDEEEIRTTNPVATEQYGYVSNNLQNSNTGPTTGTVNHQGALPGMVWQDRDVYLQGPIWAKIPHTDGHFHPSPLMGGFGLKHPPPQIMIKNTPVPANPPTNFSSAKFASFITQYSTGQVSVEIEWELQKENSKRWNPEIQYTSNYNKSVNVDFTVDTNGVYSEPRPIGTRYLTRNL

SEQ ID NO: 4976 - DNA, 2208 bp, Adeno-associated virus
atggctgccgatggttatcttccagattggctcgaggacactctctctgaaggaataagacagtggtggaagctcaaacctggcccaccaccaccaaagcccgcagagcggcataaggacgacagcaggggtcttgtgcttcctgggtacaagtacctcggacccttcaacggactcgacaagggggagccggtcaacgaggcagacgccgcggccctcgagcacgacaaggcctacgaccggcagctcgacagcggagacaacccgtacctcaagtacaaccacgccgacgcggagtttcaggagcgtcttaaagaagatacgtcttttgggggcaacctcggacgagcagtcttccaggcgaaaaagagggttcttgaacctctgggcctggttgagggacctgttaagacggctccgggaaaaaagaggccggtagagcactctcctgcggagccagactcctcctcgggaaccggaaaagcgggccagcagcctgcaagaaaaagattgaattttggtcagactggagacgcagactccgtacctgacccccagcctctcggacagccaccagcagccccctctggtttgggatctactacaatggctacaggcagtggcgcaccaatggcagacaataacgagggtgccgatggagtgggtaattcctcaggaaattggcattgcgattcccaatggctgggcgacagagtcatcaccaccagcacccgaacctgggccctgcccacctacaacaaccacctctacaagcaaatctcaagccaatcaggagcctcaaacgacaaccactactttggctacagcaccccttgggggtattttgacttcaacagattccactgccacttttcaccacgtgactggcaaagactcatcaacaacaactggggattccgacccaagagactcaacttcaagctctttaacattcaagtcaaagaggtcacgcagaatgacggtacgacgacgattgccaataaccttaccagcacggttcaggtgtttactgactcggagtaccagctcccgtacgtcctcgggtcggcgcatcaaggatgcctcccgccgtttccagcggacgtcttcatggtcccacagtatggatacctcaccctgaacaacgggagtcaggcggtaggacgctcttccttttactgcctggagtactttccttctcagatgcttcgtactggaaacaactttcagttcagctacacctttgaagacgttcctttccacagcagctacgctcacagccagagtctggatcggctgatgaatcctctgatcgaccagtacctgtattatctgaacaaaacacaatcaaatagtggaactcttcagcagtctcggctactgtttagtcaagctggacccaccagcatgtctcttcaagctaaaaactggctacctggaccttgctacagacagcagcgtctgtcaaagcaggcaaacgacaacaacaacagcaactttccctggactgcggctacaaagtatcacctaaatggccgggactcgttggttaatccaggaccagctatggccagtcacaaagacgatgaagaaaagtttttccccatgcatggaaccctgatatttggtaaacaaggaacaaatgctaacgacgcggatttggacaatgtcatgattacagatgaagaagaaatccgcaccaccaatcccgtggctacggagcagtacggatatgtgtcaaataatttgcaaaactcaaatactggtccaactactggaactgtcaatcaccaaggagcgttacctggcatggtgtggcaggatcgagacgtgtacctgcagggacccatttgggccaagattcctcacaccgatggacactttcatccttctccactgatgggaggttttgggctcaaacacccgcctcctcagatcatgatcaaaaacactcccgttccagccaatcctcccacaaacttcagttctgccaagtttgcttctttcatcacacagtattccacggggcaggtcagcgtggagatcgagtgggagctgcagaaagagaacagcaaacgctggaatcccgaaattcagtacacttccaactacaacaaatctgttaatgtggactttactgtggacactaatggcgtgtattcagagcctcgccccattggcaccagatacctgactcgtaatctgtaa

SEQ ID NO: 4977 - DNA, 2211 bp, Adeno-associated virus
atggctgccgatggttatcttccagattggctcgaggacaacctctctgagggcattcgcgagtggtgggacttgaaacctggagccccgaagcccaaagccaaccagcaaaagcaggacgacggccggggtctggtgcttcctggctacaagtacctcggacccttcaacggactcgacaagggggagcccgtcaacgcggcggacgcagcggccctcgagcacgacaaggcctacgaccagcagctcaaagcgggtgacaatccgtacctgcggtataaccacgccgacgccgagtttcaggagcgtctgcaagaagatacgtcttttgggggcaacctcgggcgagcagtcttccaggccaagaagcgggttctcgaacctctcggtctggttgaggaaggcgctaagacggctcctggaaagaaacgtccggtagagcagtcgccacaagagccagactcctcctcgggcatcggcaagacaggccagcagcccgctaaaaagagactcaattttggtcagactggcgactcagagtcagtccccgatccacaacctctcggagaacctccagcaacccccgctgctgtgggacctactacaatggcttcaggcggtggcgcaccaatggcagacaataacgaaggcgccgacggagtgggtaatgcctcaggaaattggcattgcgattccacatggctgggcgacagagtcatcaccaccagcacccgcacctgggccttgcccacctacaataaccacctctacaagcaaatctccagtgcttcaacgggggccagcaacgacaaccactacttcggctacagcaccccctgggggtattttgatttcaacagattccactgccacttttcaccacgtgactggcagcgactcatcaacaacaattggggattccggcccaagagactcaacttcaaactcttcaacatccaagtcaaggaggtcacgacgaatgatggcgtcacaaccatcgctaataaccttaccagcacggttcaagtcttctcggactcggagtaccagcttccgtacgtcctcggctctgcgcaccagggctgcctccctccgttcccggcggacgtgttcatgattccgcaatacggctacctgacgctcaacaatggcagccaagccgtgggacgttcatccttttactgcctggaatatttcccttctcagatgctgagaacgggcaacaactttaccttcagctacacctttgaggaagtgcctttccacagcagctacgcgcacagccagagcctggaccggctgatgaatcctctcatcgaccaatacctgtattacctgaacagaactcaaaatcagtccggaagtgcccaaaacaaggacttgctgtttagccgtgggtctccagctggcatgtctgttcagcccaaaaactggctacctggaccctgttatcggcagcagcgcgtttctaaaacaaaaacagacaacaacaacagcaattttacctggactggtgcttcaaaatataacctcaatgggcgtgaatccatcatcaaccctggcactgctatggcctcacacaaagacgacgaagacaagttctttcccatgagcggtgtcatgatttttggaaaagagagcgccggagcttcaaacactgcattggacaatgtcatgattacagacgaagaggaaattaaagccactaaccctgtggccaccgaaagatttgggaccgtggcagtcaatttccagagcagcagcacagaccctgcgaccggagatgtgcatgctatgggagcattacctggcatggtgtggcaagatagagacgtgtacctgcagggtcccatttgggccaaaattcctcacacagatggacactttcacccgtctcctcttatgggcggctttggactcaagaacccgcctcctcagatcctcatcaaaaacacgcctgttcctgcgaatcctccggcggagttttcagctacaaagtttgcttcattcatcacccaatactccacaggacaagtgagtgtggaaattgaatgggagctgcagaaagaaaacagcaagcgctggaatcccgaagtgcagtacacatccaattatgcaaaatctgccaacgttgattttactgtggacaacaatggactttatactgagcctcgccccattggcacccgttaccttacccgtcccctgtaa

SEQ ID NO: 4978 - DNA, 2208 bp, Adeno-associated virus
atggctgccgatggttatcttccagattggctcgaggacactctctctgaaggaacaagacagtggtggaagctcaaacctggcccaccaccaccaaagcccgcagagcggcataaggacgacagcaggggtcttgtgcttcctgggtacaagtacctcggacccttcaacggactcgacaagggggagccggtcaacgaggcagacgccgcggccctcgagcacgacaaggcctacgaccggcagctcgacagcggagacaacccgtacctcaagtacaaccacgccgacgcggagtttcaggagcgtcttaaagaagatacgtcttttgggggcaacctcggacgagcagtcttccaggcgaaaaagagggttcttgaacctctgggcctggttgaggaacctgttaagacggctccgggaaaaaagaggccggtagagcactctcctgcggagccagactcctcctcgggaaccggaaaagcgggccagcagcctgcaagaaaaagattgaattttggtcagactggagacgcagactccgtacctgacccccagcctctcggacagccaccagcagccccctctggtttgggatctactacaatggctacaggcagtggcgcaccaatggcagacaataacgagggtgccgatggagtgggtaattcctcaggaaattggcattgcgattcccaatggctgggcgacagagtcatcaccaccagcacccgaacctgggccctgcccacctacaacaaccacctctacaagcaaatctcaagccaatcaggagcctcaaacgacaaccactactttggctacagcaccccttgggggtattttgacttcaacagattccactgccacttttcaccacgtgactggcaaagactcatcaacaacaactggggattccgacccaagagactcaacttcaagctctttaacattcaagtcaaagaggtcacgcagaatgacggtacgacgacgattgccaataaccttaccagcacggttcaggtgtttactgactcggagtaccagctcccgtacgtcctcgggtcggcgcatcaaggatgcctcccgccgtttccagcggacgtcttcatggtcccacagtatggatacctcaccctgaacaacgggagtcaggcggtaggacgctcttccttttactgcctggagtactttccttctcagatgcttcgtactggaaacaactttcagttcagctacacctttgaagacgttcctttccacagcagctacgctcacagccagagtctggatcggctgatgaatcctctgatcgaccagtacctgtattatctgaacaaaacacaatcaaatagtggaactcttcagcagtctcggctactgtttagtcaagctggacccaccagcatgtctcttcaagctaaaaactggctacctggaccttgctacagacagcagcgtctgtcaaagcaggcaaacgacaacaacaacagcaactttccctggactgcggctacaaagtaccacctaaatggccgggactcgttggttaatccaggaccagctatggccagtcacaaagacgatgaagaaaagtttttccccatgcatggaaccctgatatttggtaaacaaggaacaaatgctaacgacgcggatttggacaatgtcatgattacagatgaagaagaaatccgcaccaccaatcccgtggctacggagcagtacggatatgtgtcaaataatttgcaaaactcaaatactggtccaactactggaactgtcaatcaccaaggagcgttacctggcatggtgtggcaggatcgagacgtgtacctgcagggacccatttgggccaagattcctcacaccgatggacactttcatccttctccactgatgggaggttttgggctcaaacacccgcctcctcagatcatgatcaaaaacactcccgttccagccaatcctcccacaaacttcagttctgccaagtttgcttctttcatcacacagtattccacggggcaggtcagcgtggagatcgagtgggagctgcagaaagagaacagcaaacgctggaatcccgaaattcagtacacttccaactacaacaaatctgttaatgtggactttactgtggacactaatggcgtgtattcagagcctcgccccattggcaccagatacctgactcgtaatctgtaa

SEQ ID NO: 4979 - DNA, 2217 bp, Adeno-associated virus
atggctgctgacggttatcttccagattggctcgaggacaacctctctgagggcattcgcgagtggtgggacctgaaacctggagcccccaagcccaaggccaaccagcagaagcaggacgacggccggggtctggtgcttcctggctacaagtacctcggacccttcaacggactcgacaagggggagcccgtcaacgcggcggacgcagcggccctcgagcacgacaaggcctacgaccagcagctcaaagcgggtgacaatccgtacctgcggtataaccacgccgacgccgagtttcaggagcgtctgcaagaagatacgtcttttgggggcaacctcgggcgagcagtcttccaggccaagaagcgggttctcgaacctctcggtctggttgaggaagctgctaagacggctcctggaaagaagagaccggtagaaccgtcacctcagcgttcccccgactcctccacgggcatcggcaagaaaggccagcagcccgctaaaaagagactgaactttggtcagactggcgactcagagtcagtccccgaccctcaaccaatcggagaaccacctgcaggcccctctggtctgggatctggtacaatggctgcaggcggtggcgctccaatggcagacaataacgaaggcgccgacggagtgggtagttcctcaggaaattggcattgcgattccacatggctgggcgacagagtcatcaccaccagcacccgaacctgggccctgcccacctacaacaaccacctctacaagcaaatatccaatgggacatcgggagggagcaccaacgacaacacctacttcggctacagcaccccctgggggtattttgacttcaacagattccactgccacttctcaccacgtgactggcagcgactcatcaacaacaactggggattccggccaaaaagactcagcttcaagctcttcaacatccaggtcaaggaggtcacgcagaatgaaggcaccaagaccatcgccaataaccttaccagcacgattcaggtatttacggactcggaataccagctgccgtacgtcctcggctccgcgcaccagggctgcctgcctccgttcccggcggacgtcttcatgattccccagtacggctaccttacactgaacaatggaagtcaagccgtaggccgttcctccttctactgcctggaatattttccatctcaaatgctgcgaactggaaacaattttgaattcagctacaccttcgaggacgtgcctttccacagcagctacgcacacagccagagcttggaccgactgatgaatcctctcatcgaccagtacctgtactacttatccagaactcagtccacaggaggaactcaaggtacccagcaattgttattttctcaagctgggcctgcaaacatgtcggctcaggctaagaactggctacctggaccttgctaccggcagcagcgagtctctacgacactgtcgcaaaacaacaacagcaactttgcttggactggtgccaccaaatatcacctgaacggaagagactctttggtaaatcccggtgtcgccatggcaacccacaaggacgacgaggaacgcttcttcccgtcgagtggagtcctgatgtttggaaaacagggtgctggaagagacaatgtggactacagcagcgttatgctaaccagcgaagaagaaattaaaaccactaaccctgtagccacagaacaatacggtgtggtggctgacaacttgcagcaaaccaatacagggcctattgtgggaaatgtcaacagccaaggagccttacctggcatggtctggcagaaccgagacgtgtacctgcagggtcccatctgggccaagattcctcacacggacggcaactgccacccttcaccgctaatgggaggatttggactgaagcacccacctcctcagatcctgatcaagaacacgccggtacctgcggatcctccaacaacgttcagccaggcgaaattggcttccttcattacgcagtacagcaccggacaggtcagcgtggaaatcgagtgggagctgcagaaggagaacagcaaacgctggaacccagagattcagtacacttcaaactactacaaatctacaaatgtggactttgctgtcaatacagagggaacttattctgagcctcgccccattggtactcgttacctcacccgtaatctgtaa

SEQ ID NO: 4980 - protein, 735 aa, Adeno-associated virus
MAADGYLPDWLEDTLSEGTRQWWKLKPGPPPPKPAERHKDDSRGLVLPGYKYLGPFNGLDKGEPVNEADAAALEHDKAYDRQLDSGDNPYLKYNHADAEFQERLKEDTSFGGNLGRAVFQAKKRVLEPLGLVEEPVKTAPGKKRPVEHSPAEPDSSSGTGKAGQQPARKRLNFGQTGDADSVPDPQPLGQPPAAPSGLGSTTMATGSGAPMADNNEGADGVGNSSGNWHCDSQWLGDRVITTSTRTWALPTYNNHLYKQISSQSGASNDNHYFGYSTPWGYFDFNRFHCHFSPRDWQRLINNNWGFRPKRLNFKLFNIQVKEVTQNDGTTTIANNLTSTVQVFTDSEYQLPYVLGSAHQGCLPPFPADVFMVPQYGYLTLNNGSQAVGRSSFYCLEYFPSQMLRTGNNFQFSYTFEDVPFHSSYAHSQSLDRLMNPLIDQYLYYLNKTQSNSGTLQQSRLLFSQAGPTSMSLQAKNWLPGPCYRQQRLSKQANDNNNSNFPWTAATKYHLNGRDSLVNPGPAMASHKDDEEKFFPMHGTLIFGKQGTNANDADLDNVMITDEEEIRTTNPVATEQYGYVSNNLQNSNTGPTTGTVNHQGALPGMVWQDRDVYLQGPIWAKIPHTDGHFHPSPLMGGFGLKHPPPQIMIKNTPVPANPPTNFSSAKFASFITQYSTGQVSVEIEWELQKENSKRWNPEIQYTSNYNKSVNVDFTVDTNGVYSEPRPIGTRYLTRNL

SEQ ID NO: 4981 - DNA, 2208 bp, Adeno-associated virus
atggctgccgatggttatcttccagattggctcgaggacactctctctgaaggaataagacagtggtggaagctcaaacctggcccaccaccaccaaagcccgcagagcggcatcaggacaacagcaggggtcttgtgcttcctgggtacaagtacctcggaccctccaacggactcgacaaaggagagccggtcaacgaggcagacgccgcggccctcgagcacgacaaggcctacgaccggcagctcgacagcggagacaacccgtacctcaagtacaaccacgccgacgcggagtttcaggagcgtcttaaagaagatacgtcttttgggggcaacctcggacgagcagtcttccaggcgaaaaagagggttcttgaacctctgggcctggttgaggaacctgttaagacggctccgggaaaaaagaggccggtagagcactctcctgtggagccagactcctcctcgggaaccggaaaagcgggccatcagcctgcgagaaagagattgaattttggtcagactggagacgcagactccgtacctgacccccagcctctcggacagccaccagcagcccccacaagtttgggatctactacaatggctacaggcagtggcgcaccaatggcagacaataacgagggtgccgatggagtgggtaattcctcaggaaattggcattgcgattcccaatggctgggcgacagagtcatcaccaccagcacccgaacctgggccctgcccacctacaacaaccacctctacaagcaaatctccagccaatcaggagcctcgaacgacaaccactactttggctgcagcaccccctgggggtattttgacttcaacagattccactgtcacttctccccacgtgattggcaaagactcatcaacaacaactggggattccgacccaagagactcaacttcaagctctttaacattcaagtcaaagaggtcacgcagaatgacggtacgacgacgattgccaataaccttaccagcacggttcaggtgtttactgactcggagtacccgctcccgtacgtcctcggctcggcgcatcaaggatgcctcccgccgtttccagcggacgtcttcatggtcccacagtatggatacctcaccctgaacaacgggagtcaggcggtaggacgctcttccttttactgcctggagtactttccttctcagatgctgcgtaccggaaacaactttaccttcagctacacctttgaggacgttcctttccacagcagctacgctcacagccagagtttggaccggctgatgaatcctctgatcgaccagtatctatattatctgaacaggacacaatcaaatagtggaactcttcagcagtctaggctactgtttagccaagctggacccaccagcatgtctcttcaagctaaaaactggctgcctggaccttgctacagacagcagcgtctttcaaagcaggcaaacgacaacaacaacagcaactttccctggactgcggctacaaagtatcatctaaatggccgggactcgttggttaatccaggaccagctatggccagccacaaagacgatgaagaaaagtttttccccatgcatggaaccctgatatttggtaaacaaggaacaaatgctaacgacgcggatttggagcatgttatgattacagatgaagaagaaatcaggaccaccaatcctgtggctacagagcagtacggaaacgtgtcaaataatttgcaaaactcaaatactggtccaactacagaaaatgtcaatcaccagggagcgttacctggtatggtgtggcaggatcgagacgtgtacctgcagggacccatttgggccaagattcctcacaccgacggacactttcacccttctccactgatgggaggttttggactcaaacacccgcctcctcaaatcatgatcaaaaacactcccgttccagccaatcctcccacaaacttcagttctgccaagtttgcttctttcatcacacagtattccacgggccaggtcagcgtggagattgagtgggagctgcagaaggagaacagcaaacgctggaaccccgagatccagtatacttccaactacaacaaatctgttaatgtggactttactgtggacactaatggtgtgtattcagagccttgccccattggcaccagatacctgactcgtaatctgtaa

SEQ ID NO: 4982 - protein, 735 aa, Adeno-associated virus
MAADGYLPDWLEDTLSEGIRQWWKLKPGPPPPKPAERHQDNSRGLVLPGYKYLGPSNGLDKGEPVNEADAAALEHDKAYDRQLDSGDNPYLKYNHADAEFQERLKEDTSFGGNLGRAVFQAKKRVLEPLGLVEEPVKTAPGKKRPVEHSPVEPDSSSGTGKAGHQPARKRLNFGQTGDADSVPDPQPLGQPPAAPTSLGSTTMATGSGAPMADNNEGADGVGNSSGNWHCDSQWLGDRVITTSTRTWALPTYNNHLYKQISSQSGASNDNHYFGCSTPWGYFDFNRFHCHFSPRDWQRLINNNWGFRPKRLNFKLFNIQVKEVTQNDGTTTIANNLTSTVQVFTDSEYPLPYVLGSAHQGCLPPFPADVFMVPQYGYLTLNNGSQAVGRSSFYCLEYFPSQMLRTGNNFTFSYTFEDVPFHSSYAHSQSLDRLMNPLIDQYLYYLNRTQSNSGTLQQSRLLFSQAGPTSMSLQAKNWLPGPCYRQQRLSKQANDNNNSNFPWTAATKYHLNGRDSLVNPGPAMASHKDDEEKFFPMHGTLIFGKQGTNANDADLEHVMITDEEEIRTTNPVATEQYGNVSNNLQNSNTGPTTENVNHQGALPGMVWQDRDVYLQGPIWAKIPHTDGHFHPSPLMGGFGLKHPPPQIMIKNTPVPANPPTNFSSAKFASFITQYSTGQVSVEIEWELQKENSKRWNPEIQYTSNYNKSVNVDFTVDTNGVYSEPCPIGTRYLTRNL

SEQ ID NO: 4983 - DNA, 2196 bp, Adeno-associated virus
atggctgctgacggttatcttccagattggctcgaggacaacctctctgagggcattcgcgagtggtgggcgctgaaacctggagccccgcaacccaaagccaaccagcaaaagcaggacgacggccggggtctggtgcttcctggctacaagtacctcggacccttcaacggactcgacaagggggagcccgtcaacgaggcggacgccgcggccctcgagcacgacaaggcctacgaccagcagctcaaagcgggtgacaatccgtacctgcggtataatcacgccgacgccgagtttcaagagcgtctgcaagaagatacgtcctttgggggcaacctcgggcgagcagtcttccaggccaaaaagagggtactcgagcctctgggtctggttgaggaaggcgctaagacggctcctggaaagaagcggccagtagaaccggactccagctcgggcatcggcaagtcaggccagcagcccgcgaaaaagagactgaattttgggcagactggcgactcagagtcagtgcctgacccccaacctctctcagaaccacccgcaggtccctctggtctgggatctggtacaatggctgctggcggtggcgctccaatggcagacaataacgaaggcgccgacggagtgggtaatgtctcaggaaattggcattgcgattccacatggctgggcgaccgagtcatcaccaccagcactcggacctgggccctccccacctacaacaaccacctctacaagcaaatctccaacgggacctcgggaggcagcagcaacgacaacacctactttggctacagcaccccctgggggtattttgactttaacagattccactgccacttttcaccacgtgactggcagcgactcatcaacaacaactgggggttccggcccaagaagctcaacttcaagctcttcaacatccaggtcaaggaggtcacccagaatgaaggcaccaagaccatcgccaataacctcaccagcacggtgcaggtctttacggactcggagtaccagctcccgtacgtgctcggctctgcccaccagggctgcctgcctccgttcccggcggacgtgttcatgattccgcagtacgggtacctgacgctgaacaacgggagccaggccgtggggcgatcctccttctactgcctggagtactttccctcgcagatgctgagaacgggcaacaactttaccttcagctacaccttcgaggacgtgcccttccacagcagctacgcgcacagccagagcctggaccggctgatgaacccgctgattgaccagtacctgtactacctgtctcggactcagaccaacgggaccaatgccacgcagactctgttgtttgctcaggccgggcctcagaacatgtcggctcaggccaagaactggctgcctggtccttgctatcggcagcagcgcgtctctacgacagtgtcgcaaaacaacaacagcaactttacctggaccggggcgaccaagtaccacctgaacggccgagactccctggtgagccccggtgtcgccatggcaacgcacaaggacgacgaggagcgcttcttcccgagcagcggggtcctgatgtttggcaagcagggcgctggaaaggacaatgtcgagtacaccaacgtgatgctcaccagcgaggaggagatcaagaccaccaaccctgtggccacggagcagtacggcgtggtggctgacaatctgcagcagaccaactcagctcccattgtgggggcagtcaacagccagggggccttacccggtatggtctggcagaaccgggacgtgtacctgcagggtcccatctgggccaagatcccgcatacggacggcaactttcacccgtctcctctcatgggcggctttggactgaaacacccgcctccccagatcctgatcaaaaacacgccggtacctgcggatcccccggtgaactttacggacgctaagctggcgagtttcatcacgcagtacagcaccgggcaggtcagcgtggagattgagtgggagctgcagaaggagaacagcaagcgctggaatcccgagattcagtacacttccaattattataaatcagctaatgtggactttgccgtcaatgcagatggtgtatatagtgaaccccgccccattggcactcgttacctcacccgtaatctgtaa

SEQ ID NO: 4984 - protein, 731 aa, Adeno-associated virus
MAADGYLPDWLEDNLSEGIREWWALKPGAPQPKANQQKQDDGRGLVLPGYKYLGPFNGLDKGEPVNEADAAALEHDKAYDQQLKAGDNPYLRYNHADAEFQERLQEDTSFGGNLGRAVFQAKKRVLEPLGLVEEGAKTAPGKKRPVEPDSSSGIGKSGQQPAKKRLNFGQTGDSESVPDPQPLSEPPAGPSGLGSGTMAAGGGAPMADNNEGADGVGNVSGNWHCDSTWLGDRVITTSTRTWALPTYNNHLYKQISNGTSGGSSNDNTYFGYSTPWGYFDFNRFHCHFSPRDWQRLINNNWGFRPKKLNFKLFNIQVKEVTQNEGTKTIANNLTSTVQVFTDSEYQLPYVLGSAHQGCLPPFPADVFMIPQYGYLTLNNGSQAVGRSSFYCLEYFPSQMLRTGNNFTFSYTFEDVPFHSSYAHSQSLDRLMNPLIDQYLYYLSRTQTNGTNATQTLLFAQAGPQNMSAQAKNWLPGPCYRQQRVSTTVSQNNNSNFTWTGATKYHLNGRDSLVSPGVAMATHKDDEERFFPSSGVLMFGKQGAGKDNVEYTNVMLTSEEEIKTTNPVATEQYGVVADNLQQTNSAPIVGAVNSQGALPGMVWQNRDVYLQGPIWAKIPHTDGNFHPSPLMGGFGLKHPPPQILIKNTPVPADPPVNFTDAKLASFITQYSTGQVSVEIEWELQKENSKRWNPEIQYTSNYYKSANVDFAVNADGVYSEPRPIGTRYLTRNL

SEQ ID NO: 4985 - DNA, 2196 bp, Adeno-associated virus
atggctgctgacggttatcttccagattggctcgaggacaacctctctgagggcattcgcgagtggtgggcgctgaaacctggagccccgcaacccaaagccaaccagcaaaagcaggacgacggccggggtctggtgcttcctggctacaagtacctcggacccttcaacggactcgacaagggggagcccgtcaacgaggcggacgccgcggccctcgagcacgacaaggcctacgaccagcagctcaaagcgggtgacaatccgtacctgcggtataatcacgccgacgccgagtttcaagagcgtctgcaagaagatacgtcctttgggggcaacctcgggcgagcagtcttccaggccaaaaagagggtactcgagcctctgggtctggttgaggaaggcgctaagacggctcctggaaagaagcggccagtagaaccggactccagctcgggcatcggcaagtcaggccggcagcccgcgaaaaagagactgaattttgggcagactggcgactcagagtcagtgcctgacccccaacctctctcagaaccacccgcaggtccctctggtctgggatctggtacaatggctgcaggcggtggcgctccaatggcagacaataacgaaggcgccgacggagtgggtaatgcctcaggaaattggcattgcgattccacatggctgggcgaccgagtcatcaccaccagcactcggacctgggccctccccacctacaacaaccacctctacaagcaaatctccaacgggacctcgggaggcagcagcaacgacaacacctactttggctacagcaccccctgggggtattttgactttaacagattccactgccacttttcaccacgtgactggcagcgactcatcaacaacaactggggattccggcccaagaggctcaacttcaagctcttcaacatccaggtcaaggaggtcacccagaatgaaggcaccaagaccatcgccaataacctcaccagcacggtgcaggtctttacggactcgaagtaccagctcccgtacgtgctcggctctgcccaccagggctgcctgcctccgttcccggcggacgtgttcatgattccgcagtacgggtacctgacgctgaacaacgggagccaggccgtggggcgatcctccttctactgcctggagtactttccctcgcagatgctgagaacgggcaacaactttaccttcagctacaccttcgaggacgtgcccttccacagcagctacgcgcacagccagagcctggaccggctgatgaacccgctgattgaccagtacctgtactacctgtctcggactcagaccaacgggaccaatgccacgcagactctgttgtttgctcaggccgggcctcagaacatgtcggctcaggccaagaactggctgcctggtccttgctatcggcagcagcgcgtctctacgacagtgtcgcaaaacaacaacagcaactttacctggaccggggcgaccaagtaccacctgaacggccgagactccctggtgaaccccggtgtcgccatggcaacgcacaaggacgacgaggagcgcttcttcccgagcagcggggtcctgatgtttggcaagcagggcgctggaaaggacaatgtcgagtacaccaacgtgatgctcaccagcgaggaggagatcaagaccaccaaccctgtggccacggagcagtacggtgtggtggctgacaatctgcagcagaccaactcggctcccattgtgggggcagtcaacagccagggggccttacccggtatggtctggcagaaccgggacgtgtacctgcagggtcccatctgggccaagatcccgcatacggacggcaactttcacccgtctcctctcatgggcggctttggactgaaacacccgcctccccagatcctgatcaaaaacacgccggtacctgcggatcccccggtgaactttacggacgctaagctggcgagtttcatcacgcagtacagcaccgggcaggtcagcgtggagattgagtgggagctgcagaaggagaacagcaagcgctggaatcccgagattcagtacacttccaattattataaatcagctaatgtggactttgccgtcaatgcagatggtgtatatagtgaaccccgccccattggcactcgttacctcacccgtaatctgtaa

SEQ ID NO: 4986 - protein, 731 aa, Adeno-associated virus
MAADGYLPDWLEDNLSEGIREWWALKPGAPQPKANQQKQDDGRGLVLPGYKYLGPFNGLDKGEPVNEADAAALEHDKAYDQQLKAGDNPYLRYNHADAEFQERLQEDTSFGGNLGRAVFQAKKRVLEPLGLVEEGAKTAPGKKRPVEPDSSSGIGKSGRQPAKKRLNFGQTGDSESVPDPQPLSEPPAGPSGLGSGTMAAGGGAPMADNNEGADGVGNASGNWHCDSTWLGDRVITTSTRTWALPTYNNHLYKQISNGTSGGSSNDNTYFGYSTPWGYFDFNRFHCHFSPRDWQRLINNNWGFRPKRLNFKLFNIQVKEVTQNEGTKTIANNLTSTVQVFTDSKYQLPYVLGSAHQGCLPPFPADVFMIPQYGYLTLNNGSQAVGRSSFYCLEYFPSQMLRTGNNFTFSYTFEDVPFHSSYAHSQSLDRLMNPLIDQYLYYLSRTQTNGTNATQTLLFAQAGPQNMSAQAKNWLPGPCYRQQRVSTTVSQNNNSNFTWTGATKYHLNGRDSLVNPGVAMATHKDDEERFFPSSGVLMFGKQGAGKDNVEYTNVMLTSEEEIKTTNPVATEQYGVVADNLQQTNSAPIVGAVNSQGALPGMVWQNRDVYLQGPIWAKIPHTDGNFHPSPLMGGFGLKHPPPQILIKNTPVPADPPVNFTDAKLASFITQYSTGQVSVEIEWELQKENSKRWNPEIQYTSNYYKSANVDFAVNADGVYSEPRPIGTRYLTRNL

SEQ ID NO: 4987 - DNA, 2196 bp, Adeno-associated virus
atggctgctgacggttatcttccagattggctcgaggacaacctctctgagggcattcgcgagtggtgggcgctgaaacctggagccccgcaacccaaagccaaccagcaaaagcaggacgacggccggggtctggtgcttcctggctacaagtacctcggacccttcaacggactcgacaagggggagcccgtcaacgaggcggacgccgcggccctcgagcacgacaaggcctacgaccagcagctcaaagcgggtgacaatccgtacctgcggtataatcacgccgacgccgagtttcaagagcgtctgcaagaagatacgtcctttgggggcaacctcgggcgagcagtcttccaggccaaaaagagggtactcgagcctctgggtctggttgaggaaggcgctaagacggctcctggaaagaagcggccagtagaaccggactccagctcgggcatcggcaagtcaggccagcagcccgcgaaaaagagactgaattttgggccgactggcgactcagagtcagtgcctgacccccaacctctctcagaaccacctgcaggtccctctggtctgggatctggtacaatggctgcaggcggtggcgctccaatggcagacaataacgaaggcgccgacggagtgggtaatgtctcaggaaattggcattgcgattccacatggctgggcgaccgagtcatcaccaccagcactcggacctgggccctccccacctacaacaaccacctctacaagcaaatctccaacgggacctcgggaggcagcagcaacgacaacacctactttggctacagcaccccctgggggtattttgactttaacagattccactgccacttttcaccacgcgactggcagcgactcatcaacaacaactggggattccggcccaagaagctcaacttcaagctcttcaacatccaggtcaaggaggtcacccagaatgaaggcaccaagaccaccgccaataacctcaccagcacggtgcaggtctttacggactcggagtaccagctcccgtacgtgctcggctctgcccaccagggctgcctgcctccgttcccggcggacgtgttcatgattccgcagtacgggtacctgacgctgaacaacgggagccaggccgtggggcgatcctccttctactgcctggagtactttccctcgcagatgctgagaacgggcaacaactttaccttcagctacaccttcgaggacgtgcccttccacagcagctacgcgcacagccagagcctggaccggctgatgaacccgctgattgaccagtacctgtactacctgtctcggactcagaccaacgggaccaatgccacgcagactctgttgtttgctcaggccgggcctcagaacatgtcggctcaggccaagaactggctgcctggtccttgctatcggcagcagcgcgtctctacggcagtgtcgcaaaacaacaacagcaactttacctggaccggggcgaccaagtaccacctgaacggccgagactccctggtgaaccccggtgtcgccatggcaacgcacaaggacgacgaggagcgcttcttcccgagcagcggggtcctgatgtttggcaagcagggcgctggaaaggacaatgtcgagtacaccaacgtgatgctcaccagcgaggaggagatcaagaccaccaaccctgtggccacggagcagtacggtgtggtggctgacaatctgcagcagaccaactcggctcccattgtgggggcagtcaacagccagggggccttacccggtatggtctggcagaaccgggacgtgtacctgcagggtcccatctgggccaagatcccgcatacggacggcaactttcacccgtctcctctcatgggcggctttggactgaaacacccgcctccccagatcctgatcaaaaacacgccggtacctgcggatcccccggtgaactttacggacgctaagctggcgagtttcatcacgcagtacagcaccgggcaggtcagcgtggagattgagtgggagctgcagaaggagaacagcaagcgctggaatcccgagattcagtacacttccaattattataaatcagctaatgtggactttgccgtcaatgcagatggtgtatatagcgaaccccgccccattggcactcgttacctcacccgtaatctgtaa

SEQ ID NO: 4988 - protein, 731 aa, Adeno-associated virus
MAADGYLPDWLEDNLSEGIREWWALKPGAPQPKANQQKQDDGRGLVLPGYKYLGPFNGLDKGEPVNEADAAALEHDKAYDQQLKAGDNPYLRYNHADAEFQERLQEDTSFGGNLGRAVFQAKKRVLEPLGLVEEGAKTAPGKKRPVEPDSSSGIGKSGQQPAKKRLNFGPTGDSESVPDPQPLSEPPAGPSGLGSGTMAAGGGAPMADNNEGADGVGNVSGNWHCDSTWLGDRVITTSTRTWALPTYNNHLYKQISNGTSGGSSNDNTYFGYSTPWGYFDFNRFHCHFSPRDWQRLINNNWGFRPKKLNFKLFNIQVKEVTQNEGTKTTANNLTSTVQVFTDSEYQLPYVLGSAHQGCLPPFPADVFMIPQYGYLTLNNGSQAVGRSSFYCLEYFPSQMLRTGNNFTFSYTFEDVPFHSSYAHSQSLDRLMNPLIDQYLYYLSRTQTNGTNATQTLLFAQAGPQNMSAQAKNWLPGPCYRQQRVSTAVSQNNNSNFTWTGATKYHLNGRDSLVNPGVAMATHKDDEERFFPSSGVLMFGKQGAGKDNVEYTNVMLTSEEEIKTTNPVATEQYGVVADNLQQTNSAPIVGAVNSQGALPGMVWQNRDVYLQGPIWAKIPHTDGNFHPSPLMGGFGLKHPPPQILIKNTPVPADPPVNFTDAKLASFITQYSTGQVSVEIEWELQKENSKRWNPEIQYTSNYYKSANVDFAVNADGVYSEPRPIGTRYLTRNL

SEQ ID NO: 4989 - DNA, 4404 bp, Adeno-associated virus
atggctgccgatggttatcttccagattggctcgagggcaacctctctgagggcattcgcgagtggtgggacttgaaacctggagccccgaaacccaaagccaaccagcaaaagcaggacgacggccggggtctggtgcttcctggctacaggtacctcggacccttcaacggactcgacaagggagagccggtcaacgaggcagacgccgcggccctcgagcacgacaaggcctacgacaagcagctcgagcagggggacaacccgtacctcaagtacaaccacgccgacgccgagtttcaggagcgtcttcaagaagatacgtcttttgggggcaacctcgggcgagcagtcttccaggccaagaagcgggttctcgaacctctcggtctggttgaggaaggcgctaagacggctcctggaaagaagagacccatagaatcccccgactcctccacgggcatcggcaagaacggccagccgcccgctaaaaagaagctcaactttgggcagactggcgactcagagtcagtgcccgacccccaacctctcggagaacctcccgccgcgccctcaggtctgggatctggtacaatggctgcaggcggtggcgcaccaatggcagacaataacgaaggcgccgacggagtgggtaatgcctccggaaattggcattgcgattccacatggctgggcgacagagtcatcaccaccagcacccgcacctgggccctgcccacctacaacaaccacctctacaagcagatatcaagtcagagcggggctaccaacgacaaccacttcttcggctacagcaccccctggggctattttgacttcaacagattccactgccacttctcaccacgtgactggcagcgactcatcaacaacaactggggattccggcccagaaagctgcggttcaagttgttcaacatccaggtcaaggaggtcacgacgaacgacggcgttacgaccatcgctaataaccttaccagcacgattcaggtcttctcggactcggagtaccaactgccgtacgtcctcggctctgcgcaccagggctgcctccctccgttccctgcggacgtgttcatgattcctcagtacggatatctgactctaaacaacggcagtcagtctgtgggacgttcctccttctactgcctggagtactttccttctcagatgctgagaacgggcgataactttgaattcagctacacctttgaggaagtgcctttccacagcagctatgcgcacagccagagcctggaccggctgatgaatcccctcatcgaccagtacctgtactacctggcccggacccagagcactacggggtccacaagggagctgcagttccatcaggctgggcccaacaccatggccgagcaatcaaagaactggctgcccggaccctgttatcggcagcagagactgtcaaaaaacatagacagcaacaacaacagtaactttgcctggaccggggccactaaataccatctgaatggtagaaattcattaaccaacccgggcgtagccatggccaccaacaaggacgacgaggaccagttctttcccatcaacggagtgctggtttttggcaaaacgggggctgccaacaagacaacgctggaaaacgtgctaatgaccagcgaggaggagatcaaaaccaccaatcccgtggctacagaagaatacggtgtggtctccagcaacctgcaatcgtctacggccggaccccagacacagactgtcaacagccagggggctctgcccggcatggtctggcagaaccgggacgtgtacctgcagggtcccatctgggccaaaattcctcacacggacggcaactttcacccgtctcccctgatgggcggatttggactcaaacacccgcctcctcaaattctcatcaaaaacaccccggtacctgctaatcctccagaggtgtttactcctgccaagtttgcctcatttatcacgcagtacagcaccggccaggtcagcgtggagatcgagtgggaactgcagaaagaaaacagcaaacgctggaatccagagattcagtacacctcaaattatgccaagtctaataatgtggaatttgctgtcaacaacgaaggggtttatactgagcctcgccccattggcacccgttacctcacccgtaacctgtaaatggctgccgatggttatcttccagattggctcgaggacaacctctctgagggcattcgcgagtggtgggacttgaaacctggagccccgaaacccaaagccaaccagcaaaagcaggacgacggccggggtctggtgcttcctggctacaagtacctcggacccttcaacggactcgacaagggggagcccgtcaacgcggcggacgcagcggccctcgagcacgacaaggcctacgaccagcagctcaaagcgggtgacaatccgtacctgcggtataaccacgccgacgccgagtttcaggagcgtctgcaagaagatacgtcttttgggggcaacctcgggcgagcagtcttccaggccaagaagcgggttctcgaacctctcggtctggttgaggaaggcgctaagacggctcctggaaagaagagaccggtagagccatcaccccagcgttctccagactcctctacgggcatcggcaagaaaggccagcagcccgcgaaaaagagactcaactttgggcagactggcgactcagagtcagtgcccgaccctcaaccaatcggagaaccccccgcaggcccctctggtctgggatctggtacaatggctgcaggcggtggcgctccaatggcagacaataacgaaggcgccgacggagtgggtagttcctcaggaaattggcattgcgattccacatggctgggcgacagagtcatcaccaccagcacccgaacctgggccctccccacctacaacaaccacctctacaagcaaatctccaacgggacttcgggaggaagcaccaacgacaacacctacttcggctacagcaccccctgggggtattttgactttaacagattccactgccacttctcaccacgtgactggcagcgactcatcaacaacaactggggattccggcccaagagactcaacttcaagctcttcaacatccaggtcaaggaggtcacgcagaatgaaggcaccaagaccatcgccaataaccttaccagcacgattcaggtctttacggactcggaataccagctcccgtacgtcctcggctctgcgcaccagggctgcctgcctccgttcccggcggacgtcttcatgattcctcagtacgggtacctgactctgaacaatggcagtcaggccgtgggccgttcctccttctactgcctggagtactttccttctcaaatgctgagaacgggcaacaactttgagttcagctaccagtttgaggacgtgccttttcacagcagctacgcgcacagccaaagcctggaccggctgatgaaccccctcatcgaccagtacctgtactacctgtctcggactcagtccacgggaggtaccgcaggaactcagcagttgctattttctcaggccgggcctaataacatgtcggctcaggccaaaaactggctacccgggccctgctaccggcagcaacgcgtctccacgacactgtcgcaaaataacaacagcaactttgcctggaccggtgccaccaagtatcatctgaatggcagagactctctggtaaatcccggtgtcgctatggcaacccacaaggacgacgaagagcgattttttccgtccagcggagtcttaatgtttgggaaacagggagctggaaaagacaacgtggactatagcagcgttatgctaaccagtgaggaagaaattaaaaccaccaacccagtggccacagaacagtacggcgtggtggccgataacctgcaacagcaaaacgccgctcctattgtaggggccgtcaacagtcaaggagccttacctggcatggtctggcagaaccgggacgtgtacctgcagggtcctatctgggccaagattcctcacacggacggaaactttcatccctcgccgctgatgggaggctttggactgaaacacccgcctcctcagatcctgattaagaatacacctgttcccgcggatcctccaactaccttcagtcaagctaagctggcgtcgttcatcacgcagtacagcaccggacaggtcagcgtggaaattgaatgggagctgcagaaagaaaacagcaaacgctggaacccagagattcaatacacttccaactactacaaatctacaaatgtggactttgctgttaacacagatggcacttattctgagcctcgccccatcggcacccgttacctcacccgtaatctgtaa

SEQ ID NO: 4990 - protein, 738 aa, Adeno-associated virus; identical to SEQ ID NO: 4793

SEQ ID NO: 4991 - protein, 738 aa, Adeno-associated virus; identical to SEQ ID NO: 4793

SEQ ID NO: 4992 - DNA, 2501 bp, Adeno-associated virus
gaattcgcccttggctgcgtcaactggaccaatgagaactttcccttcaacgattgcgtcgacaagatggtgatctggtgggaggagggcaagatgacggccaaggtcgtggagtccgccaaggccattcatcatctgctggggcgggctcccgagattgcttgctcggcctgcgatctggtcaacgtggacctggatgactgtgtttctgagcaataaatgacttaaaccaggtatggctgccgatggttatcttccagattggctcgaggacaacctctctgagggcattcgcgagtggtgggacttgagacctggagccccgaaacccaaagccaaccagcaaaagcaggacgacggccggggtctggtgcttcctggctacaagtacctcggacccttcaacggactcgacaagggagagccggtcaacgaggcagacgccgcggccctcgagcacgacaaggcctacgacaagcagctcgagcagggggacaacccgtacctcaagtacaaccacgccgacgccgagtttcaggagcgtcttcaagaagatacgtcttttgggggcaacctcgggcgagcagtcttccaggccaagaagcgggttctcgaacctctcggtctggttgaggaaggcgctaagacggctcctggaaagaagagacccatagaatcccccgactcctccacgggcatcggcaagaaaggccagcagcccgctaaaaagagactcaactttgggcagactggcgactcagagtcagtgcccgaccctcaaccaatcggagaaccccccgcaggcccctctggtctgggatctggcacaatggctgcaggcggtggcgctccaatggcagacaataacgaaggcgccgacggagtgggtagttcctcaggaaattggcattgcgattccacatggctgggcgacagagtcatcaccaccagcacccgaacctgggccctccccacctacaacaaccacctctacaagcaaatctccaacgggacatcgggaggaagcaccaacgacaacacctacttcggctacagcaccccctgggggtattttgactttaacagattccactgccacttctcaccacgtgactggcagcgactcatcaacaacaactggggattccggcccaagagactcaacttcaagctcttcaacatccaggtcaaggaggtcacgcagaatgaaggcaccaagaccatcgccaataaccttaccagcacgattcaggtctttacggactcggaataccagctcccgtacgtcctcggctctgcgcaccagggctgcctgcctccgttcccggcggacgtcttcatgattcctcagtacgggtacctgactctgaacaacggcagtcaggccgtgggccgttcctccttctactgcctggagtactttccttctcaaatgctgagaacgggcaacaactttgagttcagctaccagtttgaggacgtgccttttcacagcagctatgcgcacagccaaagcctggaccggctgatgaaccccctcatcgaccagtacctgtactacctgtctcggactcagtccacgggaggtaccgcaggaactcagcagttgctattttctcaggccgggcctaataacatgtcggctcaggccaaaaactggctacccgggccctgctaccggcagcaacgcgtctccacgacagtgtcgcaaaataacaacagcaactttgcttggaccggtgccaccaagtatcatctgaatggcagagactctctggtaaatcccggtgtcgctatggcaacgcacaagggcgacgaagagcgattttttccatccagcggagtcttgatgtttgggaaacagggagctggaaaagacaacgtagactatagcagcgttatgctaaccagtgaggaagaaatcaaaaccaccaacccagtggccacagaacagtacggcgtggtggccgataacctgcaacagcaaaacgccgctcctattgtaggggccgtcaacagtcaaggagccttacctggcatggtctggcagaaccgggacgtgtacctgcagggtcctatctgggccaagattcctcacacggacggcaactttcatccttcgccgctgatgggaggctttggactgaaacacccgcctcctcagatcctgattaagaatacacctgttcccgcggatcctccaactaccttcagtcaagccaagctggcgtcgttcatcacgcagtacagcaccggacaggtcagcgtggaaattgaatgggagctgcagaaagagaacagcaagcgctggaacccagagattcagtatacttccaactactacaaatctacaaatgtggactttgctgtcaatactgagggtacttattcagagcctcgccccattggcacccgttacctcacccgtaacctgtaattgcctgttaatcaataaaccggttgattcgtttcagttgaactttggtctcaagggcgaattc

SEQ ID NO: 4993 - DNA, 2187 bp, Adeno-associated virus
atggctgccgatggttatcttccagattggctcgaggacaacctctctgagggcattcgcgagtggtgggacttgaaacctggagccccgaaacccaaagccaaccagcaaaagcaggacgacggccggggtctggtgcttcctggctacaagtacctcggacccttcaacggactcgacaagggagagccggtcaacgaggcagacgccgcggccctcgagcacgacaaggcctacgacaagcagctcgagcagggggacaacccgtacctcaagtacaaccacgccgacgccgagtttcaggagcgtcttcaagaagatacgtcttttgggggcaacctcgggcgagcagtcttccaggccaagaagcgggttctcgaacctctcggtctggttgaggaaggcgctaagacggctcctggaaagaagagacccatagaatcccccgactcctccacgggcatcggcaagaaaggccagcagcccgctaaaaagaagctcaactttgggcagactggcgactcagagtcagtgcccgacccccaacctctcggagaacctcccgccgcgccctcaggtctgggatctggtacaatggctgcaggcggtggcgcaccaatggcagacaataacgaaggcgccgacggagtgggtaatgcctccggaaattggcattgcgattccacatggctgggcgacagagtcatcaccaccagcacccgcacctgggccctgcccacctacaacaaccacctctacaagcagatatcaagtcagagcggggctaccaacgacaaccacttcttcggctacagcaccccctggggctattttgacttcaacagattccactgccacttctcaccacgtgactggcagcgactcatcaacaacaactggggattccggcccagaaagctgcggttcaagttgttcaacatccaggtcaaggaggtcacgacgaacgacggcgttacgaccatcgctaataaccttaccagcacgattcaggtcttctcggactcggagtaccaactgccgtacgtcctcggctctgcgcaccagggctgcctccctccgttccctgcggacgtgttcatgattcctcagtacggatatctgactctaaacaacggcagtcagtctgtgggacgttcctccttctactgcctggagtactttccttctcagatgctgagaacgggcaataactttgaattcagctacacctttgaggaagtgcctttccacagcagctatgcgcacagccagagcctggaccggctgatgaatcccctcatcgaccagtacctgtactacctggcccggacccagagcactacggggtccacaagggagctgcagttccatcaggctgggcccaacaccatggccgagcaatcaaagaactggctgcccggaccctgttatcggcagcagagactgtcaaaaaacatagacagcaacaacaacagtaactttgcctggaccggggccactaaataccatctgaatggtagaaattcattaaccaacccgggcgtagccatggccaccaacaaggacgacgaggaccagttctttcccatcaacggagtgctggtttttggcgaaacgggggctgccaacaagacaacgctggaaaacgtgctaatgaccagcgaggaggagatcaaaaccaccaatcccgtggctacagaagaatacggtgtggtctccagcaacctgcaatcgtctacggccggaccccagacacagactgtcaacagccagggggctctgcccggcatggtctggcagaaccgggacgtgtacctgcagggtcccatctgggccaaaattcctcacacggacggcaactttcacccgtctcccctgatgggcggatttggactcaaacacccgcctcctcaaattctcatcaaaaacaccccggtacctgctaatcctccagaggtgtttactcctgccaagtttgcctcatttatcacgcagtacagcaccggccaggtcagcgtggagatcgagtgggaactgcagaaagaaaacagcaaacgctggaatccagagattcagtacacctcaaattatgccaagtctaataatgtggaatttgctgtcaacaacgaaggggtttatactgagcctcgccccattggcacccgttacctcacccgtaacctgtaa

SEQ ID NO: 4994 - protein, 728 aa, Adeno-associated virus; identical to SEQ ID NO: 4765

SEQ ID NO: 4995 - protein, 728 aa, Adeno-associated virus; identical to SEQ ID NO: 4829

SEQ ID NO: 4996 - protein, 728 aa, Adeno-associated virus; identical to SEQ ID NO: 4829

SEQ ID NO: 4997 - DNA, 3113 bp, Adeno-associated virus
gaattcgccctttctacggctgcgtcaactggaccaatgagaactttcccttcaacgattgcgtcgacaagatggtgatctggtgggaggagggcaagatgacggccaaggtcgtggagtccgccaaggccattctcggcggcagcaaggtgcgcgtggaccaaaagtgcaagtcgtccgcccagatcgatcccacccccgtgatcgtcacttccaacaccaacatgtgcgccgtgattgacgggaacagcaccaccttcgagcaccagcagccgttacaagaccggatgttcaaatttgaactcacccgccgtctggagcatgactttggcaaggtgacaaagcaggaagtcaaagagttcttccgctgggcgcaggatcacgtgaccgaggtggcgcatgagttctacgtcagaaagggtggagccaacaagagacccgcccccgatgacgcggataaaagcgagcccaagcgggcctgcccctcagtcgcggatccatcgacgtcagacgcggaaggagctccggtggactttgccgacaggtaccaaaacaaatgttctcgtcacgcgggcatgcttcagatgctgcttccctgcaagacatgcgagagaatgaatcagaatttcagcatttgcttcacgcacgggaccagagactgttcagaatgtttccccggcgtgtcagaatctcaaccggtcgtcagaaagaggacgtatcggaaactctgtgccattcatcatctgctggggcgggctcccgagattgcttgctcggcctgcgatctggtcaacgtggacctggatgactgtgtttctgagcaataaatgacttaaaccaggtatggctgccgatggtcatcttccagattggctcgaggacaacctctctgagggcattcgcgagtggtgggacttgaaacctggagccccgaaacccaaagccaaccagcaaaagcaggacgacggccggggtctggtgcttcctggctacaagtacctcggacccttcaacggactcgacaagggggagcccgtcaacgcggcggacgcagcggccctcgagcacgacaaggcctacgaccagcagctcaaagcgggtgacaatccgtacctgcggtataaccacgccgacgccgagtttcaggagcgtcttcaagaagatacgtcttttgggggcaacctcgggcgagcagtcttccaggccaagaagcgggttctcgaacctctcggtctggttgaggaaggcgctaagacggctcctggaaagaagagacccatagaatcccccgactcctccacgggcatcggcaagaaaggccagcagcccgctaaaaagaagctcaactttgggcagactggcgactcagagtcagtgcccgaccctcaaccaatcggagaaccccccgcaggcccctctggtctgggatctggtacaatggctgcaggcggtggcgctccaatggcagacaataacgaaggcgccgacggagtgggtagttcctcaggaaattggcattgcgattccacatagctgggcgacagagtcatcaccaccagcacccgaacctgggccctccccacctacaacaaccacctctacaagcaaatctccaacgggacatcgggaggaagcaccaacgacaacacctacttcggctacagcaccccctgggggtattttgactttaacagattccactgccacttctcaccacgtgactggcagcgactcatcaacaacagctggggattccggcccaagagactcaacttcaagctcttcaacatccaggtcaaggaggtcacgcagaatgaaggcaccaagaccatcgccaataaccttaccagcacgattcaggtctttacggactcggaataccagctcccgtacgtcctcggctctgcgcaccagggctgcctgcctccgttcccggcggacgtcttcatgattcctcagtacgggtacctgactctgaacaacggcagtcaggccgtgggccgttcctccttctactgcctggagtactttccttctcaaatgctgagaacgggcaacaactttgagttcagctaccagtttgaggacgtgccttttcacagcagctacgcgcacagccaaagcctggaccggctgatgaaccccctcatcgaccagtacctgtactacctgtctcggactcagtccacgggaggtaccgcaggaactcagcagttgctattttctcaggccgggcctaataacatgtcggctcaggccaaaaactggctacccgggccctgctaccggcagcaacgcgtctccacgacactgtcgcaaaataacaacagcaactttgcttggaccggtgccaccaagtatcatctgaatggcagagactctctggtaaatcccggtgtcgctatggcaacgcacaaggacgacgaagagcgattttttccatccagcggagtcttgatgtttgggaaacagggagctggaaaagacaacgtggactatagcagcgttatgctaaccagtgaggaagaaatcaaaaccaccaacccagtggccacagaacagtacggcgtggtggccgataacctgcaacagcaaaacgccgctcctattgtaggggccgtcaacagtcaaggagccttacctggcatggtctggcagaaccgggacgtgtacctgcagggtcctatctgggccaagattcctcacacggacggcaactttcatccttcgccgctgatgggaggctttggactgaaacacccgcctcctcagatcctgattaagaatacacctgttcccgcggatcctccaactaccttcagtcaagccaagctggcgtcgttcatcacgcagtacagcaccggacaggtcagcgtggaaattgaatgggagctgcagaaagagaacagcaagcgctggaacccagagattcagtatacttccaactactacaaatctacaaatgtggactttgctgtcaatactgagggtacttattcagagcctcgccccattggcacccgttacctcacccgtaacctgtaattgcctgttaatcaataaaccggttaattcgtttcagttgaactttggtctctgcgaagggcgaattc

SEQ ID NO: 4998 - DNA, 3106 bp, Adeno-associated virus
gaattcgcccttctacggctgcgtcaactggaccaatgagaactttcccttcaacgattgcgtcgacaagatggtgatctggtgggaggagggcaagatgacggccaaggtcgtggagtccgccaaggccattctcggcggcagcaaggtgcgcgtggaccaaaagtgcaagtcgtccgcccagatcgaccccacccccgtgatcgtcacctccaacaccaacatgtgcgccgtgattgacgggaacagcaccaccttcgagcaccagcagccgttgcaggaccggatgttcaaatttgaactcacccgccgtctggagcatgactttggcaaggcgacaaagcaggaagtcaaagagttcttccgctgggcgcaggatcacgtgaccgaggtggcgcatgagttctacgtcagaaagggtggagccaacaagagacccgcccccgatgacgcggataaaagcgagcccaagcgggcccgcccctcagtcgcggatccatcgacgtcagacgcggaaggagctccggtggactttgccgacaggtaccaaaacaaatgttctcgtcacgcgggcatgcttcagatgctgtttccctgcaaaacatgcgagagaatgaatcagaatttcaacatttgcttcacgcacgggaccagagactgttcagaatgtttccccggcgtgtcagaatctcaaccggtcgtcagaaagaggacgtatcggaaactctgtgccattcatcatctgctggggcgggctcccgagattgcttgctcggcctgcgatctggtcaacgtggacctggatgactgtgtttctgagcaataaatgacttaaaccaggtatggctgccgatggttatcttccagattggctcgaggacaacctctctgagggcattcgcgagtggtgggacttgaaacctggagccccgaaacccaaagccaaccagcaaaagcaggacgacggccggggtctggtgcttcctggctacaagtacctcggacccttcaacggactcgacaagggagagccggtcaacgaggcagacgccgcggccctcgagcacgacaaggcctacgacaagcagctcgagcagggggacaacccgtacctcaagtacaaccacgccgacgccgagtttcaggagcgtcttcaagaagatacgtcttttgggggcaacctcgggcgagcagtcttccgggccaagaagcgggttctcgaacctctcggtctggttgaggaaggcgctaagacggctcctggaaagaagagacccatagaatcccccgactcctccacgggcatcggcaagaaaggccagcagcccgctaaaaagaagctcaactttgggcagactggcgactcagagtcagtgcccgacccccaacctctcggagaacctcccgccgcgccctcaggtctgggatctggtacaatggctgcaggcggtggcgcaccaatggcagacaataacgaaggcgccgacggagtgggtaatgcctccggaaattggcattgcgattccacatggctgggcgacagagtcatcaccaccagcacccgcacctgggccctgcccacctacaacaaccacctctacaagcagatatcaagtcagagcggggctaccaacgacaaccacttcttcggctacagcaccccctggggctattttgacttcaacagattccactgccacttctcaccacgtgactggcagcgactcatcaacaacaaccggggattccggcccagaaagctgcggttcaagttgttcaacatccaggtcaaggaggtcacgacgaacgacggcgttacgaccatcgctaataaccttaccagcacgattcaggtcttctcggactcggagtaccaactgccgtacgtcctcggctctgcgcaccagggctgcctccctccgttccctgcggacgtgttcatgattcctcagtacggatatctgactctaaacaacggcagtcagtctgtgggacgttcctccttctactgcctggagtactttccttctcagatgctgagaacgggcaataactttgaattcagctaccagtttgaggacgtgccctttcacagcagctacgcgcacagccaaagcctggaccggctgatgaaccccctcatcgaccagtacctgtactacctgtctcggactcagtccacgggaggtaccgcaggaactcagcagttgctattttctcaggccgggcctaataacatgtcggctcaggccaaaaactggctacccgggccctgctaccggcagcaacgcgtctccacgacactgtcgcaaaataacaacagcaactttgcttggaccggtgccaccaagtatcatctgaatggcagagactctctggtaaatcccggtgtcgctatggcaacgcacaaggacgacgaagagcgattttttccatccagcggagtcttgatgtttgggaaacagggagctggaaaagacaacgtggactatagcagcgttatgctaaccagtgaggaagaaatcaaaaccaccaacccagtggccacagaacagtacggcgtggtggccgataacctgcaacagcaaaacgccgctcctattgtaggggccgtcaacagtcaaggagccttacctggcatggcctggcagaaccgggacgtgtacctgcagggtcctatctgggccaagattcctcacacggacggcaactttcatccttcgccgctgatgggaggctttggactgaaacacccgcctcctcagatcctgattaagaatacacctgttcccgcggatcctccaactaccttcagtcaagccaagctggcgtcgttcatcacgcagtacagcaccggacaggtcagcgtggaaattgaatgggagctgcagaaagagaacagcaagcgctggaacccagagattcagtatacttccaactactacaaatctacaaatgtggactttgctgtcaatactgagggtacttattcagagcctcgccccattggcacccgttacctcacccgtaacctgtaattgcctgttaatcaataaaccggttaattcgtttcagttgaactttggtctctgcgaagggcgaattc

SEQ ID NO: 4999 - DNA, 3197 bp, Adeno-associated virus
gaattcgccctttctacggctgcgtcaactggaccaatgagaactttcccttcaacgattgcgtcgacaagatggtgatctggtgggaggagggcaagatgacggccaaggtcgtggagtccgccaaggccattctcggcggcagcaaggtgcgcgtggaccaaaagtgcaagtcgtccgcccagatcgaccccacccccgtgatcgtcacctccaacaccaacatgtgcgccgtgattgacgggaacagcaccaccttcgagcaccagcagccgttacaagaccggatgttcaaatttgaactcacccgccgtctggagcacgactttggcaaggtgacaaagcaggaagtcaaagagttcttccgctgggcgcaggatcacgtgaccgaggtggcgcatgagttctacgtcagaaagggtggagccaacaagagacccgcccccgatgacgcggataaaagcgagcccaagcgggcctgcccctcagtcgcggatccatcgacgtcagacgcggaaggagctccggtggactttgccgacaggtaccaaaacaaatgttctcgtcacgcgggcatgcttcagatgctgtttccctgcaagacatgcgagagaatgaatcagaatttcaacatttgcttcacgcacgggaccagagactgttcagaatgtttccccggcgtgtcagaatctcaaccggtcgtcagaaagaggacgtatcggaaactctgtgccattcatcatctgctggggcgggctcccgagattgcttgctcggcctgcgatctggtcaacgtggacctggatgactgtgtttctgagcaataaatgacttaaaccaggtatggctgccgatggttatcttccagattggctcgaggacaacctctctgagggcattcgcgagtggtgggacttgaaacctggagccccgaaacccaaagccaaccagcaaaagcaggacgacggccggggtctggtgcttcctggctacaagtacctcggacccttcaacggactcgacaagggagagccggtcaacgaggcagacgccgcggccctcgagcacgacaaggcctacgacaagcagctcgagcagggggacaacccgtacctcaagtacaaccacgccgacgccgagtttcaggagcgtcttcaagaagatacgtcttttgggggcaacctcgggcgagcagtcttccaggccaagaagcgggttctcgaacctctcggtctggttgaggaaggcgctaagacggctcctggaaagaagagaccggtagagccatcaccccagcgttctccagactcctctacgggcatcggcaagacaggccagcagcccgcgaaaaagagactcaactttgggcagactggcgactcagagtcagtgcccgaccctcaaccaatcggagaaccccccgcaggcccctctggtctgggatctggtacaatggctgcaggcggtggcgctccaatggcagacaataacgaaggcgccgacggagtgggtagttcctcaggaaattggcattgcgattccacatggctgggcgacagagtcatcaccaccagcacccgaacctgggccctccccacctacaacaaccacctctacaagcaaatctccaacgggacatcgggaggaagcaccaacgacaacacctacttcggctacagcaccccctgggggtattttgactttaacagattccactgccacttctcaccacgtgactggcagcgactcatcaacaacaactggggattccggcccaagagactcaacttcaagctcttcaacatccaggtcaaggaggtcacgcagaatgaaggcaccaagaccatcgccaataaccttaccagcacgattcaggtctttacggactcggaataccagctcccgtacgtcctcggctctgcgcaccagggctgcctgcctccgttcccggcggacgtcttcatgattcctcagtacgggtacctgactctgaacaacggcagtcaggccgtgggccgttcctccttctactgcctggagtactttccttctcaaatgctgagaacgggcaacaactttgagttcagctaccagtttgaggacgtgccttttcacagcagctacgcgcacagccaaagcctggaccggctgatgaaccccctcatcgaccagtacctgtactacctgtctcggactcagtccacgggaggtaccgcaggaactcagcagttgctattttctcaggccgggcctaataacatgtcggctcaggccaaaaactggctacccgggccctgctaccggcagcaacgcgtctccacgacactgtcgcaaaataacaacagcaactttgcttggaccggtgccaccaagtatcatctgaatggcagagactctctggtaaatcccggtgtcgctatggcaacgcacaaggacgacgaagagcgattttttccatccagcggagtcttgatgtttgggaaacagggagctggaaaagacaacgtggactatagcagcgttatgctaaccagtgaggaagaaatcaaaaccaccaacccagtggccacagaacagtacggcgtggtggccgataacctgcaacagcaaaacgccgctcctattgtaggggccgtcaacagtcaaggagccttacctggcatggtctggcagaaccgggacgtgtacctgcagggtcctatctgggccaagattcctcacacggacggcaactttcatccttcgccgctgatgggaggctttggactgaaacacccgcctcctcagatcctgattaagaatacacctgttcccgcggatcctccaactaccttcagtcaagccaagctggcgtcgttcatcacgcagtacagcaccggacaggtcagcgtggaaattgaatgggagctgcagaaagagaacagcaagcgctggaacccagagattcagtatacttccaactactacaaatctacaaatgtggactttgctgtcaatactgagggtacttattcagagcctcgccccattggcacccgttacctcacccgtaacctgtaattgcctgttaatcaataaaccggttaattcgtttcagttgaactttggtctctgcgaagggcgaattcgtttaaacctgcaggactagtccctttagtgagggttaattctgagcttggcgtaatcatgggtcatag

SEQ ID NO: 5000 - DNA, 3276 bp, Adeno-associated virus
gaattcgcccttcgcagagaccaaagttcaactgaaacgaattaaccggtttattgattaacaggcaattacaggttacgggtgaggtaacgggtgccaatggggcgaggctcagtataaaccccttcgttgttgacagcaaattccacattattagacttggcataatttgaggtgtactgaatctctggattccagcgtttgctgttttctttctgcagttcccactcgatctccacgctgacctggccggtgctgtactgcgtgataaatgaggcaaacttggcaggagtaaacacctctggaggattagcaggtaccggggtgtttttgatgagaatttgaggaggcgggtgtttgagtccaaatccgtccatcaggggagacgggtgaaagttgccgtccgtgtgaggaattttggcccagatgggaccctgcaggtacacgtcccggttctgccagaccatgccgggcagagccccctggctgttgacagtctgtgtctggggtccggccgtagacgattgcaggttgctggagaccacaccgtattcttctgtagccacgggattggtggttttgatctcctcctcgctggtcattagcacgttttccagcgttgtcttgttggcagcccccgttttgccaaaaaccagcactccgttgatgggaaagaactggtcctcgtcgtccttgttggtggccatggctacgcccgggttggttaatgaatttctaccattcagatggtatttagtggccccggtccaggcaaagttactgttgttgttgctgtctatgttttttgacagtctctgctgccgataacagggtccgggcagccagttctttgattgctcggccatggtgttgggcccagcctgatggaactgcagctcccttgtggaccccgtagtgctctgggtccgggccaggtagtacaggtactggtcgatgaggggattcatcagccggtccaggctctggctatgcgcatagctgctgtggaaaggcacttcctcaaaggtgtagctgaattcaaagttattgcccgttctcagcatctgagaaggaaagtactccaggcagtagaaggaggaacgtcccacagactgactgccgttgtttagagtcagatatccgtactgaggaatcatgaacacgtccgcagggaacggagggaggcagccctggtgcgcagagccgaggacgtacggcagttggtactccgagtccgagaagacctgaatcgtgctggtaaggttattagcgatggtcgtaacgccgtcgtccgtcgtgacctccttgacctggatgttgaacaacttgaaccgcagctttctgggccggaatccccagttgttgttgatgagtcgctgccagtcacgtggtgagaagtggcagtggaatctgttaaagtcaaaatacccccagggggtgctgtagccgaagtaggtgttgtcgttggtgcttcctcccgatgtcccgttggagatttgcttgtagaggtggttgttgtaggtggggagggcccaggttcgggtgctggtggtgatgactctgtcgcccagccatgtggaatcgcaatgccaatttcctgaggaactacccactccgtcggcgccttcgttattgtctgccattggagcgccaccgcctgcagccattgtaccagatcccagaccagaggggcctgcggggggttctccgattggttgagggtcgggcactgactctgagtcgccagtctgcccaaagttgagtctctttttcgcgggctgctggcctgtcttgccgatgcccgtagaggagtctggagaacgctggggtgatggctctaccggtctcttctttccaggagccgtcttagcgccttcctcaaccagaccgagaggttcgagaacccgcttcttggcctggaagactgctcgcccgaggttgcccccaaaagacgtatcttcttgaagacgctcctgaaactcggcgtcggcgtggttgtacttgaggtacgggttgtccccctgctcgagctgcttgtcgtaggccttgtcgtgctcgagggccgcggcgtctgcctcgttgaccggctctcccttgtcgagtccgttgaagggtccgaggtacttgtagccaggaagcaccagaccccggccgtcgtcctgcttttgctggttggctttgggtttcggggctccaggtttcaagtcccaccactcgcgaatgccctcagagaggttgtcctcgagccaatctggaagataaccatcggcagccatacctggtttaagtcatttattgctcagaaacacagtcatccaggtccacgttgaccagatcgcaggccgagcaagcaatctcgggagcccgccccagcagatgatgaatggcacagagtttccgatacgtcctctttctgacgaccggttgagattctgacacgccggggaaacattctgaacagtctctggtcccgtgcgtgaagcaaatgttgaaattctgattcattctctcgcatgtcttgcagggaaacagcatctgaagcatgcccgcgtgacgagaacacttgttttggtacctgtcggcaaagtccaccggagctccttccgcgtctgacgtcgatggatgcaaaatgtcgcaaaagcactcacgtgacagctaatacaggaccactcccctatgacgtgatttacgtcagcgctatgcccgcgtgacgagaacatttgttttggtacctgtcggcaaagtccaccggagctccttccgcgtctgacgtcgatggatccgcgactgaggggcaggcccgcttgggctcgcttttatccgcgtcatcgggggcgggtctcttgttggctccaccctttctgacgtagaactcatgcgccacctcggtcacgtgatcctgcgcccagcggaagaactctttgacttcctgctttgtcaccttgccaaagtcatgctccagacggcgggtgagttcaaatttgaacatccggtcctgcaacggctgctggtgctcgaaggtggtgctgttcccgtcaatcacggcgcacatgttggtgttggaagtgacgatcacgggggtgggatcgatctgggcggaagacttgcacttttggtccacgcgcaccttgctgccgccgagaatggccttggcggactccacgaccttggccgtcatcttgccctcctcccaccagatcaccatcttgtcgacgcaatcgttgaagggaaagttctcattggtccagttgacgcagccgtagaaagggcgaattc

SEQ ID NO: 5001 - protein, 738 aa, Adeno-associated virus; identical to SEQ ID NO: 4777

SEQ ID NO: 5002 - protein, 738 aa, Adeno-associated virus
MAADGYLPDWLEDNLSEGIREWWDLKPGAPKPKANQQKQDDGRGLVLPGYKYLGPFNGLDKGEPVNAADAAALEHDKAYDQQLKAGDNPYLRYNHADAEFQERLQEDTSFGGNLGRAVFQAKKRVLEPLGLVEEGAKTAPGKKRPVEPSPQRSPDSSTGIGKKGHQPARKRLNFGQTGDSESVPDPQPIGEPPAGPSGLGSGTMAAGGGAPMADNNEGADGVGSSSGNWHCDSTWLGDRVITTSTRTWALPTYNNHLYKQISNGTSGGSTNDNTYFGYSTPWGYFDFNRFHCHFSPRDWQRLINNNWGFRPKRLNFKLFNIQVKEVTQNEGTKTIANNLTSTIQVFTDSEYQLPYVPGSAHQGCLPPFPADVFMIPQYGYLTLNNGSQAVGRSSFYCLEYFPSQMLRTGNNFEFSYTFEDVPFHSSYAHSQSLDRLMNPLIDQYLYYLSRTQSTGGTQGTQQLLFSQAGPANMSAQAKNWLPGPCYRQQRVSTTLSQNNNSNFAWTGATKYHLNGRDSLVNPGVAMATHKDDEERFFPSSGVLMFGKQGAGKDNVDYSSVMLTSEEEIKTTNPVATEQYGVVADNLQQTNGAPIVGTVNSQGALPGMVWQNRDVYLQGPIWAKIPHTDGNFHPSPLMGGFGLKHPPPQILIKNTPVPADPPTTFSQAKLASFITQYSTGQVSVEIEWELQKENSKRWNPEIQYTSNYYKSTNVDFAVNTEGTYSEPRPIGTRYLTRNL

SEQ ID NO: 5003 - protein, 738 aa, Adeno-associated virus; identical to SEQ ID NO: 4775

SEQ ID NO: 5004 - DNA, 2489 bp, Adeno-associated virus
gaattcgccctttctacggctgcgtcaactggaccaatgagaactttcccttcaacgattgcgtcgacaagatggtgatctggtgggaggagggcaagatgacggccaaggtcgtgaagtccgccaaggccattcatcatctgctggggcgggctcccgagattgcttgctcggcctgcgatctggtcaacgtggacctggatgactgtgtttctgagcaataaatgacttaaaccaggtatggctgccgatggttatcttccagattggctcgaggacaacctctctgagggcattcgcgagtggtgggacttgaaacctggagccccgaaacccaaagccaaccagcaaaagcaggacgacggccggggtctggtgcttcctggctacaagtacctcggacccttcaacggactcgacaagggagagccggtcaacgaggcagacgccgcggccctcgagcacgacaaggcctacgacaagcagctcgagcagggggacaacccgtacctcaagtacaaccacgccgacgccgagtttcaggagcgtcttcaagaagatacgtcttttgggggcaacctcgggcgagcagtcttccaggccaagaagcgggttctcgaacctctcggtctggttgaggaaggcgctaagacggctcctggaaagaagagacccatagaatcccccgactcctccacgggcatcggcaggaaaggccagcagcccgctaaaaagaagctcaactttgggcagactggcgactcagagtcagtgcccgaccctcaaccaatcggagaaccccccgcaggcccctctggtctgggatctggtacaatggctgcaggcggtggcgctccaatggcagacaataacgaaggcgccgacggagtgggtaatgcctccggaaattggcattgcgattccacatggctgggcgacagagtcatcaccaccagcacccgcacctgggccctgcccacctacaacaaccacctctacaagcagatatcaagtcagagcggggctaccaacgacaaccacttcttcggctacagcaccccctggggctattttgacttcaacagattccactgccacttctcaccacgtgactggcagcgactcatcaacaacaactggggattccggcccagaaagctgcggttcaagttgttcaacatccaggtcaaggaggtcacgacgaacgacggcgttacgaccatcgccaataaccttaccagcacgattcaggtcttctcggactcggagtaccaactgccgtacgtcctcggctctgcgcaccagggctgcctccctccgttccctgcggacgtgttcatgattcctcagtacggatatctgactctaaacaacggcagtcagtctgtgggacgttcctccttctactgcctggagtactttccttctcagatgctgagaacgggcaataactttgaattcagctacacctttgaggaagtgcctttccacagcagctatgcgcacagccagagcctggaccggctgatgaatcccctcatcgaccagtacctgtactacctggcccggacccagagcactacggggtccacaagggagctgcagttccatcaggctgggcccaacaccatggccgagcaatcaaagaactggctgcccggaccctgttatcggcagcagagactgtcaaaaaacatagacagcaacaacaacagtaactttgcctggaccggggccactaaataccatctgaatggtagaaattcattaaccaacccgggcgtagccatggccaccaacaaggacgacgaggaccagttctttcccatcaacggagtgctggtttttggcaaaacgggggctgccaacaagacaacgctggaaaacgtgctaatgaccagcgaggaggagatcaaaaccaccaatcccgtggctacagaagaatacggtgtggtctccagcaacctgcaatcgtctacggccggaccccagacacagactgtcaacagccagggggctctgcccggcatggtctggcagaaccgggacgtgtacctgcagggtcccatctgggccaaaattcctcacacggacggcaactttcacccgtctcccctgatgggcggatttggactcaaacacccgcctcctcaaattctcatcaaaaacaccccggtacctgctaatcctccagaggtgtttactcctgccaagtttgcctcatttatcacgcagtacagcaccggccaggtcagcgtggagatcgagtgggaactgcagaaagaaaacagcaaacgctggaatccagagattcagtacacctcaaattatgccaagtctaataatgtggaatttgctgtcaacaacgaaggggtttatactgagcctcgccccattggcacccgttacctcacccgtaacctgtaattgcctgttaatcaataaaccggttaattcgtttcagttgaactttggtcaagggcgaattc

SEQ ID NO: 5005 - DNA, 3098 bp, Adeno-associated virus
gaattcgccctttctacggctgcgtcaactggaccaatgagaactttcccttcaacgattgcgtcgacaagatggtgatctggtgggaggagggcaagatgacggccaaggtcgtggagtccgccaaggccattctcggcggcagcaaggtgcgcgtggaccaaaagtgcaagtcttccgcccagatcgatcccacccccgtgatcgtcacttccaacaccaacatgtgcgccgtgattgacgggaacagcaccaccttcgagcaccagcagccgttacaagaccggatgttcaaatttgaactcacccgccgtctggagcacgactttggcaaggtgacaaagcaggaagtcaaagagttcttccgctgggcgcaggatcacgtgaccgaggtggcgcatgagttctacgtcagaaagggtggagccaacaagagacccgcccccgatgacgcggataaaagcgagcccaagcgggcctgcccctcagtcgcggatccatcgacgtcagacgcggaaggagctccggtggactttgccgacaggtaccaaaacaaatgttctcgtcacgcgggcatgcttcagatgctgtttccctgcaagacatgcgagagaatgaatcagaatttcaacatttgcttcacgcacgggaccggagactgttcagaatgtttccccggcgtgtcagaatctcaaccggtcgtcagaaagaggacgtatcggaaactctgtgccattcatcatctgctggggcgggctcccgagattgcttgctcggcctgcgatctggtcaacgtggacctggatgactgtgtttctgagcaataaatgacttaaaccaggtatggctgccgatggttatcttccagattggctcgaggacaacctctctgagggcattcgcgagtggtgggacttgaaacctggagccccgaaacccaaagccaaccagcaaaagcaggacgacggccggggtctggtgcttcctggctacaagtacctcggacccttcaacggactcgacaagggagagccggtcaacgcggcggacgcagcggccctcgagcacgacaaggcctacgaccagcagctcaaagcgggtgacaatccgtacctgcggtataaccacgccgacgccgagtttcaggagcgtcttcaagaagatacgtcttttgggggcaacctcgggcgagcagtcttccaggccaagaagcgggttctcgaacctctcggtctggttgaggaaggcgctaagacggctcctggaaagaagagacccatagaatcccccgactcctccacgggcatcggcaagaaaggccagcagcccgctaaaaagaagctcaactttgggcagactggcgactcagagtcagtgcccgaccctcaaccaatcggagaaccccccgcaggcccctctggtctgggatctggtacaatggctgcaggcggtggcgctccaatggcagacaataacgaaggcgccgacggagtgggtaatgcctccggaaattggcattgcgattccacatggctgggcgacagagtcatcaccaccagcacccgcacctgggccctgcccacctacaacaaccacctctacaagcagatatcaagtcagagcggggctaccaacgacaaccacttcttcggctacagcaccccctggggctattttgacttcaacagattccactgccacttctcaccacgtgactggcagcgactcatcaacaacaactggggattccggcccagaaagctgcggttcaagttgttcaacatccaggtcaaggaggtcacgacgaacgacggcgttacgaccatcgctaataaccttaccagcacgattcaggtcttctcggactcggagtaccaactgccgtacgtcctcggctctgcgcaccagggctgcctccctccgttccctgcggacgtgttcatgattcctcagtacggatatctgactctaaacaacggcagtcagtctgtgggacgttcctccttctactgcctggagtactttccttctcagatgctgagaacgggcaataactttgaattcagctacacctttgaggaagtgcctttccacagcagctatgcgcacagccagagcctggaccggctgatgaatcccctcatcgaccagtacctgtactacctggcccggacccagagcactacggggtccacaagggagctgcagttccatcaggctgggcccaacaccatggccgagcaatcaaagaactggctgcccggaccctgttatcggcggcagagactgtcaaaagacatagacagcaacaacaacagtaactttgcctggaccggggccactaaataccatctgaatggtagaaattcattaaccaacccgggcgtagccatggccaccaacaaggacgacgaggaccagttctttcccatcaacggagtgctggtttttggcaaaacgggggctgccaacaagacaacgctggaaaacgtgctaatgaccagcgaggaggagatcaaaaccaccaatcccgtggctacagaagaatacggtgtggtctccagcaacctgcaatcgtctacggccggaccccagacacagactgtcaacagccagggggctctgcccggcatggtctggcagaaccgggacgtgtacctgcagggtcccatctgggccaaaattcctcacacggacggcaactttcacccgtctcccctgatgggcggatttggactcaaacacccgcctcctcaaattctcatcaaaaacaccccggtacctgctaatcctccagaggtgtttactcctgccaagtttgcctcatttatcacgcagtacagcaccggccaggtcagcgtggagatcgagtgggaactgcagaaagagaacagcaaacgctggaatccagagattcagtacacctcaaattatgccaagtctaataatgtggaatttgctgtcaacaacgaaggggtttatactgagcctcgccccattggcacccgttacctcacccgtaacctgtaattacttgttaatcaataaaccggttgattcgtttcagttgaactttggtctctgcgaagggcgaattc

SEQ ID NO: 5006 - DNA, 2969 bp, Adeno-associated virus
gaattcgccctttctacggctgcgtcaactggaccaatgagaactttcccttcaacgattgcgtcgacaagatggtgatctggtgggaggagggcaagatgacggccaaggtcgtggagtccgccaaggccattctcggcggcagcaaggtgcgcgtggaccaaaagtgcaagtcgtccgcccagatcgaccccacccccgtgatcgtcacctccaacaccaacatgtgcgccgtgattgacgggaacagcaccaccttcgagcaccagcagccgttacaagaccggatgttcaaatttgaactcacccgccgtctggagcacgactttggcaaggtgacaaagcaggaagtcaaagagttcttccgctgggcgcaggatcacgtgaccgaggtggcgcatgagttctacgtcagaaagggtggagccaacaagagacccgcccccgatgacgcggataaaagcgagcccaagcgggcctgcccctcagtcgcggatccatcgacgtcagacgcggaaggagctccggtggactttgccgacaggtaccaaaacaaatgttctcgtcacgcgggcatgcttcagatgctgtttccctgcaagacatgcgagagaatgaatcagaatttcaacatttgcttcacgcacgggaccagagactgttcagaatgtttccccggcgtgtcagaatctcaaccggtcgtcagaaagaggacgtatcggaaactctgtgccattcatcatctgctggggcgggctcccgagattgcttgctcggcctgcgatctggtcaacgtggacctggatgactgtgtttctgagcaataaatgacttaaaccaggtatggctgccgatggttatcttccagattggctcgaggacaacctctctgagggcatccgcgagtggtgggacttgaaacctggagccccgaaacccaaagccaaccagcaaaagcaggacgacggccggggtctggtgcttcctggctacaagtacctcggacccttcaacggactcgacaagggagagccggtcaacgaggcagacgccgcggccctcgagcacgacaaggcctacgacaagcagctcgagcagggggacaacccgtacctcaagtacaaccacgccgacgccgagtttcaggagcgtcttcaagaagatacgtcttttgggggcaacctcgggcgagcagtcttccaggccaagaagcgggttctcgaacctctcggtctggttgaggaaggcgctaagacggctcctggaaagaagagaccggtagagccatcaccccagcgttctccagactcctctacgggcatcggcaagacaggccagcagcccgcgaaaaagagactcaactttgggcagactggcgactcagagtcagtgcccgaccctcaaccaatcggagaaccccccgcaggcccctctggtctgggatctggtacaatggctgcaggcggtggcgctccaatggcagacaataacgaaggcgccgacggagtgggtagttcctcaggaaattggcattgcgattccacatggctgggcgacagagtcatcaccaccagcacccgaacctgggccctccccacctacaacaaccacctctacaagcaaatctccaacgggacatcgggaggaagcaccaacgacaacacctacttcggctacagcaccccctgggggtattttgactttaacagattccactgccacttctcaccacgtgactggcagcgactcatcaacaacaactggggattccggcccaagagactcaacttcaagctcttcaacatccaggtcaaggaggtcacgcagaatgaaggcaccaagaccatcgccaataaccttaccagcacgattcaggtctttacggactcggaataccagctcccgtacgtcctcggctctgcgcaccagggctgcctgcctccgttcccggcggacgtcttcatgattcctcagtacgggtacctgactctgaacaacggcagtcaggccgtgggccgttcctccttctactgcctggagtactttccttctcaaatgctgagaacgggcaacaactttgagttcagctaccagtttgaggacgtgccttttcacagcagctacgcgcacagccaaagcctggaccggctgacgaaccccctcatcgaccagtacctgtactacctggcccggacccagagcactacggggtccacaagggggctgcagttccatcaggctgggcccaacaccatggccgagcaatcaaagaactggctgcccggaccctgttatcggcagcagagactgtcaaaaaacatagacagcaacaacaacagtaactttgcctggaccggggccactaaataccatctgaatggtagaaattcattaaccaacccgggcgtagccatggccaccaacaaggacgacgaggaccagttctttcccatcaacggagtgctggtttttggcaaaacgggggctgccaacaagacaacgctggaaaacgtgctaatgaccagcgaggaggagatcaaaaccaccaatcccgtggctacagaagaatacggtgtggtctccagcaacctgcaatcgtctacggccggaccccagacacagactgtcaacagccagggggctctgcccggcatggtctggcagaaccgggacgtgtacctgcagggtcccatctgggccaaaattcctcacacggacggcaactttcacccgtctcccctgatgggcggatttggactcaaacacccgcctcctcaaattctcatcaagtatacttccaactactacaaatctacaaatgtggactttgctgtcaatactgagggtacttattcagagcctcgccccattggcacccgttacctcacccgtaacctgtaattgcctgttaatcaataaaccggttaattcgtttcagttgaactttggtctctgcgaagggcgaattc

SEQ ID NO: 5007 - DNA, 3113 bp, Adeno-associated virus
gaattcgccctttctacggctgcgtcaactggaccaatgagaactttcccttcaacgattgcgtcgacaagatggtgatctggtgggaggagggcaagatgacggccaaggtcgtggagtccgccaaggccattctcggcggcagcaaggtgcgcgtggaccaaaagtgcaagtcgtccgcccagatcgatcccacccccgtgatcgtcacttccaacaccaacatgtgcgccgtgattgacgggaacagcaccaccttcgagcaccagcagccgttacaagaccggatgttcaaatttgaactcacccgccgtctggagcatgactttggcaaggtgacaaagcaggaagtcaaagagttcttccgctgggcgcaggatcacgtgaccgaggtggcgcatgagttctacgtcagaaagggtggagccaacaagagacccgcccccgatgacgcggataaaagcgagcccaagcgggcctgcccctcagtcgcggatccatcgacgtcagacgcggaaggagctccggtggactttgccgacaggtaccaaaacaaatgttctcgtcacgcgggcatgcttcagatgctgtttccctgcaagacatgcgagagaatgaatcagaatttcaacatttgcttcacgcacgggaccagagactgttcagaatgtttccccggcgtgtcagaatctcaaccggtcgtcagaaagaggacgtatcggaaactctgtgccattcatcatctgctggggcgggctcccgagattgcttgctcggcctgcgatctggtcaacgtggacctggatgactgtgtttctgagcaataaatgacttaaaccaggtatggctgccgatggttatcttccagattggctcgaggacaacctctctgagggcattcgcgagtggtgggacttgaaacctggagccccgaaacccaaagccaaccagcaaaagcaggacgacggccggggtctggtgcttcctggctacaagtacctcggacccttcaacggactcgacaagggggagcccgtcaacgcggcggacgcagcggccctcgagcacgacaaggcctacgaccagcagctcaaagcgggtgacaatccgtacctgcggtataaccacgccgacgccgagtttcaggagcgtcttcaagaagatacgtcttttgggggcaacctcgggcgagcagtcttccaggccaagaagcgggttctcgaacctctcggtctggttgaggaaggcgctaagacggctcctggaaagaagagacccatagaatcccccgactcctccacgggcatcggcaagaaaggccagcagcccgctaaaaagaagctcaactttgggcagactggcgactcagagtcagtgcccgaccctcaaccaatcggagaaccccccgcaggcccctctggtctgggatctggtacaatggctgcaggcggtggcgctccaatggcagacaataacgaaggcgccgacggagtgggtagttcctcaggaaattggcattgcgattccacatggctgggcgacagagtcatcaccaccagcacccgaacctgggccctccccacctacaacaaccacctctacaagcaaatctccaacgggacatcgggaggaagcaccaacgacaacacctacttcggctacagcaccccctgggggtattttgactttaacagattccactgccacttctcaccacgtgactggcagcgactcatcaacaacaactggggattccggcccaagagactcaacttcaagctcttcaacatccaggtcaaggaggtcacgcagaatgaaggcaccaagaccatcgccaataaccttaccagcacgattcaggtctttacggactcggaataccagctcccgtacgtcctcggctctgcgcaccagggctgcctgcctccgttcccggcggacgtcttcatgattcctcagtacgggtacctgactctgaacaacggcagtcaggccgtgggccgttcctccttctactgcctggagtactttccttctcaaatgctgagaacgggcaacaactttgagttcagctaccagtttgaggacgtgccttttcacagcagctatgcgcacagccaaagcctggaccggctgatgaaccccctcatcgaccagtacctgtactacctgtctcggactcagtccacgggaggtaccgcaggaactcagcagttgctattttctcaggccgggcctaataacatgtcggctcaggccaaaaactggctacccgggccctgctaccggcagcaacgcgtctccacgacagtgtcgcaaaataacaacagcaactttgcttggaccggtgccaccaagtatcatctgaatggcagagactctctggtaaatcccggtgtcgctatggcaacgcacaagggcgacgaagagcgattttttccatccagcggagtcttgatgtttgggaaacagggagctggaaaagacaacgtggactatagcagcgttatgctaaccagtgaggaagaaatcaaaaccaccaacccagtggccacagaacagtacggcgtggtggccgataacctgcaacagcaaaacgccgctcctattgtaggggccgtcaacagtcaaggagccttacctggcatggtctggcagaaccgggacgtgtacctgcagggtcctatctgggccaagattcctcacacggacggcaactttcatccttcgccgctgatgggaggctttggactgaaacacccgcctcctcagatcctgattaagaatacacctgttcccgcggatcctccaactaccttcagtcaagccaagctggcgtcgttcatcacgcagtacagcaccggacaggtcagcgtggaaattgaatgggagctgcagaaagagaacagcaagcgctggaacccagagattcagtatacttccaactactacaaatctacaaatgtggactttgctgtcaatactgagggtacttattcagagcctcgccccattggcacccgttacctcacccgtagcctgtaattgcctgttaatcaataaaccggttgattcgtttcagttgaactttggtctctgcgaagggcgaattc

SEQ ID NO: 5008 - DNA, 3128 bp, Adeno-associated virus
gaattcgccctttctacggctgcgtcaactggaccaatgagaactttcccttcaacgattgcgtcgacaagatggtgatctggtgggaggagggcaagatgacggccaaggtcgtggagtccgccaaggccattctcggcggcagcaaggtgcgcgtggaccaaaagtgcaagtcgtccgcccagatcgaccccacccccgtgatcgtcacctccaacaccaacatgtgcgccgtgattgacgggaacagcaccaccttcgagcaccagcagccgttgcaggaccggatgttcaaatttgaactcacccgccgtctggagcatgactttggcaaggtgacaaagcaggaagtcaaagagttcttccgctgggcgcaggatcacgtgaccgaggtggcgcatgagttctacgtcagaaagggtggagccaacaagagacccgcccccgatgacgcggataaaagcgagcccaagcgggcctgcccctcagtcgcggatccatcgacgtcagacgcggaaggagctccggtggactttgccgacaggtaccaaaacaaatgttctcgtcacgcgggcatgcttcagatgctgtttccctgcaagacatgcgagagaatgaatcagaatttcaacatttgcttcacgcgcgggaccagagactgttcagaatgtttcccgggcgtgtcagaatctcaaccggtcgtcagaaagaggacgtatcggaaactctgtgccattcatcatctgctggggcgggctcccgagattgcttgctcggcctgcgatctggtcaacgtggacctggatgactgtgtttctgagcaataaatgacttaaaccaggtatggctgccgatggttatcttccagattggctcgaggacaacctctctgagggcattcgcgagtggtgggacttgaaacctggagccccgaaacccaaagccaaccagcaaaagcaggacgacggccggggtctggtgcttcctggctacaagtacctcggacccttcaacggactcgacaagggggagcccgtcaacgcggcggacgcagcggccctcgagcacgacaaggcctacgaccagcagctcaaagcgggtgacaatccgtacctgcggtataaccacgccgacgccgagtttcaggagcgtctgcaagaagatacgtcttttgggggcaacctcgggcgagcagtcttccaggccaagaagcgggttctcgaacctctcggtctggttgaggaaggcgctaagacggctcctggaaagaagagaccggtagagccatcaccccagcgttctccagactcctctacgggcatcggcaagacaggccagcagcccgcgaaaaagagactcaactttgggcagactggcgactcagagtcagtgcccgaccctcaaccaatcggagaaccccccgcaggcccctctggtctgggatctggtacaatggctgcaggcggtggcgctccaatggcagacaataacgaaggcgccgacggagtgggtagttcctcaggaaattggcattgcgattccacatggctgggcgacagagtcatcaccaccagcacccgaacctgggccctccccacctacaacaaccacctctacaagcaaatctccaacgggacatcgggaggaagcaccaacgacaacacctacttcggctacagcaccccctgggggtattttgactttaacagattccactgccacttctcaccacgtgactggcagcgactcatcaacaacaactggggattccggcccaagagactcaacttcaagctcttcaacatccaggtcaaggaggtcacgcagaatgaaggcaccaagaccatcgccaataaccttaccagcacgattcaggtctttacggactcggaataccagctcccgtacgtcctcggctctgcgcaccagggctgcccgcctccgttcccggcggacgtcttcatgattcctcagtacgggtacctgactctgaacaacggcagtcaggccgtgggccgttcctccttctactgcctggagtactttccttctcaaatgcggagaacgggcaacaactttgagttcagctaccagtttgaggacgtgccttttcacagcagctacgcgcatagccaaagcctggaccggctgatgaaccccctcatcgaccagtacctgtactacctgtctcggactcagtccacgggaggtaccgcaggaactcagcagttgctattttctcaggccgggcctaataacatgtcggctcaggccaaaaactggctacccgggccctgctaccggcagcaacgcgtctccacgacactgtcgcaaaataacaacagcaactttgcttggaccggtgccaccaagtatcatctgaatggcagagactctctggtaaatcccggtgtcgctatggcaacgcacaaggacgacgaagagcgattttttccatccagcggagtcttgatgtttgggaaacagggagctggaaaagacaacgtggactatagcagcgttatgctaaccagtgaggaagaaatcaaaaccaccaacccagtggccacagaacagtacggcgtggtggccgataacctgcaacagcaaaacgccgctcctattgtaggggccgtcaacagtcaaggagccttacctggcatggtctggcagaaccgggacgtgtacctgcagggtcctatctgggccaagattcctcacacggacggcaactttcatccttcgccgctgatgggaggctttggactgaaacacccgcctcctcagatcctgattaagaatacacctgttcccgcggatcctccaactaccttcagtcaagccaagctggcgtcgttcatcacgcagtacagcaccggacaggtcagcgtggaaattgaatgggagctgcagaaagagaacagcaagcgctggaacccagagattcagtatacttccaactactacaaatctacaaatgtggactttgctgtcaatactgagggtacttattcagagcctcgccccattggcacccgttacctcacccgtaacctgtaattgcctgttaatcaataaaccggttaattcgtttcagttgaactttggtctctgcgaagggcgaattc

SEQ ID NO: 5009 - protein, 738 aa, Adeno-associated virus; identical to SEQ ID NO: 5002

SEQ ID NO: 5010 - DNA, 1933 bp, Adeno-associated virus
  modified_base (1302)..(1302): a, c, t or g
caaggcctacgaccagcagctcaaagcgggtgacaatccgtacctgcggtataaccacgccgacgccgagtttcaggagcgtcttcaagaagatacgtcttttgggggcaacctcgggcgagcagtcttccaggccaaaaagcgggttctcgaacctcttggtctggttgagacgccagctaagacggcacctggaaagaagcgaccggtagactcgccagactccacctcgggcatcggcaagaaaggccagcagcccgcgaaaaagagactcaactttgggcagactggcgactcagagtcagtccccgaccctcaaccaatcggagaaccaccagcaggcccctctggtctgggatctggtacaatggctgcaggcggtggcgcaccaatggctgacaataacgagggcgccgacggagtgggtaatgcctcaggaaattggcattgcgattccacatggctgggcgacagagtcatcaccaccagcacccgaacctgggccctgcccacctacaacaaccacctctacaagcaaatctccagtcagtcagcagggagcaccaacgataacgtctatttcggctacagcaccccctgggggtattttgacttcaacagattccattgccacttctcaccacgtgactggcagcgacttatcaacaacaactggggattccggcccaagaagctcaacttcaagctcttcaacatccaggtcaaggaggtcacgacgaatgacggtgtcacaaccatcgctaataaccttaccagcacggttcaggtcttttcggactcggaatatcaactgccgtacgtcctcggctccgcgcaccagggctgcctgcctccgttcccggcagacgtgttcatgattccgcagtacggatacctgactctgaacaatggcagccaatcggtaggccgttcctccttctactgcctggagtactttccttctcagatgctgagaacgggcaacaacttcacctttagctacaccttcgaggacgtgcctttccacagcagctacgcgcacagccagagtctggaccggctgatgaatcccctcatcgaccagtacctgtactacttggccagaacacagagcaacgcaggaggtactgctggcaatcgggaactgcagttttatcagggcggacctaccaccatggccgaacaagcaaagaactggctgcccggaccttgcttccggcaacagagagtatccaagacgctggatcaaaataacaacagcaactttgcctggactggtgccacaaaataccatttaaatgnaagaaattcattggttaatcccggtgtcgccatggcaacccacaaggacgacgaggaacgcttcttcccttcgagcggagttctaatttttggcaaaactggagcagctaataaaactacattagaaaacgtgctcatgacaaatgaagaagaaattcgtcctaccaacccggtagctaccgaggaatacgggattgtaagcagcaacttgcaggcggctagcaccgcagcccagacacaagttgttaacaaccagggagccttacctggcatggtctggcagaaccgggacgtgtacctgcaaggtcccatttgggccaagattcctcacacggacggcaactttcacccgtctcctctaatgggtggctttggactgaaacacccgcctccccagatcctgatcaaaaacacaccggtacctgctaatcctccagaagtgtttactcctgccaagtttgcttccttcatcacgcagtacagcaccgggcaagtcagcgttgagatcgagtgggagctgcagaaagagaacagcaagcgctggaacccagagattcagtacacctccaactttgacaaacagactggagtggactttgctgttgacagccagggtgtttactctgagcct

SEQ ID NO: 5011 - DNA, 3105 bp, Adeno-associated virus
gaattcgcccttgctgcgtcaactggaccaatgagaactttcccttcaacgattgcgtcgacaagatggtgatctggtgggaggagggcaagatgaccgccaaggtcgtggagtccgccaaggccattctgggcggaagcaaggtgcgcgtggaccaaaagtgcaagtcatcggcccagatcgaccccacgcccgtgatcgtcacctccaacaccaacatgtgcgccgtgatcgacgggaacagcaccaccttcgagcaccagcagccgctgcaggaccgcatgttcaagttcgagctcacccgccgtctggagcacgactttggcaaggtgaccaagcaggaagtcaaagagttcttccgctgggctcaggatcacgtgactgaggtggcgcatgagttctacgtcagaaagggcggagccaccaaaagacccgcccccagtgacgcggatataagcgagcccaagcgggcctgcccctcagttgcggagccatcgacgtcagacgcggaagcaccggtggactttgcggacaggtaccaaaacaaatgttctcgtcacgcgggcatgcttcagatgctgtttccctgcaagacatgcgagagaatgaatcagaatttcaacgtctgcttcacgcacggggtcagagactgctcagagtgcttccccggcgcgtcagaatctcaacccgtcgtcagaaaaaagacgtatcagaaactgtgcgcgattcatcatctgctggggcgggcacccgagattgcgtgttcggcccgcgatctcgtcaacgtggacttggatgactgtgtttctgagcaataaatgacttaaaccaggtatggctgctgacggttatcttccagattggctcgaggacaacctctctgagggcattcgcgagtggtgggacctgaaacctggagcccccaagcccaaggccaaccagcagaagcaggacgacggccggggtctggtgcttcctggctacaagtacctcggacccttcaacggactcgacaagggggagcccgtcaacgcggcggacgcagcggccctcgagcacgacaaggcctacgaccagcagctcaaagcgggtgacaatccgtacctgcggtataaccacgccgacgccgagtttcaggagcgtctgcaagaagatacgtcttttgggggcaacctcgggcgagcagtcttccaggccaagaagagggtactcgaacctctgggcctggttgaagaaggtgctaagacggctcctggaaagaagagaccgttagagtcaccacaagagcccgactcctcctcaggaatcggcaaaaaaggcaaacaaccagccaaaaagagactcaactttgaagaggacactggagccggagacggaccccctgaaggatcagataccagcgccatgtcttcagacattgaaatgcgtgcagcaccgggcggaaatgctgtcgatgcgggacaaggttccgatggagtgggtaatgcctcgggtgattggcattgcgattccacctggtctgagggcaaggtcacaacaacctcgaccagaacctgggtcttgcccacctacaacaaccacttgtacctgcggctcggaacaacatcaaacagcaacacctacaacggattctccaccccctggggatactttgactttaacagattccactgtcacttctcaccacgtgactggcaaagactcatcaacaacaactggggactacgaccaaaagccatgcgcgttaaaatcttcaatatccaagttaaggaggtcacaacgtcgaacggcgagactacggtcgctaataaccttaccagcacggttcagatatttgcggactcgtcgtatgagctcccgtacgtgatggacgctggacaagagggaagtctgtctcctttccccaatgacgtcttcatggtgcctcaatatggctactgtggcattgtgactggcgaaaatcagaaccagacggacagaaatgctttctactgcctggagtattttccttcacaaatgctgagaactggcaataactttgaaatggcttacaactttgggaaggtgccgttccactcaatgtatgcttacagccagagcccggacagactgatgaatcccctcctggaccagtacctgtggcacttacagtcgaccacctctggagagactctgaatcaaggcaatgcagcaaccacatttggaaaaatcaggagtggagactttgccttttacagaaagaactggctgcctgggccttgtgttaaacagcagagactctcaaaaactgccagtcaaaattacaagattcctgccagcgggggcaacgctctgttaaagtatgacacccactataccttaaacaaccgctggagcaacatagcgcctggacctccaatggcaacagctggaccttcagatggggacttcagcaacgcccagctcatcttccctggaccatcagtcaccggaaacacaacaacctcagcaaacaatctgttgtttacatcagaagaagaaattgctgccaccaacccaagagacacggacatgtttggtcagattgctgacaataatcagaatgctacaactgctcccataaccggcaacgtgactgctatgggagtgcttcctggcatggtgtggcaaaacagagacatttactaccaagggccaatttgggccaagatcccacacgcggacggacattttcatccttcaccgctaattggcggttttggactgaaacatccgcctccccagatatttatcaaaaacacccccgtacctgccaatcctgcgacaaccttcactgcagccagagtggactctttcatcacacaatacagcaccggccaggtcgctgttcagattgaatgggaaatcgaaaaggaacgctccaaacgctggaatcctgaagtgcagtttacttcaaactatgggaaccagtcttctatgttgtgggctcccgatacaactgggaagtatacagagccgcgggttattggctctcgttatttgactaatcatttgtaactgcctagttaatcaataaaccgtgtgattcgtttcagttgaactttggtctctgcgaagggcgaattc

SEQ ID NO: 5012 - protein, 733 aa, Adeno-associated virus
MAADGYLPDWLEDNLSEGIREWWDLKPGAPKPKANQQKQDDGRGLVLPGYKYLGPFNGLDKGEPVNAADAAALEHDKAYDQQLKAGDNPYLRYNHADAEFQERLQEDTSFGGNLGRAVFQAKKRVLEPLGLVEEGAKTAPGKKRPLESPQEPDSSSGIGKKGKQPAKKRLNFEEDTGAGDGPPEGSDTSAMSSDIEMRAAPGGNAVDAGQGSDGVGNASGDWHCDSTWSEGKVTTTSTRTWVLPTYNNHLYLRLGTTSNSNTYNGFSTPWGYFDFNRFHCHFSPRDWQRLINNNWGLRPKAMRVKIFNIQVKEVTTSNGETTVANNLTSTVQIFADSSYELPYVMDAGQEGSLPPFPNDVFMVPQYGYCGIVTGENQNQTDRNAFYCLEYFPSQMLRTGNNFEMAYNFEKVPFHSMYAHSQSLDRLMNPLLDQYLWHLQSTTSGETLNQGNAATTFGKIRSGDFAFYRKNWLPGPCVKQQRFSKTASQNYKIPASGGNALLKYDTHYTLNNRWSNIAPGPPMATAGPSDGDFSNAQLIFPGPSVTGNTTTSANNLLFTSEEEIAATNPRDTDMFGQIADNNQNATTAPITGNVTAMGVLPGMVWQNRDIYYQGPIWAKIPHADGHFHPSPLIGGFGLKHPPPQIFIKNTPVPANPATTFTAARVDSFITQYSTGQVAVQIEWEIEKERSKRWNPEVQFTSNYGNQSSMLWAPDTTGKYTEPRVIGSRYLTNHL

SEQ ID NO: 5013 - DNA, 3105 bp, Adeno-associated virus
gaattcgcccttgctgcgtcaactggaccaatgagaactttcccttcaacgattgcgtcgacaagatggtgatctggtgggaggagggcaagatgaccgccaaggtcgtggagtccgccaaggccattctgggcggaagcaaggtgcgcgtggaccaaaagtgcaagtcatcggcccagatcgaccccacgcccgtgatcgtcacctccaacaccaacatgtgcgccgtgatcgacgggaacagcaccaccttcgagcaccagcagccgctgcaggaccgcatgttcaagttcgagctcacccgccgtctggagcacgactttggcaaggtgaccaagcaggaagtcaaagagttcttccgctgggctcaggatcacgtgactgaggtggcgcatgagttctacgtcagaaagggcggagccaccaaaagacccgcccccagtgacgcggatataagcgagcccaagcgggcctgcccctcagttgcggagccatcgacgtcagacgcggaagcaccggtggactttgcggacaggtaccaaaacaaatgttctcgtcacgcgggcatgcttcagatgctgtttccctgcaagacatgcgagagaatgaatcagaatttcaacgtctgcttcacgcacggggtcagagactgctcagagtgcttccccggcgcgtcagaatctcaacccgtcgtcagaaaaaagacgtatcagaaactgtgcgcgattcatcatctgctggggcgggcacccgagattgcgtgttcggcctgcgatctcgtcaacgtggacttggatgactgtgtttctgagcaataaatgacttaaaccaggtatggctgctgacggttatcttccagattggctcgaggacaacctctctgagggcattcgcgagtggtgggacctgaaacctggagcccccaagctcaaggccaaccagcagaagcaggacgacggccggggtctggtgcttcctggctacaagtacctcggacccttccacggactcgacaagggggagcccgtcaacgcggcggacgcagcggccctcgagcacgacaaggcctacgaccagcagctcaaagcgggtgacaatccgtacctgcggtataaccacgccgacgccgagtttcaggagcgtctgcaagaagatacgtcttttgggggcaacctcgggcgagcagtcttccaggccaagaagagggtactcgaaccactgggcctggttgaagaaggtgctaagacggctcctggaaagaagagaccgttagagtcaccacaagagcccgactcctcctcaggaatcggcaaaaaaggcaaacaaccagccaaaaagagactcaactttgaagaggacactggagccggagacggaccccctgaaggatcagataccagcgccatgtcttcagacattgaaatgcgtgcagcaccgggcggaaatgctgtcgatgcgggacaaggttccgatggagtgggtaatgcctcgggtgattggcattgcgattccacctggtctgagggcaaggtcacaacaacctcgaccagaacctgggtcttgcccacctacaacaaccacttgtacctgcggctcggaacaacatcaaacagcaacacctacaacggattctccaccccctggggatactttgactttaacagattccactgtcacttctcaccacgtgactggcaaagactcatcaacaacaactggggactacgaccaaaagccatgcgcgttaaaatcttcaatatccaagttaaggaggtcacaacgtcgaacggcgagactacggtcgctaataaccttaccagcacggttcagatatttgcggactcgtcgtatgagctcccgtacgtgatggacgctggacaagagggaagtctgcctcctttccccaatgacgtcttcatggtgcctcaatatggctactgtggcattgtgactggcgaaaatcagaaccagacggacagaaatgctttctactgcctggagtattttccttcacaaatgctgagaactggcaataactttgaaatggcttacaactttgagaaggtgccgttccactcaatgtatgctcacagccagagcctggacagactgatgaatcccctcctggaccagtacctgtggcacttacagtcgaccacctctggagagactctgaatcaaggcaatgcagcaaccacatttggaaaaatcaggagtggagactttgccttttacagaaagaactggctgcctgggccttgtgttaaacagcagagattctcaaaaactgccagtcaaaattacaagattcctgccagcgggggcaacgctctgttaaagtatgacacccactataccttaaacaaccgctggagcaacatagcgcctggacctccaatggcaacagctggaccttcagatggggacttcagcaacgcccagctcatcttccctggaccatcagtcaccggaaacacaacaacctcagcaaacaatctgttgtttacatcagaaggagaaattgctgccaccaacccaagagacacggacatgtttggtcagattgctgacaataatcagaatgctacaactgctcccataaccggcaacgtgactgctatgggagtgcttcctggcatggtgtggcaaaacagagacatttactaccaagggccaatttgggccaagatcccacacgcggacggacattttcatccttcaccgctaattggcggttttggactgaaacatccgcctccccagatatttatcaaaaacacccccgtacctgccaatcctgcgacaaccttcactgcagccagagtggactctttcatcacacaatacagcaccggccaggtcgctgttcagattgaatgggaaatcgaaaaggaacgctccaaacgccggaatcctgaagtgcagtttacttcaaactatgggaaccagtcttctatgttgtgggctcccgatacaactgggaagtatacagagccgcgggttattggctctcgttatttgactaatcatttgtaactgcctagttaatcaataaaccgtgtgattcgtttcagttgaactttggtctctgcgaagggcgaattc

SEQ ID NO: 5014 - DNA, 3105 bp, Adeno-associated virus
gaattcgcccttcgcagagaccaaagttcaactgaaacgaatcacacggtttattgattaactaggcagttacaaatgattagtcaaataacgagagccaataacccgcggctctgtatacttcccagttgtatcgggagcccacaacatagaagactggttcccacagtttgaagtaaactgcacttcaggattccagcgtttggagcgttccttttcgatttcccattcaatctgaacagcgacctggccggtgctgtattgtgtgatgaaagagtccactctggctgcagtgaaggttgtcgcaggataggcaggtacgggggtgtttttgataaatatctggggaggcggatgtttcagtccaaaaccgccaattagcggtgaaggatgaaaatgtccgtccgcgtgtgggatcttggcccaaattggcccttggtagtaaatgtctctgttttgccacaccatgccaggaagcactcccatagcagtcacgttgccggttatgggagcagttgtagcattctgattattgtcagcaatctgaccaaacatgtccgtgtctcttgggttggtggcagcaatttcttcttctgatgtaaacaacagattgtttgctgaggttgttgtgtttccggtgactgatggtccagggaagatgagctgggcgttgctgaagtccccatctgaaggtccagctgttgccattggaggtccaggcgctatgttgctccagcggttgtttaaggtatagtgggtgtcatactttaacagagcgttgcccccgctggcaggaatcttgtaattttgactggcagtttttgagaatctctgctgtttaacacaaggcccaggcagccagttctttctgtaaaaggcaaagtctccactcctgatttttccaaatgtggttgctgcattgccttgattcagagtctctccagaggtggtcgactgtaagtgccacaggtactggtccaggaggggattcatcagtccgtccaggctctggctgtgagcatacattgagtggaacggcaccttctcaaagttgtaagccgtttcaaagttattgccagttctcagcatttgtgaaggaaaatactccaggcagtagaaagcatttctgtccgtctggttctgattttcgccagtcacaatgccacagtagccatattgaggcaccatgaagacgtcattggggaaaggaggcagacttccctcttgtccagcgtccatcacgtacgggagctcatacgacgagtccgcaaatatctgaaccgtgctggtaaggttattagcgaccgtagtctcgccgttcgacgttgtgacctccttaacttggatattgaagattttaacgcgcatggcttttggtcgtagtccccagttgttgttgatgagtctttgccagtcacgtggtgagaagtgacagtggaatctgttaaagtcaaagtatccccagggggtggagaatccgttgtaggtgttgctgtttgatgttgttccgagccgcaggtacaagtggttgttgtaggtgggcaagacccaggttctggtcgaggttgttgtgaccttgccctcagaccaggtggaatcgcaatgccaatcacccgaggcattacccactccatcggaaccttgtcccgcatcgacagcatttccgcccggtgctgcacgcatttcaatgtctgaagacatggcgctggtatctgatccttcagggggtccgtctccggctccagtgtcctcttcaaagttgagtctctttttggctggttgtttgccttttttgccgattcctgaggaggagtcgggctcttgtggtgactctaacggtctcttctttccaggagccgtcttagcaccttcttcaaccaggcccagaggttcgagtaccctcttcttggcctggaagactgctcgcccgaggttgcccccaaaagacgtatcttcttgcagacgctcctgaaactcggcgtcggcgtggttataccgcaggtacggattgtcacccgctttgagctgctggtcgtaggccttgtcgtgctcgagggccgctgcgtccgccgcgttgacgggctcccccttgtcgagtccgttgaagggtccgaggtactcgtagccaggaagcaccagaccccggccgtcgtcctgcttctgctggttggccttgggcttgggggctccaggtttcaggtcccaccactcgcgaatgccctcagagaggttgtcctcgagccaatctggaagataaccgtcagcagccatacctggtttaagtcatttattgctcagaaacacagtcatccaagtccacgttgacgagatcgcaggccgaacacgcaatctcgggtgcccgccccagcagatgatgaatcgcgcacagtttctgatacgtcttttttctgacgacgggttgagattctgacgcgccggggaagcactctgagcagtctctgaccccgtgcgtgaagcagacgttgaaattctgattcattctctcgcatgtcttgcagggaaacagcatctgaagcatgcccgcgtgacgagaacatttgttttggtacctgtccgcaaggtccaccggtgcttccgcgtctgacgtcgatggctccgcaactgaggggcaggcccgcttgggctcgcttatatccgcgtcactgggggcgggtcttttggtggctccgccctttctgacgtagaactcatgcgccacctcagtcacgtgatcctgagcccagcggaagaactctttgacttcctgcttggtcaccttgccaaagtcgtgctccagacggcgggtgagctcgaacttgaacatgcggtcctgcagcggctgctggtgctcgaaggtggtgctgttcccgtcgatcacggcgcacatgttggtgttggaggtgacgatcacgggcgtggggtcgatctgggccgatgacttgcacttttggtccacgcgcaccttgcttccgcccagaatggccttggcggactccacgaccttggcggtcatcttgccctcctcccaccagatcaccatcttgtcgacgcaatcgttgaagggaaagttctcattggtccagttgacgcagcaagggcgaattc

SEQ ID NO: 5015 - DNA, 3094 bp, Adeno-associated virus
gaattcgcccttgctgcgtcaactggaccaagagaactttcccttcaacgattgcgtcgacaagatggtgatctggtgggaggagggcaagatgacggccaaggtcgtggagtccgccaaagccattctgggcggaagcaaggtgcgcgtcgaccaaaagtgcaagtcctcggcccagatcgatcccacccccgtgatcgtcacctccaacaccaacatgtgcgccgtgatcgacgggaacagcaccaccttcgagcaccagcagccgttgcaggaccggatgttcaaatttgaactcacccgccgtctggaacacgactttggcaaggtgaccaagcaggaagtcaaagagttcttccgctgggctagtgatcacgtgactgaggtgacgcatgagttctacgtcagaaagggcggagccagcaaaagacccgcccccgatgacgcggatataagcgagcccaagcgggcctgtccctcagtcacggacccatcgacgtcagacgcggaaggagctccggtggactttgccgacaggtaccaaaacaaatgttctcgtcacgcgggcatgcttcagatgctgtttccctgcaaaacgtgcgagagaatgaatcagaatttcaacatttgcttcacgcacggggtcagagactgtttagaatgtttccccggcgtgtcagaatctcaaccggtcgtcagaaaaaagacgtatcggaagctgtgtgcgattcatcatctgctggggcgggcacccgagattgcttgctcggcctgcgacctggtcaacgtggacctggacgactgtgtttctgagcaataaatgacttaaaccgggtatggctgccgatggttatcttccagattggctcgaggacaacctctctgagggcattcgcgagtggtgggacctgaaacctggagccccgaaacccaaagccaaccagcaaaagcaggacgacggccggggtctggtgcttcctggctacaagtacctcggacccttcaacggactcgacaagggggagcccgtcaacgcggcggacgcagcggccctcgagcacgacaaggcctacgaccagcagctcaaagcgggtgacaatccgtacctgcggtataaccacgccgacgccgagtttcaggagcgtctgcaagaagatacgtcatttgggggcaacctcgggcgagcagtcttccaggccaagaagcgggttctcgaacctctcggtctggttgaggaaggcgctaagacggctcctggaaagaagagacccatagactctccagactcctccacgggcatcggcaaaaaaggccagcagcccgctaaaaagaagctcaattttggtcagactggcgactcagagtcagtccccgaccctcaacctcttggagaacctccagcagcgccctctagtgtgggatctggtacaatggctgcaggcggtggcgcaccaatggcagacaataacgaaggtgccgacggagtgggtaatgcctcaggaaattggcattgcgattccacatggctgggcgacagagtcatcaccaccagcaccagaacctgggccctccccacctacaacaaccacctctacaagcaaatctccagcagcagctcaggagccaccaatgacaaccactacttcggctacagcaccccctgggggtattttgactttaacagattccactgccacttctcaccacgtgactggcagcgactcatcaacaacaactggggattccggcccaagaagctgcggttcaagctcttcaacatccaggtcaaggaggtcacaacgaatgacggcgtcacgaccatcgctaataaccttaccagcacggttcaggtcttctcggactcggaataccagctgccgtacgtcctcggctctgcgcaccagggctgcctgcctccgttcccggcggacgtcttcatgattcctcagtacggctacctgactctgaacaacggcagccaatcggtgggccgttcctccttctactgcctggaatatttcccctctcaaatgctgagaacgggcaacaactttgagttcagttacagcttcgaggacgtgcctttccacagcagctacgcgcacagccagagcctagaccggctgatgaaccctctcatcgaccagtacctgtactacctggcccggacccagagcaccacgggttccaccagggaactgcaatttcatcaagctgggcccaatactatggccgagcagtcaaagaactggctgcctggaccctgctataggcaacagggactgtcaaagaacttggactttaacaacaacagcaattttgcctggactgctgccactaaatatcatctgaatggcagaaactctttgaccaatcctggcattcccatggcaaccaacaaggatgatgaggaccagttctttcccatcaacggggtactggtttttggcaagacgggagctgccaacaaaactacgctggaaaacgttctgatgaccagcgaggaggagatcaagaccactaaccctgtggctacagaagaatacggtgtggtctccagcaacctgcagccgtctacagccgggcctcaatcacagactatcaacagccagggagcactgcctggcatggtctggcagaaccgggacgtgtatctgcagggtcccatctgggccaaaattcctcacacggatggcaactttcacccgtctcctctgatgggcggttttggactcaaacacccgcctccacagatcctgatcaaaaacacacctgtacctgctaatcctccggaggtgtttactcctgccaagtttgcctccttcatcacgcagtacagcaccggacaagtcagcgtggaaatcgagtgggagctgcagaaagaaaacagcaagcgctggaacccagaaattcagtatacttccaattatgccaagtctaataatgttgaatttgctgtgaaccctgatggtgtttatactgagcctcgccccattggcactcgttacctcccccgtaatctgtaattgcttgttaatcaataaaccggttgattcgtttcagttgaactttggtctctgcgaagggcgaattc

SEQ ID NO: 5016 - DNA, 3095 bp, Adeno-associated virus
gaattcgcccttcgcagagaccaaagttcaactgaaacgaatcaaccggtttattgattaacaagcaattacagattacgggtgaggtaacgagtgccaatggggcgaggctcagtataaacaccatcagggttcacagcaaattcaacattattagacttggcataattggaagtatactgaatttctgggttccagcgcttgctgttttctttctgcagctcccactcgatttccacgctgacttgtccggtgctgtactgcgtgatgaaggaggcaaacttggcaggagtaaacacctccggaggattagcaggtacaggtgtgtttttgatcaggatctgtggaggcgggtgtttgagtccaaaaccgcccatcagaggagacgggtgaaagttgccatccgtgtgaggaattttggcccagatgggaccctgcagatacacgtcccggttctgccagaccatgccaggcagtgctccctggctgttgatagtctgtgattgaggcccggctgtagacgactgcaggttgctggagaccacaccgtattcttctgtagccacagggttagtggtcttgatctcctcctcgctggtcatcagaacgttttccagcgtagttttgttggcagctcccgtcttgccaaaaaccagtaccccgttgatgggaaagaactggtcctcatcatccttgttggttgccatgggaatgccaggattggtcaaagagtttctgccattcagatgatatttagtggcagcagtccaggcaaaattgctgttgttgttaaagtccaagttctttgacagtctctgttgcctatagcagggtccaggcagccagttctttgactgctcggccatagtattgggcccagcttgatgaaattgcagttccctggtggaacccgtggtgctctgggtccgggccaggtagtacaggtactggtcgatgagagggttcatcagccggtctaggctctggctgtgcgcgtagctgctgtggaaaggcacgtcctcgaagctgtaactgaactcaaagttgttgcccgttctcagcatttgagaggggaaatattccaggcagtagaaggaggaacggcccaccgattggctgccgttgtccagagtcaggtagccgtactgaggaatcatgaagacgtccgccgggaacggaggcaggcagccctggtgcgcagagccgaggacgtacggcagctggtattccgagtccgagaagacctgaaccgtgctggtaaggttattagcgatggtcgtgacgccgtcattcgttgtgacctccttgacctggatgttgaggagcttgaaccgcagcttcttgggccggaatccccagttgttgttgatgagtcgctgccagtcacgtggtgagaagtggcagtggaatctgttaaagtcaaaatacccccagggggtgctgtagccgaagtagtggttgtcattggtggctcctgagctgctgctggagatttgcttgtagaggtggttgttgtaggtggggagggcccaggttctggtgctggtggtgatgactctgtcgcccagccatgtggaatcgcaatgccaatttcctgaggcattacccactccgtcggcaccttcgttattgtctgccattggtgcgccaccgcctgcagccattgtaccagatcccacactagagggcgctgctggaggttctccaagaggttgagggtcggggactgactctgagtcgccagtctgaccaaaattgagcttctttttagcgggctgctggccttttttgccgatgcccgtggaggagtctggagagcctatgggtctcttctttccaggagccgtcttagcgccttcctcaaccagaccgagaggttcgagaacccgcttcttggcctggaagactgctcgcccgaggttgcccccaaatgacgtatcttcttgcagacgctcctgaaactcggcgtcggcgtggttataccgcaggtacggattgtcacccgctttgagctgctggtcgtaggccttgtcgtgctcgagggccgctgcgtccgccgcgttgacgggctcccccttgtcgagtccgttgaagggtccgaggtacttgtagccaggaagcaccagaccccggccgtcgtcctgcttttgctggttggctttgggtttcggggctccaggtttcaggtcccaccactcgcgaatgccctcagagaggttgtcctcgagccaatctggaagataaccatcggcagccatacctggtttaagtcatttattgctcagaaacacagtcgtccaggtccacgttgaccaggtcgcaggccgagcaagcaatctcgggtgcccgccccagcagatgatgaatcgcacacagcttccgatacgtcttttttctgacgaccggttgagattctgacacgccggggaaacattctaaacagtctctgaccccgtgcgtgaagcaaatgttgaaattctgattcattctctcgcacgttttgcagggaaacagcacctgaagcatgcccgcgtgacgagaacatttgttttggtacctgtcggcaaagtccaccggagctccttccgcgtctgacgtcgatgggtccgtgactgagggacgggcccgcttgggctcgcttatatccgcgtcatcgggggcgggtcttttgctggctccgccctttctgacgtagaactcatgcgtcacctcagtcacgtgatcactagcccagcggaagaactctttgacttcctgctttgtcaccttgccaaagtcgtgttccagacggcgggtgagttcaaatttgaacatccggtcctgcaacggttgctggtgctcgaaggtggtgctgttcccgtcgatcacggcgcacatgttggtgttggaggtgacgatcacgggggtgggatcgatctgggcggacgacttgcacttttggtccacgcgcaccttgctgccgccgagaatggccttggcggactccacgaccttggccgtcatcttgccctcctcccaccagatcaccatcttgtcgacgcaatcgttgaagggaaagttctcattggtccagttgacgcagcaagggcgaattc

SEQ ID NO: 5017 - DNA, 3095 bp, Adeno-associated virus
gaattcgcccttcgcagagaccaaagttcaactgaaacgaatcaaccggtttattgattaacaagcaattacagattacgggtgaggtaacgagtgccaatggggcgaggctcagtataaacaccatcagggttcacagcaaattcaacattattagacttggcataattggaagtatactgaatttctgggttccagcgcttgctgttttctttctgcagctcccactcgatttccacgctgacttgtccggtgctgtactgcgtgatgaaggaggcaaacttggcaggagtaaacacctccggaggattagcaggtacaggtgtgtttttgatcaggatctgtggaggcgggtgttcgagtccaaaaccgcccatcagaggagacgggtgaaagttgccatccgtgtgaggaattttggcccagatgggaccctgcagatacacgtcccggttctgccagaccatgccaggcagtgctccctggctgttgatagtctgtgattgaggcccggctgtagacgactgcaggttgctggagaccacaccgtattcttctgtagccacagggttagtggtcttgatctcctcctcgctggtcatcagaacgttttccagcgtagttttgttggcagctcccgtcttgccaaaaaccagtaccccgttgatgggaaagaactggtcctcatcatccttgttggttgccatgggaatgccaggattggtcaaagagtttctgccattcagatgatatttagtggcagcagtccaggcaaaattgctgttgttgttaaagtccaagttctttgacagtctctgttgcctatagcagggtccaggcagccagttctttgactgctcggccatagtattgggcccagcttgatgaaattgcagttccctggtggaacccgtggtgctctgggtccgggccaggtagtacaggtactggtcgatgagagggttcatcagccggtctaggctctggctgtgcgcgtagctgctgtggaaaggcacgtcctcgaagctgtaactgaactcaaagttgttgcccgttctcagcatttgagaggggaaatattccaggcagtagaaggaggaacggcccaccgattggctgccgttgttcagagtcaggtagccgtactgaggaatcatgaagacgtccgccgggaacggaggcaggcagccctggtgcgcagagccgaggacgtacggcagctggtattccgagtccgagaagacctgaaccgtgctggtaaggttattagcgatggtcgtgacgccgtcattcgttgtgacctccttgacctggatgttgaagagcttgaaccgcagcttcttgggccggaatccccagttgttgttgatgagtcgctgccagtcacgtggtgagaagtggcagtggaatctgttaaagtcaaaatacccccagggggtgctgtagccgaagtagtggttgtcattggtggctcctgagctgctgctggagatttgcttgtagaggtggttgttgtaggtggggagggcccaggttctggtgctggtggtgatgactctgtcgcccagccatgtggaatcgcaatgccaatttcctgaggcattacccactccgtcggcaccttcgttattgtctgccgttggtgcgccaccgcctgcagccattgtaccagatcccacactagagggcgctgctggaggttctccaagaggttgagggtcggggactgactctgagtcgccagtctgaccaaaattgagcttctttttagcgggctgctggccttttttgccgatgcccgtggaggagtctggagagtctatgggtctcttctttccaggagccgtcttagcgccttcctcaaccagaccgagaggttcgagaacccgcttcttggcctggaagactgctcgcccgaggttgcccccaaatgacgtatcttcttgcaggcgctcctgaaactcggcgtcggcgtggttataccgcaggtacggattgtcacccgctttgagctgctggtcgtaggccttgtcgtgctcgagggccgctgcgtccgccgcgttgacgggctcccccttgtcgagtccgttgaagggtccgaggtacttgtagccaggaagcaccagaccccggccgtcgtcctgcttttgctggttggctttgggtttcggggctccaggtttcaggtcccaccactcgcgaatgccctcagagaggttgtcctcgagccaatctggaagataaccatcggcagccatacctggtttaagccatttattgctcagaaacacagtcgtccaggtccacgttgaccaggtcgcaggccgagcaggcaatctcgggtgcccgccccagcagatgatgaatcgcacacagcttccgatacgtcttttttctgacgaccggttgagattctgacacgccggggaaacattctaaacagtctctgaccccgtgcgtgaagcaaatgttgaaattctgattcattctctcgcacgttttgcagggaaacagcatctgaagcatgcccgcgtggcgagaacatttgttttggtacctgtcggcaaagtccaccggagctccttccgcgtctgacgtcgatgggtccgtgactgagggacaggcccgcttgggctcgcttatatccgcgtcatcgggggcgggtcttttgctggctccgccctttctgacgtagaactcatgcgtcacctcagtcacgtgatcactagcccagcggaagaactctttgacttcctgctttgtcaccttgccaaagtcgtgttccagacggcgggtgagttcaaatttgaacatccggtcctgcaacggctgctggtgctcgaaggtggtgctgttcccgtcgatcacggcgcgcatgttggtgttggaggtgacgatcacgggggtgggatcgatctgggcggacgacttgcacttttggtccacgcgcaccttgctgccgccgagaatggccttggcggactccacgaccttggccgtcatcttgccctcctcccaccagatcaccatcttgtcgacgcaatcgttgaagggaaagttctcattggtccagttgacgcagcaagggcgaattc

SEQ ID NO: 5018 - protein, 729 aa, Adeno-associated virus; identical to SEQ ID NO: 4833

SEQ ID NO: 5019 - protein, 729 aa, Adeno-associated virus
MAADGYLPDWLEDNLSEGIREWWDLKPGAPKPKANQQKQDDGRGLVLPGYKYLGPFNGLDKGEPVNAADAAALEHDKAYDQQLKAGDNPYLRYNHADAEFQERLQEDTSFGGNLGRAVFQAKKRVLEPLGLVEEGAKTAPGKKRPIDSPDSSTGIGKKGQQPAKKKLNFGQTGDSESVPDPQPLGEPPAAPSSVGSGTMAAGGGAPTADNNEGADGVGNASGNWHCDSTWLGDRVITTSTRTWALPTYNNHLYKQISSSSSGATNDNHYFGYSTPWGYFDFNRFHCHFSPRDWQRLINNNWGFRPKKLRFKLFNIQVKEVTTNDGVTTIANNLTSTVQVFSDSEYQLPYVLGSAHQGCLPPFPADVFMIPQYGYLTLNNGSQSVGRSSFYCLEYFPSQMLRTGNNFEFSYSFEDVPFHSSYAHSQSLDRLMNPLIDQYLYYLARTQSTTGSTRELQFHQAGPNTMAEQSKNWLPGPCYRQQRLSKNLDFNNNSNFAWTAATKYHLNGRNSLTNPGIPMATNKDDEDQFFPINGVLVFGKTGAANKTTLENVLMTSEEEIKTTNPVATEEYGVVSSNLQSSTAGPQSQTINSQGALPGMVWQNRDVYLQGPIWAKIPHTDGNFHPSPLMGGFGLKHPPPQILIKNTPVPANPPEVFTPAKFASFITQYSTGQVSVEIEWELQKENSKRWNPEIQYTSNYAKSNNVEFAVNPDGVYTEPRPIGTRYLTRNL

SEQ ID NO: 5020 - protein, 729 aa, Adeno-associated virus
MAADGYLPDWLEDNLSEGIREWWDLKPGAPKPKANQQKQDDGRGLVLPGYKYLGPFNGLDKGEPVNAADAAALEHDKAYDQQLKAGDNPYLRYNHADAEFQERLQEDTSFGGNLGRAVFQAKKRVLEPLGLVEEGAKTAPGKKRPIDSPDSSTGIGKKGQQPAKKKLNFGQTGDSESVPDPQPLGEPPAAPSSVGSGTMAAGGGAPMADNNEGADGVGNASGNWHCDSTWLGDRVITTSTRTWALPTYNNHLYKQISSSSSGATNDNHYFGYSTPWGYFDFNRFHCHFSPRDWQRLINNNWGFRPKKLRFKLFNIQVKEVTTNDGVTTIANNLTSTVQVFSDSEYQLPYVLGSAHQGCLPPFPADVFMIPQYGYLTLNNGSQSVGRSSFYCLEYFPSQMLRTGNNFEFSYSFEDVPFHSSYAHSQSLDRLMNPLIDQYLYYLARTQSTTGSTRELQFHQAGPNTMAEQSKNWLPGPCYRQQRLSKNLDFNNNSNFAWTAATKYHLNGRNSLTNPGIPMATNKDDEDQFFPINGVLVFGKTGAANKTTLENVLMTSEEEIKTTNPVATEEYGVVSSNLQSSTAGPQSQTINSQGALPGMVWQNRDVYLQGPIWAKIPHTDGNFHPSPLMGGFGLKHPPPQILIKNTPVPANPPEVFTPAKFASFITQYSTGQVSVEIEWELQKENSKRWNPEIQYTSNYAKSNNVEFAVNPDGVYTEPRPIGTRYLTRNL

SEQ ID NO: 5021 - DNA, 2217 bp, Adeno-associated virus
atggctgctgacggttatcttccagattggctcgaggacaacctctctgagggcattcgcgagtggtgggacctgaaacctggagcccccaagcccaaggccaaccagcagaagcaggacgacggccggggtctggtgcttcctggctacaagtacctcggacccttcaacggactcgacaagggggagcccgtcaacgcggcggacgcagcggccctcgagcacgacaaggcctacgaccagcagctcaaagcgggtgacaatccgtacctgcggtataaccacgccgacgccgagtttcaggagcgtctacaagaagatacgtcttttgggggcaacctcgggcgagcagtcttccaggccaagaagcgggttctcgaacctctcggtctggttgaggaagctgctaagacggctcctggaaagaagagaccggtagaaccgtcacctcagcgttcccccgactcctccacgggcatcggcaagaaaggccagcggcccgctaaaaagagactgaactttggtcagactggcgactcagagtcagtccccgaccctcaaccaatcggagaaccaccagcaggcccctctggtctgggatctggtacaatggctgcaggcggtggcgctccaatggcagacaataacgaaggcgccgacggagtgggtagttcctcaggaaattggcattgcgattccacatggctgggcgacagagtcatcaccaccagcacccgaacctgggccctgcccacctacaacaaccacctctacaagcaaatatccaatgggacatcgggaggaagcaccaacgacaacacctacttcggctacagcaccccctgggggtattttgacttcaacagattccactgccacttctcaccacgtgactggcagcgactcatcaacaacaactggggattccggccaaaaagactcagcttcaagcccttcaacatccaggtcaaggaggtcacgcagaatgaaggcaccaagaccatcgccaataaccttaccagcacgattcaggtatttacggactcggaataccagctgccgtacgtcctcggctccgcgcaccagggctgcctgcctccgttcccggcggacgtcttcatgattccccagtacggctaccttacactgaacaatggaagtcaagccgtaggccgttcctccttctactgcctggaatattttccatctcaaatgctgcgaactggaaacaattttgaattcagctacaccttcgaggacgtgcctttccacagcagctacgcacacagccagagcttggaccgactgatgaatcctctcatcgaccagtacctgcactacttatccagaactcagtccacaggaggaactcaaggtacccagcaattgttattttctcaagctgggcctgcaaacatgtcggctcaggctaagaactggctacctggaccttgctaccggcagcagcgagtctctacgacactgtcgcaaaacaacaacagcaactttgcttggactggtgccaccaaatatcacctgaacggaagagactctttggtaaatcccggtgtcgccatggcaacccacaaggacgacgaggaacgcttcttcccgtcgagtggagtcctgatgtttggaaaacagggtgctggaagagacaatgtggactacagcagcgttatgctaaccagcgaagaagaaattaaaaccactaaccctgtagccacagaacaatacggtgtggtggctgacaacttgcagcaaaccaatacagggcctattgtgggaaatgtcaacagccaaggagccttacctggcatggtctggcagaaccgagacgtgtacctgcagggtcccatctgggccaagattcctcacacggacggcaacttccacccttcaccgctaatgggaggatttggactgaagcacccacctcctcagatcctgatcaagaacacgccggtacctgcggatcctccaacaacgttcagccaggcgaaattggcttccttcattacgcagtacagcaccggacaggtcagcgtggaaatcgagtgggagctgcagaaggagaacagcaaacgctggaacccagagattcagtacacttcaaactactacaaatctacaaatgtggactttgctgtcaatacagagggaacttattctgagcctcgccccattggtactcgctacctcacccgtaatctgtaa

SEQ ID NO: 5022 - protein, 738 aa, Adeno-associated virus
MAADGYLPDWLEDNLSEGIREWWDLKPGAPKPKANQQKQDDGRGLVLPGYKYLGPFNGLDKGEPVNAADAAALEHDKAYDQQLKAGDNPYLRYNHADAEFQERLQEDTSFGGNLGRAVFQAKKRVLEPLGLVEEAAKTAPGKKRPVEPSPQRSPDSSTGIGKKGQRPAKKRLNFGQTGDSESVPDPQPIGEPPAGPSGLGSGTMAAGGGAPMADNNEGADGVGSSSGNWHCDSTWLGDRVITTSTRTWALPTYNNHLYKQISNGTSGGSTNDNTYFGYSTPWGYFDFNRFHCHFSPRDWQRLINNNWGFRPKRLSFKPFNIQVKEVTQNEGTKTIANNLTSTIQVFTDSEYQLPYVLGSAHQGCLPPFPADVFMIPQYGYLTLNNGSQAVGRSSFYCLEYFPSQMLRTGNNFEFSYTFEDVPFHSSYAHSQSLDRLMNPLIDQYLHYLSRTQSTGGTQGTQQLLFSQAGPANMSAQAKNWLPGPCYRQQRVSTTLSQNNNSNFAWTGATKYHLNGRDSLVNPGVAMATHKDDEERFFPSSGVLMFGKQGAGRDNVDYSSVMLTSEEEIKTTNPVATEQYGVVADNLQQTNTGPIVGNVNSQGALPGMVWQNRDVYLQGPIWAKIPHTDGNFHPSPLMGGFGLKHPPPQILIKNTPVPADPPTTFSQAKLASFITQYSTGQVSVEIEWELQKENSKRWNPEIQYTSNYYKSTNVDFAVNTEGTYSEPRPIGTRYLTRNL

SEQ ID NO: 5023 - DNA, 2217 bp, Adeno-associated virus
atggctgctgacggttatcttccagattggctcgaggacaacctctctgagggcattcgcgagtggtgggacctgaaacctggagcccccaagcccaaggccaaccagcagaagcaggacgacggccggggtctggtgcttcctggctacaagtacctcggacccttcaacggactcgacaagggggagcccgtcaacgcggcggacgcagcggccctcgagcacgacaaggcctacgaccagcagctcaaagcgggtgacaatccgtacctgcggtataaccacgccgacgccgagtttcaggagcgtctgcaagaagatacgtcttttgggggcaacctcgggcgagcagtcttccaggccaagaagcgggttctcgaacctctcggtctggttgaggaagctgctaagacggctcctggaaagaagagaccggtagaaccgtcacctcagcgttcccccgactcctccacgggcatcggcaagaaaggccagcagcccgctaaaaagagactgaactttggtcagactggcgactcagagtcagtccccgaccctcaaccaatcggagaaccaccagcaggcccctctggtctgggatctggtacaatggctgcaggcggtggcgctccaatggcagacaataacgaaggcgccgacggagtgggtagttcctcaggaaattggcattgcgattccacatggctgggcgacagagtcatcaccaccagcacccgaacctgggccctgcccacctacaacaaccacctctacaagcaaatatccaatgggacatcgggaggaagcaccaacgacaacacctacttcggctacagcaccccctgggggtattttgacttcaacagattccactgccacttctcaccacgtgactggcagcgactcatcaacaacaactggggattccggccaaaaagactcagcttcaagctcttcaacatccaggtcaaggaggtcacgcagaatgaaggcaccaagaccatcgccaataaccttaccagcacgattcaggtatttacggactcggaataccagctgccgtacgtcctcggctccgcgcaccagggctgcctgcctccgttcccggcggacgtcttcatgattccccagtacggctaccttacactgaacaatggaagtcaagccgtaggccgttcctccttctactgcctggaatattttccatctcaaatgctgcgaactggaaacaattttgaattcagctacaccttcgaggacgtgcctttccacagcagctacgcacacagccagagcttggaccgactgatgaatcctctcatcgaccagtacctgtactacttatccagaactcagtccacaggaggaactcaaggtacccagcaattgttattttctcaagctgggcctgcaaacatgtcggctcaggctaagaactggctacctggaccttgctaccggcagcagcgagtctctacgacactgtcgcaaaacaacaacagcaactttgcttggactggtgccaccaaatatcacctgaacggaagagactctttggtaaatcccggtgtcgccatggcaacccacaaggacgacgaggaacgcttcttcccgtcgagtggagtcctgatgtttggaaaacagggtgctggaagagacaatgtggactacagcagcgttatgctaaccagcgaagaagaaattaaaaccactaaccctgtagccacagaacaatacggtgtggtggctgataacttgcagcaaaccaatacggggcctattgtgggaaatgtcaacagccaaggagccttacctggcatggtctggcagaaccgagacgtgtacctgcagggtcccatctgggccaagattcctcacacggacggcaacttccacccttcaccgctaatgggaggatttggactgaagcacccacctcctcagatcctgatcaagaacacgccggtacctgcggatcctccaacaacgttcagccaggcgaaattggcttccttcattacgcagtacagcaccggacaggtcagcgtggaaatcgagtgggagctgcagaaggagaacagcaaacgctggaacccagagattcagtacacttcaaactactacaaatctacaaatgtggactttgctgtcaatacagagggaacttattctgagcctcgccccattggtactcgttacctcacccgtaatctgtaa

SEQ ID NO: 5024 - protein, 738 aa, Adeno-associated virus; identical to SEQ ID NO: 4797

SEQ ID NO: 5025 - protein, 738 aa, Adeno-associated virus
MAADGYLPDWLEDNLSEGIREWWDLKPGAPKPKANQQKQDDGRGLVLPGYKYLGPFNGLDKGEPVNAADAAALEHDKAYDQQLKAGDNPYLRYNHADAEFQERLQEDTSFGGNLGRAVFQAKKRVLEPLGLVEEAAKTAPGKKRPVEPSPQRSPDSSTGIGKKGQQPAKKRLNFGQTGDSESVPDPQPIGEPPAGPSGLGSGTMAAGGGAPMADNNEGADGVGSSSGNWHCDSTWLGDRVITTSTRTWALPTYNNHLYKQISNGTSGGSTNDNTYFGYSTPWGYFDFNRFHCHFSPRDWQRLINNNWGFRPKRLSFKLFNIQVKEVTQDEGTKTIANNLTSTIQVFTDSEYQLPYVLGSAHQGCLPPFPADVFMIPQYGYLTLNNGSQAVGRSSFYCLEYFPSQMLRTGNNFEFSYTFEDVPFHSSYAHSQSLDRLMNPLIDQYLYYLSRTQSTGGTQGTQQLLFSQAGPANMSARAKNWLPGPCYRQQRVSTTLSQNNNSNFAWTGATKYHLNGRDSLVNPGVAMATHKDDEERFFPSSGVLMFGKQGAGRDNVDYSSVMLTSEEEIKTTNPVATEQYGVVADNLQQANTGPIVGNVNSQGALPGMVWQNRDVYLQGPIWAKIPHTDGNFHPSPLMGGFGLKHPPPQILIKNTPVPADPPTTFSQAKLASFITQYSTGQVSVEIEWELQKENSKRWNPEIQYTSNYYKSTNVDFAVNSEGTYSEPRPIGTRYLTRNL

SEQ ID NO: 5026 - DNA, 2217 bp, Adeno-associated virus
atggctgctgacggttatcttccagattggctcgaggacaacctctctgagggcattcgcgagtggtgggacctgaaacctggagcccccaagcccaaggccaaccagcagaagcaggacgacggccggggtctggtgcttcctggctacaagtacctcggacccttcaacggactcgacaagggggagcccgtcaacgcggcggacgcagcggccctcgagcacgacaaggcctacgaccagcagctcaaagcgggtgacaatccgtacctgcggtataaccacgccgacgccgagtttcaggagcgtctgcaagaagatacgtcttttgggggcaacctcgggcgagcagtcttccaggccaagaagcgggttctcgaacctctcggtctggttgaggaagctgctaagacggctcctggaaagaagagaccggtagaaccgtcacctcagcgttcccccgactcctccacgggcatcggcaagaaaggccagcagcccgctaaaaagagactgaactttggtcagactggcgactcagagtcagtccccgaccctcaaccaatcggagaaccaccagcaggcccctctggtctgggatctggtacaatggctgcaggcggtggcgctccaatggcagacaataacgaaggcgccgacggagtgggtagttcctcaggaaattggcattgcgattccacatggctgggcgacagagtcatcaccaccagcacccgaacctgggccctgcccacctacaacaaccacctctacaagcaaatatccaatgggacatcgggaggaagcaccaacgacaacacctacttcggctacagcaccccctgggggtattttgacttcaacagattccactgccacttctcaccacgtgactggcagcgactcatcaacaacaactggggattccggccaaaaagactcagcttcaagctcttcaacatccaggtcaaggaggtcacgcaggatgaaggcaccaagaccatcgccaataaccttaccagcacgattcaggtatttacggactcggaataccagctgccgtacgtcctcggctccgcgcaccagggctgcctgcctccgttcccggcggacgtcttcatgattccccagtacggctaccttacactgaacaatggaagtcaagccgtaggccgttcctccttctactgcctggaatattttccatctcaaatgctgcgaactggaaacaattttgaattcagctacaccttcgaggacgtgcctttccacagcagctacgcacacagccagagcttggaccgactgatgaatcctctcatcgaccagtacctgtactacttatccagaactcagtccacaggaggaactcaaggtacccagcaattgttattttctcaagctgggcctgcaaacatgtcggctcgggctaagaactggctacctggaccttgctaccggcagcagcgagtctctacgacactgtcgcaaaacaacaacagcaactttgcttggactggtgccaccaaatatcacctgaacggaagagactctttggtaaatcccggtgttgctatggcaacgcataaggacgacgaggaacgtttctttccatcgagcggagtcctgatgtttggaaaacagggtgctggaagagacaatgtggactatagcagcgttatgctaaccagcgaggaagaaattaaaaccactaaccctgtagccacagaacaatacggtgtggtggctgacaacttgcagcaagccaatacagggcctattgtgggaaatgtcaacagccaaggagccttacctggcatggtctggcagaaccgagacgtgtacctgcagggtcccatctgggccaaaattcctcacacggacggcaattttcacccgtctcctctgatgggcggctttggactgaagcacccacctccccagatcctgatcaagaatacgccggtacctgcggatcctccaacgacgttcagccaggcaaaattggcttccttcatcacgcagtacagcaccggccaggtcagcgtggagatcgagtgggagctgcagaaggagaacagcaagcgatggaacccagaaattcagtacacttccaactactacaaatctacaaatgtggactttgctgtcaattctgagggtacatattcagagcctcgccccattggtactcgttatctgacacgtaatctgtaa

SEQ ID NO: 5027 - DNA, 2211 bp, Adeno-associated virus
atggctgccgatggttatcttccagattggctcgaggacaacctctctgagggcattcgcgagtggtgggacttgaaacctggagccccgaaacccaaagccaaccagcaaaagcaggacgacggccggggcctggtgcttcctggctacaagtacctcggacccttcaacggactcgacaagggggagcccgtcaacgcggcggacgcagcggccctcgagcacgacaaggcctacgaccagcagctcgaagcgggtgacaatccgtacctgcggtataaccacgccgacgccgagtttcaggagcgtctgcaagaagatacgtcttttgggggcaacctcgggcgagcagtcttccaggccaagaagcgggttctcgaacctctcggtctggttgaggaaggcgctaagacggctcctggaaagaagagaccagtagagcagtcaccccaagaaccagactcctcctcgggcatcggcaagaaaggccaacagcccgccagaaaaagactcaattttggccagactggcgactcagagtcagttccagaccctcaacctctcggagaacctccagcagcgccctctggtgtgggacctaatacaatggctgcaggcggtggcgcaccaatggcagacaataacgaaggcgccgacggagtgggtagttcctcgggaaattggcattgcgattccacatggctgggcgacagagtcatcaccaccagcacccgaacctgggccctgcccacctacaacaaccacctctacaagcaaatctccaacgggacatcgggaggagccaccaacgacaacacctacttcggctacagcaccccctgggggtattttgactttaacagattccactgccacttttcaccacgtgactggcagcgactcatcaacaacaactggggattccggcccaagagactcagcttcaagctcttcaacatccaggtcaaggaggtcacgcagaatgaaggcaccaagaccatcgccaataacctcaccagcaccatccaggtgtttacggactcggagtaccagctgccgtacgttctcggctctgcccaccagggctgcctgcctccgttcccggcggacgtgttcatgattccccagtacggctacctaacactcaacaacggtagtcaggccgtgggacgctcctccttctactgcctggaatactttccttcgcagatgctgagaaccggcaacaacttccagtttacttacaccttcgaggacgtgcctttccacagcagctacgcccacagccagagcttggaccggctgatgaatcctctgattgaccagtacctgtactacttgtctcggactcaaacaacaggaggcacggcaaatacgcagactctgggcttcagccaaggtgggcctaatacaatggccaatcaggcaaagaactggctgccaggaccctgttaccgccaacaacgcgtctcaacgacaaccgggcaaaacaacaatagcaactttgcctggactgctgggaccaaataccatctgaatggaagaaattcattggctaatcctggcatcgctatggcaacacacaaagacgacgaggagcgttttttcccagtaacgggatcctgtttttggcaacaaaatgctgccagagacaatgcggattacagcgatgtcatgctcaccagcgaggaagaaatcaaaaccactaaccctgtggctacagaggaatacggtatcgtggcagataacttgcagcagcaaaacacggctcctcaaattggaactgtcaacagccagggggccttacccggtatggtctggcagaaccgggacgtgtacctgcagggtcccatctgggccaagattcctcacacggacggcaacttccacccgtctccgctgatgggcggctttggcctgaaacatcctccgcctcagatcctgatcaagaacacgcctgtacctgcggatcctccgaccaccttcaaccagtcaaagctgaactctttcatcacgcaatacagcaccggacaggtcagcgtggaaattgaatgggagctacagaaggaaaacagcaagcgctggaaccccgagatccagtacacctccaactactacaaatctacaagtgtggactttgctgttaatacagaaggcgtgtactctgaaccccgccccattggcacccgttacctcacccgtaatctgtaa

SEQ ID NO: 5028 - protein, 736 aa, Adeno-associated virus
MAADGYLPDWLEDNLSEGIREWWDLKPGAPKPKANQQKQDDGRGLVLPGYKYLGPFNGLDKGEPVNAADAAALEHDKAYDQQLEAGDNPYLRYNHADAEFQERLQEDTSFGGNLGRAVFQAKKRVLEPLGLVEEGAKTAPGKKRPVEQSPQEPDSSSGIGKKGQQPARKRLNFGQTGDSESVPDPQPLGEPPAAPSGVGPNTMAAGGGAPMADNNEGADGVGSSSGNWHCDSTWLGDRVITTSTRTWALPTYNNHLYKQISNGTSGGATNDNTYFGYSTPWGYFDFNRFHCHFSPRDWQRLINNNWGFRPKRLSFKLFNIQVKEVTQNEGTKTIANNLTSTIQVFTDSEYQLPYVLGSAHQGCLPPFPADVFMIPQYGYLTLNNGSQAVGRSSFYCLEYFPSQMLRTGNNFQFTYTFEDVPFHSSYAHSQSLDRLMNPLIDQYLYYLSRTQTTGGTANTQTLGFSQGGPNTMANQAKNWLPGPCYRQQRVSTTTGQNNNSNFAWTAGTKYHLNGRNSLANPGIAMATHKDDEERFFPVTGSCFWQQNAARDNADYSDVMLTSEEEIKTTNPVATEEYGIVADNLQQQNTAPQIGTVNSQGALPGMVWQNRDVYLQGPIWAKIPHTDGNFHPSPLMGGFGLKHPPPQILIKNTPVPADPPTTFNQSKLNSFITQYSTGQVSVEIEWELQKENSKRWNPEIQYTSNYYKSTSVDFAVNTEGVYSEPRPIGTRYLTRNL

SEQ ID NO: 5029 - DNA, 2214 bp, Adeno-associated virus
atggctgctgacggttatcttccagattggctcgaggacaacctctctgagggcattcgcgagtggtgggacctgaaacctggagcccccaagcccaaggccaaccagcagaagcaggacgacggccggggtctggtgcttcctggctacaagtacctcggacccttcaacggactcgacaagggggagcccgtcagcgcggcggacgcagcggccctcgagcacgacaaggcctgcgaccagcggctcaaagcgggtgacaatccgtacctgcggtataaccacgccgacgccgagtttcaggagcgtctgcaagaagatacgtcttttgggggcaacctcgggcgagcagtcttccaggccaagaagcgggttctcgaacctctcggtctggttgaggaagctgctaagacggctcctggaaagaagggaccggtagaaccgtcacctcagcgttcccccgactcctccacgggcatcggcaagaaaggccagcagcccgctagaaagagactgaactttgggcagactggcgactcagagtcagtccccgaccctcaaccaatcggagaaccaccagcaggcccctctggtctgggatctggtacaatggctgcaggcggtggcgcaccaatggctgacaataacgagggcgccgacggagtgggtaatgcctcaggaaattggcattgcgattccacatggctgggcgacagagtcatcaccaccagcacccgaacctgggctttgcccacctacaacaatcacctctacaagcaaatctccagtcagtcagcaggtagcaccaacgacaacgtctacttcggctacagcaccccctgggggtattttgacttcaacagattccactgtcacttctcaccacgtgactggcagcggctcatcaacaacaactggggattccggcccaagaagctcaacttcaagctgttcaacatccaggtcaaggaggtcacaacgaatgacggcgtcacgaccatcgccaataaccttaccagcacggttcaggtcttttcggactcggaataccagctgccctacgtcctcggctccgcacaccagggctgcctgcctccgttcccggcggacgtcttcatgattccccagtacggctacctgactctgaacaatggcagccaatcggtgggtcgttcctctttctactgcctggaatatttcccttctcaaatgctgagaacgggcaacaacttcaccttcagctacaccttcgaggacgttcccttccacagcagctacgcacacagccagagcctggaccggctgatgaatcctcttatcgaccagtacctgtattacctggccagaacacagagcaacgcaggaggcacagctggcaatcgggaactgcagttttatcagggcgggcctaccaccatggccgaacaagccaaaaactggctgcctggaccttgcttccggcaacaaagagtctccaagacgctggatcaaaacaacaacagcaactttgcttggactggtgccaccaaataccatctaaatggaagaaattcattggttaatcccggtgtcgccatggcaacccacaaggacgacgaggaacgcttcttcccttcgagcggagtcctgatttttggaaaaactggagcagctaataagactacactggaaaatgtgttaatgacaaatgaagaggaaattcgtcctaccaacccggtagccaccgaggaatacgggactgttagcagcaacctgcaggcggctaacactgcagcccagacacaagttgtcaacaaccagggagccttacctggtatggtctggcagaaccgggacgtgtacctgcagggtcccatctgggccaagattcctcacacggacggcaactttcacccgtctccgctgatgggcggctttggactgaagcatccgcctcctcagatcctgatcaaaaacactcctgttcctgctaatcccccggaggtgtttacgcctgccaagtttgcttctttcatcacacagtacagcaccggccaggtcagcgtggagatcgagtgggagctgcagaaggagaacagcaagcgctggaacccagagattcagtatacctccaattttgacgaacagactggtgtggactttgccgttgacagccagggtgtttattctgagcctcgccccattggtactcgttacctcacccgtaatctgtaa

SEQ ID NO: 5030 - protein, 737 aa, Adeno-associated virus
MAADGYLPDWLEDNLSEGIREWWDLKPGAPKPKANQQKQDDGRGLVLPGYKYLGPFNGLDKGEPVSAADAAALEHDKACDQRLKAGDNPYLRYNHADAEFQERLQEDTSFGGNLGRAVFQAKKRVLEPLGLVEEAAKTAPGKKGPVEPSPQRSPDSSTGIGKKGQQPARKRLNFGQTGDSESVPDPQPIGEPPAGPSGLGSGTMAAGGGAPMADNNEGADGVGNASGNWHCDSTWLGDRVITTSTRTWALPTYNNHLYKQISSQSAGSTNDNVYFGYSTPWGYFDFNRFHCHFSPRDWQRLINNNWGFRPKKLNFKLFNIQVKEVTTNDGVTTIANNLTSTVQVFSDSEYQLPYVLGSAHQGCLPPFPADVFMIPQYGYLTLNNGSQSVGRSSFYCLEYFPSQMLRTGNNFTFSYTFEDVPFHSSYAHSQSLDRLMNPLIDQYLYYLARTQSNAGGTAGNRELQFYQGGPTTMAEQAKNWLPGPCFRQQRVSKTLDQNNNSNFAWTGATKYHLNGRNSLVNPGVAMATHKDDEERFFPSSGVLIFGKTGAANKTTLENVLMTNEEEIRPTNPVATEEYGTVSSNLQAANTAAQTQVVNNQGALPGMVWQNRDVYLQGPIWAKIPHTDGNFHPSPLMGGFGLKHPPPQILIKNTPVPANPPEVFTPAKFASFITQYSTGQVSVEIEWELQKENSKRWNPEIQYTSNFDEQTGVDFAVDSQGVYSEPRPIGTRYLTRNL

SEQ ID NO: 5031 - DNA, 2214 bp, Adeno-associated virus
atggctgccgatggttatcttccagattggctcgaggacaacctctctgagggcattcgcgagtggtgggacctgaaacctggagccccgaaacccaaagccaaccagcaaaagcaggacgacggccggggtctggtgcttcctggctacaagtacctcggacccttcaacggactcgacaagggggagcccgtcaacgcggcggacgcagcggccctcgagcacgacaaggcctacgaccagcagctcaaagcgggtgacaatccgtacctgcggtataaccacgccgacgccgagtttcaggagcgtctgcaagaagatacgtcttttgggggcaacctcgggcgagcagtcttccaggccaagaagcgggttctcgaacctctcggtctggttgaggaagctgctaagacggctcctggaaagaagagaccggtagaaccgtcacctcagcgttcccccgactcctccacgggcatcggcaagaaaggccagcagcccgctagaaagagactgaactttgggcagactggcgactcagagtcagtccccgaccctcaaccaatcggagaaccaccagcaggcccctctggtctgggatctggtacaatggctgcaggcggtggcgctccaatggcagacaataacgaaggcgccgacggagtgggtaatgcctcaggaaattggcattgcgattccacatggctgggcgacagagtcatcaccaccagcacccgaacctgggctttgcccacctacaacaaccacctctacaagcaaatctccagtcagtcagcaggtagcaccaacgacaacgtctacttcggctacagcaccccctgggggtattttgacttcaacagattccactgtcacttctcaccacgtgactggcagcggctcatcaacaacaactggggattccggcccaagaagctcaacttcaagctgttcaacatccaggtcaaggaggtcacaacgaatgacggcgtcacgaccatcgccaataaccttaccagcacggttcaggtcttttcggactcggaataccagctgccctacgtcctcggctccgcacaccagggctgcctgcctccgttcccggcggacgtcttcatgattcctcagtacggctacctgactctcaacaacggtagtcaggccgtgggacgttcctccttctactgcctggagtacttcccctctcagatgctgagaacgggcaacaacttttccttcagctacactttcgaggacgtgcctttccacagcagctacgcgcacagccagagtttggacaggctgatgaatcctctcatcgaccagtacctgtactacctgtcaagaacccagtctacgggaggcacagcgggaacccagcagttgctgttttctcaggccgggcctagcaacatgtcgactcaggccagaaactggctgcctggaccctgctacagacagcagcgcgtctccacgacactgtcgcaaaacaacaacagcaactttgcctggactggtgccaccaagtatcatctgaacggcagagactctctggtgaatccgggcgtcgccatggcaaccaacaaggacgacgaggaccgcttcttcccatccagcggcatcctcatgtttggcaagcagggagctggaaaagacaacgtggactatagcaacgtgatgctaaccagcgaggaagaaatcaagaccaccaaccccgtggccacagaacagtatggcgtggtggctgataacctacagcagcaaaacaccgctcctattgtgggggccgtcaacagccagggagccttacctggcatggtctggcagaaccgggacgtgtacctgcagggtcctatttgggccaagattcctcacacagatggcaactttcacccgtctcctttaatgggcggctttggacttaaacatccgcctcctcagatccttatcaaaaacactcctgttcctgcggatcctccaacagcgttcaaccaggccaagctgaattctttcatcacgcagtacagcaccggacaagtcagcgtggagatcgagtgggagctgcagaaggagaacagcaagcgctggaacccagagattcagtatacttccaactactacaaatctacaaatgtggactttgctgttaatactgagggtgcttactctgagcctcgccccattggcactcgttacctcacccgtaatctgtaa

SEQ ID NO: 5032 - protein, 737 aa, Adeno-associated virus
MAADGYLPDWLEDNLSEGIREWWDLKPGAPKPKANQQKQDDGRGLVLPGYKYLGPFNGLDKGEPVNAADAAALEHDKAYDQQLKAGDNPYLRYNHADAEFQERLQEDTSFGGNLGRAVFQAKKRVLEPLGLVEEAAKTAPGKKRPVEPSPQRSPDSSTGIGKKGQQPARKRLNFGQTGDSESVPDPQPIGEPPAGPSGLGSGTMAAGGGAPMADNNEGADGVGNASGNWHCDSTWLGDRVITTSTRTWALPTYNNHLYKQISSQSAGSTNDNVYFGYSTPWGYFDFNRFHCHFSPRDWQRLINNNWGFRPKKLNFKLFNIQVKEVTTNDGVTTIANNLTSTVQVFSDSEYQLPYVLGSAHQGCLPPFPADVFMIPQYGYLTLNNGSQAVGRSSFYCLEYFPSQMLRTGNNFSFSYTFEDVPFHSSYAHSQSLDRLMNPLIDQYLYYLSRTQSTGGTAGTQQLLFSQAGPSNMSTQARNWLPGPCYRQQRVSTTLSQNNNSNFAWTGATKYHLNGRDSLVNPGVAMATNKDDEDRFFPSSGILMFGKQGAGKDNVDYSNVMLTSEEEIKTTNPVATEQYGVVADNLQQQNTAPIVGAVNSQGALPGMVWQNRDVYLQGPIWAKIPHTDGNFHPSPLMGGFGLKHPPPQILIKNTPVPADPPTAFNQAKLNSFITQYSTGQVSVEIEWELQKENSKRWNPEIQYTSNYYKSTNVDFAVNTEGAYSEPRPIGTRYLTRNL

SEQ ID NO: 5033 - DNA, 2217 bp, Adeno-associated virus
atggctgccgatggttatcttccagattggctcgaggacaacctctctgagggcattcgcgagtggtgggacctgaaacctggagccccgaaacccaaagccaaccagcaaaagcaggacgacggccggggtctggtgcttcctggctacaagtacctcggacccttcaacggactcgacaagggggagcccgtcaacgcggcggacgcagcggccctcgagcacgacaaggcctacgaccagcagctcaaagcgggtgacaatccgtacctgcggtataatcacgccgacgccgagtttcaggagcgtctgcaagaagatacgtcttttgggggcaacctcgggcgagcagtcttccaggccaagaagcgggttctcgaacctctcggtctggttgaggaaggcgctaagacggctcctggaaagaagagaccggtagagccgtcaccacagcgttcccccgactcctccacgggcatcggcaagaaaggccagcagcccgccagaaagagactcaatttcggtcagactggcgactcagagtcagtccccgaccctcaacctatcggagaacctccagcagcgccctctagtgtgggatctggtacaatggctgcaggcggtggcgcaccaatggcagacaataacgaaggtgccgacggagtgggtagttcctcgggaaattggcattgcgattccacatggctgggcgacagagtcatcaccaccagcacccgaacctgggccctgcccacctacaacaaccacctctacaagcaaatctccaacgggacctcgggaggcagcaccaacgacaacacctactttggctacagcaccccctgggggtattttgactttaacagattccactgccacttctcaccacgtgactggcagcgactcatcaacaacaactggggattccggcccaagagactcagcttcaagctcttcaacatccaggtcaaagaggtcacgcagaatgaaggcaccaagaccatcgccaataacctcaccagcaccatccaggtgtttacggactcggaataccagctgccgtacgtcctcggctctgcccaccagggctgcctgcctccgttcccggcggacgtcttcatgattcctcagtacggctacctgactctcaacaacggtagtcaggccgtgggacgttcctccttctactgcctggagtacttcccctctcagatgctgagaacgggcaacaacttttccttcagctacactttcgaggacgtgcctttccacagcagctacgcgcacagccagagtttggacaggctgatgaatcctctcatcgaccagtacctgtactacctgtcaagaacccagtctacgggaggcacagcgggaacccagcagttgctgttttctcaggccgggcctagcaacatgtcggctcaggccagaaactggctgcctggaccctgctacagacagcagcgcgtctccacgacactgtcgcaaaacaacaacagcaactttgcctggactggtgccaccaagtatcatctgaacggcagagactctctggtgaatccgggcgtcgccatggcaaccaacaaggacgacgaggaccgcttcttcccatccagcggcatcctcatgtttggcaagcagggagctggaaaagacaacgtggactatagcaacgtgatgctaaccagcgaggaagaaatcaaggccaccaaccccgtggccacagaacagtatggcgtggtggctgataacctacagcagcaaaacaccgctcctattgtgggggccgtcaacagccagggagccttacctggcatggtctggcagaaccgggacgtgtacctgcagggtcctatttgggccaagattcctcacacagatggcaactttcacccgtctcctttaatgggcggctttggacttaaacatccgcctcctcagatcctcatcaaaaacactcctgttcctgcggatcctccaacagcgttcaaccaggccaagctgaattctttcatcacgcagtacagcaccggacaagtcagcgtggagatcgagtgggagctgcagaaggagaacagcaagcgctggaacccagagattcagtatacttccaactactacaaatctacaaatgtggactttgctgttaatactgagggtgtttactctgagcctcgccccattggcactcgttacctcacccgtaatctgtaa

SEQ ID NO: 5034 - protein, 738 aa, Adeno-associated virus
MAADGYLPDWLEDNLSEGIREWWDLKPGAPKPKANQQKQDDGRGLVLPGYKYLGPFNGLDKGEPVNAADAAALEHDKAYDQQLKAGDNPYLRYNHADAEFQERLQEDTSFGGNLGRAVFQAKKRVLEPLGLVEEGAKTAPGKKRPVEPSPQRSPDSSTGIGKKGQQPARKRLNFGQTGDSESVPDPQPIGEPPAAPSSVGSGTMAAGGGAPMADNNEGADGVGSSSGNWHCDSTWLGDRVITTSTRTWALPTYNNHLYKQISNGTSGGSTNDNTYFGYSTPWGYFDFNRFHCHFSPRDWQRLINNNWGFRPKRLSFKLFNIQVKEVTQNEGTKTIANNLTSTIQVFTDSEYQLPYVLGSAHQGCLPPFPADVFMIPQYGYLTLNNGSQAVGRSSFYCLEYFPSQMLRTGNNFSFSYTFEDVPFHSSYAHSQSLDRLMNPLIDQYLYYLSRTQSTGGTAGTQQLLFSQAGPSNMSAQARNWLPGPCYRQQRVSTTLSQNNNSNFAWTGATKYHLNGRDSLVNPGVAMATNKDDEDRFFPSSGILMFGKQGAGKDNVDYSNVMLTSEEEIKATNPVATEQYGVVADNLQQQNTAPIVGAVNSQGALPGMVWQNRDVYLQGPIWAKIPHTDGNFHPSPLMGGFGLKHPPPQILIKNTPVPADPPTAFNQAKLNSFITQYSTGQVSVEIEWELQKENSKRWNPEIQYTSNYYKSTNVDFAVNTEGVYSEPRPIGTRYLTRNL

SEQ ID NO: 5035 - DNA, 2217 bp, Adeno-associated virus
atggctgccgatggttatcttccagattggctcgaggacaacctctctgagggcattcgcgagtggtgggacctgaaacctggagccccgaaacccaaagccaaccagcaaaagcaggacgacggccggggtctggtgcttcctggctacaagcacctcggacccttcaacggactcgacaagggggagcccgtcaacgcggcggacgcagcggccctcgagcacgacaaggcctacgaccagcagctcaaagcgggtgacaatccgtacctgcggtataatcacgctgacgccgagtttcaggagcgtctgcaagaagatacgtcttttgggggcaacctcgggcgagcagtcttccaggccaagaagcgggttctcgaacctctcggtctggttgaggaaggcgctaagacggctcctggaaagaagagaccggtagagccgtcaccacagcgttcccccgactcctccacgggcatcggcaagaaaggccagcagcccgccagaaagagactcaatttcggtcagactggcgactcagagtcagtccccgaccctcaacctatcggagaacctccagcagcgccctctagtgtgggatctggtacaatggctgcaggcggtggcgcaccaatggcagacaataacgaaggtgccgacggagtgggtagttcctcgggaaattggcattgcgattccacatggctgggcgacagagtcatcaccaccagcacccgaacctgggccctgcccacctacaacaaccacctctacaagcaaatctccaacgggacctcgggaggcagcaccaacgacaacacctactttggctacagcaccccctgggggtattttgactttaacagattccactgccacttctcaccacgtgactggcagcgactcatcaacaacaactggggattccggcccaagagactcagcttcaagctcttcaacatccaggtcaaagaggtcacgcagaatgaaggcaccaagaccatcgccaataaccttaccagcacggttcaggtcttttcggactcggaataccagctgccctacgtcctcggctccgcacaccagggctgcctgcctccgttcccggcggacgtcttcatgattccccagtacggctacctgactctgaacaatggcagccaatcggtgggtcgttcctctttctactgcctggaatatttcccttctcaaatgctgagaacgggcaacaacttcaccttcagctacaccttcgaggacgttcccttccacagcagctacgcacacagccagagcctggaccggctgatgaatcctcttatcgaccagtacctgtattacctggccagaacacagagcaacgcaggaggcacagctggcaatcgggaactgcagttttatcagggcgggcctaccaccatggccgaacaagccaaaaactggctgcctggaccttgcttccggcaacaaagagtctccaagacgctggatcaaaacaacaacagcaactttgcttggactggtgccaccaaataccatctaaatggaagaaattcattggttaatcccggtgtcgccatggcaacccacaaggacgacgaggaacgcttcttcccttcgagcggagtcctgatttttggaaaaactggagcagctaataagactacactggaaaatgtgttaatgacaaatgaagaggaaattcgtcctaccaacccggtagccaccgaggaatacgggactgttagcagcaacctgcaggcggctaacactgcagcccagacacaagttgtcaacaaccagggagccttacctggtatggtctggcagaaccgggacgtgtacctgcagggtcccatctgggccaagattcctcacacggacggcaactttcacccgtctccgctgatgggcggctttggactgaagcatccgcctcctcagatcctgatcaaaaacactcctgttcctgctaatcccccggaggtgtttacgcctgccaagtttgcttctttcatcacacagtacagcaccggccaggtcagcgtggagatcgagtgggagctgcagaaggagaacagcaagcgctggaacccagagattcagtatacctccaattttgacaaacagactggtgtggactttgccgttgacagccagggtgtttattctgagcctcgccccattggtactcgttacctcacccgtaatctgtaa

SEQ ID NO: 5036 - protein, 738 aa, Adeno-associated virus
MAADGYLPDWLEDNLSEGIREWWDLKPGAPKPKANQQKQDDGRGLVLPGYKHLGPFNGLDKGEPVNAADAAALEHDKAYDQQLKAGDNPYLRYNHADAEFQERLQEDTSFGGNLGRAVFQAKKRVLEPLGLVEEGAKTAPGKKRPVEPSPQRSPDSSTGIGKKGQQPARKRLNFGQTGDSESVPDPQPIGEPPAAPSSVGSGTMAAGGGAPMADNNEGADGVGSSSGNWHCDSTWLGDRVITTSTRTWALPTYNNHLYKQISNGTSGGSTNDNTYFGYSTPWGYFDFNRFHCHFSPRDWQRLINNNWGFRPKRLSFKLFNIQVKEVTQNEGTKTIANNLTSTVQVFSDSEYQLPYVLGSAHQGCLPPFPADVFMIPQYGYLTLNNGSQSVGRSSFYCLEYFPSQMLRTGNNFTFSYTFEDVPFHSSYAHSQSLDRLMNPLIDQYLYYLARTQSNAGGTAGNRELQFYQGGPTTMAEQAKNWLPGPCFRQQRVSKTLDQNNNSNFAWTGATKYHLNGRNSLVNPGVAMATHKDDEERFFPSSGVLIFGKTGAANKTTLENVLMTNEEEIRPTNPVATEEYGTVSSNLQAANTAAQTQVVNNQGALPGMVWQNRDVYLQGPIWAKIPHTDGNFHPSPLMGGFGLKHPPPQILIKNTPVPANPPEVFTPAKFASFITQYSTGQVSVEIEWELQKENSKRWNPEIQYTSNFDKQTGVDFAVDSQGVYSEPRPIGTRYLTRNL

SEQ ID NO: 5037 - protein, 737 aa, Adeno-associated virus
MAADGYLPDWLEDNLSEGIREWWDLKPGAPKPKANQQKQDDGRGLVLPGYKYLGPFNGLDKGEPVNAADAAALEHDKAYDQQLKAGDNPYLRYNHADAEFQERLQEDTSFGGNLGRAVFQAKKRVLEPLGLVEEAAKTAPGKKRPVEPSPQRSPDSSTGIGKKGQQPARKRLNFGQTGDSESVPDPQPIGEPPAGPSGLGSGTMAAGGGAPMADNNKGADGVGNASGNWHCDSTWLGDRVITTSTRTWALPTYNNHLYKQISSQSAGSTNDNVYFGYSTPWGYFDFNRFHCHFSPRDWQRLINSNWGFRPKKLNFKLFNIQVKEVTTNDGVTTIANNLTSTVQVFSDSEYQLPYVLGSAHQGCLPPFPADVFMIPQYGYLTLNNGSQSVGRSSFYCLEYFPSQMLRTGNNFTFSYTFEDVPFHSSYAHSQSLDRLMNPLIDQYLYYLARTQSNAGGTAGNRELQFYQGGPTTMAEQAKNWLPGPCFRQQRVSKTLDQNNNSNFAWTGATKYHLNGRNSLVNPGVAMATHKDDEERFFPSSGVLIFGKTGAANKTTLENVLMTNEEEIRPTNPVATEEYGTVSSNLQAANTAAQTQVVNNQGALPGMVWQNRDVYLQGPIWAKIPHTDGNFHPSPLMGGFGLKHPPPQILIKNTPVPANPPEVFTPAKFASFITQYSTGQVSVEIEWELQKENSKRWNPEIQYTSNFDKQTGVDFAVDSQGVYSEPRPIGTRYLTRNL

SEQ ID NO: 5038 - DNA, 2214 bp, Adeno-associated virus
atggctgctgacggttatcttccagattggctcgaggacaacctctctgagggcattcgcgagtggtgggacctgaaacctggagcccccaagcccaaggccaaccagcagaagcaggacgacggccggggtctggtgcttcctggctacaagtacctcggacccttcaacggactcgacaagggggagcccgtcaacgcggcggacgcagcggccctcgagcacgacaaggcctacgaccagcagctcaaagcgggtgacaatccgtacctgcggtataaccacgccgacgccgagtttcaggagcgtctgcaagaagatacgtcttttgggggcaacctcgggcgagcagtcttccaggccaagaagcgggttctcgaacctctcggtctggttgaggaagctgctaagacggctcctggaaagaagagaccggtagaaccgtcacctcagcgttcccccgactcctccacgggcatcggcaagaaaggccagcagcccgctagaaagagactgaactttgggcagactggcgactcagagtcagtccccgaccctcaaccaatcggagaaccaccagcaggcccctctggtctgggatctggtacaatggctgcaggcggtggcgcaccaatggctgacaataacaagggcgccgacggagtgggtaatgcctcaggaaattggcattgcgattccacatggctgggcgacagagtcatcaccaccagcacccgaacctgggctttgcccacctacaacaaccacctctacaagcaaatctccagtcagtcagcaggtagcaccaacgacaacgtctacttcggctacagcaccccctgggggtattttgacttcaacagattccactgtcacttctcaccacgtgactggcagcggctcatcaacagcaactggggattccggcccaagaagctcaacttcaagctgttcaacatccaggtcaaggaggtcacaacgaatgacggcgtcacgaccatcgccaataaccttaccagcacggttcaggtcttttcggactcggaataccagctgccctacgtcctcggctccgcacaccagggctgcctgcctccgttcccggcggacgtcttcatgattccccagtacggctacctgactctgaacaatggcagccaatcggtgggtcgttcctctttctactgcctggaatatttcccttctcaaatgctgagaacgggcaacaacttcaccttcagctacaccttcgaggacgttcccttccacagcagctacgcacacagccagagcctggaccggctgatgaatcctcttatcgaccagtacctgtattacctggccagaacacagagcaacgcaggaggcacagctggcaatcgggaactgcagttttatcagggcgggcctaccaccatggccgaacaagccaaaaactggctgcctggaccttgcttccggcaacaaagagtctccaagacgctggatcaaaacaacaacagcaactttgcttggactggtgccaccaaataccatctaaatggaagaaattcattggttaatcccggtgtcgccatggcaacccacaaggacgacgaggaacgcttcttcccttcgagcggagtcctgatttttggaaaaactggagcagctaataagactacactggaaaatgtgttaatgacaaatgaagaggaaattcgtcctaccaacccggtagccaccgaggaatacgggactgttagcagcaacctgcaggcggctaacactgcagcccagacacaagttgtcaacaaccagggagccttacctggtatggtctggcagaaccgggacgtgtacctgcagggtcccatctgggccaagattcctcacacggacggcaactttcacccgtctccgctgatgggcggctttggactgaagcatccgcctcctcagatcctgatcaaaaacactcctgttcctgctaatcccccggaggtgtttacgcctgccaagtttgcttctttcatcacacagtacagcaccggccaggtcagcgtggagatcgagtgggagctgcagaaggagaacagcaagcgctggaacccagagattcagtatacctccaattttgacaaacagactggtgtggactttgccgttgacagccagggtgtttattctgagcctcgccccattggtactcgttacctcacccgtaatctgtaa

SEQ ID NO: 5039 - protein, 737 aa, Adeno-associated virus
MAADGYLPDWLEDNLSEGIREWWDLKPGAPKPKANQQKQDDGRGLVLPGYKYLGPFNGLDKGEPVNAADAAALEHDKAYDQQLKAGDNPYLRYNHADAEFQERLQEDTSFGGNLGRAVFQAKKRVLEPLGLVEEAAKTAPGKKRPVEPSPQRSPDSSTGIGKKGQQPARKRLNFGQTGDSESVPDPQPIGEPPAGPSGLGSGTMAAGGGAPMADNNEGADGVGNASGNWHCDSTWLGDRVITTSTRTWALPTYNNHLYKQISSQSAGSTNDNVYFGYSTPWGYFDFNRFHCHFSPRDWQRLINSNWGFRPKKLNFKLFNIQVKEVTTNDGVTTIANNLTSTVQVFSDSEYQLPYVLGSAHQGCLPPFPADVFMIPQYGYLTLNNGSQSVGRSSFYCLEYFPSQMLRTGNNFTFSYTFEDVPFHSSYAHSQSLDRLMNPLIDQYLYYLARTQSNAGGTAGNRELQFYQGGPTTMAEQAKNWLPGPCFRQQRVSKTLDQNNNSNFAWTGATKYHLNGRNSLVNPGVAMATHKDDEERFFPSSGVLIFGKTGAANKTTLENVLMTNEEEIRPTNPVATEEYGTVSSNLQAANTAAQTQVVNNQGALPGMVWQNRDVYLQGPIWAKIPHTDGNFHPSPLMGGFGLKHPPPQILIKNTPVPANPPEVFTPAKFASFITQYSTGQVSVEIEWELQKENSKRWNPEIQYTSNFDKQTGVDFAVDSQGVYSEPRPIGTRYLTRNL

SEQ ID NO: 5040 - protein, 737 aa, Adeno-associated virus
MAADGYLPDWLEDNLSEGIREWWDLKPGAPKPKANQQKQDDGRGLVLPGYKYLGPFNGLDKGEPVNAADAAALEHDKAYDQQLKAGDNPYLRYNHADAEFQERLQEDTSFGGNLGRAVFQAKKRVLEPLGLVEEAAKTAPGKKRPVEPSPQRSPDSSTGIGKKGQQPARKRLNFGQTGDSESVPDPQPIGEPPAGPSGLGSGTMAAGGGAPMADNNEGADGVGNASGNWHCDSTWLGDRVITTSTRTWALPTYNNHLYKQISSQSAGSTNDNVYFGYSTPWGYFDFNRFHCHFSPRDWQRLINNNWGFRPKKLNFKLFNIQVKEVTTNDGVTTIANNLTSTVQVFSDSEYQLPYVLGSAHQGCLPPFPADVFMIPQYGYLTLNNGSQSVGRSSFYCLEYFPSQMLRTGNNFTFSYTFEDVPFHSSYAHSQSLDRLMNPLIDQYLYYLARTQSNAGGTAGNRELQFYQGGPTTMAEQAKNWLPGPCFRQQRVSKTLDQNNNSNFAWTGATKYHLNGRNSLVNPGVAMATHKDDEERFFPSSGVLIFGKTGAANKTTLENVLMTNEEEIRPTNPVATEEYGTVSSNLQAANTAAQTQVVNNQGALPGMVWQNRDVYLQGPIWAKIPHTDGNFHPSPLMGGFGLKHPPPQILIKNTPVPANPPEVFTPAKFASFITQYSTGQVSVEIEWELQKENSKRWNPEIQYTSNFDKQTGVDFAVDSQGVYSEPRPIGTRYLTRNL

SEQ ID NO: 5041 - protein, 737 aa, Adeno-associated virus
MAADGYLPDWLEDNLSEGIREWWDLKPGAPKPKANQQKQDDGRGLVLPGYKYLGPFNGLDKGEPVNAADAAALEHDKAYDQQLKAGDNPYLRYNHADAEFQERLQEDTSFGGNLGRAVFQAKKRVLEPLGLVEEAAKTAPGKKRPVEPSPQRSPDSSTGIGKKGQQPARKRLNFGQTGDSESVPDPQPIGEPPAGPSGLGSGTMAAGGGAPMADNNKGADGVGNASGNWHCDSTWLGDRVITTSTRTWALPTYNNHLYKQISSQSAGSTNDNVYFGYSTPWGYFDFNRFHCHFSPRDWQRLINNNWGFRPKKLNFKLFNIQVKEVTTNDGVTTIANNLTSTVQVFSDSEYQLPYVLGSAHQGCLPPFPADVFMIPQYGYLTLNNGSQSVGRSSFYCLEYFPSQMLRTGNNFTFSYTFEDVPFHSSYAHSQSLDRLMNPLIDQYLYYLARTQSNAGGTAGNRELQFYQGGPTTMAEQAKNWLPGPCFRQQRVSKTLDQNNNSNFAWTGATKYHLNGRNSLVNPGVAMATHKDDEERFFPSSGVLIFGKTGAANKTTLENVLMTNEEEIRPTNPVATEEYGTVSSNLQAANTAAQTQVVNNQGALPGMVWQNRDVYLQGPIWAKIPHTDGNFHPSPLMGGFGLKHPPPQILIKNTPVPANPPEVFTPAKFASFITQYSTGQVSVEIEWELQKENSKRWNPEIQYTSNFDKQTGVDFAVDSQGVYSEPRPIGTRYLTRNL

SEQ ID NO: 5042 - DNA, 2217 bp, Adeno-associated virus
atggctgccgatggttatcttccagattggctcgaggacaacctctctgagggcattcgcgagtggtgggacctgaaacctggagccccgaaacccaaagccaaccagcaaaagcaggacgacggccggggtctggtgcttcctggctacaagtacctcggacccttcaacggactcgacaagggggagcccgtcaacgcggcggacgcagcggccctcgagcacgacaaggcctacgaccagcagctcaaagcgggtgacaatccgcacctgcggtataatcacgccgacgccgagtttcaggagcgtctgcaagaagatacgtcttttgggggcaacctcgggcgagcagtcttccaggccaagaagcgggttctcgaacctctcggtctggttgaggaaggcgctaagacggctcctggaaagaagagaccggtagagccgtcaccacagcgttcccccgactcctccacgggcatcggcaagaaaggccagcagcccgccagaaagagactcaatttcggtcagactggcgactcagagtcagtccccgaccctcaacttatcggagaacctccagcagcgccctctagtgtgggatctggtacaatggctgcaggcggtggcgcaccaatggcagacaataacgaaggtgccgacggagtgggtagttcctcgggaaattggcattgcgattccacatggctgggcgacagagtcatcaccaccagcacccgaacctgggccctgcccacctacaacaaccacctctacaagcaaatctccaacgggacctcgggaggcagcaccaacgacaacacctactttggctacagcaccccctgggggtattttgactttaacagattccactgccacttctcaccacgtgactggcagcgactcatcaacaacaactggggattccggcccaagagactcagcttcaagctcttcaacatccaggtcaaagaggtcacgcagaatgaaggcaccaagaccatcgccaataacctcaccagcaccatccaggtgtttacggactcggagtaccagctgccgtacgtcctcggctctgcccaccagggctgcctgcctccgttcccggcggacgtcttcatgattcctcagtacggcaacctgactctcaacaacggtagtcaggccgtgggacgttcctccttctactgcctggagtacttcccctctcagatgctgagaacgggcaacaacttttccttcagctacactttcgaggacgtgcctttccacagcagctacgcgcacagccagagtttggacaggctgatgaatcctctcatcgaccagtacctgtactacctgtcaagaacccagtctacgggaggcacagcgggaacccagcagttgctgttttctcaggccgggcctagcaacatgtcggctcaggccagaaactggctgcctggaccctgctacagacagcagcgcgtctccacgacactgtcgcaaaacaacaacagcaactttgcctggactggtgccaccaagtatcatctgaacggcagagactctctggtgaatccgggcgtcgccatggcaaccaacaaggacgacgaggaccgcttcttcccatccagcggcatcctcatgtttggcaagcagggagctggaaaagacaacatgggctatagcaacgtgatgctaaccagcgaggaagaaatcaagaccaccaaccccgtggccacagaacagtatggcgtggtggctgataacctacagcagcaaaacaccgctcctattgtgggggccgtcaacagccagggagccttacctggcatggtctggcagaaccgggacgtgtacctgcagggtcctatttgggccaagattcctcacacagatggcaactttcacccgtctcctttaatgggcggctttggacttaaacatccgcctcctcagatcctcatcaaaaacactcctgttcctgcggatcctccaacagcgttcaaccaggccaagctgaattctttcatcacgcagtacggcaccggacaagtcagcgtggagatcgagtgggagctgcagaaggagaacagcaagcgctggaacccagagattcagtatacttccaactactacaaatctacaaatgtggactttgctgttaatactgagggtgtttactctgagcctcgccccattggcactcgttacctcacccgtaatctgtaa

SEQ ID NO: 5043 - protein, 738 aa, Adeno-associated virus
MAADGYLPDWLEDNLSEGIREWWDLKPGAPKPKANQQKQDDGRGLVLPGYKYLGPFNGLDKGEPVNAADAAALEHDKAYDQQLKAGDNPHLRYNHADAEFQERLQEDTSFGGNLGRAVFQAKKRVLEPLGLVEEGAKTAPGKKRPVEPSPQRSPDSSTGIGKKGQQPARKRLNFGQTGDSESVPDPQLIGEPPAAPSSVGSGTMAAGGGAPMADNNEGADGVGSSSGNWHCDSTWLGDRVITTSTRTWALPTYNNHLYKQISNGTSGGSTNDNTYFGYSTPWGYFDFNRFHCHFSPRDWQRLINNNWGFRPKRLSFKLFNIQVKEVTQNEGTKTIANNLTSTIQVFTDSEYQLPYVLGSAHQGCLPPFPADVFMIPQYGNLTLNNGSQAVGRSSFYCLEYFPSQMLRTGNNFSFSYTFEDVPFHSSYAHSQSLDRLMNPLIDQYLYYLSRTQSTGGTAGTQQLLFSQAGPSNMSAQARNWLPGPCYRQQRVSTTLSQNNNSNFAWTGATKYHLNGRDSLVNPGVAMATNKDDEDRFFPSSGILMFGKQGAGKDNMGYSNVMLTSEEEIKTTNPVATEQYGVVADNLQQQNTAPIVGAVNSQGALPGMVWQNRDVYLQGPIWAKIPHTDGNFHPSPLMGGFGLKHPPPQILIKNTPVPADPPTAFNQAKLNSFITQYGTGQVSVEIEWELQKENSKRWNPEIQYTSNYYKSTNVDFAVNTEGVYSEPRPIGTRYLTRNL

SEQ ID NO: 5044 - DNA, 2217 bp, Adeno-associated virus
atggctgccgatggttatcttccagattggctcgaggacaacctctctgagggcattcgcgagtggtgggacctgaaacctggagccccgaaacccaaagccaaccagcaaaagcaggacgacggccggggtctggtgcttcctggctacaagtacctcggacccttcaacggactcgacaagggggagcccgtcaacgcggcggacgcagcggccctcgagcacgacaaggcctacgaccagcagctcaaagcgggtgacaatccgtacctgcggtataatcacgccgacgccgagtttcaggagcgtctgcaagaagatacgtcttttgggggcaacctcgggcgagcagtcttccaggccaagaagcgggttctcgaacctctcggtctggttgaggaaggcgctaagacggctcctggaaagaagagaccggtagagccgtcaccacagcgttcccccgactcctccacgggcatcggcaagaaaggccagcagcccgccggaaagagactcaatttcggtcagactggcgactcagagtcagtccccgaccctcaacctatcggagaacctccagcagcgccctctagtgtgggatctggtacaatggctgcaggcggtggcgcaccaatggcagacaataacgaaggtgccgacggagtgggtagttcctcgggaaattggcattgcgattccacatggctgggcgacagagtcatcaccaccagcacccgaacctgggccctgcccacctacaacaaccacctctacaagcaaatctccaacgggacctcgggaggcagcaccaacgacaacacctactttggctacagcaccccctgggggtattttgactttaacagattccactgccacttctcaccacgtgactggcagcgactcatcaacaacaactggggattccggcccaagagactcagcttcaagctcttcaacatccaggtcaaagaggtcacgcagaatgaaggcaccaagaccatcgccaataacctcaccagcaccatccaggtgtttacggactcggaataccagctgccgtacgtcctcggctctgcccaccagggctgcctgcctccgttcccggcggacgtcttcatgattcctcagtacggctacctgactctcaacaacggtagtcaggccgtgggacgttcctccttctactgcctggagtacttcccctctcagatgctgagaacgggcaacaacttttccttcagctacactttcgaggacgtgcctttccacagcagctacgcgcacagccagagtttggacaggctgatgaatcctctcgtcgaccagtacctgtactacctgtcaagaacccagtctacgggaggcacagcgggaacccagcagttgctgttttctcaggccgggcctagcaacatgtcggctcaggccagaaactggctgcctggaccctgctacagacagcagcgcgtctccacgacactgtcgcaaaacaacaacagcaactttgcctggactggtgccaccaagtatcatctgaacggcagagactctctggtgaatccgggcgtcgccatggcaaccaacaaggacgacgaggaccgcttcttcccatccagcggcatcctcatgtttggcaagcagggagctggaaaagacaacgtggactatagcaacgtgatgctaaccagcgaggaagaaatcaagaccaccaaccccgtggccacagaacagtatggcgtggtggctgataacctacagcagcaaaacaccgctcctattgtgggggccgtcaacagccagggagccttacctggcatggtctggcagaaccgggacgtgtacctgcagggtcctatttgggccaagattcctcacacagatggcaactttcacccgtctcctttaatgggcggctttggacttaaacatccgcctcctcagatcctcatcaaaaacactcctgttcctgcggatcctccaacagcgttcaaccaggccaagctgaattctttcatcacgcagtacagcaccggacaagtcagcgtggagatcgagtgggagctgcagaaggagaacagcaagcgctggagcccagagattcagtatacttccaactactacaaatctacaaatgtggactttgctgttaatactgagggtgtttactctgagcctcgccccattggcactcgttacctcacccgtaatctgtaa

SEQ ID NO: 5045 - protein, 738 aa, Adeno-associated virus
MAADGYLPDWLEDNLSEGIREWWDLKPGAPKPKANQQKQDDGRGLVLPGYKYLGPFNGLDKGEPVNAADAAALEHDKAYDQQLKAGDNPYLRYNHADAEFQERLQEDTSFGGNLGRAVFQAKKRVLEPLGLVEEGAKTAPGKKRPVEPSPQRSPDSSTGIGKKGQQPAGKRLNFGQTGDSESVPDPQPIGEPPAAPSSVGSGTMAAGGGAPMADNNEGADGVGSSSGNWHCDSTWLGDRVITTSTRTWALPTYNNHLYKQISNGTSGGSTNDNTYFGYSTPWGYFDFNRFHCHFSPRDWQRLINNNWGFRPKRLSFKLFNIQVKEVTQNEGTKTIANNLTSTIQVFTDSEYQLPYVLGSAHQGCLPPFPADVFMIPQYGYLTLNNGSQAVGRSSFYCLEYFPSQMLRTGNNFSFSYTFEDVPFHSSYAHSQSLDRLMNPLVDQYLYYLSRTQSTGGTAGTQQLLFSQAGPSNMSAQARNWLPGPCYRQQRVSTTLSQNNNSNFAWTGATKYHLNGRDSLVNPGVAMATNKDDEDRFFPSSGILMFGKQGAGKDNVDYSNVMLTSEEEIKTTNPVATEQYGVVADNLQQQNTAPIVGAVNSQGALPGMVWQNRDVYLQGPIWAKIPHTDGNFHPSPLMGGFGLKHPPPQILIKNTPVPADPPTAFNQAKLNSFITQYSTGQVSVEIEWELQKENSKRWSPEIQYTSNYYKSTNVDFAVNTEGVYSEPRPIGTRYLTRNL

SEQ ID NO: 5046 - DNA, 2217 bp, Adeno-associated virus
atggttgccgatggttatcttccagattggctcgaggacaacctctctgagggcattcgcgagtggtgggacctgaaacctggagccccgaaacccaaagccaaccagcaaaagcagggcgacggccggggtctggtgcttcctggctacaagtacctcggacccttcaacggactcgacaagggggagcccgtcaacgcggcggacgcagcggccctcgagcacgacaaggcctacgaccagcagcttaaagcgggtgacaatccgtacctgcggtataatcacgccgacgccgagcttcaggagcgtctgcaagaagatacgtcttttgggggcaacctcgggcgagcagtcttccaggccaagaagcgggttctcgaacctctcggtctggttgaggaaggcgctaagacggctcctggaaagaagagaccggtagagccgtcaccacagcgttcccccgactcctccacgggcatcggcaagaaaggccagcagcccgccagaaagagactcaatttcggtcagactggcgactcagagtcagtccccgaccctcaacctatcggagaacctccagcagcgccctctagtgtgggatctggtacaatggctgcaggcggtggcgcgccaatggcagacaataacgaaggtgccgacggagtgggtagttcctcgggaaattggcattgcgattccacatggctgggcgacagagtcatcaccaccagcacccgaacctgggccctgcccacctacaacaaccacctctacaagcaaatctccaacgggacctcgggaggcagcaccaacgacaacacctactttggctacagcaccccctgggggtattttgactttaacagattccactgccacttctcaccacgtgactggcagcgactcatcaacaacaactggggattccggcccaagagactcagcttcaagctcttcaacatccaggtcaaagaggtcacgcagaatgaaggcaccaagaccatcgccaataacctcaccagcaccatccaggtgtttacggactcggaataccagctgccgtacgtcctcggctctgcccaccagggctgccagcctccgttcccggcggacgtcttcatgattcctcagtacggctacctgactctcaacaacggtagtcaggccgtgggacgttcctccttctactgcctggagtacttcccctctcagatgctgagaacgggcaacaacttttccttcagctacactttcgaggacgtgcctttccacagcagctacgcgcacagccagagtttggacaggctgatgaatcctctcatcgaccagtacctgtactacctgtcaagaacccagtctacgggaggcacagcgggaacccagcagttgctgttttctcaggccgggcctagcaacatgtcggctcaggccagaaactggctgcctggaccctgctacagacagcagcgcgtctccacgacactgtcgcaaaacaacaacagcaactttgcctggactggtgccaccaagtatcatctgaacggcagagactctctggtgaatccgggcgtcgccatggcaaccaacaaggacgacgaggaccgcttcttcccatccagcggcatcctcatgtttggcaagcagggagctggaaaagacaacgtggactatagcaacgtgatgctaaccagcgaggaagaaatcaagaccaccaaccccgtggccacagaacagtatggcgtggtggctgataacctacagcagcaaaacaccgctcctattgtgggggccgtcaacagccagggagccttacctggcatggtctggcagaaccgggacgtgtacctgcagggtcctatttgggccaagattcctcacacagatggcaactttcacccgtctcctttaatgggcggctttggacttaaacatccgcctcctcagatcctcatcaaaaacactcctgttcctgcggatcctccaacagcgttcaaccaggccaagctgaattctttcatcacgcagtacagcaccggacaagtcagcgtggagatcgagtgggagccgcagaaggagaacagcaagcgctggaacccagagattcagtatacttccaactactacaaatctacaaatgtggactttgctgttaatactgagggtgtttactctgagcctcgccccattggcactcgttacctcacccgtaatctgtaa

SEQ ID NO: 5047 - protein, 738 aa, Adeno-associated virus
MVADGYLPDWLEDNLSEGIREWWDLKPGAPKPKANQQKQGDGRGLVLPGYKYLGPFNGLDKGEPVNAADAAALEHDKAYDQQLKAGDNPYLRYNHADAELQERLQEDTSFGGNLGRAVFQAKKRVLEPLGLVEEGAKTAPGKKRPVEPSPQRSPDSSTGIGKKGQQPARKRLNFGQTGDSESVPDPQPIGEPPAAPSSVGSGTMAAGGGAPMADNNEGADGVGSSSGNWHCDSTWLGDRVITTSTRTWALPTYNNHLYKQISNGTSGGSTNDNTYFGYSTPWGYFDFNRFHCHFSPRDWQRLINNNWGFRPKRLSFKLFNIQVKEVTQNEGTKTIANNLTSTIQVFTDSEYQLPYVLGSAHQGCQPPFPADVFMIPQYGYLTLNNGSQAVGRSSFYCLEYFPSQMLRTGNNFSFSYTFEDVPFHSSYAHSQSLDRLMNPLIDQYLYYLSRTQSTGGTAGTQQLLFSQAGPSNMSAQARNWLPGPCYRQQRVSTTLSQNNNSNFAWTGATKYHLNGRDSLVNPGVAMATNKDDEDRFFPSSGILMFGKQGAGKDNVDYSNVMLTSEEEIKTTNPVATEQYGVVADNLQQQNTAPIVGAVNSQGALPGMVWQNRDVYLQGPIWAKIPHTDGNFHPSPLMGGFGLKHPPPQILIKNTPVPADPPTAFNQAKLNSFITQYSTGQVSVEIEWEPQKENSKRWNPEIQYTSNYYKSTNVDFAVNTEGVYSEPRPIGTRYLTRNL

SEQ ID NO: 5048 - DNA, 2217 bp, Adeno-associated virus
atggctgccgatggttatcttccagattggctcgaggacaacctctctgagggcattcgcgagtggtgggacctgaaacctggagccccgaaacccaaagccaaccagcaaaagcaggacgacggccggggtctggtgcttcctggctacaagtacctcggacccttcaacggactcgacaagggggagcccgtcaacgcggcggacgcagcggccctcgagcacgacaaggcctacgaccagcagctcaaagcgggtgacaatccgtacctgcggtataatcacgccgacgccgagtttcaggagcgtctgcaagaagatacgtcttttgggggcaacctcgggcgagcagtcttccaggccaagaagcgggttctcgaacctctcggtctggttgaggaaggcgctaagacggctcctggaaagaagagaccggtagagccgtcaccacagcgttcccccgactcctccacgggcatcggcaagaaaggccagcagcccgccagaaagagactcaatttcggtcagactggcgactcagagtcagtccccgaccctcaacctatcggagaacctccagcagcgccctctagtgtgggatctggtacaatggctgcaggcggtggcgcaccaatggcagacaataacgaaggtgccgacggagtgggtagttcctcgggaaattggcattgcgattccacatggctgggcgacagagtcatcaccaccagcacccgaacctgggccctgcccacctacaacaaccacctctacaagcaaatctccaacgggacctcgggaggcagcaccaacgacaacacctactttggctacagcaccccctgggggtattttgactttaacagattccactgccacttctcaccacgtgactggcagcgactcatcaacaacaactggggattccggcccaagagactcagcttcaagctcttcaacatccaggtcaaagaggtcacgcagaatgaaggcaccaagaccatcgccaatagcctcaccagcaccatccaggtgtttacggactcggaataccagctgccgtacgtcctcggctctgcccaccagggctgcctgcctccgttcccggcggacgtcttcatgattcctcagtacggctacctgactcccaacaacggtagtcaggccgtgggacgttcctccttctactgcctggagtacttcccctctcagatgctgagaacgggcaacaacttttccttcagctacactttcgaggacgtgcctttccacagcagctacgcgcacagccagagtttggacaggctgatgaatcctctcatcgaccagtacctgtactacctgtcaagaacccagtctacgggaggcacagcgggaacccagcagttgctgtcttctcaggccgggcctagcaacatgtcggctcaggccagaaactggctgcctggaccctgctacagacagcagcgcgtctccacgacactgtcgcaaaacaacaacagcaactttgcctggactggtgccaccaagtatcatctgaacggcagagactctctggtgaatccgggcgtcgccatggcaaccaacaaggacgacgaggaccgcttcttcccatccagcggcatcctcatgtttggcaagcagggagctggaaaagacaacgtggactatagcaacgtgatgctaaccagcgaggaagaaatcaagaccaccaaccccgtggccacagaacagtatggcgtggtggctgataacctacagcagcaaaacaccgctcctattgtgggggccgtcaacagccagggagccttacctggcatggtctggcagaaccgggacgtgtacttgcagggtcctatttgggccaagattcctcacacagatggcaactttcacccgtctcctttaatgggcggctttggacttaaacatccgcctcctcagatcctcatcaaaaacactcctgttcctgcggatcctccaacagcgttcaaccaggccaagctgaattctttcatcacgcagtacagcaccggacaagtcagcgtggagatcgagtgggagctgcagaaggagaacagcaagcgctggaacccagagattcagtatacttccaactactacaaatctacaaatgtggactttgctgttaatactgagggtgtttactctgagcctcgccccattggcactcgttacctcacccgtaatctgtaa

SEQ ID NO: 5049 - protein, 738 aa, Adeno-associated virus
MAADGYLPDWLEDNLSEGIREWWDLKPGAPKPKANQQKQDDGRGLVLPGYKYLGPFNGLDKGEPVNAADAAALEHDKAYDQQLKAGDNPYLRYNHADAEFQERLQEDTSFGGNLGRAVFQAKKRVLEPLGLVEEGAKTAPGKKRPVEPSPQRSPDSSTGIGKKGQQPARKRLNFGQTGDSESVPDPQPIGEPPAAPSSVGSGTMAAGGGAPMADNNEGADGVGSSSGNWHCDSTWLGDRVITTSTRTWALPTYNNHLYKQISNGTSGGSTNDNTYFGYSTPWGYFDFNRFHCHFSPRDWQRLINNNWGFRPKRLSFKLFNIQVKEVTQNEGTKTIANSLTSTIQVFTDSEYQLPYVLGSAHQGCLPPFPADVFMIPQYGYLTPNNGSQAVGRSSFYCLEYFPSQMLRTGNNFSFSYTFEDVPFHSSYAHSQSLDRLMNPLIDQYLYYLSRTQSTGGTAGTQQLLSSQAGPSNMSAQARNWLPGPCYRQQRVSTTLSQNNNSNFAWTGATKYHLNGRDSLVNPGVAMATNKDDEDRFFPSSGILMFGKQGAGKDNVDYSNVMLTSEEEIKTTNPVATEQYGVVADNLQQQNTAPIVGAVNSQGALPGMVWQNRDVYLQGPIWAKIPHTDGNFHPSPLMGGFGLKHPPPQILIKNTPVPADPPTAFNQAKLNSFITQYSTGQVSVEIEWELQKENSKRWNPEIQYTSNYYKSTNVDFAVNTEGVYSEPRPIGTRYLTRNL

SEQ ID NO: 5050 - protein, 738 aa, Adeno-associated virus
MAADGYLPDWLEDNLSEGIREWWDLKPGAPKPKANQQKQDDGRGLVLPGYKYLGPFNGLDKGEPVNAADAAALEHDKAYDQQLKAGDNPYLRYNHADAEFQERLQEDTSFGGNLGRAVFQAKKRVLEPLGLVEEGAKTAPGKKRPVEPSPQRSPDSSTGIGKKGQQPARKRLNFGQTGDSESVPDPQPIGEPPAAPSSVGSGTMAAGGGAPMADNNEGADGVGSSSGNWHCDSTWLGDRVITTSTRTWALPTYNNHLYKQISNGTSGGSTNDNTYFGYSTPWGYFDFNRFHCHFSPRDWQRLINNNWGFRPKRLSFKLFNIQVKEVTQNEGTKTIANNLTSTIQVFTDSEYQLPYVLGSAHQGCLPPFPADVFMIPQYGYLTLNNGSQAVGRSSFYCLEYFPSQMLRTGNNFSFSYTFEDVPFHSSYVHSQSLDRLMNPLIDQYLYYLSRTQSTGGTAGTQQLLFSQAGPSNMSAQARNWLPGPCYRQQRVSTTLSQNNNSNFAWTGATKYHLNGRDSLVNSGVAMATNKDDEDRFFPSSGILMFGKQGAGKDNVDYSNVMLTSEEEIKTTNPVATEQYGVVADNLQQQNTAPIVGAVNSQGALPGMVWQNRDVYLQGPIWAKIPHTDGNFHPSPLMGGFGLKHPPPQILIKNTPVPADPPTAFNQAKLNSFITQYSTGQVSVEIEWELQKENSKRWNPEIQYTSNYYKSTNVDFAVNTEGVYSEPRPIGTRYPTRNL

SEQ ID NO: 5051 - DNA, 2217 bp, Adeno-associated virus
atggctgccgatggttatcttccagattggctcgaggacaacctctctgagggcattcgcgagtggtgggacctgaaacctggagccccgaaacccaaagccaaccagcaaaagcaggacgacggccggggtctggtgcttcctggctacaagtacctcggacccttcaacggactcgacaagggggagcccgtcaacgcggcggacgcagcggccctcgagcacgacaaggcctacgaccagcagctcaaagcgggtgacaatccgtacctgcggtataatcacgccgacgccgagtttcaggagcgtctgcaagaagatacgtcttttgggggcaacctcgggcgagcagtcttccaggccaagaagcgggttctcgaacctctcggtctggttgaggaaggcgctaagacggctcctggaaagaagagaccggtagagccgtcaccacagcgttcccccgactcctccacgggcatcggcaagaaaggccagcagcccgccagaaagagactcaatttcggtcagactggcgactcagagtcagtccccgaccctcaacctatcggagaacctccagcagcgccctctagtgtgggatctggtacaatggctgcaggcggtggcgcaccaatggcagacaataacgaaggtgccgacggagtgggtagttcctcgggaaattggcattgcgattccacatggctgggcgacagagtcatcaccaccagcacccgaacctgggccctgcccacctacaacaaccacctctacaagcaaatctccaacgggacctcgggaggcagcaccaacgacaacacctactttggctacagcaccccctgggggtattttgactttaacagattccactgccacttctcaccacgtgactggcagcgactcatcaacaacaactggggattccggcccaagagactcagcttcaagctcttcaacatccaggtcaaagaggtcacgcagaatgaaggcaccaagaccatcgccaataacctcaccagcaccatccaggtgtttacggactcggaataccagctgccgtacgtcctcggctctgcccaccagggctgcctgcctccgttcccggcggacgtcttcatgattcctcagtacggctacctgactctcaacaacggtagtcaggccgtgggacgttcctccttctactgcctggagtacttcccctctcagatgctgagaacgggcaacaacttttccttcagctacactttcgaggacgtgcctttccacagcagctacgtgcacagccagagtttggacaggctgatgaatcctctcatcgaccagtacctgtactacctgtcaagaacccagtctacgggaggcacagcgggaacccagcagttgctgttttctcaggccgggcctagcaacatgtcggctcaggccagaaactggctgcctggaccctgctacagacagcagcgcgtctccacgacactgtcgcaaaacaacaacagcaactttgcctggactggtgccaccaagtatcatctgaacggcagagactctctggtgaattcgggcgtcgccatggcaaccaacaaggacgacgaggaccgcttcttcccatccagcggcatcctcatgtttggcaagcagggagctggaaaagacaacgtggactatagcaacgtgatgctaaccagcgaggaagaaatcaagaccaccaaccccgtggccacagaacagtatggcgtggtggctgataacctacagcagcaaaacaccgctcctattgtgggggccgtcaacagccagggagccttacctggcatggtctggcagaaccgggacgtgtacctgcagggtcctatttgggccaagattcctcacacagatggcaactttcacccgtctcctttaatgggcggctttggacttaaacatccgcctcctcagatcctcatcaaaaacactcctgttcctgcggatcctccaacagcgttcaaccaggccaagctgaattctttcatcacgcagtacagcaccggacaagtcagcgtggagatcgagtgggagctgcagaaggagaacagcaagcgctggaacccagagattcagtatacttccaactactacaaatctacaaatgtggactttgctgttaatactgagggtgtttactctgagcctcgccccattggcactcgttaccccacccgtaatctgtaa

SEQ ID NO: 5052 - protein, 734 aa, Adeno-associated virus; identical to SEQ ID NO: 4948

SEQ ID NO: 5053 - DNA, 2214 bp, Adeno-associated virus
atggctgctgacggttatcttccagattggctcgaggacaacctctctgagggcattcgcgagtggtgggacctgaaacctggagccccgaaacccaaagccaaccagcagaagcaggacgacggccggggtctggtgcttcctggctacaagtacctcggacccttcaacggactcgacaagggggagcccgtcaacgcggcggacgcagcggccctcgagcacgacaaggcctacgaccagcagctcaaagcgggtgacaatccgtacctgcggtataaccacgccgacgccgagtttcaggagcgtctgcaagaagatacgtcttttgggggcaacctcgggcgagcagtcttccaggccaagaagcgggttctcgaacctctcggtctggttgaggaagctgctaagacggctcctggaaagaagagaccggtagaaccgtcacctcagcgttcccccgactcctccacgggcatcggcaagaaaggccagcagcccgctagaaagagactgaactttgggcagactggcgactcagagtcagtccccgaccctcaacctctcggagaaccaccagcaggcccctctggtctgggatctggtacaatggctgcaggcggtggcgctccaatggcagacaataacgaaggcgccgacggagtgggtaatgcctcaggaaattggcattgcgattccacatggctgggcgacagagtcatcaccaccagcacccgaacctgggctttgcccacctacaacaaccacctctacaagcaaatctccagtcagtcagcaggtagcaccaacgacaacgtctacttcggctacagcaccccctgggggtattttgacttcaacagattccactgtcacttctcaccacgtgactggcagcgactcatcaacaacaactggggattccggcccaagaagctcaacttcaagctcttcaacatccaagtcaaggaggtcacgacgaatgacggcgtcacgaccatcgctaataaccttaccagcacggttcaggtcttttcggactcggagtaccagctgccgtacgtcctcggctctgcccaccagggctgcctgcctccgttcccggcggacgtcttcatgattcctcagtacggctacctgactctgaacaatggcagccaatcggtgggacgttcatccttctactgcctggaatacttcccttctcaggtgctgagaacgggtaacaacttcaccttcagttacaccttcgaggacgtgcctttccacagcagctacgcgcacagccagagcctagaccggctgatgaatcccctcatcgaccagtacctgtattacctggctagaacacagagtaacccaggaggcacatctggcaatcgggaactgcagttttaccagggcgggccttccaccatggccgaacaagccaagaactggttacctggaccttgcttccggcaacaaagagtttccaaaacactggatcaaaacaacaacagcaactttgcttggactggtgccaccaaatatcacctgaacggcagaaactcattggtgaatcctggtgtcgccatggcaactcacaaggacgacgaggaccgctttttcccatccagcggagtcctgatttttggaaaaactggagcaaccaacaagactacattggaaaacgtgttaatgacaaatgaagaagaaattcgtcctactaatcctgtggccacagaagaatacgggatagtcagcagcaatttacaagcggccaatactgcagcccagacacaagttgtcaacaaccagggagccttacctggcatggtctggcagaaccgggacgtgtacctgcagggtcccatctgggccaaaattcctcacacagacggcaactttcacccgtctccgctgatgggcggctttggactgaagcatccgcctcctcagatcctgatcaaaaacactcctgttcctgctaatcccccggaggtgtttacgcctgccaagtttgcttctttcatcacacagtacagcaccggccaggtcagcgtggagatcgagtgggagctgcagaaggagaacagcaagcgctggaacccagagattcagtatacctccaattttgacaaacagactggtgtggactttgccgttgacagccagggtgtttattctgagcctcgccccattggtactcgttacctcacccgtaatctgtaa

SEQ ID NO: 5054 - protein, 737 aa, Adeno-associated virus
MAADGYLPDWLEDNLSEGIREWWDLKPGAPKPKANQQKQDDGRGLVLPGYKYLGPFNGLDKGEPVNAADAAALEHDKAYDQQLKAGDNPYLRYNHADAEFQERLQEDTSFGGNLGRAVFQAKKRVLEPLGLVEEAAKTAPGKKRPVEPSPQRSPDSSTGIGKKGQQPARKRLNFGQTGDSESVPDPQPLGEPPAGPSGLGSGTMAAGGGAPMADNNEGADGVGNASGNWHCDSTWLGDRVITTSTRTWALPTYNNHLYKQISSQSAGSTNDNVYFGYSTPWGYFDFNRFHCHFSPRDWQRLINNNWGFRPKKLNFKLFNIQVKEVTTNDGVTTIANNLTSTVQVFSDSEYQLPYVLGSAHQGCLPPFPADVFMIPQYGYLTLNNGSQSVGRSSFYCLEYFPSQVLRTGNNFTFSYTFEDVPFHSSYAHSQSLDRLMNPLIDQYLYYLARTQSNPGGTSGNRELQFYQGGPSTMAEQAKNWLPGPCFRQQRVSKTLDQNNNSNFAWTGATKYHLNGRNSLVNPGVAMATHKDDEDRFFPSSGVLIFGKTGATNKTTLENVLMTNEEEIRPTNPVATEEYGIVSSNLQAANTAAQTQVVNNQGALPGMVWQNRDVYLQGPIWAKIPHTDGNFHPSPLMGGFGLKHPPPQILIKNTPVPANPPEVFTPAKFASFITQYSTGQVSVEIEWELQKENSKRWNPEIQYTSNFDKQTGVDFAVDSQGVYSEPRPIGTRYLTRNL

SEQ ID NO: 5055 - DNA, 2214 bp, Adeno-associated virus
atggctgccgatggttatcttccagattggctcgaggacaacctctctgagggcattcgcgagtggtgggacctgaaacctggagccccgaaacccaaagccaaccagcaaaagcaggacgacggccggggtctggtgcttcctggctacaagtacctcggacccttcaacggactcgacaagggggagcccgtcaacgcggcggacgcagcggccctcgagcacgacaaggcctacgaccagcagctcaaagcgggtgacaatccgtacctgcggtataatcacgccgacgccgagtttcaggagcgtctgcaagaagatacgtcttttgggggcaacctcgggcgagcagtcttccaggccaagaagcgggttctcgaacctctcggtctggttgaggaaggcgctaagacggctcctggaaagaagagaccggtagagccgtcaccacagcgttcccccgactcctccacgggcatcggcaagaaaggccagcagcccgccagaaagagactcaatttcggtcagactggcgactcagagtcagtccccgaccctcaacctatcggagaacctccagcagcgccctctagtgtgggatctggtacaatggctgcaggcggtggcgcaccaatggcagacaataacgaaggtgccgacggagtgggtagttcctcgggaaattggcattgcgattccacacggctgggcgacagagtcatcaccaccagcacccggacctgggctttgcccacctacaacaaccacctctacaagcaaatctccagtcagtcagcaggtagcaccaacgacaacgtctacttcggctacagcaccccctgggggtattttgacttcaacagattccactgtcacttctcaccacgtgactggcagcggctcatcaacaacaactggggattccggcccaagaagctcaacttcaagctgttcaacatccaggtcaaggaggtcacaacgaatgacggcgtcacgaccatcgccaataaccttaccagcacggttcaggtcttttcggactcggaataccagctgccctacgtcctcggctccgcacaccagggctgcctgcctccgttcccggcggacgtcttcatgattccccagtacggctacctgactctgaacaatggcagccaatcggtgggtcgttcctctttctactgcctggaatatttcccttctcaaatgctgagaacgggcaacaacttcaccttcagctacaccttcgaggacgttcccttccacagcagctacgcacacagccagagcctggaccggctgatgaatcctcttatcgaccagtacctgtattacctggccagaacacagagcaacgcaggaggcacagctggcaatcgggaactgcagttttatcagggcgggcctaccaccatggccgaacaagccaaaaactggctgcctggaccttgcttccggcaacgaagagtctccaagacgctggatcaaaacaacaacagcaactttgcttggactggtgccaccaaataccatctaaatggaagaaattcattggttaatcccggtgtcgccatggcaacccacaaggacgacgaggaacgcttcttcccttcgagcggagtcctgatttttggaaaaactggagcagctaataagactacactggaaaatgtgttaatgacaaatgaagaggaaattcgtcctaccaacccggtagccaccgaggaatacgggactgttagcagcaacctgcaggcggctaacactgcagcccagacacaagttgtcaacaaccagggagccttacctggtatggtctggcagaaccgggacgtgtacctgcagggtcccatctgggccaagattcctcacacggacggcaactttcacccgtctccgctgatgggcggctttggactgaagcatccgcctcctcagatcctgatcaaaaacactcctgttcctgctaatcccccggaggtgtttacgcctgccaagtttgcttctttcatcacacagtacagcaccggccaggtcagcgtggagatcgagtgggagctgcagaaggagaacagcaagcgctggaacccagagattcagtatacctccaattttgacaaacagactggtgtggactttgccgttgacagccagggtgtttattctgagcctcgccccattggtactcgttacctcacccgtaatctgtaa

SEQ ID NO: 5056 - protein, 737 aa, Adeno-associated virus
MAADGYLPDWLEDNLSEGIREWWDLKPGAPKPKANQQKQDDGRGLVLPGYKYLGPFNGLDKGEPVNAADAAALEHDKAYDQQLKAGDNPYLRYNHADAEFQERLQEDTSFGGNLGRAVFQAKKRVLEPLGLVEEGAKTAPGKKRPVEPSPQRSPDSSTGIGKKGQQPARKRLNFGQTGDSESVPDPQPIGEPPAAPSSVGSGTMAAGGGAPMADNNEGADGVGSSSGNWHCDSTRLGDRVITTSTRTWALPTYNNHLYKQISSQSAGSTNDNVYFGYSTPWGYFDFNRFHCHFSPRDWQRLINNNWGFRPKKLNFKLFNIQVKEVTTNDGVTTIANNLTSTVQVFSDSEYQLPYVLGSAHQGCLPPFPADVFMIPQYGYLTLNNGSQSVGRSSFYCLEYFPSQMLRTGNNFTFSYTFEDVPFHSSYAHSQSLDRLMNPLIDQYLYYLARTQSNAGGTAGNRELQFYQGGPTTMAEQAKNWLPGPCFRQRRVSKTLDQNNNSNFAWTGATKYHLNGRNSLVNPGVAMATHKDDEERFFPSSGVLIFGKTGAANKTTLENVLMTNEEEIRPTNPVATEEYGTVSSNLQAANTAAQTQVVNNQGALPGMVWQNRDVYLQGPIWAKIPHTDGNFHPSPLMGGFGLKHPPPQILIKNTPVPANPPEVFTPAKFASFITQYSTGQVSVEIEWELQKENSKRWNPEIQYTSNFDKQTGVDFAVDSQGVYSEPRPIGTRYLTRNL

SEQ ID NO: 5057 - DNA, 2208 bp, Adeno-associated virus
atggctgccgatggttatcttccagattggctcgaggacactctctctgaaggaataagacagtggtggaagctcaaacctggcccaccaccaccaaagcccgcagagcggcataaggacgacagcaggggtcttgtgcttcctgggtacaagtacctcggacccttcaacggactcgacaagggggagccggtcaacgaggcagacgccgcggccctcgagcacgacaaggcctacgaccggcagctcgacagcggagacaacccgtacctcaagtacaaccacgccgacgcggagtttcaggagcgtcttaaagaagatacgtcttttgggggcaacctcggacgagcagtcttccaggcgaaaaagagggttcttgaacctctgggcctggttgaggaacctgttaagacggctccgggaaaaaagaggccggtagagcactctcctgcggagccagactcctcctcgggaaccggaaaagcgggccagcagcctgcaagaaaaagattgaattttggtcagactggagacgcagactccgtacctgacccccagcctctcggacagccaccagcagccccctctggtttgggatctactacaatggctacaggcagtggcgcaccaatggcagacaataacgagggtgccgatggagtgggtaattcttcaggaaattggcattgcgattcccaatggctgggcgacagagtcatcaccaccagcacccgaacctgggcccagcccacctacaacaaccacctctacaagcaaatctcaagccaatcaggagcctcaaacgacaaccactactttggctacagcaccccttgggggtattttgacttcaacagattccactgccacttttcaccacgtgactggcaaagactcatcaacaacaactggggattccgacccaagagactcaacttcaagctctttaacattcaagtcaaagaggtcacgcagaatgacggtacgacgacgattgccaataaccttaccagcacggttcaggtgtttactgactcggagtaccagctcccgtacgtcctcgggtcggcgcatcaaggatgcctcccgccgtttccagcggacgtcttcatggtcccacagtatggatacctcaccctgaacaacgggagtcaggcggtaggacgctcttccttttactgcctggagtactttccttctcagatgcttcgtactggaaacaactttcagttcagctacacctttgaagacgttcctttccacagcagctacgctcacagccagagtctggatcggctgatgaatcctctgatcgaccagtacctgtattatctgaacaaaacacaatcaaatagtggagctcttcagcagtctcggctactgtttagtcaagctggacccaccagcatgtctcttcaagctaaaaactggctacctggaccttgctacagacagcagcgtctgtcaaagcaggcaaacgacaacaacaacagcaactttccctggactgcggctacaaagtaccacctaaatggccgggactcgttggttaatccaggaccagctatggccagtcacaaagacgatgaagaaaagtttttccccatgcatggaaccctgatatttggtaaacaaggaacaaatgctaacgacgcggatttggacaatgtcatgattacagatgaagaagaaatccgcaccaccaatcccgtggctacggagcagtacggatatgtgtcaaataatttgcaaaactcaaatactggtccaactactggaactgtcaatcaccgaggagcgttacctggcatggtgtggcaggatcgagacgtgtacctgcagggacccatttgggccaagattcctcacaccgatggacactttcatccttctccactgatgggaggttttgggctcaaacacccgcctcctcagatcatgatcaaaaacactcccgttccagccaatcctcccacaaacttcagttctgccaagtttgcttctttcatcacacagtattccacggggcaggtcagcgtggagatcgagtgggagctgcagaaagagaacagcaaacgctggaatcccgaaattcagtacacttccaactacaacaaatctgttaatgtggactttactgtggacactaatggcgtgtattcagagcctcgccccattggcaccagatacctgactcgtaatctgtaa

SEQ ID NO: 5058 - protein, 735 aa, Adeno-associated virus
MAADGYLPDWLEDTLSEGIRQWWKLKPGPPPPKPAERHKDDSRGLVLPGYKYLGPFNGLDKGEPVNEADAAALEHDKAYDRQLDSGDNPYLKYNHADAEFQERLKEDTSFGGNLGRAVFQAKKRVLEPLGLVEEPVKTAPGKKRPVEHSPAEPDSSSGTGKAGQQPARKRLNFGQTGDADSVPDPQPLGQPPAAPSGLGSTTMATGSGAPMADNNEGADGVGNSSGNWHCDSQWLGDRVITTSTRTWAQPTYNNHLYKQISSQSGASNDNHYFGYSTPWGYFDFNRFHCHFSPRDWQRLINNNWGFRPKRLNFKLFNIQVKEVTQNDGTTTIANNLTSTVQVFTDSEYQLPYVLGSAHQGCLPPFPADVFMVPQYGYLTLNNGSQAVGRSSFYCLEYFPSQMLRTGNNFQFSYTFEDVPFHSSYAHSQSLDRLMNPLIDQYLYYLNKTQSNSGALQQSRLLFSQAGPTSMSLQAKNWLPGPCYRQQRLSKQANDNNNSNFPWTAATKYHLNGRDSLVNPGPAMASHKDDEEKFFPMHGTLIFGKQGTNANDADLDNVMITDEEEIRTTNPVATEQYGYVSNNLQNSNTGPTTGTVNHRGALPGMVWQDRDVYLQGPIWAKIPHTDGHFHPSPLMGGFGLKHPPPQIMIKNTPVPANPPTNFSSAKFASFITQYSTGQVSVEIEWELQKENSKRWNPEIQYTSNYNKSVNVDFTVDTNGVYSEPRPIGTRYLTRNL

SEQ ID NO: 5059 - DNA, 2217 bp, Adeno-associated virus
atggctgccgatggttatcttccagattggctcgaggacaacctctctgagggcattcgcgagtggtgggcgctgaaacctggagccccgaagcccaaagccaaccagcaaaagcaggacgacggccggggtctggtgcttcctggctacaagtacctcggacccttcaacggactcgacaagggggagcccgtcaacgcggcggacgcagcggccctcgagcacgacaaggcctacgaccagcagctgcaggcgggtgacaatccgtacctgcggtataatcacgccgacgccgagtttcaggagcgtctgcaagaagatacgtcttttgggggcaacctcgggcgagcagtcttccaggccaagaagcgggttctcgaacctctcggtctggttgaggaaggcgctaagacggctcctggaaagaagagaccggtagagccgtcaccacagcgttcccccgactcctccacgggcatcggcaagaaaggccagcagcccgccagaaagagactcaatttcggtcagactggcgactcagagtcagtccccgaccctcaacctatcggagaacctccagcagcgccctctagtgtgggatctggtacaatggctgcaggcggtggcgcgccaatggcagacaataacgaaggtgccgacggagtgggtagttcctcgggaaattggcattgcgattccacatggctgggcgacagagtcatcaccaccagcacccgaacctgggccctgcccacctacaacaaccacctctacaagcaaacctccaacgggacctcgggaggcagcaccaacgacaacacctactttggctacagcaccccctgggggtattttgactttaacagattccactgccacttctcaccacgtgactggcagcgactcatcaacaacaactggggattccggcccaagagactcagcttcaagctcttcaacatccaggtcaaagaggtcacgcagaatgaaggcaccaagaccatcgccaataacctcaccagcaccatccaggtgtttacggactcggaataccagctgccgtacgtcctcggctctgcccaccagggctgcctgcctccgttcccggcggacgtcttcatgattcctcagtacggctacctgactctcaacaacggtagtcaggccgtgggacgttcctccttctactgcctggagtacttcccctctcagatgctgagaacgggcaacaacttttccttcagctacactttcgaggacgtgcctttccacagcagctacgcgcacagccagagtttggacaggctgatgaatcctctcatcgaccagtacctgtactacctgtcaagaacccagtctacgggaggcacagcgggaacccagcagttgctgttttctcaggccgggcctagcaacatgtcggctcaggccagaaactggctgcctggaccctgctacagacagcagcgcgtctccacgacactgtcgcaaaacaacaacagcaactttgcctggactggtgccaccaagtatcatctgaacggcagagactctctggtgaatccgggcgtcgccatggcaaccaacaaggacgacgaggaccgcttcttcccatccagcggcatcctcatgtttggcaagcagggagctggaaaagacaacgtggactatagcaacgtgatgctaaccagcgaggaagaaatcaagaccaccaaccccgtggccacagaacagtatggcgtggtggctgataacctacagcagcaaaacaccgctcctattgtgggggccgtcaacagccagggagccttacctggcatggtctggcagaaccgggacgtgtacctgcagggtcctatttgggccaagattcctcacacagatggcaactttcacccgtctcctttaatgggcggctttggacttaaacatccgcctcctcagatcctcatcaaaaacactcctgttcctgcggatcctccaacagcgttcaaccaggccaagctgaattctttcatcacgcagtacagcaccggacaagtcagcgcggagatcgagtgggagctgcagaaggagaacagcaagcgctggaacccagagattcagtatacttccaactactacaaatctacaaatgtggactttgctgttaatactgagggtgtttactctgagcctcgccccattggcactcgttacctcacccgtaatctgtaa

SEQ ID NO: 5060 - protein, 738 aa, Adeno-associated virus
MAADGYLPDWLEDNLSEGIREWWALKPGAPKPKANQQKQDDGRGLVLPGYKYLGPFNGLDKGEPVNAADAAALEHDKAYDQQLQAGDNPYLRYNHADAEFQERLQEDTSFGGNLGRAVFQAKKRVLEPLGLVEEGAKTAPGKKRPVEPSPQRSPDSSTGIGKKGQQPARKRLNFGQTGDSESVPDPQPIGEPPAAPSSVGSGTMAAGGGAPMADNNEGADGVGSSSGNWHCDSTWLGDRVITTSTRTWALPTYNNHLYKQTSNGTSGGSTNDNTYFGYSTPWGYFDFNRFHCHFSPRDWQRLINNNWGFRPKRLSFKLFNIQVKEVTQNEGTKTIANNLTSTIQVFTDSEYQLPYVLGSAHQGCLPPFPADVFMIPQYGYLTLNNGSQAVGRSSFYCLEYFPSQMLRTGNNFSFSYTFEDVPFHSSYAHSQSLDRLMNPLIDQYLYYLSRTQSTGGTAGTQQLLFSQAGPSNMSAQARNWLPGPCYRQQRVSTTLSQNNNSNFAWTGATKYHLNGRDSLVNPGVAMATNKDDEDRFFPSSGILMFGKQGAGKDNVDYSNVMLTSEEEIKTTNPVATEQYGVVADNLQQQNTAPIVGAVNSQGALPGMVWQNRDVYLQGPIWAKIPHTDGNFHPSPLMGGFGLKHPPPQILIKNTPVPADPPTAFNQAKLNSFITQYSTGQVSAEIEWELQKENSKRWNPEIQYTSNYYKSTNVDFAVNTEGVYSEPRPIGTRYLTRNL

SEQ ID NO: 5061 - DNA, 2217 bp, Adeno-associated virus
atggctgctgacggttatcttccagattggctcgaggacaacctctctgagggcattcgcgagtggtgggacctgaaacctggagcccccaagcccaaggccaaccagcagaagcaggacgacggccggggtctggtgcttcctggctacaagtacctcggacccttcaacggactcgacaagggggagcccgtcaacgcggcggacgcagcggccctcgagcacgacaaggcctacgaccagcagctcaaagcgggtgacaatccgtacctgcggtataatcacgccgacgccgagtttcaggagcgtctgcaagaagatacgtcttttgggggcaacctcgggcgagcagtcttccaggccaagaagcgggttctcgaacctctcggtctggttgaggaagctgctaagacggctcctggaaagaagagaccggtagaaccgtcacctcagcgttcccccgactcctccacgggcatcggcaagaaaggccagcagcccgctagaaagagactgaactttgggcagactggcgactcagagtcagtccccgaccctcaaccaatcggagaacctccagcagcgccctctagtgtgggatctggtacaatggccgcaggcggtggcgcaccaatggcagacaataacgaaggtgccgacggagtgggtagttcctcgggaaattggcattgcgattccacatggctgggcgacagagtcatcaccaccagcacccgaacctgggccctgcccacctacaacaaccacctctacaagcaaatctccaacgggacctcgggaggcagcaccaacgacaacacctactttggctacagcaccccctgggggtattttgactttaacagattccactgccacttctcaccacgtgactggcagcgactcatcaacaacaactggggattccggcccaagagactcagcttcaagctcttcaacatccaggtcaaagaggtcacgcagaatgaaggcaccaagaccatcgccaataacctcaccagcaccatccaggtgtttacggactcggaataccagctgccgtacgtcctcggctctgcccaccagggctgcctgcctccgttcccggcggacgtcttcatgattcctcagtacggctacctgactctcaacaacggtagtcaggccgtgggacgttcctccttctactgcctggagtacttcccctctcagatgctgagaacgggcaacaacttttccttcagctacactttcgaggacgtgcctttccacagcagctacgcgcacagccagagtttggacaggctgatgaatcctctcatcgaccagtacctgtactacctgtcaagaacccagtctacgggaggcacagcgggaacccagcagctgctgttttctcaggccgggcctagcaacatgtcggctcaggccagaaactggctgcctggaccctgctacagacagcagcgcgtctccacgacactgtcgcaaaacaacaacagcaactttgcctggactggtgccaccaagtatcatctgaacggcagagactctctggtgaatccgggcgtcgccatggcaaccaacaaggacgacgaggaccgcttcttcccatccagcggcatcctcatgtttggcaagcagggagctggaaaagacaacgtggactatagcaacgtgatgctaaccagcgaggaagaaatcaagaccaccaaccccgtggccacagaacagtatggcgtggtggctgataacctacagcagcaaaacaccgctcctattgtgggggccgtcaacagccagggagccttacctggcatggtctggcagaaccgggacgtgtacctgcagggtcctatttgggccaagattcctcacacagatggcaactttcacccgtctcctttaatgggcggctttggacttaaacatccgcctcctcagatcctcatcaaaagcactcctgttcctgcggatcctccaacagcgttcaaccaggccaagctgaattctttcatcacgcagtacagcaccggacaagtcagcgtggagatcgagtgggagctgcagaaggagaacagcaagtgctggaacccagagattcagtatacttccaactactacaaatctacaaatgtggactttgctgttaatactgagggtgtttactctgagcctcgccccattggcactcgttacctcacccgtaatctgtaa

SEQ ID NO: 5062 - protein, 738 aa, Adeno-associated virus
MAADGYLPDWLEDNLSEGIREWWDLKPGAPKPKANQQKQDDGRGLVLPGYKYLGPFNGLDKGEPVNAADAAALEHDKAYDQQLKAGDNPYLRYNHADAEFQERLQEDTSFGGNLGRAVFQAKKRVLEPLGLVEEAAKTAPGKKRPVEPSPQRSPDSSTGIGKKGQQPARKRLNFGQTGDSESVPDPQPIGEPPAAPSSVGSGTMAAGGGAPMADNNEGADGVGSSSGNWHCDSTWLGDRVITTSTRTWALPTYNNHLYKQISNGTSGGSTNDNTYFGYSTPWGYFDFNRFHCHFSPRDWQRLINNNWGFRPKRLSFKLFNIQVKEVTQNEGTKTIANNLTSTIQVFTDSEYQLPYVLGSAHQGCLPPFPADVFMIPQYGYLTLNNGSQAVGRSSFYCLEYFPSQMLRTGNNFSFSYTFEDVPFHSSYAHSQSLDRLMNPLIDQYLYYLSRTQSTGGTAGTQQLLFSQAGPSNMSAQARNWLPGPCYRQQRVSTTLSQNNNSNFAWTGATKYHLNGRDSLVNPGVAMATNKDDEDRFFPSSGILMFGKQGAGKDNVDYSNVMLTSEEEIKTTNPVATEQYGVVADNLQQQNTAPIVGAVNSQGALPGMVWQNRDVYLQGPIWAKIPHTDGNFHPSPLMGGFGLKHPPPQILIKSTPVPADPPTAFNQAKLNSFITQYSTGQVSVEIEWELQKENSKCWNPEIQYTSNYYKSTNVDFAVNTEGVYSEPRPIGTRYLTRNL

SEQ ID NO: 5063 - protein, 738 aa, Adeno-associated virus
MAADGYLPDWLEDNLSEGIREWWDLKPGAPKPKANQQKQDDGRGLVLPGYKYLGPFNGLDKGEPVNAADAAALEHDKAYDQQLKAGDNPYLRYNHADAEFQERLQEDTSFGGNLGRAVFQAKKRVLEPLGLVEEAAKTAPGKKRPVEPSPQRSPDSSTGIGKKGQQPARKRLNFGQTGDSESVPDPQPIGEPPAAPSSVGSGTMAAGGGAPMADNNEGADGVGSSSGNWHCDSTWLGDRVITTSTRTWALPTYNNHLYKQISNGTSGGSTNDNTYFGYSTPWGYFDFNRFHCHFSPRDWQRLINNNWGFRPKRLSFKLFNIQVKEVTQNEGTKTIANNLTSTIQVFTDSEYQLPYVLGSAHQGCLPPFPADVFMIPQYGYLTLNNGSQAVGRSSFYCLEYFPSQMLRTGNNFSFSYTFEDVPFHSSYAHSQSLDRLMNPLIDQYLYYLSRTQSTGGTAGTQQLLFSQAGPSNMSAQARNWLPGPCYRQQRVSTTLSQNNNSNFAWTGATKYHLNGRDSLVNPGVAMATNKDDEDRFFPSSGILMFGKQGAGKDNVDYSNVMLTSEEEIKTTNPVATEQYGVVADNLQQQNTAPIVGAVNSQGALPGMVWQNRDVYLQGPIWAKIPHTDGNFHPSPLMGGFGLKHPPPQILIKSTPVPADPPTAFNQAKLNSFITQYSTGQVSVEIEWELQKENSKRWNPEIQYTSNYYKSTNVDFAVNTEGVYSEPRPIGTRYLTRNL

SEQ ID NO: 5064 - DNA, 2217 bp, Adeno-associated virus
atggctgctgacggttatcttccagattggctcgaggacaacctctctgagggcattcgcgagtggtgggacctgaaacctggagcccccaagcccaaggccaaccagcagaagcaggacgacggccggggtctggtgcttcctggctacaagtacctcggacccttcaacggactcgacaagggggagcccgtcaacgcggcggacgcagcggccctcgagcacgacaaggcctacgaccagcagctcaaagcgggtgacaatccgtacctgcggtataaccacgccgacgccgagtttcaggagcgtctgcaagaagatacgtcttttgggggcaacctcgggcgagcagtcttccaggccaagaagcgggttctcgaacctctcggtctggttgaggaagctgctaagacggctcctggaaagaagagaccggtagaaccgtcacctcagcgttcccccgactcctccacgggcatcggcaagaaaggccagcagcccgctagaaagagactgaactttgggcagactggcgactcagagtcagtccccgaccctcaaccaatcggagaaccaccagcaggcccctctggtctgggatctggtacaatggctgcaggcggtggcgcaccaatggctgacaataacgagggcgccgacggagtgggtaatgcctcaggaaattggcattgcgattccacatggctgggcgacagagtcatcaccaccagcacccgaacctgggctttgcccacctacaacaaccacctctacaagcaaatctccagtcagtcagcaggtagcaccaacgacaacgtctacttcggctacagcaccccctgggggtattttgacttcaacagattccactgtcacttctcaccacgtgactggcagcggctcatcaacaacaactggggattccggcccaagaagctcaacttcaagctgttcaacatccaggtcaaggaggtcacaacgaatgacggcgtcacgaccatcgccaataaccctaccagcacggttcaggtcttttcggactcggaataccagctgccctacgtcctcggctccgcacaccagggctgcctgcctccgttcccggcggacgtcttcatgattccccagtacggctacctgactctgaacaatggcagccaatcggtgggtcgttcctctttctactgcctggaatatttcccttctcaaatgctgagaacgggcaacaacttcaccttcagctacaccttcgaggacgttcccttccacagcagctacgcacacagccagagcctggaccggctgatgaatcctcttatcgaccagtacctgtattacctggccagaacacagagcaacgcaggaggcacagctggcaatcgggaactgcagttttatcagggcgggcctaccaccatggccgaacaagccaaaaactggctgcctggaccctgctacagacagcagcgcgtctccacgacactgtcgcaaaacaacaacagcaactttgcctggactggtgccaccaagtatcatctgaacggcagagactctctggtgaatccgggcgtcgccatggcaaccaacaaggacgacgaggaccgcttcttcccatccagcggcatcctcatgtttggcaagcagggagctggaaaagacaacgtggactatagcaacgtgatgctaaccagcgaggaagaaatcaagaccaccaaccccgtggccacagaacagtatggcgtggtggctgataacctacagcagcaaaacaccgctcctattgtgggggccgtcaacagccagggagccttacctggcatggtctggcagaaccgggacgtgtacctgcagggtcctatttgggccaagattcctcacacagatggcaactttcacccgtctcctttaatgggcggctttggacttaaacatccgcctcctcagatcctcatcaaaaacactcctgttcctgcggatcctccaacagcgttcaaccaggccaagctgaattctttcatcacgcagtacagcaccggacaagtcagcgtggagatcgagtgggagctgcagaaggagaacagcaagcgctggaacccagagattcagtatacttccaactactacaaatctacaaatgtggactttgctgttaatactgagggtgtttactctgagcctcgccccattggcactcgttacctcacccgtaatctgtaa

SEQ ID NO: 5065 - protein, 738 aa, Adeno-associated virus
MAADGYLPDWLEDNLSEGIREWWDLKPGAPKPKANQQKQDDGRGLVLPGYKYLGPFNGLDKGEPVNAADAAALEHDKAYDQQLKAGDNPYLRYNHADAEFQERLQEDTSFGGNLGRAVFQAKKRVLEPLGLVEEAAKTAPGKKRPVEPSPQRSPDSSTGIGKKGQQPARKRLNFGQTGDSESVPDPQPIGEPPAGPSGLGSGTMAAGGGAPMADNNEGADGVGNASGNWHCDSTWLGDRVITTSTRTWALPTYNNHLYKQISSQSAGSTNDNVYFGYSTPWGYFDFNRFHCHFSPRDWQRLINNNWGFRPKKLNFKLFNIQVKEVTTNDGVTTIANNPTSTVQVFSDSEYQLPYVLGSAHQGCLPPFPADVFMIPQYGYLTLNNGSQSVGRSSFYCLEYFPSQMLRTGNNFTFSYTFEDVPFHSSYAHSQSLDRLMNPLIDQYLYYLARTQSNAGGTAGNRELQFYQGGPTTMAEQAKNWLPGPCYRQQRVSTTLSQNNNSNFAWTGATKYHLNGRDSLVNPGVAMATNKDDEDRFFPSSGILMFGKQGAGKDNVDYSNVMLTSEEEIKTTNPVATEQYGVVADNLQQQNTAPIVGAVNSQGALPGMVWQNRDVYLQGPIWAKIPHTDGNFHPSPLMGGFGLKHPPPQILIKNTPVPADPPTAFNQAKLNSFITQYSTGQVSVEIEWELQKENSKRWNPEIQYTSNYYKSTNVDFAVNTEGVYSEPRPIGTRYLTRNL

SEQ ID NO: 5066 - DNA, 2208 bp, Adeno-associated virus
atggctgccgatggttatcttccagattggctcgaggacaacctctctgagggcattcacgagtggtgggacccgaaacctggagccccgaaacccaaagccaaccagcaaaagcaggacgacggccggggtctggtgcttcctggctacaagtacctcggacccttcaacggactcgacaagggggagcccgtcaacgcggcggacgcagcggccctcgagcacgacaaggcctacgaccagcagctcaaagcgggtgacaatccgtacctgcggtataatcacgccgacgccgagtttcaggagcgtctgcaagaagatacgtcttttgggggcaacctcgggcgagcagtcttccaggccaagaagcgggttctcgaacctctcggtctggttgaggaaggcgctaagacggctcctggaaagaagagaccggtagagccgtcaccacagcgttcccccgactcctccacgggcatcggcaagaaaggccagcagcccgccagaaagagactcaatttcggtcagactggcgactcagagtcagtccccgaccctcaacctatcggagaacctccagcagcgccctctagtgtgggatctggtacaatggctgcaggcggtggcgcaccaatggcagacaataacgaaggtgccgacggagtgggtagttcctcgggaaattggcattgcgattccacatggctgggcgacagagtcatcaccaccagcacccgaacctgggccctgcccacccacaacaaccacctctacaagcaaatctccaacgggacctcgggaggcagcaccaacgacaacgtctacttcggctacagcaccccctgggggtattttgacttcaacagattccactgtcacttctcaccacgtgaccggcagcgactcatcaacaacaactggggattccggcccaagagactcagcttcaagctcttcaacatccaggtcaaagaggtcacgcagaatgaaggcaccaagaccatcgccaataacctcaccagcaccatccaggtgtttacggactcggaataccagctgccgtacgtcctcggctctgcccaccagggctgcctgcctccgttcccggcggacgtcttcatgattcctcagtacggctacctgactctcaacaacggtagtcaggccgtgggacgttcctccttctactgcctggagtacttcccctctcagatgctgagaacgggcaacaacttttccttcagctacactttcgaggacgtgcctttccacagcagctacgcgcacagccagagtttggacaggctgatgaatcctctcatcgaccagtacctgtactacctgtcaagaacccagtctacggaaggcacagcgggaacccagcagttgctgttttctcaggccgggcctagcaacatgtcggctcaggccagaaactggctgcctggaccctgctacagacagcagcgcgtctccacgacactgtcgcaaaacaacaacagcaactttgcctggactggtgccaccaagtatcatctgaacggcagagactctctggtgaatccgggcgtcgccatggcaacccacaaggacgacgaggaacgcttcttcccttcgagcggagtcctgatttttggaaaaactggagcagctaataagactacactggaaaatgtgttaatgacaaatgaagaggaaattcgtcctaccaacccggtagccaccgaggaatacgggactgttagcagcaacctgcaggcggctaacactgcagcccagacacaagttgtcaacaaccagggagccttacctggtatggtctggcagaaccgggacgtgtacctgcagggtcccatctgggccaagattcctcacacggacggcaactttcacccgtctccgctgatgggcggctttggactgaagcatcctcagatcctgatcaaaaacactcctgttcctgctaatcccccggaggtgtttacgcctgccaagtttgcttctttcatcacacagtacagcaccggccaggtcagcgtggagatcgagtgggagctgcagaaggagaacagcaagcgctggaacccagagattcagtatacctccaattttgacaaacagactggtgtggactttgccgttgacagccagggtgtttattctgagcctcgccccattggtactcgttacctcacccgtaatctgtaa

SEQ ID NO: 5067 - protein, 735 aa, Adeno-associated virus
MAADGYLPDWLEDNLSEGIHEWWDPKPGAPKPKANQQKQDDGRGLVLPGYKYLGPFNGLDKGEPVNAADAAALEHDKAYDQQLKAGDNPYLRYNHADAEFQERLQEDTSFGGNLGRAVFQAKKRVLEPLGLVEEGAKTAPGKKRPVEPSPQRSPDSSTGIGKKGQQPARKRLNFGQTGDSESVPDPQPIGEPPAAPSSVGSGTMAAGGGAPMADNNEGADGVGSSSGNWHCDSTWLGDRVITTSTRTWALPTHNNHLYKQISNGTSGGSTNDNVYFGYSTPWGYFDFNRFHCHFSPRDRQRLINNNWGFRPKRLSFKLFNIQVKEVTQNEGTKTIANNLTSTIQVFTDSEYQLPYVLGSAHQGCLPPFPADVFMIPQYGYLTLNNGSQAVGRSSFYCLEYFPSQMLRTGNNFSFSYTFEDVPFHSSYAHSQSLDRLMNPLIDQYLYYLSRTQSTEGTAGTQQLLFSQAGPSNMSAQARNWLPGPCYRQQRVSTTLSQNNNSNFAWTGATKYHLNGRDSLVNPGVAMATHKDDEERFFPSSGVLIFGKTGAANKTTLENVLMTNEEEIRPTNPVATEEYGTVSSNLQAANTAAQTQVVNNQGALPGMVWQNRDVYLQGPIWAKIPHTDGNFHPSPLMGGFGLKHPQILIKNTPVPANPPEVFTPAKFASFITQYSTGQVSVEIEWELQKENSKRWNPEIQYTSNFDKQTGVDFAVDSQGVYSEPRPIGTRYLTRNL

SEQ ID NO: 5068 - protein, 738 aa, Adeno-associated virus
MAADGYLPDWLEDNLSEGIREWWDLKPGAPKPKANQQKQDDGRGLVLPGYKYLGPFNGLDKGEPVNAADAAALEHDKAYDQQLKAGDNPYLRYNHADAEFQERLQEDTSFGGNLGRAVFQAKKRVLEPLGLVEEGAKTAPGKKRPVEPSPQRSPDSSTGIGKKGQQPARKRLNFGQTGDSESVPDPQPIGEPPAAPSSVGSGTMAAGGGAPMADNNEGADGVGSSSGNWHCDSTWLGDRVITTSTRTWALPTYNNHLYKQISNGTSGGSTNDNTYFGYSTPWGYFDFNRFHCHFSPRDWQRPINNNWGFRPKRLSFKLFNIQVKEVTQNEGTKTIANNLTSTIQVFTDSEYQLPYVLGSAHQGCLPPFPADVFMIPQYGYLTLNNGSQAVGRSSFYCLEYFPSQMLRTGNNFSFSYPFEDVPFHSSYAHSQSLDRLMNPLIDQYLYYLSRTQSTGGTAGTQQLLFSQAGPSNMSAQARNWLPGPCYRQQRVSTTLSQNNNSNFAWTGATKYHLNGRDSLVNPGVAMATNKDDEDRFFPSSGILMFGKQGAGKDNVDYSNVMLTSEEEIKTTNPVATEQYGVVADNLQQQDTAPIVGAVNSQGALPGMVWQNRDVYLQGPIWAKIPHTDGNFHPSPLMGGFGLKHPPPQVLIKNTPVPADPPTAFNQAKLNSFITQYSTGQVSVEIEWELQKENSKRWNPEIQYTSNYYKSTNVDFAVNTEGVYSEPRPIGTRYLTRNL

SEQ ID NO: 5069 - DNA, 2217 bp, Adeno-associated virus
atggctgccgatggttatcttccagattggctcgaggacaacctctctgagggcattcgcgagtggtgggacctgaaacctggagccccgaaacccaaggccaaccagcaaaagcaggacgacggccggggtctggtgcttcctggctacaagtacctcggacccttcaacggactcgacaagggggagcccgtcaacgcggcggacgcagcggccctcgagcacgacaaggcctacgaccagcagctcaaagcgggtgacaatccgtacctgcggtataatcacgccgacgccgagtttcaggagcgtctgcaagaagatacgtcttttgggggcaacctcgggcgagcagtcttccaggccaagaagcgggttctcgaacctctcggtctggttgaggaaggcgctaagacggctcctggaaagaagagaccggtagagccgtcaccacagcgttcccccgactcctccacgggcatcggcaagaaaggccagcagcccgccagaaagagactcaatttcggtcagactggcgactcagagtcagtccccgaccctcaacctatcggagaacctccagcagcgccctctagtgtgggatctggtacaatggctgcaggcggtggcgcaccaatggcagacaataacgaaggtgccgacggagtgggtagttcctcgggaaattggcattgcgattccacatggctgggcgacagagtcatcaccaccagcacccgaacctgggccctgcccacctacaacaaccacctctacaagcaaatctccaacgggacctcgggaggcagcaccaacgacaacacctactttggctacagcaccccctgggggtattttgactttaacagattccactgccacttctcaccacgtgactggcagcgacccatcaacaacaactggggattccggcccaagagactcagcttcaagctcttcaacatccaggtcaaagaggtcacgcagaatgaaggcaccaagaccatcgccaataacctcaccagcaccatccaggtgtttacggactcggaataccagctgccgtacgtcctcggctctgcccaccagggctgcctgcctccgttcccggcggacgtcttcatgattcctcagtacggctacctgactctcaacaacggtagtcaggccgtgggacgttcctccttctactgcctggagtacttcccctctcagatgctgagaacgggcaacaacttttccttcagctaccctttcgaggacgtgcctttccacagcagctacgcgcacagccagagtttggacaggctgatgaatcctctcatcgaccagtacctgtactacctgtcaagaacccagtctacgggaggcacagcgggaacccagcagttgctgttttctcaggccgggcctagcaacatgtcggctcaggccagaaactggctgcctggaccctgctacagacagcagcgcgtctccacgacactgtcgcaaaacaacaacagcaactttgcctggactggtgccaccaagtatcatctgaacggcagagactctctggtgaatccgggcgtcgccatggcaaccaacaaggacgacgaggaccgcttcttcccatccagcggcatcctcatgtttggcaagcagggagctggaaaagacaacgtggactatagcaacgtgatgctaaccagcgaggaagaaatcaagaccaccaaccccgtggccacagaacagtatggcgtggtggctgataacctacagcagcaagacaccgctcctattgtgggggccgtcaacagccagggagccttacctggcatggtctggcagaaccgggacgtgtacctgcagggtcctatttgggccaagattcctcacacagatggcaactttcacccgtctcctttaatgggcggctttggacttaaacatccgcctcctcaggtcctcatcaaaaacactcctgttcctgcggatcctccaacagcgttcaaccaggccaagctgaattctttcatcacgcagtacagcaccggacaagtcagcgtggagatcgagtgggagctgcagaaggagaacagcaagcgctggaacccagagattcagtatacttccaactactacaaatctacaaatgtggactttgctgttaatactgagggtgtttactctgagcctcgccccattggcactcgttacctcacccgtaatctgtaa

SEQ ID NO: 5070 - DNA, 2214 bp, Adeno-associated virus
atggctgctgacggttatcttccagattggctcgaggacaacctctctgagggcattcgcgagtggtgggacctgaaacctggagcccccaagcccaaggccaaccagcagaagcaggacgacggccggggtctggtgcttcctggctacaagtacctcggacccttcaacggactcgacaagggggagcccgtcaacgcggcggacgcagcggccctcgagcacgacaaggcctacgaccagcagctcaaagcgggtgacaatccgtacctgcggtataaccacgccgacgccgagttccaggagcgtctgcaagaagatacgtcttttgggggcaacctcgggcgagcagtcttccaggccaagaagcgggttctcgaacctctcggtctggctgaggaagctgctaagacggctcctggaaagaagagaccggtagaaccgtcacctcagcgttcccccgactcctccacgggcatcggcaagaaaggccagcagcccgctagaaagagactgaactttgggcagactggcgactcagagtcagtccccgaccctcaaccaatcggagagccaccagcaggcccctctggtctgggatctggtacaatggctgcaggcggtggcgcaccaatggctgacaataacaagggcgccgacggagtgggtaatgcctcaggaaattggcattgcgattccacatggctgggcgacagagtcatcaccaccagcacccgaacctgggctttgcccacctacaacaaccacctctacaagcaaatctccagtcagtcagcaggtagcaccaacgacaacgtctacttcggctacagcaccccctgggggtattttgacttcaacagattccactgtcacttctcaccacgtgactggcagcggctcatcaacaacaactggggattccggcccaagaagctcaacttcaagctgttcaacatccaggtcaaggaggtcacaacgggtgacggcgtcacgaccatcgccaataaccttaccagcacggttcaggtcttttcggactcggaataccagctgccctacgtcctcggctccgcacaccagggctgcctgcctccgttcccggcggacgtcttcatgattccccagtacggctacctgactctgaacaatgacagccaatcggtgggtcgttcctctttctactgcctggaatatttcccttctcaaatgctgagaacgggcaacaacttcaccttcagctacaccttcgaggacgttcccttccacagcagctacgcacacagccagagcctggaccggctgatgaatcctcttatcgaccagtacctgtattacctggccagaacacagagcaacgcaggaggcacagctggcaatcgggaactgcagttttatcagggcgggcctaccaccatggccgaacaagccaaaaactggctgcctggaccttgcttccggcaacaaagagtctccaagacgctggatcaaaacaacaacagcaactttgcttggactggtgccaccaaataccatctaaatggaagaaattcattggttaatcccggtgtcgccatggcaacccacaaggacgacgaggaacgcttcttcccttcgagcggagtcctgatttttggaaaaactggagcagctaataagactacactggaaaatgtgttaatgacaaatgaagaggaaattcgtcctaccaacccggtagccaccgaggaatacgggactgttagcagcaacctgcaggcggctaacactgcagcccagacacaagttgtcaacaaccagggagccttacctggtatggtctggcagaaccgggacgtgtacctgcagggtcccatctgggccaagattcctcacacggacggcaactttcacccgtctccgctgatgggcggctttggactgaagcatccgcctcctcagatcctgatcaaaaacactcctgttcctgctaatcccccggaggtgtttacgcctgccaagtttgcttctttcatcacacagtacagcaccggccaggtcagcgtggagatcgagtgggagctgcagaaggagaacagcaagcgctggaacccagagattcagtatacctccaattttgacaaacagactggtgtggactttgccgttgacagccagggtgtttattctgagcctcgccccattggtactcgttacctcacccgtaatctgtaa

SEQ ID NO: 5071 - protein, 737 aa, Adeno-associated virus
MAADGYLPDWLEDNLSEGIREWWDLKPGAPKPKANQQKQDDGRGLVLPGYKYLGPFNGLDKGEPVNAADAAALEHDKAYDQQLKAGDNPYLRYNHADAEFQERLQEDTSFGGNLGRAVFQAKKRVLEPLGLAEEAAKTAPGKKRPVEPSPQRSPDSSTGIGKKGQQPARKRLNFGQTGDSESVPDPQPIGEPPAGPSGLGSGTMAAGGGAPMADNNKGADGVGNASGNWHCDSTWLGDRVITTSTRTWALPTYNNHLYKQISSQSAGSTNDNVYFGYSTPWGYFDFNRFHCHFSPRDWQRLINNNWGFRPKKLNFKLFNIQVKEVTTGDGVTTIANNLTSTVQVFSDSEYQLPYVLGSAHQGCLPPFPADVFMIPQYGYLTLNNDSQSVGRSSFYCLEYFPSQMLRTGNNFTFSYTFEDVPFHSSYAHSQSLDRLMNPLIDQYLYYLARTQSNAGGTAGNRELQFYQGGPTTMAEQAKNWLPGPCFRQQRVSKTLDQNNNSNFAWTGATKYHLNGRNSLVNPGVAMATHKDDEERFFPSSGVLIFGKTGAANKTTLENVLMTNEEEIRPTNPVATEEYGTVSSNLQAANTAAQTQVVNNQGALPGMVWQNRDVYLQGPIWAKIPHTDGNFHPSPLMGGFGLKHPPPQILIKNTPVPANPPEVFTPAKFASFITQYSTGQVSVEIEWELQKENSKRWNPEIQYTSNFDKQTGVDFAVDSQGVYSEPRPIGTRYLTRNL

SEQ ID NO: 5072 - DNA, 2217 bp, Adeno-associated virus
atggctgccgatggttatcttccagattggctcgaggacaacctctctgagggcattcgcgagtggtgggacctgaaacctggagccccgaaacccaaagccaaccagcaaaagcaggacgacggccggggtctggtgcttcctggctacaagtacctcggacccttcaacggactcgacaagggggagcccgtcaacgcggcggacgcagcggccctcgagcacgacaaggcctacgaccagcagctcaaagcgggtgacaatccgtacctgcggtataatcacgccgacgccgagtttcaggagcgtctgcaagaagatacgtcttttgggggcaacctcgggcgagcagtcttccaggccaagaagcgggttctcgaacctctcggtctggttgaggaaggcgctaagacggctcctggaaagaagagaccggtagagccgtcaccacagcgttcccccgactcctccacgggcatcggcaagaaaggccagcagcccgccagaaagagactcaatttcggtcagactggcgactcagagtcagtccccgaccctcaacctatcggagaacctccagcagcgccctctagtgtgggatctggtacaatggctgcaggcggtggcgcaccaatggcagacaataacgaaggtgccgacggagtgggtagttcctcgggaaattggcattgcgattccacatggctgggcgacagagtcatcaccaccagcacccgaacctgggccctgcccacctacaacaaccacctctacaagcaaatctccaacgggacctcgggaggcagcaccaacgacaacacctactttggctacagcaccccctgggggtattttgactttaacagattccactgccacttctcaccacgtgactggcagcgactcatcaacaacaactggggattccggcccaagagactcagcttcaagctcttcaacatccaggtcaaagaggtcacgcagaatgaaggcaccaagaccatcgccaataacctcaccagcaccatccaggtgtttacggactcggaataccagctgccgtacgtcctcggctctgcccaccagggctgcctgcctccgttcccggcggacgtcttcatgattcctcagtacggctacctgactctcaacaacggtagtcaggccgtgggacgttcctccttctactgcctggagtacttcccctctcagatgctgagaacgggcaacaacttttccttcagctacactttcgaggacgtgcctttccacagcagctacgcgcacagccagagtttggacaggctgatgaatcctctcatcgaccagtacctgtactacctgtcaagaacccagtctacgggaggcacagcgggaacccagcagttgctgttttctcaggccgggcctagcaacatgtcggctcaggccagaaactggctgcctggaccctgctacagacagcagcgcgtctccacgacactgtcgcaaaacaacaacagcaactttgcctggactggtgccaccaagtatcatctgaacggcagagactctctggtgaatccgggcgtcgccatggcaaccaacaaggacgacgaggaccgcttcttcccatccagcggcatcctcatgtttggcaagcagggagctggaaaagacaacgtggactatagcaacgtgatgctaaccagcgaggaagaaatcaagaccaccaaccccgtggccacagaacagtatggcgtggtggctgataacctacagcagcaaaacaccgctcctattgtgggggccgtcaacagccagggagccttacctggcatggtctggcagaaccgggacgtgtacctgcagggtcctatttgggccaagattcctcacacagatggcaactttcacccgtctcctttaatgggcggctttggacttaaacatccgcctcctcagatcctcatcaaaaacactcctgttcctgcggatcctccaacagcgttcaaccaggccaagctgaattctttcatcacgcagtacagcaccggacaagtcagcgtggagatcgtgtgggagctgcagaaggagaacagcaagcgcaggaacccagagattcagtatacttccaactactacaaatctacaaatgtggactttgctgttaatactgagggtgtttactctgagcctcgccccattggcactcgttacctcacccgtaatctgtaa

SEQ ID NO: 5073 - protein, 738 aa, Adeno-associated virus
MAADGYLPDWLEDNLSEGIREWWDLKPGAPKPKANQQKQDDGRGLVLPGYKYLGPFNGLDKGEPVNAADAAALEHDKAYDQQLKAGDNPYLRYNHADAEFQERLQEDTSFGGNLGRAVFQAKKRVLEPLGLVEEGAKTAPGKKRPVEPSPQRSPDSSTGIGKKGQQPARKRLNFGQTGDSESVPDPQPIGEPPAAPSSVGSGTMAAGGGAPMADNNEGADGVGSSSGNWHCDSTWLGDRVITTSTRTWALPTYNNHLYKQISNGTSGGSTNDNTYFGYSTPWGYFDFNRFHCHFSPRDWQRLINNNWGFRPKRLSFKLFNIQVKEVTQNEGTKTIANNLTSTIQVFTDSEYQLPYVLGSAHQGCLPPFPADVFMIPQYGYLTLNNGSQAVGRSSFYCLEYFPSQMLRTGNNFSFSYTFEDVPFHSSYAHSQSLDRLMNPLIDQYLYYLSRTQSTGGTAGTQQLLFSQAGPSNMSAQARNWLPGPCYRQQRVSTTLSQNNNSNFAWTGATKYHLNGRDSLVNPGVAMATNKDDEDRFFPSSGILMFGKQGAGKDNVDYSNVMLTSEEEIKTTNPVATEQYGVVADNLQQQNTAPIVGAVNSQGALPGMVWQNRDVYLQGPIWAKIPHTDGNFHPSPLMGGFGLKHPPPQILIKNTPVPADPPTAFNQAKLNSFITQYSTGQVSVEIVWELQKENSKRRNPEIQYTSNYYKSTNVDFAVNTEGVYSEPRPIGTRYLTRNL

SEQ ID NO: 5074 - protein, 738 aa, Adeno-associated virus
MAADGYLPDWLEDNLSEGIREWWDLKPGAPKPKANQQKQDDGRGLVLPGYKYLGPFNGLDKGEPVNAADAAALEHDKAYDQQLKAGDNPYLRYNHADAEFQERLQEDTSFGGNLGRAVFQAKKRVLEPLGLVEEGAKTAPGKKRPVEPSPQRSPDSSTGIGKKGQQPARKRLNFGQTGDSESVPDPQPIGEPPAAPSSVGSGTMAAGGGAPMADNNEGADGVGSSSGNWHCDSTWLGDRVITTSTRTWALPTYNNHLYKQISNGTSGGSTNDNTYFGYSTPWGYFDFNRFHCHFSPRDWQRLINNNWGFRPKRLSFKLFNIQVKEVTQNEGTKTIANNLTSTIQVFTDSEYQLPYVLGSAHQGCLPPFPADVFMIPQYGYLTLNNGSQAVGRSSFYCLEYFPSQMLRTGNNFSFSYTFEDVPFHSSYAHSQSLDRLMNPLIDQYLYYLSRTQSTGGTAGTQQLLFSQAGPSNMSAQARNWLPGPCYRQQRVSTTLSQNNNSNFAWTGATKYHLNGRDSLVNPGVAMATNKDDEDRFFPSSGILMFGKQGAGKDNVDYSNVMLTSEEEIKTTNPVATEQYGVVADNLQQQNTAPIVGAVNSQGALPGMVWQNRDVYLQGPIWAKIPHTDGNFHPSPLMGGFGLKHPPPQILIKNTPVPADPPTAFNQAKLNSFITQYSTGQVSVEIEWELQKENSKRWNPEIQYTSNYYKSTNVDFAVNTEGVYSEPRPIGTRYLTRNL

SEQ ID NO: 5075 - protein, 738 aa, Adeno-associated virus
MAADGYLPDWLEDNLSEGIREWWDLKPGAPKPKANQQKQDDGRGLVLPGYKYLGPFNGLDKGEPVNAADAAALEHDKAYDQQLKAGDNPYLRYNHADAEFQERLQEDTSFGGNLGRAVFQAKKRVLEPLGLVEEGAKTAPGKKRPVEPSPQRSPDSSTGIGKKGQQPARKRLNFGQTGDSESVPDPQPIGEPPAAPSSVGSGTMAAGGGAPMADNNEGADGVGSSSGNWHCDSTWLGDRVITTSTRTWALPTYNNHLYKQISNGTSGGSTNDNTYFGYSTPWGYFDFNRFHCHFSPRDWQRLINNNWGFRPKRLSFKLFNIQVKEVTQNEGTKTIANNLTSTIQVFTDSEYQLPYVLGSAHQGCLPPFPADVFMIPQYGYLTLNNGSQAVGRSSFYCLEYFPSQMLRTGNNFSFSYTFEDVPFHSSYAHSQSLDRLMNPLIDQYLYYLSRTQSTGGTAGTQQLLFSQAGPSNMSAQARNWLPGPCYRQQRVSTTLSQNNNSNFAWTGATKYHLNGRDSLVNPGVAMATNKDDEDRFFPSSGILMFGKQGAGKDNVDYSNVMLTSEEEIKTTNPVATEQYGVVADNLQQQNTAPIVGAVNSQGALPGMVWQNRDVYLQGPIWAKIPHTDGNFHPSPLMGGFGLKHPPPQILIKNTPVPADPPTAFNQAKLNSFITQYSTGQVSVEIVWELQKENSKRWNPEIQYTSNYYKSTNVDFAVNTEGVYSEPRPIGTRYLTRNL

SEQ ID NO: 5076 - protein, 738 aa, Adeno-associated virus; identical to SEQ ID NO: 5074

SEQ ID NO: 5077 - DNA, 2214 bp, Adeno-associated virus
atggctgctgacggttatcttccagattggctcgaggacaacctctctgagggcattcgcgagtggtgggacctgaaacctggagcccccaagcccaaggccaaccagcagaagcaggacgacggccggggtctggtgcttcctggctacaagtacctcggacccttcaacggactcgacaagggggagcccgtcaacgcggcggacgcagcggccctcgagcacgacaaggcctacgaccagcagctcaaagcgggtgacaatccgtacctgcggtataaccacgccgacgccgagtttcaggagcgtctgcaagaagatacgtcttttgggggcaacctcgggcgagcagtcttccaggccaagaagcgggttctcgaacctctcggtctggttgaggaagctgctaagacggctcctggaaagaagagaccggtagaaccgtcacctcagcgttcccccgactcctccacgggcatcggcaagaaaggccagcagcccgctagaaagagactgaactttgggcagactggcgactcagagtcagtccccgaccctcaaccaatcggagaaccaccagcaggcccctctggtctgggatctggtacaatggctgcaggcggtggcgctccaatggcagacaataacgaaggcgccgacggagtgggtaatgcctcaggaaattggcattgcgattccacatggctgggcgacagagtcatcaccaccagcacccgaacctgggctttgcccacctacaacaaccacctctacaagcaaatctccagtcagtcagcaggtagcaccaacgacaacgtctacttcggctacagcaccccctgggggtattttgacttcaacagattccactgtcacttctcaccacgtgactggcagcggctcatcaacaacaactggggattccggcccaagaagctcaacttcaagctgttcaacatccaggtcaaggaggtcacaacgaatgacggcgtcacgaccatcgccaataaccttaccagcacggttcaggtcttttcggactcggaataccagctgccctacgtcctcggctccgcacaccagggctgcctgcctccgttcccggcggacgtcttcatgattccccagtacggctacctgactctgaacaatggcagccaatcggtgggtcgttcctctttctactgcctggaatatttcccttctcaaatgctgagaacgggcaacaacttcaccttcagctacaccttcgaggacgttcccttccacagcagctacgcacacagccagagcctggaccggctgatgaatcctcttatcgaccagtacctgtattacctggccagaacacagagcaacgcaggaggcacagctggcaatcgggaactgcagttttatcagggcgggcctaccaccatggccgaacaagccaaaaactggctgcctagaccttgcttccggcaacaaagagtctccaagacgctggatcaaaacaacaacagcaactttgcttggactggtgccaccaaataccatctaaatggaagaaattcattggttaatcccggtgtcgccatggcaacccacaaggacgacgaggaacgcttcttcccttcgagcggagtcctgatttttggaaaaactggagcagctaataagactacactggaaaatgtgttaatgacaaatgaagaggaaattcgtcctaccaacccggtagccaccgaggaatacgggactgttagcagcaacctgcaggcggctaacactgcagcccagacacaagttgtcaacaaccagggagccttacctggtatggtctggcagaaccgggacgtgtacctgcagggtcccatctgggccaagattcctcacacggacggcaactttcacccgtctccgctgatgggcggctttggactgaagcatccgcctcctcagatcctgatcaaaaacactcctgttcctgctaatcccccggaggtgtttacgcctgccaagtttgcttctttcatcacacagtacagcaccggccaggtcagcgtggagatcgagtgggagctgcagaaggagaacagcaagcgctggaacccagagattcagtatacctccaattttgacaaacagactggtgtggactttgccgttgacagccagggtgtttattctgagcctcgccccattggtactcgttacctcacccgtaatctgtaa

SEQ ID NO: 5078 - protein, 737 aa, Adeno-associated virus
MAADGYLPDWLEDNLSEGIREWWDLKPGAPKPKANQQKQDDGRGLVLPGYKYLGPFNGLDKGEPVNAADAAALEHDKAYDQQLKAGDNPYLRYNHADAEFQERLQEDTSFGGNLGRAVFQAKKRVLEPLGLVEEAAKTAPGKKRPVEPSPQRSPDSSTGIGKKGQQPARKRLNFGQTGDSESVPDPQPIGEPPAGPSGLGSGTMAAGGGAPMADNNEGADGVGNASGNWHCDSTWLGDRVITTSTRTWALPTYNNHLYKQISSQSAGSTNDNVYFGYSTPWGYFDFNRFHCHFSPRDWQRLINNNWGFRPKKLNFKLFNIQVKEVTTNDGVTTIANNLTSTVQVFSDSEYQLPYVLGSAHQGCLPPFPADVFMIPQYGYLTLNNGSQSVGRSSFYCLEYFPSQMLRTGNNFTFSYTFEDVPFHSSYAHSQSLDRLMNPLIDQYLYYLARTQSNAGGTAGNRELQFYQGGPTTMAEQAKNWLPRPCFRQQRVSKTLDQNNNSNFAWTGATKYHLNGRNSLVNPGVAMATHKDDEERFFPSSGVLIFGKTGAANKTTLENVLMTNEEEIRPTNPVATEEYGTVSSNLQAANTAAQTQVVNNQGALPGMVWQNRDVYLQGPIWAKIPHTDGNFHPSPLMGGFGLKHPPPQILIKNTPVPANPPEVFTPAKFASFITQYSTGQVSVEIEWELQKENSKRWNPEIQYTSNFDKQTGVDFAVDSQGVYSEPRPIGTRYLTRNL

SEQ ID NO: 5079 - DNA, 2214 bp, Adeno-associated virus
atggctgctgacggttatcttccagattggctcgaggacaacctctctgagggcattcgcgagtggtgggacctgaaacctggagcccccaagcccaaggccaaccagcagaagcaggacgacggccggggtctggtgcttcctggctacaagtacctcggacccttcaacggactcgacaagggggagcccgtcaacgcggcggacgcagcggccctcgagcacgacaaggcctacgaccagcagctcaaagcgggtgacaatccgtacctgcggtataaccatgccgacgccgagtttcaggagcgtctgcaagaagatacgtcttttgggggcaacctcgggcgagcagtcctccaggccaagaagcgggttctcgaacctctcggtctggttgaggaagctgctaagacggctcctggaaagaagagaccggtagaaccgtcacctcagcgttcccccgactcctccacgggcatcggcaagaaaggccagcagcccgctagaaagagactgaactttgggcagactggcgactcagagtcagtccccgaccctcaaccaatcggagaaccaccagcaggcccctctggtctgggatctggtacaatggctgcaggcggtggcgctccaatggcagacaataacgaaggcgccgacggagtgggtaatgcctcaggaaattggcattgcgattccacatggctgggcgacagagtcatcaccaccagcacccgaacctgggctttgcccacctacaacaaccacctctacaagcaaatctccagtcagtcagcaggtagcaccaacgacaacgtctacttcggctacagcaccccctgggggtattttgacttcaacagattccactgtcacttctcaccacgtgactggcagcggctcatcaacaacaactggggattccggcccaagaagctcaacttcaagctgttcaacatccaggtcaaggaggtcacaacgaatgacggcgtcacgaccatcgccaataaccttaccagcacggttcaggtcttttcggactcggaataccagctgccctacgtcctcggctccgcacaccagggctgcctgcctccgttcccggcggacgtcttcatgattccccagtacggctacctgactctgaacaatggcagccaatcggtgggtcgttcctctttctactgcctggaatatttcccttctcaaatgctgagaacgggcaacaacttcaccttcagctacaccttcgaggacgttcccttccacagcagctacgcacacagccagagcctggaccggctgatgaatcctcttatcgaccagtacctgtattacctggccagaacacagagcaacgcaggaggcacagctggcaatcgggaactgcagttttatcagggcgggcctaccaccatggccgaacaagccaaaaactggctgcctggaccttgcttccggcaacaaagagtctccaagacgctggatcaaaacaacaacagcaactttgcttggactggtgccaccaaataccatctaaatggaagaaattcattggttaatcccggtgtcgccatggcaacccacaaggacgacgaggaacgcttcttcccttcgagcggagtcctgatttttggaaaaactggagcagctaataagactacactggaaaatgtgttaatgacaaatgaagaggaaattcgtcctaccaacccggtagccaccgaggaatacgggactgttagcagcaacctgcaggcggctaacactgcagcccagacacaagttgtcaacaaccagggagccttacctggtatggtctggcagaaccgggacgtgtacctgcagggtcccatctgggccaagattcctcacacggacggcaactttcacccgtctccgctgatgggcggctttggactgaagcatccgcctcctcagatcctgatcaaaaacactcctgttcctgctaatcccccggaggtgtttacgcctgccaagtttgcttctttcatcacacagtacagcaccggccaggtcagcgtggagatcgagtgggagctgcagaaggagaacagcaagcgctggaacccagagattcagtatacctccaattttgacaaacagactggtgtggactttgccgttgacagccagggtgtttattctgagcctcgccccattggtactcgttacctcacccgtaatctgtaa

SEQ ID NO: 5080 - protein, 737 aa, Adeno-associated virus; identical to SEQ ID NO: 5040

SEQ ID NO: 5081 - protein, 737 aa, Adeno-associated virus
MAADGYLPDWLEDNLSEGIREWWDLKPGAPKPKANQQKQDDGRGLVLPGYKYLGPFNGLDKGEPVNAADAAALEHDKAYDQQLKAGDNPYLRYNHADAEFQERLQEDTSFGGNLGRAVLQAKKRVLEPLGLVEEAAKTAPGKKRPVEPSPQRSPDSSTGIGKKGQQPARKRLNFGQTGDSESVPDPQPIGEPPAGPSGLGSGTMAAGGGAPMADNNEGADGVGNASGNWHCDSTWLGDRVITTSTRTWALPTYNNHLYKQISSQSAGSTNDNVYFGYSTPWGYFDFNRFHCHFSPRDWQRLINNNWGFRPKKLNFKLFNIQVKEVTTNDGVTTIANNLTSTVQVFSDSEYQLPYVLGSAHQGCLPPFPADVFMIPQYGYLTLNNGSQSVGRSSFYCLEYFPSQMLRTGNNFTFSYTFEDVPFHSSYAHSQSLDRLMNPLIDQYLYYLARTQSNAGGTAGNRELQFYQGGPTTMAEQAKNWLPGPCFRQQRVSKTLDQNNNSNFAWTGATKYHLNGRNSLVNPGVAMATHKDDEERFFPSSGVLIFGKTGAANKTTLENVLMTNEEEIRPTNPVATEEYGTVSSNLQAANTAAQTQVVNNQGALPGMVWQNRDVYLQGPIWAKIPHTDGNFHPSPLMGGFGLKHPPPQILIKNTPVPANPPEVFTPAKFASFITQYSTGQVSVEIEWELQKENSKRWNPEIQYTSNFDKQTGVDFAVDSQGVYSEPRPIGTRYLTRNL

SEQ ID NO: 5082 - DNA, 2217 bp, Adeno-associated virus
atggctgccgatggttatcttccagattggctcgaggacaacctctctgagggcattcgcgagtggtgggacctgaaacctggagccccgaaacccaaagccaaccagcaaaagcaggacgacggccggggtctggtgcttcctggctacaagtacctcggacccttcaacggactcgacaagggggagcccgtcaacgcggcggacgcagcggccctcgagcacgacaaggcctacgaccagcagctcaaagcgggtgacaatccgtacctgcggtataatcacgccgacgccgagtttcaggagcgtctgcaagaagatacgtcttttgggggcaacctcgggcgagcagtcttccaggccaagaagcgggttctcgaacctctcggtctggttgaggaaggcgctaagacggctcctggaaagaagagaccggtagagccgtcaccacagcgttcccccgactcctccacgggcatcggcaagaaaggccagcagcccgccagaaagagactcaatttcggtcagactggcgactcagagtcagtccccgaccctcaacctatcggagaacctccagcagcgccctctagtgtgggatctggtacaatggctgcaggcggtggcgcaccaatggcagacaataacgaaggtgccgacggagtgggtagttcctcgggaaattggcattgcgattccacatggctgggcgacagagtcatcaccaccagcacccgaacctgggccctgcccacctacaacaaccacctctacaagcaaatctccaacgggacctcgggaggcagcaccaacgacaacacctactttggctacagcaccccctgggggtattttgactttaacagattccactgccacttctcaccacgtgactggcagcgactcatcaacaacaactggggattccggcccaagagactcagcttcaagctcttcaacatccaggtcaaagaggtcacgcagaatgaaggcaccaagaccatcgccaataacctcaccagcaccatccaggtgtttacggactcggaataccagctgccgtacgtcctcggctctgcccaccagggctgcctgcctccgttcccggcggacgtcttcatgattcctcagtacggctacctgactctcaacaacggtagtcaggccgtgggacgttcctccttctactgcctggagtacttcccctctcagatgctgagaacgggcaacaacttttccttcagctacactttcgaggacgtgcctttccacagcagctacgcgcacagccagagtttggacaggctgatgaatcctctcatcgaccagtacctgtactacctgtcaagaacccagtctacgggaggcacagcgggaacccagcagttgctgttttctcaggccgggcctagcaacatgtcggctcaggccagaaactggctgcctggaccctgctacagacagcagcgcgtctccacgacactgtcgcaaaacaacaacagcaactttgcctggactggtgccaccaagtatcatctgaacggcagagactctctggtgaatccgggcgtcgccatggcaaccaacaaggacgacgaggaccgcttcttcccacccagcggcatcctcatgtttggcaagcagggagctggaaaagacaacgtggactatagcaacgtgatgctaaccagcgaggaagaaatcaagaccaccaaccccgtggccacagaacagtatggcgtggtggctgataacctacagcagcaaaacaccgctcctattgtgggggccgtcaacagccagggagccttacctggcatggtctggcagaaccgggacgtgtacctgcagggtcctatttgggccaagattcctcacacagatggcaactttcacccgtctcctttaatgggcggctttggacttaaacatccgcctcctcagatcctcatcaaaaacactcctgttcctgcggatcctccaacagcgttcaaccaggccaagctgaattctttcatcacgcagtacagcaccggacaagtcagcgtggtgatcgagtgggagctgcagaaggagaacagcaagcgctggaacccagagattcagtatacttccaactactacaaatctacaaatgtggactttgctgttaatactgagggtgtttactctgagcttcgccccattggcactcgttacctcacccgtaatctgtaa

SEQ ID NO: 5083 - protein, 738 aa, Adeno-associated virus
MAADGYLPDWLEDNLSEGIREWWDLKPGAPKPKANQQKQDDGRGLVLPGYKYLGPFNGLDKGEPVNAADAAALEHDKAYDQQLKAGDNPYLRYNHADAEFQERLQEDTSFGGNLGRAVFQAKKRVLEPLGLVEEGAKTAPGKKRPVEPSPQRSPDSSTGIGKKGQQPARKRLNFGQTGDSESVPDPQPIGEPPAAPSSVGSGTMAAGGGAPMADNNEGADGVGSSSGNWHCDSTWLGDRVITTSTRTWALPTYNNHLYKQISNGTSGGSTNDNTYFGYSTPWGYFDFNRFHCHFSPRDWQRLINNNWGFRPKRLSFKLFNIQVKEVTQNEGTKTIANNLTSTIQVFTDSEYQLPYVLGSAHQGCLPPFPADVFMIPQYGYLTLNNGSQAVGRSSFYCLEYFPSQMLRTGNNFSFSYTFEDVPFHSSYAHSQSLDRLMNPLIDQYLYYLSRTQSTGGTAGTQQLLFSQAGPSNMSAQARNWLPGPCYRQQRVSTTLSQNNNSNFAWTGATKYHLNGRDSLVNPGVAMATNKDDEDRFFPPSGILMFGKQGAGKDNVDYSNVMLTSEEEIKTTNPVATEQYGVVADNLQQQNTAPIVGAVNSQGALPGMVWQNRDVYLQGPIWAKIPHTDGNFHPSPLMGGFGLKHPPPQILIKNTPVPADPPTAFNQAKLNSFITQYSTGQVSVVIEWELQKENSKRWNPEIQYTSNYYKSTNVDFAVNTEGVYSELRPIGTRYLTRNL

SEQ ID NO: 5084 - DNA, 2214 bp, Adeno-associated virus
atggctgctgacggttatcttccagattggctcgaggacaacctctctgagggcattcgcgagtggtgggacctgaaacctggagcccccaagcccaaggccaaccagcagaagcaggacgacggccggggtctggtgcttcctggctacaagtacctcggacccttcaacggactcgacaagggggagcccgtcaacgcggcggacgcagcggccctcgagcacgacaaggcctacgaccagcagctcaaagcgggtgacaatccgtacctgcggtataaccacgccgacgccgagtttcaggagcgtctgcaagaagatacgtcttttgggggcaacctcgggcgagcagtcttccaggccaagaagcgggttctcgaacctctcggtctggttgaggaagctgctaagacggctcctggaaagaagagaccggtagaaccgtcacctcagcgttcccccgactcctccacgggcatcggcaagaaaggccagcagcccgctagaaagagactgaactttgggcagactggcgactcagagtcagtccccgaccctcaaccaatcggagaaccaccagcaggcccctctggtctgggatctggtacaatggctgcaggcggtggcgccccaatggcagacaataacgaaggcgccgacggagtgggtaatgcctcaggaaattggcattgcgattccacatggctgggcgacagagtcatcaccaccagcacccgaacctgggctttgcccacctacaacaaccacctctacaagcaaatctccagtcagtcagcaggtagcaccaacgacaacgtctacttcggctacagcaccccctgggggtattttgacttcaacagattccactgtcacttctcaccacgtgactggcagcggctcatcaacaacaactggggattccggcccaagaagctcaacttcaagctgttcaacatccaggtcaaggaggtcacaacgaatgacggcgtcacgaccatcgccaataaccttaccagcacggttcaggtcttttcggactcggaataccagctgccctacgtcctcggctccgcacaccagggctgcctgcctccgttcccggcggacgtcttcatgattccccagtacggctacctgactctgaacaatggcagccaatcggtgggtcgttcctctttctactgcctggaatatttcccttctcaaatgctgagaacgggcaacaacttcaccatcagctacaccttcgaggacgttcccttccacagcagctacgcacacagccagagcctggaccggctgatgaatcctcttatcgaccagtacctgtattacctggccagaacacagagcaacgcaggaggcacagctggcaatcaggaactgcagttttatcagggcgggcctaccaccatggccgaacaagccaaaaactggctgcctggaccttgcttccggcaacaaagagtctccaagacgctggatcaaaacaacaacagcaactttgcttggactggtgccaccaaataccatctaaatggaagaaattcattggttaatcccggtgtcgccatggcaacccacaaggacgacgaggaacgcttcttcccttcgagcggagtcctgatttttggaaaaactggagcagctaataagactacactggaaaatgtgttaatgacaaatgaagaggaaattcgtcctaccaacccggtagccaccgaggaatacgggactgttagcagcaacctgcaggcggctaacactgcagcccagacacaagttgtcaacaaccagggagccttacctggtatggtctggcagaaccgggacgtgtacctgcagggtcccatctgggccaagattcctcacacagatggcaactttcacccgtctcctttaatgggcggctttggacttaaacatccgcctcctcagatcctcatcaaaaacactcctgttcctgcggatcctccaacagcgttcaaccaggccaagctgaattctttcatcacgcagtacagcaccggacaagtcagcgtggagatcgagtgggagctgcagaaggagaacagcaagcgctggaacccagagattcagtatacttccaactactacaaatctacaaatgtggactttgctgttaatactgagggtgtttactctgagcctcgccccattggcactcgttacctcacccgtaatctgtaa

SEQ ID NO: 5085 - protein, 737 aa, Adeno-associated virus
MAADGYLPDWLEDNLSEGIREWWDLKPGAPKPKANQQKQDDGRGLVLPGYKYLGPFNGLDKGEPVNAADAAALEHDKAYDQQLKAGDNPYLRYNHADAEFQERLQEDTSFGGNLGRAVFQAKKRVLEPLGLVEEAAKTAPGKKRPVEPSPQRSPDSSTGIGKKGQQPARKRLNFGQTGDSESVPDPQPIGEPPAGPSGLGSGTMAAGGGAPMADNNEGADGVGNASGNWHCDSTWLGDRVITTSTRTWALPTYNNHLYKQISSQSAGSTNDNVYFGYSTPWGYFDFNRFHCHFSPRDWQRLINNNWGFRPKKLNFKLFNIQVKEVTTNDGVTTIANNLTSTVQVFSDSEYQLPYVLGSAHQGCLPPFPADVFMIPQYGYLTLNNGSQSVGRSSFYCLEYFPSQMLRTGNNFTISYTFEDVPFHSSYAHSQSLDRLMNPLIDQYLYYLARTQSNAGGTAGNQELQFYQGGPTTMAEQAKNWLPGPCFRQQRVSKTLDQNNNSNFAWTGATKYHLNGRNSLVNPGVAMATHKDDEERFFPSSGVLIFGKTGAANKTTLENVLMTNEEEIRPTNPVATEEYGTVSSNLQAANTAAQTQVVNNQGALPGMVWQNRDVYLQGPIWAKIPHTDGNFHPSPLMGGFGLKHPPPQILIKNTPVPADPPTAFNQAKLNSFITQYSTGQVSVEIEWELQKENSKRWNPEIQYTSNYYKSTNVDFAVNTEGVYSEPRPIGTRYLTRNL

SEQ ID NO: 5086 - DNA, 2217 bp, Adeno-associated virus
atggctgccgatggttatcttccagattggctcgaggacaacctctctgagggcattcgcgagtggtgggacctgaaacctggagccccgaaacccaaagccaaccagcaaaagcaggacgacggccggggtctggtgcttcctggctacaagtacctcggacccttcaacggactcgacaagggggagcccgtcaacgcggcggacgcagcggccctcgagcacgacaaggcctacgaccagcagctcaaagcgggtgacaatccgtacctgcggtataatcacgccgacgccgagtttcaggagcgtctgcaagaagatacgtcttttgggggcaacctcgggcgagcagtcttccaggccaagaagcgggttctcgaacctctcggtctggttgaggaaggcgctaagacggctcctggaaagaagagaccggtagagccgtcaccacagcgttcccccgactcctccacgggcatcggcaagaaaggccagcagcccgccagaaagagactcaatttcggtcagactggcgactcagagtcagtccccgaccctcaacctatcggagaacctccagcagcgccctctagtgtgggatctggtacaatggctgcaggcggtggcgcaccaatggcagacaataacgaaggtgccgacggagtgggtagttcctcgggaaattggcattgcgattccacatggctgggcgacagagtcatcaccaccagcacccgaacctgggccctgcccgcctacaacaaccacctctacaagcaaatctccaacgggacctcgggaggcagcaccaacgacaacacctactttggctacagcaccccctgggggtattttgactttaacagattccactgccacttctcaccacgtgactggcagcgactcatcaacaacaactggggattccggcccaagagactcagcttcaagctcttcaacatccaggtcaaagaggtcacgcagaatgaaggcaccaagaccatcgccaataacctcaccagcaccatccaggtgtttacggactcggaataccagctgccgtacgtcctcggctctgcccaccagggctgcctgcctccgttcccggcggatgtcttcatgattcctcagtacggctacctgactctcaacaacggtagtcaggccgtgggacgttcctccttctactgcctggagtacttcccctctcagatgctgagaacgggcaacaacttttccttcagctacactttcgaggacgtgcctttccacagcagctacgcgcacagccagagtttggacaggctgatgaatcctctcatcgaccagtacctgtactacctgtcaagaacccagtctacgggaggcacagcgggaacccagcagttgctgttttctcaggccgggcctagcaacatgtcggctcaggccagaaactggctgcctggaccctgctacagacagcagcgcgtctccacgacactgtcgcaaaacaacaacagcaactttgcctggactggtgccaccaagtatcatctgagcggcagagactctctggtgaatccgggcgtcgccatggcaaccaacaaggacgacgaggaccgcttcttcccatccagcggcatcctcatgtttggcaagcagggagctggaaaagacaacgtggactatagcaacgtgatgctaaccagcgaggaagaaatcaagaccaccaaccccgtggccacagaacagtatggcgtggtggctgataacctacagcagcaaaacaccgctcctattgtgggggccgtcaacagccagggagccttacctggcatggtctggcagaaccgggacgtgtacctgcagggtcctatttgggccaagattcctcacacagatggcaactttcacccgtctcctttaatgggcggctttggacttaaacatccgcctcctcagatcctcatcaaaaacactcctgttcctgcggatcctccaacagcgttcaaccaggccaagctgaattcttccatcacgcagtacagcaccggacaagtcagcgtggagatcgagtgggagctgcagaaggagaacagcaagcgctggaacccagagattcagtatacttccaactactacaaatctacaaatgtggactttgctgttaatactgagggtgtttactctgagcctcgccccattggcactcgttacctcacccgtaatttgtaa

SEQ ID NO: 5087 - protein, 738 aa, Adeno-associated virus
MAADGYLPDWLEDNLSEGIREWWDLKPGAPKPKANQQKQDDGRGLVLPGYKYLGPFNGLDKGEPVNAADAAALEHDKAYDQQLKAGDNPYLRYNHADAEFQERLQEDTSFGGNLGRAVFQAKKRVLEPLGLVEEGAKTAPGKKRPVEPSPQRSPDSSTGIGKKGQQPARKRLNFGQTGDSESVPDPQPIGEPPAAPSSVGSGTMAAGGGAPMADNNEGADGVGSSSGNWHCDSTWLGDRVITTSTRTWALPAYNNHLYKQISNGTSGGSTNDNTYFGYSTPWGYFDFNRFHCHFSPRDWQRLINNNWGFRPKRLSFKLFNIQVKEVTQNEGTKTIANNLTSTIQVFTDSEYQLPYVLGSAHQGCLPPFPADVFMIPQYGYLTLNNGSQAVGRSSFYCLEYFPSQMLRTGNNFSFSYTFEDVPFHSSYAHSQSLDRLMNPLIDQYLYYLSRTQSTGGTAGTQQLLFSQAGPSNMSAQARNWLPGPCYRQQRVSTTLSQNNNSNFAWTGATKYHLSGRDSLVNPGVAMATNKDDEDRFFPSSGILMFGKQGAGKDNVDYSNVMLTSEEEIKTTNPVATEQYGVVADNLQQQNTAPIVGAVNSQGALPGMVWQNRDVYLQGPIWAKIPHTDGNFHPSPLMGGFGLKHPPPQILIKNTPVPADPPTAFNQAKLNSSITQYSTGQVSVEIEWELQKENSKRWNPEIQYTSNYYKSTNVDFAVNTEGVYSEPRPIGTRYLTRNL

SEQ ID NO: 5088 - protein, 736 aa, Adeno-associated virus
MAADGYLPDWLEDNLSEGIREWWDLKPGAPKPKANQQKQDDGRGLVLPGYKYLGPFNGLDKGEPVNAADAAALEHDKAYDQQLKAGDNPYLRYNHADAEFQERLQEDTSFGGNLGRAVFQAKKRVLEPLGLVEEGAKTAPGKKRPVEQSPQEPDSSSGIGKTGQQPAKKRLNFGQTGDSESVPDPQPLGEPPATPAAVGPTTMASGGGAPMADNNEGADGVGNASGNWHCDSTWLGDRVITTSTRTWALPTYNNHLYKQISSASTGASNDNHYFGYSTPWGYFDFNRFHCHFSPRDWQRLINNNWGFRPKRLNFKLFNIQVKEVTTNDGVTTIANNLTSTVQVFSDSEYQLPYVLGSAHQGCLPPFPADVFMIPQYGYLTLNNGSQAVGRSSFYCLEYFPSQMLRTGNNFTFSYTFEEVPFHSSYAHSQSLDRLMNPLIDQYLYYLNRTQNQSGSAQNKDLLFSRGSPAGMSVQPKNWLPGPCYRQQRVSKTKTDNNNSNFTWTGASKYNLNGRESIINPGTAMASHKDDEDKFFPMSGVMIFGKESAGASNTALDNVMITDEEEIKATNPVATERFGTVAVNFQSSSTDPATGDVHAMGALPGMVWQDRDVYLQGPIWAKIPHTDGHFHPSPLMGGFGLKNPPPQILIKNTPVPANPPAEFSATKFASFITQYSTGQVSVEIEWELQKENSKRWNPEVQYTSNYAKSANVDFTVDNNGLYTEPRPIGTRYLTRPL

SEQ ID NO: 5089 - DNA, 2217 bp, Adeno-associated virus
atggctgctgacggttatcttccagattggctcgaggacaacctctctgagggcattcgcgagtggtgggacctgaaacctggagcccccaagcccaaggccaaccagcagaagcaggacgacggccggggtctggtgcttcctggctacaagtacctcggacccttcaacggactcgacaagggggagcccgtcaacgcggcggacgcagcggccctcgagcacgacaaggcctacgaccagcagctcaaagcgggtgacaatccgtacctgcggtataaccacgccgacgccgagtttcaggagcgtctgcaagaagatacgtcttttgggggcaacctcgggcgagcagtcttccaggccaagaagcgggttctcgaacctctcggtctggttgaggaagctgctaagacggctcctggaaagaagagaccggtagaaccgtcacctcagcgttcccccgactcctccacgggcatcggcaagaaaggccagcagcccgctaaaaagagactgaactttggtcagactggcgactcagagtcagtccccgaccctcaaccaatcggagaaccaccagcaggcccctctggtctgggatctggtacaatggctgcaggcggtggcgctccaatggcagacaataacgaaggcgccgacggagtgggtagttcctcaggaaattggcattgcgattccacatggctgggcgacagagtcatcaccaccagcacccgaacctgggccctgcccacctacaacaaccacctctacaagcaaatatccaatgggacatcgggaggaagcaccaacgacaacacctacttcggctacagcaccccctgggggtattttgacttcaacagattccactgccacttctcaccacgtgactggcagcgactcatcaacaacaactggggattccggccaaaaagactcagcttcaagctcttcaacatccaggtcaaggaggtcacgcagaatgaaggcaccaagaccatcgccaataaccttaccagcacgattcaggtatttacggactcggaataccagctgccgtacgtcctcggctccgcgcaccagggctgcctgcctccgttcccggcggacgtcttcatgattccccagtacggctaccttacactgaacaatggaagtcaagccgtaggccgttcctccttctactgcctggaatattttccatctcaaatgctgcgaactggaaacaattttgaattcagctacaccttcgaggacgtgcctttccacagcagctacgcacacagccagagcttggaccgactgatgaatcctctcatcgaccagtacctgtactacttatccagaactcagtccacaggaggaactcaaggtacccagcaattgttattttctcaagctgggcctgcaaacatgtcggctcaggctaagaactggctacctggaccttgctaccggcagcagcgagtctctacgacactgtcgcaaaacaacaacagcaactttgcttggactggtgccaccaaatatcacctgaacggaagagactctttggtaaatcccggtgtcgccatggcaacccacaaggacgacgaggaacgcttcttcccgtcgagtggagtcctgatgtttggaaaacagggtgctggaagagacaatgtggactacagcagcgttatgctaaccagcgaagaagaaattaaaaccactaaccctgtagccacagaacaatacggtgtggtggctgacaacttgcagcaaaccaatacagggcctattgtgggaaatgtcaacagccaaggagccttacctggcatggtctggcagaaccgagacgtgtacctgcagggtcccatctgggccaagattcctcacacggacggcaacttccacccttcaccgctaatgggaggatttggactgaagcacccacctcctcagatcctgatcaagaacacgccggtacctgcggatcctccaacaacgttcagccaggcgaaattggcttccttcattacgcagtacagcaccggacaggtcagcgtggaaatcgagtgggagctgcagaaggagaacagcaaacgctggaacccagagattcagtacacttcaaactactacaaatctacaaatgtggactttgctgtcaatacagagggaacttattctgagcctcgccccattggtactcgttacctcacccgtaatctgtaa

SEQ ID NO: 5090 - protein, 738 aa, Adeno-associated virus
MAADGYLPDWLEDNLSEGIREWWDLKPGAPKPKANQQKQDDGRGLVLPGYKYLGPFNGLDKGEPVNAADAAALEHDKAYDQQLKAGDNPYLRYNHADAEFQERLQEDTSFGGNLGRAVFQAKKRVLEPLGLVEEGAKTAPGKKRPVEPSPQRSPDSSTGIGKKGQQPARKRLNFGQTGDSESVPDPQPLGEPPAAPSSVGSGTMAAGGGAPMADNNEGADGVGSSSGNWHCDSTWLGDRVITTSTRTWALPTYNNHLYKQISNGTSGGSTNDNTYFGYSTPWGYFDFNRFHCHFSPRDWQRLINNNWGFRPKRLSFKLFNIQVKEVTQNEGTKTIANNLTSTIQVFTDSEYQLPYVLGSAHQGCLPPFPADVFMIPQYGYLTLNNGSQAVGRSSFYCLEYFPSQMLRTGNNFSFSYTFEDVPFHSSYAHSQSLDRLMNPLIDQYLYYLSRTQSTGGTAGTQQLLFSQAGPSNMSAQARNWLPGPCYRQQRVSTTLSQNNNSNFAWTGATKYHLNGRDSLVNPGVAMATNKDDEDRFFPSSGILMFGKQGAGKDNVDYSNVMLTSEEEIKTTNPVATEQYGVVADNLQRQNTAPIVGAVNSQGALPGMVWQNRDVYLQGPIWAKIPHTDGNFHPSPLMGGFGLKHPPPQILIKNTPVPADPPTAFNQAKLNSFITQYSTGQVSVEIEWELQKENSKRWNPEIQYTSNYYKSTNVDFAVNTEGVYSEPRPIGTRYLTRNL

SEQ ID NO: 5091 - protein, 736 aa, Adeno-associated virus
MAADGYLPDWLEDNLSEGIREWLNLKPGAPQPKANQQKQDNARGLVLPGYKYLGPFNGLDKGDPVNEADAAALEHDKAYGQQLKAGDNPYLKYNHADAEFQERLQKDTSFGGNLGKAVFQAKKRILEPLGLVETPAKTAPGKKRPVDPSPQRSPDSSSGIGKKSPHPARKRLNFGQTGEAESVPDPQPIGEPPSDPSSVGSGTMAAGGGAPMADNNEGADGVGNSSGNWHCDSTWLGDRVITTSTRTWALPTYNNHLYKQISSQSGATNDNHYFGYSTPWGYFDFNRFHCHFSPRDWQRLINNNWGFRPKRLSFKLFNIQVKEVTQNDGTTTIANNLTSTVQVFTDSEYQLPYVLGSAHQGCLPPFPADVFMIPQYGYLTLNNGSQAVGRSSFYCLEYFPSQMLRTGNNFQFSYTFEDVPFHSSYAHSQSLDRLMNPLIDQYLYYLSKTQGTNATVQGAKLQFSQAGPSNMRDQARNWLPGPCYRQQRVSKTANDNNNSEYAWTGATKYHLNGRDSLVNPGPAMASHKDDEEKFFPMNGTLVFGKNGAGNSNVDIENVMITDEEEIRTTNPVATEQYGVVSDNLQSSNTRPITGDVDSQGVLPGMVWQDRDVYLQGPIWAKIPHTDGHFHPSPLMGGFGLKHPPPQILIKNTPVPANPATTFTPGKFASFITQYSTGQVSVQIEWELQKENSKRWNPEIQYTSNYNKSVNVDFTVDTNGVYSEPRPIGTRYLTRNL

SEQ ID NO: 5092 - protein, 736 aa, Adeno-associated virus; identical to SEQ ID NO: 4787

SEQ ID NO: 5093 - protein, 736 aa, Adeno-associated virus
MAADGYLPDWLEDNLSEGIREWWDLKPGAPKPKANQQKQDDGRGLVLPGYKYLGPFNGLDKGEPVNAADAAALEHDKAYDQQLKAGDNPYLRYNHADAEFQERLQEDTSFGGNLGRAVFQAKKRVLEPLGLVEEGAKTAPGKKRPVEQSPQEPDSSSGIGKTGQQPAKKRLNFGQTGDSESVPDPQPLGEPPAAPSGLGPNTMASGGGAPMADNNEGADGVGNSSGNWHCDSTWLGDRVITTSTRTWALPTYNNHLYKQISNGTSGGSTNDNTYFGYSTPWGYFDFNRFHCHFSPRDWQRLINNNWGFRPKRLNFKLFNIQVKEVTTNEGTKTIANNLTSTVQVFTDSEYQLPYVLGSAHQGCLPPFPADVFMVPQYGYLTLNNGSQALGRSSFYCLEYFPSQMLRTGNNFQFSYTFEDVPFHSSYAHSQSLDRLMNPLIDQYLYYLVRTQTTGTGGTQTLAFSQAGPSSMANQARNWVPGPCYRQQRVSTTTNQNNNSNFAWTGAAKFKLNGRDSLMNPGVAMASHKDDEDRFFPSSGVLIFGKQGAGNDGVDYSQVLITDEEEIKATNPVATEEYGAVAINNQAANTQAQTGLVHNQGVIPGMVWQNRDVYLQGPIWAKIPHTDGNFHPSPLMGGFGLKHPPPQILIKNTPVPADPPLTFNQAKLNSFITQYSTGQVSVEIEWELQKENSKRWNPEIQYTSNYYKSTNVDFAVNTEGVYSEPRPIGTRYLTRNL

SEQ ID NO: 5094 - DNA, 2211 bp, Adeno-associated virus 1; identical to SEQ ID NO: 4977

SEQ ID NO: 5095 - protein, 736 aa, Adeno-associated virus 1; identical to SEQ ID NO: 5088

SEQ ID NO: 5096 - DNA, 4718 bp, Adeno-associated virus 1
ttgcccactccctctctgcgcgctcgctcgctcggtggggcctgcggaccaaaggtccgcagacggcagagctctgctctgccggccccaccgagcgagcgagcgcgcagagagggagtgggcaactccatcactaggggtaatcgcgaagcgcctcccacgctgccgcgtcagcgctgacgtaaattacgtcataggggagtggtcctgtattagctgtcacgtgagtgcttttgcgacattttgcgacaccacgtggccatttagggtatatatggccgagtgagcgagcaggatctccattttgaccgcgaaatttgaacgagcagcagccatgccgggcttctacgagatcgtgatcaaggtgccgagcgacctggacgagcacctgccgggcatttctgactcgtttgtgagctgggtggccgagaaggaatgggagctgcccccggattctgacatggatctgaatctgattgagcaggcacccctgaccgtggccgagaagctgcagcgcgacttcctggtccaatggcgccgcgtgagtaaggccccggaggccctcttctttgttcagttcgagaagggcgagtcctacttccacctccatattctggtggagaccacgggggtcaaatccatggtgctgggccgcttcctgagtcagattagggacaagctggtgcagaccatctaccgcgggatcgagccgaccctgcccaactggttcgcggtgaccaagacgcgtaatggcgccggaggggggaacaaggtggtggacgagtgctacatccccaactacctcctgcccaagactcagcccgagctgcagtgggcgtggactaacatggaggagtatataagcgcctgtttgaacctggccgagcgcaaacggctcgtggcgcagcacctgacccacgtcagccagacccaggagcagaacaaggagaatctgaaccccaattctgacgcgcctgtcatccggtcaaaaacctccgcgcgctacatggagctggtcgggtggctggtggaccggggcatcacctccgagaagcagtggatccaggaggaccaggcctcgtacatctccttcaacgccgcttccaactcgcggtcccagatcaaggccgctctggacaatgccggcaagatcatggcgctgaccaaatccgcgcccgactacctggtaggccccgctccgcccgcggacattaaaaccaaccgcatctaccgcatcctggagctgaacggctacgaacctgcctacgccggctccgtctttctcggctgggcccagaaaaggttcgggaagcgcaacaccatctggctgtttgggccggccaccacgggcaagaccaacatcgcggaagccatcgcccacgccgtgcccttctacggctgcgtcaactggaccaatgagaactttcccttcaatgattgcgtcgacaagatggtgatctggtgggaggagggcaagatgacggccaaggtcgtggagtccgccaaggccattctcggcggcagcaaggtgcgcgtggaccaaaagtgcaagtcgtccgcccagatcgaccccacccccgtgatcgtcacctccaacaccaacatgtgcgccgtgattgacgggaacagcaccaccttcgagcaccagcagccgttgcaggaccggatgttcaaatttgaactcacccgccgtctggagcatgactttggcaaggtgacaaagcaggaagtcaaagagttcttccgctgggcgcaggatcacgtgaccgaggtggcgcatgagttctacgtcagaaagggtggagccaacaaaagacccgcccccgatgacgcggataaaagcgagcccaagcgggcctgcccctcagtcgcggatccatcgacgtcagacgcggaaggagctccggtggactttgccgacaggtaccaaaacaaatgttctcgtcacgcgggcatgcttcagatgctgtttccctgcaagacatgcgagagaatgaatcagaatttcaacatttgcttcacgcacgggacgagagactgttcagagtgcttccccggcgtgtcagaatctcaaccggtcgtcagaaagaggacgtatcggaaactctgtgccattcatcatctgctggggcgggctcccgagattgcttgctcggcctgcgatctggtcaacgtggacctggatgactgtgtttctgagcaataaatgacttaaaccaggtatggctgccgatggttatcttccagattggctcgaggacaacctctctgagggcattcgcgagtggtgggacttgaaacctggagccccgaagcccaaagccaaccagcaaaagcaggacgacggccggggtctggtgcttcctggctacaagtacctcggacccttcaacggactcgacaagggggagcccgtcaacgcggcggacgcagcggccctcgagcacgacaaggcctacgaccagcagctcaaagcgggtgacaatccgtacctgcggtataaccacgccgacgccgagtttcaggagcgtctgcaagaagatacgtcttttgggggcaacctcgggcgagcagtcttccaggccaagaagcgggttctcgaacctctcggtctggttgaggaaggcgctaagacggctcctggaaagaaacgtccggtagagcagtcgccacaagagccagactcctcctcgggcatcggcaagacaggccagcagcccgctaaaaagagactcaattttggtcagactggcgactcagagtcagtccccgatccacaacctctcggagaacctccagcaacccccgctgctgtgggacctactacaatggcttcaggcggtggcgcaccaatggcagacaataacgaaggcgccgacggagtgggtaatgcctcaggaaattggcattgcgattccacatggctgggcgacagagtcatcaccaccagcacccgcacctgggccttgcccacctacaataaccacctctacaagcaaatctccagtgcttcaacgggggccagcaacgacaaccactacttcggctacagcaccccctgggggtattttgatttcaacagattccactgccacttttcaccacgtgactggcagcgactcatcaacaacaattggggattccggcccaagagactcaacttcaaactcttcaacatccaagtcaaggaggtcacgacgaatgatggcgtcacaaccatcgctaataaccttaccagcacggttcaagtcttctcggactcggagtaccagcttccgtacgtcctcggctctgcgcaccagggctgcctccctccgttcccggcggacgtgttcatgattccgcaatacggctacctgacgctcaacaatggcagccaagccgtgggacgttcatccttttactgcctggaatatttcccttctcagatgctgagaacgggcaacaactttaccttcagctacacctttgaggaagtgcctttccacagcagctacgcgcacagccagagcctggaccggctgatgaatcctctcatcgaccaatacctgtattacctgaacagaactcaaaatcagtccggaagtgcccaaaacaaggacttgctgtttagccgtgggtctccagctggcatgtctgttcagcccaaaaactggctacctggaccctgttatcggcagcagcgcgtttctaaaacaaaaacagacaacaacaacagcaattttacctggactggtgcttcaaaatataacctcaatgggcgtgaatccatcatcaaccctggcactgctatggcctcacacaaagacgacgaagacaagttctttcccatgagcggtgtcatgatttttggaaaagagagcgccggagcttcaaacactgcattggacaatgtcatgattacagacgaagaggaaattaaagccactaaccctgtggccaccgaaagatttgggaccgtggcagtcaatttccagagcagcagcacagaccctgcgaccggagatgtgcatgctatgggagcattacctggcatggtgtggcaagatagagacgtgtacctgcagggtcccatttgggccaaaattcctcacacagatggacactttcacccgtctcctcttatgggcggctttggactcaagaacccgcctcctcagatcctcatcaaaaacacgcctgttcctgcgaatcctccggcggagttttcagctacaaagtttgcttcattcatcacccaatactccacaggacaagtgagtgtggaaattgaatgggagctgcagaaagaaaacagcaagcgctggaatcccgaagtgcagtacacatccaattatgcaaaatctgccaacgttgattttactgtggacaacaatggactttatactgagcctcgccccattggcacccgttaccttacccgtcccctgtaattacgtgttaatcaataaaccggttgattcgtttcagttgaactttggtctcctgtccttcttatcttatcggttaccatggttatagcttacacattaactgcttggttgcgcttcgcgataaaagacttacgtcatcgggttacccctagtgatggagttgcccactccctctctgcgcgctcgctcgctcggtggggcctgcggaccaaaggtccgcagacggcagagctctgctctgccggccccaccgagcgagcgagcgcgcagagagggagtgggcaa

SEQ ID NO: 5097 - DNA, 255 bp, Adeno-associated virus 10
ggtaattcctccggaaattggcattgcgattccacatggctgggcgacagagtcatcaccaccagcacccgaacctgggtcctgcccacctacaacaaccacatctacaagcaaatctccagcgagacaggagccaccaacgacaaccactacttcggctacagcaccccctgggggtattttgactttaacagattccactgccacttttcaccacgtgactggcagcgactcatcaacaacaactggggattc

SEQ ID NO: 5098 - protein, 738 aa, Adeno-associated virus 10
MAADGYLPDWLEDNLSEGIREWWDLKPGAPKPKANQQKQDDGRGLVLPGYKYLGPFNGLDKGEPVNAADAAALEHDKAYDQQLKAGDNPYLRYNHADAEFQERLQEDTSFGGNLGRAVFQAKKRVLEPLGLVEEAAKTAPGKKRPVEPSPQRSPDSSTGIGKKGQQPAKKRLNFGQTGESESVPDPQPIGEPPAGPSGLGSGTMAAGGGAPMADNNEGADGVGSSSGNWHCDSTWLGDRVITTSTRTWALPTYNNHLYKQISNGTSGGSTNDNTYFGYSTPWGYFDFNRFHCHFSPRDWQRLINNNWGFRPKRLSFKLFNIQVKEVTQNEGTKTIANNLTSTIQVFTDSEYQLPYVLGSAHQGCLPPFPADVFMIPQYGYLTLNNGSQAVGRSSFYCLEYFPSQMLRTGNNFEFSYTFEDVPFHSSYAHSQSLDRLMNPLIDQYLYYLSRTQSTGGTQGTQQLLFSQAGPANMSAQAKNWLPGPCYRQQRVSTTLSQNNNSNFAWTGATKYHLNGRDSLVNPGVAMATHKDDEERFFPSSGVLMFGKQGAGRDNVDYSSVMLTSEEEIKTTNPVATEQYGVVADNLQQANTGPIVGNVNSQGALPGMVWQNRDVYLQGPIWAKIPHTDGNFHPSPLMGGFGLKHPPPQILIKNTPVPADPPTTFSQAKLASFITQYSTGQVSVEIEWELQKENSKRWNPEIQYTSNYYKSTNVDFAVNTEGTYSEPRPIGTRYLTRNL

SEQ ID NO: 5099 - protein, 738 aa, Adeno-associated virus 10; identical to SEQ ID NO: 4793

SEQ ID NO: 5100 - DNA, 258 bp, Adeno-associated virus 11
ggtaattcctccggaaattggcattgcgattccacatggctgggcgacagagtcatcaccaccagcacccgaacctgggccctgccaacctacaacaaccacctctacaaacaaatctccagcgcttcaacgggggccagcaacgacaaccactactttggctacagcaccccctgggggtattttgactttaacagattccactgccacttctcaccacgtgactggcagcgactcatcaacaacaactggggattc

SEQ ID NO: 5101 - DNA, 255 bp, Adeno-associated virus 12
ggtaattcctccggaaattggcattgcgattccacatggctgggcgaccgagtcattaccaccagcacccggacttgggccctgcccacctacaacaaccacctctacaagcaaatctccagccaatcgggtgccaccaacgacaaccactacttcggctacagcaccccttgggggtattttgatttcaacagattccactgccatttctcaccacgtgactggcagcgactcatcaacaacaactggggattc

SEQ ID NO: 5102 - DNA, 2208 bp, Adeno-associated virus 2
atggctgccgatggttatcttccagattggctcgaggacactctctctgaaggaataagacagtggtggaagctcaaacctggcccaccaccaccaaagcccgcagagcggcataaggacgacagcaggggtcttgtgcttcctgggtacaagtacctcggacccttcaacggactcgacaagggagagccggtcaacgaggcagacgccgcggccctcgagcacgacaaagcctacgaccggcagctcgacagcggagacaacccgtacctcaagtacaaccacgccgacgcggagtttcaggagcgccttaaagaagatacgtcttttgggggcaacctcggacgagcagtcttccaggcgaaaaagagggttcttgaacctctgggcctggttgaggaacctgttaagacggctccgggaaaaaagaggccggtagagcactctcctgtggagccagactcctcctcgggaaccggaaaggcgggccagcagcctgcaagaaaaagattgaattttggtcagactggagacgcagactcagtacctgacccccagcctctcggacagccaccagcagccccctctggtctgggaactaatacgatggctacaggcagtggcgcaccaatggcagacaataacgagggcgccgacggagtgggtaattcctcgggaaattggcattgcgattccacatggatgggcgacagagtcatcaccaccagcacccgaacctgggccctgcccacctacaacaaccacctctacaaacaaatttccagccaatcaggagcctcgaacgacaatcactactttggctacagcaccccttgggggtattttgacttcaacagattccactgccacttttcaccacgtgactggcaaagactcatcaacaacaactggggattccgacccaagagactcaacttcaagctctttaacattcaagtcaaagaggtcacgcagaatgacggtacgacgacgattgccaataaccttaccagcacggttcaggtgtttactgactcggagtaccagctcccgtacgtcctcggctcggcgcatcaaggatgcctcccgccgttcccagcagacgtcttcatggtgccacagtatggatacctcaccctgaacaacgggagtcaggcagtaggacgctcttcattttactgcctggagtactttccttctcagatgctgcgtaccggaaacaactttaccttcagctacacttttgaggacgttcctttccacagcagctacgctcacagccagagtctggaccgtctcatgaatcctctcatcgaccagtacctgtattacttgagcagaacaaacactccaagtggaaccaccacgcagtcaaggcttcagttttctcaggccggagcgagtgacattcgggaccagtctaggaactggcttcctggaccctgttaccgccagcagcgagtatcaaagacatctgcggataacaacaacagtgaatactcgtggactggagctaccaagtaccacctcaatggcagagactctctggtgaatccgggcccggccatggcaagccacaaggacgatgaagaaaagttttttcctcagagcggggttctcatctttgggaagcaaggctcagagaaaacaaatgtggacattgaaaaggtcatgattacagacgaagaggaaatcaggacaaccaatcccgtggctacggagcagtatggttctgtatctaccaacctccagagaggcaacagacaagcagctaccgcagatgtcaacacacaaggcgttcttccaggcatggtctggcaggacagagatgtgtaccttcaggggcccatctgggcaaagattccacacacggacggacattttcacccctctcccctcatgggtggattcggacttaaacaccctcctccacagattctcatcaagaacaccccggtacctgcgaatccttcgaccaccttcagtgcggcaaagtttgcttccttcatcacacagtactccacgggacaggtcagcgtggagatcgagtgggagctgcagaaggaaaacagcaaacgctggaatcccgaaattcagtacacttccaactacaacaagtctgttaatgtggactttactgtggacactaatggcgtgtattcagagcctcgccccattggcaccagatacctgactcgtaatctgtaa

SEQ ID NO: 5103 - protein, 735 aa, Adeno-associated virus 2 [sequence omitted]

SEQ ID NO: 5104 - protein, 621 aa, Adeno-associated virus 2
MPGFYEIVIKVPSDLDGHLPGISDSFVNWVAEKEWELPPDSDMDLNLIEQAPLTVAEKLQRDFLTEWRRVSKAPEALFFVQFEKGESYFHMHVLVETTGVKSMVLGRFLSQIREKLIQRIYRGIEPTLPNWFAVTKTRNGAGGGNKVVDECYIPNYLLPKTQPELQWAWTNMEQYLSACLNLTERKRLVAQHLTHVSQTQEQNKENQNPNSDAPVIRSKTSARYMELVGWLVDKGITSEKQWIQEDQASYISFNAASNSRSQIKAALDNAGKIMSLTKTAPDYLVGQQPVEDISSNRIYKILELNGYDPQYAASVFLGWATKKFGKRNTIWLFGPATTGKTNIAEAIAHTVPFYGCVNWTNENFPFNDCVDKMVIWWEEGKMTAKVVESAKAILGGSKVRVDQKCKSSAQIDPTPVIVTSNTNMCAVIDGNSTTFEHQQPLQDRMFKFELTRRLDHDFGKVTKQEVKDFFRWAKDHVVEVEHEFYVKKGGAKKRPAPSDADISEPKRVRESVAQPSTSDAEASINYADRYQNKCSRHVGMNLMLFPCRQCERMNQNSNICFTHGQKDCLECFPVSESQPVSVVKKAYQKLCYIHHIMGKVPDACTACDLVNVDLDDCIFEQ

SEQ ID NO: 5105 - DNA, 4675 bp, Adeno-associated virus 2
ttggccactccctctctgcgcgctcgctcgctcactgaggccgggcgaccaaaggtcgcccgacgcccgggctttgcccgggcggcctcagtgagcgagcgagcgcgcagagagggagtggccaactccatcactaggggttcctggaggggtggagtcgtgacgtgaattacgtcatagggttagggaggtcctgtattagaggtcacgtgagtgttttgcgacattttgcgacaccatgtggtcacgctgggtatttaagcccgagtgagcacgcagggtctccattttgaagcgggaggtttgaacgcgcagccgccatgccggggttttacgagattgtgattaaggtccccagcgaccttgacgggcatctgcccggcatttctgacagctttgtgaactgggtggccgagaaggaatgggagttgccgccagattctgacatggatctgaatctgattgagcaggcacccctgaccgtggccgagaagctgcagcgcgactttctgacggaatggcgccgtgtgagtaaggccccggaggcccttttctttgtgcaatttgagaagggagagagctacttccacatgcacgtgctcgtggaaaccaccggggtgaaatccatggttttgggacgtttcctgagtcagattcgcgaaaaactgattcagagaatttaccgcgggatcgagccgactttgccaaactggttcgcggtcacaaagaccagaaatggcgccggaggcgggaacaaggtggtggatgagtgctacatccccaattacttgctccccaaaacccagcctgagctccagtgggcgtggactaatatggaacagtatttaagcgcctgtttgaatctcacggagcgtaaacggttggtggcgcagcatctgacgcacgtgtcgcagacgcaggagcagaacaaagagaatcagaatcccaattctgatgcgccggtgatcagatcaaaaacttcagccaggtacatggagctggtcgggtggctcgtggacaaggggattacctcggagaagcagtggatccaggaggaccaggcctcatacatctccttcaatgcggcctccaactcgcggtcccaaatcaaggctgccttggacaatgcgggaaagattatgagcctgactaaaaccgcccccgactacctggtgggccagcagcccgtggaggacatttccagcaatcggatttataaaattttggaactaaacgggtacgatccccaatatgcggcttccgtctttctgggatgggccacgaaaaagttcggcaagaggaacaccatctggctgtttgggcctgcaactaccgggaagaccaacatcgcggaggccatagcccacactgtgcccttctacgggtgcgtaaactggaccaatgagaactttcccttcaacgactgtgtcgacaagatggtgatctggtgggaggaggggaagatgaccgccaaggtcgtggagtcggccaaagccattctcggaggaagcaaggtgcgcgtggaccagaaatgcaagtcctcggcccagatagacccgactcccgtgatcgtcacctccaacaccaacatgtgcgccgtgattgacgggaactcaacgaccttcgaacaccagcagccgttgcaagaccggatgttcaaatttgaactcacccgccgtctggatcatgactttgggaaggtcaccaagcaggaagtcaaagactttttccggtgggcaaaggatcacgtggttgaggtggagcatgaattctacgtcaaaaagggtggagccaagaaaagacccgcccccagtgacgcagatataagtgagcccaaacgggtgcgcgagtcagttgcgcagccatcgacgtcagacgcggaagcttcgatcaactacgcagacaggtaccaaaacaaatgttctcgtcacgtgggcatgaatctgatgctgtttccctgcagacaatgcgagagaatgaatcagaattcaaatatctgcttcactcacggacagaaagactgtttagagtgctttcccgtgtcagaatctcaacccgtttctgtcgtcaaaaaggcgtatcagaaactgtgctacattcatcatatcatgggaaaggtgccagacgcttgcactgcctgcgatctggtcaatgtggatttggatgactgcatctttgaacaataaatgatttaaatcaggtatggctgccgatggttatcttccagattggctcgaggacactctctctgaaggaataagacagtggtggaagctcaaacctggcccaccaccaccaaagcccgcagagcggcataaggacgacagcaggggtcttgtgcttcctgggtacaagtacctcggacccttcaacggactcgacaagggagagccggtcaacgaggcagacgccgcggccctcgagcacgtacaaagcctacgaccggcagctcgacagcggagacaacccgtacctcaagtacaaccacgccgacgcggagtttcaggagcgccttaaagaagatacgtcttttgggggcaacctcggacgagcagtcttccaggcgaaaaagagggttcttgaacctctgggcctggttgaggaacctgttaagacggctccgggaaaaaagaggccggtagagcactctcctgtggagccagactcctcctcgggaaccggaaaggcgggccagcagcctgcaagaaaaagattgaattttggtcagactggagacgcagactcagtacctgacccccagcctctcggacagccaccagcagccccctctggtctgggaactaatacgatggctacaggcagtggcgcaccaatggcagacaataacgagggcgccgacggagtgggtaattcctccggaaattggcattgcgattccacatggatgggcgacagagtcatcaccaccagcacccgaacctgggccctgcccacctacaacaaccacctctacaaacaaatttccagccaatcaggagcctcgaacgacaatcactactttggctacagcaccccttgggggtattttgacttcaacagattccactgccacttttcaccacgtgactggcaaagactcatcaacaacaactggggattccgacccaagagactcaacttcaagctctttaacattcaagtcaaagaggtcacgcagaatgacggtacgacgacgattgccaataaccttaccagcacggttcaggtgtttactgactcggagtaccagctcccgtacgtcctcggctcggcgcatcaaggatgcctcccgccgttcccagcagacgtcttcatggtgccacagtatggatacctcaccctgaacaacgggagtcaggcagtaggacgctcttcattttactgcctggagtactttccttctcagatgctgcgtaccggaaacaactttaccttcagctacacttttgaggacgttcctttccacagcagctacgctcacagccagagtctggaccgtctcatgaatcctctcatcgaccagtacctgtattacttgagcagaacaaacactccaagtggaaccaccacgcagtcaaggcttcagttttctcaggccggagcgagtgacattcgggaccagtctaggaactggcttcctggaccctgttaccgccagcagcgagtatcaaagacatctgcggataacaacaacagtgaatactcgtggactggagctaccaagtaccacctcaatggcagagactctctggtgaatccggccatggcaagccacaaggacgatgaagaaaagttttttcctcagagcggggttctcatctttgggaagcaaggctcagagaaaacaaatgtgaacattgaaaaggtcatgattacagacgaagaggaaatcggaacaaccaatcccgtggctacggagcagtatggttctgtatctaccaacctccagagaggcaacagacaagcagctaccgcagatgtcaacacacaaggcgttcttccaggcatggtctggcaggacagagatgtgtaccttcaggggcccatctgggcaaagattccacacacggacggacattttcacccctctcccctcatgggtggattcggacttaaacaccctcctccacagattctcatcaagaacaccccggtacctgcgaatccttcgaccaccttcagtgcggcaaagtttgcttccttcatcacacagtactccacgggacacggtcagcgtggagatcgagtgggagctgcagaaggaaaacagcaaacgctggaatcccgaaattcagtacacttccaactacaacaagtctgttaatcgtggacttaccgtggatactaatggcgtgtattcagagcctcgccccattggcaccagatacctgactcgtaatctgtaattgcttgttaatcaataaaccgtttaattcgtttcagttgaactttggtctctgcgtatttctttcttatctagtttccatggctacgtagataagtagcatggcgggttaatcattaactacaaggaacccctagtgatggagttggccactccctctctgcgcgctcgctcgctcactgaggccgggcgaccaaaggtcgcccgacgcccgggctttgcccgggcggcctcagtgagcgagcgagcgcgcagagagggagtggccaa

SEQ ID NO: 5106 - DNA, 4679 bp, Adeno-associated virus 2
ttggccactccctctctgcgcgctcgctcgctcactgaggccgggcgaccaaaggtcgcccgacgcccgggctttgcccgggcggcctcagtgagcgagcgagcgcgcagagagggagtggccaactccatcactaggggttcctggaggggtggagtcgtgacgtgaattacgtcatagggttagggaggtcctgtattagaggtcacgtgagtgttttgcgacattttgcgacaccatgtggtcacgctgggtatttaagcccgagtgagcacgcagggtctccattttgaagcgggaggtttgaacgcgcagccgccatgccggggttttacgagattgtgattaaggtccccagcgaccttgacgggcatctgcccggcatttctgacagctttgtgaactgggtggccgagaaggaatgggagttgccgccagattctgacatggatctgaatctgattgagcaggcacccctgaccgtggccgagaagctgcagcgcgactttctgacggaatggcgccgtgtgagtaaggccccggaggcccttttctttgtgcaatttgagaagggagagagctacttccacatgcacgtgctcgtggaaaccaccggggtgaaatccatggttttgggacgtttcctgagtcagattcgcgaaaaactgattcagagaatttaccgcgggatcgagccgactttgccaaactggttcgcggtcacaaagaccagaaatggcgccggaggcgggaacaaggtggtggatgagtgctacatccccaattacttgctccccaaaacccagcctgagctccagtgggcgtggactaatatggaacagtatttaagcgcctgtttgaatctcacggagcgtaaacggttggtggcgcagcatctgacgcacgtgtcgcagacgcaggagcagaacaaagagaatcagaatcccaattctgatgcgccggtgatcagatcaaaaacttcagccaggtacatggagctggtcgggtggctcgtggacaaggggattacctcggagaagcagtggatccaggaggaccaggcctcatacatctccttcaatgcggcctccaactcgcggtcccaaatcaaggctgccttggacaatgcgggaaagattatgagcctgactaaaaccgcccccgactacctggtgggccagcagcccgtggaggacatttccagcaatcggatttataaaattttggaactaaacgggtacgatccccaatatgcggcttccgtctttctgggatgggccacgaaaaagttcggcaagaggaacaccatctggctgtttgggcctgcaactaccgggaagaccaacatcgcggaggccatagcccacactgtgcccttctacgggtgcgtaaactggaccaatgagaactttcccttcaacgactgtgtcgacaagatggtgatctggtgggaggaggggaagatgaccgccaaggtcgtggagtcggccaaagccattctcggaggaagcaaggtgcgcgtggaccagaaatgcaagtcctcggcccagatagacccgactcccgtgatcgtcacctccaacaccaacatgtgcgccgtgattgacgggaactcaacgaccttcgaacaccagcagccgttgcaagaccggatgttcaaatttgaactcacccgccgtctggatcatgactttgggaaggtcaccaagcaggaagtcaaagactttttccggtgggcaaaggatcacgtggttgaggtggagcatgaattctacgtcaaaaagggtggagccaagaaaagacccgcccccagtgacgcagatataagtgagcccaaacgggtgcgcgagtcagttgcgcagccatcgacgtcagacgcggaagcttcgatcaactacgcagacaggtaccaaaacaaatgttctcgtcacgtgggcatgaatctgatgctgtttccctgcagacaatgcgagagaatgaatcagaattcaaatatctgcttcactcacggacagaaagactgtttagagtgctttcccgtgtcagaatctcaacccgtttctgtcgtcaaaaaggcgtatcagaaactgtgctacattcatcatatcatgggaaaggtgccagacgcttgcactgcctgcgatctggtcaatgtggatttggatgactgcatctttgaacaataaatgatttaaatcaggtatggctgccgatggttatcttccagattggctcgaggacactctctctgaaggaataagacagtggtggaagctcaaacctggcccaccaccaccaaagcccgcagagcggcataaggacgacagcaggggtcttgtgcttcctgggtacaagtacctcggacccttcaacggactcgacaagggagagccggtcaacgaggcagacgccgcggccctcgagcacgacaaagcctacgaccggcagctcgacagcggagacaacccgtacctcaagtacaaccacgccgacgcggagtttcaggagcgccttaaagaagatacgtcttttgggggcaacctcggacgagcagtcttccaggcgaaaaagagggttcttgaacctctgggcctggttgaggaacctgttaagacggctccgggaaaaaagaggccggtagagcactctcctgtggagccagactcctcctcgggaaccggaaaggcgggccagcagcctgcaagaaaaagattgaattttggtcagactggagacgcagactcagtacctgacccccagcctctcggacagccaccagcagccccctctggtctgggaactaatacgatggctacaggcagtggcgcaccaatggcagacaataacgagggcgccgacggagtgggtaattcctccggaaattggcattgcgattccacatggatgggcgacagagtcatcaccaccagcacccgaacctgggccctgcccacctacaacaaccacctctacaaacaaatttccagccaatcaggagcctcgaacgacaatcactactttggctacagcaccccttgggggtattttgacttcaacagattccactgccacttttcaccacgtgactggcaaagactcatcaacaacaactggggattccgacccaagagactcaacttcaagctctttaacattcaagtcaaagaggtcacgcagaatgacggtacgacgacgattgccaataaccttaccagcacggttcaggtgtttactgactcggagtaccagctcccgtacgtcctcggctcggcgcatcaaggatgcctcccgccgttcccagcagacgtcttcatggtgccacagtatggatacctcaccctgaacaacgggagtcaggcagtaggacgctcttcattttactgcctggagtactttccttctcagatgctgcgtaccggaaacaactttaccttcagctacacttttgaggacgttcctttccacagcagctacgctcacagccagagtctggaccgtctcatgaatcctctcatcgaccagtacctgtattacttgagcagaacaaacactccaagtggaaccaccacgcagtcaaggcttcagttttctcaggccggagcgagtgacattcgggaccagtctaggaactggcttcctggaccctgttaccgccagcagcgagtatcaaagacatctgcggataacaacaacagtgaatactcgtggactggagctaccaagtaccacctcaatggcagagactctctggtgaatccgggcccggccatggcaagccacaaggacgatgaagaaaagttttttcctcagagcggggttctcatctttgggaagcaaggctcagagaaaacaaatgtggacattgaaaaggtcatgattacagacgaagaggaaatcaggacaaccaatcccgtggctacggagcagtatggttctgtatctaccaacctccagagaggcaacagacaagcagctaccgcagatgtcaacacacaaggcgttcttccaggcatggtctggcaggacagagatgtgtaccttcaggggcccatctgggcaaagattccacacacggacggacattttcacccctctcccctcatgggtggattcggacttaaacaccctcctccacagattctcatcaagaacaccccggtacctgcgaatccttcgaccaccttcagtgcggcaaagtttgcttccttcatcacacagtactccacgggacaggtcagcgtggagatcgagtgggagctgcagaaggaaaacagcaaacgctggaatcccgaaattcagtacacttccaactacaacaagtctgttaatgtggactttactgtggacactaatggcgtgtattcagagcctcgccccattggcaccagatacctgactcgtaatctgtaattgcttgttaatcaataaaccgtttaattcgtttcagttgaactttggtctctgcgtatttctttcttatctagtttccatggctacgtagataagtagcatggcgggttaatcattaactacaaggaacccctagtgatggagttggccactccctctctgcgcgctcgctcgctcactgaggccgggcgaccaaaggtcgcccgacgcccgggctttgcccgggcggcctcagtgagcgagcgagcgcgcagagagggagtggccaa

SEQ ID NO: 5107 - protein, 735 aa, Adeno-associated virus 2
MAADGYLPDWLEDTLSEGIRQWWKLKPGPPPPKPAERHKDDSRGLVLPGYKYLGPFNGLDKGEPVNEADAAALEHDKAYDRQLDSGDNPYLKYNHADAEFQERLKEDTSFGGNLGRAVFQAKKRVLEPLGLVEEPVKTAPGKKRPVEHSPVEPDSSSGTGKAGQQPARKRLNFGQTGDADSVPDPQPLGEPPATPAAVGPTTMASGGGAPMADNNEGADGVGNASGNWHCDSTWLGDRVITTSTRTWALPTYNNHLYKQISSASTGASNDNHYFGYSTPWGYFDFNRFHCHFSPRDWQRLINNNWGFRPKRLNFKLFNIQVKEVTQNDGTTTIANNLTSTVQVFTDSEYQLPYVLGSAHQGCLPPFPADVFMIPQYGYLTLNNGSQAVGRSSFYCLEYFPSQMLRTGNNFTFSYTFEDVPFHSSYAHSQSLDRLMNPLIDQYLYYLNRTQNQSGSAQDKALLFSRGSPAGMSVQPKNWLPGPCYRQQRVSKTKTDNNNSNFTWTGASKYNLNGRESIINPGTAMASHKDDKDKFFPMSGVMIFGKESAGASNTALDNVMITDEEEIKATNPVATERFGTVAVNFQSSSTDPATGDVHVMGALPGMVWQDRDVYLQGPIWAKIPHTDGHFHPSPLMGGFGLKHPPPQILIKNTPVPANPPAEFSATKFASFITQYSTGQVSVEIEWELQKENSKRWNPEVQYTSNYAKSANVDFTVDNNGLYTEPRPIGTRYLTRP

SEQ ID NO: 5108 - protein, 740 aa, Adeno-associated virus 2
MAADGYLPDWLEDTLSEGIRQWWKLKPGPPPPKPAERHKDDSRGLVLPGYKYLGPFNGLDKGEPVNAADAAALEHDKAYDRQLDSGDNPYLKYNHADAEFQERLKEDTSFGGNLGRAVFQAKKRVLEPLGLVEEPVKTAPGKKRPVEHSPVEPDSSSGTGKAGQQPARKRLNFGQTGDADSVPDPQPLGQPPAAPSGLGTNTMATGSGAPMADNNEGADGVGNSSGNWHCDSTWMGDRVITTSTRTWALPTYNNHLYKQISSQSGASNDNHYFGYSTPWGYFDFNRFHCHFSPRDWQRLINNNWGFRPKRLNFKLFNIQVKEVTQNDGTTTIANNLTSTVQVFTDSEYQLPYVLGSAHQGCLPPFPADVFMVPQYGYLTLNNGSQAVGRSSFYCLEYFPSQMLRTGNNFTFSYTFEDVPFHSSYAHSQSLDRLMNPLIDQYLYYLSRTNTPSGTTTQSGLQFSQAGASDIRDQSRNWLPGPCYRQQRVSKTSADNNNSEYSWTGATKYHLNGRDSLVNPGPAMASHKDDEEKFFPQSGVLIFGKQGSEKTNVDIEKVMITDEEEIRTTNPVATEQYGSVSTNLQRGNRQAATADVNTQGVLPGMVWQDRDVYLQGPIWAKIPHTDGHFHPSPLMGGFGLKHPPPQILIKNTPVPANPSTTFSAAKFASFITQYSTGQVSVEIEWELQKENSKRWNPEIQYTSNYNKSVNVDFTVDTNGVYSEPRPIGTRYLTRNLLLAAA

SEQ ID NO: 5109 - protein, 734 aa, Adeno-associated virus 2
MAADGYLPDWLEDTLSEGIRQWWKLKPGPPPPKPAERHKDDSRGLVLPGYKYLGPFNGLDKGEPVNEADAAALEHDKAYDRQLDSGDNPYLKYNHADAEFQERLKEDTSFGGNLGRAVFQAKKRVLEPLGLVEEPVKTAPGKKRPVEHSPVEPDSSSGTGKAGQQPARKRLNFGQTGDADSVPDPQPLGQPPAAPSGLGTNTMATGSGAPMADNNEGADGVGNSSGNWHCDSTWMGDRVITTSTRTWALPTYNNHLYKQISSQSGASNDNHYFGYSTPWGYFDFNRFHCHFSPRDWQRLINNNWGFRPKRLNFKLFNIQVKEVTQNDGTTTIANNLTSTVQVFTDSEYQLPYVLGSAHQGCLPPFPADVFMVPQYGYLTLNNGSQAVGRSSFYCLEYFPSQMLRTGNNFTFSYTFEDVPFHSSYAHSQSLDRLMNPLIDQYLYYLSRTNTPSGTTTQSGLQFSQAGASDIRDQSRNWLPGPCYRQQRVSKTSADNNNSEYSWTGATMYHLNGRDSLVNPGPAMASHKDDEEKFFPQSGVLIFGKQGSEKTNVDIEKVMITDEEEIRTTNPVATEQYGSVSTNLQRGNRQAATADVNTQGVLPGMVWQDRDVYLQGPIWAKIPHTDGHFHPSPLMGGFGLKHPPPQILIKNTPVPANPSTTFSAAKFASFITQYSTGQVSVEIEWELQKENSKRWNPEIQYTSNYNKSINVDFTVDTNGVYSEPRPIGTRYLTRN

SEQ ID NO: 5110 - protein, 734 aa, Adeno-associated virus 2
MAADGYLPDWLEDTLSEGIRQWWKLKPGPPPPKPAERHKDDSRGLVLPGYKYLGPFNGLDKGEPVNEADAAALEHDKAYDRQLDSGDNPYLKYNHADAEFQERLKEDTSFGGNLGRAVFQAKKRVLEPLGLVEEPVKTAPGKKRPVEHSPVEPDSSSGTGKAGQQPARKRLNFGQTGDADSVPDPQPLGQPPAAPSGLGTNTMATGSGAPMADNNEGADGVGNSSGNWHCDSTWMGDRVITTSTRTWALPTYNNHLYKQISSQSGASNDNHYFGYSTPWGYFDFNRFHCHFSPRDWQRLINNNWGFRPKRLNFKLFNIQVKEVTQNDGTTTIANNLTSTVQVFTDSEYQLPYVLGSAHQGCLPPFPADVFMVPQYGYLTLNNGSQAVGRSSFYCLEYFPSQMLRTGNNFTFSYTFEDVPFHSSYAHSQSLDRLMNPLIDQYLYYLSRTNTPSGTTTQSGLQFSQAGASDIRDQSRNWLPGPCYRQQRVSKTSADNNNSEYSWTGATKYHLNGRDSLVNPGPAMASHKDDEEKFFPQSGVLIFGKQGSEKTNVDIEKVMITDEEEIRTTNPVATEQYGSVSTNLQRGNRQAATADVNTQGVLPGMVWQDRDVYLQGPIWAKIPHTDGHFHPSPLMGGFGLKHPPPQILIKNTPVPANPSTTFSEAKFASFITQYSTGQVSVEIEWELQKENSKRWNPEIQYTSNYNKSVNVDFTVDTNGVYSEPRPIGTRYLTRN

SEQ ID NO: 5111 - protein, 739 aa, Adeno-associated virus 2
MAADGYLPDWLEDTLSEGIRQWWKLKPGPPPPKPAERHKDDSRGLVLPGYKYLGPFNGLDKGEPVNEADAAALEHDKAYDRQLDSGDNPYLKYNHADAEFQERLKEDTSFGGNLGRAVFQAKKRVLEPLGLVEEPVKTAPGKKRPVEHSPVEPDSSSGTGKAGQQPARKRLNFGQTGDADSVPDPQPLGQPPAAPSGLGTNTMATGSGAPMADNNEGADGVGNSSGNWHCDSTWMGDRVITTSTRTWALPTYNNHLYKQISSQSGASNDNHYFGYSTPWGYFDFNRFHCHFSPRDWQRLINNNWGFRPKRLNFKLFNIQVKEVTQNDGTTTIANNLTSTVQVFTDSEYQLPYVLGSAHQGCLPPFPADVFMVPQYGYLTLNNGSQAVGRSSFYCLEYFPSQMLRTGNNFTFSYTFEDVPFHSSYAHSQSLDRLMNPLIDQYLYYLSRTNTPSGTTTQSGLQFSQAGASDIRDQSRNWLPGPCYRQQRVSKTSADNNNSEYSWTGATKYHLNGRDSLVNPGPAMASHKDDEEKFFPQSGVLIFGKQGSEKTNVDIEKVMITDEEEIRTTNPVATEQYGSVSTNLQRGNRQAATADVNTQGVLPGMVWQDRDVYLQGPIWAKIPHTDGHFHPSPLMGGFGLKHPPPQILIKNTPVPANPSTTFSAAKFASFITQYSTGQVSVEIEWELQKENSKRWNPEIQYTSNYNKSVNVDFTVDTNGVYSEPRPIGTRYLTRNLLLAA

SEQ ID NO: 5112 - protein, 725 aa, Adeno-associated virus 2
MAADGYLPDWLEDTLSEGIRQWWKLKPGPPPPKPAERHKDDSRGLVLPGYKYLGPFNGLDKGEPVNEADAAALEHDKAYDRQLDSGDNPYLKYNHADAEFQERLKEDTSFGGNLGRAVFQAKKRVLEPLGLVEEPVKTAPGKKRPVEHSPVEPDSSSGTGKAGQQPARKRLNFGQTGDADSVPDPQPLGQPPAAPSGLGTNTMATGSGAPMADNNEGADGVGNSSGNWHCDSTWMGDRVITTSTRTWALPTYNNHLYKQISSQSGASNDNHYFGYSTPWGYFDFNRFHCHFSPRDWQRLINNNWGFRPKRLNFKLFNIQVKEVTQNDGTTTIANNLTSTVQVFTDSEYQLPYVLGSAHQGCLPPFPADVFMVPQYGYLTLNNGSQAVGRSSFYCLEYFPSQMLRTGNNFTFSYTFEDVPFHSSYAHSQSLDRLMNPLIDQYLYYLSRTNTPSGTTTQSGLQFSQAGASDIRDQSRNWLPGPCYRQQRVSKTSADNNNSEYSWTGATKYHLNGRDSLVNPGPAMASHKDDEEKFFPQSGVLIFGKQGSEKTNVDIEKVMITDEEEIRTTNPVATEQYGSVSTNLQRGNRQAATADVNTQGVLPGMVWQDRDVYLQGPIWAKIPHTDGHFHPSPLMGGFGLKHPPPQILIKNTPVPANPSTTFSAAKFASFITQYSTGQVSVEIEWELQKENSKRWNPEIQYTSNYNKSVNVDFTVDTNGVYSEPRP

SEQ ID NO: 5113 - protein, 707 aa, Adeno-associated virus 2
MAADGYLPDWLEDTLSEGIRQWWKLKPGPPPPKPAERHKDDSRGLVLPGYKYLGPFNGLDKGEPVNEADAAALEHDKAYDRQLDSGDNPYLKYNHADAEFQERLKEDTSFGGNLGRAVFQAKKRVLEPLGLVEEPVKTAPGKKRPVEHSPVEPDSSSGTGKAGQQPARKRLNFGQTGDADSVPDPQPLGQPPAAPSGLGTNTMATGSGAPMADNNEGADGVGNSSGNWHCDSTWMGDRVITTSTRTWALPTYNNHLYKQISSQSGASNDNHYFGYSTPWGYFDFNRFHCHFSPRDWQRLINNNWGFRPKRLNFKLFNIQVKEVTQNDGTTTIANNLTSTVQVFTDSEYQLPYVLGSAHQGCLPPFPADVFMVPQYGYLTLNNGSQAVGRSSFYCLEYFPSQMLRTGNNFTFSYTFEDVPFHSSYAHSQSLDRLMNPLIDQYLYYLSRTNTPSGTTTQSGLQFSQAGASDIRDQSRNWLPGPCYRQQRVSKTSADNNNSEYSWTGATKYHLNGRDSLVNPGPAMASHKDDEEKFFPQSGVLIFGKQGSEKTNVDIEKVMITDEEEIRTTNPVATEQYGSCIYQPPERQQTSSYRRCQHTRRSSRHGLAGQRCVPSGAHLGKDSTHGRTFSPLSPHGWIRTTPSSTDSHQEHPGTCESFDHLQCGKVCFLHHTVLHGTGQRGDRVRAAEGKQQTLESRNSVHFQLQQVC

SEQ ID NO: 5114 - protein, 739 aa, Adeno-associated virus 2; identical to SEQ ID NO: 5111

SEQ ID NO: 5115 - protein, 737 aa, Adeno-associated virus 2
MASDGYLPDWLEDNLSEGIREWWDLKPGAPKPKANQQKQDDGRGLVLPGYKYLGPFNGLDKGEPVNAADAAALEHDKAYDQQLKAGDNPYLRYNHADAEFQERLQEDTSFGGNLGRAVFQAKKRVLEPFGLVEEGAKTAPGKKRPVEQSPQEPDSSSGIGKTGQQPAKKRLNFGQTGDSESVPDPQPLGEPPATPAAVGPTTMASGGGAPMADNNEGADGVGNASGNWHCDSTWLGDRVITTSTRTWALPTYNNHLYKQISSASTGASNDNHYFGYSTPWGYFDFNRFHCHFSPRDWQRLINNNWGFRPKRLNFKLFNIQVKEVTTNDGTTTIANNLTSTVQVFTDSEYQLPYVLGSAHQGCLPPFPADVFMVPQYGYLTLNNGSQAVGRSSFYCLEYFPSQMLRTGNNFTFSYTFEDVPFHSSYAHSQSLDRLMNPLIDQYLYYLSRTNTPSGTTTQSGLQFSQAGASDIRDQSRNWLPGPCYRQQRVSKTSADNNNSEYSWTGATKYHLNGRDSLVNPGPAMASHKDDEEKFFPQSGVLIFGKQGSEKTNVDIEKVMITDEEEIRTTNPVATEQYGSVSTNLQRGNRQAATADVNTQGVLPGMVWQDRDVYLQGPIWAKIPHTDGHFHPSPLMGGFGLKHHPPQILIKNTPVPANPSTTFSAAKFASFITQYSTGQVSVEIEWELQKENSKRWNPEIQYTSNYNKSVNVDFTVDTNGVYSEPRPIGTRYLTRNLL

SEQ ID NO: 5116 - protein, 741 aa, Adeno-associated virus 2
MAADGYLPDWLEDTLSEGIREWWALKPGAPKPKANQQKQDDGRGLVLPGYKYLGPFNGLDKGEPVNEADAAALEHDKAYDQQLQAGDNPYLRYNHADAEFQERLQEDTSFGGNLGRAVFQAKKRVLEPLGLVEEPVKTAPGKKRPVEHSPVEPDSSSGTGKSGQQPARKRLNFGQTGDADSVPDPQPLGQPPAAPSGLGTNTMATGSGAPMADNNEGADGVGNSSGNWHCDSTWMGDRVITTSTRTWALPTYNNHLYKQISSQSGASNDNHYFGYSTPWGYFDFNRFHCHFSPRDWQRLINNNWGFRPKRLNFKLFNIQVKEVTQNDGTTTIANNLTSTVQVFTDSEYQLPYVLGSAHQGCLPPFPADVFMVPQYGYLTLNNGSQAVGRSSFYCLEYFPSQMLRTGNNFTFSYTFEDVPFHSSYAHSQSLDRLMNPLIDQYLYYLSRTNTPSGTTTQSGLQFSQAGASDIRDQSRNWLPGPCYRQQRVSKTSADNNNSEYSWTGATKYHLNGRDSLVNPGPAMASHKDDEEKFFPQSGVLIFGKQGSEKTNVDIEKVMITDEEEIRTTNPVATEQYGSVSTNLQRGNLANHNNTTNARQAATADVNTQGVLPGMVWQDRDVYLQGPIWAKIPHTDGHFHPSPLMGGFGLKHPPPQILIKNTPVPANPSTTFSAAKFASFITQYSTGQVSVEIEWELQKENSKRWNPEIQYTSNYNKSINVDFTVDTNGVYSEPRPIGTRYL

SEQ ID NO: 5117 - protein, 730 aa, Adeno-associated virus 2
MASDGYLPDWLEDNLSEGIREWWDLKPGAPKPKANQQKQDDGRGLVLPGYKYLGPFNGLDKGEPVNAADAAALEHDKAYDQQLKAGDNPYLRYNHADAEFQERLQEDTSFGGNLGRAVFQAKKRVLEPFGLVEEGAKTAPGKKRPVEQSPQEPDSSSGIGKTGQQPAKKRLNFGQTGDSESVPDPQPLGEPPATPAAVGPTTMASGGGAPMADNNEGADGVGNASGNWHCDSTWLGDRVITTSTRTWALPTYNNHLYKQISSASTGASNDNHYFGYSTPWGYFDFNRFHCHFSPRDWQRLINNNWGFRPKRLNFKLFNIQVKEVTTNDGVTTIANNLTSTVQVFSDSEYQLPYVLGSAHQGCLPPFPADVFMIPQYGYLTLNNGSQAVGRSSFYCLEYFPSQMLRTGNNFTFSYTFEDVPFHSSYAHSQSLDRLMNPLIDQYLYYLNRTQNQSGSAQNNDLLFSRGSPAGMSVQPKNWLPGPCYRQQRVSKTKTDNNNSNFTWTGASKYNLNGRESIINPGTAMASHKDDKDKFFPMSGVMIFGKESAGASNTALDNVMITDEEEIKATNPVATERFGTVAVNLQSSSTDPATGDVHVMGALPGMVWQDRDVYLQGPIWAKIPHTDGHFHPSPLMGGFGLKNPPPQILIKNTPVPANPPAEFSATKFASFITQYSTGQVSVEIEWELQKENSKRWNPEVQYTSNYAKSANVDFTVDNNGLYTEPRPIGTR

SEQ ID NO: 5118 - protein, 735 aa, Adeno-associated virus 2
  MOD_RES (239)..(239): Any amino acid
MASDGYLPDWLEDNLSEGIREWWDLKPGAPKPKANQQKQDDGRGLVLPGYKYLGPFNGLDKGEPVNAADAAALEHDKAYDQQLKAGDNPYLRYNHADAEFQERLQEDTSFGGNLGRAVFQAKKRVLEPFGLVEEGAKTAPGKKRPVEQSPQEPDSSSGIGKTGQQPAKKRLNFGQTGDSESVPDPQPLGEPPATPAAVGPTTMASGGGAPMADNNEGADGVGNASGNWHCDSTWLGDRXITTSTRTWALPTYNNHLYKQISSASTGASNDNHYFGYSTPWGYFDFNRFHCHFSPRDWQRLINNNWGFRPKRLNFKLFNIQVKEVTTNDGVTTIANNLTSTVQVFSDSEYQLPYVLGSAHQGCLPPFPADVFMIPQYGYLTLNNGSQAVGRSSFYCLEYFPSQMLRTGNNFTFSYTFEDVPFHSSYAHSQSLDRLMNPLIDQYLYYLNRTQNQSGSAQNNDLLFSRGSPAGMSVQPKNWLPGPCYRQQRVSKTKTDNNNSNFTWTGASKYNLNGRESIINPGTAMASHKDDKDKFFPMSGVMIFGKESAGASNTALDNVMITDEEEIKATNPVATERFGTVAVNLQSSSTDPATGDVHVMGALPGMVWQDRDVYLQGPIWAKIPHTDGHFHPSPLMGGFGLKNPPPQILIKNTPVPANPPAEFSATKFASFITQYSTGQVSVEIEWELQKENSKRWNPEVQYTSNYAKSANVDFTVDNNGLYTEPRPIGTRYLTRP

SEQ ID NO: 5119 - protein, 733 aa, Adeno-associated virus 2
MASDGYLPDWLEDNLSEGIREWWDLKPGAPKPKANQQKQDDGRGLVLPGYKYLGPFNGLDKGEPVNAADAAALEHDKAYDQQLKAGDNPYLRYNHADAEFQERLQEDTSFGGNLGRAVFLAKKRVLEPFGLVEEGAKTAPGKKRPVEQSPQEPDSSSGIGKTGQQPAKKRLNFGQTGDSESVPDPQPLGEPPATPAAVGPTTMASGGGAPMADNNEGADGVGNASGNWHCDSTWLGDRVITTSTRTWALPTYNNHLYKQISSASTGASNDNHYFGYSTPWGYFDFNRFHCHFSPRDWQRLINNNWGFRPKRLNFKLFNIQVKEVTTNDGVTTIANNLTSTVQVFSDSEYQLPYVLGSAHQGCLPPFPADVFMIPQYGYLTLNNGSQAVGRSSFYCLEYFPSQMLRTGNNFTFSYTFEDVPFHSSYAHSQSLDRLMNPLIDQYLYYLNRTQNQSGSAQNNDLLFSRGSPAGMSVQPKNWLPGPCYRQQRVSKTKTDNNNSNFTWTGASKYNLNGRESIINPGTAMASHKDDKDKFFPMSGVMIFGKESAGASNTALDNVMITDEEEIKATNPVATERFGTVAVNLQSSSTDPATGDVHVMGALPGMVWQDRDVYLQGPIWAKIPHTDGHFHPSPLMGGFGLKNPPPQILIKNTPVPANPPAEFSATKFASFITQYSTGQVSVEIEWELQKENSKRWNPEVQYTSNYAKSANVDFTVDNNGLYTEPRPIGTRYLT

SEQ ID NO: 5120 - protein, 734 aa, Adeno-associated virus 2
MAADGYLPDWLEDTLSEGIRQWWKLKPGPPPPKPAERHKDDSRGLVLPGCKYLGPFNGLDKGEPVNEADAAALEHDKAYDRQLDSGDNPYLKYNHADAEFQERLKEDTSFGGNLGRAVFQAKKRVLEPLGLVEEPVKTAPGKKRPVEHSPVEPDSSSGTGKAGQQPARKRLNFGQTGDADSVPDPQPLGQPPAAPSGLGTNTMATGSGAPMADNNEGADGVGNSSGNWHCDSTWMGDRVITTSTRTWALPTYNNHLYKQISSQSGASNDNHYFGYSTPWGYFDFNRFHCHFSPRDWQRLINNNWGFRPKRLNFKLFNIQVKEVTQNDGTTTIANNLTSTVQVFSDSEYQLPYVLGSAHQGCLPPFPADVFMIPQYGYLTLNNGSQAVGRSSFYCLEYFPSQMLRTGNNFTFNYTFEDVPFHSSYAHSQSLDRLMNPLIDQYLYYLNRTQNQSGSAQNNDLLFSRGSPAGMSVQPKNWLPGPCYRQQRVSKTKTDNNNSNFTWTGASKYNLNGRESIINPGTAMASHKDDKDKFFPMSGVMIFGKESAGASNTALDNVMITDEEEIKATNPVATERFGTVAVNLQSSSTDPATGDVHVMGALPGMVWQDRDVYLQGPIWAKIPHTDGHFHPSPLMGGFGLKNPPPQILIKNTPVPANPPAEFSATKFASFITQYSTGQVSVEIEWELQKENSKRWNPEVQYTSNYAKSANVDFTVDNNGLYTEPRPIGTRYLTRP

SEQ ID NO: 5121 - protein, 734 aa, Adeno-associated virus 2
MAADGYLPDWLEDTLSEGIRQWWKLKPGPPPPKPAERHKDDSRGLVLPGYKYLGPFNGLDKGEPVNEADAAALEHDKAYDRQLDSGDNPYLKYNHADAEFQERLKEDTSFGGNLGRAVFQAKKRVLEPLGLVEEPVKTAPGKKRPVEHSPVEPDSSSGTGKAGQQPARKRLNFGQTGDADSVPDPQPLGQPPAAPSGLGTNTMATGSGAPMADNNEGADGVGNSSGNWHCDSTWMGDRVITTSTRTWALSTYNNHLYKQISSQSGASNDNHYFGYSTPWGYFDFNRFHCHFSPRDWQRLINNNWGFRPKRLNFKLFNIQVKEVTQNDGTTTIANNLTSTVQVFTDSEYQLPYVLGSAHQGCLPPFPADVFMVPQYGYLTLNNGSQAVGRSSFYCLEYFPSQMLRTGNNFTFSYTFEDVPFHSSYAHSQSLDRLMNPLIDQYLYYLSRTNTPSGTTTQSRLQFSQAGASDIRDQSRNWLPGPCYRQQRVSKTSADNNNSEYSWTGATKYHLNGRDSLVNPGPAMASHKDDEEKFFPQSGVLIFGKQGSEKTNVDIEKVMITDEEEIRTTNPVATEQYGSVSTNLQRGNRQAATADVNTQGVLPGMVWQDRDVYLQGPIWAKIPHTDGHFHPSPLMGGFGLKHPPPQILIKNTPVPANPSTTFSAAKFASFITQYSTGQVSVEIEWELQKENSKRWNPEIQYTSNYNKSINVDFTVDTNGVYSEPRPIGTRYLTRN

SEQ ID NO: 5122 - protein, 738 aa, Adeno-associated virus 2
MAADGYLPDWLEDTLSEGIRQWWKLKPGPPPPKPAERHKDDSRGLVLPGYKYLGPFNGLDKGEPVNEADAAALEHDKAYDRQLDGGDNPYLKYNHADAEFQERLKEDTSFGGNLGRAVFQAKKRVLEPLGLVEEPVKTAPGKKRPVEHSPVEPDSSSGTGKAGQQPARKRLNFGQTGDADSVPDPQPLGQPPAAPSGLGTNTMATGSGAPMADNNEGADGVGNSSGNWHCDSTWMGDRVITTSTRTWALPTYNNHLYKQISSQSGASNDNHYFGYSTPWGYFDFNRFHCHFSPRDWQRLINNNWGFRPKRLNFKLFNIQVKEVTQNDGTTTIANNLTSTVQVFTDSEYQLPYVLGSAHQGCLPPFPADVFMVPQYGYLTLNNGSQAVGRSSFYCLEYFPSQMLRTGNNFTFSYTFEDVPFHSSYAHSQSLDRLMNPLIDQYLYYLSRTNTPSGTTTQSGLQFSQAGASDIRDQSRNWLPGPCYRQQRVSKTSADNNNSEYSWTGATKYHLNGRDSLVNPGPAMASHKDDEEKFFPQSGVLIFGKQGSEKTNVDIEKVMITDEEEIRTTNPVATEQYGSVSTNLQRGNRQAATADVNTQGVLPGMVWQDRDVYLQGPIWAKIPHTDGHFHPSPLMGGFGLKHPPPQILIKNTPVPANPSTTFSAAKFASFITQYSTGQVSVEIEWELQKENSKRWNPEIQYTSNYNKSVNVDFTVDTNGVYSEPRPIGTRYLTRNLLRP

SEQ ID NO: 5123 - protein, 736 aa, Adeno-associated virus 3; identical to SEQ ID NO: 4757

SEQ ID NO: 5124 - DNA, 4726 bp, Adeno-associated virus 3
ttggccactccctctatgcgcactcgctcgctcggtggggcctggcgaccaaaggtcgccagacggacgtgctttgcacgtccggccccaccgagcgagcgagtgcgcatagagggagtggccaactccatcactagaggtatggcagtgacgtaacgcgaagcgcgcgaagcgagaccacgcctaccagctgcgtcagcagtcaggtgacccttttgcgacagtttgcgacaccacgtggccgctgagggtatatattctcgagtgagcgaaccaggagctccattttgaccgcgaaatttgaacgagcagcagccatgccggggttctacgagattgtcctgaaggtcccgagtgacctggacgagcgcctgccgggcatttctaactcgtttgttaactgggtggccgagaaggaatgggacgtgccgccggattctgacatggatccgaatctgattgagcaggcacccctgaccgtggccgaaaagcttcagcgcgagttcctggtggagtggcgccgcgtgagtaaggccccggaggccctcttttttgtccagttcgaaaagggggagacctacttccacctgcacgtgctgattgagaccatcggggtcaaatccatggtggtcggccgctacgtgagccagattaaagagaagctggtgacccgcatctaccgcggggtcgagccgcagcttccgaactggttcgcggtgaccaaaacgcgaaatggcgccgggggcgggaacaaggtggtggacgactgctacatccccaactacctgctccccaagacccagcccgagctccagtgggcgtggactaacatggaccagtatttaagcgcctgtttgaatctcgcggagcgtaaacggctggtggcgcagcatctgacgcacgtgtcgcagacgcaggagcagaacaaagagaatcagaaccccaattctgacgcgccggtcatcaggtcaaaaacctcagccaggtacatggagctggtcgggtggctggtggaccgcgggatcacgtcagaaaagcaatggattcaggaggaccaggcctcgtacatctccttcaacgccgcctccaactcgcggtcccagatcaaggccgcgctggacaatgcctccaagatcatgagcctgacaaagacggctccggactacctggtgggcagcaacccgccggaggacattaccaaaaatcggatctaccaaatcctggagctgaacgggtacgatccgcagtacgcggcctccgtcttcctgggctgggcgcaaaagaagttcgggaagaggaacaccatctggctctttgggccggccacgacgggtaaaaccaacatcgcggaagccatcgcccacgccgtgcccttctacggctgcgtaaactggaccaatgagaactttcccttcaacgattgcgtcgacaagatggtgatctggtgggaggagggcaagatgacggccaaggtcgtggagagcgccaaggccattctgggcggaagcaaggtgcgcgtggaccaaaagtgcaagtcatcggcccagatcgaacccactcccgtgatcgtcacctccaacaccaacatgtgcgccgtgattgacgggaacagcaccaccttcgagcatcagcagccgctgcaggaccggatgtttgaatttgaacttacccgccgtttggaccatgactttgggaaggtcaccaaacaggaagtaaaggactttttccggtgggcttccgatcacgtgactgacgtggctcatgagttctacgtcagaaagggtggagctaagaaacgccccgcctccaatgacgcggatgtaagcgagccaaaacgggagtgcacgtcacttgcgcagccgacaacgtcagacgcggaagcaccggcggactacgcggacaggtaccaaaacaaatgttctcgtcacgtgggcatgaatctgatgctttttccctgtaaaacatgcgagagaatgaatcaaatttccaatgtctgttttacgcatggtcaaagagactgtggggaatgcttccctggaatgtcagaatctcaacccgtttctgtcgtcaaaaagaagacttatcagaaactgtgtccaattcatcatatcctgggaagggcacccgagattgcctgttcggcctgcgatttggccaatgtggacttggatgactgtgtttctgagcaataaatgacttaaaccaggtatggctgctgacggttatcttccagattggctcgaggacaacctttctgaaggcattcgtgagtggtgggctctgaaacctggagtccctcaacccaaagcgaaccaacaacaccaggacaaccgtcggggtcttgtgcttccgggttacaaatacctcggacccggtaacggactcgacaaaggagagccggtcaacgaggcggacgcggcagccctcgaacacgacaaagcttacgaccagcagctcaaggccggtgacaacccgtacctcaagtacaaccacgccgacgccgagtttcaggagcgtcttcaagaagatacgtcttttgggggcaaccttggcagagcagtcttccaggccaaaaagaggatccttgagcctcttggtctggttgaggaagcagctaaaacggctcctggaaagaagggggctgtagatcagtctcctcaggaaccggactcatcatctggtgttggcaaatcgggcaaacagcctgccagaaaaagactaaatttcggtcagactggagactcagagtcagtcccagaccctcaacctctcggagaaccaccagcagcccccacaagtttgggatctaatacaatggcttcaggcggtggcgcaccaatggcagacaataacgagggtgccgatggagtgggtaattcctcaggaaattggcattgcgattcccaatggctgggcgacagagtcatcaccaccagcaccagaacctgggccctgcccacttacaacaaccatctctacaagcaaatctccagccaatcaggagcttcaaacgacaaccactactttggctacagcaccccttgggggtattttgactttaacagattccactgccacttctcaccacgtgactggcagcgactcattaacaacaactggggattccggcccaagaaactcagcttcaagctcttcaacatccaagttagaggggtcacgcagaacgatggcacgacgactattgccaataaccttaccagcacggttcaagtgtttacggactcggagtatcagctcccgtacgtgctcgggtcggcgcaccaaggctgtctcccgccgtttccagcggacgtcttcatggtccctcagtatggatacctcaccctgaacaacggaagtcaagcggtgggacgctcatccttttactgcctggagtacttcccttcgcagatgctaaggactggaaataacttccaattcagctataccttcgaggatgtaccttttcacagcagctacgctcacagccagagtttggatcgcttgatgaatcctcttattgatcagtatctgtactacctgaacagaacgcaaggaacaacctctggaacaaccaaccaatcacggctgctttttagccaggctgggcctcagtctatgtctttgcaggccagaaattggctacctgggccctgctaccggcaacagagactttcaaagactgctaacgacaacaacaacagtaactttccttggacagcggccagcaaatatcatctcaatggccgcgactcgctggtgaatccaggaccagctatggccagtcacaaggacgatgaagaaaaatttttccctatgcacggcaatctaatatttggcaaagaagggacaacggcaagtaacgcagaattagataatgtaatgattacggatgaagaagagattcgtaccaccaatcctgtggcaacagagcagtatggaactgtggcaaataacttgcagagctcaaatacagctcccacgactggaactgtcaatcatcagggggccttacctggcatggtgtggcaagatcgtgacgtgtaccttcaaggacctatctgggcaaagattcctcacacggatggacactttcatccttctcctctgatgggaggctttggactgaaacatccgcctcctcaaatcatgatcaaaaatactccggtaccggcaaatcctccgacgactttcagcccggccaagtttgcttcatttatcactcagtactccactggacaggtcagcgtggaaattgagtgggagctacagaaagaaaacagcaaacgttggaatccagagattcagtacacttccaactacaacaagtctgttaatgtggactttactgtagacactaatggtgtttatagtgaacctcgccctattggaacccggtatctcacacgaaacttgtgaatcctggttaatcaataaaccgtttaattcgtttcagttgaactttggctcttgtgcacttctttatctttatcttgtttccatggctactgcgtagataagcagcggcctgcggcgcttgcgcttcgcggtttacaactgctggttaatatttaactctcgccatacctctagtgatggagttggccactccctctatgcgcactcgctcgctcggtggggcctggcgaccaaaggtcgccagacggacgtgctttgcacgtccggccccaccgagcgagcgagtgcgcatagagggagtggccaa

SEQ ID NO: 5125 - protein, 736 aa, Adeno-associated virus 3A; identical to SEQ ID NO: 4757

SEQ ID NO: 5126 - protein, 624 aa, Adeno-associated virus 3A
MPGFYEIVLKVPSDLDERLPGISNSFVNWVAEKEWDVPPDSDMDPNLIEQAPLTVAEKLQREFLVEWRRVSKAPEALFFVQFEKGETYFHLHVLIETIGVKSMVVGRYVSQIKEKLVTRIYRGVEPQLPNWFAVTKTRNGAGGGNKVVDDCYIPNYLLPKTQPELQWAWTNMDQYLSACLNLAERKRLVAQHLTHVSQTQEQNKENQNPNSDAPVIRSKTSARYMELVGWLVDRGITSEKQWIQEDQASYISFNAASNSRSQIKAALDNASKIMSLTKTAPDYLVGSNPPEDITKNRIYQILELNGYDPQYAASVFLGWAQKKFGKRNTIWLFGPATTGKTNIAEAIAHAVPFYGCVNWTNENFPFNDCVDKMVIWWEEGKMTAKVVESAKAILGGSKVRVDQKCKSSAQIEPTPVIVTSNTNMCAVIDGNSTTFEHQQPLQDRMFEFELTRRLDHDFGKVTKQEVKDFFRWASDHVTDVAHEFYVRKGGAKKRPASNDADVSEPKRECTSLAQPTTSDAEAPADYADRYQNKCSRHVGMNLMLFPCKTCERMNQISNVCFTHGQRDCGECFPGMSESQPVSVVKKKTYQKLCPIHHILGRAPEIACSACDLANVDLDDCVSEQ

SEQ ID NO: 5127 - protein, 736 aa, Adeno-associated virus 3B
MAADGYLPDWLEDNLSEGIREWWALKPGVPQPKANQQHQDNRRGLVLPGYKYLGPGNGLDKGEPVNEADAAALEHDKAYDQQLKAGDNPYLKYNHADAEFQERLQEDTSFGGNLGRAVFQAKKRILEPLGLVEEAAKTAPGKKRPVDQSPQEPDSSSGVGKSGKQPARKRLNFGQTGDSESVPDPQPLGEPPAAPTSLGSNTMASGGGAPMADNNEGADGVGNSSGNWHCDSQWLGDRVITTSTRTWALPTYNNHLYKQISSQSGASNDNHYFGYSTPWGYFDFNRFHCHFSPRDWQRLINNNWGFRPKKLSFKLFNIQVKEVTQNDGTTTIANNLTSTVQVFTDSEYQLPYVLGSAHQGCLPPFPADVFMVPQYGYLTLNNGSQAVGRSSFYCLEYFPSQMLRTGNNFQFSYTFEDVPFHSSYAHSQSLDRLMNPLIDQYLYYLNRTQGTTSGTTNQSRLLFSQAGPQSMSLQARNWLPGPCYRQQRLSKTANDNNNSNFPWTAASKYHLNGRDSLVNPGPAMASHKDDEEKFFPMHGNLIFGKEGTTASNAELDNVMITDEEEIRTTNPVATEQYGTVANNLQSSNTAPTTRTVNDQGALPGMVWQDRDVYLQGPIWAKIPHTDGHFHPSPLMGGFGLKHPPPQIMIKNTPVPANPPTTFSPAKFASFITQYSTGQVSVEIEWELQKENSKRWNPEIQYTSNYNKSVNVDFTVDTNGVYSEPRPIGTRYLTRNL

SEQ ID NO: 5128 - protein, 624 aa, Adeno-associated virus 3B
MPGFYEIVLKVPSDLDEHLPGISNSFVNWVAEKEWELPPDSDMDPNLIEQAPLTVAEKLQREFLVEWRRVSKAPEALFFVQFEKGETYFHLHVLIETIGVKSMVVGRYVSQIKEKLVTRIYRGVEPQLPNWFAVTKTRNGAGGGNKVVDDCYIPNYLLPKTQPELQWAWTNMDQYLSACLNLAERKRLVAQHLTHVSQTQEQNKENQNPNSDAPVIRSKTSARYMELVGWLVDRGITSEKQWIQEDQASYISFNAASNSRSQIKAALDNASKIMSLTKTAPDYLVGSNPPEDITKNRIYQILELNGYDPQYAASVFLGWAQKKFGKRNTIWLFGPATTGKTNIAEAIAHAVPFYGCVNWTNENFPFNDCVDKMVIWWEEGKMTAKVVESAKAILGGSKVRVDQKCKSSAQIEPTPVIVTSNTNMCAVIDGNSTTFEHQQPLQDRMFKFELTRRLDHDFGKVTKQEVKDFFRWASDHVTDVAHEFYVRKGGAKKRPASNDADVSEPKRQCTSLAQPTTSDAEAPADYADRYQNKCSRHVGMNLMLFPCKTCERMNQISNVCFTHGQRDCGECFPGMSESQPVSVVKKKTYQKLCPIHHILGRAPEIACSACDLANVDLDDCVSEQ

SEQ ID NO: 5129 - DNA, 4722 bp, Adeno-associated virus 3B
tggccactccctctatgcgcactcgctcgctcggtggggcctggcgaccaaaggtcgccagacggacgtgctttgcacgtccggccccaccgagcgagcgagtgcgcatagagggagtggccaactccatcactagaggtatggcagtgacgtaacgcgaagcgcgcgaagcgagaccacgcctaccagctgcgtcagcagtcaggtgacccttttgcgacagtttgcgacaccacgtggccgctgagggtatatattctcgagtgagcgaaccaggagctccattttgaccgcgaaatttgaacgagcagcagccatgccggggttctacgagattgtcctgaaggtcccgagtgacctggacgagcacctgccgggcatttctaactcgtttgttaactgggtggccgagaaggaatgggagctgccgccggattctgacatggatccgaatctgattgagcaggcacccctgaccgtggccgaaaagcttcagcgcgagttcctggtggagtggcgccgcgtgagtaaggccccggaggccctcttttttgtccagttcgaaaagggggagacctacttccacctgcacgtgctgattgagaccatcggggtcaaatccatggtggtcggccgctacgtgagccagattaaagagaagctggtgacccgcatctaccgcggggtcgagccgcagcttccgaactggttcgcggtgaccaaaacgcgaaatggcgccgggggcgggaacaaggtggtggacgactgctacatccccaactacctgctccccaagacccagcccgagctccagtgggcgtggactaacatggaccagtatttaagcgcctgtttgaatctcgcggagcgtaaacggctggtggcgcagcatctgacgcacgtgtcgcagacgcaggagcagaacaaagagaatcagaaccccaattctgacgcgccggtcatcaggtcaaaaacctcagccaggtacatggagctggtcgggtggctggtggaccgcgggatcacgtcagaaaagcaatggattcaggaggaccaggcctcgtacatctccttcaacgccgcctccaactcgcggtcccagatcaaggccgcgctggacaatgcctccaagatcatgagcctgacaaagacggctccggactacctggtgggcagcaacccgccggaggacattaccaaaaatcggatctaccaaatcctggagctgaacgggtacgatccgcagtacgcggcctccgtcttcctgggctgggcgcaaaagaagttcgggaagaggaacaccatctggctctttgggccggccacgacgggtaaaaccaacatcgcggaagccatcgcccacgccgtgcccttctacggctgcgtaaactggaccaatgagaactttcccttcaacgattgcgtcgacaagatggtgatctggtgggaggagggcaagatgacggccaaggtcgtggagagcgccaaggccattctgggcggaagcaaggtgcgcgtggaccaaaagtgcaagtcatcggcccagatcgaacccactcccgtgatcgtcacctccaacaccaacatgtgcgccgtgattgacgggaacagcaccaccttcgagcatcagcagccgctgcaggaccggatgtttaaatttgaacttacccgccgtttggaccatgactttgggaaggtcaccaaacaggaagtaaaggactttttccggtgggcttccgatcacgtgactgacgtggctcatgagttctacgtcagaaagggtggagctaagaaacgccccgcctccaatgacgcggatgtaagcgagccaaaacggcagtgcacgtcacttgcgcagccgacaacgtcagacgcggaagcaccggcggactacgcggacaggtaccaaaacaaatgttctcgtcacgtgggcatgaatctgatgctttttccctgtaaaacatgcgagagaatgaatcaaatttccaatgtctgttttacgcatggtcaaagagactgtggggaatgcttccctggaatgtcagaatctcaacccgtttctgtcgtcaaaaagaagacttatcagaaactgtgtccaattcatcatatcctgggaagggcacccgagattgcctgttcggcctgcgatttggccaatgtggacttggatgactgtgtttctgagcaataaatgacttaaaccaggtatggctgctgacggttatcttccagattggctcgaggacaacctttctgaaggcattcgtgagtggtgggctctgaaacctggagtccctcaacccaaagcgaaccaacaacaccaggacaaccgtcggggtcttgtgcttccgggttacaaatacctcggacccggtaacggactcgacaaaggagagccggtcaacgaggcggacgcggcagccctcgaacacgacaaagcttacgaccagcagctcaaggccggtgacaacccgtacctcaagtacaaccacgccgacgccgagtttcaggagcgtcttcaagaagatacgtcttttgggggcaaccttggcagagcagtcttccaggccaaaaagaggatccttgagcctcttggtctggttgaggaagcagctaaaacggctcctggaaagaagaggcctgtagatcagtctcctcaggaaccggactcatcatctggtgttggcaaatcgggcaaacagcctgccagaaaaagactaaatttcggtcagactggcgactcagagtcagtcccagaccctcaacctctcggagaaccaccagcagcccccacaagtttgggatctaatacaatggcttcaggcggtggcgcaccaatggcagacaataacgagggtgccgatggagtgggtaattcctcaggaaattggcattgcgattcccaatggctgggcgacagagtcatcaccaccagcaccagaacctgggccctgcccacttacaacaaccatctctacaagcaaatctccagccaatcaggagcttcaaacgacaaccactactttggctacagcaccccttgggggtattttgactttaacagattccactgccacttctcaccacgtgactggcagcgactcattaacaacaactggggattccggcccaagaaactcagcttcaagctcttcaacatccaagttaaagaggtcacgcagaacgatggcacgacgactattgccaataaccttaccagcacggttcaagtgtttacggactcggagtatcagctcccgtacgtgctcgggtcggcgcaccaaggctgtctcccgccgtttccagcggacgtcttcatggtccctcagtatggatacctcaccctgaacaacggaagtcaagcggtgggacgctcatccttttactgcctggagtacttcccttcgcagatgctaaggactggaaataacttccaattcagctataccttcgaggatgtaccttttcacagcagctacgctcacagccagagtttggatcgcttgatgaatcctcttattgatcagtatctgtactacctgaacagaacgcaaggaacaacctctggaacaaccaaccaatcacggctgctttttagccaggctgggcctcagtctatgtctttgcaggccagaaattggctacctgggccctgctaccggcaacagagactttcaaagactgctaacgacaacaacaacagtaactttccttggacagcggccagcaaatatcatctcaatggccgcgactcgctggtgaatccaggaccagctatggccagtcacaaggacgatgaagaaaaatttttccctatgcacggcaatctaatatttggcaaagaagggacaacggcaagtaacgcagaattagataatgtaatgattacggatgaagaagagattcgtaccaccaatcctgtggcaacagagcagtatggaactgtggcaaataacttgcagagctcaaatacagctcccacgactagaactgtcaatgatcagggggccttacctggcatggtgtggcaagatcgtgacgtgtaccttcaaggacctatctgggcaaagattcctcacacggatggacactttcatccttctcctctgatgggaggctttggactgaaacatccgcctcctcaaatcatgatcaaaaatactccggtaccggcaaatcctccgacgactttcagcccggccaagtttgcttcatttatcactcagtactccactggacaggtcagcgtggaaattgagtgggagctacagaaagaaaacagcaaacgttggaatccagagattcagtacacttccaactacaacaagtctgttaatgtggactttactgtagacactaatggtgtttatagtgaacctcgccctattggaacccggtatctcacacgaaacttgtaatcctggttaatcaataaaccgtttaattcgtttcagttgaactttggctcttgtgcacttcttatcttatcttgtttccatggctactgcgtagataagcagcggcctgcggcgcttgcgcttcgcggtttacaactgctggttaatatttaactctcgccatacctctagtgatggagttggccactccctctatgcgcactcgctcgctcggtggggccggacgtgcaaagcacgtccgtctggcgacctttggtcgccaggccccaccgagcgagcgagtgcgcatagagggagtggccaa

SEQ ID NO: 5130 - DNA, 1800 bp, Adeno-associated virus 4
  modified_base (342)..(342): a, c, t or g
acggctcctggaaagaagagaccgttgattgaatccccccagcagcccgactcctccacgggtatcggcaaaaaaggcaagcagccggctaaaaagaagctcgttttcgaagacgaaactggagcaggcgacggaccccctgagggatcaacttccggagccatgtctgatgacagtgagatgcgtgcagcagctggcggagctgcagtcgagggsggacaaggtgccgatggagtgggtaatgcctcgggtgattggcattgcgattccacctggtctgagggccacgtcacgaccaccagcaccagaacctgggtcttgcccacctacaacaaccacctntacaagcgactcggagagagcctgcagtccaacacctacaacggattctccaccccctggggatactttgacttcaaccgcttccactgccacttctcaccacgtgactggcagcgactcatcaacaacaactggggcatgcgacccaaagccatgcgggtcaaaatcttcaacatccaggtcaaggaggtcacgacgtcgaacggcgagacaacggtggctaataaccttaccagcacggttcagatctttgcggactcgtcgtacgaactgccgtacgtgatggatgcgggtcaagagggcagcctgcctccttttcccaacgacgtctttatggtgccccagtacggctactgtggactggtgaccggcaacacttcgcagcaacagactgacagaaatgccttctactgcctggagtactttccttcgcagatgctgcggactggcaacaactttgaaattacgtacagttttgagaaggtgcctttccactcgatgtacgcgcacagccagagcctggaccggctgatgaaccctctcatcgaccagtacctgtggggactgcaatcgaccaccaccggaaccaccctgaatgccgggactgccaccaccaactttaccaagctgcggcctaccaacttttccaactttaaaaagaactggctgcccgggccttcaatcaagcagcagggcttctcaaagactgccaatcaaaactacaagatccctgccaccgggtcagacagtctcatcaaatacgagacgcacagcactctggacggaagatggagtgccctgacccccggacctccaatggccacggctggacctgcggacagcaagttcagcaacagccagctcatctttgcggggcctaaacagaacggcaacacggccaccgtacccgggactctgatcttcacctctgaggaggagctggcagccaccaacgccaccgatacggacatgtggggcaacctacctggcggtgaccagagcaacagcaacctgccgaccgtggacagactgacagccttgggagccgtgcctggaatggtctggcaaaacagagacatttactaccagggtcccatttgggccaagattcctcataccgatggacactttcacccctcaccgctgattggtgggtttgggctgaaacacccgcctcctcaaatttttatcaagaacaccccggtacctgcgaatcctgcaacgaccttcagctctactccggtaaactccttcattactcagtacagcactggccaggtgtcggtgcagattgactgggagatccagaaggagcggtccaaacgctggaaccccgaggtccagtttacctccaactacggacagcaaaactctctgttgtgggctcccgatgcggctgggaaatacactgagcctagggctatcggtacccgctacctcacccaccacctgtaataa

SEQ ID NO: 5131 - DNA, 2208 bp, Adeno-associated virus 4
  modified_base (750)..(750): a, c, t or g
atgactgacggttaccttccagattggctagaggacaacctctctgaaggcgttcgagagtggtgggcgctgcaacctggagcccctaaacccaaggcaaatcaacaacatcaggacaacgctcggggtcttgtgcttccgggttacaaatacctcggacccggcaacggactcgacaagggggaacccgtcaacgcagcggacgcggcagccctcgagcacgacaaggcctacgaccagcagctcaaggccggtgacaacccctacctcaagtacaaccacgccgacgcggagttccagcagcggcttcagggcgacacatcgtttgggggcaacctcggcagagcagtcttccaggccaaaaagagggttcttgaacctcttggtctggttgagcaagcgggtgagacggctcctggaaagaagagaccgttgattgaatccccccagcagcccgactcctccacgggtatcggcaaaaaaggcaagcagccggctaaaaagaagctcgttttcgaagacgaaactggagcaggcgacggaccccctgagggatcaacttccggagccatgtctgatgacagtgagatgcgtgcagcagctggcggagctgcagtcgagggsggacaaggtgccgatggagtgggtaatgcctcgggtgattggcattgcgattccacctggtctgagggccacgtcacgaccaccagcaccagaacctgggtcttgcccacctacaacaaccacctntacaagcgactcggagagagcctgcagtccaacacctacaacggattctccaccccctggggatactttgacttcaaccgcttccactgccacttctcaccacgtgactggcagcgactcatcaacaacaactggggcatgcgacccaaagccatgcgggtcaaaatcttcaacatccaggtcaaggaggtcacgacgtcgaacggcgagacaacggtggctaataaccttaccagcacggttcagatctttgcggactcgtcgtacgaactgccgtacgtgatggatgcgggtcaagagggcagcctgcctccttttcccaacgacgtctttatggtgccccagtacggctactgtggactggtgaccggcaacacttcgcagcaacagactgacagaaatgccttctactgcctggagtactttccttcgcagatgctgcggactggcaacaactttgaaattacgtacagttttgagaaggtgcctttccactcgatgtacgcgcacagccagagcctggaccggctgatgaaccctctcatcgaccagtacctgtggggactgcaatcgaccaccaccggaaccaccctgaatgccgggactgccaccaccaactttaccaagctgcggcctaccaacttttccaactttaaaaagaactggctgcccgggccttcaatcaagcagcagggcttctcaaagactgccaatcaaaactacaagatccctgccaccgggtcagacagtctcatcaaatacgagacgcacagcactctggacggaagatggagtgccctgacccccggacctccaatggccacggctggacctgcggacagcaagttcagcaacagccagctcatctttgcggggcctaaacagaacggcaacacggccaccgtacccgggactctgatcttcacctctgaggaggagctggcagccaccaacgccaccgatacggacatgtggggcaacctacctggcggtgaccagagcaacagcaacctgccgaccgtggacagactgacagccttgggagccgtgcctggaatggtctggcaaaacagagacatttactaccagggtcccatttgggccaagattcctcataccgatggacactttcacccctcaccgctgattggtgggtttgggctgaaacacccgcctcctcaaatttttatcaagaacaccccggtacctgcgaatcctgcaacgaccttcagctctactccggtaaactccttcattactcagtacagcactggccaggtgtcggtgcagattgactgggagatccagaaggagcggtccaaacgctggaaccccgaggtccagtttacctccaactacggacagcaaaactctctgttgtgggctcccgatgcggctgggaaatacactgagcctagggctatcggtacccgctacctcacccaccacctgtaataa

SEQ ID NO: 5132 - DNA, 1872 bp, Adeno-associated virus 4
atgccggggttctacgagatcgtgctgaaggtgcccagcgacctggacgagcacctgcccggcatttctgactcttttgtgagctgggtggccgagaaggaatgggagctgccgccggattctgacatggacttgaatctgattgagcaggcacccctgaccgtggccgaaaagctgcaacgcgagttcctggtcgagtggcgccgcgtgagtaaggccccggaggccctcttctttgtccagttcgagaagggggacagctacttccacctgcacatcctggtggagaccgtgggcgtcaaatccatggtggtgggccgctacgtgagccagattaaagagaagctggtgacccgcatctaccgcggggtcgagccgcagcttccgaactggttcgcggtgaccaagacgcgtaatggcgccggaggcgggaacaaggtggtggacgactgctacatccccaactacctgctccccaagacccagcccgagctccagtgggcgtggactaacatggaccagtatataagcgcctgtttgaatctcgcggagcgtaaacggctggtggcgcagcatctgacgcacgtgtcgcagacgcaggagcagaacaaggaaaaccagaaccccaattctgacgcgccggtcatcaggtcaaaaacctccgccaggtacatggagctggtcgggtggctggtggaccgcgggatcacgtcagaaaagcaatggatccaggaggaccaggcgtcctacatctccttcaacgccgcctccaactcgcggtcacaaatcaaggccgcgctggacaatgcctccaaaatcatgagcctgacaaagacggctccggactacctggtgggccagaacccgccggaggacatttccagcaaccgcatctaccgaatcctcgagatgaacgggtacgatccgcagtacgcggcctccgtcttcctgggctgggcgcaaaagaagttcgggaagaggaacaccatctggctctttgggccggccacgacgggtaaaaccaacatcgcggaagccatcgcccacgccgtgcccttctacggctgcgtgaactggaccaatgagaactttccgttcaacgattgcgtcgacaagatggtgatctggtgggaggagggcaagatgacggccaaggtcgtagagagcgccaaggccatcctgggcggaagcaaggtgcgcgtggaccaaaagtgcaagtcatcggcccagatcgacccaactcccgtgatcgtcacctccaacaccaacatgtgcgcggtcatcgacggaaactcgaccaccttcgagcaccaacaaccactccaggaccggatgttcaagttcgagctcaccaagcgcctggagcacgactttggcaaggtcaccaagcaggaagtcaaagactttttccggtgggcgtcagatcacgtgaccgaggtgactcacgagttttacgtcagaaagggtggagctagaaagaggcccgcccccaatgacgcagatataagtgagcccaagcgggcctgtccgtcagttgcgcagccatcgacgtcagacgcggaagctccggtggactacgcggacaggtaccaaaacaaatgttctcgtcacgtgggtatgaatctgatgctttttccctgccggcaatgcgagagaatgaatcagaatgtggacatttgcttcacgcacggggtcatggactgtgccgagtgcttccccgtgtcagaatctcaacccgtgtctgtcgtcagaaagcggacgtatcagaaactgtgtccgattcatcacatcatggggagggcgcccgaggtggcctgctcggcctgcgaactggccaatgtggacttggatgactgtgacatggaacaataa

SEQ ID NO: 5133 - DNA, 1611 bp, Adeno-associated virus 4
atgccggggttctacgagatcgtgctgaaggtgcccagcgacctggacgagcacctgcccggcatttctgactcttttgtgagctgggtggccgagaaggaatgggagctgccgccggattctgacatggacttgaatctgattgagcaggcacccctgaccgtggccgaaaagctgcaacgcgagttcctggtcgagtggcgccgcgtgagtaaggccccggaggccctcttctttgtccagttcgagaagggggacagctacttccacctgcacatcctggtggagaccgtgggcgtcaaatccatggtggtgggccgctacgtgagccagattaaagagaagctggtgacccgcatctaccgcggggtcgagccgcagcttccgaactggttcgcggtgaccaagacgcgtaatggcgccggaggcgggaacaaggtggtggacgactgctacatccccaactacctgctccccaagacccagcccgagctccagtgggcgtggactaacatggaccagtatataagcgcctgtttgaatctcgcggagcgtaaacggctggtggcgcagcatctgacgcacgtgtcgcagacgcaggagcagaacaaggaaaaccagaaccccaattctgacgcgccggtcatcaggtcaaaaacctccgccaggtacatggagctggtcgggtggctggtggaccgcgggatcacgtcagaaaagcaatggatccaggaggaccaggcgtcctacatctccttcaacgccgcctccaactcgcggtcacaaatcaaggccgcgctggacaatgcctccaaaatcatgagcctgacaaagacggctccggactacctggtgggccagaacccgccggaggacatttccagcaaccgcatctaccgaatcctcgagatgaacgggtacgatccgcagtacgcggcctccgtcttcctgggctgggcgcaaaagaagttcgggaagaggaacaccatctggctctttgggccggccacgacgggtaaaaccaacatcgcggaagccatcgcccacgccgtgcccttctacggctgcgtgaactggaccaatgagaactttccgttcaacgattgcgtcgacaagatggtgatctggtgggaggagggcaagatgacggccaaggtcgtagagagcgccaaggccatcctgggcggaagcaaggtgcgcgtggaccaaaagtgcaagtcatcggcccagatcgacccaactcccgtgatcgtcacctccaacaccaacatgtgcgcggtcatcgacggaaactcgaccaccttcgagcaccaacaaccactccaggaccggatgttcaagttcgagctcaccaagcgcctggagcacgactttggcaaggtcaccaagcaggaagtcaaagactttttccggtgggcgtcagatcacgtgaccgaggtgactcacgagttttacgtcagaaagggtggagctagaaagaggcccgcccccaatgacgcagatataagtgagcccaagcgggcctgtccgtcagttgcgcagccatcgacgtcagacgcggaagctccggtggactacgcggacagattggctagaggacaacctctctga

SEQ ID NO: 5134 - DNA, 1872 bp, Adeno-associated virus 4; identical to SEQ ID NO: 5132

SEQ ID NO: 5135 - DNA, 1617 bp, Adeno-associated virus 4
  modified_base (162)..(162): a, c, t or g
atgcgtgcagcagctggcggagctgcagtcgagggsggacaaggtgccgatggagtgggtaatgcctcgggtgattggcattgcgattccacctggtctgagggccacgtcacgaccaccagcaccagaacctgggtcttgcccacctacaacaaccacctntacaagcgactcggagagagcctgcagtccaacacctacaacggattctccaccccctggggatactttgacttcaaccgcttccactgccacttctcaccacgtgactggcagcgactcatcaacaacaactggggcatgcgacccaaagccatgcgggtcaaaatcttcaacatccaggtcaaggaggtcacgacgtcgaacggcgagacaacggtggctaataaccttaccagcacggttcagatctttgcggactcgtcgtacgaactgccgtacgtgatggatgcgggtcaagagggcagcctgcctccttttcccaacgacgtctttatggtgccccagtacggctactgtggactggtgaccggcaacacttcgcagcaacagactgacagaaatgccttctactgcctggagtactttccttcgcagatgctgcggactggcaacaactttgaaattacgtacagttttgagaaggtgcctttccactcgatgtacgcgcacagccagagcctggaccggctgatgaaccctctcatcgaccagtacctgtggggactgcaatcgaccaccaccggaaccaccctgaatgccgggactgccaccaccaactttaccaagctgcggcctaccaacttttccaactttaaaaagaactggctgcccgggccttcaatcaagcagcagggcttctcaaagactgccaatcaaaactacaagatccctgccaccgggtcagacagtctcatcaaatacgagacgcacagcactctggacggaagatggagtgccctgacccccggacctccaatggccacggctggacctgcggacagcaagttcagcaacagccagctcatctttgcggggcctaaacagaacggcaacacggccaccgtacccgggactctgatcttcacctctgaggaggagctggcagccaccaacgccaccgatacggacatgtggggcaacctacctggcggtgaccagagcaacagcaacctgccgaccgtggacagactgacagccttgggagccgtgcctggaatggtctggcaaaacagagacatttactaccagggtcccatttgggccaagattcctcataccgatggacactttcacccctcaccgctgattggtgggtttgggctgaaacacccgcctcctcaaatttttatcaagaacaccccggtacctgcgaatcctgcaacgaccttcagctctactccggtaaactccttcattactcagtacagcactggccaggtgtcggtgcagattgactgggagatccagaaggagcggtccaaacgctggaaccccgaggtccagtttacctccaactacggacagcaaaactctctgttgtgggctcccgatgcggctgggaaatacactgagcctagggctatcggtacccgctacctcacccaccacctgtaa

SEQ ID NO: 5136 - DNA, 939 bp, Adeno-associated virus 4
atggagctggtcgggtggctggtggaccgcgggatcacgtcagaaaagcaatggatccaggaggaccaggcgtcctacatctccttcaacgccgcctccaactcgcggtcacaaatcaaggccgcgctggacaatgcctccaaaatcatgagcctgacaaagacggctccggactacctggtgggccagaacccgccggaggacatttccagcaaccgcatctaccgaatcctcgagatgaacgggtacgatccgcagtacgcggcctccgtcttcctgggctgggcgcaaaagaagttcgggaagaggaacaccatctggctctttgggccggccacgacgggtaaaaccaacatcgcggaagccatcgcccacgccgtgcccttctacggctgcgtgaactggaccaatgagaactttccgttcaacgattgcgtcgacaagatggtgatctggtgggaggagggcaagatgacggccaaggtcgtagagagcgccaaggccatcctgggcggaagcaaggtgcgcgtggaccaaaagtgcaagtcatcggcccagatcgacccaactcccgtgatcgtcacctccaacaccaacatgtgcgcggtcatcgacggaaactcgaccaccttcgagcaccaacaaccactccaggaccggatgttcaagttcgagctcaccaagcgcctggagcacgactttggcaaggtcaccaagcaggaagtcaaagactttttccggtgggcgtcagatcacgtgaccgaggtgactcacgagttttacgtcagaaagggtggagctagaaagaggcccgcccccaatgacgcagatataagtgagcccaagcgggcctgtccgtcagttgcgcagccatcgacgtcagacgcggaagctccggtggactacgcggacagattggctagaggacaacctctctga

SEQ ID NO: 5137 - DNA, 1197 bp, Adeno-associated virus 4
atggagctggtcgggtggctggtggaccgcgggatcacgtcagaaaagcaatggatccaggaggaccaggcgtcctacatctccttcaacgccgcctccaactcgcggtcacaaatcaaggccgcgctggacaatgcctccaaaatcatgagcctgacaaagacggctccggactacctggtgggccagaacccgccggaggacatttccagcaaccgcatctaccgaatcctcgagatgaacgggtacgatccgcagtacgcggcctccgtcttcctgggctgggcgcaaaagaagttcgggaagaggaacaccatctggctctttgggccggccacgacgggtaaaaccaacatcgcggaagccatcgcccacgccgtgcccttctacggctgcgtgaactggaccaatgagaactttccgttcaacgattgcgtcgacaagatggtgatctggtgggaggagggcaagatgacggccaaggtcgtagagagcgccaaggccatcctgggcggaagcaaggtgcgcgtggaccaaaagtgcaagtcatcggcccagatcgacccaactcccgtgatcgtcacctccaacaccaacatgtgcgcggtcatcgacggaaactcgaccaccttcgagcaccaacaaccactccaggaccggatgttcaagttcgagctcaccaagcgcctggagcacgactttggcaaggtcaccaagcaggaagtcaaagactttttccggtgggcgtcagatcacgtgaccgaggtgactcacgagttttacgtcagaaagggtggagctagaaagaggcccgcccccaatgacgcagatataagtgagcccaagcgggcctgtccgtcagttgcgcagccatcgacgtcagacgcggaagctccggtggactacgcggacaggtaccaaaacaaatgttctcgtcacgtgggtatgaatctgatgctttttccctgccggcaatgcgagagaatgaatcagaatgtggacatttgcttcacgcacggggtcatggactgtgccgagtgcttccccgtgtcagaatctcaacccgtgtctgtcgtcagaaagcggacgtatcagaaactgtgtccgattcatcacatcatggggagggcgcccgaggtggcctgctcggcctgcgaactggccaatgtggacttggatgactgtgacatggaacaa

SEQ ID NO: 5138 - DNA, 245 bp, Adeno-associated virus 4
ctccatcatctaggtttgcccactgacgtcaatgtgacgtcctagggttagggaggtccctgtattagcagtcacgtgagtgtcgtatttcgcggagcgtagcggagcgcataccaagctgccacgtcacagccacgtggtccgtttgcgacagtttgcgacaccatgtggtcaggagggtatataaccgcgagtgagccagcgaggagctccattttgcccgcgaattttgaacgagcagcagc

SEQ ID NO: 5139 - protein, 313 aa, Adeno-associated virus 4
  MOD_RES (313)..(313): Any amino acid
MELVGWLVDRGITSEKQWIQEDQASYISFNAASNSRSQIKAALDNASKIMSLTKTAPDYLVGQNPPEDISSNRIYRILEMNGYDPQYAASVFLGWAQKKFGKRNTIWLFGPATTGKTNIAEAIAHAVPFYGCVNWTNENFPFNDCVDKMVIWWEEGKMTAKVVESAKAILGGSKVRVDQKCKSSAQIDPTPVIVTSNTNMCAVIDGNSTTFEHQQPLQDRMFKFELTKRLEHDFGKVTKQEVKDFFRWASDHVTEVTHEFYVRKGGARKRPAPNDADISEPKRACPSVAQPSTSDAEAPVDYADRLARGQPLX

SEQ ID NO: 5140 - protein, 399 aa, Adeno-associated virus 4
MELVGWLVDRGITSEKQWIQEDQASYISFNAASNSRSQIKAALDNASKIMSLTKTAPDYLVGQNPPEDISSNRIYRILEMNGYDPQYAASVFLGWAQKKFGKRNTIWLFGPATTGKTNIAEAIAHAVPFYGCVNWTNENFPFNDCVDKMVIWWEEGKMTAKVVESAKAILGGSKVRVDQKCKSSAQIDPTPVIVTSNTNMCAVIDGNSTTFEHQQPLQDRMFKFELTKRLEHDFGKVTKQEVKDFFRWASDHVTEVTHEFYVRKGGARKRPAPNDADISEPKRACPSVAQPSTSDAEAPVDYADRYQNKCSRHVGMNLMLFPCRQCERMNQNVDICFTHGVMDCAECFPVSESQPVSVVRKRTYQKLCPIHHIMGRAPEVACSACELANVDLDDCDMEQ

SEQ ID NO: 5141 - protein, 623 aa, Adeno-associated virus 4
MPGFYEIVLKVPSDLDEHLPGISDSFVSWVAEKEWELPPDSDMDLNLIEQAPLTVAEKLQREFLVEWRRVSKAPEALFFVQFEKGDSYFHLHILVETVGVKSMVVGRYVSQIKEKLVTRIYRGVEPQLPNWFAVTKTRNGAGGGNKVVDDCYIPNYLLPKTQPELQWAWTNMDQYISACLNLAERKRLVAQHLTHVSQTQEQNKENQNPNSDAPVIRSKTSARYMELVGWLVDRGITSEKQWIQEDQASYISFNAASNSRSQIKAALDNASKIMSLTKTAPDYLVGQNPPEDISSNRIYRILEMNGYDPQYAASVFLGWAQKKFGKRNTIWLFGPATTGKTNIAEAIAHAVPFYGCVNWTNENFPFNDCVDKMVIWWEEGKMTAKVVESAKAILGGSKVRVDQKCKSSAQIDPTPVIVTSNTNMCAVIDGNSTTFEHQQPLQDRMFKFELTKRLEHDFGKVTKQEVKDFFRWASDHVTEVTHEFYVRKGGARKRPAPNDADISEPKRACPSVAQPSTSDAEAPVDYADRYQNKCSRHVGMNLMLFPCRQCERMNQNVDICFTHGVMDCAECFPVSESQPVSVVRKRTYQKLCPIHHIMGRAPEVACSACELANVDLDDCDMEQ

SEQ ID NO: 5142 - protein, 537 aa, Adeno-associated virus 4
  MOD_RES (537)..(537): Any amino acid
MPGFYEIVLKVPSDLDEHLPGISDSFVSWVAEKEWELPPDSDMDLNLIEQAPLTVAEKLQREFLVEWRRVSKAPEALFFVQFEKGDSYFHLHILVETVGVKSMVVGRYVSQIKEKLVTRIYRGVEPQLPNWFAVTKTRNGAGGGNKVVDDCYIPNYLLPKTQPELQWAWTNMDQYISACLNLAERKRLVAQHLTHVSQTQEQNKENQNPNSDAPVIRSKTSARYMELVGWLVDRGITSEKQWIQEDQASYISFNAASNSRSQIKAALDNASKIMSLTKTAPDYLVGQNPPEDISSNRIYRILEMNGYDPQYAASVFLGWAQKKFGKRNTIWLFGPATTGKTNIAEAIAHAVPFYGCVNWTNENFPFNDCVDKMVIWWEEGKMTAKVVESAKAILGGSKVRVDQKCKSSAQIDPTPVIVTSNTNMCAVIDGNSTTFEHQQPLQDRMFKFELTKRLEHDFGKVTKQEVKDFFRWASDHVTEVTHEFYVRKGGARKRPAPNDADISEPKRACPSVAQPSTSDAEAPVDYADRLARGQPLX

SEQ ID NO: 5143 - protein, 623 aa, Adeno-associated virus 4; identical to SEQ ID NO: 5141

SEQ ID NO: 5144 - protein, 544 aa, Adeno-associated virus 4
MSDDSEMRAAAGGAAVEGGQGADGVGNASGDWHCDSTWSEGHVTTTSTRTWVLPTYNNHLYKRLGESLQSNTYNGFSTPWGYFDFNRFHCHFSPRDWQRLINNNWGMRPKAMRVKIFNIQVKEVTTSNGETTVANNLTSTVQIFADSSYELPYVMDAGQEGSLPPFPNDVFMVPQYGYCGLVTGNTSQQQTDRNAFYCLEYFPSQMLRTGNNFEITYSFEKVPFHSMYAHSQSLDRLMNPLIDQYLWGLQSTTTGTTLNAGTATTNFTKLRPTNFSNFKKNWLPGPSIKQQGFSKTANQNYKIPATGSDSLIKYETHSTLDGRWSALTPGPPMATAGPADSKFSNSQLIFAGPKQNGNTATVPGTLIFTSEEELAATNATDTDMWGNLPGGDQSNSNLPTVDRLTALGAVPGMVWQNRDIYYQGPIWAKIPHTDGHFHPSPLIGGFGLKHPPPQIFIKNTPVPANPATTFSSTPVNSFITQYSTGQVSVQIDWEIQKERSKRWNPEVQFTSNYGQQNSLLWAPDAAGKYTEPRAIGTRYLTHHL

SEQ ID NO: 5145 - protein, 734 aa, Adeno-associated virus 4; identical to SEQ ID NO: 4791

SEQ ID NO: 5146 - protein, 598 aa, Adeno-associated virus 4
TAPGKKRPLIESPQQPDSSTGIGKKGKQPAKKKLVFEDETGAGDGPPEGSTSGAMSDDSEMRAAAGGAAVEGGQGADGVGNASGDWHCDSTWSEGHVTTTSTRTWVLPTYNNHLYKRLGESLQSNTYNGFSTPWGYFDFNRFHCHFSPRDWQRLINNNWGMRPKAMRVKIFNIQVKEVTTSNGETTVANNLTSTVQIFADSSYELPYVMDAGQEGSLPPFPNDVFMVPQYGYCGLVTGNTSQQQTDRNAFYCLEYFPSQMLRTGNNFEITYSFEKVPFHSMYAHSQSLDRLMNPLIDQYLWGLQSTTTGTTLNAGTATTNFTKLRPTNFSNFKKNWLPGPSIKQQGFSKTANQNYKIPATGSDSLIKYETHSTLDGRWSALTPGPPMATAGPADSKFSNSQLIFAGPKQNGNTATVPGTLIFTSEEELAATNATDTDMWGNLPGGDQSNSNLPTVDRLTALGAVPGMVWQNRDIYYQGPIWAKIPHTDGHFHPSPLIGGFGLKHPPPQIFIKNTPVPANPATTFSSTPVNSFITQYSTGQVSVQIDWEIQKERSKRWNPEVQFTSNYGQQNSLLWAPDAAGKYTEPRAIGTRYLTHHL

SEQ ID NO: 5147 - DNA, 129 bp, Adeno-associated virus 4
ttggccactccctctatgcgcgctcgctcactcactcggccctgcggccagaggccggcagtctggagacctttggtgtccagggcagggccgagtgagtgagcgagcgcgcatagagggagtggccaa

SEQ ID NO: 5148 - DNA, 125 bp, Adeno-associated virus 4
ttggccactccctctatgcgcgctcgctcactcactcggccctggagaccaaaggtctccagactgccggcctctggccggcagggccgagtgagtgagcgagcgcgcatagagggagtggccaa

SEQ ID NO: 5149 - DNA, 4768 bp, Adeno-associated virus 4
  modified_base (3009)..(3009): a, c, t or g
ttggccactccctctatgcgcgctcgctcactcactcggccctggagaccaaaggtctccagactgccggcctctggccggcagggccgagtgagtgagcgagcgcgcatagagggagtggccaactccatcatctaggtttgcccactgacgtcaatgtgacgtcctagggttagggaggtccctgtattagcagtcacgtgagtgtcgtatttcgcggagcgtagcggagcgcataccaagctgccacgtcacagccacgtggtccgtttgcgacagtttgcgacaccatgtggtcaggagggtatataaccgcgagtgagccagcgaggagctccattttgcccgcgaattttgaacgagcagcagccatgccggggttctacgagatcgtgctgaaggtgcccagcgacctggacgagcacctgcccggcatttctgactcttttgtgagctgggtggccgagaaggaatgggagctgccgccggattctgacatggacttgaatctgattgagcaggcacccctgaccgtggccgaaaagctgcaacgcgagttcctggtcgagtggcgccgcgtgagtaaggccccggaggccctcttctttgtccagttcgagaagggggacagctacttccacctgcacatcctggtggagaccgtgggcgtcaaatccatggtggtgggccgctacgtgagccagattaaagagaagctggtgacccgcatctaccgcggggtcgagccgcagcttccgaactggttcgcggtgaccaagacgcgtaatggcgccggaggcgggaacaaggtggtggacgactgctacatccccaactacctgctccccaagacccagcccgagctccagtgggcgtggactaacatggaccagtatataagcgcctgtttgaatctcgcggagcgtaaacggctggtggcgcagcatctgacgcacgtgtcgcagacgcaggagcagaacaaggaaaaccagaaccccaattctgacgcgccggtcatcaggtcaaaaacctccgccaggtacatggagctggtcgggtggctggtggaccgcgggatcacgtcagaaaagcaatggatccaggaggaccaggcgtcctacatctccttcaacgccgcctccaactcgcggtcacaaatcaaggccgcgctggacaatgcctccaaaatcatgagcctgacaaagacggctccggactacctggtgggccagaacccgccggaggacatttccagcaaccgcatctaccgaatcctcgagatgaacgggtacgatccgcagtacgcggcctccgtcttcctgggctgggcgcaaaagaagttcgggaagaggaacaccatctggctctttgggccggccacgacgggtaaaaccaacatcgcggaagccatcgcccacgccgtgcccttctacggctgcgtgaactggaccaatgagaactttccgttcaacgattgcgtcgacaagatggtgatctggtgggaggagggcaagatgacggccaaggtcgtagagagcgccaaggccatcctgggcggaagcaaggtgcgcgtggaccaaaagtgcaagtcatcggcccagatcgacccaactcccgtgatcgtcacctccaacaccaacatgtgcgcggtcatcgacggaaactcgaccaccttcgagcaccaacaaccactccaggaccggatgttcaagttcgagctcaccaagcgcctggagcacgactttggcaaggtcaccaagcaggaagtcaaagactttttccggtgggcgtcagatcacgtgaccgaggtgactcacgagttttacgtcagaaagggtggagctagaaagaggcccgcccccaatgacgcagatataagtgagcccaagcgggcctgtccgtcagttgcgcagccatcgacgtcagacgcggaagctccggtggactacgcggacaggtaccaaaacaaatgttctcgtcacgtgggtatgaatctgatgctttttccctgccggcaatgcgagagaatgaatcagaatgtggacatttgcttcacgcacggggtcatggactgtgccgagtgcttccccgtgtcagaatctcaacccgtgtctgtcgtcagaaagcggacgtatcagaaactgtgtccgattcatcacatcatggggagggcgcccgaggtggcctgctcggcctgcgaactggccaatgtggacttggatgactgtgacatggaacaataaatgactcaaaccagatatgactgacggttaccttccagattggctagaggacaacctctctgaaggcgttcgagagtggtgggcgctgcaacctggagcccctaaacccaaggcaaatcaacaacatcaggacaacgctcggggtcttgtgcttccgggttacaaatacctcggacccggcaacggactcgacaagggggaacccgtcaacgcagcggacgcggcagccctcgagcacgacaaggcctacgaccagcagctcaaggccggtgacaacccctacctcaagtacaaccacgccgacgcggagttccagcagcggcttcagggcgacacaccgtttgggggcaacctcggcagagcagtcttccaggccaaaaagagggttcttgaacctcttggtctggttgagcaagcgggtgagacggctcctggaaagaagagaccgttgattgaatccccccagcagcccgactcctccacgggtatcggcaaaaaaggcaagcagccggctaaaaagaagctcgttttcgaagacgaaactggagcaggcgacggaccccctgagggatcaacttccggagccatgtctgatgacagtgagatgcgtgcagcagctggcggagctgcagtcgagggsggacaaggtgccgatggagtgggtaatgcctcgggtgattggcattgcgattccacctggtctgagggccacgtcacgaccaccagcaccagaacctgggtcttgcccacctacaacaaccacctntacaagcgactcggagagagcctgcagtccaacacctacaacggattctccaccccctggggatactttgacttcaaccgcttccactgccacttctcaccacgtgactggcagcgactcatcaacaacaactggggcatgcgacccaaagccatgcgggtcaaaatcttcaacatccaggtcaaggaggtcacgacgtcgaacggcgagacaacggtggctaataaccttaccagcacggttcagatctttgcggactcgtcgtacgaactgccgtacgtgatggatgcgggtcaagagggcagcctgcctccttttcccaacgacgtctttatggtgccccagtacggctactgtggactggtgaccggcaacacttcgcagcaacagactgacagaaatgccttctactgcctggagtactttccttcgcagatgctgcggactggcaacaactttgaaattacgtacagttttgagaaggtgcctttccactcgatgtacgcgcacagccagagcctggaccggctgatgaaccctctcatcgaccagtacctgtggggactgcaatcgaccaccaccggaaccaccctgaatgccgggactgccaccaccaactttaccaagctgcggcctaccaacttttccaactttaaaaagaactggctgcccgggccttcaatcaagcagcagggcttctcaaagactgccaatcaaaactacaagatccctgccaccgggtcagacagtctcatcaaatacgagacgcacagcactctggacggaagatggagtgccctgacccccggacctccaatggccacggctggacctgcggacagcaagttcagcaacagccagctcatctttgcggggcctaaacagaacggcaacacggccaccgtacccgggactctgatcttcacctctgaggaggagctggcagccaccaacgccaccgatacggacatgtggggcaacctacctggcggtgaccagagcaacagcaacctgccgaccgtggacagactgacagccttgggagccgtgcctggaatggtctggcaaaacagagacatttactaccagggtcccatttgggccaagattcctcataccgatggacactttcacccctcaccgctgattggtgggtttgggctgaaacacccgcctcctcaaatttttatcaagaacaccccggtacctgcgaatcctgcaacgaccttcagctctactccggtaaactccttcattactcagtacagcactggccaggtgtcggtgcagattgactgggagatccagaaggagcggtccaaacgctggaaccccgaggtccagtttacctccaactacggacagcaaaactctctgttgtgggctcccgatgcggctgggaaatacactgagcctagggctatcggtacccgctacctcacccaccacctgtaataacctgttaatcaataaaccggtttattcgtttcagttgaactttggtctccgtgtccttcttatcttatctcgtttccatggctactgcgtacataagcagcggcctgcggcgcttgcgcttcgcggtttacaactgccggttaatcagtaacttctggcaaaccatgatgatggagttggccactccctctatgcgcgctcgctcactcactcggccctggagaccaaaggtctccagactgccggcctctggccggcagggccgagtgagtgagcgagcgcgcatagagggagtggccaa

SEQ ID NO: 5150 - protein, 725 aa, Adeno-associated virus 5
MAADGYLPDWLEDTLSEGIRQWWKLKPGPPPPKPAERHKDDSRGLVLPGYKYLGPFNGLDKGEPVNEADAAALEHDKAYDRQLDSGDNPYLKYNHADAEFQERLKEDTSFGGNLGRAVFQAKKRVLEPFGLVEEGAKTAPTGKRIDDHFPKRKKARTEEDSKPSTSSDAEAGPSGSQQLQIPAQPASSLGADTMSAGGGGPLGDNNQGADGVGNASGDWHCDSTWMGDRVVTKSTRTWVLPSYNNHQYREIKSGSVDGSNANAYFGYSTPWGYFDFNRFHSHWSPRDWQRLINNYWGFRPRSLRVKIFNIQVKEVTVQDSTTTIANNLTSTVQVFTDDDYQLPYVVGNGTEGCLPAFPPQVFTLPQYGYATLNRDNTENPTERSSFFCLEYFPSKMLRTGNNFEFTYNFEEVPFHSSFAPSQNLFKLANPLVDQYLYRFVSTNNTGGVQFNKNLAGRYANTYKNWFPGPMGRTQGWNLGSGVNRASVSAFATTNRMELEGASYQVPPQPNGMTNNLQGSNTYALENTMIFNSQPANPGTTATYLEGNMLITSESETQPVNRVAYNVGGQMATNNQSSTTAPTTGTYNLQEIVPGSVWMERDVYLQGPIWAKIPETGAHFHPSPAMGGFGLKHPPPMMLIKNTPVPGNITSFSDVPVSSFITQYSTGQVTVEMEWELKKENSKRWNPEIQYTNNYNDPQFVDFAPDSTGEYRTTRPIGTRYLTRPL

SEQ ID NO: 5151 - protein, 724 aa, Adeno-associated virus 5
MSFVDHPPDWLEEVGEGLREFLGLEAGPPKPKPNQQHQDQARGLVLPGYNYLGPGNGLDRGEPVNRADEVAREHDISYNEQLEAGDNPYLKYNHADAEFQEKLADDTSFGGNLGKAVFQAKKRVLEPFGLVEEGAKTAPTGKRIDDHFPKRKKARTEEDSKPSTSSDAEAGPSGSQQLQIPAQPASSLGADTMSAGGGGPLGDNNQGADGVGNASGDWHCDSTWMGDRVVTKSTRTWVLPSYNNHQYREIKSGSVDGSNANAYFGYSTPWGYFDFNRFHSHWSPRDWQRLINNYWGFRPRSLRVKIFNIQVKEVTVQDSTTTIANNLTSTVQVFTDDDYQLPYVVGNGTEGCLPAFPPQVFTLPQYGYATLNRDNTENPTERSSFFCLEYFPSKMLRTGNNFEFTYNFEEVPFHSSFAPSQNLFKLANPLVDQYLYRFVSTNNTGGVQFNKNLAGRYANTYKNWFPGPMGRTQGWNLGSGVNRASVSAFATTNRMELEGASYQVPPQPNGMTNNLQGSNTYALENTMIFNSQPANPGTTATYLEGNMLITSESETQPVNRVAYNVGGQMATNNQSSTTAPATGTYNLQEIVPGSVWMERDVYLQGPIWAKIPETGAHFHPSPAMGGFGLKHPPPMMLIKNTPVPGNITSFSDVPVSSFITQYSTGQVTVEMEWELKKENSKRWNPEIQYTNNYNDPQFVDFAPDSTGEYRTTRPIGTRYLTRPL

SEQ ID NO: 5152 - DNA, 2175 bp, Adeno-associated virus 5
atgtcttttgttgatcaccctccagattggttggaagaagttggtgaaggtcttcgcgagtttttgggccttgaagcgggcccaccgaaaccaaaacccaatcagcagcatcaagatcaagcccgtggtcttgtgctgcctggttataactatctcggacccggaaacggtctcgatcgaggagagcctgtcaacagggcagacgaggtcgcgcgagagcacgacatctcgtacaacgagcagcttgaggcgggagacaacccctacctcaagtacaaccacgcggacgccgagtttcaggagaagctcgccgacgacacatccttcgggggaaacctcggaaaggcagtctttcaggccaagaaaagggttctcgaaccttttggcctggttgaagagggtgctaagacggcccctaccggaaagcggatagacgaccactttccaaaaagaaagaaggctcggaccgaagaggactccaagccttccacctcgtcagacgccgaagctggacccagcggatcccagcagctgcaaatcccagcccaaccagcctcaagtttgggagctgatacaatgtctgcgggaggtggcggcccattgggcgacaataaccaaggtgccgatggagtgggcaatgcctcgggagattggcattgcgattccacgtggatgggggacagagtcgtcaccaagtccacccgaacctgggtgctgcccagctacaacaaccaccagtaccgagagatcaaaagcggctccgtcgacggaagcaacgccaacgcctactttggatacagcaccccctgggggtactttgactttaaccgcttccacagccactggagcccccgagactggcaaagactcatcaacaactactggggcttcagaccccggtccctcagagtcaaaatcttcaacattcaagtcaaagaggtcacggtgcaggactccaccaccaccatcgccaacaacctcacctccaccgtccaagtgtttacggacgacgactaccagctgccctacgtcgtcggcaacgggaccgagggatgcctgccggccttccctccgcaggtctttacgctgccgcagtacggttacgcgacgctgaaccgcgacaacacagaaaatcccaccgagaggagcagcttcttctgcctagagtactttcccagcaagatgctgagaacgggcaacaactttgagtttacctacaactttgaggaggtgcccttccactccagcttcgctcccagtcagaacctgttcaagctggccaacccgctggtggaccagtacttgtaccgcttcgtgagcacaaataacactggcggagtccagttcaacaagaacctggccgggagatacgccaacacctacaaaaactggttcccggggcccatgggccgaacccagggctggaacctgggctccggggtcaaccgcgccagtgtcagcgccttcgccacgaccaataggatggagctcgagggcgcgagttaccaggtgcccccgcagccgaacggcatgaccaacaacctccagggcagcaacacctatgccctggagaacactatgatcttcaacagccagccggcgaacccgggcaccaccgccacgtacctcgagggcaacatgctcatcaccagcgagagcgagacgcagccggtgaaccgcgtggcgtacaacgtcggcgggcagatggccaccaacaaccagagctccaccactgcccccgcgaccggcacgtacaacctccaggaaatcgtgcccggcagcgtgtggatggagagggacgtgtacctccaaggacccatctgggccaagatcccagagacgggggcgcactttcacccctctccggccatgggcggattcggactcaaacacccaccgcccatgatgctcatcaagaacacgcctgtgcccggaaatatcaccagcttctcggacgtgcccgtcagcagcttcatcacccagtacagcaccgggcaggtcaccgtggagatggagtgggagctcaagaaggaaaactccaagaggtggaacccagagatccagtacacaaacaactacaacgacccccagtttgtggactttgccccggacagcaccggggaatacagaaccaccagacctatcggaacccgataccttacccgacccctttaa

SEQ ID NO: 5153 - DNA, 2208 bp, Adeno-associated virus 6
atggctgccgatggttatcttccagattggctcgaggacaacctctctgagggcattcgcgagtggtgggacttgaaacctggagccccgaaacccaaagccaaccagcaaaagcaggacgacggccggggtctggtgcttcctggctacaagtacctcggacccttcaacggactcgacaagggggagcccgtcaacgcggcggatgcagcggccctcgagcacgacaaggcctacgaccagcagctcaaagcgggtgacaatccgtacctgcggtataaccacgccgacgccgagtttcaggagcgtctgcaagaagatacgtcttttgggggcaacctcgggcgagcagtcttccaggccaagaagagggttctcgaaccttttggtctggttgaggaaggtgctaagacggctcctggaaagaaacgtccggtagagcagtcgccacaagagccagactcctcctcgggcattggcaagacaggccagcagcccgctaaaaagagactcaattttggtcagactggcgactcagagtcagtccccgacccacaacctctcggagaacctccagcaacccccgctgctgtgggacctactacaatggcttcaggcggtggcgcaccaatggcagacaataacgaaggcgccgacggagtgggtaatgcctcaggaaattggcattgcgattccacatggctgggcgacagagtcatcaccaccagcacccgaacatgggccttgcccacctataacaaccacctctacaagcaaatctccagtgcttcaacgggggccagcaacgacaaccactacttcggctacagcaccccctgggggtattttgatttcaacagattccactgccatttctcaccacgtgactggcagcgactcatcaacaacaattggggattccggcccaagagactcaacttcaagctcttcaacatccaagtcaaggaggtcacgacgaatgatggcgtcacgaccatcgctaataaccttaccagcacggttcaagtcttctcggactcggagtaccagttgccgtacgtcctcggctctgcgcaccagggctgcctccctccgttcccggcggacgtgttcatgattccgcagtacggctacctaacgctcaacaatggcagccaggcagtgggacggtcatccttttactgcctggaatatttcccatcgcagatgctgagaacgggcaataactttaccttcagctacaccttcgaggacgtgcctttccacagcagctacgcgcacagccagagcctggaccggctgatgaatcctctcatcgaccagtacctgtattacctgaacagaactcagaatcagtccggaagtgcccaaaacaaggacttgctgtttagccgggggtctccagctggcatgtctgttcagcccaaaaactggctacctggaccctgttaccggcagcagcgcgtttctaaaacaaaaacagacaacaacaacagcaactttacctggactggtgcttcaaaatataaccttaatgggcgtgaatctataatcaaccctggcactgctatggcctcacacaaagacgacaaagacaagttctttcccatgagcggtgtcatgatttttggaaaggagagcgccggagcttcaaacactgcattggacaatgtcatgatcacagacgaagaggaaatcaaagccactaaccccgtggccaccgaaagatttgggactgtggcagtcaatctccagagcagcagcacagaccctgcgaccggagatgtgcatgttatgggagccttacctggaatggtgtggcaagacagagacgtatacctgcagggtcctatttgggccaaaattcctcacacggatggacactttcacccgtctcctctcatgggcggctttggacttaagcacccgcctcctcagatcctcatcaaaaacacgcctgttcctgcgaatcctccggcagagttttcggctacaaagtttgcttcattcatcacccagtattccacaggacaagtgagcgtggagattgaatgggagctgcagaaagaaaacagcaaacgctggaatcccgaagtgcagtatacatctaactatgcaaaatctgccaacgttgatttcactgtggacaacaatggactttatactgagcctcgccccattggcacccgttacctcacccgtcccctg

SEQ ID NO: 5154 - protein, 736 aa, Adeno-associated virus 6; identical to SEQ ID NO: 4799

SEQ ID NO: 5155 - protein, 623 aa, Adeno-associated virus 6
MPGFYEIVIKVPSDLDEHLPGISDSFVNWVAEKEWELPPDSDMDLNLIEQAPLTVAEKLQRDFLVQWRRVSKAPEALFFVQFEKGESYFHLHILVETTGVKSMVLGRFLSQIRDKLVQTIYRGIEPTLPNWFAVTKTRNGAGGGNKVVDECYIPNYLLPKTQPELQWAWTNMEEYISACLNLAERKRLVAHDLTHVSQTQEQNKENLNPNSDAPVIRSKTSARYMELVGWLVDRGITSEKQWIQEDQASYISFNAASNSRSQIKAALDNAGKIMALTKSAPDYLVGPAPPADIKTNRIYRILELNGYDPAYAGSVFLGWAQKRFGKRNTIWLFGPATTGKTNIAEAIAHAVPFYGCVNWTNENFPFNDCVDKMVIWWEEGKMTAKVVESAKAILGGSKVRVDQKCKSSAQIDPTPVIVTSNTNMCAVIDGNSTTFEHQQPLQDRMFKFELTRRLEHDFGKVTKQEVKEFFRWAQDHVTEVAHEFYVRKGGANKRPAPDDADKSEPKRACPSVADPSTSDAEGAPVDFADRYQNKCSRHAGMLQMLFPCKTCERMNQNFNICFTHGTRDCSECFPGVSESQPVVRKRTYRKLCAIHHLLGRAPEIACSACDLVNVDLDDCVSEQ

SEQ ID NO: 5156 - DNA, 4683 bp, Adeno-associated virus 6
ttggccactccctctctgcgcgctcgctcgctcactgaggccgggcgaccaaaggtcgcccgacgcccgggctttgcccgggcggcctcagtgagcgagcgagcgcgcagagagggagtggccaactccatcactaggggttcctggaggggtggagtcgtgacgtgaattacgtcatagggttagggaggtcctgtattagaggtcacgtgagtgttttgcgacattttgcgacaccatgtggtcacgctgggtatttaagcccgagtgagcacgcagggtctccattttgaagcgggaggtttgaacgcgcagcgccatgccggggttttacgagattgtgattaaggtccccagcgaccttgacgagcatctgcccggcatttctgacagctttgtgaactgggtggccgagaaggaatgggagttgccgccagattctgacatggatctgaatctgattgagcaggcacccctgaccgtggccgagaagctgcagcgcgacttcctggtccagtggcgccgcgtgagtaaggccccggaggccctcttctttgttcagttcgagaagggcgagtcctacttccacctccatattctggtggagaccacgggggtcaaatccatggtgctgggccgcttcctgagtcagattagggacaagctggtgcagaccatctaccgcgggatcgagccgaccctgcccaactggttcgcggtgaccaagacgcgtaatggcgccggaggggggaacaaggtggtggacgagtgctacatccccaactacctcctgcccaagactcagcccgagctgcagtgggcgtggactaacatggaggagtatataagcgcgtgtttaaacctggccgagcgcaaacggctcgtggcgcacgacctgacccacgtcagccagacccaggagcagaacaaggagaatctgaaccccaattctgacgcgcctgtcatccggtcaaaaacctccgcacgctacatggagctggtcgggtggctggtggaccggggcatcacctccgagaagcagtggatccaggaggaccaggcctcgtacatctccttcaacgccgcctccaactcgcggtcccagatcaaggccgctctggacaatgccggcaagatcatggcgctgaccaaatccgcgcccgactacctggtaggccccgctccgcccgccgacattaaaaccaaccgcatttaccgcatcctggagctgaacggctacgaccctgcctacgccggctccgtctttctcggctgggcccagaaaaggttcggaaaacgcaacaccatctggctgtttgggccggccaccacgggcaagaccaacatcgcggaagccatcgcccacgccgtgcccttctacggctgcgtcaactggaccaatgagaactttcccttcaacgattgcgtcgacaagatggtgatctggtgggaggagggcaagatgacggccaaggtcgtggagtccgccaaggccattctcggcggcagcaaggtgcgcgtggaccaaaagtgcaagtcgtccgcccagatcgatcccacccccgtgatcgtcacctccaacaccaacatgtgcgccgtgattgacgggaacagcaccaccttcgagcaccagcagccgttgcaggaccggatgttcaaatttgaactcacccgccgtctggagcatgactttggcaaggtgacaaagcaggaagtcaaagagttcttccgctgggcgcaggatcacgtgaccgaggtggcgcatgagttctacgtcagaaagggtggagccaacaagagacccgcccccgatgacgcggataaaagcgagcccaagcgggcctgcccctcagtcgcggatccatcgacgtcagacgcggaaggagctccggtggactttgccgacaggtaccaaaacaaatgttctcgtcacgcgggcatgcttcagatgctgtttccctgcaaaacatgcgagagaatgaatcagaatttcaacatttgcttcacgcacgggaccagagactgttcagaatgtttccccggcgtgtcagaatctcaaccggtcgtcagaaagaggacgtatcggaaactctgtgccattcatcatctgctggggcgggctcccgagattgcttgctcggcctgcgatctggtcaacgtggatctggatgactgtgtttctgagcaataaatgacttaaaccaggtatggctgccgatggttatcttccagattggctcgaggacaacctctctgagggcattcgcgagtggtgggacttgaaacctggagccccgaaacccaaagccaaccagcaaaagcaggacgacggccggggtctggtgcttcctggctacaagtacctcggacccttcaacggactcgacaagggggagcccgtcaacgcggcggatgcagcggccctcgagcacgacaaggcctacgaccagcagctcaaagcgggtgacaatccgtacctgcggtataaccacgccgacgccgagtttcaggagcgtctgcaagaagatacgtcttttgggggcaacctcgggcgagcagtcttccaggccaagaagagggttctcgaaccttttggtctggttgaggaaggtgctaagacggctcctggaaagaaacgtccggtagagcagtcgccacaagagccagactcctcctcgggcattggcaagacaggccagcagcccgctaaaaagagactcaattttggtcagactggcgactcagagtcagtccccgacccacaacctctcggagaacctccagcaacccccgctgctgtgggacctactacaatggcttcaggcggtggcgcaccaatggcagacaataacgaaggcgccgacggagtgggtaatgcctcaggaaattggcattgcgattccacatggctgggcgacagagtcatcaccaccagcacccgaacatgggccttgcccacctataacaaccacctctacaagcaaatctccagtgcttcaacgggggccagcaacgacaaccactacttcggctacagcaccccctgggggtattttgatttcaacagattccactgccatttctcaccacgtgactggcagcgactcatcaacaacaattggggattccggcccaagagactcaacttcaagctcttcaacatccaagtcaaggaggtcacgacgaatgatggcgtcacgaccatcgctaataaccttaccagcacggttcaagtcttctcggactcggagtaccagttgccgtacgtcctcggctctgcgcaccagggctgcctccctccgttcccggcggacgtgttcatgattccgcagtacggctacctaacgctcaacaatggcagccaggcagtgggacggtcatccttttactgcctggaatatttcccatcgcagatgctgagaacgggcaataactttaccttcagctacaccttcgaggacgtgcctttccacagcagctacgcgcacagccagagcctggaccggctgatgaatcctctcatcgaccagtacctgtattacctgaacagaactcagaatcagtccggaagtgcccaaaacaaggacttgctgtttagccgggggtctccagctggcatgtctgttcagcccaaaaactggctacctggaccctgttaccggcagcagcgcgtttctaaaacaaaaacagacaacaacaacagcaactttacctggactggtgcttcaaaatataaccttaatgggcgtgaatctataatcaaccctggcactgctatggcctcacacaaagacgacaaagacaagttctttcccatgagcggtgtcatgatttttggaaaggagagcgccggagcttcaaacactgcattggacaatgtcatgatcacagacgaagaggaaatcaaagccactaaccccgtggccaccgaaagatttgggactgtggcagtcaatctccagagcagcagcacagaccctgcgaccggagatgtgcatgttatgggagccttacctggaatggtgtggcaagacagagacgtatacctgcagggtcctatttgggccaaaattcctcacacggatggacactttcacccgtctcctctcatgggcggctttggacttaagcacccgcctcctcagatcctcatcaaaaacacgcctgttcctgcgaatcctccggcagagttttcggctacaaagtttgcttcattcatcacccagtattccacaggacaagtgagcgtggagattgaatgggagctgcagaaagaaaacagcaaacgctggaatcccgaagtgcagtatacatctaactatgcaaaatctgccaacgttgatttcactgtggacaacaatggactttatactgagcctcgccccattggcacccgttacctcacccgtcccctgtaattgtgtgttaatcaataaaccggttaattcgtgtcagttgaactttggtctcatgtcgttattatcttatctggtcaccatagcaaccggttacacattaactgcttagttgcgcttcgcgaatacccctagtgatggagttgcccactccctctatgcgcgctcgctcgctcggtggggccggcagagcagagctctgccgtctgcggacctttggtccgcaggccccaccgagcgagcgagcgcgcatagagggagtgggcaa

SEQ ID NO: 5157 - DNA, 2211 bp, Adeno-associated virus 6
atggctgccgatggttatcttccagattggctcgaggacaacctctctgagggcattcgcgagtggtgggacttgaaacctggagccccgaaacccaaagccaaccagcaaaagcaggacgacggccggggtctggtgcttcctggctacaagtacctcggacccttcaacggactcgacaagggggagcccgtcaacgcggcggatgcagcggccctcgagcacgacaaggcctacgaccagcagctcaaagcgggtgacaatccgtacctgcggtataaccacgccgacgccgagtttcaggagcgtctgcaagaagatacgtcttttgggggcaacctcgggcgagcagtcttccaggccaagaagagggttctcgaaccttttggtctggttgaggaaggtgctaagacggctcctggaaagaaacgtccggtagagcagtcgccacaagagccagactcctcctcgggcattggcaagacaggccagcagcccgctaaaaagagactcaattttggtcagactggcgactcagagtcagtccccgacccacaacctctcggagaacctccagcaacccccgctgctgtgggacctactacaatggcttcaggcggtggcgcaccaatggcagacaataacgaaggcgccgacggagtgggtaatgcctcaggaaattggcattgcgattccacatggctgggcgacagagtcatcaccaccagcacccgaacatgggccttgcccacctataacaaccacctctacaagcaaatctccagtgcttcaacgggggccagcaacgacaaccactacttcggctacagcaccccctgggggtattttgatttcaacagattccactgccatttctcaccacgtgactggcagcgactcatcaacaacaattggggattccggcccaagagactcaacttcaagctcttcaacatccaagtcaaggaggtcacgacgaatgatggcgtcacgaccatcgctaataaccttaccagcacggttcaagtcttctcggactcggagtaccagttgccgtacgtcctcggctctgcgcaccagggctgcctccctccgttcccggcggacgtgttcatgattccgcagtacggctacctaacgctcaacaatggcagccaggcagtgggacggtcatccttttactgcctggaatatttcccatcgcagatgctgagaacgggcaataactttaccttcagctacaccttcgaggacgtgcctttccacagcagctacgcgcacagccagagcctggaccggctgatgaatcctctcatcgaccagtacctgtattacctgaacagaactcagaatcagtccggaagtgcccaaaacaaggacttgctgtttagccgggggtctccagctggcatgtctgttcagcccaaaaactggctacctggaccctgttaccggcagcagcgcgtttctaaaacaaaaacagacaacaacaacagcaactttacctggactggtgcttcaaaatataaccttaatgggcgtgaatctataatcaaccctggcactgctatggcctcacacaaagacgacaaagacaagttctttcccatgagcggtgtcatgatttttggaaaggagagcgccggagcttcaaacactgcattggacaatgtcatgatcacagacgaagaggaaatcaaagccactaaccccgtggccaccgaaagatttgggactgtggcagtcaatctccagagcagcagcacagaccctgcgaccggagatgtgcatgttatgggagccttacctggaatggtgtggcaagacagagacgtatacctgcagggtcctatttgggccaaaattcctcacacggatggacactttcacccgtctcctctcatgggcggctttggacttaagcacccgcctcctcagatcctcatcaaaaacacgcctgttcctgcgaatcctccggcagagttttcggctacaaagtttgcttcattcatcacccagtattccacaggacaagtgagcgtggagattgaatgggagctgcagaaagaaaacagcaaacgctggaatcccgaagtgcagtatacatctaactatgcaaaatctgccaacgttgatttcactgtggacaacaatggactttatactgagcctcgccccattggcacccgttacctcacccgtcccctgtaa

SEQ ID NO: 5158 - DNA, 2214 bp, Adeno-associated virus 7
atggctgccgatggttatcttccagattggctcgaggacaacctctctgagggcattcgcgagtggtgggacctgaaacctggagccccgaaacccaaagccaaccagcaaaagcaggacaacggccggggtctggtgcttcctggctacaagtacctcggacccttcaacggactcgacaagggggagcccgtcaacgcggcggacgcagcggccctcgagcacgacaaggcctacgaccagcagctcaaagcgggtgacaatccgtacctgcggtataaccacgccgacgccgagtttcaggagcgtctgcaagaagatacgtcatttgggggcaacctcgggcgagcagtcttccaggccaagaagcgggttctcgaacctctcggtctggttgaggaaggcgctaagacggctcctgcaaagaagagaccggtagagccgtcacctcagcgttcccccgactcctccacgggcatcggcaagaaaggccagcagcccgccagaaagagactcaatttcggtcagactggcgactcagagtcagtccccgaccctcaacctctcggagaacctccagcagcgccctctagtgtgggatctggtacagtggctgcaggcggtggcgcaccaatggcagacaataacgaaggtgccgacggagtgggtaatgcctcaggaaattggcattgcgattccacatggctgggcgacagagtcattaccaccagcacccgaacctgggccctgcccacctacaacaaccacctctacaagcaaatctccagtgaaactgcaggtagtaccaacgacaacacctacttcggctacagcaccccctgggggtattttgactttaacagattccactgccacttctcaccacgtgactggcagcgactcatcaacaacaactggggattccggcccaagaagctgcggttcaagctcttcaacatccaggtcaaggaggtcacgacgaatgacggcgttacgaccatcgctaataaccttaccagcacgattcaggtattctcggactcggaataccagctgccgtacgtcctcggctctgcgcaccagggctgcctgcctccgttcccggcggacgtcttcatgattcctcagtacggctacctgactctcaacaatggcagtcagtctgtgggacgttcctccttctactgcctggagtacttcccctctcagatgctgagaacgggcaacaactttgagttcagctacagcttcgaggacgtgcctttccacagcagctacgcacacagccagagcctggaccggctgatgaatcccctcatcgaccagtacttgtactacctggccagaacacagagtaacccaggaggcacagctggcaatcgggaactgcagttttaccagggcgggccttcaactatggccgaacaagccaagaattggttacctggaccttgcttccggcaacaaagagtctccaaaacgctggatcaaaacaacaacagcaactttgcttggactggtgccaccaaatatcacctgaacggcagaaactcgttggttaatcccggcgtcgccatggcaactcacaaggacgacgaggaccgctttttcccatccagcggagtcctgatttttggaaaaactggagcaactaacaaaactacattggaaaatgtgttaatgacaaatgaagaagaaattcgtcctactaatcctgtagccacggaagaatacgggatagtcagcagcaacttacaagcggctaatactgcagcccagacacaagttgtcaacaaccagggagccttacctggcatggtctggcagaaccgggacgtgtacctgcagggtcccatctgggccaagattcctcacacggatggcaactttcacccgtctcctttgatgggcggctttggacttaaacatccgcctcctcagatcctgatcaagaacactcccgttcccgctaatcctccggaggtgtttactcctgccaagtttgcttcgttcatcacacagtacagcaccggacaagtcagcgtggaaatcgagtgggagctgcagaaggaaaacagcaagcgctggaacccggagattcagtacacctccaactttgaaaagcagactggtgtggactttgccgttgacagccagggtgtttactctgagcctcgccctattggcactcgttacctcacccgtaatctgtaa

SEQ ID NO: 5159 - protein, 738 aa, Adeno-associated virus 7
MAADGYLPDWLEDNLSEGIREWWALKPGAPKPKANQQKQDDGRGLVLPGYKYLGPFNGLDKGEPVNAADAAALEHDKAYDQQLQAGDNPYLRYNHADAEFQERLQEDTSFGGNLGRAVFQAKKRVLEPLGLVEEGAKTAPGKKRPVEPSPQRSPDSSTGIGKKGQQPARKRLNFGQTGDSESVPDPQPLGEPPAAPSGVGPNTMAAGGGAPMADNNEGADGVGSSSGNWHCDSTWLGDRVITTSTRTWALPTYNNHLYKQISNGTSGGATNDNTYFGYSTPWGYFDFNRFHCHFSPRDWQRLINNNWGFRPKRLSFKLFNIQVKEVTQNEGTKTIANNLTSTIQVFTDSEYQLPYVLGSAHQGCLPPFPADVFMIPQYGYLTLNNGSQAVGRSSFYCLEYFPSQMLRTGNNFQFTYTFEDVPFHSSYAHSQSLDRLMNPLIDQYLYYLSRTQTTGGTANTQTLGFSQGGPNTMANQAKNWLPGPCYRQQRVSTTTGQNNNSNFAWTAGTKYHLNGRNSLANPGIAMATHKDDEERFFPSNGILIFGKQNAARDNADYSDVMLTSEEEIKTTNPVATEEYGIVADNLQQQNTAPQIGTVNSQGALPGMVWQNRDVYLQGPIWAKIPHTDGNFHPSPLMGGFGLKHPPPQILIKNTPVPADPPTTFNQSKLNSFITQYSTGQVSVEIEWELQKENSKRWNPEIQYTSNYYKSTSVDFAVNTEGVYSEPRPIGTRYLTRNL

SEQ ID NO: 5160 - protein, 737 aa, Adeno-associated virus 7
MAADGYLPDWLEDNLSEGIREWWDLKPGAPKPKANQQKQDNGRGLVLPGYKYLGPFNGLDKGEPVNAADAAALEHDKAYDQQLKAGDNPYLRYNHADAEFQERLQEDTSFGGNLGRAVFQAKKRVLEPLGLVEEGAKTAPAKKRPVEPSPQRSPDSSTGIGKKGQQPARKRLNFGQTGDSESVPDPQPLGEPPAAPSSVGSGTVAAGGGAPMADNNEGADGVGNASGNWHCDSTWLGDRVITTSTRTWALPTYNNHLYKQISSETAGSTNDNTYFGYSTPWGYFDFNRFHCHFSPRDWQRLINNNWGFRPKKLRFKLFNIQVKEVTTNDGVTTIANNLTSTIQVFSDSEYQLPYVLGSAHQGCLPPFPADVFMIPQYGYLTLNNGSQSVGRSSFYCLEYFPSQMLRTGNNFEFSYSFEDVPFHSSYAHSQSLDRLMNPLIDQYLYYLARTQSNPGGTAGNRELQFYQGGPSTMAEQAKNWLPGPCFRQQRVSKTLDQNNNSNFAWTGATKYHLNGRNSLVNPGVAMATHKDDEDRFFPSSGVLIFGKTGATNKTTLENVLMTNEEEIRPTNPVATEEYGIVSSNLQAANTAAQTQVVNNQGALPGMVWQNRDVYLQGPIWAKIPHTDGNFHPSPLMGGFGLKHPPPQILIKNTPVPANPPEVFTPAKFASFITQYSTGQVSVEIEWELQKENSKRWNPEIQYTSNFEKQTGVDFAVDSQGVYSEPRPIGTRYLTRNL

SEQ ID NO: 5161 - protein, 623 aa, Adeno-associated virus 7
MPGFYEIVIKVPSDLDEHLPGISDSFVNWVAEKEWELPPDSDMDLNLIEQAPLTVAEKLQRDFLVQWRRVSKAPEALFFVQFEKGESYFHLHVLVETTGVKSMVLGRFLSQIREKLVQTIYRGVEPTLPNWFAVTKTRNGAGGGNKVVDECYIPNYLLPKTQPELQWAWTNMEEYISACLNLAERKRLVAQHLTHVSQTQEQNKENLNPNSDAPVIRSKTSARYMELVGWLVDRGITSEKQWIQEDQASYISFNAASNSRSQIKAALDNAGKIMALTKSAPDYLVGPSLPADIKTNRIYRILELNGYDPAYAGSVFLGWAQKKFGKRNTIWLFGPATTGKTNIAEAIAHAVPFYGCVNWTNENFPFNDCVDKMVIWWEEGKMTAKVVESAKAILGGSKVRVDQKCKSSAQIDPTPVIVTSNTNMCAVIDGNSTTFEHQQPLQDRMFKFELTRRLEHDFGKVTKQEVKEFFRWASDHVTEVAHEFYVRKGGASKRPAPDDADISEPKRACPSVADPSTSDAEGAPVDFADRYQNKCSRHAGMIQMLFPCKTCERMNQNFNICFTHGVRDCLECFPGVSESQPVVRKKTYRKLCAIHHLLGRAPEIACSACDLVNVDLDDCVSEQ

SEQ ID NO: 5162 - DNA, 4721 bp, Adeno-associated virus 7
ttggccactccctctatgcgcgctcgctcgctcggtggggcctgcggaccaaaggtccgcagacggcagagctctgctctgccggccccaccgagcgagcgagcgcgcatagagggagtggccaactccatcactaggggtaccgcgaagcgcctcccacgctgccgcgtcagcgctgacgtaaatcacgtcataggggagtggtcctgtattagctgtcacgtgagtgcttttgcgacattttgcgacaccacgtggccatttgaggtatatatggccgagtgagcgagcaggatctccattttgaccgcgaaatttgaacgagcagcagccatgccgggtttctacgagatcgtgatcaaggtgccgagcgacctggacgagcacctgccgggcatttctgactcgtttgtgaactgggtggccgagaaggaatgggagctgcccccggattctgacatggatctgaatctgatcgagcaggcacccctgaccgtggccgagaagctgcagcgcgacttcctggtccaatggcgccgcgtgagtaaggccccggaggccctgttctttgttcagttcgagaagggcgagagctacttccaccttcacgttctggtggagaccacgggggtcaagtccatggtgctaggccgcttcctgagtcagattcgggagaagctggtccagaccatctaccgcggggtcgagcccacgctgcccaactggttcgcggtgaccaagacgcgtaatggcgccggcggggggaacaaggtggtggacgagtgctacatccccaactacctcctgcccaagacccagcccgagctgcagtgggcgtggactaacatggaggagtatataagcgcgtgtttgaacctggccgaacgcaaacggctcgtggcgcagcacctgacccacgtcagccagacgcaggagcagaacaaggagaatctgaaccccaattctgacgcgcccgtgatcaggtcaaaaacctccgcgcgctacatggagctggtcgggtggctggtggaccggggcatcacctccgagaagcagtggatccaggaggaccaggcctcgtacatctccttcaacgccgcctccaactcgcggtcccagatcaaggccgcgctggacaatgccggcaagatcatggcgctgaccaaatccgcgcccgactacctggtggggccctcgctgcccgcggacattaaaaccaaccgcatctaccgcatcctggagctgaacgggtacgatcctgcctacgccggctccgtctttctcggctgggcccagaaaaagttcgggaagcgcaacaccatctggctgtttgggcccgccaccaccggcaagaccaacattgcggaagccatcgcccacgccgtgcccttctacggctgcgtcaactggaccaatgagaactttcccttcaacgattgcgtcgacaagatggtgatctggtgggaggagggcaagatgacggccaaggtcgtggagtccgccaaggccattctcggcggcagcaaggtgcgcgtggaccaaaagtgcaagtcgtccgcccagatcgaccccacccccgtgatcgtcacctccaacaccaacatgtgcgccgtgattgacgggaacagcaccaccttcgagcaccagcagccgttgcaggaccggatgttcaaatttgaactcacccgccgtctggagcacgactttggcaaggtgacgaagcaggaagtcaaagagttcttccgctgggccagtgatcacgtgaccgaggtggcgcatgagttctacgtcagaaagggcggagccagcaaaagacccgcccccgatgacgcggatataagcgagcccaagcgggcctgcccctcagtcgcggatccatcgacgtcagacgcggaaggagctccggtggactttgccgacaggtaccaaaacaaatgttctcgtcacgcgggcatgattcagatgctgtttccctgcaaaacgtgcgagagaatgaatcagaatttcaacatttgcttcacacacggggtcagagactgtttagagtgtttccccggcgtgtcagaatctcaaccggtcgtcagaaaaaagacgtatcggaaactctgcgcgattcatcatctgctggggcgggcgcccgagattgcttgctcggcctgcgacctggtcaacgtggacctggacgactgcgtttctgagcaataaatgacttaaaccaggtatggctgccgatggttatcttccagattggctcgaggacaacctctctgagggcattcgcgagtggtgggacctgaaacctggagccccgaaacccaaagccaaccagcaaaagcaggacaacggccggggtctggtgcttcctggctacaagtacctcggacccttcaacggactcgacaagggggagcccgtcaacgcggcggacgcagcggccctcgagcacgacaaggcctacgaccagcagctcaaagcgggtgacaatccgtacctgcggtataaccacgccgacgccgagtttcaggagcgtctgcaagaagatacgtcatttgggggcaacctcgggcgagcagtcttccaggccaagaagcgggttctcgaacctctcggtctggttgaggaaggcgctaagacggctcctgcaaagaagagaccggtagagccgtcacctcagcgttcccccgactcctccacgggcatcggcaagaaaggccagcagcccgccagaaagagactcaatttcggtcagactggcgactcagagtcagtccccgaccctcaacctctcggagaacctccagcagcgccctctagtgtgggatctggtacagtggctgcaggcggtggcgcaccaatggcagacaataacgaaggtgccgacggagtgggtaatgcctcaggaaattggcattgcgattccacatggctgggcgacagagtcattaccaccagcacccgaacctgggccctgcccacctacaacaaccacctctacaagcaaatctccagtgaaactgcaggtagtaccaacgacaacacctacttcggctacagcaccccctgggggtattttgactttaacagattccactgccacttctcaccacgtgactggcagcgactcatcaacaacaactggggattccggcccaagaagctgcggttcaagctcttcaacatccaggtcaaggaggtcacgacgaatgacggcgttacgaccatcgctaataaccttaccagcacgattcaggtattctcggactcggaataccagctgccgtacgtcctcggctctgcgcaccagggctgcctgcctccgttcccggcggacgtcttcatgattcctcagtacggctacctgactctcaacaatggcagtcagtctgtgggacgttcctccttctactgcctggagtacttcccctctcagatgctgagaacgggcaacaactttgagttcagctacagcttcgaggacgtgcctttccacagcagctacgcacacagccagagcctggaccggctgatgaatcccctcatcgaccagtacttgtactacctggccagaacacagagtaacccaggaggcacagctggcaatcgggaactgcagttttaccagggcgggccttcaactatggccgaacaagccaagaattggttacctggaccttgcttccggcaacaaagagtctccaaaacgctggatcaaaacaacaacagcaactttgcttggactggtgccaccaaatatcacctgaacggcagaaactcgttggttaatcccggcgtcgccatggcaactcacaaggacgacgaggaccgctttttcccatccagcggagtcctgatttttggaaaaactggagcaactaacaaaactacattggaaaatgtgttaatgacaaatgaagaagaaattcgtcctactaatcctgtagccacggaagaatacgggatagtcagcagcaacttacaagcggctaatactgcagcccagacacaagttgtcaacaaccagggagccttacctggcatggtctggcagaaccgggacgtgtacctgcagggtcccatctgggccaagattcctcacacggatggcaactttcacccgtctcctttgatgggcggctttggacttaaacatccgcctcctcagatcctgatcaagaacactcccgttcccgctaatcctccggaggtgtttactcctgccaagtttgcttcgttcatcacacagtacagcaccggacaagtcagcgtggaaatcgagtgggagctgcagaaggaaaacagcaagcgctggaacccggagattcagtacacctccaactttgaaaagcagactggtgtggactttgccgttgacagccagggtgtttactctgagcctcgccctattggcactcgttacctcacccgtaatctgtaattgcatgttaatcaataaaccggttgattcgtttcagttgaactttggtctcctgtgcttcttatcttatcggtttccatagcaactggttacacattaactgcttgggtgcgcttcacgataagaacactgacgtcaccgcggtacccctagtgatggagttggccactccctctatgcgcgctcgctcgctcggtggggcctgcggaccaaaggtccgcagacggcagagctctgctctgccggccccaccgagcgagcgagcgcgcatagagggagtggccaa

SEQ ID NO: 5163 - DNA, 2214 bp, Adeno-associated virus 7; identical to SEQ ID NO: 5158

SEQ ID NO: 5164 - protein, 737 aa, Adeno-associated virus 7; identical to SEQ ID NO: 5160

SEQ ID NO: 5165 - DNA, 2217 bp, Adeno-associated virus 8
atggctgccgatggttatcttccagattggctcgaggacaacctctctgagggcattcgcgagtggtgggcgctgaaacctggagccccgaagcccaaagccaaccagcaaaagcaggacgacggccggggtctggtgcttcctggctacaagtacctcggacccttcaacggactcgacaagggggagcccgtcaacgcggcggacgcagcggccctcgagcacgacaaggcctacgaccagcagctgcaggcgggtgacaatccgtacctgcggtataaccacgccgacgccgagtttcaggagcgtctgcaagaagatacgtcttttgggggcaacctcgggcgagcagtcttccaggccaagaagcgggttctcgaacctctcggtctggttgaggaaggcgctaagacggctcctggaaagaagagaccggtagagccatcaccccagcgttctccagactcctctacgggcatcggcaagaaaggccaacagcccgccagaaaaagactcaattttggtcagactggcgactcagagtcagttccagaccctcaacctctcggagaacctccagcagcgccctctggtgtgggacctaatacaatggctgcaggcggtggcgcaccaatggcagacaataacgaaggcgccgacggagtgggtagttcctcgggaaattggcattgcgattccacatggctgggcgacagagtcatcaccaccagcacccgaacctgggccctgcccacctacaacaaccacctctacaagcaaatctccaacgggacatcgggaggagccaccaacgacaacacctacttcggctacagcaccccctgggggtattttgactttaacagattccactgccacttttcaccacgtgactggcagcgactcatcaacaacaactggggattccggcccaagagactcagcttcaagctcttcaacatccaggtcaaggaggtcacgcagaatgaaggcaccaagaccatcgccaataacctcaccagcaccatccaggtgtttacggactcggagtaccagctgccgtacgttctcggctctgcccaccagggctgcctgcctccgttcccggcggacgtgttcatgattccccagtacggctacctaacactcaacaacggtagtcaggccgtgggacgctcctccttctactgcctggaatactttccttcgcagatgctgagaaccggcaacaacttccagtttacttacaccttcgaggacgtgcctttccacagcagctacgcccacagccagagcttggaccggctgatgaatcctctgattgaccagtacctgtactacttgtctcggactcaaacaacaggaggcacggcaaatacgcagactctgggcttcagccaaggtgggcctaatacaatggccaatcaggcaaagaactggctgccaggaccctgttaccgccaacaacgcgtctcaacgacaaccgggcaaaacaacaatagcaactttgcctggactgctgggaccaaataccatctgaatggaagaaattcattggctaatcctggcatcgctatggcaacacacaaagacgacgaggagcgtttttttcccagtaacgggatcctgatttttggcaaacaaaatgctgccagagacaatgcggattacagcgatgtcatgctcaccagcgaggaagaaatcaaaaccactaaccctgtggctacagaggaatacggtatcgtggcagataacttgcagcagcaaaacacggctcctcaaattggaactgtcaacagccagggggccttacccggtatggtctggcagaaccgggacgtgtacctgcagggtcccatctgggccaagattcctcacacggacggcaacttccacccgtctccgctgatgggcggctttggcctgaaacatcctccgcctcagatcctgatcaagaacacgcctgtacctgcggatcctccgaccaccttcaaccagtcaaagctgaactctttcatcacgcaatacagcaccggacaggtcagcgtggaaattgaatgggagctgcagaaggaaaacagcaagcgctggaaccccgagatccagtacacctccaactactacaaatctacaagtgtggactttgctgttaatacagaaggcgtgtactctgaaccccgccccattggcacccgttacctcacccgtaatctgtaa

SEQ ID NO: 5166 - DNA, 2213 bp, Adeno-associated virus 8
atggctgccgatggttatcttccagattggctcgaggacaacctctctgagggcattcgcgagtggtgggcgctgaaacctggagccccgaagcccaaagccaaccagcaaaagcaggacgacggccggggtctggtgcttcctggctacaagtacctcggacccttcaacggactcgacaagggggagcccgtcaacgcggcggacgcagcggccctcgagcacgacaaggcctacgaccagcagctgcaggcgggtgacaatccgtacctgcggtataaccacgccgacgccgagtttcaggagcgtctgcaagaagatacgtcttttgggggcaacctcgggcgagcagtcttccaggccaagaagcgggttctcgaacctctcggtctggttgaggaaggcgctaagacggctcctggaaagaagagaccggtagagccatcaccccagcgttctccagactcctctacgggcatcggcaagaaaggccaacagcccgccagaaaaagactcaattttggtcagactggcgactcagagtcagttccagaccctcaacctctcggagaacctccagcagcgccctctggtgtgggacctaatacaatggctgcaggcggtggcgcaccaatggcagacaataacgaaggcgccgacggagtgggtagttcctcgggaaattggcattgcgattccacatggctgggcgacagagtcatcaccaccagcacccgaacctgggccctgcccacctacaacaaccacctctacaagcaaatctccaacgggacatcgggaggagccaccaacgacaacacctacttcggctacagcaccccctgggggtattttgactttaacagattccactgccacttttcaccacgtgactggcagcgactcatcaacaacaactggggattccggcccaagagactcagcttcaagctcttcaacatccaggtcaaggaggtcacgcagaatgaaggcaccaagaccatcgccaataacctcaccagcaccatccaggtgtttacggactcggagtaccagctgccgtacgttctcggctctgcccaccagggctgcctgcctccgttcccggcggacgtgttcatgattccccagtacggctacctaacactcaacaacggtagtcaggccgtgggacgctcctccttctactgcctggaatactttccttcgcagatgctgagaaccggcaacaacttccagtttacttacaccttcgaggacgtgcctttccacagcagctacgcccacagccagagcttggaccggctgatgaatcctctgattgaccagtacctgtactacttgtctcggactcaaacaacaggaggcacggcaaatacgcagactctgggcttcagccaaggtgggcctaatacaatggccaatcaggcaaagaactggctgccaggaccctgttaccgccaacaacgcgtctcaacgacaaccgggcaaaacaacaatagcaactttgcctggactgctgggaccaaataccatctgaatggaagaaattcattggctaatcctggcatcgctatggcaacacacaaagacgacgaggagcgtttttttcccagtaacgggatcctgatttttggcaaacaaaatgctgccagagacaatgcggattacagcgatgtcatgctcaccagcgaggaagaaatcaaaaccactaaccctgtggctacagaggaatacggtatcgtggcagataacttgcagcagcaaaacacggctcctcaaattggaactgtcaacagccagggggccttacccggtatggtctggcagaaccgggacgtgtacctgcagggtcccatctgggccaagattcctcacacggacggcaacttccacccgtctccgctgatgggcggctttggcctgaaacatcctccgcctcagatcctgatcaagaacacgcctgtacctgcggatcctccgaccaccttcaaccagtcaaagctgaactctttcatcacgcaatacagcaccggacaggtcagcgtggaaattgaatgggagctgcagaaggaaaacagcaagcgctggaaccccgagatccagtacacctccaactactacaaatctacaagtgtggactttgctgtaatacagaaggcgtgtactctgaaccccgccccattggcacccgttacctcacccgtaatctg

SEQ ID NO: 5167 - DNA, 4393 bp, Adeno-associated virus 8
cagagagggagtggccaactccatcactaggggtagcgcgaagcgcctcccacgctgccgcgtcagcgctgacgtaaattacgtcataggggagtggtcctgtattagctgtcacgtgagtgcttttgcggcattttgcgacaccacgtggccatttgaggtatatatggccgagtgagcgagcaggatctccattttgaccgcgaaatttgaacgagcagcagccatgccgggcttctacgagatcgtgatcaaggtgccgagcgacctggacgagcacctgccgggcatttctgactcgtttgtgaactgggtggccgagaaggaatgggagctgcccccggattctgacatggatcggaatctgatcgagcaggcacccctgaccgtggccgagaagctgcagcgcgacttcctggtccaatggcgccgcgtgagtaaggccccggaggccctcttctttgttcagttcgagaagggcgagagctactttcacctgcacgttctggtcgagaccacgggggtcaagtccatggtgctaggccgcttcctgagtcagattcgggaaaagcttggtccagaccatctacccgcggggtcgagccccaccttgcccaactggttcgcggtgaccaaagacgcggtaatggcgccggcgggggggaacaaggtggtggacgagtgctacatccccaactacctcctgcccaagactcagcccgagctgcagtgggcgtggactaacatggaggagtatataagcgcgtgcttgaacctggccgagcgcaaacggctcgtggcgcagcacctgacccacgtcagccagacgcaggagcagaacaaggagaatctgaaccccaattctgacgcgcccgtgatcaggtcaaaaacctccgcgcgctatatggagctggtcgggtggctggtggaccggggcatcacctccgagaagcagtggatccaggaggaccaggcctcgtacatctccttcaacgccgcctccaactcgcggtcccagatcaaggccgcgctggacaatgccggcaagatcatggcgctgaccaaatccgcgcccgactacctggtggggccctcgctgcccgcggacattacccagaaccgcatctaccgcatcctcgctctcaacggctacgaccctgcctacgccggctccgtctttctcggctgggctcagaaaaagttcgggaaacgcaacaccatctggctgtttggacccgccaccaccggcaagaccaacattgcggaagccatcgcccacgccgtgcccttctacggctgcgtcaactggaccaatgagaactttcccttcaatgattgcgtcgacaagatggtgatctggtgggaggagggcaagatgacggccaaggtcgtggagtccgccaaggccattctcggcggcagcaaggtgcgcgtggaccaaaagtgcaagtcgtccgcccagatcgaccccacccccgtgatcgtcacctccaacaccaacatgtgcgccgtgattgacgggaacagcaccaccttcgagcaccagcagcctctccaggaccggatgtttaagttcgaactcacccgccgtctggagcacgactttggcaaggtgacaaagcaggaagtcaaagagttcttccgctgggccagtgatcacgtgaccgaggtggcgcatgagttttacgtcagaaagggcggagccagcaaaagacccgcccccgatgacgcggataaaagcgagcccaagcgggcctgcccctcagtcgcggatccatcgacgtcagacgcggaaggagctccggtggactttgccgacaggtaccaaaacaaatgttctcgtcacgcgggcatgcttcagatgctgtttccctgcaaaacgtgcgagagaatgaatcagaatttcaacatttgcttcacacacggggtcagagactgctcagagtgtttccccggcgtgtcagaatctcaaccggtcgtcagaaagaggacgtatcggaaactctgtgcgattcatcatctgctggggcgggctcccgagattgcttgctcggcctgcgatctggtcaacgtggacctggatgactgtgtttctgagcaataaatgacttaaaccaggtatggctgccgatggttatcttccagattggctcgaggacaacctctctgagggcattcgcgagtggtgggcgctgaaacctggagccccgaagcccaaagccaaccagcaaaagcaggacgacggccggggtctggtgcttcctggctacaagtacctcggacccttcaacggactcgacaagggggagcccgtcaacgcggcggacgcagcggccctcgagcacgacaaggcctacgaccagcagctgcaggcgggtgacaatccgtacctgcggtataaccacgccgacgccgagtttcaggagcgtctgcaagaagatacgtcttttgggggcaacctcgggcgagcagtcttccaggccaagaagcgggttctcgaacctctcggtctggttgaggaaggcgctaagacggctcctggaaagaagagaccggtagagccatcaccccagcgttctccagactcctctacgggcatcggcaagaaaggccaacagcccgccagaaaaagactcaattttggtcagactggcgactcagagtcagttccagaccctcaacctctcggagaacctccagcagcgccctctggtgtgggacctaatacaatggctgcaggcggtggcgcaccaatggcagacaataacgaaggcgccgacggagtgggtagttcctcgggaaattggcattgcgattccacatggctgggcgacagagtcatcaccaccagcacccgaacctgggccctgcccacctacaacaaccacctctacaagcaaatctccaacgggacatcgggaggagccaccaacgacaacacctacttcggctacagcaccccctgggggtattttgactttaacagattccactgccacttttcaccacgtgactggcagcgactcatcaacaacaactggggattccggcccaagagactcagcttcaagctcttcaacatccaggtcaaggaggtcacgcagaatgaaggcaccaagaccatcgccaataacctcaccagcaccatccaggtgtttacggactcggagtaccagctgccgtacgttctcggctctgcccaccagggctgcctgcctccgttcccggcggacgtgttcatgattccccagtacggctacctaacactcaacaacggtagtcaggccgtgggacgctcctccttctactgcctggaatactttccttcgcagatgctgagaaccggcaacaacttccagtttacttacaccttcgaggacgtgcctttccacagcagctacgcccacagccagagcttggaccggctgatgaatcctctgattgaccagtacctgtactacttgtctcggactcaaacaacaggaggcacggcaaatacgcagactctgggcttcagccaaggtgggcctaatacaatggccaatcaggcaaagaactggctgccaggaccctgttaccgccaacaacgcgtctcaacgacaaccgggcaaaacaacaatagcaactttgcctggactgctgggaccaaataccatctgaatggaagaaattcattggctaatcctggcatcgctatggcaacacacaaagacgacgaggagcgtttttttcccagtaacgggatcctgatttttggcaaacaaaatgctgccagagacaatgcggattacagcgatgtcatgctcaccagcgaggaagaaatcaaaaccactaaccctgtggctacagaggaatacggtatcgtggcagataacttgcagcagcaaaacacggctcctcaaattggaactgtcaacagccagggggccttacccggtatggtctggcagaaccgggacgtgtacctgcagggtcccatctgggccaagattcctcacacggacggcaacttccacccgtctccgctgatgggcggctttggcctgaaacatcctccgcctcagatcctgatcaagaacacgcctgtacctgcggatcctccgaccaccttcaaccagtcaaagctgaactctttcatcacgcaatacagcaccggacaggtcagcgtggaaattgaatgggagctgcagaaggaaaacagcaagcgctggaaccccgagatccagtacacctccaactactacaaatctacaagtgtggactttgctgttaatacagaaggcgtgtactctgaaccccgccccattggcacccgttacctcacccgtaatctgtaattgcctgttaatcaataaaccggttgattcgtttcagttgaactttggtctctgcg

SEQ ID NO: 5168 - protein, 738 aa, Adeno-associated virus 8; identical to SEQ ID NO: 5159

SEQ ID NO: 5169 - protein, 737 aa, Adeno-associated virus 8
MAADGYLPDWLEDNLSEGIREWWALKPGAPKPKANQQKQDDGRGLVLPGYKYLGPFNGLDKGEPVNAADAAALEHDKAYDQQLQAGDNPYLRYNHADAEFQERLQEDTSFGGNLGRAVFQAKKRVLEPLGLVEEGAKTAPGKKRPVEPSPQRSPDSSTGIGKKGQQPARKRLNFGQTGDSESVPDPQPLGEPPAAPSGVGPNTMAAGGGAPMADNNEGADGVGSSSGNWHCDSTWLGDRVITTSTRTWALPTYNNHLYKQISNGTSGGATNDNTYFGYSTPWGYFDFNRFHCHFSPRDWQRLINNNWGFRPKRLSFKLFNIQVKEVTQNEGTKTIANNLTSTIQVFTDSEYQLPYVLGSAHQGCLPPFPADVFMIPQYGYLTLNNGSQAVGRSSFYCLEYFPSQMLRTGNNFQFTYTFEDVPFHSSYAHSQSLDRLMNPLIDQYLYYLSRTQTTGGTANTQTLGFSQGGPNTMANQAKNWLPGPCYRQQRVSTTTGQNNNSNFAWTAGTKYHLNGRNSLANPGIAMATHKDDEERFFPSNGILIFGKQNAARDNADYSDVMLTSEEEIKTTNPVATEEYGIVADNLQQQNTAPQIGTVNSQGALPGMVWQNRDVYLQGPIWAKIPHTDGNFHPSPLMGGFGLKHPPPQILIKNTPVPADPPTTFNQSKLNSFITQYSTGQVSVEIEWELQKENSKRWNPEIQYTSNYYKSTSVDFAVIQKACTLNPAPLAPVTSPVI

SEQ ID NO: 5170 - DNA, 2217 bp, Adeno-associated virus 8; identical to SEQ ID NO: 5165

SEQ ID NO: 5171 - DNA, 4385 bp, Adeno-associated virus 9
cagagagggagtggccaactccatcactaggggtaatcgcgaagcgcctcccacgctgccgcgtcagcgctgacgtagattacgtcataggggagtggtcctgtattagctgtcacgtgagtgcttttgcgacattttgcgacaccacatggccatttgaggtatatatggccgagtgagcgagcaggatctccattttgaccgcgaaatttgaacgagcagcagccatgccgggcttctacgagattgtgatcaaggtgccgagcgacctggacgagcacctgccgggcatttctgactcttttgtgaactgggtggccgagaaggaatgggagctgcccccggattctgacatggatcggaatctgatcgagcaggcacccctgaccgtggccgagaagctgcagcgcgacttcctggtccaatggcgccgcgtgagtaaggccccggaggccctcttctttgttcagttcgagaagggcgagagctactttcacctgcacgttctggtcgagaccacgggggtcaagtccatggtgctaggccgcttcctgagtcagattcgggagaagctggtccagaccatctaccgcgggatcgagccgaccctgcccaactggttcgcggtgaccaagacgcgtaatggcgccggcggggggaacaaggtggtggacgagtgctacatccccaactacctcctgcccaagactcagcccgagctgcagtgggcgtggactaacatggaggagtatataagcgcgtgcttgaacctggccgagcgcaaacggctcgtggcgcagcacctgacccacgtcagccagacgcaggagcagaacaaggagaatctgaaccccaattctgacgcgcccgtgatcaggtcaaaaacctccgcgcgctacatggagctggtcgggtggctggtggaccggggcatcacctccgagaagcagtggatccaggaggaccaggcctcgtacatctccttcaacgccgcctccaactcgcggtcccagatcaaggccgcgctggacaatgccggcaagatcatggcgctgaccaaatccgcgcccgactacctggtaggcccttcacttccggtggacattacgcagaaccgcatctaccgcatcctgcagctcaacggctacgaccctgcctacgccggctccgtctttctcggctgggcacaaaagaagttcgggaaacgcaacaccatctggctgtttgggccggccaccacgggaaagaccaacatcgcagaagccattgcccacgccgtgcccttctacggctgcgtcaactggaccaatgagaactttcccttcaacgattgcgtcgacaagatggtgatctggtgggaggagggcaagatgacggccaaggtcgtggagtccgccaaggccattctcggcggcagcaaggtgcgcgtggaccaaaagtgcaagtcgtccgcccagatcgaccccactcccgtgatcgtcacctccaacaccaacatgtgcgccgtgattgacgggaacagcaccaccttcgagcaccagcagcctctccaggaccggatgtttaagttcgaactcacccgccgtctggagcacgactttggcaaggtgacaaagcaggaagtcaaagagttcttccgctgggccagtgatcacgtgaccgaggtggcgcatgagttttacgtcagaaagggcggagccagcaaaagacccgcccccgatgacgcggataaaagcgagcccaagcgggcctgcccctcagtcgcggatccatcgacgtcagacgcggaaggagctccggtggactttgccgacaggtaccaaaacaaatgttctcgtcacgcgggcatgcttcagatgctgcttccctgcaaaacgtgcgagagaatgaatcagaatttcaacatttgcttcacacacggggtcagagactgctcagagtgtttccccggcgtgtcagaatctcaaccggtcgtcagaaagaggacgtatcggaaactctgtgcgattcatcatctgctggggcgggctcccgagattgcttgctcggcctgcgatctggtcaacgtggacctggatgactgtgtttctgagcaataaatgacttaaaccaggtatggctgccgatggttatcttccagattggctcgaggacaacctctctgagggcattcgcgagtggtgggcgctgaaacctggagccccgaagcccaaagccaaccagcaaaagcaggacgacggccggggtctggtgcttcctggctacaagtacctcggacccttcaacggactcgacaagggggagcccgtcaacgcggcggacgcagcggccctcgagcacggcaaggcctacgaccagcagctgcaggcgggtgacaatccgtacctgcggtataaccacgccgacgccgagtttcaggagcgtctgcaagaagatacgtcttttgggggcaacctcgggcgagcagtcttccaggccaagaagcgggttctcgaacctctcggtctggttgaggaaggcgctaagacggctcctggaaagaagagaccggtagagccatcaccccagcgttctccagactcctctacgggcatcggcaagaaaggccaacagcccgccagaaaaagactcaattttggtcagactggcgactcagagtcagttccagaccctcaacctctcggagaacctccagcagcgccctctggtgtgggacctaatacaatggctgcaggcggtggcgcaccaatggcagacaataacgaaggcgccgacggagtgggtaattcctcgggaaattggcattgcgattccacatggctgggggacagagtcatcaccaccagcacccgaacctgggcattgcccacctacaacaaccacctctacaagcaaatctccaatggaacatcgggaggaagcaccaacgacaacacctactttggctacagcaccccctgggggtattttgacttcaacagattccactgccacttctcaccacgtgactggcagcgactcatcaacaacaactggggattccggccaaagagactcaacttcaagctgttcaacatccaggtcaaggaggttacgacgaacgaaggcaccaagaccatcgccaataaccttaccagcaccgtccaggtctttacggactcggagtaccagctaccgtacgtcctaggctctgcccaccaaggatgcctgccaccgtttcctgcagacgtcttcatggttcctcagtacggctacctgacgctcaacaatggaagtcaagcgttaggacgttcttctttctactgtctggaatacttcccttctcagatgctgagaaccggcaacaactttcagttcagctacactttcgaggacgtgcctttccacagcagctacgcacacagccagagtctagatcgactgatgaaccccctcatcgaccagtacctatactacctggtcagaacacagacaactggaactgggggaactcaaactttggcattcagccaagcaggccctagctcaatggccaatcaggctagaaactgggtacccgggccttgctaccgtcagcagcgcgtctccacaaccaccaaccaaaataacaacagcaactttgcgtggacgggagctgctaaattcaagctgaacgggagagactcgctaatgaatcctggcgtggctatggcatcgcacaaagacgacgaggaccgcttctttccatcaagtggcgttctcatatttggcaagcaaggagccgggaacgatggagtcgactacagccaggtgctgattacagatgaggaagaaattaaagccaccaaccctgtagccacagaggaatacggagcagtggccatcaacaaccaggccgctaacacgcaggcgcaaactggacttgtgcataaccagggagttattcctggtatggtctggcagaaccgggacgtgtacctgcagggccctatttgggctaaaatacctcacacagatggcaactttcacccgtctcctctgatgggtggatttggactgaaacacccacctccacagattctaattaaaaatacaccagtgccggcagatcctcctcttaccttcaatcaagccaagctgaactctttcatcacgcagtacagcacgggacaagtcagcgtggaaatcgagtgggagctgcagaaagaaaacagcaagcgctggaatccagagatccagtatacttcaaactactacaaatctacaaatgtggactttgctgtcaataccaaaggtgtttactctgagcctcgccccattggtactcgttacctcacccgtaatttgtaattgcctgttaatcaataaaccggttaattcgtttcagttgaactttggtctctgcg

SEQ ID NO: 5172 - DNA, 4382 bp, Adeno-associated virus 9
cagagagggagtggccaactccatcactaggggtaatcgcgaagcgcctcccacgctgccgcgtcagcgctgacgtagattacgtcataggggagtggtcctgtattagctgtcacgtgagtgcttttgcgacattttgcgacaccacatggccatttgaggtatatatggccgagtgagcgagcaggatctccattttgaccgcgaaatttgaacgagcagcagccatgccgggcttctacgagattgtgatcaaggtgccgagcgacctggacgagcacctgccgggcatttctgactcttttgtgaactgggtggccgagaaggaatgggagctgcccccggattctgacatggatcggaatctgatcgagcaggcacccctgaccgtggccgagaagctgtagcgcgacttcctggtccaatggcgccgcgtgagtaaggccccggaggccctcttctttgttcagttcgagaagggcgagagctactttcacctgcacgttctggtcgagaccacgggggtcaagtccatggtgctaggccgcttcctgagtcagattcgggagaagctggtccagaccatctaccgcgggatcgagccgaccctgcccaactggttcgcggtgaccaagacgcgtaatggcgccggcggggggaacaaggtggtggacgagtgctacatccccaactacctcctgcccaagactcagcccgagctgcagtgggcgtggactaacatggaggagtatataagcgcgtgcttgaacctggccgagcgcaaacggctcgtggcgcagcacctgacccacgtcagccagacgcaggagcagaacaaggagaatctgaaccccaattctgacgcgcccgtgatcaggtcaaaaacctccgcgcgctacatggagctggtcgggtggctggtggaccggggcatcacctccgagaagcagtggatccaggaggaccaggcctcgtacatctccttcaacgccgcctccaactcgcggtcccagatcaaggccgcgctggacaatgccggcaagatcatggcgctgaccaaatccgcgcccgactacctggtaggcccttcacttccggtggacattacgcagaaccgcatctaccgcatcctgcagctcaacggctacgaccctgcctacgccggctccgtctttctcggctgggcacaaaagaagttcgggaaacgcaacaccatctggctgtttgggccggccaccacgggaaagaccaacatcgcagaagccattgcccacgccgtgcccttctacggctgcgtcaactggaccaatgagaactttcccttcaacgattgcgtcgacaagatggtgatctggtgggaggagggcaagatgacggccaaggtcgtggagtccgccaaggccattctcggcggcagcaaggtgcgcgtggaccaaaagtgcaagtcgtccgcccagatcgaccccactcccgtgatcgtcacctccaacaccaacatgtgcgccgtgattgacgggaacagcaccaccttcgagcaccagcagcctctccaggaccggatgtttaagttcgaactcacccgccgtctggagcacgactttggcaaggtgacaaagcaggaagtcaaagagttcttccgctgggccagtgatcacgtgaccgaggtggcgcatgagttttacgtcagaaagggcggagccagcaaaagacccgcccccgatgacgcggataaaagcgagcccaagcgggcctgcccctcagtcgcggatccatcgacgtcagacgcggaaggagctccggtggactttgccgacaggtaccaaaacaaatgttctcgtcacgcgggcatgcttcagatgctgcttccctgcaaaacgtgcgagagaatgaatcagaatttcaacatttgcttcacacacggggtcagagactgctcagagtgtttccccggcgtgtcagaatctcaaccggtcgtcagaaagaggacgtatcggaaactctgtgcgattcatcatctgctggggcgggctcccgagattgcttgctcggcctgcgatctggtcaacgtggacctggatgactgtgtttctgagcaataaatgacttaaaccaggtatggctgccgatggttatcttccagattggctcgaggacaacctctctgagggcattcgcgagtggtgggacctgaaacctggagccccgaaacccaaagccaaccagcaaaagcaggacgacggccggggtctggtgcttcctggctacaagtacctcggacccttcaacggactcgacaagggggagcccgtcaacgcggcggacgcagcggccctcgagcacgacaaggcctacgaccagcagctcaaagcgggtgacaatccgtacctgcggtataaccacgccgacgccgagtttcaggagcgtctgcaagaagatacgtcttttgggggcaacctcgggcgagcagtcttccaggccaagaagcgggttctcgaacctctcggtctggttgaggaaggcgctaagacggctcctggaaagaagagaccggtagagcagtcaccccaagaaccagactcatcctcgggcatcggcaaatcaggccagcagcccgctaaaaagagactcaattttggtcagactggcgactcagagtcagtccccgacccacaacctctcggagaacctccagaagccccctcaggtctgggacctaatacaatggcttcaggcggtggcgctccaatggcagacaataacgaaggcgccgacggagtgggtaattcctcgggaaattggcattgcgattccacatggctgggggacagagtcatcaccaccagcacccgaacctgggcattgcccacctacaacaaccacctctacaagcaaatctccaatggaacatcgggaggaagcaccaacgacaacacctactttggctacagcaccccctgggggtattttgacttcaacagattccactgccacttctcaccacgtgactggcagcgactcatcaacaacaactggggattccggccaaagagactcaacttcaagctgttcaacatccaggtcaaggaggttacgacgaacgaaggcaccaagaccatcgccaataaccttaccagcaccgtccaggtctttacggactcggagtaccagctaccgtacgtcctaggctctgcccaccaaggatgcctgccaccgtttcctgcagacgtcttcatggttcctcagtacggctacctgacgctcaacaatggaagtcaagcgttaggacgttcttctttctactgtctggaatacttcccttctcagatgctgagaaccggcaacaactttcagttcagctacactttcgaggacgtgcctttccacagcagctacgcacacagccagagtctagatcgactgatgaaccccctcatcgaccagtacctatactacctggtcagaacacagacaactggaactgggggaactcaaactttggcattcagccaagcaggccctagctcaatggccaatcaggctagaaactgggtacccgggccttgctaccgtcagcagcgcgtctccacaaccaccaaccaaaataacaacagcaactttgcgtggacgggagctgctaaattcaagctgaacgggagagactcgctaatgaatcctggcgtggctatggcatcgcacaaagacgacgaggaccgcttctttccatcaagtggcgttctcatatttggcaagcaaggagccgggaacgatggagtcgactacagccaggtgctgattacagatgaggaagaaattaaagccaccaaccctgtagccacagaggaatacggagcagtggccatcaacaaccaggccgctaacacgcaggcgcaaactggacttgtgcataaccagggagttattcctggtatggtctggcagaaccgggacgtgtacctgcagggccctatttgggctaaaatacctcacacagatggcaactttcacccgtctcctctgatgggtggatttggactgaaacacccacctccacagattctaattaaaaatacaccagtgccggcagatcctcctcttaccttcaatcaagccaagctgaactctttcatcacgcagtacagcacgggacaagtcagcgtggaaatcgagtgggagctgcagaaagaaaacagcaagcgctggaatccagagatccagtatacttcaaactactacaaatctacaaatgtggactttgctgtcaataccgaaggtgtttactctgagcctcgccccattggtactcgttacctcacccgtaatttgtaattgcctgttaatcaataaaccggttaattcgtttcagttgaactttggtctctgcg

SEQ ID NO: 5173 - protein, 736 aa, Adeno-associated virus 9; identical to SEQ ID NO: 4805

SEQ ID NO: 5174 - protein, 736 aa, Adeno-associated virus 9
MAADGYLPDWLEDNLSEGIREWWDLKPGAPKPKANQQKQDDGRGLVLPGYKYLGPFNGLDKGEPVNAADAAALEHDKAYDQQLKAGDNPYLRYNHADAEFQERLQEDTSFGGNLGRAVFQAKKRVLEPLGLVEEGAKTAPGKKRPVEQSPQEPDSSSGIGKSGQQPAKKRLNFGQTGDSESVPDPQPLGEPPEAPSGLGPNTMASGGGAPMADNNEGADGVGNSSGNWHCDSTWLGDRVITTSTRTWALPTYNNHLYKQISNGTSGGSTNDNTYFGYSTPWGYFDFNRFHCHFSPRDWQRLINNNWGFRPKRLNFKLFNIQVKEVTTNEGTKTIANNLTSTVQVFTDSEYQLPYVLGSAHQGCLPPFPADVFMVPQYGYLTLNNGSQALGRSSFYCLEYFPSQMLRTGNNFQFSYTFEDVPFHSSYAHSQSLDRLMNPLIDQYLYYLVRTQTTGTGGTQTLAFSQAGPSSMANQARNWVPGPCYRQQRVSTTTNQNNNSNFAWTGAAKFKLNGRDSLMNPGVAMASHKDDEDRFFPSSGVLIFGKQGAGNDGVDYSQVLITDEEEIKATNPVATEEYGAVAINNQAANTQAQTGLVHNQGVIPGMVWQNRDVYLQGPIWAKIPHTDGNFHPSPLMGGFGLKHPPPQILIKNTPVPADPPLTFNQAKLNSFITQYSTGQVSVEIEWELQKENSKRWNPEIQYTSNYYKSTNVDFAVNTEGVYSEPRPIGTRYLTRNL

SEQ ID NO: 5175 - protein, 623 aa, Adeno-associated virus 9
MPGFYEIVIKVPSDLDEHLPGISDSFVNWVAEKEWELPPDSDMDRNLIEQAPLTVAEKLQRDFLVQWRRVSKAPEALFFVQFEKGESYFHLHVLVETTGVKSMVLGRFLSQIREKLVQTIYRGIEPTLPNWFAVTKTRNGAGGGNKVVDECYIPNYLLPKTQPELQWAWTNMEEYISACLNLAERKRLVAQHLTHVSQTQEQNKENLNPNSDAPVIRSKTSARYMELVGWLVDRGITSEKQWIQEDQASYISFNAASNSRSQIKAALDNAGKIMALTKSAPDYLVGPSLPVDITQNRIYRILQLNGYDPAYAGSVFLGWAQKKFGKRNTIWLFGPATTGKTNIAEAIAHAVPFYGCVNWTNENFPFNDCVDKMVIWWEEGKMTAKVVESAKAILGGSKVRVDQKCKSSAQIDPTPVIVTSNTNMCAVIDGNSTTFEHQQPLQDRMFKFELTRRLEHDFGKVTKQEVKEFFRWASDHVTEVAHEFYVRKGGASKRPAPDDADKSEPKRACPSVADPSTSDAEGAPVDFADRYQNKCSRHAGMLQMLLPCKTCERMNQNFNICFTHGVRDCSECFPGVSESQPVVRKRTYRKLCAIHHLLGRAPEIACSACDLVNVDLDDCVSEQ

SEQ ID NO: 5176 - DNA, 1797 bp, Artificial Sequence
  Description of Artificial Sequence: Synthetic polynucleotide
acggctccgaccggagacaagcggaaaggcgaagacgaacctcgtttgcccgacacttcttcacagactcccaagaaaaacaagaagcctcgcaaggaaagaccttccggcggggcagaagatccgggcgaaggcacctcttccaacgctggagcagcagcacccgcctctagtgtgggatcatctatcatggctgaaggaggtggcggcccagtgggcgatgcaggccagggtgccgatggagtgggcaattcctccggaaattggcattgcgattcccaatggctggaaaacggagtcgtcactcgaaccacccgaacctgggtcttgcccagctacaacaaccacctgtacaaacgaatccaaggacccagcggaggcgacaacaacaacaaattctttggattcagcaccccctggggatactttgactacaatcgattccactgccacttttccccgcgagactggcaacgactcatcaacaacaactggggcatccgtcccaaagcgatgcgctttagactctttaacatccaggttaaagaggtcacggtccaagacttcaacaccaccatcggcaacaacctcaccagtacggtccaggtctttgcggacaaggactaccaactgccgtacgtcctcggatcggctaccgaaggcaccttcccgccgttcccagcggatatctacacgatcccgcagtacgggtactgcacgctaaactacaacaacgaggcggtggatcgttcggccttctactgtctggactactttccctcagacatgctgcggacaggaaataactttgagtttacttacaccttcgaggacgttcctttccatagcatgtttgcccacaaccagacgctagaccggctgatgaatcccctcgtggatcagtacctctgggctttcagctccgtcagccaagcaggctcatctggacgagctcttcattactcgcgggcgactaaaaccaacatggcggctcaatataggaactggttacctgggcctttcttccgtgatcagcaaatctttacgggcgctagcaacatcactaaaaataacgtctttagcgtttgggaaaaaggcaagcaatgggaactcgacaatcggaccaacctaatgcagcccggtcctgcggcagcgaccacctttagcggagaacctgaccgtcaagccatgcaaaacacgctggcttttagcaggaccgtctacgatcaaacgaccgccacgaccgatcgtaaccagatactcatcaccaacgaagacgaaatcagacccaccaactcggtcggtatcgacgcgtggggagcagttcccaccaacaaccagtcgatcgtgacccccggcactcgcgcggccgtcaacaatcaaggggcgcttcccgggatggtgtggcaaaacagagacatttaccctacagggacccatttggccaaaattcccgacactgacaatcacttccatccgtccccgcttattgggcggtttggctgcaagcatccccctccccagattttcattaaaaacacacccgtccctgccaacccttcggaaacgttccagacggccaaagtggcctccttcatcaaccagtactcgaccggacagtgcaccgtcgaaatcttttgggaactcaagaaggaaacctccaagcgctggaaccccgaaatccagttcacctccaactttggcaacgcggccgacatccagtttgccgtctccgacacgggatcctattccgaacctcgtcccatcggtacccgttaccttaccaaacctctgtaa

SEQ ID NO: 5177 - DNA, 1989 bp, Artificial Sequence
  Description of Artificial Sequence: Synthetic polynucleotide
atgaggtcgtactacgaggtcatcgttcagctgcccaacgacgtcgagagtcaggtacctggaatctccgattcgttcgtcaactggattacgtcgcgagaatggacgttgcctgaggacgccgattgggatttggaccaggtcgatcaagttcaactgacgctcggcgacaaaatccaacgggagattcgaactcattgggggacgatggccaaagaaccggactttcactattttatccaactggaacaaggtgaggtgttctttcatttacacgtcctgctggaaacgtgttccgtaaagccgatggtactcggaagatatatccgacatattcaacaaaaaattgtgagtaaagtctactgcgccacgagcctacgatggaaggatggatgcgtggtgaccaagaccaaaaatttcgggggcgcgaacaaggtccgggccgagtcgtatattcccgcctacctgatcccgaaacagcaaccggaagtgcagtgggcgtggactaacgtgcccgagtatataaaagcgtgcttgcaccgagaactgcgtgccagtctcgcgcgacttcacttcgaggaggcgggcgtctcgcaatccaaggaaaatctcgcgagaactgcagacggcgctcccgtgatgccgacccgcgtcagcaaacgctacatggagctcgtggattggctcgtggagaaggggatcaccaccgagaaggaatggctgctggaaaacagagaaagctttcggagctttcaggcctcgagcaactcggcgcgtcagatcaagacggccctgcaaggcgccattcaggagatgcttctgaccaagacggcggaggactacctcgtcggaaaggatcccgtctcggacgacgacatccgtcagaaccgcatctacaagattctggaactgaaccactacgacccagcgtacgtggggagtattttggtcgggtggtgccagaagaaatggggcaagcgaaacacgctgtggctgttcggacatgcgaccaccggcaagaccaacatcgcggaggctattgcccatgctgtgccgttctatggatgcgttaactggaccaacgagaactttccgttcaacgactgcgtcgaaaaaatgattatctggtgggaggagggcaaaatgaccgccaaagtggtggaaacagccaaggcgattctgggaggatctcgggtgagagtggaccaaaaatgcaaagcttcggttccgatcgaaccgacgccggtcattattaccagtaacaccaacatgtgttatgtcatcgacgggaacacgaccacgttcgagcataagcagccgttggaggacaggatgtttaagctcgaattgctgactcggttgcctgatgactttggtaaggtgaccaaacaggaggtgcgtcaattcttcaggtggtctcaggatcacctgacccctgtgatcccagaattcctagtgcggaaggcggagtctcgcaaaagacccgccccttccggggaaggctatataagcccgacaaagcggcccgcgctcgcagagcagcagcaggcgtcggagagcgcggacccggttcccaccaggtatcgtatcaaatgctcgaaacattgcggtatggataaaatgttgtttccttgccaaatttgtgaatcgatgaacagagatattaatatttgtgctattcataaaacgaccgactgtaaagagtgtttccccgactacggggataaagatgatgtagaactacccccctgtacagaacacaacgtgtctcgttgttatcaatgtcattcgggcgaattgtatcgcgtgacttcggactctgacgagaaacctgcccccgagagtgatgaaggcaccgagccatcctatgctccctgcacgattcaccacctgatgggcaagagtcacgggttagtcacttgcgcggcgtgtcggttgaaaaatagtacgttgcatgatgacttggatgacggtgatctcgaacaataa

SEQ ID NO: 5178 - DNA, 1626 bp, Artificial Sequence
  Description of Artificial Sequence: Synthetic polynucleotide
atgaggtcgtactacgaggtcatcgttcagctgcccaacgacgtcgagagtcaggtacctggaatctccgattcgttcgtcaactggattacgtcgcgagaatggacgttgcctgaggacgccgattgggatttggaccaggtcgatcaagttcaactgacgctcggcgacaaaatccaacgggagattcgaactcattgggggacgatggccaaagaaccggactttcactattttatccaactggaacaaggtgaggtgttctttcatttacacgtcctgctggaaacgtgttccgtaaagccgatggtactcggaagatatatccgacatattcaacaaaaaattgtgagtaaagtctactgcgccacgagcctacgatggaaggatggatgcgtggtgaccaagaccaaaaatttcgggggcgcgaacaaggtccgggccgagtcgtatattcccgcctacctgatcccgaaacagcaaccggaagtgcagtgggcgtggactaacgtgcccgagtatataaaagcgtgcttgcaccgagaactgcgtgccagtctcgcgcgacttcacttcgaggaggcgggcgtctcgcaatccaaggaaaatctcgcgagaactgcagacggcgctcccgtgatgccgacccgcgtcagcaaacgctacatggagctcgtggattggctcgtggagaaggggatcaccaccgagaaggaatggctgctggaaaacagagaaagctttcggagctttcaggcctcgagcaactcggcgcgtcagatcaagacggccctgcaaggcgccattcaggagatgcttctgaccaagacggcggaggactacctcgtcggaaaggatcccgtctcggacgacgacatccgtcagaaccgcatctacaagattctggaactgaaccactacgacccagcgtacgtggggagtattttggtcgggtggtgccagaagaaatggggcaagcgaaacacgctgtggctgttcggacatgcgaccaccggcaagaccaacatcgcggaggctattgcccatgctgtgccgttctatggatgcgttaactggaccaacgagaactttccgttcaacgactgcgtcgaaaaaatgattatctggtgggaggagggcaaaatgaccgccaaagtggtggaaacagccaaggcgattctgggaggatctcgggtgagagtggaccaaaaatgcaaagcttcggttccgatcgaaccgacgccggtcattattaccagtaacaccaacatgtgttatgtcatcgacgggaacacgaccacgttcgagcataagcagccgttggaggacaggatgtttaagctcgaattgctgactcggttgcctgatgactttggtaaggtgaccaaacaggaggtgcgtcaattcttcaggtggtctcaggatcacctgacccctgtgatcccagaattcctagtgcggaaggcggagtctcgcaaaagacccgccccttccggggaaggctatataagcccgacaaagcggcccgcgctcgcagagcagcagcaggcgtcggagagcgcggacccggttcccaccagattggttggagcggttggtcaaaaagggagtgaatgctgcagctga

SEQ ID NO: 5179 - DNA, 1323 bp, Artificial Sequence
  Description of Artificial Sequence: Synthetic polynucleotide
atggagctcgtggattggctcgtggagaaggggatcaccaccgagaaggaatggctgctggaaaacagagaaagctttcggagctttcaggcctcgagcaactcggcgcgtcagatcaagacggccctgcaaggcgccattcaggagatgcttctgaccaagacggcggaggactacctcgtcggaaaggatcccgtctcggacgacgacatccgtcagaaccgcatctacaagattctggaactgaaccactacgacccagcgtacgtggggagtattttggtcgggtggtgccagaagaaatggggcaagcgaaacacgctgtggctgttcggacatgcgaccaccggcaagaccaacatcgcggaggctattgcccatgctgtgccgttctatggatgcgttaactggaccaacgagaactttccgttcaacgactgcgtcgaaaaaatgattatctggtgggaggagggcaaaatgaccgccaaagtggtggaaacagccaaggcgattctgggaggatctcgggtgagagtggaccaaaaatgcaaagcttcggttccgatcgaaccgacgccggtcattattaccagtaacaccaacatgtgttatgtcatcgacgggaacacgaccacgttcgagcataagcagccgttggaggacaggatgtttaagctcgaattgctgactcggttgcctgatgactttggtaaggtgaccaaacaggaggtgcgtcaattcttcaggtggtctcaggatcacctgacccctgtgatcccagaattcctagtgcggaaggcggagtctcgcaaaagacccgccccttccggggaaggctatataagcccgacaaagcggcccgcgctcgcagagcagcagcaggcgtcggagagcgcggacccggttcccaccaggtatcgtatcaaatgctcgaaacattgcggtatggataaaatgttgtttccttgccaaatttgtgaatcgatgaacagagatattaatatttgtgctattcataaaacgaccgactgtaaagagtgtttccccgactacggggataaagatgatgtagaactacccccctgtacagaacacaacgtgtctcgttgttatcaatgtcattcgggcgaattgtatcgcgtgacttcggactctgacgagaaacctgcccccgagagtgatgaaggcaccgagccatcctatgctccctgcacgattcaccacctgatgggcaagagtcacgggttagtcacttgcgcggcgtgtcggttgaaaaatagtacgttgcatgatgacttggatgacggtgatctcgaacaataa

SEQ ID NO: 5180 - DNA, 960 bp, Artificial Sequence
  Description of Artificial Sequence: Synthetic polynucleotide
atggagctcgtggattggctcgtggagaaggggatcaccaccgagaaggaatggctgctggaaaacagagaaagctttcggagctttcaggcctcgagcaactcggcgcgtcagatcaagacggccctgcaaggcgccattcaggagatgcttctgaccaagacggcggaggactacctcgtcggaaaggatcccgtctcggacgacgacatccgtcagaaccgcatctacaagattctggaactgaaccactacgacccagcgtacgtggggagtattttggtcgggtggtgccagaagaaatggggcaagcgaaacacgctgtggctgttcggacatgcgaccaccggcaagaccaacatcgcggaggctattgcccatgctgtgccgttctatggatgcgttaactggaccaacgagaactttccgttcaacgactgcgtcgaaaaaatgattatctggtgggaggagggcaaaatgaccgccaaagtggtggaaacagccaaggcgattctgggaggatctcgggtgagagtggaccaaaaatgcaaagcttcggttccgatcgaaccgacgccggtcattattaccagtaacaccaacatgtgttatgtcatcgacgggaacacgaccacgttcgagcataagcagccgttggaggacaggatgtttaagctcgaattgctgactcggttgcctgatgactttggtaaggtgaccaaacaggaggtgcgtcaattcttcaggtggtctcaggatcacctgacccctgtgatcccagaattcctagtgcggaaggcggagtctcgcaaaagacccgccccttccggggaaggctatataagcccgacaaagcggcccgcgctcgcagagcagcagcaggcgtcggagagcgcggacccggttcccaccagattggttggagcggttggtcaaaaagggagtgaatgctgcagctga

SEQ ID NO: 5181 - DNA, 1608 bp, Artificial Sequence
  Description of Artificial Sequence: Synthetic polynucleotide
atggctgaaggaggtggcggcccagtgggcgatgcaggccagggtgccgatggagtgggcaattcctccggaaattggcattgcgattcccaatggctggaaaacggagtcgtcactcgaaccacccgaacctgggtcttgcccagctacaacaaccacctgtacaaacgaatccaaggacccagcggaggcgacaacaacaacaaattctttggattcagcaccccctggggatactttgactacaatcgattccactgccacttttccccgcgagactggcaacgactcatcaacaacaactggggcatccgtcccaaagcgatgcgctttagactctttaacatccaggttaaagaggtcacggtccaagacttcaacaccaccatcggcaacaacctcaccagtacggtccaggtctttgcggacaaggactaccaactgccgtacgtcctcggatcggctaccgaaggcaccttcccgccgttcccagcggatatctacacgatcccgcagtacgggtactgcacgctaaactacaacaacgaggcggtggatcgttcggccttctactgtctggactactttccctcagacatgctgcggacaggaaataactttgagtttacttacaccttcgaggacgttcctttccatagcatgtttgcccacaaccagacgctagaccggctgatgaatcccctcgtggatcagtacctctgggctttcagctccgtcagccaagcaggctcatctggacgagctcttcattactcgcgggcgactaaaaccaacatggcggctcaatataggaactggttacctgggcctttcttccgtgatcagcaaatctttacgggcgctagcaacatcactaaaaataacgtctttagcgtttgggaaaaaggcaagcaatgggaactcgacaatcggaccaacctaatgcagcccggtcctgcggcagcgaccacctttagcggagaacctgaccgtcaagccatgcaaaacacgctggcttttagcaggaccgtctacgatcaaacgaccgccacgaccgatcgtaaccagatactcatcaccaacgaagacgaaatcagacccaccaactcggtcggtatcgacgcgtggggagcagttcccaccaacaaccagtcgatcgtgacccccggcactcgcgcggccgtcaacaatcaaggggcgcttcccgggatggtgtggcaaaacagagacatttaccctacagggacccatttggccaaaattcccgacactgacaatcacttccatccgtccccgcttattgggcggtttggctgcaagcatccccctccccagattttcattaaaaacacacccgtccctgccaacccttcggaaacgttccagacggccaaagtggcctccttcatcaaccagtactcgaccggacagtgcaccgtcgaaatcttttgggaactcaagaaggaaacctccaagcgctggaaccccgaaatccagttcacctccaactttggcaacgcggccgacatccagtttgccgtctccgacacgggatcctattccgaacctcgtcccatcggtacccgttaccttaccaaacctctgtaa

SEQ ID NO: 5182 - DNA, 2232 bp, Artificial Sequence
  Description of Artificial Sequence: Synthetic polynucleotide
atgtctctcatttctgatgcgattccagattggttggagcggttggtcaaaaagggagtgaatgctgcagctgatttctaccatttggaaagcggtcctcctcgtcctaaggcaaatcagcaaactcaagaatctcttgaaaaggacgattcgagaggtctcgtgttcccaggctacaattatctaggccctttcaacggtctagataaaggagaacccgtcaacgaggcagacgctgccgccttagaacacgacaaggcttacgacctcgaaatcaaggacgggcacaacccgtactttgagtacaacgaggccgacagacgtttccaggaacgtctcaaagacgatacctcctttggaggcaatttaggtaaagccatcttccaggccaaaaagagggttctcgaaccctttggtctggtggaagactcaaagacggctccgaccggagacaagcggaaaggcgaagacgaacctcgtttgcccgacacttcttcacagactcccaagaaaaacaagaagcctcgcaaggaaagaccttccggcggggcagaagatccgggcgaaggcacctcttccaacgctggagcagcagcacccgcctctagtgtgggatcatctatcatggctgaaggaggtggcggcccagtgggcgatgcaggccagggtgccgatggagtgggcaattcctccggaaattggcattgcgattcccaatggctggaaaacggagtcgtcactcgaaccacccgaacctgggtcttgcccagctacaacaaccacctgtacaaacgaatccaaggacccagcggaggcgacaacaacaacaaattctttggattcagcaccccctggggatactttgactacaatcgattccactgccacttttccccgcgagactggcaacgactcatcaacaacaactggggcatccgtcccaaagcgatgcgctttagactctttaacatccaggttaaagaggtcacggtccaagacttcaacaccaccatcggcaacaacctcaccagtacggtccaggtctttgcggacaaggactaccaactgccgtacgtcctcggatcggctaccgaaggcaccttcccgccgttcccagcggatatctacacgatcccgcagtacgggtactgcacgctaaactacaacaacgaggcggtggatcgttcggccttctactgtctggactactttccctcagacatgctgcggacaggaaataactttgagtttacttacaccttcgaggacgttcctttccatagcatgtttgcccacaaccagacgctagaccggctgatgaatcccctcgtggatcagtacctctgggctttcagctccgtcagccaagcaggctcatctggacgagctcttcattactcgcgggcgactaaaaccaacatggcggctcaatataggaactggttacctgggcctttcttccgtgatcagcaaatctttacgggcgctagcaacatcactaaaaataacgtctttagcgtttgggaaaaaggcaagcaatgggaactcgacaatcggaccaacctaatgcagcccggtcctgcggcagcgaccacctttagcggagaacctgaccgtcaagccatgcaaaacacgctggcttttagcaggaccgtctacgatcaaacgaccgccacgaccgatcgtaaccagatactcatcaccaacgaagacgaaatcagacccaccaactcggtcggtatcgacgcgtggggagcagttcccaccaacaaccagtcgatcgtgacccccggcactcgcgcggccgtcaacaatcaaggggcgcttcccgggatggtgtggcaaaacagagacatttaccctacagggacccatttggccaaaattcccgacactgacaatcacttccatccgtccccgcttattgggcggtttggctgcaagcatccccctccccagattttcattaaaaacacacccgtccctgccaacccttcggaaacgttccagacggccaaagtggcctccttcatcaaccagtactcgaccggacagtgcaccgtcgaaatcttttgggaactcaagaaggaaacctccaagcgctggaaccccgaaatccagttcacctccaactttggcaacgcggccgacatccagtttgccgtctccgacacgggatcctattccgaacctcgtcccatcggtacccgttaccttaccaaacctctgtaa

SEQ ID NO: 5183 - protein, 535 aa, Artificial Sequence
  Description of Artificial Sequence: Synthetic polypeptide
MAEGGGGPVGDAGQGADGVGNSSGNWHCDSQWLENGVVTRTTRTWVLPSYNNHLYKRIQGPSGGDNNNKFFGFSTPWGYFDYNRFHCHFSPRDWQRLINNNWGIRPKAMRFRLFNIQVKEVTVQDFNTTIGNNLTSTVQVFADKDYQLPYVLGSATEGTFPPFPADIYTIPQYGYCTLNYNNEAVDRSAFYCLDYFPSDMLRTGNNFEFTYTFEDVPFHSMFAHNQTLDRLMNPLVDQYLWAFSSVSQAGSSGRALHYSRATKTNMAAQYRNWLPGPFFRDQQIFTGASNITKNNVFSVWEKGKQWELDNRTNLMQPGPAAATTFSGEPDRQAMQNTLAFSRTVYDQTTATTDRNQILITNEDEIRPTNSVGIDAWGAVPTNNQSIVTPGTRAAVNNQGALPGMVWQNRDIYPTGTHLAKIPDTDNHFHPSPLIGRFGCKHPPPQIFIKNTPVPANPSETFQTAKVASFINQYSTGQCTVEIFWELKKETSKRWNPEIQFTSNFGNAADIQFAVSDTGSYSEPRPIGTRYLTKPL

SEQ ID NO: 5184 - protein, 440 aa, Artificial Sequence
  Description of Artificial Sequence: Synthetic polypeptide
MELVDWLVEKGITTEKEWLLENRESFRSFQASSNSARQIKTALQGAIQEMLLTKTAEDYLVGKDPVSDDDIRQNRIYKILELNHYDPAYVGSILVGWCQKKWGKRNTLWLFGHATTGKTNIAEAIAHAVPFYGCVNWTNENFPFNDCVEKMIIWWEEGKMTAKVVETAKAILGGSRVRVDQKCKASVPIEPTPVIITSNTNMCYVIDGNTTTFEHKQPLEDRMFKLELLTRLPDDFGKVTKQEVRQFFRWSQDHLTPVIPEFLVRKAESRKRPAPSGEGYISPTKRPALAEQQQASESADPVPTRYRIKCSKHCGMDKMLFPCQICESMNRDINICAIHKTTDCKECFPDYGDKDDVELPPCTEHNVSRCYQCHSGELYRVTSDSDEKPAPESDEGTEPSYAPCTIHHLMGKSHGLVTCAACRLKNSTLHDDLDDGDLEQ

SEQ ID NO: 5185 - protein, 319 aa, Artificial Sequence
  Description of Artificial Sequence: Synthetic polypeptide
MELVDWLVEKGITTEKEWLLENRESFRSFQASSNSARQIKTALQGAIQEMLLTKTAEDYLVGKDPVSDDDIRQNRIYKILELNHYDPAYVGSILVGWCQKKWGKRNTLWLFGHATTGKTNIAEAIAHAVPFYGCVNWTNENFPFNDCVEKMIIWWEEGKMTAKVVETAKAILGGSRVRVDQKCKASVPIEPTPVIITSNTNMCYVIDGNTTTFEHKQPLEDRMFKLELLTRLPDDFGKVTKQEVRQFFRWSQDHLTPVIPEFLVRKAESRKRPAPSGEGYISPTKRPALAEQQQASESADPVPTRLVGAVGQKGSECCS

SEQ ID NO: 5186 - protein, 662 aa, Artificial Sequence
  Description of Artificial Sequence: Synthetic polypeptide
MRSYYEVIVQLPNDVESQVPGISDSFVNWITSREWTLPEDADWDLDQVDQVQLTLGDKIQREIRTHWGTMAKEPDFHYFIQLEQGEVFFHLHVLLETCSVKPMVLGRYIRHIQQKIVSKVYCATSLRWKDGCVVTKTKNFGGANKVRAESYIPAYLIPKQQPEVQWAWTNVPEYIKACLHRELRASLARLHFEEAGVSQSKENLARTADGAPVMPTRVSKRYMELVDWLVEKGITTEKEWLLENRESFRSFQASSNSARQIKTALQGAIQEMLLTKTAEDYLVGKDPVSDDDIRQNRIYKILELNHYDPAYVGSILVGWCQKKWGKRNTLWLFGHATTGKTNIAEAIAHAVPFYGCVNWTNENFPFNDCVEKMIIWWEEGKMTAKVVETAKAILGGSRVRVDQKCKASVPIEPTPVIITSNTNMCYVIDGNTTTFEHKQPLEDRMFKLELLTRLPDDFGKVTKQEVRQFFRWSQDHLTPVIPEFLVRKAESRKRPAPSGEGYISPTKRPALAEQQQASESADPVPTRYRIKCSKHCGMDKMLFPCQICESMNRDINICAIHKTTDCKECFPDYGDKDDVELPPCTEHNVSRCYQCHSGELYRVTSDSDEKPAPESDEGTEPSYAPCTIHHLMGKSHGLVTCAACRLKNSTLHDDLDDGDLEQ

SEQ ID NO: 5187 - protein, 541 aa, Artificial Sequence
  Description of Artificial Sequence: Synthetic polypeptide
MRSYYEVIVQLPNDVESQVPGISDSFVNWITSREWTLPEDADWDLDQVDQVQLTLGDKIQREIRTHWGTMAKEPDFHYFIQLEQGEVFFHLHVLLETCSVKPMVLGRYIRHIQQKIVSKVYCATSLRWKDGCVVTKTKNFGGANKVRAESYIPAYLIPKQQPEVQWAWTNVPEYIKACLHRELRASLARLHFEEAGVSQSKENLARTADGAPVMPTRVSKRYMELVDWLVEKGITTEKEWLLENRESFRSFQASSNSARQIKTALQGAIQEMLLTKTAEDYLVGKDPVSDDDIRQNRIYKILELNHYDPAYVGSILVGWCQKKWGKRNTLWLFGHATTGKTNIAEAIAHAVPFYGCVNWTNENFPFNDCVEKMIIWWEEGKMTAKVVETAKAILGGSRVRVDQKCKASVPIEPTPVIITSNTNMCYVIDGNTTTFEHKQPLEDRMFKLELLTRLPDDFGKVTKQEVRQFFRWSQDHLTPVIPEFLVRKAESRKRPAPSGEGYISPTKRPALAEQQQASESADPVPTRLVGAVGQKGSECCS

SEQ ID NO: 5188 - protein, 743 aa, Artificial Sequence
  Description of Artificial Sequence: Synthetic polypeptide
MSLISDAIPDWLERLVKKGVNAAADFYHLESGPPRPKANQQTQESLEKDDSRGLVFPGYNYLGPFNGLDKGEPVNEADAAALEHDKAYDLEIKDGHNPYFEYNEADRRFQERLKDDTSFGGNLGKAIFQAKKRVLEPFGLVEDSKTAPTGDKRKGEDEPRLPDTSSQTPKKNKKPRKERPSGGAEDPGEGTSSNAGAAAPASSVGSSIMAEGGGGPVGDAGQGADGVGNSSGNWHCDSQWLENGVVTRTTRTWVLPSYNNHLYKRIQGPSGGDNNNKFFGFSTPWGYFDYNRFHCHFSPRDWQRLINNNWGIRPKAMRFRLFNIQVKEVTVQDFNTTIGNNLTSTVQVFADKDYQLPYVLGSATEGTFPPFPADIYTIPQYGYCTLNYNNEAVDRSAFYCLDYFPSDMLRTGNNFEFTYTFEDVPFHSMFAHNQTLDRLMNPLVDQYLWAFSSVSQAGSSGRALHYSRATKTNMAAQYRNWLPGPFFRDQQIFTGASNITKNNVFSVWEKGKQWELDNRTNLMQPGPAAATTFSGEPDRQAMQNTLAFSRTVYDQTTATTDRNQILITNEDEIRPTNSVGIDAWGAVPTNNQSIVTPGTRAAVNNQGALPGMVWQNRDIYPTGTHLAKIPDTDNHFHPSPLIGRFGCKHPPPQIFIKNTPVPANPSETFQTAKVASFINQYSTGQCTVEIFWELKKETSKRWNPEIQFTSNFGNAADIQFAVSDTGSYSEPRPIGTRYLTKPL

SEQ ID NO: 5189 - protein, 598 aa, Artificial Sequence
  Description of Artificial Sequence: Synthetic polypeptide
TAPTGDKRKGEDEPRLPDTSSQTPKKNKKPRKERPSGGAEDPGEGTSSNAGAAAPASSVGSSIMAEGGGGPVGDAGQGADGVGNSSGNWHCDSQWLENGVVTRTTRTWVLPSYNNHLYKRIQGPSGGDNNNKFFGFSTPWGYFDYNRFHCHFSPRDWQRLINNNWGIRPKAMRFRLFNIQVKEVTVQDFNTTIGNNLTSTVQVFADKDYQLPYVLGSATEGTFPPFPADIYTIPQYGYCTLNYNNEAVDRSAFYCLDYFPSDMLRTGNNFEFTYTFEDVPFHSMFAHNQTLDRLMNPLVDQYLWAFSSVSQAGSSGRALHYSRATKTNMAAQYRNWLPGPFFRDQQIFTGASNITKNNVFSVWEKGKQWELDNRTNLMQPGPAAATTFSGEPDRQAMQNTLAFSRTVYDQTTATTDRNQILITNEDEIRPTNSVGIDAWGAVPTNNQSIVTPGTRAAVNNQGALPGMVWQNRDIYPTGTHLAKIPDTDNHFHPSPLIGRFGCKHPPPQIFIKNTPVPANPSETFQTAKVASFINQYSTGQCTVEIFWELKKETSKRWNPEIQFTSNFGNAADIQFAVSDTGSYSEPRPIGTRYLTKPL

SEQ ID NO: 5190 - DNA, 4694 bp, Artificial Sequence
  Description of Artificial Sequence: Synthetic polynucleotide
tggccagtttccaagacaggctcgctcgctcactcgggccggggccccaaaggggcccctagcgaccgcttcgcggtcgcggcccgagtgagcgagcgagcctgtcttggaaactggccagcactccggtgaggtaatgccgtcacgtggtcgggaatgggaacgggaaatctcgcgagaacgtaaacaaatataagacggcgccacacggcgctgcgtcatacgcgcgcgcgcaccggcgagatgaggtcgtactacgaggtcatcgttcagctgcccaacgacgtcgagagtcaggtacctggaatctccgattcgttcgtcaactggattacgtcgcgagaatggacgttgcctgaggacgccgattgggatttggaccaggtcgatcaagttcaactgacgctcggcgacaaaatccaacgggagattcgaactcattgggggacgatggccaaagaaccggactttcactattttatccaactggaacaaggtgaggtgttctttcatttacacgtcctgctggaaacgtgttccgtaaagccgatggtactcggaagatatatccgacatattcaacaaaaaattgtgagtaaagtctactgcgccacgagcctacgatggaaggatggatgcgtggtgaccaagaccaaaaatttcgggggcgcgaacaaggtccgggccgagtcgtatattcccgcctacctgatcccgaaacagcaaccggaagtgcagtgggcgtggactaacgtgcccgagtatataaaagcgtgcttgcaccgagaactgcgtgccagtctcgcgcgacttcacttcgaggaggcgggcgtctcgcaatccaaggaaaatctcgcgagaactgcagacggcgctcccgtgatgccgacccgcgtcagcaaacgctacatggagctcgtggattggctcgtggagaaggggatcaccaccgagaaggaatggctgctggaaaacagagaaagctttcggagctttcaggcctcgagcaactcggcgcgtcagatcaagacggccctgcaaggcgccattcaggagatgcttctgaccaagacggcggaggactacctcgtcggaaaggatcccgtctcggacgacgacatccgtcagaaccgcatctacaagattctggaactgaaccactacgacccagcgtacgtggggagtattttggtcgggtggtgccagaagaaatggggcaagcgaaacacgctgtggctgttcggacatgcgaccaccggcaagaccaacatcgcggaggctattgcccatgctgtgccgttctatggatgcgttaactggaccaacgagaactttccgttcaacgactgcgtcgaaaaaatgattatctggtgggaggagggcaaaatgaccgccaaagtggtggaaacagccaaggcgattctgggaggatctcgggtgagagtggaccaaaaatgcaaagcttcggttccgatcgaaccgacgccggtcattattaccagtaacaccaacatgtgttatgtcatcgacgggaacacgaccacgttcgagcataagcagccgttggaggacaggatgtttaagctcgaattgctgactcggttgcctgatgactttggtaaggtgaccaaacaggaggtgcgtcaattcttcaggtggtctcaggatcacctgacccctgtgatcccagaattcctagtgcggaaggcggagtctcgcaaaagacccgccccttccggggaaggctatataagcccgacaaagcggcccgcgctcgcagagcagcagcaggcgtcggagagcgcggacccggttcccaccaggtatcgtatcaaatgctcgaaacattgcggtatggataaaatgttgtttccttgccaaatttgtgaatcgatgaacagagatattaatatttgtgctattcataaaacgaccgactgtaaagagtgtttccccgactacggggataaagatgatgtagaactacccccctgtacagaacacaacgtgtctcgttgttatcaatgtcattcgggcgaattgtatcgcgtgacttcggactctgacgagaaacctgcccccgagagtgatgaaggcaccgagccatcctatgctccctgcacgattcaccacctgatgggcaagagtcacgggttagtcacttgcgcggcgtgtcggttgaaaaatagtacgttgcatgatgacttggatgacggtgatctcgaacaataaatgattgaaatgtagccatgtctctcatttctgatgcgattccagattggttggagcggttggtcaaaaagggagtgaatgctgcagctgatttctaccatttggaaagcggtcctcctcgtcctaaggcaaatcagcaaactcaagaatctcttgaaaaggacgattcgagaggtctcgtgttcccaggctacaattatctaggccctttcaacggtctagataaaggagaacccgtcaacgaggcagacgctgccgccttagaacacgacaaggcttacgacctcgaaatcaaggacgggcacaacccgtactttgagtacaacgaggccgacagacgtttccaggaacgtctcaaagacgatacctcctttggaggcaatttaggtaaagccatcttccaggccaaaaagagggttctcgaaccctttggtctggtggaagactcaaagacggctccgaccggagacaagcggaaaggcgaagacgaacctcgtttgcccgacacttcttcacagactcccaagaaaaacaagaagcctcgcaaggaaagaccttccggcggggcagaagatccgggcgaaggcacctcttccaacgctggagcagcagcacccgcctctagtgtgggatcatctatcatggctgaaggaggtggcggcccagtgggcgatgcaggccagggtgccgatggagtgggcaattcctccggaaattggcattgcgattcccaatggctggaaaacggagtcgtcactcgaaccacccgaacctgggtcttgcccagctacaacaaccacctgtacaaacgaatccaaggacccagcggaggcgacaacaacaacaaattctttggattcagcaccccctggggatactttgactacaatcgattccactgccacttttccccgcgagactggcaacgactcatcaacaacaactggggcatccgtcccaaagcgatgcgctttagactctttaacatccaggttaaagaggtcacggtccaagacttcaacaccaccatcggcaacaacctcaccagtacggtccaggtctttgcggacaaggactaccaactgccgtacgtcctcggatcggctaccgaaggcaccttcccgccgttcccagcggatatctacacgatcccgcagtacgggtactgcacgctaaactacaacaacgaggcggtggatcgttcggccttctactgtctggactactttccctcagacatgctgcggacaggaaataactttgagtttacttacaccttcgaggacgttcctttccatagcatgtttgcccacaaccagacgctagaccggctgatgaatcccctcgtggatcagtacctctgggctttcagctccgtcagccaagcaggctcatctggacgagctcttcattactcgcgggcgactaaaaccaacatggcggctcaatataggaactggttacctgggcctttcttccgtgatcagcaaatctttacgggcgctagcaacatcactaaaaataacgtctttagcgtttgggaaaaaggcaagcaatgggaactcgacaatcggaccaacctaatgcagcccggtcctgcggcagcgaccacctttagcggagaacctgaccgtcaagccatgcaaaacacgctggcttttagcaggaccgtctacgatcaaacgaccgccacgaccgatcgtaaccagatactcatcaccaacgaagacgaaatcagacccaccaactcggtcggtatcgacgcgtggggagcagttcccaccaacaaccagtcgatcgtgacccccggcactcgcgcggccgtcaacaatcaaggggcgcttcccgggatggtgtggcaaaacagagacatttaccctacagggacccatttggccaaaattcccgacactgacaatcacttccatccgtccccgcttattgggcggtttggctgcaagcatccccctccccagattttcattaaaaacacacccgtccctgccaacccttcggaaacgttccagacggccaaagtggcctccttcatcaaccagtactcgaccggacagtgcaccgtcgaaatcttttgggaactcaagaaggaaacctccaagcgctggaaccccgaaatccagttcacctccaactttggcaacgcggccgacatccagtttgccgtctccgacacgggatcctattccgaacctcgtcccatcggtacccgttaccttaccaaacctctgtaaattaaacccttcaataaaccgtttatgcgtaactgtatttccgtctcctgtcgttattcagtcacatgatgcggcattacctcaccggagtgctggccagtttccaagacaggctcgctcgctcactcgggccggggccccaaaggggcccctagcgaccgcttcgcggtcgcggcccgagtgagcgagcgagcctgtcttggaaactggcca

SEQ ID NO: 5191 - DNA, 2211 bp, Artificial Sequence
  Description of Artificial Sequence: Synthetic polynucleotide
atggctgctgatggttatcttccagattggctcgaggacactctctctgaaggaataagacagtggtggaagctcaaacctggcccaccaccaccaaagcccgcagagcggcataaggacgacagcaggggtcttgtgcttcctgggtacaagtacctcggacccttcaacggactcgacaagggagagccggtcaacgaggcagacgcagcggccctcgagcacgacaaggcctacgaccagcagctcaaggccggtgacaacccctacctcaagtacaaccacgccgacgcggagttccagcagcggcttcagggcgacacatcgtttgggggcaacctcggcagagcagtcttccaggccaaaaagagggttcttgaacctcttggtctggttgagcaagcgggtgagacggctcctggaaagaagagaccgttgattgaatccccccagcagcccgactcctccacgggtatcggcaaaaaaggcaagcagccggctaaaaagagactcaattttggtcagactggcgactcagagtcagtccccgacccacaacctctcggagaacctccagcaacccccgctgctgtgggacctactacaatggcttcaggtggtggcgcaccaatggcagacaataacgaaggcgccgacggagtgggtaatgcctcaggaaattggcattgcgattccacatggctgggcgacagagtcatcaccaccagcacccgcacctgggccttgcccacctacaataaccacctctacaagcaaatctccagtgcttcaacgggggccagcaacgacaaccactacttcggctacagcaccccctgggggtattttgacttcaacagattccactgccacttttcaccacgtgactggcagcgactcatcaacaacaattggggattccggcccaagagactcaacttcaaactcttcaacatccaagtcaaggaggtcacgacgaatgatggcgtcacaaccatcgctaataaccttaccagcacggttcaagtcttctcggactcagactatcagctcccgtacgtgctcgggtcggctcacgagggctgcctcccgccgttcccagcagacgtcttcatggtgccacagtatggatacctcaccctgaacaacgggagtcaggcagtaggacgctcttcattttactgcctggagtactttccttctcagatgctgcgtaccggaaacaactttaccttcagctacacttttgaggacgttcctttccacagcagctacgctcacagccagagtctggaccgtctcatgaatcctctcatcgaccagtacctgtattacctgaacagaactcagaatcagtccggaagtgcccaaaacaaggacttgctgtttagccgggggtctccagctggcatgtctgttcagcccaaaaactggctacctggaccctgttatcggcagcagcgcgtttctaaaacaaaaacagacaacaacaacagcaactttacctggactggtgcttcaaaatataaccttaatgggcgtgaatctataatcaaccctggcactgctatggcctcacacaaagacgacaaagacaagttctttcccatgagcggtgtcatgatttttggaaaggagagcgccggagcttcaaacactgcattggacaatgtcatgatcacagacgaagaggaaatcaaagccactaaccccgtggccaccgaaagatttgggactgtggcagtcaatctccagagcagcagcacagaccctgcgaccggagatgtgcatgttatgggagccttacctggaatggtgtggcaagacagagacgtatacctgcagggtcccatttgggccaaaattcctcacacagatggacactttcacccgtctcctcttatgggcggctttggactcaagaacccgcctcctcagatcctcatcaaaaacacgcctgttcctgcgaatcctccggcggagttttcagctacaaagtttgcttcattcatcacccaatactccacaggacaagtgagtgtggaaattgaatgggagctgcagaaagaaaacagcaagcgctggaatcccgaagtgcagtacacatccaattatgcaaaatctgccaacgttgattttactgtggacaacaatggactttatactgagcctcgccccattggcacccgttacctcacccgtcccctgtaa

SEQ ID NO: 5192 - protein, 736 aa, Artificial Sequence
  Description of Artificial Sequence: Synthetic polypeptide
MAADGYLPDWLEDTLSEGIRQWWKLKPGPPPPKPAERHKDDSRGLVLPGYKYLGPFNGLDKGEPVNEADAAALEHDKAYDQQLKAGDNPYLKYNHADAEFQQRLQGDTSFGGNLGRAVFQAKKRVLEPLGLVEQAGETAPGKKRPLIESPQQPDSSTGIGKKGKQPAKKRLNFGQTGDSESVPDPQPLGEPPATPAAVGPTTMASGGGAPMADNNEGADGVGNASGNWHCDSTWLGDRVITTSTRTWALPTYNNHLYKQISSASTGASNDNHYFGYSTPWGYFDFNRFHCHFSPRDWQRLINNNWGFRPKRLNFKLFNIQVKEVTTNDGVTTIANNLTSTVQVFSDSDYQLPYVLGSAHEGCLPPFPADVFMVPQYGYLTLNNGSQAVGRSSFYCLEYFPSQMLRTGNNFTFSYTFEDVPFHSSYAHSQSLDRLMNPLIDQYLYYLNRTQNQSGSAQNKDLLFSRGSPAGMSVQPKNWLPGPCYRQQRVSKTKTDNNNSNFTWTGASKYNLNGRESIINPGTAMASHKDDKDKFFPMSGVMIFGKESAGASNTALDNVMITDEEEIKATNPVATERFGTVAVNLQSSSTDPATGDVHVMGALPGMVWQDRDVYLQGPIWAKIPHTDGHFHPSPLMGGFGLKNPPPQILIKNTPVPANPPAEFSATKFASFITQYSTGQVSVEIEWELQKENSKRWNPEVQYTSNYAKSANVDFTVDNNGLYTEPRPIGTRYLTRPL

SEQ ID NO: 5193 - DNA, 2211 bp, Artificial Sequence
  Description of Artificial Sequence: Synthetic polynucleotide
atggcttccgatggttatcttccagattggctcgaggacaacctctctgagggcatccgcgagtggtgggacttgaaacctggagccccgaaacccaaagccaaccagcaaaagcaggacgacggccggggtctggtgcttcctggctacaagtacctcggacccttcaacggactcgacaagggggagcccgtcaacgcggcggatgcagcggccctcgagcacgacaaggcctacgaccagcagctcagagcgggtgacaatccgtacctgcggtataaccacgccgacgccgagtttcaggagcgtctgcaagaagatacgtcttttgggggcaacctcgggcgagcagtcttccaggccaagaagagggttctcgaaccttttggtctggttgaggaaggtgctaagacggctcctggaaagaaacgtccggtagagcagtcgccacaagagccagactcctcctcgggcattggcaagacaggccagcagcccgctaaaaagagactcaattttggtcagactggcgactcagagtcagtccccgacccacaacctctcggagaacctccagcaacccccgctgctgtgggacctactacaatggcttcaggcggtggcgcaccaatggcagacaataacgaaggcgccgacggagtgggtaatgcctcaggaaattggcattgcgattccacatggctgggcgacagagtcatcaccaccagcacccgaacatgggccttgcccacctataacaaccacctctacaagcaaatctccagtgcttcaacgggggccagcaacgacaaccactacttcggctacagcaccccctgggggtattttgatttcaacagattccactgccatttctcaccacgtgactggcagcgactcatcaacaacaattggggattccggcccaagagactcaacttcaaactcttcaacatccaagtcaaggaggtcacgacgaatgatggcgtcacaaccatcgctaataaccttaccagcacggttcaagtcttctcggactcggagtaccagcttccgtacgtcctcggctctgcgcaccagggctgcctccctccgttcccggcggacgtgttcatgattccgcagtacggctacctaacgctcaacaatggcagccaggcagtgggacggtcatccttttactgcctggaatatttcccatcgcagatgctgagaacgggcaataactttaccttcagctacaccttcgaggacgtgcctttccacagcagctacgcgcacagccagagcctggaccggctgatgaatcctctcatcgaccagtacctgtattacctgaacagaactcagaatcagtccggaagtgcccaaaacaaggacttgctgtttagccgggggtctccagctggcatgtctgttcagcccaaaaactggctacctggaccctgttaccggcagcagcgcgtttctaaaacaaaaacagacaacaacaacagcaactttacctggactggtgcttcaaaatataaccttaatgggcgtgaatctataatcaaccctggcactgctatggcctcacacaaagacgacaaagacaagttctttcccatgagcggtgtcatgatttttggaaaggagagcgccggagcttcaaacactgcattggacaatgtcatgatcacagacgaagaggaaatcaaagccactaaccccgtggccaccgaaagatttgggactgtggcagtcaatctccagagcagcagcacagaccctgcgaccggagatgtgcatgttatgggagccttacctggaatggtgtggcaagacagagacgtatacctgcagggtcccatttgggccaaaattcctcacacagatggacactttcacccgtctcctcttatgggcggctttggacttaagcacccgcctcctcagatcctcatcaaaaacacgcctgttcctgcgaatcctccggcagagttttcggctacaaagtttgcttcattcatcacccagtattctactggccaagtcagcgtggagattgaatgggagctgcagaaagaaaacagcaaacgctggaatcccgaagtgcagtatacatctaactatgcaaaatctgccaacgttgatttcactgtggacaacaatggactttatactgagcctcgtcccattggcacccgttacctcacccgtcccctgtaa

SEQ ID NO: 5194 - protein, 736 aa, Artificial Sequence
  Description of Artificial Sequence: Synthetic polypeptide
MASDGYLPDWLEDNLSEGIREWWDLKPGAPKPKANQQKQDDGRGLVLPGYKYLGPFNGLDKGEPVNAADAAALEHDKAYDQQLRAGDNPYLRYNHADAEFQERLQEDTSFGGNLGRAVFQAKKRVLEPFGLVEEGAKTAPGKKRPVEQSPQEPDSSSGIGKTGQQPAKKRLNFGQTGDSESVPDPQPLGEPPATPAAVGPTTMASGGGAPMADNNEGADGVGNASGNWHCDSTWLGDRVITTSTRTWALPTYNNHLYKQISSASTGASNDNHYFGYSTPWGYFDFNRFHCHFSPRDWQRLINNNWGFRPKRLNFKLFNIQVKEVTTNDGVTTIANNLTSTVQVFSDSEYQLPYVLGSAHQGCLPPFPADVFMIPQYGYLTLNNGSQAVGRSSFYCLEYFPSQMLRTGNNFTFSYTFEDVPFHSSYAHSQSLDRLMNPLIDQYLYYLNRTQNQSGSAQNKDLLFSRGSPAGMSVQPKNWLPGPCYRQQRVSKTKTDNNNSNFTWTGASKYNLNGRESIINPGTAMASHKDDKDKFFPMSGVMIFGKESAGASNTALDNVMITDEEEIKATNPVATERFGTVAVNLQSSSTDPATGDVHVMGALPGMVWQDRDVYLQGPIWAKIPHTDGHFHPSPLMGGFGLKHPPPQILIKNTPVPANPPAEFSATKFASFITQYSTGQVSVEIEWELQKENSKRWNPEVQYTSNYAKSANVDFTVDNNGLYTEPRPIGTRYLTRPL

SEQ ID NO: 5195 - DNA, 2211 bp, Artificial Sequence
  Description of Artificial Sequence: Synthetic polynucleotide
atggctgctgatggttatcttccagattggctcgaggacactctctctgaaggaataagacagtggtggaagctcaaacctggcccaccaccaccaaagcccgcagagcggcataaggacgacagcaggggtcttgtgcttcctgggtacaagtacctcggacccttcaacggactcgacaagggagagccggtcaacgaggcagacgcagcggccctcgagcacgacaaggcctacgaccagcagctcaaggccggtgacaacccctacctcaagtacaaccacgccgacgcggagttccagcagcggcttcagggcgacacatcgtttgggggcaacctcggcagagcagtcttccaggccaaaaagagggttcttgaacctcttggtctggttgagcaagcgggtgagacggctcctggaaagaagagaccgttgattgaatccccccagcagcccgactcctccacgggtatcggcaaaaaaggcaagcagccggctaaaaagagactcaattttggtcagactggcgactcagagtcagtccccgacccacaacctctcggagaacctccagcaacccccgctgctgtgggacctactacaatggcttcaggtggtggcgcaccaatggcagacaataacgaaggcgccgacggagtgggtaatgcctcaggaaattggcattgcgattccacatggctgggcgacagagtcatcaccaccagcacccgcacctgggccttgcccacctacaataaccacctctacaagcaaatctccagtgcttcaacgggggccagcaacgacaaccactacttcggctacagcaccccctgggggtattttgacttcaacagattccactgccacttttcaccacgtgactggcagcgactcatcaacaacaattggggattccggcccaagagactcaacttcaaactcttcaacatccaagtcaaggaggtcacgacgaatgatggcgtcacaaccatcgctaataaccttaccagcacggttcaagtcttctcggactcagactatcagctcccgtacgtgctcgggtcggctcacgagggctgcctcccgccgttcccagcagacgtcttcatggtgccacagtatggatacctcaccctgaacaacgggagtcaggcagtaggacgctcttcattttactgcctggagtactttccttctcagatgctgcgtaccggaaacaactttaccttcagctacacttttgaggacgttcctttccacagcagctacgctcacagccagagtctggaccgtctcatgaatcctctcatcgaccagtacctgtattacctgaacagaactcagaatcagtccggaagtgcccaaaacaaggacttgctgtttagccgggggtctccaactggcatgtctgttcagcccaaaaactggctacctggaccctgttatcggcagcagcgcgtttctaaaacaaaaacagacaacaacaacagcaactttacctggactggtgcttcaaaatataaccttaatgggcgtgaatctataatcaaccctggcactgctatggcctcacacaaagacgacaaagacaagttctttcccatgagcggtgtcatgatttttggaaaggagagcgccggagcttcaaacactgcattggacaatgtcatgatcacagacgaagaggaaatcaaagccactaaccccgtggccactgaaagatttgggactgtggcagtcaatctccagagcagcagcacagaccctgcgaccggagatgtgcatgccatgggagccttacctggaatggtgtggcaagacagagacgtatacctgcagggtcctatttgggccaaaattcctcacacggatggacactttcacccgtctcctctcatgggcggctttggactcaagaacccgcctcctcagatcctcatcaaaaacacgcctgttcctgcgaatcctccggcggagttttcagctacaaagtttgcttcattcatcacccagtattccacaggacaagtgagcgtggagattgaatgggagctgcagaaagaaaacagcaaacgctggaatcccgaagtgcagtatacatctaactatgcaaaatctgccaacgttgatttcactgtggacaacaatggactttatactgagcctcgccccattggcacccgttacctcacccgtcccctgtaa

SEQ ID NO: 5196 - protein, 736 aa, Artificial Sequence
  Description of Artificial Sequence: Synthetic polypeptide
MAADGYLPDWLEDTLSEGIRQWWKLKPGPPPPKPAERHKDDSRGLVLPGYKYLGPFNGLDKGEPVNEADAAALEHDKAYDQQLKAGDNPYLKYNHADAEFQQRLQGDTSFGGNLGRAVFQAKKRVLEPLGLVEQAGETAPGKKRPLIESPQQPDSSTGIGKKGKQPAKKRLNFGQTGDSESVPDPQPLGEPPATPAAVGPTTMASGGGAPMADNNEGADGVGNASGNWHCDSTWLGDRVITTSTRTWALPTYNNHLYKQISSASTGASNDNHYFGYSTPWGYFDFNRFHCHFSPRDWQRLINNNWGFRPKRLNFKLFNIQVKEVTTNDGVTTIANNLTSTVQVFSDSDYQLPYVLGSAHEGCLPPFPADVFMVPQYGYLTLNNGSQAVGRSSFYCLEYFPSQMLRTGNNFTFSYTFEDVPFHSSYAHSQSLDRLMNPLIDQYLYYLNRTQNQSGSAQNKDLLFSRGSPTGMSVQPKNWLPGPCYRQQRVSKTKTDNNNSNFTWTGASKYNLNGRESIINPGTAMASHKDDKDKFFPMSGVMIFGKESAGASNTALDNVMITDEEEIKATNPVATERFGTVAVNLQSSSTDPATGDVHAMGALPGMVWQDRDVYLQGPIWAKIPHTDGHFHPSPLMGGFGLKNPPPQILIKNTPVPANPPAEFSATKFASFITQYSTGQVSVEIEWELQKENSKRWNPEVQYTSNYAKSANVDFTVDNNGLYTEPRPIGTRYLTRPL

SEQ ID NO: 5197 - DNA, 2211 bp, Artificial Sequence
  Description of Artificial Sequence: Synthetic polynucleotide
atggctgccgatggttatcttccagattggctcgaggacaacctctctgagggcattcgcgagtggtgggcgctgaaacctggagccccgaagcccaaagccaaccagcaaaagcaggacgacggccggggtctggtgcttcctggctacaagtacctcggacccttcaacggactcgacaagggggagcccgtcaacgcggcggatgcagcggccctcgagcacgacaaggcctacgaccagcagctcaaagcgggtgacaatccgtacctgcggtataaccacgccgacgccgagtttcaggagcgtctgcaagaagatacgtcttttgggggcaacctcgggcgagcagtcttccaggccaagaagcgggttctcgaacctctcggtctggttgaggaaggcgctaagacggctcctggaaagaaacgtccggtagagcaatcgccacaagagccagactcctcctcgggcatcggcaagacaggccagcagcccgctaaaaagagactcaattttggtcagactggcgactcagagtcagtccccgacccacaacctctcggagaacctccagcaacccccgctgctgtgggacctactacaatggcttcaggcggtggcgcaccaatggcagacaataacgaaggcgccgacggagtgggtaatgcctcaggaaattggcattgcgattccacatggctgggcgacagagtcatcaccaccagcacccgaacatgggccttgcccacctataacaaccacctctacaagcaaatctccagtgcttcgacgggggccagcaacgacaaccactacttcggctacagcaccccctgggggtattttgactttaacagattccactgccacttttcaccacgtgactggcagcgactcatcaacaacaactggggattccggcccaagagactcagcttcaagctcttcaacatccaggtcaaggaggtcacgacgaatgatggcgtcacaaccatcgctaataaccttaccagcacggttcaagtcttctcggactcggagtaccagcttccgtacgtcctcggctctgcgcaccagggctgcctccctccgttcccggcggacgtgttcatgattccgcaatacggctacctgacgctcaacaatggcagccaagccgtgggacgttcatccttttactgcctggaatatttcccttctcagatgctgagaacgggcaacaactttaccttcagctacacctttgaggaagtgcctttccacagcagctacgcgcacagccagagcctggaccggctgatgaatcctctcatcgatcaatacctgtattacctgaacagaactcaaaatcagtccggaagtgcccaaaacaaggacttgctgtttagccgtgggtctccagctggcatgtctgttcagcccaaaaactggctacctggaccctgttatcggcagcagcgcgtttctaaaacaaaaacagacaacaacaacagcaattttacctggactggtgcttcaaaatataacctcaatgggcgtgaatccatcatcaaccctggcactgctatggcctcacataaagacgacgaagacaagttctttcccatgagcggtgtcatgatttttggaaaagagagcgccggagcttcaaacactgcattggacaatgtcatgattacagacgaagaggaaattaaagccactaaccctgtggccaccgaaagatttgggaccgtggcagtcaatttccagagcagcagcacagaccctgcgaccggagatgtgcatgctatgggagcattacctggcatggtgtggcaagatagagacgtgtacctgcagggtcccatttgggccaaaattcctcacacagatggacactttcacccgtctcctcttatgggcggctttggactcaagaacccgcctcctcagatcctcatcaaaaacacgcctgttcctgcgaatcctccggcggagttttcagctacaaagtttgcttcattcatcacccaatactccacaggacaagtgagcgtggagattgaatgggagctgcagaaagaaaacagcaaacgctggaatcccgaagtgcagtatacatctaactatgcaaaatctgccaacattgatttcactgtggacaacaatggactttatactgagcctcgccccattggcacccgttacctcacccgtccccagtaa

SEQ ID NO: 5198 - protein, 736 aa, Artificial Sequence
  Description of Artificial Sequence: Synthetic polypeptide
MAADGYLPDWLEDNLSEGIREWWALKPGAPKPKANQQKQDDGRGLVLPGYKYLGPFNGLDKGEPVNAADAAALEHDKAYDQQLKAGDNPYLRYNHADAEFQERLQEDTSFGGNLGRAVFQAKKRVLEPLGLVEEGAKTAPGKKRPVEQSPQEPDSSSGIGKTGQQPAKKRLNFGQTGDSESVPDPQPLGEPPATPAAVGPTTMASGGGAPMADNNEGADGVGNASGNWHCDSTWLGDRVITTSTRTWALPTYNNHLYKQISSASTGASNDNHYFGYSTPWGYFDFNRFHCHFSPRDWQRLINNNWGFRPKRLSFKLFNIQVKEVTTNDGVTTIANNLTSTVQVFSDSEYQLPYVLGSAHQGCLPPFPADVFMIPQYGYLTLNNGSQAVGRSSFYCLEYFPSQMLRTGNNFTFSYTFEEVPFHSSYAHSQSLDRLMNPLIDQYLYYLNRTQNQSGSAQNKDLLFSRGSPAGMSVQPKNWLPGPCYRQQRVSKTKTDNNNSNFTWTGASKYNLNGRESIINPGTAMASHKDDEDKFFPMSGVMIFGKESAGASNTALDNVMITDEEEIKATNPVATERFGTVAVNFQSSSTDPATGDVHAMGALPGMVWQDRDVYLQGPIWAKIPHTDGHFHPSPLMGGFGLKNPPPQILIKNTPVPANPPAEFSATKFASFITQYSTGQVSVEIEWELQKENSKRWNPEVQYTSNYAKSANIDFTVDNNGLYTEPRPIGTRYLTRPQ

SEQ ID NO: 5199 - DNA, 2211 bp, Artificial Sequence
  Description of Artificial Sequence: Synthetic polynucleotide
atggctgccgatggttatcttccagattggctcgaggacaacctctctgagggcattcgcgagtggtgggacttgaaacctggagccccgaaacccaaagccaaccagcaaaagcaggacgacggccggggtctggtgcttcctggctacaagtacctcggacccttcaacggactcgacaagggggagcccgtcaacgcggcggatgcagcggccctcgagcacgacaaggcctacgaccagcagctcaaagcgggtgacaatccgtaccttcggtataaccacgccgacgccgagtttcaggagcgtctgcaagaagatacgtcttttgggggcaacctcgggcgagcagtcttccaggccaaaaagagggttctcgaacctctcggtctggttgaggaagcggctaagacggctcctggaaagaaacgtccggtagagcagtcgccacaagagccagactcctcctcgggcattggcaagacaggccagcagcccgctaaaaagagactcaattttggtcagactggcgactcagagtcagtccccgacccacaacctctcggagaacctcccgcagccccctcaggtgtgggatctcttacaatggcttcaggtggtggcgcaccaatggcagacaataacgaaggcgccgacggagtgggtaatgcctcaggaaattggcattgcgattccacatggctgggcgacagagtcatcaccaccagcacccgcacctgggccttgcccacctacaataaccacctctacaagcaaatctccagtgcttcaacgggggccagcaacgacaaccactacttcggctacagcaccccctgggggtattttgacttcaacagattccactgccacttttcaccacgtgactggcaaagactcatcaacaacaattggggattccggcccaagagactcaacttcaagctcttcaacatccaagtcaaggaggtcacgacgaatgatggcgtcacgaccatcgctaataaccttaccagcacggttcaagtcttctcggactcggagtaccagttgccgtacgtcctcggctctgcgcaccagggctgcctccctccgttcccggcggacgtgttcatgattccgcagtacggctacctaacgctcaacaatggcagccaggcagtgggacggtcatccttttactgcctggaatatttcccatcgcagatgctgagaacgggcaacaactttaccttcagctacacctttgaggaagtgcctttccacagcagctacgcgcacagccagagcctggaccggctgatgaatcctctcatcgaccagtacctgtattacctgaacagaactcaaaatcagtccggaagtgcccaaaacaaggacttgctgtttagccgtgggtctccagctggcatgtctgttcagcccaaaaactggctacctggaccctgttaccggcagcagtgcgtttctaaaacaaaaacagacaacaacaacagcaactttacctggactggtgcttcaaaatataaccttaatgggcgtgaatctataatcaaccctggcactgctatggcctcacacaaagacgacaaagacaagttctttcccatgagcggtgtcatgatttttggaaaggagagcgccggagcttcaaacactgcattggacaatgtcatgatcacagacgaagaggaaatcaaagccactaaccccgtggccaccgaaagatttgggactgtggcagtcaatctccagagcagcagcacagaccctgcgaccggagatgtgcatgttatgggagccttacctggaatggtgtggcaagacagagacgtatacctgcagggtcctatttgggccaaaattcctcacacagatggacactttcacccgtctcctcttatgggcggctttggactcaagaacccgcctcctcagatcctcatcaaaaacacgcctgttcctgcgaatcctccggcggagttttcagctacaaagtttgcttcattcatcacccaatactccacaggacaagtgagcgtggagattgaatgggagctgcagaaagaaaacagcaagcgctggaatcccgaagtgcagtacacatccaattatgcaaaatctgccaacgttgatttcactgtggacaacaatggactttatactgagcctcgccccattggcacccgttacctcacccgtcccctgtaa

SEQ ID NO: 5200 - protein, 736 aa, Artificial Sequence
  Description of Artificial Sequence: Synthetic polypeptide
MAADGYLPDWLEDNLSEGIREWWDLKPGAPKPKANQQKQDDGRGLVLPGYKYLGPFNGLDKGEPVNAADAAALEHDKAYDQQLKAGDNPYLRYNHADAEFQERLQEDTSFGGNLGRAVFQAKKRVLEPLGLVEEAAKTAPGKKRPVEQSPQEPDSSSGIGKTGQQPAKKRLNFGQTGDSESVPDPQPLGEPPAAPSGVGSLTMASGGGAPMADNNEGADGVGNASGNWHCDSTWLGDRVITTSTRTWALPTYNNHLYKQISSASTGASNDNHYFGYSTPWGYFDFNRFHCHFSPRDWQRLINNNWGFRPKRLNFKLFNIQVKEVTTNDGVTTIANNLTSTVQVFSDSEYQLPYVLGSAHQGCLPPFPADVFMIPQYGYLTLNNGSQAVGRSSFYCLEYFPSQMLRTGNNFTFSYTFEEVPFHSSYAHSQSLDRLMNPLIDQYLYYLNRTQNQSGSAQNKDLLFSRGSPAGMSVQPKNWLPGPCYRQQCVSKTKTDNNNSNFTWTGASKYNLNGRESIINPGTAMASHKDDKDKFFPMSGVMIFGKESAGASNTALDNVMITDEEEIKATNPVATERFGTVAVNLQSSSTDPATGDVHVMGALPGMVWQDRDVYLQGPIWAKIPHTDGHFHPSPLMGGFGLKNPPPQILIKNTPVPANPPAEFSATKFASFITQYSTGQVSVEIEWELQKENSKRWNPEVQYTSNYAKSANVDFTVDNNGLYTEPRPIGTRYLTRPL

SEQ ID NO: 5201 - DNA, 2211 bp, Artificial Sequence
  Description of Artificial Sequence: Synthetic polynucleotide
atggctgccgatggttatcttccagattggctcgaggacaacctctctgagggcattcgcgaatggtgggacttgaaacctggagccccgaaacccaaagtcaaccagcaaaagcaggacaacgctcggggtcttgtgcttccgggttacaaatacctcggacccttcaacggactcgacaagggggagcccgtcaacgcggcggacgcagcggccctcgagcacgacaaggcctacgaccagcagctcaaagcgggtgacaatccgtaccttcggtataaccacgccgacgccgagtttcaggagcgtctgcaagaagatacgtcttttgggggcaaccttggacgagcagtcttccaggccaagaagagggttctcgaaccttttggtctggttgaggaaggtgctaagacggctcctggaaagaaacgtccggtagagcagtcgccacaagagccagactcctcctcgggcattggcaagacaggccagcagcccgctaaaaagagactcaattttggtcagactggcgactcagagtcagtccccgacccacaacctctcggagaacctccagcaacccccgctgctgtgggacctactacaatggcttcaggcggtggcgcaccaatggcagacaataacgaaggcgccgacggagtgggtaatgcctcaggaaattggcattgcgattccacatggctgggcgacagagtcatcaccaccagcacccgcacctgggccttgcccacctacaataaccacctctacaagcaaatctccagtgcttcaacgggggccagcaacgacaaccactacttcggctacagcaccccctgggggtattttgacttcaacagattccactgccacttttcaccacgtgactggcaaagactcatcaacaacaattggggattccggcccaagagactcaacttcaagctcttcaacatccaagtcaaggaggtcacgacgaatgatggcgtcacgaccatcgctaataaccttaccagcacggttcaagtcttctcggactcggagtaccagttgccgtacgtcctcggctctgcgcaccagggctgcctccctccgttcccggcggacgtgttcatgattccgcaatacggctacctgacgctcaacaatggcagccaggcagtgggacggtcatccttttactgcctggaatatttcccatcgcagatgctgagaacgggcaataactttaccttcagctacacttttgaggacgttcctttccacagcagctacgctcacagccagagcctggaccggctgatgaatcctctcatcgaccagtacctgtattacctgaacagaactcagaatcagtccggaagtgcccaaaacaaggacttgctgtttagccgtgggtctccaactggcatgtctgttcagcccaaaaactggctacctggaccctgttatcggcagcagcgcgtttctaaaacaaaaacagacaacaacaacagcaactttacctggactggtgcttcaaaatataaccttaatgggcgtgaatctataatcaaccctggcactgctatggcctcacacaaagacgacgaagacaagttctttcccatgagcggtgtcatgatttttggaaaggagagcgccggagcttcaaacactgcattggacaatgtcatgatcacagacgaagaggaaatcaaagccactaaccccgtggccactgaaagatttgggactgtggcagtcaatctccagagcagcagcacagaccctgcgaccggagatgtgcatgccatgggagccttacctggaatggtgtggcaagacagagacgtatacctgcagggtcctatttgggccaaaattcctcacacggatggacactttcacccgtctcctctcatgggcggctttggacttaagcacccgcctcctcagatcctcatcaaaaacacgcctgttcctgcgaatcctccggcagagttttcggctacaaagtttgcttcattcatcacccagtattccacaggacaagtgagcgtggagattgaatgggagctgcagaaagaaaacagcaaacgctggaatcccgaagtgcagtatacatctaactatgcaaaatctgccaacgttgatttcactgtggacaacaatggactttatactgagcctcgccccattggcacccgttacctcacccgtcccctgtaa

SEQ ID NO: 5202 - protein, 736 aa, Artificial Sequence
  Description of Artificial Sequence: Synthetic polypeptide
MAADGYLPDWLEDNLSEGIREWWDLKPGAPKPKVNQQKQDNARGLVLPGYKYLGPFNGLDKGEPVNAADAAALEHDKAYDQQLKAGDNPYLRYNHADAEFQERLQEDTSFGGNLGRAVFQAKKRVLEPFGLVEEGAKTAPGKKRPVEQSPQEPDSSSGIGKTGQQPAKKRLNFGQTGDSESVPDPQPLGEPPATPAAVGPTTMASGGGAPMADNNEGADGVGNASGNWHCDSTWLGDRVITTSTRTWALPTYNNHLYKQISSASTGASNDNHYFGYSTPWGYFDFNRFHCHFSPRDWQRLINNNWGFRPKRLNFKLFNIQVKEVTTNDGVTTIANNLTSTVQVFSDSEYQLPYVLGSAHQGCLPPFPADVFMIPQYGYLTLNNGSQAVGRSSFYCLEYFPSQMLRTGNNFTFSYTFEDVPFHSSYAHSQSLDRLMNPLIDQYLYYLNRTQNQSGSAQNKDLLFSRGSPTGMSVQPKNWLPGPCYRQQRVSKTKTDNNNSNFTWTGASKYNLNGRESIINPGTAMASHKDDEDKFFPMSGVMIFGKESAGASNTALDNVMITDEEEIKATNPVATERFGTVAVNLQSSSTDPATGDVHAMGALPGMVWQDRDVYLQGPIWAKIPHTDGHFHPSPLMGGFGLKHPPPQILIKNTPVPANPPAEFSATKFASFITQYSTGQVSVEIEWELQKENSKRWNPEVQYTSNYAKSANVDFTVDNNGLYTEPRPIGTRYLTRPL

SEQ ID NO: 5203 - DNA, 2208 bp, Artificial Sequence
  Description of Artificial Sequence: Synthetic polynucleotide
  modified_base (955)..(955): a, c, t or g
  modified_base (971)..(972): a, c, t or g
  modified_base (981)..(981): a, c, t or g
  modified_base (986)..(986): a, c, t or g
  modified_base (1235)..(1235): a, c, t or g
  modified_base (1694)..(1696): a, c, t or g
  modified_base (1698)..(1698): a, c, t or g
  modified_base (1763)..(1765): a, c, t or g
  modified_base (1778)..(1778): a, c, t or g
  modified_base (2204)..(2204): a, c, t or g
atggctgccgatggttatcttccagattggctcgaggacaacctctctgagggcattcgcgaatggtgggacttgaaacctggagccccgaaacccaaagtcaaccagcaaaagcaggacaacgctcggggtcttgtgcttccgggttacaaatacctcggacccttcaacggactcgacaagggggagcccgtcaacgcggcggacgcagcggccctcgagcacgacaaggcctacgaccagcagctcaaagcgggtgacaatccgtaccttcggtataaccacgccgacgccgagtttcaggagcgtctgcaagaagatacgtcttttgggggcaaccttggacgagcagtcttccaggccaagaagagggttctcgaaccttttggtctggttgaggaaggtgctaagacggctcctggaaagaaacgtccggtagagcagtcgccacaagagccagactcctcctcgggcattggcaagacaggccagcagcccgctaaaaagagactcaattttggtcagactggcgactcagagtcagtccccgacccacaacctctcggagaacctccagcaacccccgctgctgtgggacctactacaatggcttcaggcggtggcgcaccaatggcagacaataacgaaggcgccgacggagtgggtaatgcctcaggaaattggcattgcgattccacatggctgggcgacagagtcatcaccaccagcacccgaacatgggccttgcccacctataacaaccacctctacaagcaaatctccagtgcttcaacgggggccagcaacgacaaccactacttcggctacagcaccccctgggggtattttgatttcaacagattccactgccacttttcaccacgtgactggcagcgactcatcaataacaattggggattccggcccaagagactcaacttcaaactcttcaacntccaagtcaaggaggnnacgacgaangatgncgtcacaaccatcgctaataaccttaccagcacggttcaagtcttctcggactcggagtaccagcttccgtacgtcctcggctctgcgcaccagggctgcctccctccgttcccggcggacgtgttcatgattccgcaatacggctacctgacgctcaacaatggcagccaggcagtgggacggtcatccttttactgcctggaatatttcccatcgcagatgctgagaacgggcaataactttacctncagctacacttttgaggacgttcctttccacagcagctacgctcacagccagagcctggaccggctgatgaatcctctcatcgaccagtacctgtattacctgaacagaactcagaatcagtccggaagtgcccaaaacaaggacttgctgtttagccgtgggtctccaactggcatgtctgttcagcccaaaaactggctacctggaccctgttatcggcagcagcgcgtttctaaaacaaaaacagacaacaacaacagcaactttacctggactggtgcttcaaaatataaccttaatgggcgtgaatctataatcaaccctggcactgctatggcctcacacaaagacgacgaagacaagttctttcccatgagcggtgtcatgatttttggaaaggagagcgccggagcttcaaacactgcattggacaatgtcatgatcacagacgaagagannncnaagccactaaccccgtggccactgaaagatttgggactgtggcagtcaatctccaagcagcacannnaccctgcgaccgnagatgtgcatgccatgggagccttacctggaatggtgtggcaagacagagacgtatacctgcagggtcctatttgggccaaaattcctcacacggatggacactttcacccgtctcctctcatgggcggctttggacttaagcacccgcctcctcagatcctcatcaaaaacacgcctgttcctgcgaatcctccggcagagttttcggctacaaagtttgcttcattcatcacccagtattccacaggacaagtgagcgtggagattgaatgggagctgcagaaagaaaacagcaaacgctggaatcccgaagtgcagtatacatctaactatgcaaaatctgccaacgttgatttcactgtggacaacaatggactttatactgagcctcgccccattggcacccgttacctcacccgtccccngtaa

SEQ ID NO: 5204 - protein, 723 aa, Artificial Sequence
  Description of Artificial Sequence: Synthetic polypeptide
MAADGYLPDWLEDNLSEGIREWWDLKPGAPKPKVNQQKQDNARGLVLPGYKYLGPFNGLDKGEPVNAADAAALEHDKAYDQQLKAGDNPYLRYNHADAEFQERLQEDTSFGGNLGRAVFQAKKRVLEPFGLVEEGAKTAPGKKRPVEQSPQEPDSSSGIGKTGQQPAKKRLNFGQTGDSESVPDPQPLGEPPATPAAVGPTTMASGGGAPMADNNEGADGVGNASGNWHCDSTWLGDRVITTSTRTWALPTYNNHLYKQISSASTGASNDNHYFGYSTPWGYFDFNRFHCHFSPRDWQRLINNNWGFRPKRLNFKLFNQVKETTDVTTIANNLTSTVQVFSDSEYQLPYVLGSAHQGCLPPFPADVFMIPQYGYLTLNNGSQAVGRSSFYCLEYFPSQMLRTGNNFTSYTFEDVPFHSSYAHSQSLDRLMNPLIDQYLYYLNRTQNQSGSAQNKDLLFSRGSPTGMSVQPKNWLPGPCYRQQRVSKTKTDNNNSNFTWTGASKYNLNGRESIINPGTAMASHKDDEDKFFPMSGVMIFGKESAGASNTALDNVMITDEEATNPVATERFGTVAVNLQSSPATDVHAMGALPGMVWQDRDVYLQGPIWAKIPHTDGHFHPSPLMGGFGLKHPPPQILIKNTPVPANPPAEFSATKFASFITQYSTGQVSVEIEWELQKENSKRWNPEVQYTSNYAKSANVDFTVDNNGLYTEPRPIGTRYLTRP

SEQ ID NO: 5205 - DNA, 2208 bp, Artificial Sequence
  Description of Artificial Sequence: Synthetic polynucleotide
atggctgccgatggttatcttccagattggctcgaggacactctctctgaaggaataagacagtggtggaagctcaaacctggcccaccaccaccaaagcccgcagagcggcataaggacgacagcaggggtcttgtgcttcctgggtacaagtacctcggacccttcaacggactcgacaagggagagccggtcaacgaggcagacgccgcggccctcgagcacgacaaagcctatgaccggcagctcgacagcggagacaacccgtacctcaagtacaaccacgccgacgcggagtttcaggagcgccttaaagaagatacgtcttttgggggcaacctcggacgagcagtcttccaggcgaaaaagagggttcttgaacctctgggcctggttgaggaacctgttaagacggctccgggaaaaaagaggccggtagagcactctcctgtggagccagactcctcctcgggaaccggaaaggcgggtcagcagcctgcaagaaaaagattgaattttggtcagactggagacgcagactcagtacctgacccccagcctctcggacagccaccagcagccccctctggtctgggaactaatacgatggctacaggcagtggcgcaccaatggcagacaataacgagggcgccgacggagtgggtaattcctcgggaaattggcattgcgattccacatggatgggcgacagagtcatcaccaccagcacccgaacctgggccctgcccacctacaacaaccacctctacaaacaaatttccagccaatcaggagcctcgaacgacaatcactactttggctacagcaccccttgggggtattttgacttcaacagattccactgccacttttcaccacgtgactggcaaagactcatcaacaacaactggggattccgacccaagagactcaagttcaagctctttaacattcaagtcaaagaggtcacgcagaatgacggtacgacgacgattgccaataaccttaccagcacggttcaggtgtttactgactcggagtaccagctcccgtacgtcctcggctcggcgcatcaaggatgcctcccgccgttcccagcagacgtcttcatggtgccacagtatggatacctcaccctgaacaacgggagtcaggcagtaggacgctcttcattttactgcctggagtactttccttctcagatgctgcgtaccggtaacaactttaccttcagctacacttttgaggacgttcctttccacagcagctacgctcacagccagagtctggaccgtctcatgaatcctctcatcgaccagtacctgtattacttgagcagaacagacgctccaagtggaaccaccacgcagtcaaggcttcagttttctcaggccggagcgagtgacattcgggaccagtctaggaactggcttcctggaccctgttaccgccagcagcgagtatcaaagacatctgcggataacaacaacagtgaatactcgtggactggagctaccaagtaccacctcaatggcagagactctctggtgaatccgggcccggccatggcaagccacaaggacgatgaagaaaagttttttcctcagagcggggttctcatctttgggaagcaaggctcagagaaaacaagtgtggacattgaaaaggtcatgattacagacgaagaggaaatcaggacaaccaatcccgtggctacggagcagtatggttctgtatctaccaacctccagagaggcaacagacaagcagctaccgcagatgtcaacacacaaggcgttcttccaggcatggtctggcaggacagagatgtgtaccttcaggggcccatctgggcaaagattccacacacggacggacattttcacccctctcccctcatgggtggattcggacttaaacaccctcctccacagattctcatcaagaacaccccggtacctgcgaatccttcgaccaccttcagtgcggcaaagtttgcttccttcatcacacagtactccacgggacaggtcagcgtggagatcgagtgggagctgcagaaggaaaacagcaaacgctggaatcccgaagttcagtacacttccaactacaacaagtctgttaatgtggactttactgtggacactaatggcgtgtattcagagcctcgccccattggcaccagatacctgactcgtaatctgtaa

SEQ ID NO: 5206 - protein, 735 aa, Artificial Sequence
  Description of Artificial Sequence: Synthetic polypeptide
MAADGYLPDWLEDTLSEGIRQWWKLKPGPPPPKPAERHKDDSRGLVLPGYKYLGPFNGLDKGEPVNEADAAALEHDKAYDRQLDSGDNPYLKYNHADAEFQERLKEDTSFGGNLGRAVFQAKKRVLEPLGLVEEPVKTAPGKKRPVEHSPVEPDSSSGTGKAGQQPARKRLNFGQTGDADSVPDPQPLGQPPAAPSGLGTNTMATGSGAPMADNNEGADGVGNSSGNWHCDSTWMGDRVITTSTRTWALPTYNNHLYKQISSQSGASNDNHYFGYSTPWGYFDFNRFHCHFSPRDWQRLINNNWGFRPKRLKFKLFNIQVKEVTQNDGTTTIANNLTSTVQVFTDSEYQLPYVLGSAHQGCLPPFPADVFMVPQYGYLTLNNGSQAVGRSSFYCLEYFPSQMLRTGNNFTFSYTFEDVPFHSSYAHSQSLDRLMNPLIDQYLYYLSRTDAPSGTTTQSRLQFSQAGASDIRDQSRNWLPGPCYRQQRVSKTSADNNNSEYSWTGATKYHLNGRDSLVNPGPAMASHKDDEEKFFPQSGVLIFGKQGSEKTSVDIEKVMITDEEEIRTTNPVATEQYGSVSTNLQRGNRQAATADVNTQGVLPGMVWQDRDVYLQGPIWAKIPHTDGHFHPSPLMGGFGLKHPPPQILIKNTPVPANPSTTFSAAKFASFITQYSTGQVSVEIEWELQKENSKRWNPEVQYTSNYNKSVNVDFTVDTNGVYSEPRPIGTRYLTRNL

SEQ ID NO: 5207 - DNA, 2208 bp, Artificial Sequence
  Description of Artificial Sequence: Synthetic polynucleotide
atggctgccgatggttatcttccagattggctcgaggacactctctctgaaggaataagacagtggtggaagctcaaacctggcccaccaccaccaaagcccgcagagcggcataaggacgacagcaggggtcttgtgcttcctgggtacaagtacctcggacccttcaacggactcgacaagggagagccggtcaacgaggcagacgccgcggccctcgagcacgacaaagcctatgaccggcagctcgacagcggagacaacccgtacctcaagtacaaccacgccgacgcggagtttcaggagcgccttaaagaagatacgtcttttgggggcaacctcggacgagcagtcttccaggcgaaaaagagggttcttgaacctctgggcctggttgaggaacctgttaagacggctccgggaaaaaagaggccggtagagcactctcctgtggagccagactcctcctcgggaaccggaaaggcgggccagcagcctgcaagaaaaagattgaattttggtcagactggagacgcaaactcagtacctgacccccagcctctcggacagccaccagcagccccctctggtctgggaactaatacgatggctacaggcagtggcgcaccaatggcagacaataacgagggcgccgacggagtgggtaattcctcgggaaattggcattgcgattccacatggatgggcgacagagtcatcaccaccagcacccgaacctgggccctgcccacctacaacaaccacctctacaaacaaatttccagccaatcaggagcctcgaacgacaatcactactttggctacagcaccccttgggggtattttgacttcaacagattccactgccacttttcaccacgtgactggcaaagactcatcaacaacaactggggattccgacccaagagactcaagttcaagctctttaacattcaagtcaaagaggtcacgcagaatgacggtacgacgacgattgccaataaccttaccagcacggttcaggtgtttactgactcggagtaccagctcccgtacgtcctcggctcggcgcatcaaggatgcctcccgccgttcccagcagacgtcttcatggtgccacagtatggatacctcaccctgaacaacgggagtcgggcagtaggacgctcttcattttactgcctggagtactttccttctcagatgctgcgtaccggtaacaactttaccttcagctacacttttgaggacgttcctttccacagcagctacgctcacagccagagtctggaccgtctcatgaatcctctcatcgaccagtacctgtattacttgagcagaacagacactccaagtggaaccaccacgcagtcaaggcttcagttttctcaggccggagcgagtgacattcgggaccagtctaggaactggcttcctggaccctgttaccgccagcagcgagtatcaaagacatctgcggataacaacaacagtgaatactcgtggactggagctaccaagtaccacctcaatggcagagactctctggtgaatccgggcccggccatggcaagccacaaggacgatgaagaaaagttttttcctcagagcggggttctcatctttgggaagcaaggctcagagaaaacaagtgtggacattgaaaaggtcatgattacagacgaagaggaaatcaggacgaccaatcccgtggctacggagcagtatggttctgtatctaccaacctccagagaggcaacagacaagcagctaccgcagatgtcaacacacaaggcgttcttccaggcatggtctggcaggacagagatgtgtaccttcaggggcccatctgggcaaagattccacacacggacggacattttcacccctctcccctcatgggtggattcggacttaaacaccctcctccacagattctcatcaagaacaccccggtacctgcgaatccttcgaccaccttcagtgcggcaaagtttgcttccttcatcacacagtactccacgggacaggtcagcgtggagatcgagtgggagctgcagaaggaaaacagcaaacgctggaatcccgaagttcagtacacttccaactacaacaagtctgttaatgtggactttactgtggacactaatggcgtgtatacagagcctcgccccattggcaccagatacctgactcgtaatctgtaa

SEQ ID NO: 5208 - protein, 735 aa, Artificial Sequence
  Description of Artificial Sequence: Synthetic polypeptide
MAADGYLPDWLEDTLSEGIRQWWKLKPGPPPPKPAERHKDDSRGLVLPGYKYLGPFNGLDKGEPVNEADAAALEHDKAYDRQLDSGDNPYLKYNHADAEFQERLKEDTSFGGNLGRAVFQAKKRVLEPLGLVEEPVKTAPGKKRPVEHSPVEPDSSSGTGKAGQQPARKRLNFGQTGDANSVPDPQPLGQPPAAPSGLGTNTMATGSGAPMADNNEGADGVGNSSGNWHCDSTWMGDRVITTSTRTWALPTYNNHLYKQISSQSGASNDNHYFGYSTPWGYFDFNRFHCHFSPRDWQRLINNNWGFRPKRLKFKLFNIQVKEVTQNDGTTTIANNLTSTVQVFTDSEYQLPYVLGSAHQGCLPPFPADVFMVPQYGYLTLNNGSRAVGRSSFYCLEYFPSQMLRTGNNFTFSYTFEDVPFHSSYAHSQSLDRLMNPLIDQYLYYLSRTDTPSGTTTQSRLQFSQAGASDIRDQSRNWLPGPCYRQQRVSKTSADNNNSEYSWTGATKYHLNGRDSLVNPGPAMASHKDDEEKFFPQSGVLIFGKQGSEKTSVDIEKVMITDEEEIRTTNPVATEQYGSVSTNLQRGNRQAATADVNTQGVLPGMVWQDRDVYLQGPIWAKIPHTDGHFHPSPLMGGFGLKHPPPQILIKNTPVPANPSTTFSAAKFASFITQYSTGQVSVEIEWELQKENSKRWNPEVQYTSNYNKSVNVDFTVDTNGVYTEPRPIGTRYLTRNL

SEQ ID NO: 5209 - DNA, 2211 bp, Artificial Sequence
  Description of Artificial Sequence: Synthetic polynucleotide
atggctgccgatggttatcttccagattggctcgaggacactctctctgaaggaataagacagtggtggaagctcaaacctggcccaccaccaccaaagcccgcagagcggcataaggacgacagcaggggtcttgtgcttcctgggtacaagtacctcggacccttcaacggactcgacaagggagagccggtcaacgaggcagacgccgcggccctcgagcacgacaaggcctacgaccagcagctcaaagcgggtgacaatccgtacctgcggtataaccacgccgacgccgagtttcaggagcgtctgcaagaagatacgtcttttgggggcaacctcgggcgagcagtcttccaggccaagaagcgggttctcgaacctctcggtctggttgaggaaggcgctaagacggctcctggaaagaaacgtccggtagagcagtcgccacaagagccagactcctcctcgggcatcggcaagacaggccagcagcccgctaaaaagagactcaattttggtcagactggcgactcagagtcagtccccgacccacaacctctcggagaacctccagcaacccccgctgctgtgggacctactacaatggcttcaggcggtggcgcaccaatggcagacaataacgaaggcgccgacggagtgggtaatgcctcaggaaattggcattgcgattccacatggctgggcgacagagtcatcaccaccagcacccgaacatgggccttgcccacctataacaaccacctctacaagcaaatctccagtgcttcgacgggggccagcaacgacaaccactacttcggctacagcaccccctgggggtattttgactttaacagattccactgccacttttcaccacgtgactggcagcgactcatcaacaataactggggattccggcccaagagactcagcttcaagctcttcaacatccaggtcaaggaggtcacgacgaatgatggcgtcacaaccatcgctaataaccttaccagcacggttcaagtcttctcggactcggagtaccagcttccgtacgtcctcggctctgcgcaccagggctgcctccctccgttcccggcggacgtgttcatgattccgcaatacggctacctgacgctcaacaatggcagccaagccgtgggacgttcatccttttactgcctggaatatttcccttctcagatgctgagaacgggcaacaactttaccttcagctacacctttgaggaagtgcctttccacagcagctacgcgcacagccagagcctggaccggctgatgaatcctctcatcgatcaatacctgtattacctgaacagaactcaaaatcagtccggaagtgcccaaaacaaggacttgctgtttagccgtgggtctccagctggcatgtctgttcagcccaaaaactggctacctggaccctgttatcggcagcagcgcgtttctaaaacaaaaacagacaacaacaacagcaattttacctggactggtgcttcaaaatataacctcaatgggcgtgaatccatcatcaaccctggcactgctatggcctcacacaaagacgacgaagacaagttctttcccatgagcggtgtcatgatttttggaaaagagagcgccggagcttcaaacactgcattggacaatgtcatgattacggacgaagaggaaattaaagccactaaccctgtggccaccgaaagatttgggaccgtggcagtcaatttccagagcagcagcacagaccctgcgaccggagatgtgcatgctatgggagcattacctggcatggtgtggcaagatagagacgtgtacctgcagggtcccatttgggccaaaattcctcacacagatggacactttcacccgtctcctcttatgggcggctttggactcaagaacccgcctcctcagatcctcatcaaaaacacgcctgttcctgcgaatcctccggcggagttttcagctacaaagtttgcttcattcatcactcaatactccacaggacaagtgagcgtggaaattgaatgggagctgcagaaagaaaacagcaaacgctggaatcccgaagtgcagtatacatctaactatgcaaaatctgccaacgttgatttcactgtggacaacaatggactttatactgagcctcgccccattggcacccgttacctcacccgtcccctgtaa

SEQ ID NO: 5210 - protein, 736 aa, Artificial Sequence
  Description of Artificial Sequence: Synthetic polypeptide
MAADGYLPDWLEDTLSEGIRQWWKLKPGPPPPKPAERHKDDSRGLVLPGYKYLGPFNGLDKGEPVNEADAAALEHDKAYDQQLKAGDNPYLRYNHADAEFQERLQEDTSFGGNLGRAVFQAKKRVLEPLGLVEEGAKTAPGKKRPVEQSPQEPDSSSGIGKTGQQPAKKRLNFGQTGDSESVPDPQPLGEPPATPAAVGPTTMASGGGAPMADNNEGADGVGNASGNWHCDSTWLGDRVITTSTRTWALPTYNNHLYKQISSASTGASNDNHYFGYSTPWGYFDFNRFHCHFSPRDWQRLINNNWGFRPKRLSFKLFNIQVKEVTTNDGVTTIANNLTSTVQVFSDSEYQLPYVLGSAHQGCLPPFPADVFMIPQYGYLTLNNGSQAVGRSSFYCLEYFPSQMLRTGNNFTFSYTFEEVPFHSSYAHSQSLDRLMNPLIDQYLYYLNRTQNQSGSAQNKDLLFSRGSPAGMSVQPKNWLPGPCYRQQRVSKTKTDNNNSNFTWTGASKYNLNGRESIINPGTAMASHKDDEDKFFPMSGVMIFGKESAGASNTALDNVMITDEEEIKATNPVATERFGTVAVNFQSSSTDPATGDVHAMGALPGMVWQDRDVYLQGPIWAKIPHTDGHFHPSPLMGGFGLKNPPPQILIKNTPVPANPPAEFSATKFASFITQYSTGQVSVEIEWELQKENSKRWNPEVQYTSNYAKSANVDFTVDNNGLYTEPRPIGTRYLTRPL

SEQ ID NO: 5211 - protein, 735 aa, Artificial Sequence
  Description of Artificial Sequence: Synthetic polypeptide
MAADGYLPDWLEDTLSEGIRQWWKLKPGPPPPKPAERHKDDSRGLVLPGYKYLGPFNGLDKGEPVNEADAAALEHDKAYDRQLDSGDNPYLKYNHADAEFQERLKEDTSFGGNLGRAVFQAKKRVLEPLGLVEEPVKTAPGKKRPVEHSPVEPDSSSGTGKAGQQPARKRLNFGQTGDADSVPDPQPLGQPPAAPSGLGTNTMATGSGAPMADNNEGADGVGNSSGNWHCDSTWMGDRVITTSTRTWALPTYNNHLYKQISSQSGASNDNHYFGYSTPWGYFDFNRFHCHFSPRDWQRLINNNWGFRPKRLKFKLFNIQVKEVTQNDGTTTIANNLTSTVQVFTDSEYQLPYVLGSAHQGCLPPFPADVFMVPQYGYLTLNNGSQAVGRSSFYCLEYFPSQMLRTGNNFTFSYTFEDVPFHSSYAHSQSLDRLMNPLIDQYLYYLSRTDTPSGTTTQSRLQFSQAGASDIRNQSRNWLPGPCYRQQRVSKTSADNNNSEYSWTGATKYHLNGRDSLVNPGPAMASHKDDEEKFFPQSGVLIFGKQGSEKTSVDIEKVMITDEEEIRTTNPVATEQYGSVSTNLQRGNRQAATADVNTQGVLPGMVWQDRDVYLQGPIWAKIPHTDGHFHPSPLMGGFGLKHPPPQILIKNTPVPANPSTTFSAAKFASFITQYSTGQVSVEIEWELQKENSKRWNPEVQYTSNYNKSVNVDFTVDTNGVYSEPRPIGTRYLTRNQ

SEQ ID NO: 5212 - DNA, 2208 bp, Artificial Sequence
  Description of Artificial Sequence: Synthetic polynucleotide
atggctgccgatggttatcttccagattggctcgaggacactctctctgaaggaataagacagtggtggaagctcaaacctggcccaccaccaccaaagcccgcagagcggcataaggacgacagcaggggtcttgtgcttcctgggtacaagtacctcggacccttcaacggactcgacaagggagagccggtcaacgaggcagacgccgcggccctcgagcacgacaaagcctatgaccggcagctcgacagcggagacaacccgtacctcaagtacaaccacgccgacgcggagtttcaggaacgccttaaagaagatacgtcttttgggggcaacctcggacgagcagtcttccaggcgaaaaagagggttcttgaacctctgggcctggttgaggaacctgttaagacggctccgggaaaaaagaggccggtagagcactctcctgtggagccagactcctcctcgggaaccggaaaggcgggccagcagcctgcaagaaaaagattgaattttggtcagactggagacgcagactcagtacctgacccccagcctctcggacagccaccagcagccccctctggtctgggaactaatacgatggctacaggcagtggcgcaccaatggcagacaataacgagggcgccgacggagtgggtaattcctcgggaaattggcattgcgattccacatggatgggcgacagagtcatcaccaccagcacccgaacctgggccctgcccacctacaacaaccacctctacaaacaaatttccagccaatcaggagcctcgaacgacaatcactactttggctacagcaccccttgggggtattttgacttcaacagattccactgccacttttcaccacgtgactggcaaagactcatcaacaacaactggggattccgacccaagagactcaagttcaagctctttaacattcaagtcaaagaggtcacgcagaatgacggtacgacgacgattgccaataaccttaccagcacggttcaggtgtttactgactcggagtaccagctcccgtacgtcctcggctcggcgcatcaaggatgcctcccgccgttcccagcagacgtcttcatggtgccacagtatggatacctcaccctgaacaacgggagtcaggcagtaggacgctcttcattttactgcctggagtactttccttctcagatgctgcgtaccggtaacaactttaccttcagctacacttttgaggacgttcctttccacagcagctacgctcacagccagagtctggaccgtctcatgaatcctctcatcgaccagtacctgtattacttgagcagaacagacactccaagtggaaccaccacgcagtcaaggcttcagttttctcaggccggagcgagtgacattcggaaccagtctaggaactggcttcctggaccctgttaccgccagcagcgagtatcaaagacatctgcggataacaacaacagtgaatactcgtggactggagctaccaagtaccacctcaatggcagagactctctggtgaatccgggcccggccatggcaagccacaaggacgatgaagaaaagttttttcctcagagcggggttctcatctttgggaagcaaggctcagagaaaacaagtgtggacattgaaaaggtcatgattacagacgaagaggaaatcaggacaaccaatcccgtggctacggagcagtatggttctgtatctaccaacctccagagaggcaacagacaagcagctaccgcagatgtcaacacacaaggcgttcttccaggcatggtctggcaggacagagatgtgtaccttcaggggcccatctgggcaaagattccacacacggacggacattttcacccctctcccctcatgggtggattcggacttaaacaccctcctccacagattctcatcaagaacaccccggtacctgcgaatccttcgaccaccttcagtgcggcaaagtttgcttccttcatcacacagtactccacgggacaggtcagcgtggagatcgagtgggagctgcagaaggaaaacagcaaacgctggaatcccgaagttcagtacacttccaactacaacaagtctgttaatgtggactttactgtggacactaatggcgtgtattcagagcctcgccccattggcaccagatacctgactcgtaatcagtaa

SEQ ID NO: 5213 - DNA, 2208 bp, Artificial Sequence
  Description of Artificial Sequence: Synthetic polynucleotide
atggctgccgatggttatcttccagattggctcgaggacactctctctgaaggaataagacagtggtggaagctcaaacctggcccaccaccaccaaagcccgcagagcggcataaggacgacagcaggggtcttgtgcttcctgggtacaagtacctcggacccttcaacggactcgacaagggagagccggtcaacgaggcagacgccgcggccctcgagcacgacaaagcctatgaccggcagctcgacagcggagacaacccgtacctcaagtacaaccacgccgacgcggagtttcaggagcgccttaaagaagatacgtcttttgggggcaacctcggacgagcagtcttccaggcgaaaaagagggttcttgaacctctgggcctggttgaggaacctgttaagacggctccgggaaaaaagaggccggtagagcactctcctgtggagccagactcctcctcgggaaccggaaaggcgggccagcagcctgcaagaaaaagattgaattttggtcagactggagacgcagactcagtacctgatccccagcctctcggacagccaccagcagccccctctggtctgggaactaatacgatggctacaggcagtggcgcaccaatggcagacaataacgagggcgccgacggagtgggtaattcctcgggaaattggcattgcgattccacatggatgggcgacagagtcatcaccaccagcacccgaacctgggccctgcccacctacaacaaccacctctacaaacaaatttccagccaatcaggagcctcgaacgacaatcactactttggctacagcaccccttgggggtattttgacttcaacagattccactgccacttttcaccacgtgactggcaaagactcatcaacaacaactggggattccgacccaagagactcaagttcaagctctttaacattcaagtcaaagaggtcacgcagaatgacggtacgacgacgattgccaataaccttaccagcacggttcaggtgtttactgactcggagtaccagctcccgtatgtcctcggctcggcgcatcaaggatgcctcccgccgttcccagcagacgtcttcatggtgccacagtatggatacctcaccctgaacaacgggagtcaggcagtaggacgctcttcattttactgcctggagtactttccttctcagatgctgcgtaccggtaacaactttaccttcagctacacttttgaggacgttcctttccacagcagctacgctcacagccagagtctggaccgtctcatgaatcctctcatcgaccagtacctgtattacttgagcagaacagacactccaagtggaaccaccacgcagtcaaggcttcagttttctcaggccggagcgagtgacattcgggaccagtctaggaactggcttcctggaccctgttaccgccagcagcgagtatcaaagacatctgcggataacaacaacagtgaatactcgtggactggagctaccaagtaccacctcaatggcagagactctctggtgaatccgggcccggccatggcaagccacaaggacgatgaagaaaagttttttcctcagagcggggttctcatctttgggaagcaaggctcagagaaaacaagtgtggacattgaaaaggtcatgattacagacgaagaggaaatcaggacaaccaatcccgtggctacggagcagtatggttctgtatctaccaacctccagagaggcaacagacaagcagctaccgcagatgtcaacacacaaggcgttcttccaggcatggtctggcaggacagagatgtgtaccttcaggggcccatctgggcaaagattccacacacggacggacattttcacccctctcccctcatgggtggattcggacttaaacaccctcctccacagattctcatcaagaacaccccggtacctgcgaatccttcgaccaccttcagtgcggcaaagtttgcttccttcatcacacagtactccacgggacaggtcagcgtggagatcgagtgggagctgcagaaggaaaacagcaaacgctggaatcccgaagttcagtacacttccaactacaacaagtctgttaatgtggactttactgtggacactaatggcgtgtattcagagcctcgccccattggcaccagatacctgactcgtaatctgtaa

SEQ ID NO: 5214 - protein, 735 aa, Artificial Sequence
  Description of Artificial Sequence: Synthetic polypeptide
MAADGYLPDWLEDTLSEGIRQWWKLKPGPPPPKPAERHKDDSRGLVLPGYKYLGPFNGLDKGEPVNEADAAALEHDKAYDRQLDSGDNPYLKYNHADAEFQERLKEDTSFGGNLGRAVFQAKKRVLEPLGLVEEPVKTAPGKKRPVEHSPVEPDSSSGTGKAGQQPARKRLNFGQTGDADSVPDPQPLGQPPAAPSGLGTNTMATGSGAPMADNNEGADGVGNSSGNWHCDSTWMGDRVITTSTRTWALPTYNNHLYKQISSQSGASNDNHYFGYSTPWGYFDFNRFHCHFSPRDWQRLINNNWGFRPKRLKFKLFNIQVKEVTQNDGTTTIANNLTSTVQVFTDSEYQLPYVLGSAHQGCLPPFPADVFMVPQYGYLTLNNGSQAVGRSSFYCLEYFPSQMLRTGNNFTFSYTFEDVPFHSSYAHSQSLDRLMNPLIDQYLYYLSRTDTPSGTTTQSRLQFSQAGASDIRDQSRNWLPGPCYRQQRVSKTSADNNNSEYSWTGATKYHLNGRDSLVNPGPAMASHKDDEEKFFPQSGVLIFGKQGSEKTSVDIEKVMITDEEEIRTTNPVATEQYGSVSTNLQRGNRQAATADVNTQGVLPGMVWQDRDVYLQGPIWAKIPHTDGHFHPSPLMGGFGLKHPPPQILIKNTPVPANPSTTFSAAKFASFITQYSTGQVSVEIEWELQKENSKRWNPEVQYTSNYNKSVNVDFTVDTNGVYSEPRPIGTRYLTRNL

SEQ ID NO: 5215 - DNA, 2172 bp, Artificial Sequence
  Description of Artificial Sequence: Synthetic polynucleotide
atgtcttttgttgatcaccctccagattggttggaagaagttggtgaaggtcttcgcgagtttttgggccttgaagcgggcccaccgaaaccaaaacccaatcagcagcatcaagatcaagcccgtggtcttgtgctgcctggttataactatctcggacccggaaacggtctcgatcgaggagagcctgtcaacagggcagacgaggtcgcgcgagagcacgacatctcgtacaacgagcagcttgaggcgggagacaacccctacctcaagtacaaccacgcggacgccgagtttcaggagaagctcgccgacgacacatccttcgggggaaacctcggaaaggcagtctttcaggccaagaaaagggttctcgaaccttttggcctggttgaagagggtgctaagacggcccctaccggaaagcggatagacgaccactttccaaaaagaaagaaggctcggaccgaagaggactccaagccttccacctcgtcagacgccgaagctggacccagcggatcccagcagctgcaaatcccagcccaaccagcctcaagtttgggagctgatacaatgtctgcgggaggtggcggcccattgggcgacaataaccaaggtgccgatggagtgggcaatgcctcgggagattggcattgcgattccacgtggatgggggacagagtcgtcaccaagtccacccgaacctgggtgctgcccagctacaacaaccaccagtaccgagagatcaaaagcggctccgtcgacggaagcaacgccaacgcctactttggatacagcaccccctgggggtactttgactttaaccgcttccacagccactggagcccccgagactggcaaagactcatcaacaactactggggcttcagaccccggtccctcagagtcaaaatcttcaacattcaagtcaaagaggtcacggtgcaggactccaccaccaccatcgccaacaacctcacctccaccgtccaagtgtttacggacgacgactaccagctgccctacgtcgtcggcaacgggaccgagggatgcctgccggccttccctccgcaggtctttacgctgccgcagtacggttacgcgacgctgaaccgcgacaacacagaaaatcccaccgagaggagcagcttcttctgcctagagtactttcccagcaagatgctgagaacgggcaacaactttgagtttacctacaactttgaggaggtgcccttccactccagcttcgctcccagtcagaacctgttcaagctggccaacccgctggtggaccagtacttgtaccgcttcgtgagcacaaataacactggcggagtccagttcaacaagaacctggccgggagatacgccaacacctacaaaaactggttcccggggcccatgggccgaacccagggctggaacctgggctccggggtcaaccgcgccagtgtcagcgccttcgccacgaccaataggatggagctcgagggcgcgagttaccaggtgcccccgcagccgaacggcatgaccaacaacctccagggcagcaacacctatgccctggagaacactatgatcttcaacagccagccggcgaacccgggcaccaccgccacgtacctcgagggcaacatgctcatcaccagcgagagcgagacgcagccggtgaaccgcgtggcgtacaacgtcggcgggcagatggccaccaacaaccagagctccaccactgcccccgcgaccggcacgtacaacctccaggaaatcgtgcccggcagcgtgtggatggagagggacgtgtacctccaaggacccatctgggccaagatcccagagacgggggcgcactttcacccctctccggccatgggcggattcggactcaaacacccaccgcccatgatgctcatcaagaacacgcctgtgcccggaaatatcaccagcttctcggacgtgcccgtcagcagcttcatcacccagtacagcaccgggcaggtcaccgtggagatggagtgggagctcaagaaggaaaactccaagaggtggaacccagagatccagtacacaaacaactacaacgacccccagtttgtggactttgccccggacagcaccggggaatacagaaccaccagacctatcggaacccgataccttacccgacccctt

SEQ ID NO: 5216 - DNA, 2214 bp, Artificial Sequence
  Description of Artificial Sequence: Synthetic polynucleotide
atggctgccgatggttatcttccagattggctcgaggacaacctctctgagggcattcgcgagtggtgggcgctgaaacctggagccccgaagcccaaagccaaccagcaaaagcaggacgacggccggggtctggtgcttcctggctacaagtacctcggacccttcaacggactcgacaagggggagcccgtcaacgcggcggacgcagcggccctcgagcacgacaaggcctacgaccagcagctgcaggcgggtgacaatccgtacctgcggtataaccacgccgacgccgagtttcaggagcgtctgcaagaagatacgtcttttgggggcaacctcgggcgagcagtcttccaggccaagaagcgggttctcgaacctctcggtctggttgaggaaggcgctaagacggctcctggaaagaagagaccggtagagccatcaccccagcgttctccagactcctctacgggcatcggcaagaaaggccaacagcccgccagaaaaagactcaattttggtcagactggcgactcagagtcagttccagaccctcaacctctcggagaacctccagcagcgccctctggtgtgggacctaatacaatggctgcaggcggtggcgcaccaatggcagacaataacgaaggcgccgacggagtgggtagttcctcgggaaattggcattgcgattccacatggctgggcgacagagtcatcaccaccagcacccgaacctgggccctgcccacctacaacaaccacctctacaagcaaatctccaacgggacatcgggaggagccaccaacgacaacacctacttcggctacagcaccccctgggggtattttgactttaacagattccactgccacttttcaccacgtgactggcagcgactcatcaacaacaactggggattccggcccaagagactcagcttcaagctcttcaacatccaggtcaaggaggtcacgcagaatgaaggcaccaagaccatcgccaataacctcaccagcaccatccaggtgtttacggactcggagtaccagctgccgtacgttctcggctctgcccaccagggctgcctgcctccgttcccggcggacgtgttcatgattccccagtacggctacctaacactcaacaacggtagtcaggccgtgggacgctcctccttctactgcctggaatactttccttcgcagatgctgagaaccggcaacaacttccagtttacttacaccttcgaggacgtgcctttccacagcagctacgcccacagccagagcttggaccggctgatgaatcctctgattgaccagtacctgtactacttgtctcggactcaaacaacaggaggcacggcaaatacgcagactctgggcttcagccaaggtgggcctaatacaatggccaatcaggcaaagaactggctgccaggaccctgttaccgccaacaacgcgtctcaacgacaaccgggcaaaacaacaatagcaactttgcctggactgctgggaccaaataccatctgaatggaagaaattcattggctaatcctggcatcgctatggcaacacacaaagacgacgaggagcgtttttttcccagtaacgggatcctgatttttggcaaacaaaatgctgccagagacaatgcggattacagcgatgtcatgctcaccagcgaggaagaaatcaaaaccactaaccctgtggctacagaggaatacggtatcgtggcagataacttgcctgagcggacggcgatgagtcttccgggaactgtcaacagccagggggccttacccggtatggtctggcagaaccgggacgtgtacctgcagggtcccatctgggccaagattcctcacacggacggcaacttccacccgtctccgctgatgggcggctttggcctgaaacatcctccgcctcagatcctgatcaagaacacgcctgtacctgcggatcctccgaccaccttcaaccagtcaaagctgaactctttcatcacgcaatacagcaccggacaggtcagcgtggaaattgaatgggagctgcagaaggaaaacagcaagcgctggaaccccgagatccagtacacctccaactactacaaatctacaagtgtggactttgctgttaatacagaaggcgtgtactctgaaccccgccccattggcacccgttacctcacccgtaatctg

SEQ ID NO: 5217 - protein, 738 aa, Artificial Sequence
  Description of Artificial Sequence: Synthetic polypeptide
MAADGYLPDWLEDNLSEGIREWWALKPGAPKPKANQQKQDDGRGLVLPGYKYLGPFNGLDKGEPVNAADAAALEHDKAYDQQLQAGDNPYLRYNHADAEFQERLQEDTSFGGNLGRAVFQAKKRVLEPLGLVEEGAKTAPGKKRPVEPSPQRSPDSSTGIGKKGQQPARKRLNFGQTGDSESVPDPQPLGEPPAAPSGVGPNTMAAGGGAPMADNNEGADGVGSSSGNWHCDSTWLGDRVITTSTRTWALPTYNNHLYKQISNGTSGGATNDNTYFGYSTPWGYFDFNRFHCHFSPRDWQRLINNNWGFRPKRLSFKLFNIQVKEVTQNEGTKTIANNLTSTIQVFTDSEYQLPYVLGSAHQGCLPPFPADVFMIPQYGYLTLNNGSQAVGRSSFYCLEYFPSQMLRTGNNFQFTYTFEDVPFHSSYAHSQSLDRLMNPLIDQYLYYLSRTQTTGGTANTQTLGFSQGGPNTMANQAKNWLPGPCYRQQRVSTTTGQNNNSNFAWTAGTKYHLNGRNSLANPGIAMATHKDDEERFFPSNGILIFGKQNAARDNADYSDVMLTSEEEIKTTNPVATEEYGIVADNLPERTAMSLPGTVNSQGALPGMVWQNRDVYLQGPIWAKIPHTDGNFHPSPLMGGFGLKHPPPQILIKNTPVPADPPTTFNQSKLNSFITQYSTGQVSVEIEWELQKENSKRWNPEIQYTSNYYKSTSVDFAVNTEGVYSEPRPIGTRYLTRNL

SEQ ID NO: 5218 - DNA, 2214 bp, Artificial Sequence
  Description of Artificial Sequence: Synthetic polynucleotide
atggctgccgatggttatcttccagattggctcgaggacaacctctctgagggcattcgcgagtggtgggcgctgaaacctggagccccgaagcccaaagccaaccagcaaaagcaggacgacggccggggtctggtgcttcctggctacaagtacctcggacccttcaacggactcgacaagggggagcccgtcaacgcggcggacgcagcggccctcgagcacgacaaggcctacgaccagcagctgcaggcgggtgacaatccgtacctgcggtataaccacgccgacgccgagtttcaggagcgtctgcaagaagatacgtcttttgggggcaacctcgggcgagcagtcttccaggccaagaagcgggttctcgaacctctcggtctggttgaggaaggcgctaagacggctcctggaaagaagagaccggtagagccatcaccccagcgttctccagactcctctacgggcatcggcaagaaaggccaacagcccgccagaaaaagactcaattttggtcagactggcgactcagagtcagttccagaccctcaacctctcggagaacctccagcagcgccctctggtgtgggacctaatacaatggctgcaggcggtggcgcaccaatggcagacaataacgaaggcgccgacggagtgggtagttcctcgggaaattggcattgcgattccacatggctgggcgacagagtcatcaccaccagcacccgaacctgggccctgcccacctacaacaaccacctctacaagcaaatctccaacgggacatcgggaggagccaccaacgacaacacctacttcggctacagcaccccctgggggtattttgactttaacagattccactgccacttttcaccacgtgactggcagcgactcatcaacaacaactggggattccggcccaagagactcagcttcaagctcttcaacatccaggtcaaggaggtcacgcagaatgaaggcaccaagaccatcgccaataacctcaccagcaccatccaggtgtttacggactcggagtaccagctgccgtacgttctcggctctgcccaccagggctgcctgcctccgttcccggcggacgtgttcatgattccccagtacggctacctaacactcaacaacggtagtcaggccgtgggacgctcctccttctactgcctggaatactttccttcgcagatgctgagaaccggcaacaacttccagtttacttacaccttcgaggacgtgcctttccacagcagctacgcccacagccagagcttggaccggctgatgaatcctctgattgaccagtacctgtactacttgtctcggactcaaacaacaggaggcacggcaaatacgcagactctgggcttcagccaaggtgggcctaatacaatggccaatcaggcaaagaactggctgccaggaccctgttaccgccaacaacgcgtctcaacgacaaccgggcaaaacaacaatagcaactttgcctggactgctgggaccaaataccatctgaatggaagaaattcattggctaatcctggcatcgctatggcaacacacaaagacgacgaggagcgtttttttcccagtaacgggatcctgatttttggcaaacaaaatgctgccagagacaatgcggattacagcgatgtcatgctcaccagcgaggaagaaatcaaaaccactaaccctgtggctacagaggaatacggtatcgtggcagataacttgagttttagtcgtgcggttctttgtgatggaactgtcaacagccagggggccttacccggtatggtctggcagaaccgggacgtgtacctgcagggtcccatctgggccaagattcctcacacggacggcaacttccacccgtctccgctgatgggcggctttggcctgaaacatcctccgcctcagatcctgatcaagaacacgcctgtacctgcggatcctccgaccaccttcaaccagtcaaagctgaactctttcatcacgcaatacagcaccggacaggtcagcgtggaaattgaatgggagctgcagaaggaaaacagcaagcgctggaaccccgagatccagtacacctccaactactacaaatctacaagtgtggactttgctgttaatacagaaggcgtgtactctgaaccccgccccattggcacccgttacctcacccgtaatctg

SEQ ID NO: 5219 - protein, 738 aa, Artificial Sequence
  Description of Artificial Sequence: Synthetic polypeptide
MAADGYLPDWLEDNLSEGIREWWALKPGAPKPKANQQKQDDGRGLVLPGYKYLGPFNGLDKGEPVNAADAAALEHDKAYDQQLQAGDNPYLRYNHADAEFQERLQEDTSFGGNLGRAVFQAKKRVLEPLGLVEEGAKTAPGKKRPVEPSPQRSPDSSTGIGKKGQQPARKRLNFGQTGDSESVPDPQPLGEPPAAPSGVGPNTMAAGGGAPMADNNEGADGVGSSSGNWHCDSTWLGDRVITTSTRTWALPTYNNHLYKQISNGTSGGATNDNTYFGYSTPWGYFDFNRFHCHFSPRDWQRLINNNWGFRPKRLSFKLFNIQVKEVTQNEGTKTIANNLTSTIQVFTDSEYQLPYVLGSAHQGCLPPFPADVFMIPQYGYLTLNNGSQAVGRSSFYCLEYFPSQMLRTGNNFQFTYTFEDVPFHSSYAHSQSLDRLMNPLIDQYLYYLSRTQTTGGTANTQTLGFSQGGPNTMANQAKNWLPGPCYRQQRVSTTTGQNNNSNFAWTAGTKYHLNGRNSLANPGIAMATHKDDEERFFPSNGILIFGKQNAARDNADYSDVMLTSEEEIKTTNPVATEEYGIVADNLSFSRAVLCDGTVNSQGALPGMVWQNRDVYLQGPIWAKIPHTDGNFHPSPLMGGFGLKHPPPQILIKNTPVPADPPTTFNQSKLNSFITQYSTGQVSVEIEWELQKENSKRWNPEIQYTSNYYKSTSVDFAVNTEGVYSEPRPIGTRYLTRNL

SEQ ID NO: 5220 - DNA, 2215 bp, Artificial Sequence
  Description of Artificial Sequence: Synthetic polynucleotide
atggctgccgatggttatcttccagattggctcgaggacactctctctgaaggaataagacagtggtggaagctcaaacctggcccaccaccaccaaagcccgcagagcggcataaggacgacagcaggggtcttgtgcttcctgggtacaagtacctcggacccttcaacggactcgacaagggagagccggtcaacgaggcagacgccgcggccctcgagcacgacaaagcctacgaccggcagctcgacagcggagacaacccgtacctcaagtacaaccacgccgacgccgagttccaggagcggctcaaagaagatacgtcttttgggggcaacctcgggcgagcagtcttccaggccaaaaagaggcttcttgaacctcttggtctggttgaggaagcggctaagacggctcctggaaagaagaggcctgtagagcactctcctgtggagccagactcctcctcgggaaccggaaaggcgggccagcagcctgcaagaaaaagattgaattttggtcagactggagacgcagactcagtcccagaccctcaaccaatcggagaacctcccgcagccccctcaggtgtgggatctcttacaatggctgcaggcggtggcgcaccaatggcagacaataacgagggcgccgacggagtgggtaattcctcgggaaattggcattgcgattccacatggatgggcgacagagtcatcaccaccagcacccgaacctgggccctgcccacctacaacaaccacctctacaagcaaatctccaacagcacatctggaggatcttcaaatgacaacgcctacttcggctacagcaccccctgggggtattttgactttaacagattccactgccacttttcaccacgtgactggcagcgactcatcaacaacaactggggattccggcccaagagactcagcttcaagctcttcaacatccaggtcaaggaggtcacgcagaatgaaggcaccaagaccatcgccaataacctcaccagcaccatccaggtgtttacggactcggagtaccagctgccgtacgttctcggctctgcccaccagggctgcctgcctccgttcccggcggacgtgttcatgattccccagtacggctacctaacactcaacaacggtagtcaggccgtgggacgctcctccttctactgcctggaatactttccttcgcagatgctgagaaccggcaacaacttccagtttacttacaccttcgaggacgtgcctttccacagcagctacgcccacagccagagcttggaccggctgatgaatcctctgattgaccagtacctgtactacttgtctcggactcaaacaacaggaggcacgacaaatacgcagactctgggcttcagccaaggtgggcctaatacaatggccaatcaggcaaagaactggctgccaggaccctgttaccgccagcagcgagtatcaaagacatctgcggataacaacaacagtgaatactcgtggactggagctaccaagtaccacctcaatggcagagactctctggtgaatccgggcccggccatggcaagccacaaggacgatgaagaaaagtttttttcctcagagcggggttctcatctttgggaagcaaggctcagagaaaacaaatgtggacattgaaaaggtcatgattacagacgaagaggaaatcaggacaaccaatcccgtggctacggagcagtatggttctgtatctaccaacctccagagaggcaacagacaagcagctaccgcagatgtcaacacacaaggcgttcttccaggcatggtctggcaggacagagatgtgtaccttcaggggcccatctgggcaaagattccacacacggacggacattttcacccctctcccctcatgggtggattcggacttaaacaccctccgcctcagatcctgatcaagaacacgcctgtacctgcggatcctccgaccaccttcaaccagtcaaagctgaactctttcatcacccagtattctactggccaagtcagcgtggagatcgagtgggagctgcagaaggaaaacagcaagcgctggaaccccgagatccagtacacctccaactactacaaatctacaagtgtggactttgctgttaatacagaaggcgtgtactctgaaccccgccccattggcacccgttacctcacccgtaatctgtaa

SEQ ID NO: 5221 - protein, 737 aa, Artificial Sequence
  Description of Artificial Sequence: Synthetic polypeptide
MAADGYLPDWLEDTLSEGIRQWWKLKPGPPPPKPAERHKDDSRGLVLPGYKYLGPFNGLDKGEPVNEADAAALEHDKAYDRQLDSGDNPYLKYNHADAEFQERLKEDTSFGGNLGRAVFQAKKRLLEPLGLVEEAAKTAPGKKRPVEHSPVEPDSSSGTGKAGQQPARKRLNFGQTGDADSVPDPQPIGEPPAAPSGVGSLTMAAGGGAPMADNNEGADGVGNSSGNWHCDSTWMGDRVITTSTRTWALPTYNNHLYKQISNSTSGGSSNDNAYFGYSTPWGYFDFNRFHCHFSPRDWQRLINNNWGFRPKRLSFKLFNIQVKEVTQNEGTKTIANNLTSTIQVFTDSEYQLPYVLGSAHQGCLPPFPADVFMIPQYGYLTLNNGSQAVGRSSFYCLEYFPSQMLKTGNNFQFTYTFEDVPFHSSYAHSQSLDRLMNPLIDQYLYYLSRTQTTGGTTNTQTLGFSQGGPNTMANQAKNWLPGPCYRQQRVSKTSADNNNSEYSWTGATKYHLNGRDSLVNPGPAMASHKDDEEKFFPQSGVLIFGKQGSEKTNVDIEKVMITDEEEIRTTNPVATEQYGSVSTNLQRGNRQAATADVNTQGVLPGMVWQDRDVYLQGPIWAKIPHTDGHFHPSPLMGGFGLKHPPPQILIKNTPVPADPPTTFNQSKLNSFITQYSTGQVSVEIEWELQKENSKRWNPEIQYTSNYYKSTSVDFAVNTEGVYSEPRPIGTRYLTRNL

SEQ ID NO: 5222 - protein, 737 aa, Artificial Sequence
  Description of Artificial Sequence: Synthetic polypeptide
MAADGYLPDWLEDTLSEGIRQWWKLKPGPPPPKPAERHKDDSRGLVLPGYKYLGPFNGLDKGEPVNEADAAALEHDKAYDRQLDSGDNPYLKYNHADAEFQERLKEDTSFGGNLGRAVFQAKKRLLEPLGLVEEAAKTAPGKKRPVEHSPVEPDSSSGTGKAGQQPARKRLNFGQTGDADSVPDPQPIGEPPAAPSGVGSLTMAAGGGAPMADNNEGADGVGNSSGNWHCDSTWMGDRVITTSTRTWALPTYNNHLYKQISNSTSGGSSNDNAYFGYSTPWGYFDFNRFHCHFSPRDWQRLINNNWGFRPKRLSFKLFNIQVKEVTQNEGTKTIANNLTSTIQVFTDSEYQLPYVLGSAHQGCLPPFPADVFMIPQYGYLTLNNGSQAVGRSSFYCLEYFPSQMLKTGNNFQFTYTFEDVPFHSSYAHSQSLDRLMNPLIDQYLYYLSRTQTTGGTTNTQTLGFSQGGPNTMANQAKNWLPGPCYRQQRVSKTSADNNNSEYSWTGATKYHLNGRDSLVNPGPAMASHKDDEEKFFPQSGVLIFGKQGSEKTNVDIEKVMITDEEEIRTTNPVATEQYGSVSTNLQQGNTQAATADVNTQGVLPGMVWQDRDVYLQGPIWAKIPHTDGHFHPSPLMGGFGLKHPPPQILIKNTPVPADPPTTFNQSKLNSFITQYSTGQVSVEIEWELQKENSKRWNPEIQYTSNYYKSTSVDFAVNTEGVYSEPRPIGTRYLTRNL

SEQ ID NO: 5223 - protein, 737 aa, Artificial Sequence
  Description of Artificial Sequence: Synthetic polypeptide
MAADGYLPDWLEDTLSEGIRQWWKLKPGPPPPKPAERHKDDSRGLVLPGYKYLGPFNGLDKGEPVNEADAAALEHDKAYDRQLDSGDNPYLKYNHADAEFQERLKEDTSFGGNLGRAVFQAKKRLLEPLGLVEEAAKTAPGKKRPVEHSPVEPDSSSGTGKAGQQPARKRLNFGQTGDADSVPDPQPIGEPPAAPSGVGSLTMAAGGGAPMADNNEGADGVGNSSGNWHCDSTWMGDRVITTSTRTWALPTYNNHLYKQISNSTSGGSSNDNAYFGYSTPWGYFDFNRFHCHFSPRDWQRLINNNWGFRPKRLSFKLFNIQVKEVTQNEGTKTIANNLTSTIQVFTDSEYQLPYVLGSAHQGCLPPFPADVFMIPQYGYLTLNNGSQAVGRSSFYCLEYFPSQMLRTGNNFQFTYTFEDVPFHSSYAHSQSLDRLMNPLIDQYLYYLSRTQTTGGTTNTQTLGFSQGGPNTMANQAKNWLPGPCYRQQRVSKTSADNNNSEYSWTGATKYHLNGRDSLVNPGPAMASHKDDEEKFFPQSGVLIFGKQGSEKTNVDIEKVMITDEEEIRTTNPVATEQYGSVSTNLQQGNTQAATADVNTQGVLPGMVWQDRDVYLQGPIWAKIPHTDGHFHPSPLMGGFGLKHPPPQILIKNTPVPADPPTTFNQSKLNSFITQYSTGQVSVEIEWELQKENSKRWNPEIQYTSNYYKSTSVDFAVNTEGVYSEPRPIGTRYLTRNL

SEQ ID NO: 5224 - DNA, 2214 bp, Artificial Sequence
  Description of Artificial Sequence: Synthetic polynucleotide
atggctgccgatggttatcttccagattggctcgaggacaaccttagtgaaggaattcgcgagtggtgggctttgaaacctggagcccctcaacccaaggcaaatcaacaacatcaagacaacgctcgaggtcttgtgcttccgggttacaaataccttggacccggcaacggactcgacaagggggagccggtcaacgcagcagacgcggcggccctcgagcacgacaaggcctacgaccagcagctgcaggcgggtgacaatccgtacctgcggtataaccacgccgacgccgagtttcaggagcgtctgcaagaagatacgtcttttgggggcaaccttggcagagcagtcttccaggccaaaaagaggatccttgagcctcttggtctggttgaggaagcagctaaaacggctcctggaaagaagaggcctgtagatcagtctcctcaggaaccggactcatcatctggtgttggcaaatcgggcaaacagcctgccagaaaaagactaaatttcggtcagactggcgactcagagtcagtcccagaccctcaacctctcggagaaccaccagcagcccccacaagtttgggatctaatacaatggcttcaggcggtggcgcaccaatggcagacaataacgagggtgccgatggggtgggtagttcctcgggaaattggcattgcgattcccaatggctgggggacagagtcatcaccaccagcacccgaacctgggccctgcccacctacaacaatcacctctacaagcaaatctccaacgggacatcgggaggagccaccaacgacaacacctacttcggctacagcaccccctgggggtattttgactttaacagattccactgccacttttcaccacgtgactggcagcgactcatcaacaacaactggggattccggcccaagagactcagcttcaagctcttcaacatccaggtcaaggaggtcacgcagaatgaaggcaccaagaccatcgccaataacctcaccagcaccatccaggtgtttacggactcggagtaccagctgccgtacgttctcggctctgcgcaccagggctgcctccctccgttcccggcggacgtgttcatgattccgcaatacggctacctgacgctcaacaatggcagccaagccgtgggacgttcatccttttactgcctggaatatttcccttctcagatgctgagaacgggcaacaactttaccttcagctacacctttgaggaagtgcctttccacagcagctacgcgcacagccagagcttggaccggctgatgaatcctctgattgaccagtacctgtactacttgtctcggactcaaacaacaggaggcacggcaaatacgcagactctgggcttcagccaaggtgggcctaatacaatggccaatcaggcaaagaactggctgccaggaccctgttaccgccaacaacgcgtctcaacgacaaccgggcaaaacaacaatagcaactttgcctggactgctgggaccaaataccatctgaatggaagaaattcattggctaatcctggcatcgctatggcaacacacaaagacgacgaggagcgtttttttcccagtaacgggatcctgatttttggcaaacaaaatgctgccagagacaatgcggattacagcgatgtcatgctcaccagcgaggaagaaatcaaaaccactaaccctgtggctacagaggaatacggtatcgtggcagataacttgcagcagcaaaacacggctcctcaaattggaactgtcaacagccagggggccttacccggtatggtctggcagaaccgggacgtgtacctgcagggtcccatctgggccaagattcctcacacggacggcaacttccacccgtctccgctgatgggcggctttggcctgaaacatcctccgcctcagatcctgatcaagaacacgcctgtacctgcggatcctccgaccaccttcaaccagtcaaagctgaactctttcatcacgcaatacagcaccggacaggtcagcgtggagatcgagtgggagctgcagaaggaaaacagcaagcgctggaacccggagatccagtacacttccaactattacaagtctaataatgttgaatttgctgttaatactgaaggtgtatatagtgaaccccgccccattggcaccagatacctgactcgtaatctgtaa

SEQ ID NO: 5225 - protein, 737 aa, Artificial Sequence
  Description of Artificial Sequence: Synthetic polypeptide
MAADGYLPDWLEDNLSEGIREWWALKPGAPQPKANQQHQDNARGLVLPGYKYLGPGNGLDKGEPVNAADAAALEHDKAYDQQLQAGDNPYLRYNHADAEFQERLQEDTSFGGNLGRAVFQAKKRILEPLGLVEEAAKTAPGKKRPVDQSPQEPDSSSGVGKSGKQPARKRLNFGQTGDSESVPDPQPLGEPPAAPTSLGSNTMASGGGAPMADNNEGADGVGSSSGNWHCDSQWLGDRVITTSTRTWALPTYNNHLYKQISNGTSGGATNDNTYFGYSTPWGYFDFNRFHCHFSPRDWQRLINNNWGFRPKRLSFKLFNIQVKEVTQNEGTKTIANNLTSTIQVFTDSEYQLPYVLGSAHQGCLPPFPADVFMIPQYGYLTLNNGSQAVGRSSFYCLEYFPSQMLRTGNNFTFSYTFEEVPFHSSYAHSQSLDRLMNPLIDQYLYYLSRTQTTGGTANTQTLGFSQGGPNTMANQAKNWLPGPCYRQQRVSTTTGQNNNSNFAWTAGTKYHLNGRNSLANPGIAMATHKDDEERFFPSNGILIFGKQNAARDNADYSDVMLTSEEEIKTTNPVATEEYGIVADNLQQQNTAPQIGTVNSQGALPGMVWQNRDVYLQGPIWAKIPHTDGNFHPSPLMGGFGLKHPPPQILIKNTPVPADPPTTFNQSKLNSFITQYSTGQVSVEIEWELQKENSKRWNPEIQYTSNYYKSNNVEFAVNTEGVYSEPRPIGTRYLTRNL

SEQ ID NO: 5226 - DNA, 2211 bp, Artificial Sequence
  Description of Artificial Sequence: Synthetic polynucleotide
atggctgccgatggttatcttccagattggctcgaggacaacctctctgagggcattcgcgagtggtgggacttgaaacctggagccccgaagcccaaagccaaccagcaaaagcaggacgacggccggggtctggtgcttcctggctacaagtacctcggacccttcaacggactcgacaagggggagcccgtcaacgcggcggacgcagcggccctcgagcacgacaaggcctacgaccagcagctcaaagcgggtgacaatccgtacctgcggtataaccacgccgacgccgagtttcaggagcgtctgcaagaagatacgtcttttgggggcaacctcgggcgagcagtcttccaggccaagaagcgggttctcgaacctctcggtctggttgaggaaggcgctaagacggctcctggaaagaaacgtccggtagagcagtcgccacaagagccagactcctcctcgggcatcggcaagacaggccagcagcccgctaaaaagagactcaattttggtcagactggcgactcagagtcagtccccgacccacaacctctcggagaacctccagcaacccccgctgctgtgggacctactacaatggcttcaggcggtggcgcaccaatggcagacaataacgaaggcgccgacggagtgggtaatgcctcaggaaattggcattgcgattccacatggctgggcgacagagtcatcaccaccagcacccgaacatgggccttgcccacctataacaaccacctctacaagcaaatctccagtgcttcaacgggggccagcaacgacaaccactacttcggctacagcaccccctgggggtattttgatttcaacagattccactgccatttctcaccacgtgactggcagcgactcatcaacaacaattggggattccggcccaagagactcaacttcaagctcttcaacatccaagtcaaggaggtcacgacgaatgatggcgtcacgaccatcgctaataaccttaccagcacggttcaagtcttctcggactcggagtaccagctgccgtacgttctcggctctgcccaccagggctgcctgcctccgttcccggcggacgtgttcatgattccccagtacggctacctaacactcaacaacggtagtcaggccgtgggacgctcctccttctactgcctggaatactttccttcgcagatgctgagaaccggcaacaacttccagtttacttacaccttcgaggacgtgcctttccacagcagctacgcccacagccagagcttggaccggctgatgaatcctctgattgaccagtacctgtactacttgtctcggactcaaacaacaggaggcacggcaaatacgcagactctgggcttcagccaaggtgggcctaatacaatggccaatcaggcaaagaactggctgccaggaccctgttaccgccaacaacgcgtctcaacgacaaccgggcaaaacaacaatagcaattttacctggactggtgcttcaaaatataacctcaatgggcgtgaatccatcatcaaccctggcactgctatggcctcacacaaagacgacgaagacaagttctttcccatgagcggtgtcatgatttttggaaaagagagcgccggagcttcaaacactgcattggacaatgtcatgattacagacgaagaggaaattaaagccactaaccctgtggccaccgaaagatttgggaccgtggcagtcaatttccagagcagcagcacagaccctgcgaccggagatgtgcatgctatgggagcattacctggcatggtgtggcaagatagagacgtgtacctgcagggtcccatttgggccaaaattcctcacacagatggacactttcacccgtctcctcttatgggcggctttggactcaagaacccgcctcctcagatcctcatcaaaaacacgcctgttcctgcgaatcctccggcggagttttcagctacaaagtttgcttcattcatcacccaatactccacaggacaagtgagtgtggaaattgaatgggagctgcagaaagaaaacagcaagcgctggaatcccgaagtgcagtacacatccaattatgcaaaatctgccaacgttgattttactgtggacaacaatggactttatactgagcctcgccccattggcacccgttacctcacccgtcccctgtaa

SEQ ID NO: 5227 - protein, 736 aa, Artificial Sequence
  Description of Artificial Sequence: Synthetic polypeptide
MAADGYLPDWLEDNLSEGIREWWDLKPGAPKPKANQQKQDDGRGLVLPGYKYLGPFNGLDKGEPVNAADAAALEHDKAYDQQLKAGDNPYLRYNHADAEFQERLQEDTSFGGNLGRAVFQAKKRVLEPLGLVEEGAKTAPGKKRPVEQSPQEPDSSSGIGKTGQQPAKKRLNFGQTGDSESVPDPQPLGEPPATPAAVGPTTMASGGGAPMADNNEGADGVGNASGNWHCDSTWLGDRVITTSTRTWALPTYNNHLYKQISSASTGASNDNHYFGYSTPWGYFDFNRFHCHFSPRDWQRLINNNWGFRPKRLNFKLFNIQVKEVTTNDGVTTIANNLTSTVQVFSDSEYQLPYVLGSAHQGCLPPFPADVFMIPQYGYLTLNNGSQAVGRSSFYCLEYFPSQMLRTGNNFQFTYTFEDVPFHSSYAHSQSLDRLMNPLIDQYLYYLSRTQTTGGTANTQTLGFSQGGPNTMANQAKNWLPGPCYRQQRVSTTTGQNNNSNFTWTGASKYNLNGRESIINPGTAMASHKDDEDKFFPMSGVMIFGKESAGASNTALDNVMITDEEEIKATNPVATERFGTVAVNFQSSSTDPATGDVHAMGALPGMVWQDRDVYLQGPIWAKIPHTDGHFHPSPLMGGFGLKNPPPQILIKNTPVPANPPAEFSATKFASFITQYSTGQVSVEIEWELQKENSKRWNPEVQYTSNYAKSANVDFTVDNNGLYTEPRPIGTRYLTRPL

SEQ ID NO: 5228 - DNA, 2211 bp, Artificial Sequence
  Description of Artificial Sequence: Synthetic polynucleotide
atggctgctgacggttatcttccagattggctcgaggacaacctttctgaaggcattcgagagtggtgggcgctgcaacctggagcccctaaacccaaggcaaatcaacaacatcaggacaacgctcggggtcttgtgcttccgggttacaaatacctcggacccggcaacggactcgacaagggggaacccgtcaacgcagcggacgcggcagccctcgagcacgacaaggcctacgaccagcagctcaaggccggtgacaacccctacctcaagtacaaccacgccgacgccgagttccaggagcggctcaaagaagatacgtcttttgggggcaacctcgggcgagcagtcttccaggccaaaaagaggcttcttgaacctcttggtctggttgaggaagcggctaagacggctcctggaaagaagaggcctgtagatcagtctcctcaggaaccggactcatcatctggtgttggcaaatcgggcaaacagcctgccagaaaaagactaaatttcggtcagactggcgactcagagtcagtcccagaccctcaacctctcggagaaccaccagcagcccccacaagtttgggatctaatacaatggcttcaggcggtggcgcaccaatggcagacaataacgagggtgccgatggagtgggtaattcctcaggaaattggcattgcgattcccaatggctgggcgacagagtcatcaccaccagcaccagaacctgggccctgcccacttacaacaaccatctctacaagcaaatctccagccaatcaggagcttcaaacgacaaccactactttggctacagcaccccttgggggtattttgactttaacagattccactgccacttctcaccacgtgactggcagcgactcattaacaacaactggggattccggcccaagaaactcagcttcaagctcttcaacatccaagttaaagaggtcacgcagaacgatggcacgacgactattgccaataaccttaccagcacggttcaagtgtttacggactcggagtatcagctcccgtacgtgctcgggtcggcgcaccaaggctgtctcccgccgtttccagcggacgtcttcatggtccctcagtatggatacctcaccctgaacaacggaagtcaagcggtgggacgctcatccttttactgcctggagtacttcccttcgcagatgctaaggactggaaataacttccaattcagctataccttcgaggatgtaccttttcacagcagctacgctcacagccagagtttggatcgcttgatgaatcctcttattgatcagtatctgtactacctgaacagaacgcaaggaacaacctctggaacaaccaaccaatcacggctgctttttagccaggctgggcctcagtctatgtctttgcaggccagaaattggctacctgggccctgctaccggcaacagagactttcaaagactgctaacgacaacaacaacagtaactttccttggacagcggccagcaaatatcatctcaatggccgcgactcgctggtgaatccaggaccagctatggccagtcacaaggacgatgaagaaaaatttttccctatgcacggcaatctaatatttggcaaagaagggacaacggcaagtaacgcagaattagataatgtaatgattacggatgaagaagagattcgtaccaccaatcctgtggcaacagagcagtatggaactgtggcaaataacttgcagagctcaaatacagctcccacgactagaactgtcaatgatcagggggccttacctggcatggtgtggcaagatcgtgacgtgtaccttcaaggacctatctgggcaaagattcctcacacggatggacactttcatccttctcctctgatgggaggctttggactgaaacatccgcctcctcaaatcatgatcaaaaatactccggtaccggcaaatcctccgacgactttcagcccggccaagtttgcttcatttatcactcagtactccactggacaggtcagcgtggaaattgagtgggagctacagaaagaaaacagcaaacgttggaatccagagattcagtacacttccaactacaacaagtctgttaatgtggactttactgtagacactaatggtgtttatagtgaacctcgccccattggcacccgttaccttacccgtcccctgtaa

SEQ ID NO: 5229 - protein, 736 aa, Artificial Sequence
  Description of Artificial Sequence: Synthetic polypeptide
MAADGYLPDWLEDNLSEGIREWWALQPGAPKPKANQQHQDNARGLVLPGYKYLGPGNGLDKGEPVNAADAAALEHDKAYDQQLKAGDNPYLKYNHADAEFQERLKEDTSFGGNLGRAVFQAKKRLLEPLGLVEEAAKTAPGKKRPVDQSPQEPDSSSGVGKSGKQPARKRLNFGQTGDSESVPDPQPLGEPPAAPTSLGSNTMASGGGAPMADNNEGADGVGNSSGNWHCDSQWLGDRVITTSTRTWALPTYNNHLYKQISSQSGASNDNHYFGYSTPWGYFDFNRFHCHFSPRDWQRLINNNWGFRPKKLSFKLFNIQVKEVTQNDGTTTIANNLTSTVQVFTDSEYQLPYVLGSAHQGCLPPFPADVFMVPQYGYLTLNNGSQAVGRSSFYCLEYFPSQMLRTGNNFQFSYTFEDVPFHSSYAHSQSLDRLMNPLIDQYLYYLNRTQGTTSGTTNQSRLLFSQAGPQSMSLQARNWLPGPCYRQQRLSKTANDNNNSNFPWTAASKYHLNGRDSLVNPGPAMASHKDDEEKFFPMHGNLIFGKEGTTASNAELDNVMITDEEEIRTTNPVATEQYGTVANNLQSSNTAPTTRTVNDQGALPGMVWQDRDVYLQGPIWAKIPHTDGHFHPSPLMGGFGLKHPPPQIMIKNTPVPANPPTTFSPAKFASFITQYSTGQVSVEIEWELQKENSKRWNPEIQYTSNYNKSVNVDFTVDTNGVYSEPRPIGTRYLTRPL

SEQ ID NO: 5230 - DNA, 2211 bp, Artificial Sequence
  Description of Artificial Sequence: Synthetic polynucleotide
atggctgccgatggttatcttccagattggctcgaggacaaccttagtgaaggaattcgcgagtggtgggctttgaaacctggagcccctcaacccaaggcaaatcaacaacatcaagacaacgctcgaggtcttgtgcttccgggttacaaataccttggacccggcaacggactcgacaagggggagccggtcaacgcagcagacgcggcggccctcgagcacgacaaggcctacgaccagcagctcaaggccggagacaacccgtacctcaagtacaaccacgccgacgccgagttccaggagcggctcaaagaagatacgtcttttgggggcaacctcgggcgagcagtcttccaggccaaaaagaggcttcttgaacctcttggtctggttgaggaagcggctaagacggctcctggaaagaagagaccggtagagccatcaccccagcgttctccagactcctctacgggcatcggcaagaaaggccaacagcccgctaaaaagagactcaattttggtcagactggcgactcagagtcagtccccgacccacaacctctcggagaacctccagcaacccccgctgctgtgggacctactacaatggcttcaggcggtggcgcaccaatggcagacaataacgagggtgccgatggagtgggtaattcctcaggaaattggcattgcgattcccaatggctgggcgacagagtcatcaccaccagcaccagaacctgggccctgcccacttacaacaaccatctctacaagcaaatctccagccaatcaggagcttcaaacgacaaccactactttggctacagcaccccttgggggtattttgactttaacagattccactgccacttttcaccacgtgactggcaaagactcatcaacaacaactggggattccgacccaagagactcaacttcaagctcttcaacatccaagtcaaggaggtcacgacgaatgatggcgtcacgaccatcgctaataaccttaccagcacggttcaagtcttctcggactcggagtaccagttgccgtacgtcctcggctctgcgcaccagggctgcctccctccgttcccggcggacgtgttcatgattccgcagtacggctacctaacgctcaacaatggcagccaagccgtgggacgttcatccttttactgcctggaatatttcccttctcagatgctgagaacgggcaacaactttaccttcagctacacttttgaggacgttcctttccacagcagctacgctcacagccagagtctggaccgtctcatgaatcctctcatcgaccagtacctgtattacttgagcagaacaaacactccaagtggaaccaccacgcagtcaaggcttcagttttctcaggccggagcgagtgacattcgggaccagtctaggaactggcttcctggaccctgttaccgccagcagcgcgtttctaaaacaaaaacagacaacaacaacagcaattttacctggactggtgcttcaaaatataaccttaatgggcgtgaatctataatcaaccctggcactgctatggcctcacacaaagacgacgaagacaagttctttcccatgagcggtgtcatgatttttggaaaagagagcgccggagcttcaaacactgcattggacaatgtcatgattacagacgaagaggaaattaaagccactaaccctgtggccaccgaaagatttgggaccgtggcagtcaatttccagagcagcagcacagaccctgcgaccggagatgtgcatgttatgggagccttacctggaatggtgtggcaagacagagacgtatacctgcagggtcctatttgggccaaaattcctcacacggatggacactttcacccgtctcctcttatgggcggctttggactcaagaacccgcctcctcagatcctcatcaaaaacacgcctgttcctgcgaatcctccggcggagttttcagctacaaagtttgcttcattcatcacccaatactccacaggacaagtgagtgtggaaattgaatgggagctgcagaaagaaaacagcaagcgctggaatcccgaagtgcagtacacatccaattatgcaaaatctgccaacgttgattttactgtggacaacaatggactttatactgagcctcgccccattggcacccgttaccttacccgtcccctgtaa

SEQ ID NO: 5231 - protein, 736 aa, Artificial Sequence
  Description of Artificial Sequence: Synthetic polypeptide
MAADGYLPDWLEDNLSEGIREWWALKPGAPQPKANQQHQDNARGLVLPGYKYLGPGNGLDKGEPVNAADAAALEHDKAYDQQLKAGDNPYLKYNHADAEFQERLKEDTSFGGNLGRAVFQAKKRLLEPLGLVEEAAKTAPGKKRPVEPSPQRSPDSSTGIGKKGQQPAKKRLNFGQTGDSESVPDPQPLGEPPATPAAVGPTTMASGGGAPMADNNEGADGVGNSSGNWHCDSQWLGDRVITTSTRTWALPTYNNHLYKQISSQSGASNDNHYFGYSTPWGYFDFNRFHCHFSPRDWQRLINNNWGFRPKRLNFKLFNIQVKEVTTNDGVTTIANNLTSTVQVFSDSEYQLPYVLGSAHQGCLPPFPADVFMIPQYGYLTLNNGSQAVGRSSFYCLEYFPSQMLRTGNNFTFSYTFEDVPFHSSYAHSQSLDRLMNPLIDQYLYYLSRTNTPSGTTTQSRLQFSQAGASDIRDQSRNWLPGPCYRQQRVSKTKTDNNNSNFTWTGASKYNLNGRESIINPGTAMASHKDDEDKFFPMSGVMIFGKESAGASNTALDNVMITDEEEIKATNPVATERFGTVAVNFQSSSTDPATGDVHVMGALPGMVWQDRDVYLQGPIWAKIPHTDGHFHPSPLMGGFGLKNPPPQILIKNTPVPANPPAEFSATKFASFITQYSTGQVSVEIEWELQKENSKRWNPEVQYTSNYAKSANVDFTVDNNGLYTEPRPIGTRYLTRPL

SEQ ID NO: 5232 - DNA, 2211 bp, Artificial Sequence
  Description of Artificial Sequence: Synthetic polynucleotide
atggctgccgatggttatcttccagattggctcgaggacaacctctctgagggcattcgcgagtggtgggacttgaaacctggagcccctaaacccaaggcaaatcaacaacatcaggacaacgctcgaggtcttgtgcttccgggttacaaataccttggacccggcaacggactcgacaagggggagccggtcaacgcagcagacgcggcggccctcgagcacgacaaggcctacgaccagcagctcaaggccggagacaacccgtacctcaagtacaaccacgccgacgccgagttccaggagcggctcaaagaagatacgtcttttgggggcaacctcgggcgagcagtcttccaggccaaaaagaggcttcttgaacctcttggtctggttgaggaagcggctaagacggctcctggaaagaagagaccggtagagccatcaccccagcgttctccagactcctctacgggcatcggcaagaaaggccaacagcccgctaaaaagagactcaattttggtcagactggcgactcagagtcagtccccgacccacaacctctcggagaacctccagcaacccccgctgctgtgggacctactacaatggcttcaggcggtggcgcaccaatggcagacaataacgagggtgccgatggagtgggtaattcctcaggaaattggcattgcgattcccaatggctgggcgacagagtcatcaccaccagcaccagaacctgggccctgcccacttacaacaaccatctctacaagcaaatctccagccaatcaggagcttcaaacgacaaccactactttggctacagcaccccttgggggtattttgactttaacagattccactgccacttttcaccacgtgactggcaaagactcatcaacaacaactggggattccgacccaagagactcaacttcaagctcttcaacatccaagtcaaggaggtcacgacgaatgatggcgtcacgaccatcgctaataaccttaccagcacggttcaagtcttctcggactcggagtaccagttgccgtacgtcctcggctctgcgcaccagggctgcctccctccgttcccggcggacgtgttcatgattccgcagtacggctacctaacgctcaacaatggcagccaagccgtgggacgttcatccttttactgcctggaatatttcccttctcagatgctgagaacgggcaacaactttaccttcagctacacttttgaggacgttcctttccacagcagctacgctcacagccagagtctggaccgtctcatgaatcccctcatcgaccagtacctgtattacttgagcagaacaaacactccaagtggaaccaccacgcagtcaaggcttcagttttctcaggccggagcgagtgacattcgggaccagtctaggaactggcttcctggaccctgttaccggcagcagcgcgtttctaaaacaaaaacagacaacaacaacagcaactttacctggactggtgcttcaaaatataaccttaatgggcgtgaatctataatcaaccctggcactgctatggcctcacacaaagacgacgaagacaagttctttcccatgagcggtgtcatgatttttggaaaggagagcgccggagcttcaaacactgcattggacaatgtcatgatcacagacgaagaggaaatcaaagccactaaccccgtggccaccgaaagatttgggactgtggcagtcaatctccagagcagcagcacagaccctgcgaccggagatgtgcatgttatgggagccttacctggaatggtgtggcaagacagagacgtgtacctgcagggtcctatttgggccaaaattcctcacacggatggacactttcacccgtctcctctcatgggcggctttggacttaagcacccgcctcctcagatcctcatcaaaaacacgcctgttcctgcgaatcctccggcagagttttcggctacaaagtttgcttcattcatcacccagtattccacaggacaagtgagtgtggaaattgaatgggagctgcagaaagaaaacagcaagcgctggaatcccgaagtgcagtacacatccaattatgcaaaatctgccaacgttgattttactgtggacaacaatggactttatactgagcctcgccccattggcacccgttacctcacccgtcccctgtaa

SEQ ID NO: 5233 - protein, 736 aa, Artificial Sequence
  Description of Artificial Sequence: Synthetic polypeptide
MAADGYLPDWLEDNLSEGIREWWDLKPGAPKPKANQQHQDNARGLVLPGYKYLGPGNGLDKGEPVNAADAAALEHDKAYDQQLKAGDNPYLKYNHADAEFQERLKEDTSFGGNLGRAVFQAKKRLLEPLGLVEEAAKTAPGKKRPVEPSPQRSPDSSTGIGKKGQQPAKKRLNFGQTGDSESVPDPQPLGEPPATPAAVGPTTMASGGGAPMADNNEGADGVGNSSGNWHCDSQWLGDRVITTSTRTWALPTYNNHLYKQISSQSGASNDNHYFGYSTPWGYFDFNRFHCHFSPRDWQRLINNNWGFRPKRLNFKLFNIQVKEVTTNDGVTTIANNLTSTVQVFSDSEYQLPYVLGSAHQGCLPPFPADVFMIPQYGYLTLNNGSQAVGRSSFYCLEYFPSQMLRTGNNFTFSYTFEDVPFHSSYAHSQSLDRLMNPLIDQYLYYLSRTNTPSGTTTQSRLQFSQAGASDIRDQSRNWLPGPCYRQQRVSKTKTDNNNSNFTWTGASKYNLNGRESIINPGTAMASHKDDEDKFFPMSGVMIFGKESAGASNTALDNVMITDEEEIKATNPVATERFGTVAVNLQSSSTDPATGDVHVMGALPGMVWQDRDVYLQGPIWAKIPHTDGHFHPSPLMGGFGLKHPPPQILIKNTPVPANPPAEFSATKFASFITQYSTGQVSVEIEWELQKENSKRWNPEVQYTSNYAKSANVDFTVDNNGLYTEPRPIGTRYLTRPL

SEQ ID NO: 5234 - DNA, 2214 bp, Artificial Sequence
  Description of Artificial Sequence: Synthetic polynucleotide
atggctgccgatggttatcttccagattggctcgaggacaaccttagtgaaggaattcgcgagtggtgggctttgaaacctggagcccctcaacccaaggcaaatcaacaacatcaagacaacgctcgaggtcttgtgcttccgggttacaaataccttggacccggcaacggactcgacaagggggagccggtcaacgcagcagacgcggcggccctcgagcacgacaaggcctacgaccagcagctgcaggcgggtgacaatccgtacctgcggtataaccacgccgacgccgagtttcaggagcgtctgcaagaagatacgtcttttgggggcaaccttggcagagcagtcttccaggccaaaaagaggatccttgagcctcttggtctggttgaggaagcagctaaaacggctcctggaaagaagaggcctgtagatcagtctcctcaggaaccggactcatcatctggtgttggcaaatcgggcaaacagcctgccagaaaaagactaaatttcggtcagactggcgactcagagtcagtcccagaccctcaacctctcggagaaccaccagcagcccccacaagtttgggatctaatacaatggcttcaggcggtggcgcaccaatggcagacaataacgagggtgccgatggggtgggtagttcctcgggaaattggcattgcgattcccaatgactgggggacagagtcatcaccaccagcacccgaacctgggccctgcccacctacaacaatcacctctacaagcaaatctccaacgggacatcgggaggagccaccaacgacaacacctacttcggctacagcaccccctgggggtattttgactttaacagattccactgccacttttcaccacgtgactggcagcgactcatcaacaacaactggggattccggcccaagagactcagcttcaagctcttcaacatccaggtcaaggaggtcacgcagaatgaaggcaccaagaccatcgccaataacctcaccagcaccatccaggtgtttacggactcggagtaccagctgccgtacgttctcggctctgcgcaccagggctgcctccctccgttcccggcggacgtgttcatgattccgcaatacggctacctgacgctcaacaatggcagccaagccgtgggacgttcatccttttactgcctggaatatttcccttctcagatgctgagaacgggcaacaactttaccttcagctacacctttgaggaagtgcctttccacagcagctacgcgcacagccagagcttggaccggctgatgaatcctctgattgaccagtacctgtactacttgtctcggactcaaacaacaggaggcacggcaaatacgcagactctgggcttcagccaaggtgggcctaatacaatggccaatcaggcaaagaactggctgccaggaccctgttaccgccaacaacgcgtctcaacgacaaccgggcaaaacaacaatagcaactttgcctggactgctgggaccaaataccatctgaatggaagaaattcattggctaatcctggcatcgctatggcaacacacaaagacgacgaggagcgtttttttcccagtaacgggatcctgatttttggcaaacaaaatgctgccagagacaatgcggattacagcgatgtcatgctcaccagcgaggaagaaatcaaaaccactaaccctgtggctacagaggaatacggtatcgtggcagataacttgcagcagcaaaacacggctcctcaaattggaactgtcaacagccagggggccttacccggtatggtctggcagaaccgggacgtgtacctgcagggtcccatctgggccaagattcctcacacggacggcaacttccacccgtctccgctgatgggcggctttggcctgaaacatcctccgcctcagatcctgatcaagaacacgcctgtacctgcggatcctccgaccaccttcaaccagtcaaagctgaactctttcatcacgcaatacagcaccggacaggtcagcgtggagatcgagtgggagctgcagaaggaaaacagcaagcgctggaacccggagatccagtacacttccaactattacaagtctaataatgttgaatttgctgttaatactgaaggtgtatatagtgaaccccgccccattggcaccagatacctgactcgtaatctgtaa

SEQ ID NO: 5235 - protein, 736 aa, Artificial Sequence
  Description of Artificial Sequence: Synthetic polypeptide
MAADGYLPDWLEDNLSEGIREWWALKPGAPQPKANQQHQDNARGLVLPGYKYLGPGNGLDKGEPVNAADAAALEHDKAYDQQLQAGDNPYLRYNHADAEFQERLQEDTSFGGNLGRAVFQAKKRILEPLGLVEEAAKTAPGKKRPVDQSPQEPDSSSGVGKSGKQPARKRLNFGQTGDSESVPDPQPLGEPPAAPTSLGSNTMASGGGAPMADNNEGADGVGSSSGNWHCDSQLGDRVITTSTRTWALPTYNNHLYKQISNGTSGGATNDNTYFGYSTPWGYFDFNRFHCHFSPRDWQRLINNNWGFRPKRLSFKLFNIQVKEVTQNEGTKTIANNLTSTIQVFTDSEYQLPYVLGSAHQGCLPPFPADVFMIPQYGYLTLNNGSQAVGRSSFYCLEYFPSQMLRTGNNFTFSYTFEEVPFHSSYAHSQSLDRLMNPLIDQYLYYLSRTQTTGGTANTQTLGFSQGGPNTMANQAKNWLPGPCYRQQRVSTTTGQNNNSNFAWTAGTKYHLNGRNSLANPGIAMATHKDDEERFFPSNGILIFGKQNAARDNADYSDVMLTSEEEIKTTNPVATEEYGIVADNLQQQNTAPQIGTVNSQGALPGMVWQNRDVYLQGPIWAKIPHTDGNFHPSPLMGGFGLKHPPPQILIKNTPVPADPPTTFNQSKLNSFITQYSTGQVSVEIEWELQKENSKRWNPEIQYTSNYYKSNNVEFAVNTEGVYSEPRPIGTRYLTRNL

SEQ ID NO: 5236 - DNA, 2214 bp, Artificial Sequence
  Description of Artificial Sequence: Synthetic polynucleotide
atggctgccgatggttatcttccagattggctcgaggacaaccttagtgaaggaattcgcgagtggtgggctttgaaacctggagcccctcaacccaaggcaaatcaacaacatcaagacaacgctcgaggtcttgtgcttccgggttacaaataccttggacccggcaacggactcgacaagggggagccggtcaacgcagcagacgcggcggccctcgagcacgacaaggcctacgaccagcagctgcaggcgggtgacaatccgtacctgcggtataaccacgccgacgccgagtttcaggagcgtctgcaagaagatacgtcttttgggggcaaccttggcagagcagtcttccaggccaaaaagaggatccttgagcctcttggtctggttgaggaagcagctaaaacggctcctggaaagaagaggcctgtagatcagtctcctcaggaaccggactcatcatctggtgttggcaaatcgggcaaacagcctgccagaaaaagactaaatttcggtcagactggcgactcagagtcagtcccagaccctcaacctctcggagaaccaccagcagcccccacaagtttgggatctaatacaatggcttcaggcggtggcgcaccaatggcagacaataacgagggtgccgatggggtgggtagttcctcgggaaattggcattgcgattcccaatggctgggggacagagtcatcaccaccagcacccgaacctgggccctgcccacctacaacaatcacctctacaagcaaatctccaacgggacatcgggaggagccaccaacgacaacacctacttcggctacagcaccccctgggggtattttgactttaacagattccactgccacttttcaccacgtgactggcagcgactcatcaacaacaactggggattccggcccaagagactcagcttcaagctcttcaacatccaggtcaaggaggtcacgcagaatgaaggcaccaagaccatcgccaataacctcaccagcaccatccaggtgtttacggactcggagtaccagctgccgtacgttctcggctctgcgcaccagggctgcctccctccgttcccggcggacgtgttcatgattccgcaatacggctacctgacgctcaacaatggcagccaagccgtgggacgttcatccttttactgcctggaatatttcccttctcagatgctgagaacgggcaacaactttaccttcagctacacctttgaggaagtgccttttcacagcagctacgcgcacagccagagcttggaccggctgatgaatcctctgattgaccagtacctgtactacttgtctcggactcaaacaacaggaggcacggcaaatacgcagactctgggcttcagccaaggtgggcctaatacaatggccaatcaggcaaagaactggctgccaggaccctgttaccgccaacaacgcgtctcaacgacaaccgggcaaaacaacaatagcaactttgcctggactgctgggaccaaataccatctgaatggaagaaattcattggctaatcctggcatcgctatggcaacacacaaagacgacgaggagcgtttttttcccagtaacgggatcctgatttttggcaaacaaaatgctgccagagacaatgcggattacagcgatgtcatgctcaccagcgaggaagaaatcaaaaccactaaccctgtggctacagaggaatacggtatcgtggcagataacttgcagcagcaaaacacggctcctcaaattggaactgtcaacagccagggggccttacccggtatggtctggcagaaccgggacgtgtacctgcagggtcccatctgggccaagattcctcacacggacggcaacttccacccgtctccgctgatgggcggctttggcctgaaacatcctccgcctcagatcctgatcaagaacacgcctgtacctgcggatcctccgaccaccttcaaccagtcaaagctgaactctttcatcacgcaatacagcaccggacaggtcagcgtggagatcgagtgggagctgcagaaggaaaacagcaagcgctggaacccggagatccagtacacttccaactattacaagtctaataatgttgaatttgctgttaatactgaaggtgtatatagtgaaccccgccccattggcaccagatacctgactcgtaatctgtaa

SEQ ID NO: 5237 - protein, 737 aa, Artificial Sequence; identical to SEQ ID NO: 5225
  Description of Artificial Sequence: Synthetic polypeptide

SEQ ID NO: 5238 - DNA, 2211 bp, Artificial Sequence
  Description of Artificial Sequence: Synthetic polynucleotide
atggctgccgatggttatcttccagattggctcgaggacaacctctctgagggcattcgcgagtggtgggacttgaaacctggagcccctaaacccaaggcaaatcaacaacatcaggacaacgctcgaggtcttgtgcttccgggttacaaataccttggacccggcaacggactcgacaagggggagccggtcaacgcagcagacgcggcggccctcgagcacgacaaggcctacgaccagcagctcaaggccggagacaacccgtacctcaagtacaaccacgccgacgccgagttccaggagcggctcaaagaagatacgtcttttgggggcaacctcgggcgagcagtcttccaggccaaaaagaggcttcttgaacctcttggtctggttgaggaagcggctaagacggctcctggaaagaagagaccggtagagccatcaccccagcgttctccagactcctctacgggcatcggcaagaaaggccaacagcccgctaaaaagagactcaattttggtcagactggcgactcagagtcagtccccgacccacaacctctcggagaacctccagcaacccccgctgctgtgggacctactacaatggcttcaggcggtggcgcaccaatggcagacaataacgagggtgccgatggagtgggtaattcctcaggaaattggcattgcgattcccaatggctgggcgacagagtcatcaccaccagcaccagaacctgggccctgcccacttacaacaaccatctctacaagcaaatctccagccaatcaggagcttcaaacgacaaccactactttggctacagcaccccttgggggtattttgactttaacagattccactgccacttttcaccacgtgactggcaaagactcatcaacaacaactggggattccgacccaagagactcaacttcaagctcttcaacatccaagtcaaggaggtcacgacgaatgatggcgtcacgaccatcgctaataaccttaccagcacggttcaagtcttctcggactcggagtaccagttgccgtacgtcctcggctctgcgcaccagggctgcctccctccgttcccggcggacgtgttcatgattccgcagtacggctacctaacgctcaacaatggcagccaagccgtgggacgttcatccttttactgcctggaatatttcccttctcagatgctgagaacgggcaacaactttaccttcagctacacttttgaggacgttcctttccacagcagctacgctcacagccagagtctggaccgtctcatgaatcctctcatcgaccagtacctgtattacttgagcagaacaaacactccaagtggaaccaccacgcagtcaaggcttcagttttctcaggccggagcgagtgacattcgggaccagtctaggaactggcttcctggaccctgttaccgccagcagcgcgtttctaaaacaaaaacagacaacaacaacagcaattttacctggactggtgcttcaaaatataaccttaatgggcgtgaatctataatcaaccctggcactgctatggcctcacacaaagacgacgaagacaagttctttcccatgagcggtgtcatgatttttggaaaagagagcgccggagcttcaaacactgcattggacaatgtcatgattacagacgaagaggaaattaaagccactaaccctgtggccaccgaaagatttgggaccgtggcagtcaatttccagagcagcagcacagaccctgcgaccggagatgtgcatgctatgggagcattacctggcatggtgtggcaagatagagacgtgtacctgcagggtcccatttgggccaaaattcctcacacagatggacactttcacccgtctcctcttatgggcggctttggactcaagaacccgcctcctcagatcctcatcaaaaacacgcctgttcctgcgaatcctccggcggagttttcagctacaaagtttgcttcattcatcacccaatactccacaggacaagtgagtgtggaaattgaatgggagctgcagaaagaaaacagcaagcgctggaatcccgaagtgcagtacacatccaattatgcaaaatctgccaacgttgattttactgtggacaacaatggactttatactgagcctcgccccattggcacccgttaccttacccgtcccctgtaa

SEQ ID NO: 5239 - protein, 736 aa, Artificial Sequence
  Description of Artificial Sequence: Synthetic polypeptide
MAADGYLPDWLEDNLSEGIREWWDLKPGAPKPKANQQHQDNARGLVLPGYKYLGPGNGLDKGEPVNAADAAALEHDKAYDQQLKAGDNPYLKYNHADAEFQERLKEDTSFGGNLGRAVFQAKKRLLEPLGLVEEAAKTAPGKKRPVEPSPQRSPDSSTGIGKKGQQPAKKRLNFGQTGDSESVPDPQPLGEPPATPAAVGPTTMASGGGAPMADNNEGADGVGNSSGNWHCDSQWLGDRVITTSTRTWALPTYNNHLYKQISSQSGASNDNHYFGYSTPWGYFDFNRFHCHFSPRDWQRLINNNWGFRPKRLNFKLFNIQVKEVTTNDGVTTIANNLTSTVQVFSDSEYQLPYVLGSAHQGCLPPFPADVFMIPQYGYLTLNNGSQAVGRSSFYCLEYFPSQMLRTGNNFTFSYTFEDVPFHSSYAHSQSLDRLMNPLIDQYLYYLSRTNTPSGTTTQSRLQFSQAGASDIRDQSRNWLPGPCYRQQRVSKTKTDNNNSNFTWTGASKYNLNGRESIINPGTAMASHKDDEDKFFPMSGVMIFGKESAGASNTALDNVMITDEEEIKATNPVATERFGTVAVNFQSSSTDPATGDVHAMGALPGMVWQDRDVYLQGPIWAKIPHTDGHFHPSPLMGGFGLKNPPPQILIKNTPVPANPPAEFSATKFASFITQYSTGQVSVEIEWELQKENSKRWNPEVQYTSNYAKSANVDFTVDNNGLYTEPRPIGTRYLTRPL

SEQ ID NO: 5240 - DNA, 2211 bp, Artificial Sequence
  Description of Artificial Sequence: Synthetic polynucleotide
atggctgccgatggttatcttccagattggctcgaggacaaccttagtgaaggaattcgcgagtggtgggcgctgaaacctggagccccgaagcccaaagccaaccagcaaaagcaggacgacggccggggtctggtgcttccgggttacaaatacctcggacccggtaacggactcgacaaaggagagccggtcaacgaggcggacgcggcagccctcgagcacgacaaggcctacgaccagcagctcaaagcgggtgacaatccgtacctgcggtataaccacgccgacgccgagtttcaggagcgtctgcaagaagatacgtcttttgggggcaacctcgggcgagcagtcttccaggccaagaagcgggttctcgaacctctcggtctggttgaggaaggcgctaagacggctcccggaaagaaacgtccggtagagcagtcgccacaagagccagactcctctacgggcatcggcaagaaaggccaacagcccgccagaaaaagactcaatttcggtcagactggcgactcagagtcagttccagaccctcaacctctcggagaacctccagcagcgccctctggtgtgggacctactacaatggcttcaggcggtggcgcaccaatggcagacaataacgaaggcgccgacggagtgggtaatgcctcaggaaattggcattgcgattccacatggctgggcgacagagtcatcaccaccagcacccgaacatgggccttgcccacctataacaaccacctctacaagcaaatctccagtgcttcaacgggggccagcaacgacaacacctacttcggctacagcaccccctgggggtattttgatttcaacagattccactgccatttctcaccacgtgactggcagcgactcatcaacaacaattggggattccggcccaagagactcaacttcaaactcttcaacatccaagtcaaggaggtcacgacgaatgatggcgtcacgaccatcgctaataaccttaccagcacggttcaagtcttctcggactcggagtaccagttgccgtacgtcctcggctctgcgcaccagggctgcctccctccgttcccggcggacgtgttcatgattccgcagtacggctacctaacgctcaacaatggcagccaggcagtgggacggtcatccttttactgcctggaatatttcccatcgcagatgctgagaacgggcaataactttaccttcagctacaccttcgaggacgtgcctttccacagcagctacgcgcacagccagagcctggaccggctgatgaatcctctcatcgaccagtacctgtattacctgaacagaactcagaatcagtccggaagtgcccaaaacaaggacttgctgtttagccgggggtctccagctggcatgtctgttcagcccaaaaactggctacctggaccctgttatcggcagcagcgcgtttctaaaacaaaaacagacaacaacaacagcaattttacctggactggtgcttcaaaatataacctcaatgggcgtgaatccatcatcaaccctggcactgctatggcctcacacaaagacgacgaagacaagttctttcccatgagcggtgtcatgatttttggaaaagagagcgccggagcttcaaacactgcattggacaatgtcatgattacagacgaagaggaaattaaagccactaaccctgtggccaccgaaagatttgggaccgtggcagtcaatttccagagcagcagcacagaccctgcgaccggagatgtgcatgttatgggagccttacctggaatggtgtggcaagacagagacgtatacctgcagggtcctatttgggccaaaattcctcacacagatggacactttcacccgtctcctcttatgggcggctttggactcaagaacccgcctcctcagatcctcatcaaaaacacgcctgttcctgcgaatcctccggcagagttttcggctacaaagtttgcttcattcatcacccagtattccacaggacaagtgagcgtggagattgaatgggagctgcagaaagaaaacagcaaacgctggaatcccgaagtgcagtatacatctaactatgcaaaatctgccaacgttgatttcactgtggacaacaatggactttatactgagcctcgccccattggcacccgttacctcacccgtcccctgtaa

SEQ ID NO: 5241 - protein, 736 aa, Artificial Sequence
  Description of Artificial Sequence: Synthetic polypeptide
MAADGYLPDWLEDNLSEGIREWWALKPGAPKPKANQQKQDDGRGLVLPGYKYLGPGNGLDKGEPVNEADAAALEHDKAYDQQLKAGDNPYLRYNHADAEFQERLQEDTSFGGNLGRAVFQAKKRVLEPLGLVEEGAKTAPGKKRPVEQSPQEPDSSTGIGKKGQQPARKRLNFGQTGDSESVPDPQPLGEPPAAPSGVGPTTMASGGGAPMADNNEGADGVGNASGNWHCDSTWLGDRVITTSTRTWALPTYNNHLYKQISSASTGASNDNTYFGYSTPWGYFDFNRFHCHFSPRDWQRLINNNWGFRPKRLNFKLFNIQVKEVTTNDGVTTIANNLTSTVQVFSDSEYQLPYVLGSAHQGCLPPFPADVFMIPQYGYLTLNNGSQAVGRSSFYCLEYFPSQMLRTGNNFTFSYTFEDVPFHSSYAHSQSLDRLMNPLIDQYLYYLNRTQNQSGSAQNKDLLFSRGSPAGMSVQPKNWLPGPCYRQQRVSKTKTDNNNSNFTWTGASKYNLNGRESIINPGTAMASHKDDEDKFFPMSGVMIFGKESAGASNTALDNVMITDEEEIKATNPVATERFGTVAVNFQSSSTDPATGDVHVMGALPGMVWQDRDVYLQGPIWAKIPHTDGHFHPSPLMGGFGLKNPPPQILIKNTPVPANPPAEFSATKFASFITQYSTGQVSVEIEWELQKENSKRWNPEVQYTSNYAKSANVDFTVDNNGLYTEPRPIGTRYLTRPL

SEQ ID NO: 5242 - DNA, 2205 bp, Artificial Sequence
  Description of Artificial Sequence: Synthetic polynucleotide
atggctgctgacggttatcttccagattggctcgaggacaacctttctgaaggcattcgtgagtggtgggctctgaaacctggagtccctcaacccaaagcgaaccaacaacaccaggacaaccgtcggggtcttgtgcttccgggttacaaatacctcggacccggtaacggactcgacaaaggagagccggtcaacgaggcggacgcggcagccctcgaacacgacaaggcctacgaccagcagctcaaggccggagacaacccgtacctcaagtacaaccacgccgacgccgagttccaggagcggctcaaagaagatacgtcttttgggggcaacctcgggcgagcagtcttccaggccaaaaagaggcttcttgaacctcttggtctggttgaggaagcggctaagacggctcctggaaagaagaggcctgtagagcagtctcctcaggaaccggactcctccgcgggtattggcaaatcgggtgcacagcccgctaaaaagagactcaatttcggtcagactggcgacacagagtcagtcccagaccctcaaccaatcggagaacctcccgcagccccctcaggtgtgggatctcttacaatggcttcaggtggtggcgcaccagtggcagacaataacgaaggtgccgatggagtgggtagttcctcgggaaattggcattgcgattcccaatggctgggggacagagtcatcaccaccagcacccgaacctgggccctgcccacctacaacaaccacctctacaaacaaatttccagccaatcaggagcctcgaacgacaatcactactttggctacagcaccccttgggggtattttgacttcaacagattccactgccacttttcaccacgtgactggcagcgactcatcaacaacaactggggattccggcccaagagactcagcttcaagctcttcaacatccaggtcaaagaggttacggacaacaatggagtcaagaccatcgccaataaccttaccagcacggtccaggtcttcacggactcagactatcagctcccgtacgtgctcgggtcggctcacgagggctgcctcccgccgttcccagcggacgttttcatgattcctcagtacgggtatctgacgcttaatgatggaagccaggccgtgggtcgttcgtccttttactgcctggaatatttcccgtcgcaaatgctaagaacgggtaacaacttccagttcagctacgagtttgagaacgtacctttccatagcagctacgctcacagccaaagcctggaccgactaatgaatccactcatcgaccaatacttgtactatctctcaaagactattaacggttctggacagaatcaacaaacgctaaaattcagtgtggccggacccagcaacatggctgtccagggaagaaactacatacctggacccagctaccgacaacaacgtgtctcaaccactgtgactcaaaacaacaacagcgaatttgcttggcctggagcttcttcttgggctctcaatggacgtaatagcttgatgaatcctggacctgctatggccagccacaaagaaggagaggaccgtttctttcctttgtctggatctttaatttttggcaaacaaggaactggaagagacaacgtggatgcggacaaagtcatgataaccaacgaagaagaaattaaaactactaacccggtagcaacggagtcctatggacaagtggccacaaaccaccagagtgcccaagcacaggcgcagaccggctgggttcaaaaccaaggaatacttccgggtatggtttggcaggacagagatgtgtacctgcaaggacccatctgggccaagattcctcacacggacggcaacttccacccgtctccgctgatgggcggctttggcctgaaacatcctccgcctcagatcctgatcaagaacacgcctgtacctgcggatcctccgaccaccttcaaccagtcaaagctgaactctttcatcacgcaatacagcaccggacaggtcagcgtggaaattgaatgggagctgcagaaggaaaacagcaagcgctggaatcccgaagtgcagtatacatctaactatgcaaaatctgccaacgttgatttcactgtggacaacaatggactttatactgagcctcgccccattggcacccgttacctcacccgtcccctgtaa

SEQ ID NO: 5243 - protein, 734 aa, Artificial Sequence
  Description of Artificial Sequence: Synthetic polypeptide
MAADGYLPDWLEDNLSEGIREWWALKPGVPQPKANQQHQDNRRGLVLPGYKYLGPGNGLDKGEPVNEADAAALEHDKAYDQQLKAGDNPYLKYNHADAEFQERLKEDTSFGGNLGRAVFQAKKRLLEPLGLVEEAAKTAPGKKRPVEQSPQEPDSSAGIGKSGAQPAKKRLNFGQTGDTESVPDPQPIGEPPAAPSGVGSLTMASGGGAPVADNNEGADGVGSSSGNWHCDSQWLGDRVITTSTRTWALPTYNNHLYKQISSQSGASNDNHYFGYSTPWGYFDFNRFHCHFSPRDWQRLINNNWGFRPKRLSFKLFNIQVKEVTDNNGVKTIANNLTSTVQVFTDSDYQLPYVLGSAHEGCLPPFPADVFMIPQYGYLTLNDGSQAVGRSSFYCLEYFPSQMLRTGNNFQFSYEFENVPFHSSYAHSQSLDRLMNPLIDQYLYYLSKTINGSGQNQQTLKFSVAGPSNMAVQGRNYIPGPSYRQQRVSTTVTQNNNSEFAWPGASSWALNGRNSLMNPGPAMASHKEGEDRFFPLSGSLIFGKQGTGRDNVDADKVMITNEEEIKTTNPVATESYGQVATNHQSAQAQAQTGWVQNQGILPGMVWQDRDVYLQGPIWAKIPHTDGNFHPSPLMGGFGLKHPPPQILIKNTPVPADPPTTFNQSKLNSFITQYSTGQVSVEIEWELQKENSKRWNPEVQYTSNYAKSANVDFTVDNNGLYTEPRPIGTRYLTRPL

SEQ ID NO: 5244 - DNA, 2211 bp, Artificial Sequence
  Description of Artificial Sequence: Synthetic polynucleotide
atggctgccgatggttatcttccagattggctcgaggacaacctctctgagggcattcgcgagtggtgggcgctgaaacctggagccccgaagcccaaagccaaccagcaaaagcaggacgacggccggggtctggtgcttcctggctacaagtacctcggacccttcaacggactcgacaagggggagcccgtcaacgcggcggacgcagcggccctcgagcacgacaaggcctacgaccagcagctgcaggcgggtgacaatccgtacctgcggtataaccacgccgacgccgagtttcaggagcgtctgcaagaagatacgtcttttgggggcaacctcgggcgagcagtcttccaggccaagaagtgggttctcgaacctctcggtctggttgaggaaggcgctaagacggctcctggaaagaaacgtccggtagagcagtcgccacaagagccagactcctcctcgggcatcggcaagacaggccagcagcccgctaaaaagagactcaattttggtcagactggcgactcagagtcagtccccgacccacaacctctcggagaacctccagcaacccccgctgctgtgggacctactacaatggcttcaggcggtggcgcaccaatggcagacaataacgaaggcgccgacggagtgggtaatgcctcaggaaattggcattgcgattccacatggctgggcgacagagtcatcaccaccagcacccgcacctgggccttgcccacctacaataaccacctctacaagcaaatctccagtgcttcaacgggggccagcaacgacaaccactacttcggctacagcaccccctgggggtattttgatttcaacagattccactgccatttctcaccacgtgactggcagcgactcatcaacaacaattggggattccggcccaagagactcaacttcaagctcttcaacatccaagtcaaggaggtcacgacgaatgatggcgtcacaaccatcgctaataaccttaccagcacggttcaagtcttctcggactcggagtaccagcttccgtacgtcctcggctctgcgcaccagggctgcctccctccgttcccggcggacgtgttcatgattccgcaatacggctacctgacgctcaacaatggcagccaagccgtgggacgttcatccttttactgcctggaatatttcccttctcagatgctgagaacgggcaacaactttaccttcagctacacctttgaggaagtgcctttccacagcagctacgcgcacagccagagcctggaccggctgatgaatcctctcatcgaccaatacctgtattacctgaacagaactcaaaatcagtccggaagtgcccaaaacaaggacttgctgtttagccgtgggtctccagctggcatgtctgttcagcccaaaaactggctacctggaccctgttatcggcagcagcgcgtttctaaaacaaaaacagacaacaacaacagcaattttacctggactggtgcttcaaaatataacctcaatgggcgtgaatccatcatcaaccctggcactgctatggcctcacacaaagacgacgaagacaagttctttcccatgagcggtgtcatgatttttggaaaggagagcgccggagcttcaaacactgcattggacaatgtcatgatcaccgacgaagaggaaatcaaagccactaaccccgtggccaccgaaagatttgggactgtggcagtcaatctccagagcagcagcacagaccctgcgaccggagatgtgcatgttatgggagccttacctggcatggtgtggcaagatagagacgtgtacctgcagggtcccatttgggccaaaattcctcacacagatggacactttcacccgtctcctcttatgggcggctttggactcaagaacccgcctcctcagatcctcatcaaaaacacgcctgttcctgcgaatcctccggcggagttttcagctacaaagtttgcttcattcatcacccaatactccacaggacaagtgagtgtggaaattgaatgggagctgcagaaagaaaacagcaagcgctggaatcccgaagtgcagtacacatccaattatgcaaaatctgccaacgttgattttactgtggacaacaatggactttatactgagcctcgccccattggcacccgttacctcacccgtcccctgtaa

SEQ ID NO: 5245 - protein, 736 aa, Artificial Sequence
  Description of Artificial Sequence: Synthetic polypeptide
MAADGYLPDWLEDNLSEGIREWWALKPGAPKPKANQQKQDDGRGLVLPGYKYLGPFNGLDKGEPVNAADAAALEHDKAYDQQLQAGDNPYLRYNHADAEFQERLQEDTSFGGNLGRAVFQAKKWVLEPLGLVEEGAKTAPGKKRPVEQSPQEPDSSSGIGKTGQQPAKKRLNFGQTGDSESVPDPQPLGEPPATPAAVGPTTMASGGGAPMADNNEGADGVGNASGNWHCDSTWLGDRVITTSTRTWALPTYNNHLYKQISSASTGASNDNHYFGYSTPWGYFDFNRFHCHFSPRDWQRLINNNWGFRPKRLNFKLFNIQVKEVTTNDGVTTIANNLTSTVQVFSDSEYQLPYVLGSAHQGCLPPFPADVFMIPQYGYLTLNNGSQAVGRSSFYCLEYFPSQMLRTGNNFTFSYTFEEVPFHSSYAHSQSLDRLMNPLIDQYLYYLNRTQNQSGSAQNKDLLFSRGSPAGMSVQPKNWLPGPCYRQQRVSKTKTDNNNSNFTWTGASKYNLNGRESIINPGTAMASHKDDEDKFFPMSGVMIFGKESAGASNTALDNVMITDEEEIKATNPVATERFGTVAVNLQSSSTDPATGDVHVMGALPGMVWQDRDVYLQGPIWAKIPHTDGHFHPSPLMGGFGLKNPPPQILIKNTPVPANPPAEFSATKFASFITQYSTGQVSVEIEWELQKENSKRWNPEVQYTSNYAKSANVDFTVDNNGLYTEPRPIGTRYLTRPL

SEQ ID NO: 5246 - DNA, 2214 bp, Artificial Sequence
  Description of Artificial Sequence: Synthetic polynucleotide
atggctgccgatggttatcttccagattggctcgaggacaaccttagtgaaggaattcgcgagtggtgggctttgaaacctggagcccctcaacccaaggcaaatcaacaacatcaagacaacgctcgaggtcttgtgcttccgggttacaaataccttggacccggcaacggactcgacaagggggagccggtcaacgcagcagacgcggcggccctcgagcacgacaaggcctacgaccagcagctgcaggcgggtgacaatccgtacctgcggtataaccacgccgacgccgagtttcaggagcgtctgcaagaagatacgtcttttgggggcaaccttggcagagcagtcttccaggccaaaaagaggatccttgagcctcttggtctggttgaggaagcagctaaaacggctcctggaaagaagaggcctgtagatcagtctcctcaggaaccggactcatcatctggtgttggcaaatcgggcaaacagcctgccagaaaaagactaaatttcggtcagactggcgactcagagtcagtcccagaccctcaacctctcggagaaccaccagcagcccccacaagtttgggatctaatacaatggcttcaggcggtggcgcaccaatggcagacaataacgagggtgccgatggggtgggtagttcctcgggaaattggcattgcgattcccaatggctgggggacagagtcatcaccaccagcacccgaacctgggccctgcccacctacaacaatcacctctacaagcaaatctccaacgggacatcgggaggagccaccaacgacaacacctacttcggctacagcaccccctgggggtattttgactttaacagattccactgccacttttcaccacgtgactggcagcgactcatcaacaacaactggggattccggcccaagagactcagcttcaagctcttcaacatccaggtcaaggaggtcacgcagaatgaaggcaccaagaccatcgccaataacctcaccagcaccatccaggtgtttacggactcggagtaccagctgccgtacgttctcggctcggcgcaccagggctgcctccctccgttcccggcggacgtcttcatggtgccacagtatggatacctgacgctcaacaatggcagccaagccgtgggacgttcatccttttactgcctggaatatttcccttctcagatgctgagaacgggcaacaactttaccttcagctacacctttgaggaagtgcctttccacagcagctacgcgcacagccagagcttggaccggctgatgaatcctctgattgaccagtacctgtactacttgtctcggactcaaacaacaggaggcacggcaaatacgcagactctgggcttcagccaaggtgggcctaatacaatggccaatcaggcaaagaactggctgccaggaccctgttaccgccaacaacgcgtctcaacgacaaccgggcaaaacaacaatagcaactttgcctggactgctgggaccaaataccatctgaatggaagaaattcattggctaatcctggcatcgctatggcaacacacaaagacgacgaggagcgtttttttcccagtaacgggatcctgatttttggcaaacaaaatgctgccagagacaatgcggattacagcgatgtcatgctcaccagcgaggaagaaatcaaaaccactaaccctgtggctacagaggaatacggtatcgtggcagataacttgcagcagcaaaacacggctcctcaaattggaactgtcaacagccagggggacttacccggtatggtctggcagaaccgggacgtgtacctgcagggtcccatctgggccaagattcctcacacggacggcaacttccacccgtctccgctgatgggcggctttggcctgaaacatcctccgcctcagatcctgatcaagaacacgcctgtacctgcggatcctccgaccaccttcaaccagtcaaagctgaactctttcatcacgcaatacagcaccggacaggtcagcgtggagatcgagtgggagctgcagaaggaaaacagcaagcgctggaacccggagatccagtacacttccaactattacaagtctaataatgttgaatttgctgttaatactgaaggtgtatatagtgaaccccgccccattggcaccagatacctgactcgtaatctgtaa

SEQ ID NO: 5247 - protein, 737 aa, Artificial Sequence
  Description of Artificial Sequence: Synthetic polypeptide
MAADGYLPDWLEDNLSEGIREWWALKPGAPQPKANQQHQDNARGLVLPGYKYLGPGNGLDKGEPVNAADAAALEHDKAYDQQLQAGDNPYLRYNHADAEFQERLQEDTSFGGNLGRAVFQAKKRILEPLGLVEEAAKTAPGKKRPVDQSPQEPDSSSGVGKSGKQPARKRLNFGQTGDSESVPDPQPLGEPPAAPTSLGSNTMASGGGAPMADNNEGADGVGSSSGNWHCDSQWLGDRVITTSTRTWALPTYNNHLYKQISNGTSGGATNDNTYFGYSTPWGYFDFNRFHCHFSPRDWQRLINNNWGFRPKRLSFKLFNIQVKEVTQNEGTKTIANNLTSTIQVFTDSEYQLPYVLGSAHQGCLPPFPADVFMVPQYGYLTLNNGSQAVGRSSFYCLEYFPSQMLRTGNNFTFSYTFEEVPFHSSYAHSQSLDRLMNPLIDQYLYYLSRTQTTGGTANTQTLGFSQGGPNTMANQAKNWLPGPCYRQQRVSTTTGQNNNSNFAWTAGTKYHLNGRNSLANPGIAMATHKDDEERFFPSNGILIFGKQNAARDNADYSDVMLTSEEEIKTTNPVATEEYGIVADNLQQQNTAPQIGTVNSQGDLPGMVWQNRDVYLQGPIWAKIPHTDGNFHPSPLMGGFGLKHPPPQILIKNTPVPADPPTTFNQSKLNSFITQYSTGQVSVEIEWELQKENSKRWNPEIQYTSNYYKSNNVEFAVNTEGVYSEPRPIGTRYLTRNL

SEQ ID NO: 5248 - DNA, 2205 bp, Artificial Sequence
  Description of Artificial Sequence: Synthetic polynucleotide
atggctgctgacggttatcttccagattggctcgaggacaacctttctgaaggcattcgtgagtggtgggctctgaaacctggagtccctcaacccaaagcgaaccaacaacaccaggacaactgtcggggtcttgtgcttccgggttacaaatacctcggacccggtaacggactcgacaaaggagagccggtcaacgaggcggacgcggcagccctcgaacacgacaaggcctacgaccagcagctcaaggccggagacaacccgtacctcaagtacaaccacgccgacgccgagttccaggagcggctcaaagaagatacgtcttttgggggcaacctcgggcgagcagtcttccagaccaaaaagaggcttcttgaacctcttggtctggttgaggaagcggctaagacggctcctggaaagaagaggcctgtagagcagtctcctcaggaaccggactcctccgcgggtattggcaaatcgggtgcacagcccgctaaaaagagactcaatttcggtcagactggcgacacagagtcagtcccagaccctcaaccaatcggagaacctcccgcagccccctcaggtgtgggatctcttacaatggcttcaggtggtggcgcaccagtggcagacaataacgaaggtgccgatggagtgggtagttcctcgggaaattggcattgcgattcccaatggctgggggacagagtcatcaccaccagcacccgaacctgggccctgcccacctacaacaaccacctctacaaacaaatttccagccaatcaggagcctcgaacgacaatcactactttggctacagcaccccttgggggtattttgacttcaacagattccactgccacttttcaccacgtgactggcagcgactcatcaacaacaactggggattccggcccaagagactcagcttcaagctcttcaacatccaggtcaaagaggttacggacaacaatggagtcaagaccatcgccaataaccttaccagcacggtccaggtcttcacggactcagactatcagctcccgtacgtgctcgggtcggctcacgagggctgcctcccgccgttcccagcggacgttttcatgattcctcagtacgggtatctgacgcttaatgatggaagccaggccgtgggtcgttcgtccttttactgcctggaatatttcccgtcgcaaatgctaagaacgggtaacaacttccagttcagctacgagtttgagaacgtacctttccatagcagctacgctcacagccaaagcctggaccgactaatgaatccactcatcgaccaatacttgtactatctctcaaagactattaacggttctggacagaatcaacaaacgctaaaattcagtgtggccggacccagcaacatggctgtccagggaagaaactacatacctggacccagctaccgacaacaacgtgtctcaaccactgtgactcaaaacaacaacagcgaatttgcttggcctggagcttcttcttgggctctcaatggacgtaatagcttgatgaatcctggacctgctatggccagccacaaagaaggagaggaccgtttctttcctttgtctggatctttaatttttggcaaacaaggaactggaagagacaacgtggatgcggacaaagtcatgataaccaacgaagaagaaattaaaactactaacccggtagcaacggagtcctatggacaagtggccacaaaccaccagagtgcccaagcacaggcgcagaccggctgggttcaaaaccaaggaatacttccgggtatggtttggcaggacagagatgtgtacctgcaaggacccatctgggccaagattcctcacacggacggcaacttccacccgtctccgctgatgggcggctttggcctgaaacatcctccgcctcagatcctgatcaagaacacgcctgttcctgcgaatcctccggcggagttttcagctacaaagtttgcttcattcatcacccagtactccacaggacaagtgagtgtggaaattgaatgggagctgcagaaagaaaacagcaagcgctggaatcccgaagtgcagtacacatccaattatgcaaaatctgccaacgttgattttactgtggacaacaatggactttatactgagcctcgccccattggcacccgttaccttaccaaacctctgtaa

SEQ ID NO: 5249 - protein, 734 aa, Artificial Sequence
  Description of Artificial Sequence: Synthetic polypeptide
MAADGYLPDWLEDNLSEGIREWWALKPGVPQPKANQQHQDNCRGLVLPGYKYLGPGNGLDKGEPVNEADAAALEHDKAYDQQLKAGDNPYLKYNHADAEFQERLKEDTSFGGNLGRAVFQTKKRLLEPLGLVEEAAKTAPGKKRPVEQSPQEPDSSAGIGKSGAQPAKKRLNFGQTGDTESVPDPQPIGEPPAAPSGVGSLTMASGGGAPVADNNEGADGVGSSSGNWHCDSQWLGDRVITTSTRTWALPTYNNHLYKQISSQSGASNDNHYFGYSTPWGYFDFNRFHCHFSPRDWQRLINNNWGFRPKRLSFKLFNIQVKEVTDNNGVKTIANNLTSTVQVFTDSDYQLPYVLGSAHEGCLPPFPADVFMIPQYGYLTLNDGSQAVGRSSFYCLEYFPSQMLRTGNNFQFSYEFENVPFHSSYAHSQSLDRLMNPLIDQYLYYLSKTINGSGQNQQTLKFSVAGPSNMAVQGRNYIPGPSYRQQRVSTTVTQNNNSEFAWPGASSWALNGRNSLMNPGPAMASHKEGEDRFFPLSGSLIFGKQGTGRDNVDADKVMITNEEEIKTTNPVATESYGQVATNHQSAQAQAQTGWVQNQGILPGMVWQDRDVYLQGPIWAKIPHTDGNFHPSPLMGGFGLKHPPPQILIKNTPVPANPPAEFSATKFASFITQYSTGQVSVEIEWELQKENSKRWNPEVQYTSNYAKSANVDFTVDNNGLYTEPRPIGTRYLTKPL

SEQ ID NO: 5250 - DNA, 2211 bp, Artificial Sequence
  Description of Artificial Sequence: Synthetic polynucleotide
atggctgccgatggttatcttccagattggctcgaggacaacctctctgagggcattcgcgagtggtgggacttgaaacctggagcccctaaacccaaggcaaatcaacaacatcaggacaacgctcgaggtcttgtgcttccgggttacaaataccttggacccggcaacggactcgacaagggggagccggtcaacgcagcagacgcggcggccctcgagcacgacaaggcctacgaccagcagctcaaggccggagacaacccgtacctcaagtacaaccacgccgacgccgagttccaggagcggctcaaagaagatacgtcttttgggggcaacctcgggcgagcagtcttccaggccaaaaagaggcttcttgaacctcttggtctggttgaggaagcggctaagacggctcctggaaagaagagaccggtagagccatcaccccagcgttctccagactcctctacgggcatcggcaagaaaggccaacagcccgctaaaaagagactcaattttggtcagactggcgactcagagtcagtccccgacccacaacctctcggagaacctccagcaacccccgctgctgtgggacctactacaatggcttcaggcggtggcgcaccaatggcagacaataacgagggtgccgatggagtgggtaattcctcaggaaattggcattgcgattcccaatggctgggcgacagagtcatcaccaccagcaccagaacctgggccctgcccacttacaacaaccatctctacaagcaaatctccagccaatcaggagcttcaaacgacaaccactactttggctacagcaccccttgggggtattttgactttaacagattccactgccacttttcaccacgtgactggcaaagactcatcaacaacaactggggattccgacccaagagactcaacttcaagctcttcaacatccaagtcaaggaggtcacgacgaatgatggcgtcacgaccatcgctaataaccttaccagcacggttcaagtcttctcggactcggagtaccagttgccgtacgtcctcggctctgcgcaccagggctgcctccctccgttcccggcggacgtgttcatgattccgcagtacggctacctaacgctcaacaatggcagccaagccgtgggacgttcatccttttactgcctggaatatttcccttctcagatgctgagaacgggcaacaactttaccttcagctacacttttgaggacgttcctttccacagcagctacgctcacagccagagtctggaccgtctcatgaatcctctcatcgaccagtacctgtattacttgagcagaacaaacactccaagtggaaccaccacgcagtcaaggcttcagttttctcaggccggagcgagtgacattcgggaccagtctaggaactggcttcctggaccctgttaccgccagcagcgcgtttctaaaacaaaaacagacaacaacaacagcaattttacctggactggtgcttcaaaatataaccttaatgggcgtgaatctataatcaaccctggcactgctatggcctcacacaaagacgacgaagacaagttctttcccatgagcggtgtcatgatttttggaaaagagagcgccggagcttcaaacactgcattggacaatgtcatgatcacagacgaagaggaaatcaaagccactaaccccgtggccaccgaaagatttgggactgtggcagtcaatctccagagcagcagcacagaccctgcgaccggagatgtgcatgttatgggagcattacctggcatggtgtggcaagatagagacgtgtacctgcagggtcccatttgggccaaaattcctcacacagatggacactttcacccgtctcctcttatgggcggctttggactcaagaacccgcctcctcagatcctcatcaaaaacacgcctgttcctgcgaatcctccggcggagttttcagctacaaagtttgcttcattcatcacccaatactccacaggacaagtgagtgtggaaattgaatgggagctgcagaaagaaaacagcaagcgctggaatcccgaagtgcagtacacatccaattatgcaaaatctgccaacgttgattttactgtggacaacaatggactttatactgagcctcgccccattggcacccgttaccttacccgtcccctgtaa

SEQ ID NO: 5251 - protein, 736 aa, Artificial Sequence
  Description of Artificial Sequence: Synthetic polypeptide
MAADGYLPDWLEDNLSEGIREWWDLKPGAPKPKANQQHQDNARGLVLPGYKYLGPGNGLDKGEPVNAADAAALEHDKAYDQQLKAGDNPYLKYNHADAEFQERLKEDTSFGGNLGRAVFQAKKRLLEPLGLVEEAAKTAPGKKRPVEPSPQRSPDSSTGIGKKGQQPAKKRLNFGQTGDSESVPDPQPLGEPPATPAAVGPTTMASGGGAPMADNNEGADGVGNSSGNWHCDSQWLGDRVITTSTRTWALPTYNNHLYKQISSQSGASNDNHYFGYSTPWGYFDFNRFHCHFSPRDWQRLINNNWGFRPKRLNFKLFNIQVKEVTTNDGVTTIANNLTSTVQVFSDSEYQLPYVLGSAHQGCLPPFPADVFMIPQYGYLTLNNGSQAVGRSSFYCLEYFPSQMLRTGNNFTFSYTFEDVPFHSSYAHSQSLDRLMNPLIDQYLYYLSRTNTPSGTTTQSRLQFSQAGASDIRDQSRNWLPGPCYRQQRVSKTKTDNNNSNFTWTGASKYNLNGRESIINPGTAMASHKDDEDKFFPMSGVMIFGKESAGASNTALDNVMITDEEEIKATNPVATERFGTVAVNLQSSSTDPATGDVHVMGALPGMVWQDRDVYLQGPIWAKIPHTDGHFHPSPLMGGFGLKNPPPQILIKNTPVPANPPAEFSATKFASFITQYSTGQVSVEIEWELQKENSKRWNPEVQYTSNYAKSANVDFTVDNNGLYTEPRPIGTRYLTRPL

SEQ ID NO: 5252 - DNA, 2214 bp, Artificial Sequence; identical to SEQ ID NO: 5224
  Description of Artificial Sequence: Synthetic polynucleotide

SEQ ID NO: 5253 - protein, 737 aa, Artificial Sequence; identical to SEQ ID NO: 5225
  Description of Artificial Sequence: Synthetic polypeptide

SEQ ID NO: 5254 - DNA, 2205 bp, Artificial Sequence
  Description of Artificial Sequence: Synthetic polynucleotide
atggctgctgacggttatcttccagattggctcgaggacaacctttctgaaggcattcgtgagtggtgggctctgaaacctggagtccctcaacccaaagcgaaccaacaacaccaggacaaccgtcggggtcttgtgcttccgggttacaaatacctcggacccggtaacggactcgacaaaggagagccggtcaacgaggcggacgcggcagccctcgaacacgacaaggcctacgaccagcagctcaaggccggagacaacccgtacctcaagtacaaccacgccgacgccgagttccaggagcggctcaaagaagatacgtcttttgggggcaacctcgggcgagcagtcttccaggccaaaaagaggcttcttgaacctcttggtctggttgaggaagcggctaagacggctcctggaaagaagaggcctgtagagcagtctcctcaggaaccggactcctccgcgggtattggcaaatcgggtgcacagcccgctaaaaagagactcaatttcggtcagactggcgacacagagtcagtcccagaccctcaaccaatcggagaacctcccgcagccccctcaggtgtgggatctcttacaatggcttcaggtggtggcgcaccagtggcagacaataacgaaggtgccgatggagtgggtagttcctcgggaaattggcattgcgattcccaatggctgggggacagagtcatcaccaccagcacccgaacctgggccctgcccacctacaacaaccacctctacaaacaaatttccagccaatcaggagcctcgaacgacaatcactactttggctacagcaccccttgggggtattttgacttcaacagattccactgccacttttcaccacgtgactggcagcgactcatcaacaacaactggggattccggcccaagagactcagcttcaagctcttcaacatccaggtcaaagaggttacggacaacaatggagtcaagaccatcgccaataaccttaccagcacggtccaggtcttcacggactcagactatcagctcccgtacgtgctcgggtcggctcacgagggctgcctcccgccgttcccagcggacgttttcatgattcctcagtacgggtatctgacgcttaatgatggaagccaggccgtgggtcgttcgtccttttactgcctggaatatttcccgtcgcaaatgctaagaacgggtaacaacttccagttcagctacgagtttgagaacgtacctttccatagcagctacgctcacagccaaagcctggaccgactaatgaatccactcatcgaccaatacttgtactatctctcaaagactattaacggttctggacagaatcaacaaacgctaaaattcagtgtggccggacccagcaacatggctgtccagggaagaaactacatacctggacccagctaccgacaacaacgtgtctcaaccactgtgactcaaaacaacaacagcgaatttgcttggcctggagcttcttcttgggctctcaatggacgtaatagcttgatgaatcctggacctgctatggccagccacaaagaaggagaggaccgtttctttcctttgtctggatctttaatttttggcaaacaaggaactggaagagacaacgtggatgcggacaaagtcatgataaccaacgaagaagaaattaaaactactaacccggtagcaacggagtcctatggacaagtggccacaaaccaccagagtgcccaagcacaggcgcagaccggctgggttcaaaaccaaggaatacttccgggtatggtttggcaggacagagatgtgtacctgcaaggacccatttgggccaaaattcctcacacggacggcaactttcacccttctccgctgatgggagggtttggaatgaaacacccgcctcctcagatcctcatcaaaaacacacctgtacctgcggatcctccaacggccttcaacaaggacaagctgaactctttcatcacccagtattctactggccaagtcagcgtggagatcgagtgggagctgcagaaggaaaacagcaagcgctggaaccccgagatccagtacacctccaactactacaaatctacaagtgtggactttgctgttaatacagaaggcgtgtactctgaaccccgccccattggcacccgttacctcacccgtaatctgtaa

SEQ ID NO: 5255 - protein, 734 aa, Artificial Sequence
  Description of Artificial Sequence: Synthetic polypeptide
MAADGYLPDWLEDNLSEGIREWWALKPGVPQPKANQQHQDNRRGLVLPGYKYLGPGNGLDKGEPVNEADAAALEHDKAYDQQLKAGDNPYLKYNHADAEFQERLKEDTSFGGNLGRAVFQAKKRLLEPLGLVEEAAKTAPGKKRPVEQSPQEPDSSAGIGKSGAQPAKKRLNFGQTGDTESVPDPQPIGEPPAAPSGVGSLTMASGGGAPVADNNEGADGVGSSSGNWHCDSQWLGDRVITTSTRTWALPTYNNHLYKQISSQSGASNDNHYFGYSTPWGYFDFNRFHCHFSPRDWQRLINNNWGFRPKRLSFKLFNIQVKEVTDNNGVKTIANNLTSTVQVFTDSDYQLPYVLGSAHEGCLPPFPADVFMIPQYGYLTLNDGSQAVGRSSFYCLEYFPSQMLRTGNNFQFSYEFENVPFHSSYAHSQSLDRLMNPLIDQYLYYLSKTINGSGQNQQTLKFSVAGPSNMAVQGRNYIPGPSYRQQRVSTTVTQNNNSEFAWPGASSWALNGRNSLMNPGPAMASHKEGEDRFFPLSGSLIFGKQGTGRDNVDADKVMITNEEEIKTTNPVATESYGQVATNHQSAQAQAQTGWVQNQGILPGMVWQDRDVYLQGPIWAKIPHTDGNFHPSPLMGGFGMKHPPPQILIKNTPVPADPPTAFNKDKLNSFITQYSTGQVSVEIEWELQKENSKRWNPEIQYTSNYYKSTSVDFAVNTEGVYSEPRPIGTRYLTRNL

SEQ ID NO: 5256 - DNA, 2217 bp, Artificial Sequence
  Description of Artificial Sequence: Synthetic polynucleotide
atggctgccgatggttatcttccagattggctcgaggacaacctctctgagggcattcgcgagtggtgggcgctgaaacctggagccccgaagcccaaagccaaccagcaaaagcaggacgacggccggggtctggtgcttcctggctacaagtacctcggacccttcaacggactcgacaagggggagcccgtcaacgcggcggacgcagcggccctcgagcacgacaaggcctacgaccagcagctgcaggcgggtgacaatccgtacctgcggtataaccacgccgacgccgagtttcaggagcgtctgcaagaagatacgtcttttgggggcaacctcgggcgagcagtcttccaggccaagaagcgggttctcgaacctctcggtctggttgaggaaggcgctaagacggctcctggaaagaagagaccggtagagccatcaccccagcgttctccagactcctctacgggcatcggcaagaaaggccaacagcccgccagaaaaagactcaattttggtcagactggcgactcagagtcagttccagaccctcaacctctcggagaacctccagcagcgccctctggtgtgggacctaatacaatggctgcaggcggtggcgcaccaatggcagacaataacgaaggcgccgacggagtgggtagttcctcgggaaattggcattgcgattccacatggctgggcgacagagtcatcaccaccagcacccgaacctgggccctgcccacctacaacaaccacctctacaagcaaatctccaacgggacatcgggaggagccaccaacgacaacacctacttcggctacagcaccccctgggggtattttgactttaacagattccactgccacttttcaccacgtgactggcagcgactcatcaacaacaactggggattccggcccaagagactcagcttcaagctcttcaacatccaggtcaaggaggtcacgcagaatgaaggcaccaagaccatcgccaataacctcaccagcaccatccaggtgtttacggactcggagtaccagctgccgtacgttctcggctctgcccaccagggctgcctgcctccgttcccggcggacgtgttcatgattccccagtacggctacctaacactcaacaacggtagtcaggccgtgggacgctcctccttctactgcctggaatactttccttcgcagatgctgagaaccggcaacaacttccagtttacttacaccttcgaggacgtgcctttccacagcagctacgcccacagccagagcttggaccggctgatgaatcctctgattgaccagtacctgtactacttgtctcggactcaaacaacaggaggcacggcaaatacgcagactctgggcttcagccaaggtgggcctaatacaatggccaatcaggcaaagaactggctgccaggaccctgttaccgccaacaacgcgtctcaacgacaaccgggcaaaacaacaatagcaactttgcctggactgctgggaccaaataccatctgaatggaagaaattcattggctaatcctggcatcgctatggcaacacacaaagacgacgaggagcgtttttttcccagtaacgggatcctgatttttggcaaacaaaatgctgccagagacaatgcggattacagcgatgtcatgctcaccagcgaggaagaaatcaaaaccactaaccctgtggctacagaggaatacggtatcgtggcagataacttgcagcagcaaaacacggctcctcaaattggaactgtcaacagccagggggccttacccggtatggtctggcagaaccgggacgtgtacctgcagggtcccatctgggccaagattcctcacacggacggcaacttccacccctctcccctcatgggtggattcggacttaaacatcctccgcctcagatcctgatcaagaacacgcctgtacctgcggatcctccgaccaccttcaaccagtcaaagctgaactctttcatcacgcaatacagcaccggacaggtcagcgtggaaattgaatgggagctgcagaaggaaaacagcaagcgctggaaccccgagatccagtacacctccaactactacaaatctacaagtgtggactttgctgttaatacagaaggcgtgtactctgaaccccgccccattggcacccgttacctcacccgtaatctgtaa

SEQ ID NO: 5257 - protein, 738 aa, Artificial Sequence; identical to SEQ ID NO: 5159
  Description of Artificial Sequence: Synthetic polypeptide

SEQ ID NO: 5258 - DNA, 2211 bp, Artificial Sequence
  Description of Artificial Sequence: Synthetic polynucleotide
atggctgctgacggttatcttccagattggctcgaggacaacctttctgaaggcattcgagagtggtgggcgctgcaacctggagcccctaaacccaaggcaaatcaacaacatcaggacaacgctcggggtcttgtgcttccgggttacaaatacctcggacccggcaacggactcgacaagggggaacccgtcaacgcagcggacgcggcagccctcgagcacgacaaggcctacgaccagcagctcaaggccggtgacaacccctacctcaagtacaaccacgccgacgccgagttccaggagcggctcaaagaagatacgtcttttgggggcaacctcgggcgagcagtcttccaggccaaaaagaggcttcttgaacctcttggtctggttgaggaagcggctaagacggctcctggaaagaagaggcctgtagatcagtctcctcaggaaccggactcatcatctggtgttggcaaatcgggcaaacagcctgccagaaaaagactaaatttcggtcagactggcgactcagagtcagtcccagaccctcaacctctcggagaaccaccagcagcccccacaagtttgggatctaatacaatggcttcaggcggtggcgcaccaatggcagacaataacgagggtgccgatggagtgggtaattcctcaggaaattggcattgcgattcccaatggctgggcgacagagtcatcaccaccagcaccagaacctgggccctgcccacttacaacaaccatctctacaagcaaatctccagccaatcaggagcttcaaacgacaaccactactttggctacagcaccccttgggggtattttgactttaacagattccactgccacttctcaccacgtgactggcagcgactcattaacaacaactggggattccggcccaagaaactcagcttcaagctcttcaacatccaagttaaagaggtcacgcagaacgatggcacgacgactattgccaataaccttaccagcacggttcaggtgtttacggactcggagtatcagctcccgtacgtgctcgggtcggcgcaccaaggctgtctcccgccgtttccagcggacgtcttcatggtccctcagtatggatacctcaccctgaacaacggaagtcaagcggtgggacgctcatccttttactgcctggagtacttcccttcgcagatgctaaggactggaaataacttccaattcagctataccttcgaggatgtaccttttcacagcagctacgctcacagccagagtttggatcgcttgatgaatcctcttattgatcagtatctgtactacctgaacagaacgcaaggaacaacctctggaacaaccaaccaatcacggctgctttttagccaggctgggcctcagtctatgtctttgcaggccagaaattggctacctgggccctgctaccggcaacagagactttcaaagactgctaacgacaacaacaacagtaactttccttggacagcggccagcaaatatcatctcaatggccgcgactcgctggtgaatccaggaccagctatggccagtcacaaggacgatgaagaaaaatttttccctatgcacggcaatctaatatttggcaaagaagggacaacggcaagtaacgcagaattagataatgtaatgattacggatgaagaagagattcgtaccaccaatcctgtggcaacagagcagtatggaactgtggcaaataacttgcagagctcaaatacagctcccacgactagaactgtcaatgatcagggggccttacctggcatggtgtggcaagatcgtgacgtgtaccttcaaggacctatctgggcaaagattcctcacacggatggacactttcatccttctcctctgatgggaggctttggactgaaacatccgcctcctcaaatcatgatcaaaaatactccggtaccggcaaatcctccgacgactttcagcccggccaagtttgcttcatttatcactcagtactccactggacaggtcagcgtggaaattgagtgggagctacagaaagaaaacagcaaacgttggaatccagagattcagtacacttccaactacaacaagtctgttaatgtggactttactgtagacactaatggtgtttatagtgaacctcgccccattggcacccgttaccttacccgtcccctgtaa

SEQ ID NO: 5259 - protein, 736 aa, Artificial Sequence; identical to SEQ ID NO: 5229
  Description of Artificial Sequence: Synthetic polypeptide

SEQ ID NO: 5260 - DNA, 2211 bp, Artificial Sequence; identical to SEQ ID NO: 5228
  Description of Artificial Sequence: Synthetic polynucleotide

SEQ ID NO: 5261 - protein, 736 aa, Artificial Sequence; identical to SEQ ID NO: 5229
  Description of Artificial Sequence: Synthetic polypeptide

SEQ ID NO: 5262 - DNA, 2211 bp, Artificial Sequence
  Description of Artificial Sequence: Synthetic polynucleotide
atggctgctgacggttatcttccagattggctcgaggacaacctttctgaaggcattcgtgagtggtgggctctgaaacctggagtccctcaacccaaagcgaaccaacaacaccaggacaaccgtcggggtcttgtgcttccgggttacaaatacctcggacccggtaacggactcgacaaaggagagcccgtcaacgcggcggatgcagcggccctcgagcacgacaaggcctacgaccagcagctcaaagcgggtgacaatccgtacctgcggtataaccacgccgacgccgagtttcaggagcgtctgcaagaagatacgtcttttgggggcaacctcgggcgagcagtcttccaggccaagaagagggttctcgaaccttttggtctggttgaggaaggtgctaagacggctcctggaaagaaacgtccggtagagcagtcgccacaagagccagactcctcctcgggcatcggcaagacaggccagcagcccgctaaaaagagactcaattttggtcagactggcgactcagagtcagtccccgacccacaacctctcggagaacctccagcaacccccgctgctgtgggacctactacaatggcttcaggcggtggcgcaccaatggcagacaataacgaaggcgccgacggagtgggtaatgcctcaggaaattggcattgcgattccacatggctgggcgacagagtcatcaccaccagcacccgcacctgggccttgcccacctacaataaccacctctacaagcaaatctccagtgcttcaacgggggccagcaacgacaaccactacttcggctacagcaccccctgggggtattttgatttcaacagattccactgccatttctcaccacgtgactggcagcgactcatcaacaacaattggggattccggcccaagagactcaacttcaagctcttcaacatccaagtcaaggaggtcacgacgaatgatggcgtcacgaccatcgctaataaccttaccagcacggttcaagtcttctcggactcggagtaccagcttccgtacgtcctcggctctgcgcaccagggctgcctccctccgttcccggcggacgtgttcatgattccgcaatacggctacctgacgctcaacaatggcagccaagccgtgggacgttcatccttttactgcctggaatatttcccttctcagatgctgagaacgggcaacaactttaccttcagctacacctttgaggaagtgcctttccacagcagctacgcgcacagccagagcctggaccggctgatgaatcctctcatcgaccaatacctgtattacctgaacagaactcaaaatcagtccggaagtgcccaaaacaaggacttgctgtttagccgtgggtctccagctggcatgtctgttcagcccaaaaactggctacctggaccctgttatcggcagcagcgcgtttctaaaacaaaaacagacaacaacaacagcaattttacctggactggtgcttcaaaatataacctcaatgggcgtgaatccatcatcaaccctggcactgctatggcctcacacaaagacgacgaagacaagttctttcccatgagcggtgtcatgatttttggaaaagagagcgccggagcttcaaacactgcattggacaatgtcatgattacagacgaagaggaaattaaagccactaaccctgtggccaccgaaagatttgggaccgtggcagtcaatttccagagcagcagcacagaccctgcgaccggagatgtgcatgttatgggagccttacctggaatggtgtggcaagacagagacgtatacctgcagggtcctatttgggccaaaattcctcacacggatggacactttcacccgtctcctctcatgggcggctttggacttaagcacccgcctcctcagatcctcatcaaaaacacgcctgttcctgcgaatcctccggcagagttttcggctacaaagtttgcttcattcatcacccagtattccacaggacaagtgagcgtggagattgaatgggagctgcagaaagaaaacagcaaacgctggaatcccgaagtgcagtatacatctaactatgcaaaatctgccaacgttgatttcactgtggacaacaatggactttatactgagcctcgccccattggcacccgttacctcacccgtcccctgtaa

SEQ ID NO: 5263 - protein, 736 aa, Artificial Sequence
  Description of Artificial Sequence: Synthetic polypeptide
MAADGYLPDWLEDNLSEGIREWWALKPGVPQPKANQQHQDNRRGLVLPGYKYLGPGNGLDKGEPVNAADAAALEHDKAYDQQLKAGDNPYLRYNHADAEFQERLQEDTSFGGNLGRAVFQAKKRVLEPFGLVEEGAKTAPGKKRPVEQSPQEPDSSSGIGKTGQQPAKKRLNFGQTGDSESVPDPQPLGEPPATPAAVGPTTMASGGGAPMADNNEGADGVGNASGNWHCDSTWLGDRVITTSTRTWALPTYNNHLYKQISSASTGASNDNHYFGYSTPWGYFDFNRFHCHFSPRDWQRLINNNWGFRPKRLNFKLFNIQVKEVTTNDGVTTIANNLTSTVQVFSDSEYQLPYVLGSAHQGCLPPFPADVFMIPQYGYLTLNNGSQAVGRSSFYCLEYFPSQMLRTGNNFTFSYTFEEVPFHSSYAHSQSLDRLMNPLIDQYLYYLNRTQNQSGSAQNKDLLFSRGSPAGMSVQPKNWLPGPCYRQQRVSKTKTDNNNSNFTWTGASKYNLNGRESIINPGTAMASHKDDEDKFFPMSGVMIFGKESAGASNTALDNVMITDEEEIKATNPVATERFGTVAVNFQSSSTDPATGDVHVMGALPGMVWQDRDVYLQGPIWAKIPHTDGHFHPSPLMGGFGLKHPPPQILIKNTPVPANPPAEFSATKFASFITQYSTGQVSVEIEWELQKENSKRWNPEVQYTSNYAKSANVDFTVDNNGLYTEPRPIGTRYLTRPL

SEQ ID NO: 5264 - DNA, 2217 bp, Artificial Sequence
  Description of Artificial Sequence: Synthetic polynucleotide
atggctgccgatggttatcttccagattggctcgaggacaacctctctgagggcattcgcgagtggtgggacttgaaacctggagccccgaaacccaaagccaaccagcaaaagcaggacgacggccggggtctggtgcttcctggctacaagtacctcggacccttcaacggactcgacaagggggagcccgtcaacgcggcggatgcaacggccctcgagcacgacaaggcctacgaccagcagctgcaggcgggtgacaatccgtacctgcggtataaccacgccgacgccgagtttcaggagcgtctgcaagaagatacgtcttttgggggcaacctcgggcgagcagtcttccaggccaagaagcgggttctcgaacctctcggtctggttgaggaaggcgctaagacggctcctggaaagaagagaccggtagagccatcaccccagcgttctccagactcctctacgggcatcggcaagaaaggccaacagcccgccagaaaaagactcaattttggtcagactggcgactcagagtcagttccagaccctcaacctctcggagaaccaccagcagcccccacaagtttgggatctaatacaatggcttcaggcggtggcgcaccaatggcagacaataacgagggtgccgatggagtgggtaattcctcaggaaattggcattgcgattcccaatggctgggcgacagagtcatcaccaccagcacccgcacctgggccttgcccacctacaataaccacctctacaagcaaatctccagtgcttcaacgggggccagcaacgacaaccactacttcggctacagcaccccctgggggtattttgactttaaccgcttccactgccacttctcgccaagagactggcaaagactcatcaacaacaattggggattccggcccaagagactcaacttcaaactcttcaacatccaagtcaaggaggtcacgacgaatgatggcgtcacgaccatcgccaataacctcaccagcaccatccaggtgtttacggactcggagtaccagctgccgtacgttctcggctctgcccaccagggctgcctgcctccgttcccggcggacgtgttcatgattccccagtatggatacctcaccctgaacaacggaagtcaagcggtgggacgctcatccttttactgcctggagtacttcccttcgcagatgctaaggactggaaataacttccaattcagctataccttcgaggatgtaccttttcacagcagctacgctcacagccagagtttggatcgcttgatgaatcctcttattgatcagtatctgtactacctgaacagaacgcaaggaacaacctctggaacaaccaaccaatcacggctgctttttagccaggctgggcctcagtctatgtctttgcaggccagaaattggctacctgggccctgctaccggcaacagagactttcaaagactgctaacgacaacaacaacagtaactttccttggacagcagccagcaaatatcatctcaatggccgcgactcgctggtgaatccaggaccagctatggccagtcacaaggacgatgaagaaaaatttttccctatgcacggcaatctaatatttggcaaagaagggacaacggcaagtaacgcagaattagataatgtaatgattacggatgaagaagagattcgtaccaccaatcctgtggcaacagagcagtatggaactgtggcaaataacttgcagagctcaaatacagctcccacgactagaactgtcaatgatcagggggccttacctggcatggtgtggcaagatcgtgacgtgtaccttcaggggcccatctgggcaaagattccacacacggacggacattttcacccctctcccctcatgggtggattcggacttaaacaccctcctccgcagattctcatcaagaacaccccggtacctgcgaatccttcgaccaccttcagtgcggcaaagtttgcttccttcatcacacagtactccacgggacaggtcagcgtggagatcgagtgggagctgcagaaggaaaacagcaagcgctggaacccggagatccagtacacttccaactattacaagtctaataatgttgaatttgctgttaatactgaaggtgtatatagtgaaccccgccccattggcaccagatacctgactcgtaatctgtaa

SEQ ID NO: 5265 - protein, 738 aa, Artificial Sequence
  Description of Artificial Sequence: Synthetic polypeptide
MAADGYLPDWLEDNLSEGIREWWDLKPGAPKPKANQQKQDDGRGLVLPGYKYLGPFNGLDKGEPVNAADATALEHDKAYDQQLQAGDNPYLRYNHADAEFQERLQEDTSFGGNLGRAVFQAKKRVLEPLGLVEEGAKTAPGKKRPVEPSPQRSPDSSTGIGKKGQQPARKRLNFGQTGDSESVPDPQPLGEPPAAPTSLGSNTMASGGGAPMADNNEGADGVGNSSGNWHCDSQWLGDRVITTSTRTWALPTYNNHLYKQISSASTGASNDNHYFGYSTPWGYFDFNRFHCHFSPRDWQRLINNNWGFRPKRLNFKLFNIQVKEVTTNDGVTTIANNLTSTIQVFTDSEYQLPYVLGSAHQGCLPPFPADVFMIPQYGYLTLNNGSQAVGRSSFYCLEYFPSQMLRTGNNFQFSYTFEDVPFHSSYAHSQSLDRLMNPLIDQYLYYLNRTQGTTSGTTNQSRLLFSQAGPQSMSLQARNWLPGPCYRQQRLSKTANDNNNSNFPWTAASKYHLNGRDSLVNPGPAMASHKDDEEKFFPMHGNLIFGKEGTTASNAELDNVMITDEEEIRTTNPVATEQYGTVANNLQSSNTAPTTRTVNDQGALPGMVWQDRDVYLQGPIWAKIPHTDGHFHPSPLMGGFGLKHPPPQILIKNTPVPANPSTTFSAAKFASFITQYSTGQVSVEIEWELQKENSKRWNPEIQYTSNYYKSNNVEFAVNTEGVYSEPRPIGTRYLTRNL

SEQ ID NO: 5266 - DNA, 2208 bp, Artificial Sequence
  Description of Artificial Sequence: Synthetic polynucleotide
atggctgccgatggttatcttccagattggctcgaggacaaccttagtgaaggaattcgcgagtggtgggacttgaaacctggagccccgaagcccaaagccaaccagcaaaagcaggacgacggccggggtctggtgcttcctggctacaagtacctcggacccttcaacggactcgacaagggggagcccgtcaacgcggcggacgcagcggccctcgagcacgacaaggcctacgaccagcagctcaaagcgggtgacaatccgtacctgcggtataaccacgccgacgccgagtttcaggagcgtctgcaagaagatacgtcttttgggggcaacctcgggcgagcagtcttccaggccaagaagcgggttctcgaacctctcggtctggttgaggaaggtgctaagacggctcctggaaagaaacgtccggtagagcagtcgccacaagagccagactcctcctcgggcattggcaagacaggccagcagcccgctaaaaagagactcaattttggtcagactggcgactcagagtcagtccccgacccacaacctctcggagaacctccagcaacccccgctgctgtgggacctactacaatggcttcaggcggtggcgcaccaatggcagacaataacgaaggcgccgacggagtgggtaatgcctcaggaaattggcattgcgattccacatggctgggcgacagagtcatcaccaccagcacccgaacctgggccctgcccacctacaacaaccacctctacaaacaaatttccagccaatcaggagcctcgaacgacaatcactactttggctacagcaccccttgggggtattttgatttcaacagattccactgccacttttcaccacgtgactggcagcgactcatcaacaacaattggggattccggcccaagagactcagcttcaagctcttcaacatccaggtcaaggaggtcacgcagaatgaaggcaccaagaccatcgccaataaccttaccagcacggttcaagtgtttacggactcggagtatcagctcccgtacgtgctcggctcggcgcatcaaggatgcctcccgccgttcccagcagacgtcttcatggtgccacagtatggatacctcaccctgaacaacgggagtcaggcagtaggacgctcttcattttactgcctggagtactttccttctcagatgctgcgtaccggaaacaactttaccttcagctacacttttgaggacgttcctttccacagcagctacgctcacagccagagtctggaccgtctcatgaatcctctgattgaccagtacctgtattacttgagcagaacaaacactccaagtggaaccaccacgcagtcaaggcttcagttttctcaggccggagcgagtgacattcgggaccagtctaggaactggcttcctggaccctgttaccgccagcagcgagtatcaaagacatctgcggataacaacaacagtgaatactcgtggactggagctaccaagtaccacctcaatggcagagactctctggtgaatccgggcccggccatggcaagccacaaggactatgaagaaaagttttttcctcagagcggggttctcatctttgggaagcaaggctcagagaaaacaaatgtggacattgaaaaggtcatgattacagacgaagaggaaatcaggacaaccaatcccgtggctacggagcagtatggttctgtatctaccaacctccagagaggcaacagacaagcagctaccgcagatgtcaacacacaaggcgttcttccaggcatggtctggcaggacagagatgtgtaccttcaggggcccatctgggcaaagattccacacacggacggacattttcacccgtctccgctgatgggcggctttggcctgaaacatcctccgcctcagatcctgatcaagaacacgcctgtacctgcggatcctccgaccaccttcaaccagtcaaagctgaactctttcatcactcagtattctactggccaagtcagcgtggagatcgagtgggagctgcagaaggaaaacagcaagcgctggaaccccgagatccagtacacctccaactactacaaatctacaagtgtggactttgctgttaatacagaaggcgtgtactctgaaccccgccccattggcacccgttacctcacccgtaatctgtaa

SEQ ID NO: 5267 - protein, 735 aa, Artificial Sequence
  Description of Artificial Sequence: Synthetic polypeptide
MAADGYLPDWLEDNLSEGIREWWDLKPGAPKPKANQQKQDDGRGLVLPGYKYLGPFNGLDKGEPVNAADAAALEHDKAYDQQLKAGDNPYLRYNHADAEFQERLQEDTSFGGNLGRAVFQAKKRVLEPLGLVEEGAKTAPGKKRPVEQSPQEPDSSSGIGKTGQQPAKKRLNFGQTGDSESVPDPQPLGEPPATPAAVGPTTMASGGGAPMADNNEGADGVGNASGNWHCDSTWLGDRVITTSTRTWALPTYNNHLYKQISSQSGASNDNHYFGYSTPWGYFDFNRFHCHFSPRDWQRLINNNWGFRPKRLSFKLFNIQVKEVTQNEGTKTIANNLTSTVQVFTDSEYQLPYVLGSAHQGCLPPFPADVFMVPQYGYLTLNNGSQAVGRSSFYCLEYFPSQMLRTGNNFTFSYTFEDVPFHSSYAHSQSLDRLMNPLIDQYLYYLSRTNTPSGTTTQSRLQFSQAGASDIRDQSRNWLPGPCYRQQRVSKTSADNNNSEYSWTGATKYHLNGRDSLVNPGPAMASHKDYEEKFFPQSGVLIFGKQGSEKTNVDIEKVMITDEEEIRTTNPVATEQYGSVSTNLQRGNRQAATADVNTQGVLPGMVWQDRDVYLQGPIWAKIPHTDGHFHPSPLMGGFGLKHPPPQILIKNTPVPADPPTTFNQSKLNSFITQYSTGQVSVEIEWELQKENSKRWNPEIQYTSNYYKSTSVDFAVNTEGVYSEPRPIGTRYLTRNL

SEQ ID NO: 5268 - DNA, 2214 bp, Artificial Sequence
  Description of Artificial Sequence: Synthetic polynucleotide
atggctgccgatggttatcttccagattggctcgaggacaacctctctgagggcattcgcgagtggtgggacttgaaacctggagccccgaaacccaaagccaaccagcaaaagcaggacgacggccggggtctggtgcttcctggctacaagtacctcggacccttcaacggactcgacaagggggagcccgtcaacgcggcggatgcagcggccctcgagcacgacaaggcctacgaccagcagctcaaagcgggtgacaatccgtacctgcggtataaccacgccgacgccgagtttcaggagcgtctgcaagaagatacgtcttttgggggcaacctcgggcgagcagtcttccaggccaagaagagggttctcgaaccttttggtctggttgaggaaggtgctaagacggctcctggaaagaaacgtccggtagagcagtcgccacaagagccagactcctcctcgggcattggcaagacaggccagcagcctgcaagaaaaagattgaattttggtcagactggagacgcagactcagtacctgacccccagcctctcggacagccaccagcagccccctctggtctgggaactaatacgatggctacaggcagtggcgcaccaatggcagacaataacgagggcgccgacggagtgggtaattcctcgggaaattggcattgcgattcccaatggctgggggacagagtcatcaccaccagcacccgaacctgggccctgcccacctacaacaatcacctctacaagcaaatctccaacagcacatctggaggatcttcaaatgacaacgcctacttcggctacagcaccccctgggggtattttgatttcaacagattccactgccatttctcaccacgtgactggcagcgactcatcaacaacaattggggattccggcccaagagactcaacttcaagctcttcaacatccaggtcaaggaggtcacgcagaatgaaggcaccaagaccatcgccaataacctcaccagcaccatccaggtgtttacggactcggagtaccagctgccgtacgttctcggctctgcccaccagggctgcctgcctccgttcccggcggacgtgttcatgattccccagtacggctacctaacactcaacaacggtagtcaggccgtgggacgctcctccttctactgcctggaatactttccttcgcagatgctgagaaccggcaacaacttccagtttacttacaccttcgaggacgtgcctttccacagcagctacgcccacagccagagcttggaccggctgatgaatcctctgattgaccagtacctgtactacttgtctcggactcaaacaacaggaggcacgacaaatacgcagactctgggcttcagccaaggtgggcctaatacaatggccaatcaggcaaagaactggctgccaggaccctgttaccgccagcagcgagtatcaaagacatttgcggataacaacaacagtgaatactcgtggactggagctaccaagtaccacctcaatggcagagactctctggtgaatccgggcccggccatggcaagccacaaggacgatgaagaaaagttttttcctcagagcggggttctcatctttgggaagcaaggctcagagaaaacaaatgtggacattgaaaaggtcatgattacagacgaagaggaaatcaggacaaccaatcccgtggctacggagcagtatggttctgtatctaccaacctccagagaggcaacagacaagcagctaccgcagatgtcaacacacaaggcgttcttccaggcatggtctggcaggacagagatgtgtaccttcaggggcccatctgggcaaagattccacacacggacggacattttcacccctctcccctcatgggtggattcggacttaaacaccctccgcctcagatcctgatcaagaacacgcctgtacccgcggatcctccgaccaccttcaaccagtcaaagctgaactctttcatcacccagtattctactggccaagtcagcgtggagatcgagtgggagctgcagaaggaaaacagcaagcgctggaaccccgagatccagtacacctccaactactacaaatctacaagtgtggactttgctgttaatacagaaggcgtgtactctgaaccccgccccattggcacccgttacctcacccgtaatctgtaa

SEQ ID NO: 5269 - protein, 737 aa, Artificial Sequence
  Description of Artificial Sequence: Synthetic polypeptide
MAADGYLPDWLEDNLSEGIREWWDLKPGAPKPKANQQKQDDGRGLVLPGYKYLGPFNGLDKGEPVNAADAAALEHDKAYDQQLKAGDNPYLRYNHADAEFQERLQEDTSFGGNLGRAVFQAKKRVLEPFGLVEEGAKTAPGKKRPVEQSPQEPDSSSGIGKTGQQPARKRLNFGQTGDADSVPDPQPLGQPPAAPSGLGTNTMATGSGAPMADNNEGADGVGNSSGNWHCDSQWLGDRVITTSTRTWALPTYNNHLYKQISNSTSGGSSNDNAYFGYSTPWGYFDFNRFHCHFSPRDWQRLINNNWGFRPKRLNFKLFNIQVKEVTQNEGTKTIANNLTSTIQVFTDSEYQLPYVLGSAHQGCLPPFPADVFMIPQYGYLTLNNGSQAVGRSSFYCLEYFPSQMLRTGNNFQFTYTFEDVPFHSSYAHSQSLDRLMNPLIDQYLYYLSRTQTTGGTTNTQTLGFSQGGPNTMANQAKNWLPGPCYRQQRVSKTFADNNNSEYSWTGATKYHLNGRDSLVNPGPAMASHKDDEEKFFPQSGVLIFGKQGSEKTNVDIEKVMITDEEEIRTTNPVATEQYGSVSTNLQRGNRQAATADVNTQGVLPGMVWQDRDVYLQGPIWAKIPHTDGHFHPSPLMGGFGLKHPPPQILIKNTPVPADPPTTFNQSKLNSFITQYSTGQVSVEIEWELQKENSKRWNPEIQYTSNYYKSTSVDFAVNTEGVYSEPRPIGTRYLTRNL

SEQ ID NO: 5270 - DNA, 2217 bp, Artificial Sequence
  Description of Artificial Sequence: Synthetic polynucleotide
atggctgccgatggttatcttccagattggctcgaggacactctctctgaaggaataagacagtggtgggcgctgaaacctggagccccgaagcccaaagccaaccagcaaaagcaggacgacggccggggtctggtgcttcctggctacaagtacctcggacccttcaacggactcgacaagggggagcccgtcaacgcggcggatgcagcggccctcgagcacgacaaggcctacgaccagcagctcaaagcgggtgacaatccgtacctgcggtataaccacgccgacgccgagtttcaggagcgtctgcaagaagatacgtcttttgggggcaacctcgggcgagcagtcttccaggccaagaagcgggttctcgaacctctcggtctggttgaggaaggcgctaagacggctcctggaaagaagagaccggtagagccatcaccccagcgttctccagactcctctacgggcatcggcaagaaaggccaacagcccgccagaaaaagactcaattttggtcagactggcgactcagagtcagttccagaccctcaacctctcggagaaccaccagcagcccccacaagtttgggatctaatacaatggcttcaggcggtggcgcaccaatggcagacaataacgagggtgccgatggagtgggtaattcctcaggaaattggcattgcgattcccaatggctgggcgacagagtcatcaccaccagcacccgcacctgggccttgcccacctacaataaccacctctacaagcaaatctccagtgcttcaacgggggccagcaacgacaaccactacttcggctacagcaccccctgggggtattttgactttaaccgcttccactgccacttctcgccaagagactggcaaagactcatcaacaacaattggggattccggcccaagagactcaacttcaaactcttcaacatccaagtcaaggaggtcacgacgaatgatggcgtcacgaccatcgccaataacctcaccagcaccatccaggtgtttacggactcggagtaccagctgccgtacgttctcggctctgcccaccagggctgcctgcctccgttcccggcggacgtgttcatgattccccagtatggatacctcaccctgaacaacggaagtcaagcggtgggacgctcatccttttactgcctggagtacttcccttcgcagatgctaaggactggaaataacttccaattcagctataccttcgaggatgtaccttttcacagcagctacgctcacagccagagtttggatcgcttgatgaatcctcttattgatcagtatctgtactacctgaacagaacgcaaggaacaacctctggaacaaccaaccaatcacggctgctttttagccaggctgggcctcagtctatgtctttgcaggccagaaattggctacctgggccctgctaccggcaacagagactttcaaagactgctaacgacaacaacaacagtaactttccttggacagcagccagcaaatatcatctcaatggccgcgactcgctggtgaatccaggaccagctatggccagtcacaaggacgatgaagaaaaatttttccctatgcacggcaatctaatatttggcaaagaagggacaacggcaagtaacgcagaattagataatgtaatgattacggatgaagaagagattcgtaccaccaatcctgtggcaacagagcagtatggaactgtggcaaataacttgcagagctcaaatacagctcccacgactagaactgtcaatgatcagggggccttacctggcatggtgtggcaagatcgtgacgtgtaccttcaggggcccatctgggcaaagattccacacacggacggacattttcacccctctcccctcatgggtggattcggacttaaacaccctcctccgcagattctcatcaagaacaccccggtacctgcgaatccttcgaccaccttcagtgcggcaaagtttgcttccttcatcacacagtactccacgggacaggtcagcgtggagatcgagtgggagctgcagaaggaaaacagcaagcgctggaacccggagatccagtacacttccaactattacaagtctaataatgttgaatttgctgttaatactgaaggtgtatatagtgaaccccgccccattggcaccagatacctgactcgtaatctgtaa

SEQ ID NO: 5271 - protein, 738 aa, Artificial Sequence
  Description of Artificial Sequence: Synthetic polypeptide
MAADGYLPDWLEDTLSEGIRQWWALKPGAPKPKANQQKQDDGRGLVLPGYKYLGPFNGLDKGEPVNAADAAALEHDKAYDQQLKAGDNPYLRYNHADAEFQERLQEDTSFGGNLGRAVFQAKKRVLEPLGLVEEGAKTAPGKKRPVEPSPQRSPDSSTGIGKKGQQPARKRLNFGQTGDSESVPDPQPLGEPPAAPTSLGSNTMASGGGAPMADNNEGADGVGNSSGNWHCDSQWLGDRVITTSTRTWALPTYNNHLYKQISSASTGASNDNHYFGYSTPWGYFDFNRFHCHFSPRDWQRLINNNWGFRPKRLNFKLFNIQVKEVTTNDGVTTIANNLTSTIQVFTDSEYQLPYVLGSAHQGCLPPFPADVFMIPQYGYLTLNNGSQAVGRSSFYCLEYFPSQMLRTGNNFQFSYTFEDVPFHSSYAHSQSLDRLMNPLIDQYLYYLNRTQGTTSGTTNQSRLLFSQAGPQSMSLQARNWLPGPCYRQQRLSKTANDNNNSNFPWTAASKYHLNGRDSLVNPGPAMASHKDDEEKFFPMHGNLIFGKEGTTASNAELDNVMITDEEEIRTTNPVATEQYGTVANNLQSSNTAPTTRTVNDQGALPGMVWQDRDVYLQGPIWAKIPHTDGHFHPSPLMGGFGLKHPPPQILIKNTPVPANPSTTFSAAKFASFITQYSTGQVSVEIEWELQKENSKRWNPEIQYTSNYYKSNNVEFAVNTEGVYSEPRPIGTRYLTRNL

SEQ ID NO: 5272 - DNA, 2208 bp, Artificial Sequence; identical to SEQ ID NO: 5102
  Description of Artificial Sequence: Synthetic polynucleotide

SEQ ID NO: 5273 - protein, 735 aa, Artificial Sequence [sequence omitted]

SEQ ID NO: 5274 - DNA, 2208 bp, Artificial Sequence
  Description of Artificial Sequence: Synthetic polynucleotide
atggctgccgatggttatcttccagattggctcgaggacaacctctctgagggcattcgcgagtggtgggcgctgaaacctggagccccgaagcccaaagccaaccagcaaaagcaggacgacggccggggtctggtgcttcctggctacaagtacctcggacccttcaacggactcgacaagggggagcccgtcaacgcggcggacgccgcggccctcgagcacgacaaggcctacgaccagcagctgcaggcgggtgacaatccgtacctgcggtataaccacgccgacgccgagtttcaggagcgtctgcaagaagatacgtcttttgggggcaacctcgggcgagcagtcttccaggccaaaaagaggcttcttgaacctcttggtctggttgaggaagcagctaaaacggctcctggaaagaagaggcctgtagagcagtctcctcaggaaccggactcctccgcgggtattggcaaatcgggtgcacagcccgccaaaaagagactcaatttcggtcagactggcgactcagagtcagtcccagaccctcaacctctcggagaaccaccagcagcccccacaagtttgggatctaatacaatggcttcaggcggtggcgcaccaatggcagacaataacgaaggcgccgacggagtgggtaatgcctcaggaaattggcattgcgattccacatggctgggcgacagagtcatcaccaccagcacccgcacctgggccttgcccacctacagcaaccatctctacaagcaaatctccagccaatcaggagcttcaaacgacaacgactactttggctacagcaccccttgggggtattttgatttcaacagattccactgccacttttcaccacgtgactggcaaagactcatcaacaacaactggggattccgacccaagagactcaacttcaagctctttaacattcaagtcaaagaggtcacgcagaatgacggtacgacgacgattgccaataaccttaccagcacggttcaggtgtttactgactcggagtaccagctcccgtacgtcctcggctcggcgcatcaaggatgcctcccgccgttcccagcagacgtcttcatggtgccacagtatggatacctcaccctgaacaacgggagtcaggcagtaggacgctcttcattttactgcctggagtactttccttctcagatgctgcgtaccggaaacaactttaccttcagctacacttttgaggacgttcctttccacagcagctacgctcacagccagagtctggaccgtctcatgaatcctctcatcgaccagtacctgtattacttgagcagaacaaacactccaagtggaaccaccacgcagtcaaggcttcagttttctcaggccggagcgagtgacattcgggaccagtctaggaactggcttcctggaccctgttaccgccagcagcgagtatcaaagacatctgaggataacaacaacagtgaatactcgtggactggagctaccaagtaccacctcaatggcagagactctctggtgaatccgggcccggccatggcaagccacaaggacgatgaagaaaagttttttcctcagagcggggttctcatctttgggaagcaaggctcagagaaaacaaatgtggacattgaaaaggtcatgattacagacgaagaggaaatcaggacaaccaatcccgtggctacggagcagtatggttctgtatctaccaacctccagagaggcaacagacaagcagctaccgcagatgtcaacacacaaggcgttcttccaggcatggtctggcaggacagagatgtgtaccttcaggggcccatctgggcaaagattccacacacggacggacattttcacccctctcccctcatgggtggattcggacttaaacaccctcctccacagattctcatcaagaacaccccggtacctgcgaatccttcgaccaccttcagtgcggcaaagtttgcttccttcatcacacagtactccacgggacaggtcagcgtggagatcgagtgggagctgcagaaggaaaacagcaaacgctggaatcccgaaattcagtacacttccaactacaacaagtctgttaatgtggactttactgtggacactaatggcgtgtattcagagcctcgccccattggcaccagatacctgactcgtaatctgtaa

SEQ ID NO: 5275 - protein, 735 aa, Artificial Sequence
  Description of Artificial Sequence: Synthetic polypeptide
MAADGYLPDWLEDNLSEGIREWWALKPGAPKPKANQQKQDDGRGLVLPGYKYLGPFNGLDKGEPVNAADAAALEHDKAYDQQLQAGDNPYLRYNHADAEFQERLQEDTSFGGNLGRAVFQAKKRLLEPLGLVEEAAKTAPGKKRPVEQSPQEPDSSAGIGKSGAQPAKKRLNFGQTGDSESVPDPQPLGEPPAAPTSLGSNTMASGGGAPMADNNEGADGVGNASGNWHCDSTWLGDRVITTSTRTWALPTYSNHLYKQISSQSGASNDNDYFGYSTPWGYFDFNRFHCHFSPRDWQRLINNNWGFRPKRLNFKLFNIQVKEVTQNDGTTTIANNLTSTVQVFTDSEYQLPYVLGSAHQGCLPPFPADVFMVPQYGYLTLNNGSQAVGRSSFYCLEYFPSQMLRTGNNFTFSYTFEDVPFHSSYAHSQSLDRLMNPLIDQYLYYLSRTNTPSGTTTQSRLQFSQAGASDIRDQSRNWLPGPCYRQQRVSKTSEDNNNSEYSWTGATKYHLNGRDSLVNPGPAMASHKDDEEKFFPQSGVLIFGKQGSEKTNVDIEKVMITDEEEIRTTNPVATEQYGSVSTNLQRGNRQAATADVNTQGVLPGMVWQDRDVYLQGPIWAKIPHTDGHFHPSPLMGGFGLKHPPPQILIKNTPVPANPSTTFSAAKFASFITQYSTGQVSVEIEWELQKENSKRWNPEIQYTSNYNKSVNVDFTVDTNGVYSEPRPIGTRYLTRNL

SEQ ID NO: 5276 - DNA, 2208 bp, Artificial Sequence
  Description of Artificial Sequence: Synthetic polynucleotide
atggctgccgatggttatcttccagattggctcgaggacaacctctctgagggcattcgcgagtggtgggcgctgaaacctggagccccgaagcccaaagccaaccagcaaaagcaggacgacggccggggtctggtgcttcctggctacaagtacctcggacccttcaacggactcgacaagggggagcccgtcaacgcggcggacgcagcggccctcgagcacgacaaggcctacgaccagcagctgcaggcgggtgacaatccgtacctgcggtataaccacgccgacgccgagttccaggagcgtctgcaagaagatacgtcttttgggggcaacctcgggcgagcagtcttccaggccaagaagagggttctcgaaccttttggtctggttgaggaaggtgctaagacggctcctggaaagaaacgtccggtagagcagtcgccacaagagccagactcctcctcgggcattggcaagacaggccagcagcccgctaaaaagagactcaattttggtcagactggcgactcagagtcagtcccagaccctcaacctctcggagaaccaccagcagcccccacaagtttgggatctaatacaatggcttcaggcggtggcgcaccaatggcagacaataacgagggcgccgacggagtgggtaattcctcgggaaattggcattgcgattccacatggatgggcgacagagtcatcaccaccagcacccgaacctgggccctgcccacctacaacaaccacctctacaaacaaatttccagccaatcaggagcttcaaacgacaaccactactttggctacagcaccccttgggggtattttgactttaacagattccactgccacttttcaccacgtgactggcagcgactcattaacaacaactggggattccggcccaagaaactcaacttcaagctctttaacatccaggtcaaggaggtcacgcagaatgaaggcaccaagaccatcgccaataacctcaccagcaccatccaggtgtttacggactcggagtaccagctgccgtacgttctcggctctgcccaccagggctgcctgcctccgttcccggcggacgtgttcatgattccccagtacggctacctaacactcaacaacggtagtcaggccgtgggacgctcctccttctactgcctggaatactttccttcgcagatgctgagaaccggcaacaacttccagtttacttacaccttcgaggacgtgcctttccacagcagctacgcccacagccagagcttggaccggctgatgaatcctctgattgaccagtacctgtattacttgtctcggactcaaacaacaggaggcacgacaaatacgcagactctgggcttcagccaaggtgggcctaatacaatggccaatcaggcaaagaactggctgcctggaccctgttaccgccagcagcgagtatcaaagacatctgcggataacaacaacagtgaatactcgtggactggagctaccaagtaccacctcaatggcagagactctctggtgaatccgggcccggccatggcaagccacaaggacgatgaagaaaagttttttcctcagagcggggttctcatctttgggaagcaaggctcagagaaaacaaatgtggacattgaaaaggttatgattacagacgaagaggaaatcaggacaaccaatcccgtggctacggagcagtatggttctgtatctaccaacctccagagaggcaacagacaagcagctaccgcagatgtcaacacacagggcgttcttccaggcatggtctggcaggacagagatgtgtaccttcagggtcccatttgggccaaaattcctcacacagatggacactttcacccgtcccctcttatgggcggctttggactcaagaacccgcctcctcagatcctcatcaaaaacacgcctgttcctgcgaatcctccggcagagttttcagctacaaagtttgcttcattcatcacccaatactccacaggacaagtgagtgtggaaattgaatgggagctgcagaaagaaaacagcaagcgctggaatcccgaagtgcagtacacatccaattatgcaaaatctgccaacgttgattttactgtggacactaatggcgtgtattcagagcctcgccccattggcaccagatacctcacccgtaatctgtaa

SEQ ID NO: 5277 - protein, 735 aa, Artificial Sequence
  Description of Artificial Sequence: Synthetic polypeptide
MAADGYLPDWLEDNLSEGIREWWALKPGAPKPKANQQKQDDGRGLVLPGYKYLGPFNGLDKGEPVNAADAAALEHDKAYDQQLQAGDNPYLRYNHADAEFQERLQEDTSFGGNLGRAVFQAKKRVLEPFGLVEEGAKTAPGKKRPVEQSPQEPDSSSGIGKTGQQPAKKRLNFGQTGDSESVPDPQPLGEPPAAPTSLGSNTMASGGGAPMADNNEGADGVGNSSGNWHCDSTWMGDRVITTSTRTWALPTYNNHLYKQISSQSGASNDNHYFGYSTPWGYFDFNRFHCHFSPRDWQRLINNNWGFRPKKLNFKLFNIQVKEVTQNEGTKTIANNLTSTIQVFTDSEYQLPYVLGSAHQGCLPPFPADVFMIPQYGYLTLNNGSQAVGRSSFYCLEYFPSQMLRTGNNFQFTYTFEDVPFHSSYAHSQSLDRLMNPLIDQYLYYLSRTQTTGGTTNTQTLGFSQGGPNTMANQAKNWLPGPCYRQQRVSKTSADNNNSEYSWTGATKYHLNGRDSLVNPGPAMASHKDDEEKFFPQSGVLIFGKQGSEKTNVDIEKVMITDEEEIRTTNPVATEQYGSVSTNLQRGNRQAATADVNTQGVLPGMVWQDRDVYLQGPIWAKIPHTDGHFHPSPLMGGFGLKNPPPQILIKNTPVPANPPAEFSATKFASFITQYSTGQVSVEIEWELQKENSKRWNPEVQYTSNYAKSANVDFTVDTNGVYSEPRPIGTRYLTRNL

SEQ ID NO: 5278 - DNA, 2214 bp, Artificial Sequence; identical to SEQ ID NO: 5268
  Description of Artificial Sequence: Synthetic polynucleotide

SEQ ID NO: 5279 - protein, 737 aa, Artificial Sequence; identical to SEQ ID NO: 5269
  Description of Artificial Sequence: Synthetic polypeptide

SEQ ID NO: 5280 - protein, 736 aa, Artificial Sequence; identical to SEQ ID NO: 5093
  Description of Artificial Sequence: Synthetic polypeptide

SEQ ID NO: 5281 - protein, 736 aa, Artificial Sequence
  Description of Artificial Sequence: Synthetic polypeptide
MAADGYLPDWLEDNLSEGIREWWDLKPGAPKPKANQQKQDDGRGLVLPGYKYLGPFNGLDKGEPVNAADAAALEHDKAYDQQLKAGDNPYLRYNHADAEFQERLQEDTSFGGNLGRAVFQAKKRVLEPLGLVEEGAKTAPGKKRPVEQSPQEPDSSSGIGKTGQQPAKKRLNFGQTGDSESVPDPQPLGEPPAAPSGLGPNTMASGGGAPMADNNEGADGVGNSSGNWHCDSTWLGDRVITTSTRTWALPTYNNHLYKQISNGTSGGSTNDNTYFGYSTPWGYFDFNRFHCHFSPRDWQRLINNNWGFRPKRLNFKLFNIQVKEVTTNEGTKTIANNLTSTVQVFTDSEYQLPYVLGSAHQGCLPPFPADVFMVPQYGYLTLNNGSQALGRSSFYCLEYFPSQMLRTGNNFQFSYTFEDVPFHSSYAHSQSLDRLMNPLIDQYLYYLVRTQTTGTGGTQTLAFSQAGPSSMANQARNWVPGPCYRQQRVSTTTNQNNNSNFAWTGAAKFKLNGRDSLMNPGVAMASHKDDEDRFFPSSGVLIFGKQGAGNDGVDYSQVLITDEEEIKATNPVATEEYGAVAINNQRANTQAQTGLVHNQGVIPGMVWQNRDVYLQGPIWAKIPHTDGNFHPSPLMGGFGLKHPPPQILIKNTPVPADPPLTFNQAKLNSFITQYSTGQVSVEIEWELQKENSKRWNPEIQYTSNYYKSTNVDFAVNTEGVYSEPRPIGTRYLTRNL

SEQ ID NO: 5282 - protein, 736 aa, Artificial Sequence
  Description of Artificial Sequence: Synthetic polypeptide
MAADGYLPDWLEDNLSEGIREWWDLKPGAPKPKANQQKQDDGRGLVLPGYKYLGPFNGLDKGEPVNAADAAALEHDKAYDQQLKAGDNPYLRYNHADAEFQERLQEDTSFGGNLGRAVFQAKKRVLEPLGLVEEGAKTAPGKKRPVEQSPQEPDSSSGIGKTGQQPAKKRLNFGQTGDSESVPDPQPLGEPPAAPSGLGPNTMASGGGAPMADNNEGADGVGNSSGNWHCDSTWLGDRVITTSTRTWALPTYNNHLYKQISNGTSGGSTNDNTYFGYSTPWGYFDFNRFHCHFSPRDWQRLINNNWGFRPKRLNFKLFNIQVKEVTTNEGTKTIANNLTSTVQVFTDSEYQLPYVLGSAHQGCLPPFPADVFMVPQYGYLTLNNGSQALGRSSFYCLEYFPSQMLRTGNNFQFSYTFEDVPFHSSYAHSQSLDRLMNPLIDQYLYYLVRTQTTGTGGTQTLAFSQAGPSSMANQARNWVPGPCYRQQRVSTTTNQNNNSNFAWTGAAKFKLNGRDSLMNPGVAMASHKDDEDAFFPSSGVLIFGKQGAGNDGVDYSQVLITDEEEIKATNPVATEEYGAVAINNQAANTQAQTGLVHNQGVIPGMVWQNRDVYLQGPIWAKIPHTDGNFHPSPLMGGFGLKHPPPQILIKNTPVPADPPLTFNQAKLNSFITQYSTGQVSVEIEWELQKENSKRWNPEIQYTSNYYKSTNVDFAVNTEGVYSEPRPIGTRYLTRNL

SEQ ID NO: 5283 - protein, 538 aa, Artificial Sequence
  Description of Artificial Sequence: Synthetic polypeptide
MRAAAGGNGGDAGQGAEGVGNASGDWHCDSTWSESHVTTTSTRTWVLPTYNNHLYLRLGSSNASDTFNGFSTPWGYFDFNRFHCHFSPRDWQRLINNHWGLRPKSMQVRIFNIQVKEVTTSNGETTVSNNLTSTVQIFADSTYELPYVMDAGQEGSLPPFPNDVFMVPQYGYCGLVTGGSSQNQTDRNAFYCLEYFPSQMLRTGNNFEMVYKFENVPFHSMYAHSQSLDRLMNPLLDQYLWELQSTTSGGTLNQGNSATNFAKLTKTNFSGYRKNWLPGPMMKQQRFSKTASQNYKIPQGRNNSLLHYETRTTLDGRWSNFAPGTAMATAANDATDFSQAQLIFAGPNITGNTTTDANNLMFTSEDELRATNPRDTDLFGHLATNQQNATTVPTVDDVDGVGVYPGMVWQDRDIYYQGPIWAKIPHTDGHFHPSPLIGGFGLKSPPPQIFIKNTPVPANPATTFSPARINSFITQYSTGQVAVKIEWEIQKERSKRWNPEVQFTSNYGAQDSLLWAPDNAGAYKEPRAIGSRYLTNHL

SEQ ID NO: 5284 - protein, 736 aa, Artificial Sequence
  Description of Artificial Sequence: Synthetic polypeptide
MSFVDHPPDWLESIGDGFREFLGLEAGPPKPKANQQKQDNARGLVLPGYKYLGPGNGLDKGDPVNFADEVAREHDLSYQKQLEAGDNPYLKYNHADAEFQEKLASDTSFGGNLGKAVFQAKKRILEPLGLVETPDKTAPAAKKRPLEQSPQEPDSSSGVGKKGKQPARKRLNFDDEPGAGDGPPPEGPSSGAMSTETEMRAAAGGNGGDAGQGAEGVGNASGDWHCDSTWSESHVTTTSTRTWVLPTYNNHLYLRLGSSNASDTFNGFSTPWGYFDFNRFHCHFSPRDWQRLINNHWGLRPKSMQVRIFNIQVKEVTTSNGETTVSNNLTSTVHIFADSTYELPYVMDAGQEGSLPPFPNDVFMVPQYGYCGLVTGGSSQNQTDRNAFYCLEYFPSQMLRTGNNFEMVYKFENVPFHSMYAHSQSLDRLMNPLLDQYLWELQSTTSGGTLNQGNSATNFAKLTNKNFSGYRKNWLPGPMMKQQRFSKTASQNYKIPQGGNNSLLHYETRTTLDRRWSNFAPGTAMATAANDATDFSQAQLIFAGPNITGNTTTDANNLMFTSEDELRATNPRDTDLFGHLATNQQNATTVPTVDDVDGVGVYPGMVWQDRDIYYQGPIWAKIPHTDGHFHPSPLIGGFGLKSPPPQIFIKNTPVPANPATTFSPARINSFITQYSTGQVAVKIEWEIQKERSKRWNPEVQFTSNYGAQDSLLWAPDNAGAYKEPRAIGSRYLTNHL

SEQ ID NO: 5285 - protein, 736 aa, Artificial Sequence
  Description of Artificial Sequence: Synthetic polypeptide
MSFVDHPPDWLESIGDGFREFLGLEAGPPKPKANQQKQDNARGLVLPGYKYLGPGNGLDKGDPVNFADEVAREHDLSYQKQLEAGDNPYLKYNHADAEFQEKLASDTSFGGNLGKAVFQAKKRILEPLGLVETPDKTAPAAKKRPLEQSPQEPDSSSGVGKKGKQPARKRLNFDDEPGAGDGPPPEGPSSGAMSTETEMRAAAGGNGGDAGQGAEGVGNASGDWHCDSTWSESHVTTTSTRTWVLPTYNNHLYLRLGSSNASDTFNGFSTPWGYFDFNRFHCHFSPRDWQRLINNHWGLRPKSMQVRIFNIQVKEVTTSNGETTVSNNLTSTVQIFADSTYELPYVMDAGQEGSLPPFPNDVFMVPQYGYCGLVTGGSSQNQTDRNAFYCLEYFPSQMLRTGNNFEMVYKFENVPFHSMYAHSQSLDRLMNPLLDQYLWELQSTTSGGTLNQGNSATNFAKLTKTNFSGYRKNWLPGPMMKQQRFSKTASQNYKIPQGRNNSLLHYETRTTLDGRWSNFAPGTAMATAANDATDFSQAQLIFAGPNITGNTTTDANNLMFTSEDELRATNPRDTDLFGHLATNQQNATTVPTVDDVDGVGVYPGMVWQDRDIYYQGPIWAKIPHTDGHFHPSPLIGGFGLKSPPPQIFIKNTPVPANPATTFSPARINSFITQYSTGQVAVKIEWEIQKERSKRWNPEVQFTSNYGAQDSLLWAPDNAGAYKEPRAIGSRYLTNHL

SEQ ID NO: 5286 - DNA, 2214 bp, Artificial Sequence
  Description of Artificial Sequence: Synthetic polynucleotide
atggctgccgatggttatcttccagattggctcgaggacactctctctgaaggaataagacagtggtggaagctcaaacctggcccaccaccaccaaagcccgcagagcggcataaggacgacagcaggggtcttgtgcttcctgggtacaagtacctcggacccttcaacggactcgacaagggagagccggtcaacgaggcagacgccgcggccctcgagcacgacaaagcctacgaccggcagctcgacagcggagacaacccgtacctcaagtacaaccacgccgacgcggagtttcaggagcgccttaaagaagatacgtcttttgggggcaacctcgggcgagcagtcttccaggccaaaaagaggcttcttgaacctcttggtctggttgaggaagcggctaagacggctcctggaaagaagaggcctgtagagcagtctcctcaggaaccggactcctcctcgggcatcggcaagacaggccagcagcccgctaaaaagagactcaatttcggtcagactggcgacacagagtcagtcccagaccctcaaccaatcggagaacctcccgcagccccctcaggtgtgggatctcttacaatggcttcaggtggtggcgcaccagtggcagacaataacgaaggtgccgatggagtgggtagttcctcgggaaattggcattgcgattcccaatggctgggggacagagtcatcaccaccagcacccgaacctgggccctgcccacctacaacaatcacctctacaagcaaatctccaacgggacatcgggaggagccaccaacgacaacacctacttcggctacagcaccccctgggggtattttgactttaacagattccactgccacttttcaccacgtgactggcagcgactcatcaacaacaactggggattccggcccaagagactcagcttcaagctcttcaacatccaggtcaaggaggtcacgcagaatgaaggcaccaagaccatcgccaataaccttaccagcacggtccaggtcttcacggactcggagtaccagctgccgtacgttctcggctctgcccaccagggctgcctgcctccgttcccggcggacgtgttcatgattccccagtacggctacctaacactcaacaacggtagtcaggccgtgggacgctcctccttctactgcctggaatactttccttcgcagatgctgagaaccggcaacaacttccagtttacttacaccttcgaggacgtgcctttccacagcagctacgcccacagccagagcttggaccggctgatgaatcctctgattgaccagtacctgtactacttgtctcggactcaaacaacaggaggcacggcaaatacgcagactctgggcttcagccaaggtgggcctaatacaatggccaatcaggcaaagaactggctgccaggaccctgttaccgccaacaacgcgtctcaacgacaaccgggcaaaacaacaatagcaactttgcctggactgctgggaccaaataccatctgaatggaagaaattcattggctaatcctggcatcgctatggcaacacacaaagacgacaaggagcgtttttttcccagtaacgggatcctgatttttggcaaacaaaatgctgccagagacaatgcggattacagcgatgtcatgctcaccagcgaggaagaaatcaaaaccactaaccctgtggctacagaggaatacggtatcgtggcagataacttgcagcagcaaaacacggctcctcaaattggaactgtcaacagccagggggccttacccggtatggtttggcagaaccgggacgtgtacctgcagggtcccatctgggccaagattcctcacacggacggcaacttccacccgtctccgctgatgggcggctttggcctgaaacatcctccgcctcagatcctgatcaagaacacgcctgtacctgcggatcctccgaccaccttcaaccagtcaaagctgaactctttcatcacgcaatacagcaccggacaggtcagcgtggaaattgaatgggagctgcagaaggaaaacagcaagcgctggaaccccgagatccagtacacctccaactactacaaatctacaagtgtggactttgctgttaatacagaaggcgtgtactctgaaccccaccccattggcacccgttacctcacccgtcccctgtaa

SEQ ID NO: 5287 - protein, 737 aa, Artificial Sequence
  Description of Artificial Sequence: Synthetic polypeptide
MAADGYLPDWLEDTLSEGIRQWWKLKPGPPPPKPAERHKDDSRGLVLPGYKYLGPFNGLDKGEPVNEADAAALEHDKAYDRQLDSGDNPYLKYNHADAEFQERLKEDTSFGGNLGRAVFQAKKRLLEPLGLVEEAAKTAPGKKRPVEQSPQEPDSSSGIGKTGQQPAKKRLNFGQTGDTESVPDPQPIGEPPAAPSGVGSLTMASGGGAPVADNNEGADGVGSSSGNWHCDSQWLGDRVITTSTRTWALPTYNNHLYKQISNGTSGGATNDNTYFGYSTPWGYFDFNRFHCHFSPRDWQRLINNNWGFRPKRLSFKLFNIQVKEVTQNEGTKTIANNLTSTVQVFTDSEYQLPYVLGSAHQGCLPPFPADVFMIPQYGYLTLNNGSQAVGRSSFYCLEYFPSQMLRTGNNFQFTYTFEDVPFHSSYAHSQSLDRLMNPLIDQYLYYLSRTQTTGGTANTQTLGFSQGGPNTMANQAKNWLPGPCYRQQRVSTTTGQNNNSNFAWTAGTKYHLNGRNSLANPGIAMATHKDDKERFFPSNGILIFGKQNAARDNADYSDVMLTSEEEIKTTNPVATEEYGIVADNLQQQNTAPQIGTVNSQGALPGMVWQNRDVYLQGPIWAKIPHTDGNFHPSPLMGGFGLKHPPPQILIKNTPVPADPPTTFNQSKLNSFITQYSTGQVSVEIEWELQKENSKRWNPEIQYTSNYYKSTSVDFAVNTEGVYSEPHPIGTRYLTRPL

SEQ ID NO: 5288 - protein, 736 aa, Artificial Sequence
  Description of Artificial Sequence: Synthetic polypeptide
MAADGYLPDWLEDNLSEGIREWWDLKPGAPKPKANQQKQDDGRGLVLPGYKYLGPFNGLDKGEPVNAADAAALEHDKAYDQQLKAGDNPYLRYNHADAEFQERLQEDTSFGGNLGRAVFQAKKRVLEPLGLVEEGAKTAPGKKRPVEQSPQEPDSSSGIGKTGQQPAKKRLNFGQTGDTESVPDPQPIGEPPAAPSGVGSLTMASGGGAPVADNNEGADGVGSSSGNWHCDSQWLGDRVITTSTRTWALPTYNNHLYKQISSASTGASNDNHYFGYSTPWGYFDFNRFHCHFSPRDWQRLINNNWGFRPKRLNFKLFNIQVKEVTDNNGVKTIANNLTSTVQVFTDSDYQLPYVLGSAHQGCLPPFPADVFMIPQYGYLTLNNGSQAVGRSSFYCLEYFPSQMLRTGNNFQFTYTFEDVPFHSSYAHSQSLDRLMNPLIDQYLYYLSRTQTTGGTANTQTLGFSQGGPNTMANQAKNWLPGPCYRQQRVSTTTGQNNNSNFAWTAGTKYHLNGRNSLANPGIAMATHKDDKERFFPSNGILIFGKQNAARDNADYSDVMLTSEEEIKTTNPVATEEYGIVADNLQQQNTAPQIGTVNSQGALPGMVWQNRDVYLQGPIWAKIPHTDGNFHPSPLMGGFGLKHPPPQILIKNTPVPADPPTTFNQSKLNSFITQYSTGQVSVEIEWELQKENSKRWNPEIQYTSNYYKSTSVDFAVNTEGVYSEPHPIGTRYLTRPL

SEQ ID NO: 5289 - protein, 736 aa, Artificial Sequence
  Description of Artificial Sequence: Synthetic polypeptide
MAADGYLPDWLEDTLSEGIRQWWKLKPGPPPPKPAERHKDDSRGLVLPGYKYLGPFNGLDKGEPVNEADAAALEHDKAYDRQLDSGDNPYLKYNHADAEFQERLQGDTSFGGNLGRAVFQAKKRVLEPLGLVEEGAKTAPGKKRPVEQSPQEPDSSSGIGETGQQPAKKRLNFGQTGDSESVPDPQPLGEPPATPAAVGPTTMASGGGAPMADNNEGADGVGSSSGNWHCDSQWLGDRVITTSTRTWALPTYNNHLYKQISSASTGASNDNHYFGYSTPWGYFDFNRFHCHFSPRDWQRLINNNWGFRPKRLSFKLFNIQVKEVTDNNGVKTIANNLTSTVQVFTDSEYQLPYVLGSAHQGCLPPFPADVFMIPQYGYLTLNNGSQAVGRSSFYCLEYFPSQMLRTGNNFTFSYTFEDVPFHSSYAHSQSLDRLMNPLIDQYLYYLSRTQTTGGTANTQTLGFSQGGPNTMANQAKNWLPGPCYRQQRVSTTTGQNNNSNFAWTAGTKYHLNGRNSLANPGIAMATHKDDKERFFPSNGILIFGKQNAARDNADYSDVMLTSEEEIKTTNPVATEEYGIVADNLQQQNTAPQIGTVNSQGALPGMVWQNRDVYLQGPIWAKIPHTDGNFHPSPLMGGFGLKHPPPQILIKNTPVPADPPTTFNQSKLNSFITQYSTGQVSVEIEWELQKENSKRWNPEIQYTSNYYKSTSVDFAVNTEGVYSEPHPIGTRYLTRPL

SEQ ID NO: 5290 - DNA, 2181 bp, Artificial Sequence
  Description of Artificial Sequence: Synthetic polynucleotide
atgtcttttgttgatcaccctccagattggttggaagaagttggtgaaggtcttcgcgagtttttgggccttgaagcgggcccaccgaaaccaaaacccaatcagcagcatcaagatcaagcccgtggtcttgtgctgcctggttataactatctcggacccggaaacggtctcgatcgaggagagcctgtcaacagggcagacgaggtcgcgcgagagcacgacatctcgtacaacgagcagcttgaggcgggagacaacccctacctcaagtacaaccacgcggacgccgagtttcaggagaagctcgccgacgacacatccttcgggggaaacctcggaaaggcagtctttcaggccaagaaaagggttctcgaaccttttggcctggttgaagagggtgctaagacggcccctaccggaaagcggatagacgaccactttccaaaaagaaagaaggctcggaccgaagaggactccaagccttccacctcgtcagacgccgaagctggacccagcggatcccagcagctgcaaatcccagcacaaccagcctcaagtttgggagctgatacaatgtctgcgggaggtggcggcccattgggcgacaataaccaaggtgccgatggagtgggcaatgcctcgggagattggcattgcgattccacgtggatgggggacagagtcgtcaccaagtccacccgcacctgggtgctgcccagctacaacaaccaccagtaccgagagatcaaaagcggctccgtcgacggaagcaacgccaacgcctactttggatacagcaccccctgggggtactttgactttaaccgcttccacagccactggagcccccgagactggcaaagactcatcaacaactattggggcttcagaccccggtctctcagagtcaaaatcttcaacatccaagtcaaagaggtcacggtgcaggactccaccaccaccatcgccaacaacctcacctccaccgtccaagtgtttacggacgacgactaccaactcccgtacgtcgtcggcaacgggaccgagggatgcctgccggccttccccccgcaggtctttacgctgccgcagtacggctacgcgacgctgaaccgagacaacggagacaacccgacagagcggagcagcttcttttgcctagagtactttcccagcaagatgctgaggacgggcaacaactttgagtttacctacagctttgaagaggtgcccttccactgcagcttcgccccgagccagaacctctttaagctggccaacccgctggtggaccagtacctgtaccgcttcgtgagcacctcggccacgggcgccatccagttccaaaagaacctggcgggcagatacgccaacacctacaaaaactggttcccggggcccatgggccgaacccagggctggaacacgagctctggggtcagcagcaccaacagagtcagcgtcaacaacttttccgtctcaaaccggatgaacctggagggggccagctaccaagtgaacccccagcccaacgggatgacaaacacgctccaaggcagcaaccgctacgcgctggaaaacaccatgatcttcaacgctcaaaacgccacgccgggaactacctcggtgtacccagaggacaatctactgctgaccagcgagagcgagactcagcccgtcaaccgggtggcttacaacacgggcggtcagatggccaccaacgcccagaacgccaccacggctcccacggtcgggacctacaacctccaggaagtgcttcctggcagcgtatggatggagagggacgtgtacctccaaggacccatctgggccaagatcccagagacgggggcgcactttcacccctctccggccatgggcggattcggactcaaacacccgccgcccatgatgctcatcaaaaacacgccggtgcccggcaacatcaccagcttctcggacgtgcccgtcagcagcttcatcacccagtacagcaccgggcaggtcaccgtggagatggaatgggagctcaaaaaggaaaactccaagaggtggaacccagagatccagtacaccaacaactacaacgacccccagtttgtggactttgctccagacggctccggcgaatacagaaccaccagagccatcggaacccgatacctcacccgacccctt

SEQ ID NO: 5291 - protein, 726 aa, Artificial Sequence
  Description of Artificial Sequence: Synthetic polypeptide
MSFVDHPPDWLEEVGEGLREFLGLEAGPPKPKPNQQHQDQARGLVLPGYNYLGPGNGLDRGEPVNRADEVAREHDISYNEQLEAGDNPYLKYNHADAEFQEKLADDTSFGGNLGKAVFQAKKRVLEPFGLVEEGAKTAPTGKRIDDHFPKRKKARTEEDSKPSTSSDAEAGPSGSQQLQIPAQPASSLGADTMSAGGGGPLGDNNQGADGVGNASGDWHCDSTWMGDRVVTKSTRTWVLPSYNNHQYREIKSGSVDGSNANAYFGYSTPWGYFDFNRFHSHWSPRDWQRLINNYWGFRPRSLRVKIFNIQVKEVTVQDSTTTIANNLTSTVQVFTDDDYQLPYVVGNGTEGCLPAFPPQVFTLPQYGYATLNRDNGDNPTERSSFFCLEYFPSKMLRTGNNFEFTYSFEEVPFHCSFAPSQNLFKLANPLVDQYLYRFVSTSATGAIQFQKNLAGRYANTYKNWFPGPMGRTQGWNTSSGSSTNRVSVNNFSVSNRMNLEGASYQVNPQPNGMTNTLQGSNRYALENTMIFNAQNATPGTTSVYPEDNLLLTSESETQPVNRVAYNTGGQMATNAQNATTAPTVGTYNLQEVLPGSVWMERDVYLQGPIWAKIPETGAHFHPSPAMGGFGLKHPPPMMLIKNTPVPGNITSFSDVPVSSFITQYSTGQVTVEMEWELKKENSKRWNPEIQYTNNYNDPQFVDFAPDGSGEYRTTRAIGTRYLTRPL

SEQ ID NO: 5292 - protein, 735 aa, Artificial Sequence
  Description of Artificial Sequence: Synthetic polypeptide
MAADGYLPDWLEDTLSEGIRQWWKLKPGPPPPKPAERHKDDSRGLVLPGYKYLGPFNGLDKGEPVNEADAAALEHDKAYDRQLDSGDNPYLKYNHADAEFQERLKEDTSFGGNLGRAVFQAKKRILEPLGLVEEPVKTAPGKKRPVEHSPAEPDSSSGTGKSGQQPARKRLNFGQTGDADSVPDPQPLGQPPAAPSGLGTNTMASGSGAPMADNNEGADGVGNSSGNWHCDSTWMGDRVITTSTRTWALPTYNNHLYKQISSQSGASNDNHYFGYSTPWGYFDFNRFHCHFSPRDWQRLINNNWGFRPKRLSFKLFNIQVKEVTQNDGTTTIANNLTSTVQVFTDSEYQLPYVLGSAHQGCLPPFPADVFMVPQYGYLTLNNGSQAVGRSSFYCLEYFPSQMLRTGNNFTFSYTFEDVPFHSSYAHSQSLDRLMNPLIDQYLYYLSRTNTPSGTTTMSRLQFSQAGASDIRDQSRNWLPGPCYRQQRVSKTAADNNNSDYSWTGATKYHLNGRDSLVNPGPAMASHKDDEEKYFPQSGVLIFGKQDSGKTNVDIEKVMITDEEEIRTTNPVATEQYGSVSTNLQSGNTQAATSDVNTQGVLPGMVWQDRDVYLQGPIWAKIPHTDGHFHPSPLMGGFGLKHPPPQILIKNTPVPANPSTTFSAAKFASFITQYSTGQVSVEIEWELQKENSKRWNPEIQYTSNYNKSVNVDFTVDTNGVYSEPRPIGTRYLTRNL

SEQ ID NO: 5293 - DNA, 1803 bp, Bovine adeno-associated virus
acggcgcctgcggcaaaaaagaggcctctagagcagagtcctcaagagccagactcctcgagcggagttggcaagaaaggcaaacagcctgccagaaagagactcaactttgacgacgaacctggagccggagacgggcctcccccagaaggaccatcttccggagctatgtctactgagactgaaatgcgtgcagcagctggcggaaatggtggcgatgcgggacaaggtgccgagggagtgggtaatgcctccggtgattggcattgcgattccacttggtcagagagccacgtcaccaccacctcaacccgcacctgggtcctgccgacctacaacaaccacctgtacctgcggctcggctcgagcaacgccagcgacaccttcaacggattctccaccccctggggatactttgactttaaccgcttccactgccacttctcgccaagagactggcaaaggctcatcaacaaccactggggactgcgccccaaaagcatgcaagtccgcatcttcaacatccaagttaaggaggtcacgacgtctaacggggagacgaccgtatccaacaacctcaccagcacggtccagatctttgcggacagcacgtacgagctcccgtacgtgatggatgcaggtcaggagggcagcttgcctcctttccccaacgacgtgttcatggtgcctcagtacgggtactgcggactggtaaccggaggcagctctcaaaaccagacagacagaaatgccttctactgtctggagtactttcccagccagatgctgagaaccggaaacaactttgagatggtgtacaagtttgaaaacgtgcccttccactccatgtacgctcacagccagagcctggataggctgatgaacccgctgctggaccagtacctgtgggagctccagtctaccacctctggaggaactctcaaccagggcaattcagccaccaactttgccaagctgaccaaaacaaacttttctggctaccgcaaaaactggctcccggggcccatgatgaagcagcagagattctccaagactgccagtcaaaactacaagattccccagggaagaaacaacagtctgctccattatgagaccagaactaccctcgacggaagatggagcaattttgccccgggaacggccatggcaaccgcagccaacgacgccaccgacttctctcaggcccagctcatctttgcggggcccaacatcaccggcaacaccaccacagatgccaataacctgatgttcacttcagaagatgaacttagggccaccaacccccgggacactgacctgtttggccacctggcaaccaaccagcaaaacgccaccaccgttcctaccgtagacgacgtggacggagtcggcgtgtacccgggaatggtgtggcaggacagagacatttactaccaagggcccatttgggccaaaattccacacacggatggacactttcacccgtctcctctcattggcggatttggactgaaaagcccgcctccacaaatattcatcaaaaacactcctgtacccgccaatcccgcaacgaccttctctccggccagaatcaacagcttcatcacccagtacagcaccggacaggtggctgtcaaaatagaatgggaaatccagaaggagcggtccaagagatggaacccagaggtccagttcacgtccaactacggagcacaggactcgcttctctgggctcccgacaacgccggagcctacaaagagcccagggccattggatcccgatacctcaccaaccacctctag

SEQ ID NO: 5294 - DNA, 1617 bp, Bovine adeno-associated virus
atgcgtgcagcagctggcggaaatggtggcgatgcgggacaaggtgccgagggagtgggtaatgcctccggtgattggcattgcgattccacttggtcagagagccacgtcaccaccacctcaacccgcacctgggtcctgccgacctacaacaaccacctgtacctgcggctcggctcgagcaacgccagcgacaccttcaacggattctccaccccctggggatactttgactttaaccgcttccactgccacttctcgccaagagactggcaaaggctcatcaacaaccactggggactgcgccccaaaagcatgcaagtccgcatcttcaacatccaagttaaggaggtcacgacgtctaacggggagacgaccgtatccaacaacctcaccagcacggtccagatctttgcggacagcacgtacgagctcccgtacgtgatggatgcaggtcaggagggcagcttgcctcctttccccaacgacgtgttcatggtgcctcagtacgggtactgcggactggtaaccggaggcagctctcaaaaccagacagacagaaatgccttctactgtctggagtactttcccagccagatgctgagaaccggaaacaactttgagatggtgtacaagtttgaaaacgtgcccttccactccatgtacgctcacagccagagcctggataggctgatgaacccgctgctggaccagtacctgtgggagctccagtctaccacctctggaggaactctcaaccagggcaattcagccaccaactttgccaagctgaccaaaacaaacttttctggctaccgcaaaaactggctcccggggcccatgatgaagcagcagagattctccaagactgccagtcaaaactacaagattccccagggaagaaacaacagtctgctccattatgagaccagaactaccctcgacggaagatggagcaattttgccccgggaacggccatggcaaccgcagccaacgacgccaccgacttctctcaggcccagctcatctttgcggggcccaacatcaccggcaacaccaccacagatgccaataacctgatgttcacttcagaagatgaacttagggccaccaacccccgggacactgacctgtttggccacctggcaaccaaccagcaaaacgccaccaccgttcctaccgtagacgacgtggacggagtcggcgtgtacccgggaatggtgtggcaggacagagacatttactaccaagggcccatttgggccaaaattccacacacggatggacactttcacccgtctcctctcattggcggatttggactgaaaagcccgcctccacaaatattcatcaaaaacactcctgtacccgccaatcccgcaacgaccttctctccggccagaatcaacagcttcatcacccagtacagcaccggacaggtggctgtcaaaatagaatgggaaatccagaaggagcggtccaagagatggaacccagaggtccagttcacgtccaactacggagcacaggactcgcttctctgggctcccgacaacgccggagcctacaaagagcccagggccattggatcccgatacctcaccaaccacctctag

SEQ ID NO: 5295 - DNA, 1173 bp, Bovine adeno-associated virus
atggcgctggtaagctggctggtggaacatggcatcacttccgagaagcagtggattcaggagaatcaggagagctacctgtccttcaactccacgggaaactctcggagccagattaaagccgcgcttgacaacgcgtcaaaaattatgagtctgaccaaatctgcctcagactatctcgtgggacagactgttccagaggacatttctgaaaacagaatctggcagatttttgatctcaacggctacgacccggcatacgcgggctctgttctctacggctggtgcactcgcgcctttggaaagaggaacaccgtctggctgtatggacccgcgaccaccggaaagaccaacatcgcggaagccatctctcacaccgtgcccttttatggctgtgtgaactggactaatgagaactttccctttaatgactgtgtggaaaaaatgttgatctggtgggaggagggaaagatgaccagcaaggtggtggaacccgccaaggccatcttgggggggtctagagtacgagtggatcaaaaatgtaaatcctctgtacaagtagactctaccccggtgattatcacctccaatactaacatgtgtgtggtggtggatgggaactccacgacctttgaacaccagcagccgctggaagaccgcatgttcagatttgaactcatgcggcggctcccgccagattttggcaagattaccaagcaggaagtcaaagacttttttgcttgggcaaaggtcaaccaggtgccggtgactcacgagtttatggttcccaagaaagtggcgggaactgagagggcggagacttctagaaaacgcccactggatgacgtcaccaataccaactataaaagtccggagaagcgggcccggctctcagttgttcctgagacgcctcgcagttcagacgtgcctgtagagcccgctcctctgcgacctctcaactggtcttccaggtatgaatgcagatgtgactatcatgctaaatttgactctgtaacgggggaatgtgacgagtgtgaatatttgaatcggggcaaaaatggctgtatctttcataatgctacacattgtcaaatttgtcacgctgttcctccatgggaaaaggaaaatgtgtcagattttaatgattttgatgactgtaataaagagcagtaa

SEQ ID NO: 5296 - DNA, 1833 bp, Bovine adeno-associated virus
atggctaccttctatgaagtcattgttcgcgttccatttgatgtggaagagcacctgcctggaatttctgacaactttgtagactgggtaactggtcaaatttgggagctgcctcccgagtcagatttgaatttgactctgattgagcagcctcagctgacggtggctgacagaattcgccgcgtgttcctgtacgagtggaacaaattttccaagcaggagagcaaattctttgtgcagtttgaaaagggatctgaatattttcatctgcacacgctcgtggagacctccggcatctcttctatggtccttggccgctacgtgagtcagattcgcgcccagctggtgaaggtggtgttccagaacattgagccgcggattaacgactgggtcgccatcaccaaggtaaagaagggcggagccaataaggtggtggattctgggtatattcccgcctacctgctgccgaaggtccaaccagagcttcagtgggcgtggactaacctcgaagagtataaattggccgccctcaatctggaggagcgcaaacggctcgtcgctcagtttcagcttgagtcctcgcagcgctcgcaagaggcatcttcccagagggacgtttcggctgacccggtcatcaagagcaagacttcccagaaatacatggcgctggtaagctggctggtggaacatggcatcacttccgagaagcagtggattcaggagaatcaggagagctacctgtccttcaactccacgggaaactctcggagccagattaaagccgcgcttgacaacgcgtcaaaaattatgagtctgaccaaatctgcctcagactatctcgtgggacagactgttccagaggacatttctgaaaacagaatctggcagatttttgatctcaacggctacgacccggcatacgcgggctctgttctctacggctggtgcactcgcgcctttggaaagaggaacaccgtctggctgtatggacccgcgaccaccggaaagaccaacatcgcggaagccatctctcacaccgtgcccttttatggctgtgtgaactggactaatgagaactttccctttaatgactgtgtggaaaaaatgttgatctggtgggaggagggaaagatgaccagcaaggtggtggaacccgccaaggccatcttgggggggtctagagtacgagtggatcaaaaatgtaaatcctctgtacaagtagactctaccccggtgattatcacctccaatactaacatgtgtgtggtggtggatgggaactccacgacctttgaacaccagcagccgctggaagaccgcatgttcagatttgaactcatgcggcggctcccgccagattttggcaagattaccaagcaggaagtcaaagacttttttgcttgggcaaaggtcaaccaggtgccggtgactcacgagtttatggttcccaagaaagtggcgggaactgagagggcggagacttctagaaaacgcccactggatgacgtcaccaataccaactataaaagtccggagaagcgggcccggctctcagttgttcctgagacgcctcgcagttcagacgtgcctgtagagcccgctcctctgcgacctctcaactggtcttccaggtatgaatgcagatgtgactatcatgctaaatttgactctgtaacgggggaatgtgacgagtgtgaatatttgaatcggggcaaaaatggctgtatctttcataatgctacacattgtcaaatttgtcacgctgttcctccatgggaaaaggaaaatgtgtcagattttaatgattttgatgactgtaataaagagcagtaa

SEQ ID NO: 5297 - DNA, 2211 bp, Bovine adeno-associated virus
atgtcttttgttgaccaccctccagattggttggaatcgatcggcgacggctttcgtgaatttctcggccttgaggcgggtcccccgaaacccaaggccaatcaacagaagcaagataacgctcgaggtcttgtgcttcctgggtacaagtatcttggtcctgggaacggccttgataagggcgatcctgtcaattttgctgacgaggttgcccgagagcacgacctctcctaccagaaacagcttgaggcgggcgataacccttacctcaagtacaaccacgcggacgcagagtttcaggagaaactcgcttctgacacttcttttgggggaaaccttgggaaggctgttttccaggctaaaaagaggattctcgaacctcttggcctggttgagacgccggataaaacggcgcctgcggcaaaaaagaggcctctagagcagagtcctcaagagccagactcctcgagcggagttggcaagaaaggcaaacagcctgccagaaagagactcaactttgacgacgaacctggagccggagacgggcctcccccagaaggaccatcttccggagctatgtctactgagactgaaatgcgtgcagcagctggcggaaatggtggcgatgcgggacaaggtgccgagggagtgggtaatgcctccggtgattggcattgcgattccacttggtcagagagccacgtcaccaccacctcaacccgcacctgggtcctgccgacctacaacaaccacctgtacctgcggctcggctcgagcaacgccagcgacaccttcaacggattctccaccccctggggatactttgactttaaccgcttccactgccacttctcgccaagagactggcaaaggctcatcaacaaccactggggactgcgccccaaaagcatgcaagtccgcatcttcaacatccaagttaaggaggtcacgacgtctaacggggagacgaccgtatccaacaacctcaccagcacggtccagatctttgcggacagcacgtacgagctcccgtacgtgatggatgcaggtcaggagggcagcttgcctcctttccccaacgacgtgttcatggtgcctcagtacgggtactgcggactggtaaccggaggcagctctcaaaaccagacagacagaaatgccttctactgtctggagtactttcccagccagatgctgagaaccggaaacaactttgagatggtgtacaagtttgaaaacgtgcccttccactccatgtacgctcacagccagagcctggataggctgatgaacccgctgctggaccagtacctgtgggagctccagtctaccacctctggaggaactctcaaccagggcaattcagccaccaactttgccaagctgaccaaaacaaacttttctggctaccgcaaaaactggctcccggggcccatgatgaagcagcagagattctccaagactgccagtcaaaactacaagattccccagggaagaaacaacagtctgctccattatgagaccagaactaccctcgacggaagatggagcaattttgccccgggaacggccatggcaaccgcagccaacgacgccaccgacttctctcaggcccagctcatctttgcggggcccaacatcaccggcaacaccaccacagatgccaataacctgatgttcacttcagaagatgaacttagggccaccaacccccgggacactgacctgtttggccacctggcaaccaaccagcaaaacgccaccaccgttcctaccgtagacgacgtggacggagtcggcgtgtacccgggaatggtgtggcaggacagagacatttactaccaagggcccatttgggccaaaattccacacacggatggacactttcacccgtctcctctcattggcggatttggactgaaaagcccgcctccacaaatattcatcaaaaacactcctgtacccgccaatcccgcaacgaccttctctccggccagaatcaacagcttcatcacccagtacagcaccggacaggtggctgtcaaaatagaatgggaaatccagaaggagcggtccaagagatggaacccagaggtccagttcacgtccaactacggagcacaggactcgcttctctgggctcccgacaacgccggagcctacaaagagcccagggccattggatcccgatacctcaccaaccacctctag

SEQ ID NO: 5298 - DNA, 4694 bp, Bovine adeno-associated virus
gtggcactcccccccctgtcgcgttcgctcgttcgctggctcgattgggggggtggcagctcaaagagctgccagacgacggccctctgggccgtcgcccccccaatcgagccagcgaacgagcgaacgcgacaggggggggagtgccacactctctagcaagggggttttgtaggtggtgatgtcattgttgatgtcattatagttgtcacgcgatagttaatgattaacagtcatgtgatgtgtgttatccaataggatgaaagcgcgcgaatgagatctcgcgagacttccggggtataaaaggggtgagtgaacgagcccgccgccattctctgctctggactgctagaggaccctcgctgccatggctaccttctatgaagtcattgttcgcgttccatttgatgtggaagagcacctgcctggaatttctgacaactttgtagactgggtaactggtcaaatttgggagctgcctcccgagtcagatttgaatttgactctgattgagcagcctcagctgacggtggctgacagaattcgccgcgtgttcctgtacgagtggaacaaattttccaagcaggagagcaaattctttgtgcagtttgaaaagggatctgaatattttcatctgcacacgctcgtggagacctccggcatctcttctatggtccttggccgctacgtgagtcagattcgcgcccagctggtgaaggtggtgttccagaacattgagccgcggattaacgactgggtcgccatcaccaaggtaaagaagggcggagccaataaggtggtggattctgggtatattcccgcctacctgctgccgaaggtccaaccagagcttcagtgggcgtggactaacctcgaagagtataaattggccgccctcaatctggaggagcgcaaacggctcgtcgctcagtttcagcttgagtcctcgcagcgctcgcaagaggcatcttcccagagggacgtttcggctgacccggtcatcaagagcaagacttcccagaaatacatggcgctggtaagctggctggtggaacatggcatcacttccgagaagcagtggattcaggagaatcaggagagctacctgtccttcaactccacgggaaactctcggagccagattaaagccgcgcttgacaacgcgtcaaaaattatgagtctgaccaaatctgcctcagactatctcgtgggacagactgttccagaggacatttctgaaaacagaatctggcagatttttgatctcaacggctacgacccggcatacgcgggctctgttctctacggctggtgcactcgcgcctttggaaagaggaacaccgtctggctgtatggacccgcgaccaccggaaagaccaacatcgcggaagccatctctcacaccgtgcccttttatggctgtgtgaactggactaatgagaactttccctttaatgactgtgtggaaaaaatgttgatctggtgggaggagggaaagatgaccagcaaggtggtggaacccgccaaggccatcttgggggggtctagagtacgagtggatcaaaaatgtaaatcctctgtacaagtagactctaccccggtgattatcacctccaatactaacatgtgtgtggtggtggatgggaactccacgacctttgaacaccagcagccgctggaagaccgcatgttcagatttgaactcatgcggcggctcccgccagattttggcaagattaccaagcaggaagtcaaagacttttttgcttgggcaaaggtcaaccaggtgccggtgactcacgagtttatggttcccaagaaagtggcgggaactgagagggcggagacttctagaaaacgcccactggatgacgtcaccaataccaactataaaagtccggagaagcgggcccggctctcagttgttcctgagacgcctcgcagttcagacgtgcctgtagagcccgctcctctgcgacctctcaactggtcttccaggtatgaatgcagatgtgactatcatgctaaatttgactctgtaacgggggaatgtgacgagtgtgaatatttgaatcggggcaaaaatggctgtatctttcataatgctacacattgtcaaatttgtcacgctgttcctccatgggaaaaggaaaatgtgtcagattttaatgattttgatgactgtaataaagagcagtaaataaagtgagtagtcatgtcttttgttgaccaccctccagattggttggaatcgatcggcgacggctttcgtgaatttctcggccttgaggcgggtcccccgaaacccaaggccaatcaacagaagcaagataacgctcgaggtcttgtgcttcctgggtacaagtatcttggtcctgggaacggccttgataagggcgatcctgtcaattttgctgacgaggttgcccgagagcacgacctctcctaccagaaacagcttgaggcgggcgataacccttacctcaagtacaaccacgcggacgcagagtttcaggagaaactcgcttctgacacttcttttgggggaaaccttgggaaggctgttttccaggctaaaaagaggattctcgaacctcttggcctggttgagacgccggataaaacggcgcctgcggcaaaaaagaggcctctagagcagagtcctcaagagccagactcctcgagcggagttggcaagaaaggcaaacagcctgccagaaagagactcaactttgacgacgaacctggagccggagacgggcctcccccagaaggaccatcttccggagctatgtctactgagactgaaatgcgtgcagcagctggcggaaatggtggcgatgcgggacaaggtgccgagggagtgggtaatgcctccggtgattggcattgcgattccacttggtcagagagccacgtcaccaccacctcaacccgcacctgggtcctgccgacctacaacaaccacctgtacctgcggctcggctcgagcaacgccagcgacaccttcaacggattctccaccccctggggatactttgactttaaccgcttccactgccacttctcgccaagagactggcaaaggctcatcaacaaccactggggactgcgccccaaaagcatgcaagtccgcatcttcaacatccaagttaaggaggtcacgacgtctaacggggagacgaccgtatccaacaacctcaccagcacggtccagatctttgcggacagcacgtacgagctcccgtacgtgatggatgcaggtcaggagggcagcttgcctcctttccccaacgacgtgttcatggtgcctcagtacgggtactgcggactggtaaccggaggcagctctcaaaaccagacagacagaaatgccttctactgtctggagtactttcccagccagatgctgagaaccggaaacaactttgagatggtgtacaagtttgaaaacgtgcccttccactccatgtacgctcacagccagagcctggataggctgatgaacccgctgctggaccagtacctgtgggagctccagtctaccacctctggaggaactctcaaccagggcaattcagccaccaactttgccaagctgaccaaaacaaacttttctggctaccgcaaaaactggctcccggggcccatgatgaagcagcagagattctccaagactgccagtcaaaactacaagattccccagggaagaaacaacagtctgctccattatgagaccagaactaccctcgacggaagatggagcaattttgccccgggaacggccatggcaaccgcagccaacgacgccaccgacttctctcaggcccagctcatctttgcggggcccaacatcaccggcaacaccaccacagatgccaataacctgatgttcacttcagaagatgaacttagggccaccaacccccgggacactgacctgtttggccacctggcaaccaaccagcaaaacgccaccaccgttcctaccgtagacgacgtggacggagtcggcgtgtacccgggaatggtgtggcaggacagagacatttactaccaagggcccatttgggccaaaattccacacacggatggacactttcacccgtctcctctcattggcggatttggactgaaaagcccgcctccacaaatattcatcaaaaacactcctgtacccgccaatcccgcaacgaccttctctccggccagaatcaacagcttcatcacccagtacagcaccggacaggtggctgtcaaaatagaatgggaaatccagaaggagcggtccaagagatggaacccagaggtccagttcacgtccaactacggagcacaggactcgcttctctgggctcccgacaacgccggagcctacaaagagcccagggccattggatcccgatacctcaccaaccacctctagcccaattctgttgcataccctcaataaaccgtgtattcgtttcagtaaaatactgcctcttgtggtcattcggcgtacaacagcttacaacaacaacaaaacccccttgctagagagtgtggcactcccccccctgtcgcgttcgctcgttcgctggctcgattgggggggtggcagctcaaagagctgccagacgacggccctctgggccgtcgcccccccaatcgagccagcgaacgagcgaacgcgacaggggggggagtgccac

SEQ ID NO: 5299 - protein, 390 aa, Bovine adeno-associated virus
MALVSWLVEHGITSEKQWIQENQESYLSFNSTGNSRSQIKAALDNASKIMSLTKSASDYLVGQTVPEDISENRIWQIFDLNGYDPAYAGSVLYGWCTRAFGKRNTVWLYGPATTGKTNIAEAISHTVPFYGCVNWTNENFPFNDCVEKMLIWWEEGKMTSKVVEPAKAILGGSRVRVDQKCKSSVQVDSTPVIITSNTNMCVVVDGNSTTFEHQQPLEDRMFRFELMRRLPPDFGKITKQEVKDFFAWAKVNQVPVTHEFMVPKKVAGTERAETSRKRPLDDVTNTNYKSPEKRARLSVVPETPRSSDVPVEPAPLRPLNWSSRYECRCDYHAKFDSVTGECDECEYLNRGKNGCIFHNATHCQICHAVPPWEKENVSDFNDFDDCNKEQ

SEQ ID NO: 5300 - protein, 610 aa, Bovine adeno-associated virus
MATFYEVIVRVPFDVEEHLPGISDNFVDWVTGQIWELPPESDLNLTLIEQPQLTVADRIRRVFLYEWNKFSKQESKFFVQFEKGSEYFHLHTLVETSGISSMVLGRYVSQIRAQLVKVVFQNIEPRINDWVAITKVKKGGANKVVDSGYIPAYLLPKVQPELQWAWTNLEEYKLAALNLEERKRLVAQFQLESSQRSQEASSQRDVSADPVIKSKTSQKYMALVSWLVEHGITSEKQWIQENQESYLSFNSTGNSRSQIKAALDNASKIMSLTKSASDYLVGQTVPEDISENRIWQIFDLNGYDPAYAGSVLYGWCTRAFGKRNTVWLYGPATTGKTNIAEAISHTVPFYGCVNWTNENFPFNDCVEKMLIWWEEGKMTSKVVEPAKAILGGSRVRVDQKCKSSVQVDSTPVIITSNTNMCVVVDGNSTTFEHQQPLEDRMFRFELMRRLPPDFGKITKQEVKDFFAWAKVNQVPVTHEFMVPKKVAGTERAETSRKRPLDDVTNTNYKSPEKRARLSVVPETPRSSDVPVEPAPLRPLNWSSRYECRCDYHAKFDSVTGECDECEYLNRGKNGCIFHNATHCQICHAVPPWEKENVSDFNDFDDCNKEQ

SEQ ID NO: 5301 - protein, 736 aa, Bovine adeno-associated virus; identical to SEQ ID NO: 5285

SEQ ID NO: 5302 - protein, 600 aa, Bovine adeno-associated virus
TAPAAKKRPLEQSPQEPDSSSGVGKKGKQPARKRLNFDDEPGAGDGPPPEGPSSGAMSTETEMRAAAGGNGGDAGQGAEGVGNASGDWHCDSTWSESHVTTTSTRTWVLPTYNNHLYLRLGSSNASDTFNGFSTPWGYFDFNRFHCHFSPRDWQRLINNHWGLRPKSMQVRIFNIQVKEVTTSNGETTVSNNLTSTVQIFADSTYELPYVMDAGQEGSLPPFPNDVFMVPQYGYCGLVTGGSSQNQTDRNAFYCLEYFPSQMLRTGNNFEMVYKFENVPFHSMYAHSQSLDRLMNPLLDQYLWELQSTTSGGTLNQGNSATNFAKLTKTNFSGYRKNWLPGPMMKQQRFSKTASQNYKIPQGRNNSLLHYETRTTLDGRWSNFAPGTAMATAANDATDFSQAQLIFAGPNITGNTTTDANNLMFTSEDELRATNPRDTDLFGHLATNQQNATTVPTVDDVDGVGVYPGMVWQDRDIYYQGPIWAKIPHTDGHFHPSPLIGGFGLKSPPPQIFIKNTPVPANPATTFSPARINSFITQYSTGQVAVKIEWEIQKERSKRWNPEVQFTSNYGAQDSLLWAPDNAGAYKEPRAIGSRYLTNHL

SEQ ID NO: 5303 - DNA, 147463 bp, Homo sapiens
acccccgagaaagcaacccagcgcgccgcccgctcctcacgtgtccctcccggccccggggccacctcacgttctgcttccgtctgacccctccgacttccggtaaagagtccctatccgcacctccgctcccacccggcgcctcggcgcgcccgccctccgatgcgctcagcggccgcagctcctcggagtcccgcggtggccaccgagtctcgccgcttcgccgcagccaggtggcccgggtggcgctcgctccagcggccggcgcggcggagcgggcggggcggcggtggcgcggccccgggaccgtatccctccgccgcccctcccccgcccggccccggcccccctccctcccggcagagctcgcctccctccgcctcagactgttttggtagcaacggcaacggcggcggcgcgtttcggcccggctcccggcggctccttggtctcggcgggcctccccgccccttcgtcgtcctccttctccccctcgccagcccgggcgcccctccggccgcgccaacccgcgcctccccgctcggcgcccgcgcgtccccgccgcgttccggcgtctccttggcgcgcccggctcccggctgtccccgcccggcgtgcgagccggtgtatgggcccctcaccatgtcgctgaagccccagcagcagcagcagcagcagcagcagcagcagcagcagcaacagcagcagcagcagcagcagcagcagccgccgcccgcggctgccaatgtccgcaagcccggcggcagcggccttctagcgtcgcccgccgccgcgccttcgccgtcctcgtcctcggtctcctcgtcctcggccacggctccctcctcggtggtcgcggcgacctccggcggcgggaggcccggcctgggcaggtgggtgtcggcaccccagccccctccgctccgggcccggcgtcccctcccccgcggcccgcgccgccgtccccgccccgtgacccgccgggctacccggggtgggctgggggccggcagcgcgggggagactcgctcgggcctgagccccgaggctcggccggtgggcgcagccggggtcctctgggattgtcaggcctgtccagcctcccgcagcatccccgccccctcccccggcggtcaagatggagggagcgggcggcctcccctccccacgcgtgttgggaggggttctcgggtagcggcgatggtcagccccggctcccccttccgcacgatcctccgcccgcagcgtggggatgctcgggcagctcctccactcccggtttaggtgtgaacgttggaggggtctggaggctgtggtggcgttttccggaacatgtccccctccatgggggacatctctggaggggagaagttagggccgcgtcccccgtgccggttaaaggggtaggcaccgggctcctccggaatcatcagggtctgtcggggctctctccccgccccctccgagtcctgggaaagatcggaggacggggtggagacaagtgggccttggcccccgcacccctctgcgttcgtgtccgaggcggcggcgggggctcccgaactcccctgaaatcgtggggctccatgtggcctccggcagcgttccaccctcccccacctggggaagggaaggggtggggagtgcccggccccgtcccggccttcctccttcccccgccagacctctccggcgcgcgggtggtggccgatccgcattgctgttcgaggccgcagtggagaaggcgcctgtggaacatcggtgggtgagggctggacccaggctggaccctggagatccggggtggcggtgctggtggcagggggcgggcaccctgcgcacttatcccaacccccgccccaatttcggaaatgctaggagagagagattgcagcaggggacgtggtcgggttcctgaaggcagaaaggcgggtgtttactagcgtctttttccctcctaagccggggttgtagtaggggctgggggctcagtgttgtcccggctaactgggtttgactcgagggtgtgtttgtgcaggagggcctgttgggggtggcgggcggttgtcagttcgtatttcacgaactaagaaaatgcttagtgttcaaagggagaaggaaacgtcaatagactccattccattgtggccggtgtccttaacttcgggagtgccgccagagcttaccaagggcacgcaagtccatttcccttgtgcctcaagtccatccgtgttgtaggcactactgtgccttctttaggcctaggccgccggcttgacggcgggtgaccggcgtcctccttaaataggcatcttgggctttggaaggtggaataagaggatttttcattcacccgagttttctttttgaaaacacattttcagcaacccatttccaaagaatttttatttacagcagaaattccccatcaagaggaatcagctggtttttaaggaattctgctgccttcaaagggggcggaaacagtcggttatttgactttacacgccccgcccccccttccccttctctgagtctgaagcatcccaaacactacttagccaaactagttcagatgaagtgatcgtttccccaagtagggtaacttcagtttccctttttcgttggcatctagcgaaaaatgaaaaaatttaaaatacaacttttatagaaaaggatgtattctgtttttactttcttaggtattaggaagagatttggcagataattcaacatgttcaaatatataaacattaaaactaaggttattaagttgcattgactactaggcttaaaaattagattataagagaatttgctcctgagtagtttgagtgatcaaagatatttggaatgttttagtaccacaaggtcttttttctgttccttgaggctttacaacaatttaaggttaatttagatttttccttgctttaagttcttttacttgagacctaaatggcagcccttattctttctgatgaataggtgaaattttgtttactgtgttggatttgtgtaatgtgaagttttattcttgaacagatcgttaatgtacttgtagaattactttgaatttgaatcactttcctgcattccttgtaaataagtttcagcttctagaatctcctcacttaggtttgtgcgtatcaacagtgaaaataagtctctgagagcaagggtgaaaaaaaatgcagcattcggtttgacaagtttcgagatagcaaaatatgcttgaaagtctggaaattcacatctgctttaagaaacatttcataatttgactttgtgtgtgtgtgtgtgaatagtttttcatgactttcagaagtgatttattttgttctttgttatatatatttttgaaggtggctgttttaggaaagataatgtaatcacaatattagaacataattttactgtaatctaattttgtgtgtgtgtgtgtgtgtgtgtgtgtgtgtgtgtgtgtgttttggatggaatctcactctgtcgcccaggctggagtgcagtggcctgatctcagcttactgcagtctctgtctcctgggttcatttaagtgattctccagcctcagcctccccagtagctgggattacaggttcgtgctaccacacctggctaatttttttgtatttttagtgaggacgggattttgccatgttggccaggctggtctcgaactcctgacctcaagtgatccgcctgccttggcctcccaaagtgctgggattacaggcgtgagctactgcccctggccaatttttgtatttttagtagagatggggtttcaccatgttggccaggctggtctcgaactcctcctgacctcaagtgattcgccagcctcggcctcccaaagtgccaggattacaggcaggaatgagccactgcccccaaccatcagtctaattcttatttttgctttttaccttttcatttttatgtagtagaggtgattgtgtatgttattttgtagttagcttttttcccctgaacgttgtattgtaaatgtaaatttttttttttttttttgagacagagtctcggtgtttgcccagtctgaagtgcagtggtacgatctcagctcactgcagcctctgactcctgggttcaagcgattctcccacctcagcctcttgagtagctggggctacaggaatgttccaccacgcttggctaatttttgtatttttggtagagacaaggtttcaccatgttggccagtttggtctcgtactaccgacctcaggtgatgcgcccgcctcggcctcccaaagtgctgggattgcaggcgtgagccactgcgcccggctgtaaggtttttacttaaccattctattgttgggaattgggtttccacttttttgttatagatagtggtgcagtgaacatttttaaatagctttttgcttcagtgtaattatttccttagagaaagttaccaagagtggttttactagttcagagggcttcaggatttttatggctcttgctagcggtgctctattattctttagaagacttgtattacttccagtgtcaagaaggttgctcttccatggaatggtttctttgtagtttgtcaaatattgtggggaatttttaaaggaaaaattgcatttttactgtcaagtgcatatattattaagtgcttttgttagttactggattattgatatttgagtttaatttggttcctctgaggatttaataaggtaatatatgtgaagatgttttgaaacctgtaaccattattattaatgagggtacttggtttatctgtcgtgctgatagtactgagtaaagtgcaggaatgaaattcctgaggaactgttctaaagctttgttgttgttgttaacctttctttttcatctgaaagtgttttttattagctgctagcctatgaccaagttatttttggtaacttttttgtaatttcatggcactattgggaattttcgctggttgactcttcttcttctacattcccttccccattaaaaataaaaatatggatttacaattgttactctattcctaaacctaaataatatgacattagaattgcttgggatacaggattcagtctgaataaaatatttttcttttagtgattttcagcttagtatttttactgcttctttctcttgaggcattgcaacttaaaaattgtgctgtttagccaggcgcctgtaatcccagctacttgggaggctgaggcaggagcatcacttgagcccaggaggcggaggttgcagtcagctgagattgtgccactgcactccagcctgggagacagagtgagactctatctcaaaaaaaaaaaaaatgtgctgtgatttaatgtagttgttcatcatgcttccatttaaatttcagtgagactgttcatcttttgcagttaaatatcttgtagaagggcctaaaatatctacgttgaatacagctttattgaagcatctatgtacatggggtttttgggatgaatcagtgaataaagcaaacatattgtccttttggagtttacattctaatgtgactaggcagacaatgagacattaaattaccagcctatgtataatagtgtataagagctatggaattagaagaaagcagattaaaggtatagggagtgtggggaggggaatgagttacaattttaaatggattgggggaacttaattgaggagctaacatttgagcaaagatttgaaggttgggtatttagccgtttgctttttatctaggttaattagtcatgtggcttcattagtaatttataaggtttaaatggcatcatcctttgttattcttttatgtgcacattgatactaaccatctctgaagttagaccaaaaaagttaattgacattgagggtcattagaggtaaattgtagatggctattactaaccaaagagacatgttttgtttttcttttgggcttacgtattttacctaattagtttagtttttgtttcaagtatgtggagaaaataaactttttaagtttgggccaaaacttgctttggttttctttttctttttctttttttttttttaagagaaaaatgtaagcctgtagttgcttaaagattccacattctgaaacagtgaaaacatgggatcagtcatggtgttcctttttttggttaaatgtaaacttgtattttcagtgttactctaattagcaatggtttatacttctacataagggatgttaactcatattgtagctatttaatagccatatattttgacttaaaggaggatctcaaggccaggcgcggtggctcatacctgtaatcccagcactttaggaggctgaggcgggtggatcacctggggtcaggagtttgagactagtctggccaacatggtgaaacccccatctctactaaaaatacaaaaattagccgggcatggtggtgggcgcctgtaatcccagcttcttgggaggctgagggaagagaattgcttgatcccggaggttgcaatgagtgcggaggttgcagtgagctgagatcatgccattacactccagcctgggcaacagagcgagactctgtctcaaaacaaacaaacaaacaaaaaaaggaggatctcatttttttgtcctaaatagctacagccgtgttagaactgtcaccttagcaaagtattgtttttttactttgaaacgaattttaaggttttagaagattgttctctagaattacaattttctgttttgactagtgatagtattttgatgttgtgtaaatagttgagcatgaacaaaaccctatttttttttttagctatttcaagtgattgtgacaacttcaacggagatgtaaacagtttattaacagtcacacctattatcttttttttttttttttttttttgagacggagtcttgctctgtcgcccaggctggagtgcagtggcacgatctctgcttactgcaacctttgcctcccgggttcaagtgattctcctgcctcagcctcctgagtagctgggtctacatgcgcacaccaccacgcctggctaatttttgtatttttagtagagacagggtttcaccatgttggctagaatggtctcaaactcctgacctcaggtgatccacctgcctcagcctcccaaagttctgggattacaggcatgagccaccgtgcttggccgctgccgtatctttttaaatgaaagtacttgtgttttttttgtttttttccaaaggatatctgggtcatctatgatgttactgttaccatctaagggtttttttgtttgtttttgagacagagtctctgtcgcccaggctggagtgcagtggcgtgatcttggctcactgcaacctccgcctcccaggttcaagcaattctcctgccttagccctcccgaatagctgggattacaggcacccgccaccatgcctggctaagttttgcatttttagtagatatggagtttcaccatgttggccaggctgctcttgaactcctgacctcaggtgattcgcttgcctcggcctcccaaagtgctgggattacaggcgtgagccacccccgcccagcctcatgagctaaggtgttttttttttttttgagacagttttgctctttcccaggctggagtgcagtggtgcaatctcagctcactgcaacctctgtttcccgggttcaagcgattctcctgcctcagccttctgagtagctgagattacaggtgcctgctaccccactcagctaatttttgtatttttagcagagacagggtttcaccatgttggttaggctcatctcgaactcctgaccttaagcgatccacctgccttggcctcccaaagtgctgggattataggcatgagccaccgtgcgcagcctaccctgtctcttaaaaaacagtaacaacaacaacaacaacaaaaaatcctaaatcttaaaaatggaaggcaaaaactctaagctttgagagattaggggacttgcccaaagcaatatttgtaggattttattacacctctccctttatttatttttttagagtcaaggtctccctctgtcacccaggctggagtgcagcctcaatctatggggccaagcatttctcctgtcttagcctcctgagtagctggaactacaggtgtacaccagctggctaacatttaaattttttgtagagacagggtcctgccatgttgcccagattggtctcaaactcctgggctcaagtgatcctcctgcctcagcttcccaaagtgctgagattacaggtgtgagccactgcaccgagccccctccctttatttttatttttaaattttaagttctggggcccctcccttgaaataaatagaaacgtaatatatacacaagatcatgctgtgtattttaaggcaatggtcctcaacctttttaacactagggaccggttttgtggaagatggtttttccataggggcaggggatgattttgagatgaaactgttccaccggccgggcacggtggctcacgcctgtaatcccagcactttgggaggccgaggcgggcagatcacgaggtcaggagatcgagaccatcctggctaacatggtgaaacccccctctactaaaaatacaaaaaaattagctgggcgcggtggagggcgcctgtagtcacagctactccggaggccgaggcaagagaatggcatgaaacccgggaggcagagcttgcagtgagctgagatagcaccactgtacttcagcctgggggacaaagtgagactccgtctaaaaaaaaaaaaattgttccacctcagatcattatgcatttgttagattctcataaagagcatacaacctacatctcttgctatatgcagttcccagtagggtttgtgcttctataagaacctaatgctgcacctgatctaacaggtggggctcaggtgctaatgctcacacagctcctgttgtgcagtctggttcctaacaggcctgtttttttttttttaattagatggagtctcgctctgtcaccaggctggagtgcagtggcacgatctcagctcactgcaacctctgcctcccgggttcaagcgattctcctgccttagcctcccatgtagttggtactacaggcgcacactgtgatgcccagctaatttttgtatttttagtagagacggggtttcaccatgttggccaggatggtgtcgatctcctgaccttgtgatccgcccaacagcctcccaaagtgctggaattacaggcgtgagctgctgcgtccggccccctaacaggcttgttttatggaatacagtcacggacagtacttgcccttcaggatatctttttgtaaccttgattttggcttgctaaaataggaggtctattttcttttctttgtttttaatgtatgtggttctgtacttacgtggtgtgaaatctacataaatgttaaatccttggttatttatttattttgagacagagtctcactctgtcacccagtctggaaagcagtggcataatctcggctcactgtaacctccacttcccaggttccagtgattctcctgcctcagcctcctgagtagctgggattacaggcatgcaccactacacctggcaaatttttgtatttttttttagtagagatggggtttcaccatgttggccaggctcgtcttgaactcctgaccttaggtgatctgcctgtcttggcctcccaaagttttgggattacagcatgagccactgcgcctcgccttatttttttgagacaggttctagctctgtcacccaggcgggagtgcagtggtgccatcatggctcattgcaacctcgagttctcaggcccaagtgatcctcctatctcagcctcctgagtagctgggaccacaggcatgcgccactatgcccagcaaaatttttgtttcactctgttgcctagggtggggtgcagtggcaggatatcggctcagtgcaacctctgcctcttgcgttcaaatgattctcatgcctcagcctcccgagtagctgggattataggcatgcgccactacacctggctaatttttgtattattggtagagatggggttttatcatgttggccaggctggtctcgaactcccgacctcaggtgatccatataccttggcctcctgaagtgctggaattacaggcataagccactgcgcctagcttttttgtttgtttttattttgtagggacagagattttacctgttgcccaggatggccttgaattcctgacctcaaacaatttgccctccttggcctcccaaggtgctgggattacaggtgtgagccactatgcctggctggttttttaaattattattattgtttgtgtgtgtgtgttgcaggatcttaccctgtcacccaggctggaatgcagtgatgtgatctcggcttactgcaacctccgcctcctaggttcaagtgattgtcctgcctcagcctcctgagtagctgggataacagctgtgtgccaccatgcctggctaatttttgtatttttagtagagatggggtttcatcatgttggccaggctggtctcgaactcctgaccttagatgatccacccgcctcgtcctcccaaagtgctgggattacaggtgtgagccaccgtgaccagtttggtttagtttttttttttttttttttttttttttttttttgagaaatctcgctctgtcgcccaggctagagtgcggtgacacaatctcagctcactgcaagctccacctcccaggttcatgccattctcctgcctcagcctcccgagtagctgggactacatgcgcccgccaccatgcccggctaattttttttatgcattttaagtagagatggggtttcactgtgttagccaggattgtctcaatctcccgacctcttgatctgcccgcctcggcttcccaaagtgctgggattataggcatgagccaccgcgtccggcctggtttggtattttttttatgagtctgggttgtttatgaaaacttgtcacagctgttaaccttaactttttttttttcttttttttccgagacggagtctcgctctgtcacctaggctggagtgcagtggtgcgatctcggctcattgcaacctctgcctcccaggttaaagcgatttttctgcctcagcctcctgagtagctgggactgcaggcacgcaccatctcgcctggctaatttttgtattttagtagagatggggtttcaccatattggccaggctggtctggaacttctggcctcaagtgatccacctgccttggcctcccatgcctggcaaccttaactttttatttgctggtaattatttgtgtttgcattcatgtgaaaatttgaaattctcattaacatttaaagattcttacatagattgcttgtaattttaaccctgaagttgtgtcaagtgactttacaatgtcaatttgttttatttatttatttatttatttatttatttatttttgtgataggatctggctctgttgctaaggctggagtgcagtgttgcaaatacggctcactgcaacctctgtctcccgggttcaagccatcctcccacctcagcctcccaagtagttggaactactggtgcgccccacagtgcctgcctagtttttttgtattttcagtagatgtggagttttgccatgttgatcttgaactcatggcctcgagtgatccaccccacttaggcctcctaacatgctggtgttacaggtgtgagccactgtgtccagcccgaaaatgtcagtttcgtgccatgattaatagctaactacattttgggaatgtaataaaatttcattctataatgaagtctttgtaaaactcattagttgtggtatgaggcttgtcggcaatataagtgaacgtggtttatttttattaactgtatcagaactttagaatgttggtctcctgaaaccattgccttgagaggctttattgaacagtgttgccaatgatcagtttttttttaaatttccttttttttgagactgagtcttaccctgttggccaggttggagtatagtggtatggtcatggctcactgcagcctcaacatcctgggctcaagcagtcctcctacctcagtctcccgagtagctggaactacaggtgtatgccaccatgcctggcttttgtatattttgtagagacagggtttagccatgttgcccaggctggtctcaaactcttaaattcaaatgatccacccacctagttttcccaaagtgctttaattacatgtgtgaggcaccgtggctggccaggtcaaatatttttcattgacgtttttcatattgctttttaaagtcatgttaaaatattcttaataatttttctaagtggaattaatcttgattataattttagttttttataaagggcgggttttgaaacaagtactgcatttttcttttcgggtttataaacatttgctgtggactttgtgcagttaactattttcattcctgaaacacatttcgaaatcaggaattgaagactaaatgtcttttcactgaagcttgagcagattttagaaaggggagttcttttttttttttttttttttggtagaaatgggggtcttgttatgttgcccaggctggcctccaacttctgggcttaaactgtcctcctgctttagcctctggtctggagagttctttatggcctctttgagaacttttactttacacatgattctatctagctttcttttctgatgtacatattggcagcaagtagaaaagcaatgttttcagaggcagatatattaacagcaatgagaaataacagtagcgtgatagaaagttgaaagacttagctgggtgcggtggctcacgcttgtaatcccagcactttgggaggccaaggagggtggatcacttgaggtcaggagttcgagaccagtctggccaacatggtgaaaccctgtctctactgaaaaacagaaaaagggccgggcgtggtggctcacccctgtaatcccagcactttgggaggttgaggagggcggattacaaggtcaagagattgagaccattctggccaacagggtgaaaccccatctctactaaaaatacaaaaaaattaaatgggcgtggtgatgtgtgcctgtagtcccagctactcgggaggctgaggcaggagaattgcttgaacccgggaggcagaggttgcagtgagccgagatcgggccactgcactgacgacagagggagactccgtctaaaaaaaaaaaaaaaaaaaaaaaaccagacttggggctgggcgggcgcctgtaatcccagctacttgggaggctgaggcaggagaatcgcttgaacccgggaggtgaaggttgcagtgagctcagattgtgccactgtgccccagcctgggccacagagcagagtgagactctgtctcaaaaaaaaaaaaaaagtttggaagactggtggctgggcatggtggctcacacctgtaatcccaacactttgggaggctgaagcaggcagattacctgagcccaggagttcaagtccagcctgggcaacacagggaaaccccatctcaacaaaaaatattaatacaaaaaatttagccagtcatggtcgtgcacttctgtagtctcagctacttgggaggctgaggcaggtggttcacttaagtctggatgtcgaggtgagccatgattgcaccactgcactccagcctgggcgttaaaatgagaccttatctcaaaaaaacaaagcaaagagcctgggaactactaaaatgggaactactaaaaaacagacacaagagctcaacaagtataccattctgggaggtttttttttttttttttttttttttttttgagatggagttttgctcttgtcacccaggctggagtgcaatggcgccatctctgctcactgtagttccgcctcccaggttcaagcagttctcctgcctgactcctgagtagctgggagtacagatattggtcacacaccgggttaatttttgtatttttagtagagacggggtttccccattttggccaggctggtctcgaactcctgacctcaggtgatccgcctgcttcagcctcccaaagtgccgggaccacaggcgtgagccaccgcacctggctttttttttttgacatagaatcttgttctgttgcccaggctggagtgcaatggtacaatcttggcccactgcaacctctgcctcccagcttctagcgattttcctgcctctgactcctgagtagctgggattacgggtgcccgccaccacacccggataatttttgtatttttagtagagatggggttttgccatattggccaggccggtcttgaactcctgacctcagatgatccacctgcctaggcctcccaaagtgccgggattacaggcgtgagccaccactcccggcctgggagttttgactgtaagtttatagctgtatatcttaggccctaagggcattactgttttatagcacagtgtagttagttaatgtgctcataatggtgactcataacaccaggttaaatgattttttatatctcccaaagaagtatttttcaatctgcagatcatgaccccttagtagattgtgaaacacattagtggattatgacaagcatttttagaaaaatgaaaaagaataagaagtgttaggatgcattgcattattgaaataattgtttttgagatggagtttcgctcttagttgccgaggctggagtgcaatggcccgatctgcctcccgggttcaagtgattctcctacctcagcctcctgagtagctgggattacagacatgctccaccatgcctggctaattttgtatttagttttagtagagatggggtttctccatgttggtcaggctggtcttgaactcctgacctcaggtgatccacttgcctcggcctcccaaagtgctggggatacaggcatgaacccctgtgcccggcctaatttttgtatttttagtagagatggggtttcaccatgttggccaggatagtcttgatctcttgacctcgtaatctgcccacctcgactcccaaagtgctgggattacaggtgtgagccactgcacccagctgccaagaattgttttaagctttggtttgagttaatgtatatataccgcattgtaattcaaaatgtaatttttggccaactctgggcacattgcctatggactagtcctgctctgccacgagcagcaacagttcaatgaattttttttttttttttttttttttttttttttttgagacagggtctctgtcaccaaggctagaatgtagtggtgcagtctcggctcactgcaacctctgtttcctgggctcaagcgatcctcccacctcagcctcctgagtagctgggagtacaggagcacgctaccatgcctggctaatttttgtattttttgaagagatgaggttttgccatgttgttcaggctagtcttgaactctggagctcagatgatccacccaccttggtgtccagaaatgctgggattacagggatgagccaccgtgcctagccaaaaatttttttttaagtaattttttattgatatagtcaaaaaagttactgctttagagccagagaaacgcagtaaaaggattgagaaagagttttgaggttatatctaagctagggttgtcagatttggcaaatagaaatacaggacactcagttaaatttgaatttttgatgaacattgaccagttttttagtataattgtgtattaaattgcatagaaaaaagttatttatctaaagttgaaatttaactgagcatcttgtattttatctggcaactccagtctaagctggaatcatggttcactgttttttttttttttttttttttttgagtcggagtcttgctgtgttgcccaggctggagtgcaatggtgcgatcttggctcactgcaacctccacctcctgtgttcaagtgattctcctgcctcagcctcctgaatagttgggattacaggcacccaccaccatgcccagctaatttttatatttttagtagagacggggttttcgccatgttgttcaggctggtcttgaactcctgacctcaggtggtccgcccacctgggcctcccaacgtgctgggattacaggcatgatctaccgtgcctggccatggttcactcttcagtaactaaaatttaagctctatgaaagcaggaactttgttttgttcactattgattgtatccctatttcttgaatggttggcacttaactgcttggtcacatgtttgaatgggcaagttactcagccactctcaggcttagtttatttacctattaaaagagaaagaatatcttccttggctgggcgcggtggctcacgcctataatcccagcactttgggaggctgaggcgggtggatcacgaggtcaggagatcgagaccaacctgggcaacattgtgaaacctcatctctactaaaatagaaaaaattagctgggcatggtggtgcgcatctgtagtcccagctactcgagaggctgaggcaggggaatcgcttgaacccaggaggtggaggttgcagtgagccaagattgtgccactgcactccagcctgggcgacagaacgagactctgtctccaaaaaaaaaaaaaaaacaaacaaaaaaaaaaactgagatactggccgggcgcggtggctcgtgcctgtaatcccagcactttggaaggccgaggcgggtggatcacgaggtcaggagatcgagaccgtcctgcctaacatggggaaaccctgtctctactaaaaatacaaaaaattagccaggcgtggtggcgggcgcctgtaatcccagctacttgggaggctgaggcaggagaatggcgtgaacccgggaggcagagcttgcagtgagcggagatggtgccactgcactccagcctgctgggcgacagagcgagactccgtctcaaacaaacaaacaaacaaacaaaaaaactgagatactaaagtcttaatattttctgtttttatgtatttattttttgagatgggatcttgctgtattgcccaggttggagtacagtattgtgatcatggcttattgcagcctttaactcctgggttcaagtgatcctcccacctcagcctcctgagtagctgggaccacaggcacatgcaacatcacaccctgcagttctttttttttttttgagacaccgtctcgctttgtcacccaggctgcagtgcgtggtgcaatttctgctcactctaacctccacctcccgagttcaagcagttctgcctcagcctcctgagtagcttgggaccacatgtgtgtgccatcatgcctggttaattttttgtatttttagtagtgacagggtcttaccatgttgcccaggttggtctcaaactcctgagctcaagtgatctgcccgccttcgcctcccaaagtgtctgcgccctacaatttaaaaaaatttttgtagagacagtctcactgttacccgggctggttttgaacttctgccctcaagtactcctcttgccttggcctcccaaagtattgaaattaaggccatgaggcagcacacccagcctaaattcttcttatgttctgttcttggcacatagtagatgttcaacaatgtagagtcaaacgcatttggagttggaatggctctggtgttttttttttttttttaaaccagaaacacgtgcagtttattgaatgccattgtagaaaagtgtgtgaggataaacggctgatagagaacttggctctgggggcagggcgaggaatggagggtggatggagtacatgggaatcagatcacgggcagagctcctggcctagataatgcctcctgatctgttgatagacttgaaagatcaacactgggatgatgctgagcagaatggtcgtaatgatgcgcacaatcagggcccagatgttcaggcacttggcggtaaaggcataggcctgggccctgatcaggtcgccaaccatcttcttgtccctagacttcacggagtaggccaatgctatgaagcccaggcagcaggagttcatgaagtgggtgttgaacagggaccagacgacatggtcgggcacggagttctcgctgtggatggggatcacggtggacattgggggagcagggttgtggggtgcccccagcacagccacctcttgctcctccttgagcatctcatagttagggggatggccgatgttggcaggagtgaagaggtttggacattgtggttcatggtgtccagggaagaccagctgtggtcgggttgctggggtggttctcagtgggcccctccctttccctggtagtttggatttctctggctctggtggttttttagtactcattctatttacgggtgaagaaattgagaccaagagggttatttaccagagtatctcatcattggctgcataactggcattagaatctgatgtacttttatttctaatacatttctttttttttttttttttttgagatggagtctcgctctgttgccgagcctagagtgcagtggggcaatcttggctccttgcaacctccacctcctgggttcaagctattcctgtctcagcctcccaagtagctgggactacaggcacctgccaccacagccggctaggttttgtattttagtagagatggggtagcaccatgttggccaggctggtctcgaactcatgacctcaggtgatccacctgcctcggcctcccagtgctgggattataggcatgagccaccatgcctggcctttctttgtcgtttcctttctttctcttcatccctcctctccttttttcccctccccgctgcctcctcctgtcttcccttctttccttcctttctctcctttttattttttcctttctttttctttctctgtctctcccaacccttcctctctccctccctccctccccttctctctccccccctccctccccttctctctccccctccccttttgttcctaagagacagggtctccttatgttgctgaggctgaccttgaactcctgagcccagatgattctgcctccttagtagctgggactacacccacctcccgttccgttgtcatcttttttttttttttcttttttggagacagaatcttcctctgttgctcagggtggagtgtagtggcacgatcatagcttactgtaactgtgtaacctcgaattcttgggctcaagcaatcatcccatcatcccacctcagcttgctgagtacctggggctacaggtgtgtaccaccatgtccggctaattacttttcttatttttaatttttcggagataggatcttgctctgttgcccaggctggtgtcaaactcctgggctcaagtgaaactcttgccttggcctcccaaagtgttgggagggattacaggcatgagccactgcacccagcctcctctttcttcccatttaactcctaaccacaccgaactttctgtctgcagagaggagcattggtcagcagttcacaaaatggctaggtgtgatggcgtgcacccatagtcccagctacttggggagctgaggtgggaggatcgctggagcccaggagttcaaggccctgggcaacacagcaagaccttatctctggctgggcccagtggctcacgcctgtaatcccagcactttgggaggctgaggtgggtggatcacctgaggtcaggagttcgagaccagcctggccaacatggtgagaccctgtgtctactaaaagtacaaaaattagccaggcacggtggcgcgctcctgtaatcccagctactcgggggggctgagacaggagaatcacttgaacccaggaggaggaggttgcagtgaaccaagaacacgccactgcactccagcctgggtgacatagtgagactcttatctcaaaaaaaaaaaaaaaaggtcgtctgtactattgcatgttagtagtttctttctgcttattgttgagtagtagtctattgtatgcatgtaccagtttgttcatctagtggtggacattgagttagcaggttttggctattaaaaataaagctggaggccgggtgcgatgtctcacgcctgtaatcccagcattttggaaggccgaggcaggcggatcacctaaggttgggagtttgagaccagcctgaccaacatggagaaaccccatctctactaaaaatacaaaattagccaggcgtggtggcgcatgcctgtaatcctagctactcaggaggctgaggcaggagaatcgcttgaacccgggaggcagaggttgtggtgagccaagattgcaccattgcactccagcctgggcatcaagagtgaaactccgtctcaaaaaaataaataaataaagctggtatgaatatttatgtacaggttttgtgtgaacatatgattttatttctcttggttggaatgcatagaaatgagattgctgggttttgtggcaagtgtttatttttccagggtacatataatcctgtgagtgtttatttaattttaaaagtaattgctaaactgtttgctaaagtgactgctatattttctttccctagcagtgtatgaatttttttttgaggcagggtcttgctctgtcacccagggtggagtgcagtggtgcgatattgtctgactgcaacattgacctcctgggctcaagtgatcctcctgcctcagcctcctggctgggaccacaggcatgtaccaccacacctggtagtttgctttgatttttagtagagaagaggtctcactatgttgccctgggtggtgttgaactcctgggctcaagtgattcatctacctcagcctcccaaagtgctgggattatagatatgagcccctgtgcctggcctcattgtggttttaatttgcatttccctaatgcccagtgatattgagcattttttcatgtgtttatttgacattcataccatctttggtgatgagaaactatgtttatgcattgcttaatgatggggatgtgttttgagaaattttttcggtgatcttatcattgtacaaatatagagtttacttacacaagcctagatggtatacctactagacacataggctgtcgtacagagtattactcttaggctacaaatctgtatagcatgttgcggtactgaacactgttggcagatgtaacataatgttaagtatttgtgaatctaaacatatctaaacatagaaaaggtgagtaaaaatacagcgtaaaagataaaagtggtatatctgaataggtcacttaccatgaatggagcttgcaggacaggaagttgcttgggatgagtcatttatcagtggtgtgtgaatgtgcaggcctaggacattactgtatgctactgtagacaaacactgaacagttaggatacactaaattgataaatatctttcttattttgttttttgagatggagtctcgctctatcgcccaggctggagtgtagtggcgtgatgttggctcactgcagtctctgccttctgggttcaagcgattctcctgcctcaacctcctgaatagctgggattacaggtgcgtgccaccacacctggctaatttttgtatttttagtagagacgggggtttcaccatgttggccaggctggtctcgaactcctgacctcaggtgatccacccgccgtggcctcccaaagtgctgggattacagatgtgagccaccgcacctggccagagatgaggtcttgctgtattgcccagggcgttgaactcctgggctccagcaatcctcccacctcagcttcccacgtagctgggactgtgggtgcacgccatcatgcctagccgttttgtgaactgttgaccaatgctcttttctgcagacagaaagttcactgtggttaggagttaagacttttaacctctgacctcaagtgatctgcccaccttgacctcccaaagtgctgggattacaggtgtgagccatcacgcctggtcaaaaatatctttctttaagagtaaatttaccttaacttactggttgatcattgtatataggtctgttgttaattgaaacatgcgggccgggcccggtggctcatgcctgtaatcccagcactttgggaggccgaggcgggtggatcacaaggtcaggagatcgagaccatcctggctaacacggtgaaaccccgtctctactaaaaatactaaaaattaaccgggtgtggtggcgggcgcctgtaatcccagctactcgggaggctgaggcaggagaatggcgtgaacccgggaggcggagcttgcagtgagccgagatcgtgccactgcactccagcctgggcaacagagcgagactctgtctcaaaataaataaataaataaataaataattgaaacatgcggtgcatgtgtttatttgcgatctgacttgtttggaaatatttgcattatcttccttctagatttagagcatcttgacagtaggaacaagtgttttgtacaactttgtatgcttagtaagttatcaattaacttgtcgtggccaggcgcagtggctcacgactgtaatcccagcactttgggaggccgaggcgggcagatcacctgaggtcaggagttcgagaccagcgtggccaacgtggtgaaaccctgggtttgtttgtttgtttatttatttatttattttttggagacggagtctcgctctgtcgcccaggctggagtgcagtggcgtgatctcggctcactgcaacctccgactcccaggttcatgccattctcctgcctcagcctcccaagtagctgggactacaggagcccgccaccatgcctggctaatttttttatttttagtagagatggggtttcgccgtgttatctgggatggtctcgaactcctgactttgtgatccgcccgcctcggcctcccaaagttctgggattacaggcgtgagccaccacacctggcctaccctgtgtttattacaaatacacaaattggccatttgtgcgtggctcatctacagtctcagtgactcagaaggctgaggcaggagaatctcttgaacccgggaggcagaggttgcagtgagcagagatcgtgccactgtacttcagcctgggtgacagagtgagactgtgtctcaaaataataataataatttgttgaatatgtgactgttggtttaatttttatttttatgagatggagtctcactctgttgcccaggttggagtacagtggcgtgcagtggcgcaatcttagctcactgcaacctccgcctcctgtgttcaggtgattcagcctcccaagtacctgagactacagacgtgcactaccgtgcctgactaatttttgtatttttagtagaaatggggtttcaccatgttggtcagcctggtctcaaactcctattctcaagtgatccgcctacctcgaccttccaaagtggcggaattataggtgtgagccgtggtgcccggccagactattggtttggtttggtgtgatgttatgttatgttatgttatgttatgttatgttatgttatgttatgttattttaagacagagtttgtctcttgtcgcccaggctggagtgcagcggcatgatctcggcttactgcaacctccgcctcccaggttcaagtgattctcctgtcttagcctcccaagtagctgggattacaggcgcccaccaccgtgcctggctaatttttgtatttttagtagagacagggtttcaccatcttggccaggctgttctggaactcctgacctcatgatccacccgccttggcctcccaaagtgctgggattacaggcgtgagccactgcgcctggctgactattggttttattattaagcagtagtagttgaccctgtcatgtagaaagcatggcatttataggcataccacgtttaatttcctcccctttttttatttttggagtacctcctgcttgtgaggcttgggaatacagtagtgaataagccagatgaggtctctctctttttggagcttatgtggtagtatagactaggcagaaagttctcattgcccctgccaccttatggcattgaggtgtttgagatgctgatgtttacttctgtctcataaaatcttgaaaggagttcttttagatgaagaggaaaacaaaatcagaagaatgggcctgggtcatgtctgtaaacctccccacgtcatggggaggctgaaatgggaagggccaggagttcaagaccaggctgagaaacataacaagaccccatctctacaaaaaatattttttaattaatgggggatggcagcacacacctgtagtcgcagctactacgaggctgaagcgagaggattgcttgagctcaggagttaaagattgcaggagctatgatcacagcactgcgctccagcccctcttatcagcagtctggtatgttgctaagggtcttgttctttttagtgcttcagggacagccactggctatgcccagaaataagtatgtttgagaagctttctgacctcagcttgaaaaattgattagggtcataattaaaaagggagggaaacaggattgagtgaaccggacgctaccgtgagtttattctcccagggcatacataatctcatgtgattaccacatagccctgttagataatctgttatcctgtcctcattttacccatgaggaaatgaaggcccagagaggttaaatgacctattcaaattcactcagaaggtggcagagatgagttactatcattgtattttggatctctggaaagaaagaaaactagtgatggtattaaaaaatgttattaatagtttcttttaatcaaccaggaacttgagtcactagcttctctgggtgaaggactatacttcaacagtatgaaaaacggaaaagaaaatgaggaattttggctgggcacagtggctcacacctgtaattctagcactttgggaagccaagggaggagggtcgcttgagctcaggaattcaagatcagcctaggcaacatagtgaggccccatctctacaaaaataaattagctgggcatggtggtgcatgcgtatagtctcagctacttgggaggctgactcaggagggtcacttaaacccaggaattggaggttgcagtgagctatgattgcgccactgtataccatcccaggcgacagagtgagaccctatccccccaccgccaaaaaaaagaaaagaaaatgaggaatttacatttgtgacagatacggaattcagggaatttagttgttcatagtctataaatgctataagaagtctccatacctttttttttttttttttttttttttggagacagagtcttgctctgtcgcccaggctggagtgcagtggtgcgatcttggctcactacaagctctgcctctcgggttcacgccattctcctgcctccacctcccgagtagctgggactacaggtgcccgccaccacgcccggctaatttttttgtatttttggtagagatgaggtttcactgtgttagccacagatcccgacctcatgatctgtctgcctcagcctcccaaagtgctgggattgcaggcttgaatcaccgcacccggccggaagtctccatactttttaacccaatctaaaatggtaaggaaatatataagaatgtctatttattattaaattttttctatataaaacatttcagaaaataaagactagcatttctgagccaagtggtagtagtggccattttttctggaaaaaaaaaaaaaaagaaagaaaaaacacatttagctatctatgatgtgaaaagatgaacattttatttaggtaataaatgttatgtcataaaataccatttattgtgtgcctattaggtttcaggagagctgtgccaagagcattacttgtatatcttttaagccttacaacagcccagcctgtcaggctggtagtgccatatctgttttacagatgaggaagtgatggattggagaaattaaggaaattgcctttaggtcaaagagataggaagtgacaaagctgagatttttaaccttgtgagatttcaaagtctttgctttttaataactgttccattgcttctaatatagagatatgacaaaaacaagtaaaaatcagtgaagaaggctgggagcagtcgcttatgcctgtaatcccagcagtttgggaggccgaggcgtgtggatcgcctgaggtcaggaatttgagaccagcctggccaacatgacaaaactccgtctctactaaaaatacaaaaaagttagccaggcgtggtgacaagcacctgtaatcccagctactcagtaggctgaggcaaggagaatcgcttgaacctgggaggtggaggttgcagtgagctgagatcgctccattgcactccagcgtaggcaacaaagcaagactccgtctcaaaaaataaataaataaataaataaaaataataacaataatgaagaaaacaatccggtgattattgtcagcaataaaatttcttcaatcaaccatgctttagtcctggcagttctctatcagtgagtttcaatcaaaaagtttgtttataatttttttttttttaaaattttgaaatttggaaacaacatcataaatgatggttagttttctgcagctccctattttggcagatagtctgttgttactcataattaatttgaactaaaaagtagtgttgtacgatatcatgggctgtgaatgtgtttgtgacttgatctgagaacccacacaccacttaggatgcttctgtaggaaaattagagtatggaactcacttgcccacgctttccctgtctcagtccatgttggtaggctgcaaagtctggggctagaaggacactgaacaagacttcagcagtacatgttagtcttccagagggaaggaatataatagttgagagaataattcctttcctctgtgactttaggcaaattcttggctatgctgttatttatttgggccaaacaatatcaggaggttgtacattttattcttaattactgcgatacattaattttatccatgggtttaacctagcctaccttttgctgttagacttcaactctacttgtgttgggttacccctctgcttaaaaatcaccctattcccaagcctgagggagtctaccttcaaagctttctatgacctaatccaaggcctgtcaaacttcgtaaagggccagatagtaaatttgttttttttttttgagatggagttttgctcttgtcacccaggctggagtgcaatggtgccatcttggctcactgcaacctctgcctcccaggttcaagtgattctcctgcctcagcctctcaagtagctggggttataggcatgtgccaccacgctcggctaatttctttgtatttagtagagatgggggtttcaccattttggtcaggctggtctcgaactcctgacctcaggtgatccacctgctgcggcctcccaaagtgctgggattaccagtgtgaaccaccgtgcccagcccgatagtaaatattttaggctttgcagtccatatacagtcccatttttttgtgtatgtttgcacgttttctttacatattttaaaagcccctttttttttttttttgagacagagtcttgctgtgttgctcaggctggagtgcagtggtgcaatcttggctcactgcaacctctgcctcctgggttcaggcgattctcctgtctcagcttcccgagtaactgggattacaggcacatgctgccacgcccagctaatttttgtatttttagtaaagatggggtttcgccacattggccaggctggtctcctgatctcaggtgatctgcccacctctgcctcccaaagtgctgggattacaggtgtgagccaccgtgcctgacctaaaagctctttacagtgtaaaaaatattctgagctttaagccatgtgaaaataggccatgggcatttgctgacccctaatagaactccattttacctttctgatcatgtttcccattaactcttcaaaaatatgacctccatttaaatcaagatggtctccttcctcactgcttgtggaggtccagtgcccagtgtctgcctcttgcttgctcctccatcattgttctgccattcgagatcctcatacttaccctttaagatctagcccaaattttccatgaaactaattctaataattaaaaacttcctgtagaacttaactttgtctagtacaagttagctttcttattcagtagtagcttactataaattacaagaataaaaagattaccattttccctcacactgttttgtggagaatgcctaaagttactttttctttttacaggtcagtattcctatttggcatcctaatcccctttcccaaatctgaattttgggatttgaagcttgcatttgagattatgatttgtcttccttgttgtacacaggagcagggactttacaattagtattcgcatccctgctccttcatacttcgtgatgtaaggcaagttattttcacttatgcttaagtttcttcccctgtaaaaaggggatggaagaggattaaatgaattaaacatgtaacacgcttaaagcaatgcctggcaagtaataagtgctcagtaacttttagctgttcttattagcatgtttggaaaccagtagaaactacaccagcaagttaaggttgaaaagtggtattgatgggcttggggtagtacagtatgaatggctacagtttagcgtttcattaagtttgtatattcattaattcattacacatttgatgctgtcagactaggacagagacaaagatgaatgaaacattatctctgcttccaggttacccagtgtagtagagaaggcaggcatgcagatagtttaaattggtagcactgggaggggactgccatgggtgggcagtgaagaaaaagggcttcaaaataatgagagttgagatggatcttcaaggaagataagcagttttcagtaaggccatgaagagaggaggaagttccaggcgggaagagtttgtgctaaagtacagggattgctatacacatggtgtatgtagaaaaaatttggttcacagtgtgatagaagaattggagggggtcctcactgaaagtaaggaaacacatttggaagaatatgtttcagttagaaaatgaaatgagcttaaagtaaacgctaataaggtttttaaaatgtaaaatttcaacgtatttagaaagagaacagctggatgaatcttatgtacctgtcactcagctttagcagttatcagtaaatggccaacgttgtttcagctatactcccctctcctccactgatagtcttttgaaggggaatacaattgttttgtggcctccagaaagggataagtttatgagcaacgggtagatcgttgggagagacttgagtttcctgtcaggaagcattcttggtgcataagtcagaggtgatatgaatgccgtggaagggggtggcttactgtctggagaactcgagaagatgggaatgggcactgtccagtattgtggctacttccacacatggttctttaaatttaaaattatgttgattaaaatttaaatatttcagttcctcagccatactaatcgtatttcaagtgcttagctgccacatgtgcctaatggctgcaatattggacagcatgacataggacatcttcatcattgtacaaagttctcttggacagcatgggactagagccctaagatccttttctacctgagttgtttggattttttggtgtgtctaggttggatctagttgttcatggcttcatgaccaagccttttatccctttctctagagggactcaaggggtaaaggcactgaaggggtaaaacttcatatgaagagtgtggtggtggtggtggtgttttaagacagggtctcgctctgtcactcaggctggagtccagtggcatgatcctggctcactgcagcctcgacttcctgggcttaagtgatcctcccacctcagctcccaagtaactggaactgtaggcatgagccaccacacctgcctaatttttaaaactttctgtagagacgagatttcgccatgttgtccaggctggtctcaaattcctggactcaccttggcctcccagagtgctgggattgcaggtgtgggccactgcgactggccttttttttctcctttactactctagtgtatgctggaatatgaggaaataattatattagctagcagttattaaacacttaataacataccaggcactgttttaagctatgcgatctgtatggaatattacttaatttccacaaccttatgaaaagatactattttttttcttttgagaaggtactattttcatcttcatttcatagatgttgaaattgaaacacagagagctgaagtcacaggattaaggccacagagctgagaagtgatggagccggaatttgaacccaagcaattaatgctgatattagttcttgtgtgaatggtaattgttttgaaacaatgatcctagatgattatatgaccggattaatctggcagttgttctgtgtgaatttagagttgccttcccacctcagtttcctaaaaacaaaacaaaacaaaacaaaacaaaaaaaactctagcttcactgtgtttgggttgtcatggcctaccccctcttgccacctcatttgactcaactttttagggagaaaatattcaatacgtggtataggatttccctttctaataataatgtaaacaacaacaagaagtctgaaattggaagaacaaaatgactcacctaagtgagttaaccttaagaggtggaacttgatttctagattttagttaattgtctaactgatgtactaaatattagttacttaagtattaaaacgggtagacataatagttggggagctgctgtagagggggtagtttgagaaggcttctttcaggaggtgacatttaagttggtaactaacaagaaaggggcagccatgtgaatagctggagggaagagcattcttacagttttactggaagggggttagaggtatgtggtacccttatgccaaagaaaattagttacttctatacaaccagtctgattctagaaacctggatcaatgaaatattttgattatataaaaaaatctgttacccaggtcttgttgaaatagcattagaaactactgaaggacatatagaggaggagtgttgaaaaatggtgatggatgagcagaatggtgaaaaataaaaagacatgaagctctataattatattgtatggtgacagtaccaatagagattgcatgttttttctccccagtttttttttttgttttgttttttgtttttgagacagagtctcactgtgtcactcaggctggagtgcattgtcgtgatattggcttactgcaacctctgcttcctgggttcaagcgattctcctgcctcagcctcctgagtagctgggattacaggcatgtgccaccacgcccggctaatttttgtatttttatttgagaggggatttcaccatgttggcaaggctggtcttgagttcctgacctcagataatccacctgcctcagcctcccaaagtgccgggattacaggtgtgagccactgcgcccggcctcccccagttgttgaaacaataatggaaggtaattttattcttagattatttaatgtttttcagttatcaggatgtgttagattgtttgtgtatattgttttgcttgttaattaagtaacacagtgaataagacagacaaacatacgaaaatgtacatttattttatttttttgagacagtctgttgcccaggctggagtgcagtggcccaatctcggcccactgcaacctctgcctcctgagttgaagcgattctcttgtgtcagcctcatgagtagctggggccatgggtgcacgccaccatacccggctaatttttatatttttagtagagatggggtttcaccatattggccaggctggtctcgaattcctgacctcaggtgatctgcccgccttggtctcccaaagtgctgggactacaggcatgagccactgtgccaggccatttcatttttggaacgttcttttttttttttgaaatggggtctcgctctgtctcccaggctggagtgcagtggctcaatctcagcttactgcaacctctgccttccgggttcaagtgattctcctgcctcagcctcctgagtatctgggactacaggtgcatgccaccacgccaggctaatttttgtatttttagtagagacggggtttcaccatattggtgaggctggtcttgaactcctggcttcgtgatctgcccgcctcaacttcgcaaagtgctgggattacaagtgtgagccaccacgcccggcctgtttctggaatattcataatcttttgttgtcatttcaacagtgctcacagcagcttcaccaggtgtagattccatcttaagaaaccactttctttgcttatccatgagaagcaacacctcatctattcaagttttatcatgagattgcagcaattcagttacatcttctgaccccacttctaattttagttctcttgcttttttaccacatctgcagttacttgctctactgaagtcctgaacccctcaaaatcattcatgagtattagaagcaatttcctggttgggcacggtggctcatgcctgtaatcccagtactttgggaggccaaggagggcggatcacctgaagtcaggagttcaagaccagtctggcaaacgtggtgaaaccccgtttctactaaaaatacaaaaattagcggggatgtggtggcgggcgcctataatcccagctacttgggagactgaggcaggagaatcgcttgaacctgggaggtggaggttgcagtgagttgagattgtgcccttgcactccagcctgggcaacaggagcgaaactctatcttaaaaaaaaaaaaaaagaaaagcaatttcctctaaaactcctgttaatgttgatgttttaacctcctcccatgctcatggatggcattctcagtggcatctagaatggtgaatactttttagaaagttttcaatttattttgccatcagagaatggctatgaatggcagtagtagccttacagaatgtatttctttttttttttttctttttttttgagatggagttttttttgctcttgtcacccaggctggagtgcagtggcatgctatctcggctcaccgcaacctccgcctcccgggttcaagcaattctcctgcctcagcctcctgagtagctgggattacaggcatgcaccaccatgcccacctaattttgtatttttagtagaggcggggtttctccatgttggtcaggctggtcttgaactcccgatctcaggtgatctgcctgcctcggccttccgaagtgttgagattacaggcgtgagccaccgcgcccggccgtatttcttaaataaaatggcttaaacgtcaaaattatcccttgatccctgggctatggactgattcttgtgttagcagttatgaaaacatttatgtccttgtacattcccatcatagctttttgtcaatgagaagtaattttttttttttttttgagacagaatctcactctgtttcccagcgtggagtgcagtggcatgatctcagctcagtgcatcctacaactctgaggttcaagcaattctcgtgcctcagcttactgagtagctgggattacaggcgcccaccaccacgtctggctaatttttgtatttttagtagagatggggtttcacgatgttggccaggctgggctcgaactcctggcttcaagtgatccacctgccttggcctcccaaagtgctgggattgtaggtgtgagccactatgcctggcctaattggcctaatttcaatattgttatatctcagggaatagagaggcacgaggagaaagagagacaagctgactgctggttcgtggagtagtcataacacacaacatttattaagattgctgtcttatatggaccgtttgtggtgccttaaaagaaatcagggtaacatcaacgattactgattacagattactataacagatacaataataattgtaaattattatttacaattgtaaaatacaatcttttctttattatttacaattattgtaaaatacaatctgattacagattactataacgtatacaataatagtggaaaagtttgaaaatattgtgagatttatgagaatgtgacacaggcgcaaagagagcacatgttactggaaatacggcactaatggacttgcccgactcggggtttccacagacggtcagcttgtcaaaaatgcagcatctgtgaatttcaataaagcaaagcagaataaaatgaggtatgcatgtattgccatcacatgtacactagtaaaatacgttttttttttcagtaggtggatcaacctcaaattttaatataaagcattacttaaaggagaatatggggacattcatgacatttcttatatgtacataaaacttcatgaaaataatttaatgctatccagcagtttattttagaagtactggaggctaggcatggtgtcttatgcctgtaatcccagcactttgggaggctgaggtaggaggatcacttgagttcaggagctggagaccagcttgggcaatatagtgcgaccccatctctacaaaagagaaaagaagtactggagtgttgcagctcttacagaatttgtctagcaggttttccagtctttaccagaaatgcccccatgcagaagtagtaaatactgattcatgtaaaataataaacaactttatctttcagtttttaaaagacagggtcttgtaacgttgcccagactggcctttaattcctgggctcaagcgatcctctcacctgagccttttgagtagctgagactacaggctgcacctctgcacctggctctgcttgatttttaattgttgtattgctgttgcagctatgtttttttttttcttcagtgtgaggatgggcaaactttttatgtaaagtctcaggtaataagtattttaggctctagggccatatagcttctctgttgcatatcctttttttttttttccatttcccctcaaattccttttaccataagcaactcttgaggaacataaaaatcattcttagcccagaagccagaccaaaacaggttgtgggctgtagtgtcctgacccctgatttaaagattgatagctttgaaatggaaagttttaactttctttttttttctttcccttgttctgattgggctgttaattcattaggtatttactcagtgtgtatcatatgaggcatgattcctctgctaattttggtagtggtagaaagatacttttgccaagcttggttgttaggttttcatttgtccaagagttcctgaccaagtgtgaatggatgttgaaatcaaggtgtttctttggccacacaatgtgcctttgggggctatatctatgtgcttctggtaccttcttttaattttcacaaagacactgcttgccgaccacactgttttgtctaatgtggggctatgaccccctggaagaggcatcattttctgattttcacagaagcataatatggtcaggtgatggtcctgagtagtgggtatatgacagatacactagtaattataatacagatctaaactggagagttgaaaacagcatcgtatatttgattgagataatcgaaggaagacttcctgaaaagatggcatttgagtttcaaggctgagtaggattaagtattattatttaaaaaatgccttggacaatgcattaaatagagttaacaaatcacatcacttatagtctccaattaaaaacattttacttaaacataattttagacttttagaaaaattgcaaagatattataaagaattctcctatatatctcacctgtattcttcaagtaacattttaccatattcaccttaacattttctctgtattggtaattgtatatgtaagatttaatataaaataaaaattcttattaaacatatgagagacatgatgcctctttagccctaaatacttcaacttgtatgtactaataacaagggcattctatttcaaaaccacagtacagttgtcaaaataaggaaattaataattgtgtcaaactgttattctgtttatagaccttctaatgtcctttaaaacaatcaacaaatcaacatttttctggtcaagaaccagtaaatatgtatattctacatatatatatacacatatatatacacacatatattctacatatatatgtggaatatacgtatttactccctctgtccaagaaccaatccaggattgttaccttcggttatcatgtatctttggtctcctttaatccaaagcagtttctttgtcttttatgacttgacacttttgaagattacaggttattttgtagactgtccctcaactagggtttatctgaggtttccttatgattagattcagatatttatttttggcaggaatacaacagaaatgatttgtgtgtttttctcattgcatgatatcagaaagtgcattgtatatatttatcccattactggggttgttaactttgatcacttggttagagttgtgtctactaagtttcttcactataaagttatttttcacttggtcatttcatcagtatcttgtggggagttactttgtggttatataaatactctgtttctactttcccttactatatttagcttctgtggacacttttgcctgaaacagttatttactatggtgttaccaagtagtgatgcccttttcttccatcattctgtctacatttttttttttttttttttttttttgagatggagtttcgctcttattgcccaggctggagtgcggtggcctgatcttggctcactgcaacctctgcctcccgggttcaagcagttctcctgcgtcagcctcccgagtagctgggattacagacatgcgccaccactcctggctaattttgtatgttcagtagagacaggatttttccatgttggtcaggctggtctccaactcccgacctcaggtgatccacccacctcagcctcccagagtgctaggattacaggcgtgagctgccacaccaggccttctttttctcttttaagagatagagtcctgctttgtcaccaaggctggagtgcagtggcatgatgatagttcactgcagcctcaaactcctgggctcaagtgaacctcccatctgtagctgggactacaggcacctgcataacacctgactgttttttaaaactattttagagatggggtcttgcgaagttgctcaggatggtcttgaactccgggtcttaagtggtccttctgcctcagcctctggattagttggcattacaggcatgagccattgtacctggcaagtgcatattttctttttttttttttaaggtggagtctcgaggccgggcgcagtggctcacacctgtaatcccagcactttggaaggccgaggtgggtggatcaagaggtcaggagatcgagaccatcctggctaacatggtgaaaccctgtctctactaaaaatacaaaaaattaactgggcatggtggcacacgcctgtagtcccagctactcgggaggctgaggcaggagaattgcttgaacccaggaggtggaggttgcagtgagtcaagatcatgccactgcactccagcctgagcgacagaggtagactctgtctcaaaaaaaacagaaagacggagtcttgctctgtcacccaggctgcattgcagtggcatgaactccgcctcctgagttcaagcaattcttgtgcctcagcctcccaagtagctgggattacagacatgtgccaccacacgtggctaatttttatagttttagtagaggtggagtttcaccatgttggctaggctggtcttgaactcctgacttcaggtgatccacccgccttggcctcttgaagtggtgggattatgagtgtgagccactgtgcccagccaagtgagtatttgcttatgtagtattttaattttatgatttttttttctttgagacggaggtttgctcttgttgcccaagctggagtacagtggtgccatctcggctcactgcagcctccacctcctgggttcaagccgttctcctccctcagccacctcctcctgaatagttgggattataggcgcctgccaccatgcctggctaattttttgtatatctagtagtgatggagtttgagcatgttgccaggctggtcttgaacctctgacctcaggtgatccacctgccttggcctcccaaagtgctgggattaaggcatgagccaccatgcccggccagagactgttcatttattttttttttttgaggcggagtctcgctgtattgcccaggctggagtgcagtggcacaatctcggctcactgcaagctccgcctcccaagttcacaccattgtcctgccttagcctcctgagtagctgggactacaggtgcctgccaccacgcctggctaattttgtttttgtatttttagtagagatggggtttcagcccgccttggcctcctggagtgctgggattacaggcgtgagtcagggcgcctggccaatcataccttcttttactgcattaattatggttttctttcgttcttaaaacatgtttatagtgaccacttttgaaattcttattaagtcagacatctggttatacaagcaatttctattgcctacttctttttccagtgggtggggttatactttcctgtgtcttagcttgtcgtttttttttttgttgttgaaaactggacattttaagtaatgtagtaactctggatacctcattagcctatggttgggggtggtggttgttactgttatttgcttatttgtctaatgactggctgaatgattttagtgttctatccttcttccctccctgtacagtgtgacacgtctgatgctagttttcttgggatgcagccttgggtatgcctaccatcactctagaatcacagtgattttggcatggctttgtctcttttcctgactgtacccagctgttaagctacactaattactaggtgatgctgtgtagtcatttcttggtgtccttgggggattggtcccaggacccccccgttggatataaaaatttatggatgctctagtccctcataaaatggcacagtatttgcatataccggtgcacatcctcctgtatgctttgtcatttctagattacttataatacctaatatggtgtaaacactaggtaaatagttgttatatattttttatttgtcttatttttattgtatttatttttaagtgtttttaatctcgagtgattgaatctgaggatgtgaaatctgcagatatggagggcctgcattgttttccgtggagctttgggcctaaactgctccacagactgatctgatcaaatttgcgcttctttgaagggatagtttctgagatcagtgtttgaaatttgttccaatccacagaggagtcctcccagctctctttccctagttctggccaccaaactagacaactacaatttagcacttatctccaatgattctcctcctaccaagtgcctttgaaagcatcattaactctttcataccttgttgcaaatgaaatttctttgggaagagattgtgagttttttttctcctaaattatggtgcaatataagtaatataccattttaacaattttaagtgtattaagtgttttttttttttgtagtttttttttttttgttttttgagatagtcttgctctgtcgcccaggctggagtgcagtggcacgatctcggctcactggaacctccacttcccgggttcaagtgattctctggtctcagcctccccaaatatctgggattacaggtgtgcaccaccacgcctggctaatttttctatttttagtagaaacggggtttcaccatattggtcaggctggtcttgaacttctgagctcgtgatccacccacctcggcctcccaaagtgctgggattacaggccttagccaccacacctggcctatgcattgcttttatatgtattttaaaattcataagttctcctcctatgatgtttttgtcccatgtgatttatttgttaaaccgtcatctttggccgggcgtggtagctcacgcctgtaatcccagcactttgggaggctgaggtgggtggatcacaaggttaagagatcaagaccatcctggccaacatggtgaaaccccgtctctactaagaatacaaaaattatctgggcatggtgacgcgtacctgtagtcctagctacctgggaggcggaggttgcagtgagccaagatcgtgccactgcactccagcctggcgacagagtgagactctgtctcagaaaaaaaaaaaaacaaaaaactgtcattttttatgttgcatttactgcattctggatttaaactgtgaggaacctcatggtatcagttaatatattcttccatcttaatgtttctcgtaaactggtagatctgtaaacttgattaggtctatcctattgtatcacatcagaagcagaaggtgcttttttttttttttaagggaaattgtgtgaaagtagacagaatggtaaagtgaacccctgcacacctatcacccagctttaatagttatcagctcataccattcttgtttgatttacaaccccattcatttctcccttctgtattattattatttagttaattattttttgagacagggttttgctctgtcaccaatgctggagtgcagtggcataatcacagctcactgctgtcttgacctcctgggctcaagtgatcctcccacctcaccctaccaagtagcggggaccacaggcgtgtgccaccatgcctggctagttttttattttttgtagaaacagggttttgctttgttgcccagactgatctcaaactccggcactcaagtgatcctcctgcctcagcctcctaaagtgctgggattacaagcatgagctaccacattcagcatgtaaatttctttatattaatttgactggcattttaagtcacacttgaatttcatatttggcaactattaaaagcatagagtcctggatattagtgttttgttaaacctgatctatctaatcataaatatacttaggtctaaaatatgctcttggcctttgtttattgcggttcagtatttgttactatattaaatagtaaaatatttggtttgagatactaatgaaaagattaaaagtaaagcataacttgaatggatacaaaaagaaacaagaatttagacttcagtggatttcagagaatactgcttcgatatgctaacattcctgttgggtgtccaaccgtgtcatagatcagtggaaattagtggtttctgcactttactgtactgtttttttatatgataatattttcctggttgaatgattcgttcttttgagtaaactccatggtcaaacaattactttttattagtcaaagatgtaaccacataatcactaaaaagaacagtgtgacttatttaaaggggattatgtttttaagtcttttatatagctttgtagggaggccatatgagtttaaggacagttcgtggcatttgttcaaggttttgtaacttggcatctcagcagccaccaggataccagatcatcgttctaagtaagatttaggcattttagccttcatgtacagactataagtacacccccccacacccctaccaaaactgtaaattcaaatgatgtttgaaaaagcatagaatttttgttaggcgaggtagtttattccttgtgatacagttccagagaggcagcataacctaggaatgaaaaacttagacgtggaatcagatacacctggtttaaataccagctctactgctcatgaactggatgattttggtcaagatacttgactgctgaggttcagtttcctcacctgtaaagtagaggtgatagattagacatgttgcatgtgaagtacttagtatggtgtctggttttgtagtaagatctataaaagataaattattagtcatattccttagacttcaggaatttatctctgtgccatgtttgaggcaaacagttacagaattagaatgttagaaatgaaaggaatcctagatgtcatttaattcaagtccattgttttctggatgagagaagaaagtgaggaaaagtgacagagttggagaccaagctaggactggcctcagaatgttaagagtactcttctagggatcgaccagtcgtgttactagactttttggatctgaattgtgcttttccttgaatgttttgaattttggcttgagtgttgtgattattttattaaaatgagattccagtcctattgtcatgactaatgtttatgagaaatataacatttcactttaatgatgttttttaattattctaaggggcctaatctttttcagtggaataagctttaggttgtattatattctataattcacttgaaaatagaattcatctttacttgacagccaaattttgtgtactgcatcttttctgagggagagagttggcaaggaaaggcacttgttacaacgatccacacatatagacgcatattatttagaaatgaaagtgctttgaatgatttagcttattttcagtttttttttttctgcagttgtaatcatatgacctgtttttctttctttttttttttttgagacagagtcttgctctgtcaccccggctggagtacaatggggcggtctcagctcactgcaacctccacctcccaggttcaggcgattcttctgcctcagcctccctagtagctgggactacaggcgcatgccaccacacctggctaatttttttattcttagtagagatggggtttcactgtgttagccaggatggtctcgaactcctgaccttgtgatctgcccacctctgcctcccaaagtgctgggattacaggcatgagccactgcgcccggcccatatgacctgtttttcttttatagatgggggagaaatatgggaagtgacttggtgtcagtcatctgtgttggttaaatcaagaatataatccgtgttttgcttctgaatagctctttataacagtgattggttactttgggagtaaagattattatttagagacagagtcttgctttgtcgcccaggctagactgcagtggaatgatcgtagcctactgcagcctcagactcctggactctggtgatcctgcctcagcctcctgagtagctaggactagaggtgcatgccacatgcctggctataattattattaatttacgtttagcattagtttttttcttccagtaggctattttactttatttatttgattttgatgaagtttgattatttctagtttgcttccttctatgacccctacctgttgtgggtctccaggcaagcagtgcataggtagagccatccttaggtagcctttagacttaatattaggtgagctctccccacagatagcctctcctttatttgaatggaattatattttaagtttggaaatatttttcagcttatttagcctgttgaatttaataaaaataatatttaatcttttcagaggtcgaaacagtaacaaaggactgcctcagtctacggtgagtaactttaatgttacttattggggaaaattagtagctaaaacatgatctctaaccacagaccaaatgccaaggcaaaagattcccttcttttgaattttgtcatagataacttgactgtttaagtatgttattagcctatatgtgtttttttaatgactctgtataaaatgtacaattacttgttgtattagtccattcttacactgctaataaagatatacctaagactgggtaatttataaaggaaagaggtttaattgactcatgctctgcattgctggggaggcctcaggaaacttacaatcatggtggaaggggaagcaaacacatccttcttcacatagcgacaggagagagaagtgctgagcaaagcagggaaagccccttataaaaccatcagatctcctgagaactcactcactatcatgagagcagcgtaggggaaactgcccccatgattcagttatctccacctggtcttgcccttgacacacgagaattattataattaaagataagatttgggtggggacacagaaccaaaccatatcatttgtaaatagtatttttgtcacgtgtaataacaagaacaagtcgcttgttcttttctaaatgactaagtgcaaatctaagtgaaaaacctccaaaagatacgtagaacaccaagagtggagtctgcagagttctttatgctttttattttgaattaatgtgctttttttctgctgctttcatttttctcctttggctttctggtcttaaattttggaatgttatcaatgaaattgaaccggacatgaagggcagaaactataagtcccacatgatggaagaaataaatgagaagctatcacaaatttttgagactttgcctttattagattgttttacaagaatcaggaagatatacacgtatatggtagtaatatggagtagtgtggttgatcagacttaagcactgtcactgatgctgatatgctgggagaacctagtcagggttcttctatgaaggtatgacctggcttcctaccccatttatttatacttcacccttcttagggtacatttctgtgagttttaacaattgcatacaatcagtgtaactaccaccacaatcaagttaatagaacagtttcattgcccaccaaaatccctcaaatcacttttcagtgaaccctcctctctctccaaccattgatttgtcttccatccttacggtttgtgtccttcctcctctatggaagtttactcttgcttttttatgtcatgtttagtcaaaacaccattagttggtttgactgataacacttgaaaacctgaccttctgttccttctgttctctatggaagcaaaatattaaataaacaaaatcttcccttaatacatgtaagatatcataaacctaactaaacattttgcaacaaataataaacgttagctttatatgcaaatgtaaatacaggctgagcatccctaatcggaaatgctccaaaatttcatattttgaattagggatgttcaagcactaagtataatgcaaatatccccaaatccgaaaaaaatccgcagtctaaaatacttctggtcccaagcattttagatgaggaagattcagtttgtactaatttctaatagttttttttttttttaatattccagatttcttttgatggaatctatgcaaatatgaggatggttcatatacttacatcagttgttgtaagttattagattattggggataaactgccttgggggtagaataaagtaattccatgaagttaaaatgtggataaatgattgtcaaagtaacattgcttagatcatgtttagtcaggatgatttagagaaatagattagaactccttttatccagtctaatataattcattgtaaaagtacagttggtcctctgcatctgtgggttccatattcatggattcagccaaccttggatcaaaaatatttgttaaaaaggccaggcacagtgactcacgcctgtaatcccagcactttgggagtttgaggtgggcagatggcttgagctcacaagtttaagaccagcctgggcaacatggcagaactccgtctctacaaaaagtaaaaaaactagccgaacgtggtggtacgtgcctgtagtcctagtgacttgggaggctgacgtgggaggattgtttgagcctgggaggtggaggtttcactgagctgagataatgcccctgcactcagcctggtcaacagtgccagacagaccccttctcaaaaaaaaaaattttttttttttttttttttttttttttttttgagaaaaaagaggcatggttgcgtctgaaccaaagatgtacggacgtttttcttgtcattattcctaaaacaatacagtatgacaatttacatagcatttacattatattaggtattacaagtaatttagggatagtttaaagtatttgggagaatgtgcttagttatatgcaaatactattacattttatgtaagtgacttaagtattatgtaattcggtatctgaaggaggtcctggaaccagtcccctaccaataacaacagatagctgtattcttgttaaccctgctgtgtgtgtaaaataatgttagtagttgattgtcttttgtacattattttgtcacttaaaatagctggggtcagaaatgtttgacttcagtattaaaattcgtactgcaaactctgagtagagcctcctgaagaatttcaagagttcagtgtattgttaatgttttgaaatttttttattgttttgttagtgaatacctaatattgaatgaagcctgatgaggtataaaaagtaaaatgaaaacaaatatccctggtgaccgggtagtatactgtttctttgataaataaattatatgtttttagggctccaaatgtgaagtacaagtgaaaaatggaggtatatatgaaggagtttttaaaacttacagtccgaaggtaatttttactttttttctttttcttacaaagtaaaagaacattttcatagtcagtgttttacctagtttttaaagccactttgaatgattttacttctcagtttcaaatactgattattttatagactggtttgtgtaatcagagaggcttcttgatgtgtgtgcttattaaaatatttcaaccatttttaagcattgtgagctaatagagggatgtggtggtttgttttttcctcttaaaaattattattaatgtacttaagacaaaccatagaaacaaaaaacatttagatatgaggatttttaaatgatggaatggataatagatcatatgcctgggaaaaagggtatgattctcttgagattatttttgtcaaaggcatataagaactggtaccttgatgagctaaagaattcctaacaaattttattttgtaaaggtttggagtacttacttgtgtttttcattttagtgtgatttggtacttgatgccgcacatgagaaaagtacagaatccagttcggggccgaaacgtgaagaaataatggagagtattttgttcaaatgttcagactttgttgtggtacagtttaaagatatggactccagttatgcaaaaagaggtgggttttgatttcctaaatatgcctcatggtttattagatttattcaagcaaagattttcacagtgatcttacaaactttttttaaagaaatatctgggctgggtatggcggctcattcctgtaatcttagcacttagggaggctgaggcgggtggatcacctgaggtcaggagttcgagaccagcctggccaacatggcgaaaccccgtctctactaaaaatacaaaaatttatttttgtgtgtggtggcgtgcgcctatagtcctagctactagggaggctgagacagaattgcttgaacccaggaggcagaggttgcagtgagctgataccgcaccactgcactccagcctgggtgacagagcaagactccgtttcaaaaaaaaaaagaaagaaaaaagaaatatctactttctagaatagcccaagtaaggtaattttttagaaaaatgagaatgttaatgcatttttgttggaaaacaattagaactttagagaaaaattaaatagagtttttgtgatctcttaaaaaattagtttgtaaagcattttctacagttttgtggtcaagaatgctactgattatattcaactgaaaatttcttgtcccatttggcctacaatgctttagtttataagtgggcatgtggcaaatctggaaagaaatcaaagtataaggctaaggaagaaaggtagagaacggttggtagaaaacaattgtctaatgaaaatgaaaaagggtgaagaagtagaacatacgtattttaaaaatattcagagtatgagacaaggttttgagaatttaaaagcgattatgtagttatattaaaaatttagtctctttttaagtgtccattgatgaacaaagtgggaattcctgttactcatttgcaaggcattattgagtgttcagtaacacgttgcaaggcacttctgggcaatcctgaacttggttctcaaattctttttttttttttttttgagacggagtcttgttctgtcccctgggtggagtgcagtggcacgatctcggctcactgcagcctctgcctcccaggttcaagcgattctcctgcctcagcctcctgagtagctgggactacaggcgtgtgccaccacaccaagctaatttttgtattttttgtagagacagggtttcaccatgttggccaggatggtctcgattgtttgacctcgtgatccgcccgcctcggcctcccaaagtgctggaattacaggcatgagccactgcacccagccggttctaaaattcttttatttatttgtatatgccaaattctgtagtgaaatacgtaattctgttgtaaattgtagttcagtacaatttgattttcactattcaaatctataccaaaagctgtttttattgttgggctgattcttctacactgttacttggaaataataatataccaggattctttctcttagacttaggagtctttctctttgcttgctttttcagaggctaacagtactgggtattctttaactgtcttgatatgctgatgaaagcacagtgttctgtttttgaatcttctcaaatgtccttgtctttgattcacaactttttgtcttaagaggccttcagcatcccatacaaggaaacaagtctttttttagctgctacctttggagttgattttgtttatgtctaggagcactaaattatttatacttatactattgaaatattcctctgttataaattcaaaaattgactttggaagataaaattttagttgaatttaatacatagcactctggaaagagtattggccacaacaaaaaaaaaggttccctactctattggataccaggtcatttaacagccatttacggtatgcattgtctttttgtttttatgatgaattgatatttcccaaatgtggaagagtgaatattactttgagatgtttgtgatagtccattccttgctcctcttcaaaattaatgtcattaaatttttattactttattagatcttcatttctcagataattttagttcattatagaaaggcaagaaaatacagatcagagtgacaactttgaaaatctcactctactcataaggggatgggtgtattttgctatatattacaaaattagttttcttgatgaggacatccactattggagtaatttcaggtatcttattttttcttttctctctctttttttttttttttttggagacggagtttcgctctgttgcccaggctggagtgcagtggcctgatctcggctcaccgcaacctctgcctcctgggttcaagcgattctcttgcctcagcctcccgagtagctggttactgaggcatgtgccaccatgcccggctaatttttgtatttttagtagagacggggtttcactatgttggccaggctggtcttgaactcctgaccttgtgatcctcctgccttggcctcccagagtgctgggattataggcgtgagccaccacgcctgggcaggtatcttatttcaaaacttacagtggtttagtgaattatacaattgcgtccagtgcgtagtatcctgaaaatagtattaagtcatgtgtttaggacatcaggtctcttaagctaagactatccaggcagaaattgccctcttctataaaagaagaaaagtattaattaggaagtactatcagtatggagaaaaccattttagaattattaattggcatggtttccttctttttttttttatttcgagatggagtctcactctatttcccaggctggagtgcagtggtgcgatctcggctcactgcaacctctgcctcctgggtttaagcgattctcctgcctcagcctcccgagtagctgggattataggcacataccaccatgccctgctaatttttttttttgtttgtattcttagtacagactgggtttcaccatgttggccaggccgcatggttttccttaataacaaaattaaggcatttattactgcatctagattttttttattttttattagagacttactcagattactcccaaagtaaaggaaggtatggtttaatcaatgcttcttaatgctgggttcacgtttagtcacctggggagtttttaaaaatgttctcacttctagggatcctggtttaattataattagcctgggtgaggctctggacagtcagggtgtgagctatgggtttcatgtgatgagatcccaggagtggctctgttctgtggccttgagaatttgtgctttctaggccaggtgcggtggctcactcctgtaatctcactttgggagaccaaggtgggcagatcatttgaggtcaggagttcgagaccagcctggccaacatgttgaaaccccgtctttactaaaaaagtaaaaaattagcgggacgtgatggcacatgtctataatcccagctacttggggagaggctgaggcagaagaatcgcttgaacccgggaggcagagattgcgagatcatgccactgcactccagcctgggcaacagaataaaaaaagaatttgtgctttattttcttgcctcacagtcccctttctgtctcagaattggcaactgcctgaaatagtctctgctgttatcatttgatagtacttttccacatcttgaatggatagatagagtgttttttataatagaagtggatgaatgattagagtatactaatatgacattgtattttcctaaaagatatgaattgatttcatttctgagcttttataattctcttctgtaatagtctgtcaaattattaaggttgataatattaactaaaatttgagtgcatattctatgtgccagactctgtgctaacagatttacctacatttgttcacataatcatcacaagttgtttctgtagtagatacagctattatccacgtcatagatgaggaaacaggcatatttaggaaacttgctaaagtgaggacacaaatctagcttttctactctaactcatgttcttaacattatactgcagtgacataaattatgtggtttggtttgttgtttatctcagttgtcataagtcgaattaatgtttgtttgtttgttttgagacagagtcttgctctgtcgcccaggctgggtacagtggcgtgatcttggcgcactgcaacctccacctcctgggttcaagcagttatcttgcttcagcctccctaataactgggattacaggcacgtaccaccacacccgggtaatttttgtatttttagtagagatggggttttaccatgttggccaggctgatttcaagctcctgaccttaggtgatccacccacctgggcctcccaaattgctgggattgtaggcatgaaccactgtgcccagccagtaagttccatggttgttaaaggatttctccacaaataaagctaaaagtaaaaaaaaaaaaaaaaaaaaaaaattctcaagcaatataagatgcagactattatgttgttcaagttttttttttttttttttaatctttggctttatttttggggaaaccttttttttcttttttgttttccttgggacggagttttgctcttgtcgcccaggctggagtgcaatggtgcaatcttcgctcactgcaacctccgccttctgggttcaagcgattctcctatctcagcctcccgagtagctgggattacaggcatgtgccaccatgcccggctaactttgtatttttagtagagactgggtttctccacgttggtcaggctggtcttgaactcctgacctcaggtgatccacctgcctaggcctcccaaagtgctgggatcacaagcgtgagccaccgcgcccagccagggaaacctttattttgaggcggagtctcgctctgtcacccaggctggagtgcagtggcgtgatctcagctcactgcaacctctgcttcctaggttcaagcaattcttctgcctaagcctcccgaggagctgggattataggcgtctgccaccatgcccagctaatttttatatttttagtagagacggggtttcaccatattggccaggctcttctcaaattcctgacctcatgatccacccaccttggcctcccaaagtgctaggattacaggcgtgagccaccacactcggctgctggggaaaccttttaacatgagtaaggtcagtgtgacttttaagttcttgatgctaacatcattgatttcaataaagtttaaaagttatattcatgcatatatgcaaatgaataaaaggctttgaaatagtgacttcttacggtacagtgaataagtttcctttggtctcttgaatgttatacatgttccagtttgatttactgagaaactgaaagtacctttacgtcatatgagctgtgagtcaccttggcacattcataattagaagagaccatcagattatcattggaaaatcagtttgtatttatcctttatttgaattccagtgcagacagatctgaggttctcttcattttgctaaaacttcttagggccttcagtcgcttttggctctgtattcgtgtatctttggaattgtcctgttatctctgcttgttttttacttgattttccatccatttccagtattcctttctcctctatttttttccttcattttctttctgctcttcctgttgcgccattattcatgttttcctctttactccaactcaactatggctttacttctgtttccttattccattgttcctcatactttttcctactgcttcattttctttgcagtattctcagcctagatgataggggtcagcaaatctgctcatcagtaaataaattttattgtagcatagctatgcccatgcgtttgtgcattgtctatggctgttttgatggctgtagccatagagttgagtagttgtagctgactgtaggacttgcaaagccagaaaatttgactgtctctttacagaaaagtttgccagctcttggcctaaatcatattttccgctgcatttagggctttttaggactgatcaaaaatacatgctatactggctttggtgaagtaacagaatgtgctctgtcctttaaacttacaactaattgcatgctttgattctaatactgtataatatcctgcgattcttattcatgaccattctaattggatttagtctgaagaattacttttgcttaacagattctttgtcacatttagtgaaaaatcataaaaggggaaggttggttaatggaaaagatctccatcaactaaccactaccttccttatctacaaatttatcttcttcctccgtgccatctttttttttttttttttcagatgatcttgctctgttgcccaggctggagtgcagtgatgcaatcacagctcactgcagcctcgacttcccaggctcaggtgatcctctcacctcaacctcctacataactgggactgtatgtgcacatcactatgcctgactaattttttatatttatattttttgtagagatggggtttccctgtattgcacaggctggtctcaaactgctgggcctaagagtcttcccaccttggcctcccaaagtcctgggattacatgagtcaccgcacccggcctcattattatttttcctctggttttagtagagaggatttttaagccaacttcaatcatgcccttgactctctcccttctacttacctccttgttctctttttctttttctttttttttagatggagtctcggtctgtcacccaggctgaagtgcagtggcgtgatttcagctcactgcagcctcagcctcctgagtagctggggctataggtgcctgccaccacgcccggctaatttttgtatttttagtagagatggggtttcaccatgttggccaggctggtctcgaactcctgacctcaagtgatcacctgcctcagcctcccaaagtgctgggattacaggcgtgagccaccacgcctggccatctttttttttctccttgctcttttataccacttctctgtttctgggctcttcaacatctgcctttctagttaatctttccctttagcatgaaaacctattcacttcctgctcatcctaaaaaggattcttttttgttttgttttgtttttgtttttgagacagagtctcgctcttgcccaggctggagtgcagtggcactatcttggctcactgcaagctccgcctcccgggttcacgccattctcctgcctcagcctcccgagtagctgggactacaggcacctgccaccacgcccagctaaatttttgtatttttagtagagatggggtttcaccgtgttagctaggatggtctcgatctcctgaccttgtgatccatctgcctcggcctcccaaagtgctgggattacaggcatgagccaccgcactgggcccaaaaggattctttttaatcctgaattcttctagccattatcctgcctaaggctacgattaacctctaactgccaggtcctttggaatctttttctgtctttattgctgcacttgaatgttggtttcaccctccttcagaatttcctcttctgtattttttatgtttattgatcattccttccctgcctcattcctgggcttcttttccttcacacaccccttagatgtgtgtccccagtgtttgtttctttgcctgctgctcttgccacatgacacacactgccagctaccacacacaagttccctcctatcatgtgtgtatcattgcccttataccatgttgtattaaaattatatgcttgtctcccctgttacagtttgagctctttgtgctccaagtaaagacagtgatactgtctttattatttattctcatggtctagtatagtgctttggcacatagtacaggctcaatataaatgtgtttgaataaatgaaattcagtgccttaatacacttttgtagaagcattattttatggaaagaatgaaaaagctgtaagtggtcttacatatatagtcatccagcagatacttagagagctctgggatgtgttccttgctgtgcttgttgctatggacagtacggagaaatacaagaatctattttgggtcccttttgagaacctagtgaaactgtgtacctagtgaaactgtataccctcaccctagaaaaatttacacacatgtagattttacatgtaattcttttaaaaattaattttttttcttttttttaaagaaacagggtcatgctctgtcactcaggctggaatgcagtggtgtgatcatggcttactgtagcctcgacctcctggctcaagcgactctcccacctcagcctcccaagtagctggggctacaggtgcacgccgctatgcccggctaatttttaaaaatattttatagacactggttctcactatgtttcccaggctggcctttacctcctgggttcaagcaatcctctaccttggccttcaaaagtgatgggattataggtgcaagccactgtgcccacgctaatgtaatttcatggtgttcacagtttcttcagggagttcatatacgccatgtactctattctaagcatttttagagttagagatagcaaagcacgtgaataaattcaagaaaaatggaatgttgtactgcatgacattgaatatcaaatggagtcagcgatgcaaataattgtctagattttacaaaaaaaattagcctggtgtgctggtgtgcgcctctaatcccagctactcgggaggctgagacaggagaatcatttgaacccagaaggtggaggttgcaatgagctgagatcgtaccactgcactccagcctgagtgacagagcgagactccatctcaaaaataaaaaataaaagaattgtgtagattttagtagttggaagaagttggagtgttaatgtgtaattagagaacagtgagaaataaaattctacagattgttttattctggtgtgctgttgtgttctcatatggttgtctttttggtcttgatagtgtatcagtaacagagtacgagtaacaaacagggatctcttctgaacggcgtgacattagaaaagctgtttacggcctcaactttgctgtggtttattaagacacagatatgtgttcattctggggccaagcagtaactggagagtggcacttattgaggccagtatggaggcagtacagagattattgagattaaaagaaagaaacaggtggaacggatctatgtaatggaaagctaaacagaatagttcgtggtacacagtagaaaagcattacatgtttattaagatatggtcatcttccatttattaaagttacatgttttataatttttagagtatatagaaattctctaccctatcatgtttgccaaagtcagaacaataacttcatttattaaatataaaaaaaataaaaacctctagcataaaatagaattttatttggacaaacgataaaaaaatactgtgtggtactagtaagagtaaggttgattcaagatacatgggagcagaatccaaagtgtagaaataggccaggtgcagtggctcatgcctgtaatttcaacacttttggaggctgaggcgggaggatgagttcaggagttcaagactcgccttggcaacttggcaaaaccccatctctacaaaaagtacaaaaattagccgggtgtggtggtgtactcctgtaaacccagctacttggtgggctgaggtgagaggttcacttgcagccagtaagtcaaggctgcagtgagctgtggttatgccacggcactccagctgggtgacaagcaagaccttgtctcaaaaacaaaccagccaggcgtggcggatcacctgaggtaaggagttggagaccagcctggccgacatggctctactaaaaatacaaaaattagctgggcgaggtgacgggcacctgtaatcccagctacttgggaggctgaggcaggagaatcgcttgaatccaggagacggagtttgcaatgagccgagatggtggtgctgcactccagcctgggtgacagagccagactctgtctcaaaaacaaaaataagcataggacatggggataaattgaagatttatgaagacacagctgaaggagacataaaagtagatttggctaaatggaaacatgccatactttgaatggaattatttaatactacaacgttgtcaattttcctcaaataaatctctaaagataatatattcagttttggccgggcacgttggctcacgcctgtaatcccagcactttggaaggctgaggtgggccgatcacttgaggacgggagtttgagaccagcctggccaacatggtgaaaccctgtctctactaaaaatacaaaaatcatctggacatggtggcaggtaccagctacttgggaagctgaggcaggagaattactcgaaccccgtaggtggaggttgcagtgagctgagattgcactccagccgggtgactccatctcaaaaaaaaaaaaatttttataatatatatatatatatccgtttttgtagaaattgacaaaatgattctaaagcttattagattatgtgtattaacagaagaactttggaaatttttttccacaagagtcataaaggaggacttgccctacaaaatatgtcagaattaaaacataacttgtcagctgggtgcggtggctcacgcctataattccagcactttgggaggctgaggcaggcagatcatgaccagcctgaccaacatggagaaaccccgtctctactaaaaatacaaaattagccggtcatggtggcgcatacctgtagtcccagctactcgggaggctgaggcaggagaatcgcttgaactcgggaggtggaggttgcagtgagccgagatcgcgccattgcactccagcctgggcaacaagagtaaaactctgtttcaaaaaaaaaaaaaaaaaaaaaagaattataactgtcacagtggctacgtatggagcatccaaaactgaatttatgtgggtattttattaatatgcaatatagcactttaattctggaggaaaggtggattattcagtaaatgattctgggacattggggacaaattagatacctacttcacactgataaataaaaccaaatagattaatgagaaaactgtgattaaacaaaacaacacccagactacactggagcaaatctgtgaatttgtttaattttgagtggagaaggactttataagcatgactaccagagcaaaaaaatcatgaagtaaaagatcgatacctttgattataaagagattaaagatttaggccgggtgtggtgctcacgcttgtaatcccagcactttgggaggccaaagcgggtggatcacttgaggtcaggagtttgagaccaacctggtcaacctggtgaaaccccatctctactaaaaatacaaaaaaattagtcaggcatggtagcacatgcctgtaatcccagctactcaggaggctaaggcaggagaattgcttgaatttgggaagtggaggttgcagtgagccgagattgtgccacatcactccagcttgggcgacagagtgactccatctcaaaaaaaaaaaaaaaaaagacttagacgtgtccaaaagtaccatacatttaaaaagacatgccacaaactgggaaaagtagaaaaatagttttaaaaatgaccagtgaatgtatgaaaaggtggccctcctcacttgtaatgatttaagaaatgcagtttatttttattttattgtatttttaaagaaattcagttttaaagcagtggaatatgattgtctatcagcttgcgctgaatggtaaatgtgagaaagattactactacttagtggtactgagggagttgcaaaacacttaacactgctagtgggatggtttaagtaaaacaagtagcattcttaaactctctattaggtaaagaataggtaagtaatgcatatgtttccaggacattttcagtaagactgtttactgatagggttgtgtaatgctaatatacttactatctagttttagtattatttttttctcttgtcttggatggtttcaatggagtcttatgcatgcagatatattaaaactagtaataaagcaagagaaggaatgtggataaattatctctaatttctattttgttctatttctatttcatactcctgggaaagaatattaagtgggcatgtgtacttgaacagttgttctgttttttattagaaaagaatccgaatctataaaatgttttacatatttgccagggaaacagaaaagatatttgtacagctgtaagaattggaattaatttcattttactgacttttccttaacctaattctgaacacttttgccataggtttgagaataagttgttataaaatgactactattcttcactaatagtattggcatttcaattcctaaattctgttttttgattcttgaacatttctgaatttactttttttgtcttagttcttctacagaatcattttcttcttttttctttttttatttttattttttatttttgagacagagtcttgctctgttgcccaggctggagtgcagtagcgcgatctcggctcactgcaagctccgcctcccgggttcatgccattttctcctgcctcagcctcccgggtagctgggactagaggtacccgccacagcgcccggctaattttttgtatttttagtagagacggggtttcaccgtgttagccaaggtggtctcaatctcctgacctcgtgatccatccgcctcggcctcccaaagtgctgggattacaggcatgagccatcgcacccggccttctttttttctttctctttaacttctgagctgaaaatagtaccttttataaagaagtgctcaaacgatgattggactgatttctccttatttctctctttctctctgtctctttcactctctttttagaatttttcttttttaagtagagacgaggtcccactatgttgcccaggctgtcttgaactcctgagcccaagcaatcctctttgcctcagcctcccaaagtgctcggattacaggcttaagctatcacaccaggcctaggctaatttcatattttgagatggcacaaatttctttcaggtagctagcttttcctcctcctccccacttaaaatagatcctgatccagaagcctaatggagaaaatgaaaacagaatgttcacccataaacagtatctttgtattggaatcttttctaaaacttcttttgatctttttaggagatagtgtgggaatcagcaatctagtattacgtacgtggaatctgtcaccttgtttttttaaatacagcaaacctcatgaagtgaatttccatattttttcttgttcttgttagttttgcaccactcaggctttgctgtagaatttgatgtatatttgattctgtagagcatgggctattgatcttcactcagctttcagaggaatctgattagtaagtttgagttttttattattttttagttgattttgaagtaaaatacagcaccattttaactgataccatttctaaacaattttcagttcaaattttaagttagctaatttagagcttaagaaaattgctttaaaaacataaaattactggctgggtacagtggctcattcctgtaatctcagcactttgggaggccaaggcagatgaattgcttgagcccagtagttcaagaccagcctgggcaatatggtggaaccccgtttctacaaaaaaaatacaaaaagtagccagacacggtggtatgtacctgtagtcccagctattcgggtggcagaggtgagaggatcatctgagcgcagggagattgaggctgcagtgagccaagtgagaccctggtttcaaaaaaaaaaaggttactaattgcagtgccttttatcttatttaatgggcttagtcaaactaagatgatgtattttatcttataaatgttttcccttgaattttaactgaagaatccaatttgtacctctcacaaacagaatgtattagtaaggaaaataaatactgctttttattacttaaataggatatatttttctcttagggattttttttctattttatctcactttatcgtagtgctagaaaatttaatcattcatttgagatagggagaaaattaggtttttttttttcttctattttgagacagggtctcattttgttgtccaggctggagtgcagtggcgccatcgtagctcaccataacctcaaactcatgggttcaggtgattcaccttagcctcctgattaagctgggactgcagatgtgtatcaccactcctggctaatttttgttgttattttttgtttgatgaggtctcattatgttgcccaggctggtctcaaactctgggcctcaaatgatcctcctgccccagcctcccaaagtgctgggattacaggcatgaacctctgctcccagcccattttttaaaatatattcacagcattgtgcaaccatcactacaatcaatttacattttcatcaccctgaaaagaaactctgaaccccttagcagttcctctctgtttgtttcaattttccccagctccaggcaactattgatttattgtcttcataggtttgcccattctggacattgcgtattaatggaatcatataatatatagcctttttttttcttttttttttttgaaacagagtctcactgtgtcgcccaggctggagcgcagtggcatgattgcagctcactgcatcctctgcctcccaggttgaagcgattctcctgcctcagcctcttgagtagctgggactataggcgcctgccaccacacctactaattttatatttttagtaaagacggggttgcaccatgttggccaggctggtctcgaattcctgacctcaagtgatctgcccacctcggactcccaaagtgctgggattgcagccatgagccaccgcatctggccatatatattatgataggcttgtttcacttagtatgtttcttccatgctgtagcatgtattagtacttctttctttttcatggccaaatattccattatacagttacacaggtacactacattttgtttattcatcagttggtggacattttcattgtttccaccttttgatttatacataatcctgctgcgaacagtgacttttaaagtttttgtgtgggccgggtgtggtggctcatgcctctgtaatcccagcactttgggaggctggggctggcagatcatttgaggccgggagttcgagaccagcctgcccaacatggtgaaaccctgtctctactaaaaatacaaaaatgagctgggtgtggtggcgtgcacctgtaatctcagctactagggaggctgaggcagagaatcacttgaagctgggaagccgaggctacagtgagccgagatcacgccactgcactccagcctgggtgacagagtgaaacttcatctcaaaaaaaaaaaaaaaaaaaaaaaactgcgtgtggacataggttttcaattctcatgggggtgtgtgtgtatgcatactcatacatacatacacatacctgcaagataattgctggctcgtatgctaaatctatgttgaaccttttacataactgttgggctgttttgttttctttttattattttttgaaaatagagttggggtctcactgttgcacaggctgatttcctgggcatagtggctgtatcattttacaatcctacatagctgtttccaacgtagctgtatcattttacaatcctactagcagtgtctgaggtttcttatgtttttcacatcctcaccagcatttgttattgtctgtctctttgattatacccatcctagtgggagagtaagaagtagtatctcactgtagattttttttttctgtttacaactttactttaaaaattatatatgcacacatggtaaaaagttcaaaacgtgtgtaccaaaagatttaacagtgaaaatagaaaataagtgtggtccttgttttcttccaccaaggcaaatattgttataatctcctaaacaacttgtcttccagatttctcattttcagtcaatcttgggcattgacataaagaaattcttagacattgcttttattagatcatctcatcccttgctcaaaatcttcagtggccactgttgtttacagaataaagttgggatgctatacagggcccttcccagtggaacttctctttttcaaccttatctctcattatttcccaatgtttttttttttttttttgagacggagtctcgctctgtcgcccaggctggagtgcagtggcgggatctcggctcactgcaagctccgcctcctgggttcacgccattctcctgcctcagcctcccaagtagctgggactacaggcgcccgccactacgcccggctaattttttgtatttttagtagagacggggtttcaccgttttagccgggatggtctcgatctcctgacctcgtgatccgcccacctcggcctcccaaagtgctgggattacaggcgtgagccaccgcgcccggcctatttcccaatgttaatctacttattgacctactaagctggcatgttctgtgtgttagacatcaccaactttgtgccttctttttttgtttgtttttgagttggagtctcactctgttgcccaggttggagtgcagtggcgcgatcttggctcaccacaacctctgcctcccgggttccagtgattctcctgcctgagcctcccgagaagctgagacgacaggcgcgcgccaccatgccctgctaacttttgtatttttagtagagatgggtttcactgtgtttcccaggctggtctcgaactcctgaccttgtgatccacctgccttgggctcccaaattgctgggattacaggcgtgagccaccgcggccccctgtgccttcttcttttactcctggatttaatcccaacgtgaagaatctaccttactaactagagttttagatactttttcaaaaccaagcccacatctgtcctttttagagtcttctctgaccttccctgctcattgtggtttgtttttattgcctgtaacaatggctgttaaactttacattttaaattaatttatgtttgtatgtatttatttgttgagaaagggtctctctctgtcacccctactagaatgcagtggcgccatcatggcttactgcttcctgggctcaagctgttctcccatttcagcctccccatgcaccaccctacctggctaatttttttgtttgttttttttagtttagtttttgtagagacagatgtctcactgtgttgcacaggctgatcttgaactcctgggctcacttgatcctcccatctcagcctccccaagtgctgggattacaggtgtgagtcaccatgcccagactttaacattttctttttagtatagaataggtcagtttttttccctctgatgagatcccatgctgactcttagttaaaacaaggctttggttggaagaagagctagtgatgtcctagctccctacttactccactttcccttgccttctggggtgtcctgaagacatcatagggtgtcatgaagtacagttggagaaccagtggtctccatcatgtaccaaacactcatcttcacgaagcagtatgtagtgtcttttttaccggtatattttctctctcccaatgcattaaacttttctggagttcagaaaacaaatttatagaattaaggaaatgcgtcccccccaaccatggtgtctagtatatatacagtgacttacagataacaggtgttcaacatatatatattcctttgattgatttttgaaaagtttacatgtatatattttttatatacggggtctcactctatcactgaggttggagtgtggtgatgcagatcttggctcaccgcaacctcctcctcccaggctcaagtgattctcccacctcagcctcccgagtacctgggaccacaggtgcgcatcaccatgcctggctaattttttatatttttggtagagacaggattttgccgtgttgcccaggttggtttcgaactcctgagctcaggcagtccacctgccttggcttcccaagtgtgagccaccactgaaatacttatatttttaaacttaatttatttatatttattatatttttatgtttttatattttaaaaaatatttttatactcactagacccaattttatactcctaaaccagggaataactgtttttttttctcttacataggcatgataccatagacaatgattaaaattgtaattaccattcatttcttagttttgtggctgggacactgatgtcttcaaatgttagtttgcaaatacagtcagccctctctatccatgggttacacagctgtgaattcaaccaaccatggatccaaaatatatgggaaatacgctggggctgtgggtcacacctgtaattccagcacttagggaggctgaggcagatggatcacctgaggtcaggagttcaagaccagcctggccaacatggcaaaaccctagctctactataagtacaaaaaattagctggccatggtagtgcacatgtgtaatcccagctactcgagaggttgagacaagcaatttgcttgaacctgagaagtagaggtttccatgagctgagattgtgtcactgcactccagcctgcgcaacagagtgtgagaagaaaagaaaaaaaactgtctgaaaagaaaaaaaaaaattatatgggaaatcaaaagcatctatactgaacatgtacagactttttttcttgtcattattccttaagcagtaccacaactatttccgtagcatttactttgtattaggtattataggtaacctagaggtttaaagtatgcgagagtatgcaaatactacaccactttgtatcagggacttaagcatccctggattttggtatccctagggggtattagaaccaatcccccatagatgctgaaggacaactgtagtgtgtgttggaataatttattttcaaatggatcatttggagaacactattctttaggaaacatagcctcctaagttctgttccatacatccctttcacctccacggcgttgtagcatcctgctttcatgactgtgtcatcactcggaaggaactgcttctcttccagaatgcttttcaagatctactctgaccacagctataaactttacacttctattctcttcttgcccctcacagtgttctctgttcctctaagatcttaaactctgtctactcctaatccagcctgctgggtgtggctggagaaagtcccactggggggctgattagttaggaatgtagggtttccagctcttgctggagcctcagaagagttcagcagacttttttttttttttttttccttaaacctatttctgcagccttgatgaccactccttccagtccctcacctatttgctttattcatggcagaggctctttcttcctgcttgtcagtacaaagaggcaggattcttcacctggatctgtggattctcaaagaatttgtggagagaattcagggcattgatgaccttggatgaagagaaatttacatctttatttacactaaccttcaagtgaaatttagcattttttgccatttaaaaatatgggcaacaaacaactagtagtattagcagtatttatgacttaagcacctatagaactcagttaatttcatatcgcttgatgttatgggtatctcaaattattattttatgtatatatatttttgagatggagtctcgctctgtctcccaggctgagtgcagtggtgcagtctcagcccattgcaacctctgcctcctgggttcaaacgattctcctgcctcagcctcctgagtagctgggattacaggcgcacaccaccacgcctagctaatgtttgtattttcagtagagaaggggtttcaccatattggccaggctggtcaccaactcctgacctcaagtgatccgcctgccttggcttccaaagtgctgggattacaggtgtgagccaccgcacccggcctcaaattatttttagaaacagaatcttgatatggtatccgctctggccttgaacttgtgggctcaggcagtcctcccacctcagcctcctgagtagctgggattataggcatgtgccactgcaccaggcttcaaattattatgtatgttcatcacctctttaaatttataatagttattaaacctgttactggatcttaatatttaatgctttaattaagaacatgtatgttactatgccaacagatttttttagtttttgataactgcatttcattgttacttgttctcatttgatttcctgtgtattttacgaatttaagtacattctgaatacggtttcataggcttccctaaaatattgaaggggcccatggattaagaaaaaggctaagaatccctaatctagaggctccccacagtcctcttttgtcatcatacccctaccccattctagcctgaggagcgtggctccacctgtgcccttggttttgttgttccagtccatacatcctgcacccttaactgtgtttcttatccccaacttgtttctttgtgttattcttcagtattatagtctttaatataatctgtataatacatggtgtagtagtatatgctcgtagtatacaattcagttagaacagatgagtattcaatgaaaagataatctcctctctaacccccagtcccacttccctggggaagcctgtgttcttgtgtacaattcagaaaatgtttatacacatattttttatttatttattttttgagacggagtctcgctctcgccaggttggagtgcagtggcgcaatcttggctcactacaacctccgcctccctagtagttcaagcaattcaaggttcaagcaattcgcctgcctcagcctcccgagtagctgggactataggcgtgtaccaccacgcctacctaatttttgtatttttagtagagacagggtttcaccatgttggccaggatggtctcgatctcttgacctcatgatccacccgcctcagcctcccaaagtgctgggattacagatgtgagccactgtgcccagcctgttgatttaattttaaacagagtttcgctcttgttacccaggctggagtgcaatggtgcgatctcggctcaccgcagcctctgcctcccaggttcaagtgattctcctgcttcagcctcccgagcagctgggattacaggcatgcaccaccatgcacagctatatttagtagagatgggggtttctccatgttggtcaggctggtctcgaactccggacctcaggtgatccgcccgcctcggcctcccaaagtgatgggattacaggcgtcagccactgcaccccgcctatacacatttttttgttttttgtttttttgagatggagtctcgctctgttgtccaggctggagtgcagtggcgcgatctctgctcactgcaagctctgcctccctggttcacaccattctcctgcctcagcctcccgagtagctgggattacaggcgccggccactacgcccatctaactttttgtatttttagtagagatggggtttcaccgtgttaaccaggatggtcttgatctcctgacctcgtgatctgcctgactgggcctcccaaaatgctgagattacaggcgtgagccaccgctcccagctatacacgtatttttaatgccactccagtctatgttggaaccattttacttcccctttcttattttcttcttgtgttcttgaaggcctagatcagctgttgctgataggctgtcactgtcactttagaaagcccagagccttttgttccttagaactttgtttttaattgtattgtagcactcattgtattcgattctaaaagatttgcttcatttctgtaactagtctcttacacccaggagctcctagttcctacaggaaatgctgggaattgtatcagtcaaatgtgaatccccacctcgtccagacttatgagtgcattgtaggtactcagtaagtgctaaaaatgactaaatagtcccactgataccaatctatatactgatactttatatagtatatagattggtccacatataacgatgacacataatgagaaactgtcttaaaaagttgttgaaagtgccgcaggaataggaattgatcaaaacaatatgattttttaggtttatatggaactttgatgtttgagaaaaggctgatttagttgagaagaaatggttagctgaggattttgatgacttctctggaagcacatttgagggtttgtgatgttaaatctgatgttaatgattatttcatccagttttatgtcattttatagtttttatacatttaagtatatttatttctaatgtttaacactaccattttagttatttgaccattattctggccctttaaaaaatgctcagacaagtttgaatgatttttcagaggcattattggctcagaggtaaaagaggaaagattgagaagctgaatatgtactctgtttcctgggtatggggctggggatacccagaagaggttcacacgttggtcgagacatttctttatgaccaccagcaggtggcatcaccggcccaaaatgactaagtttctgcccagaatcagaagagaaggtgttgagagcccactgctgtgggggtagcatggaggtgggatacaggggctggaggtgatacaattttgtttcttcctccaacatcgcctgctagtctagaggcttttataaattgaaaaactaattctttatcatctcatctgatggtttttatgtttttccttttttctctctatacctgtagttccttcagaaacaggtaacacttttctaatagtcacgttgtattcttgcatcttgttgttacaatgcttttgtttctcaccataggggatgatggaaaattaatattctttgacttatggcattggtaaaatctgcatgcaaattcccacagttgcctgtagattagagccagttgtttttttctcaactttgcaggaatcctggttacaacattgtactatttactaccaacagtgttttttttttttaaaatccagacttgctgggcatagtggctcatgcctgtaatctcagcgacttgggaggctgaggtgggaggattgcttgagcccagggctgcagtgattgcggcactacactccagcatgagtgacaaagaccccatctctgaaaaaacaaaaacaaaaacaaattttttttaaagaaacagaaacaaaaatccaaacttgtaaccactgtaaaacaaatcagaatttacgatagtggatattattaatagtgcagaatggatacccagatcttgcttcctttctagctaatgatgcaatgttggcctgaaatgcattacttatagccagggattttctcagcatcctgatgatatagcctcatttcgtgctaactctccacttctgcacatcttcccctaagtcctttactcatctttagaaagagctacttttggtgaaattttaaaaccaaggaatatcattctttatagaatcacacttctgtgttttccccttccccatttctgtctcgaaagcgacagactgctacataacctgtgaatacttttttttaaaaaaagtttggtattgtaaacagaagatttaagattaaaatgtagcattgagaaaaatagatttattaataatgccctcttaacacaacctaaattctggtcagtggaataaagcctgggtcctaaagttttagacgcttgcttgcttttccacactggctcttacttggggatccttttagaaatttgtttagaataatactgtaaaaacatatttaagctactttgtgtgtacatttgggatcttttggtttgaagacggcttgactcaagactttctaaatattttcacacacacacacataccctgtagtgagaaaaaaatccgtttatatggttctataaaaatctctagctgcttcgagctttaatttcttgaatcaaaagagtattgtttttaatactgagcttctatctaaataaatgctttatttacttaaatgtgtgcttttcaaaaactagtatgattaagacattaacaggatcttagacgtaaaggaacagtcctgttgcttcttccagaagataatatgactcgtttggaattttcctatagtgtagttttttgtctagtgttgtgagaattaaagggatttcaggatcttaaggtaggttattatttgatgttttcttggaacattttacattcttgaaaatacacatggctaaattaatttttgccagcaatccacataactttaagataatgtagagaagaacgtgattcaggttagtatcaaataaggtcagatttctagtgccatcagtagctttcagcaaagatgaggtgttggtaagatagcattagtctcttagaatctcttagagagattttccaaaattcagccatttctagtgaatgctccattccacccccagctgagtcctgctgctctggggaactccctcagcacactcttggctcttagaattgctagcaatgggagtagtgctgctggtggagctggcagctaagcccagaggtggattaatgcttttattccctgatgtacaggtacacacactcatacctacccacacctagtttgggataagaagaggttagaattagctaggcttgaagttccatgcttaaatttgctggctcagatttcttattttggcatcactttgcccattagggagacaatgacagttatagaagcattgccaaataaaaaatccatctggaataacctcttttgtaggagtattgtgtgtttagttgttgattcgtcccttcctcctcttagtggcaacttacagtactgggaaggaacagtggctgggagcttatattcctcagcagagccagatcagcagaagtattactccttagttcgtagtaggtggtaccctatgggtccagtcatttaaatgcaagcctgtatctacagagcgtttcctagtgccatcattgcccagtgggcctttatttagctgagtctaactcccaactagagaaaatttcctgtgccagacagcagtatggtcagctaacatgtggatgctacatttgctttcataagtcagtactcttcaataacattagtagaagagaagaggacacaaagtgagagtgtgttaataggaagtccaggtatgcctgctacctgaactttctgagacaggtaatactgtagggcctgaactttgtagcagagtggttatatatgaagaagtgggttctgggaggggttaaaccacttagaatggcttcatttactaatggcaagagtttgctgggatattgaccactgtacatagacatgaatatggaaagttaaaaacaaaatccacatatatttggctgcaagtactccgaaggtatatctaattagtgcatccattaaacaaaagagatattttaggccgggcatggttgctcacacctgtaatcccagcactttgggaggccaaggtgggtggatcacctgaggtcaggagttcgagaccagcctggccaacatggtgaaaccctgtctctgctaaaaatacaaacattagctgggcgtgttggtgggcgcctgtaatcttagctacttgggaggctgaggcaggagattcccttgaacctggaaggtggatgttgcagggagccgagatggtgtcactgcactccggtctgggtgaaagagcaagctccatctcaaaaaagaaaaaaaaaaaaagagatatttttgatggattgatagaaattttctttttctttttttttttgagacagggtctcactctgtcgccaggctggagcacagtggcgtgatctccattcattgcaacctccacctcccgggttcaaacgattctccttcctcagcctcccgagtagctgggactacaggcatgtgccaccatgcccaactaatttttgtatttttagtagagagagggtttcaccatgttggccaggatggtctcgatctcttaacctcatgatccacctgcctgggcctcccaaagtgctggtattacaggcatgagccaccacatctggccagaaattttcttggtcacttctgagacatgcagagtaattacctgtaatataatttaatgaattatgtcaatatattaaaatatgcttcatgtgggctgggcatggtggctcatgcctgtaatcccagcactttgggaggccaaggtgggggtatcactaggtcaggagatcaagaccagcctggctaacacggtgaaaccccgtctactaaaaatacaaaaaattatccgggcgtggtggtacacacctgtagtcccagctactcgggagactgaggcaggagaatcgcttgaacccgggaggcagaggttgcagtgagccgagatcacgccactgcattccagcctgggcaacagaacgagactctatctcaaaaaaaaaaaaaaaatgcttcgtgtggcttaaaattatatgaaaagaaaatacctttactgatagtcatctgtgattccatttgctaaattaaacgtgaaagcatacttttactgaatactatatattccgtatcagtttagatagcagtttatcttcacatacataagttttaagtttacctttattatagtgcattggtcttttgttttcatcaacctaaattatgttcaataaatgtttctgttagattttaagttaaacaattatgtgaaattcatttttcgtaattgttttttaacatatgtctttgttggtaattcacgtgtgtgagtgtaactgattgccagattatataaactttcaaccaaaaccattctttgcagatgcttttactgactctgctatcagtgctaaagtgaatggcgaacacaaagagaaggacctggagccctgggatgcaggtgaactcacagccaatgaggaacttgaggctttggaaaatgacgtagtaagtaacatctttgtaattattgctagactctggtcagtatgacatcctgtcacttggttgtaatttaaatgtgcttttgttgttgttgttattgtagtgagtgtatttagagcagcaggtttgttgtataactagagactttctcccaagcaatatataaagaaaaatgtttgtcattttacttgtaggggttaagcaggagtactgtctgttcttgtggatgctcatgaattacttctttgtgattaaaataaataataagaagtagcttaaattaaaattagaaaccatgggaaatgccggtgtgttttgctttaacacccagccaaataaggtagcctaaggaaagtggtgtcttaattgttgacttcacctagagaagaggttgaagtaggacattttaagcctcttgtctgaagaaaaggttgtcattaagataaataattaggttacattggaattaaagcattacataaatttcttggtcttaaatttggattattctccacaaaattcttttatttctaaaacgcctcttgtcacatactagttttgtttctctctttaatgcattatctgtacttgaagtgcttagctgggtatgctggcacatgcctgcagtcccagctacttgggaggctgaagcaggaggatcacttgagcccaggagttggagtccagcctgaatgacataaggagaccccttctctaagaaataaaaataaaaacaaatacttaataaagactctgtctttaggatagagagcatagagatataaagcaaagtgtcttgccaaaaatgagtgttatggtaccaatatttgagtagaatgaagaatcttccattgagtagaaagagaatttgtaacatatctgtgtttgatgtttaaggcataacagcttaataatgacactcttcctcagacaggaagcctgaaatgtcctactttgacctaaagtctagtaataaaactggacatacacaggcaacatgtcattaattctcaaactttaacaaatcatatataacctaatataatggttctcaagtctgtacatcacgtcacctgtatgaaaaatatgaggaaacagagacttcttttacactattggtgaggtggataaattgatagagtctttctggagagaatctggcaatgctaatcaaaatttaaaatgcacatacactttgttccagcagttctatctctagtaatttatttttgccctcatatatccataagacatgcaaataattatatgtgaagattttttttttttctttttctgcagagacagggttttaccatgttgcccagggtgatctggaactcctgagctcaggtaatccacccacctcagcctcccaaagtgctgggattacaggtgtgagccatcatgcctgaccaggatttttttttttttcagcattatttcttttgttgttgttgctgttgttttgagagatggagtctcactctgtcacccagactggagtgcagtggtgcgatctcggctccctgtaacctccacctcctgggttcaagtgattctactgcctcagctttccaagcagctgggactataggcgtgcgccaccacacccagctaatttttgtatttttagtagagacggggtttcaccatatgttggccaggctggtcttgaactcctgacctcaggtgatctgcccacctcggcctcccaaagtgctgagattataggcgtgaaccaccatgcctggccatagcattatttctaatagtgaaaaattggaaacatgctaagtgtctatcaatatagcatgagttagatttatgatgtcaccattcaattgaaacactacatatctcccaaaaagaatggtgttccaatatggaaagatatctaagatttattaagagaaaaagcacattgcagaacactgggatcctatttgcttttttttttctttttttgagacagagtcttgctctgtcacactgcaacctccgcctcccgggttcaagcgattctcctgcctcagcctcctgagtagctgccaccatgcccagctaatttttgtgtttttagtagagaaggggtttcaccatgtttgtcaggctggtcttgaactcctgaactcgtgatccacctgcctcagcctcccaaagtgctgcgattactggcatgagccaccgcacctggccatgaaatttttttttttttttaaagagctgttcatattcttattgcctagaagatgtctgaaattacacccaagaaactctttttgagacggagtcttgctctgttgtccaggctggagtgcaatggcgtgatcttggctcactgaaacctctgccttccaggttcaagcgattctcctgcttcagccttctgagtagctgggactacaagcgcccgccaccacatctggctaattttttgtatttttagtagagacagggtttcaacatgttggccaggctggtcccgaactcctaatctcaggtgatccacccaccttggcctctcaaagtgctgggattacaggcatgagccactgcgcccggctgaaactctttttttttcttttaagatggagtctcgctctgtcgcccagacttgagtgcagtggtgtgatctcagctcactgcaagctctgcctcccgggttcacaccattctcctgccctagcctcccaagtagctgggactacaggctcccgccaccacacctggctaattttttgtatttttagtagagacagggtttcaccatgttagccagcatggtctcaatctcctgacttcgtgatcctcctgcctcggcctcccaaagtgctgggataccaggcatgagccaccgtgcccggccagaactcttaatagtagttatttatgcacgctgggattggaagacatttactttttactggatgtctttccgtattgtgtgcttttttttttttttttttatgtagggcatacattacttaagtaattttaaagcctccataagtaagtgtgatttcctgcccatgtgtttggcaaaaggaattgcattggtggtagacttacattatagtcttacctggagtagcacaggaggacccaaggttaataggtgaacttcgaggcaagccttagcattgaggttgccatcagcattgcttggttgatgtgttcattcttctgggatggattacaacctttactggactttatacttttcaccagtaaggctttaaaaaaggagttgaaacattagagaataattatccaggcagtaatattcactggtaaatagtcttccagcctgtggcccaattggttgattcttttacgttaaagaatgcagcctcagctgctctgcctatggagtaggattcttttatttactttcttaataaacttgcttgcccctggctcccccccaccaaaaaaagaaggcagcctcccttttgcgaatggtaatttcctatagtttcctcgtagaattgtggagttacctatgctgaggttataggttagggtattgagatccagagttgccacttctgaggtgtcacaactgctaatggtaaaaccatttctaaagcccagttcttgtgactttgtccagtgattgcctgttcaccgtttcatgctgccttcccatttgagcattcccaggaggaaggggaggttgccagggacctagtaccatagtccgaccttggaatcgttgaatatgagggaaagcgttggcttctcccttctttctcccaaacattggaagtatttttggctgttaaaaagcaccccttgttccatgtggaatcccttgtttaaaagaagtaaaatatgtacctcctgtcctccacagacctgaggaccagtgtgatctcaagaaggttacaggtaaatgtagatgtctctaactgaaaggtggcttttacaggttagagaaaagagagaaccctgatctgaaggctattttatgaagtaattaaaatgttctaaactttaaaaataactgctcaaataattgtgttgtatagttacttatcaactggaggggctgataagtatttttctaaaacatttttaaggaaattttttcctattttctaatttgctaattttgctcaagtagtttgttagatattgttaatatagatgttggttataactgaatgaaagggaacaactactttgacattttgaaaaacaagcttcattttcttctagtctaatggatgggatcccaatgatatgtttcgatataatgaagaaaattatggtgtagtgtctacgtatgatagcagtttatcttcgtatacgtaagtttgaaaagtttgtttttattttagtgcatttgtctttgattttcatcagcttaatttatgatgaataaatgtttgttagtttttaagttaaacaattacatgaaataatttttctcttattaccaactgtgataaatttccattaaaaaaagggaataaatgtagtttgcctataccctgtttttatgctctaaacaaattttggttttgtctttttttttcttttgagagggaatctcgctgtgtctccaggctggagtgcagtggtgcaatctcggctcactgcaacctctgcatcccgggttcaagcgattctcctgcctcagcctcccgagtagctgggactataggcgcgtgctaccatgcccatctaatttctgtatttttagtagagacggggtttcaccatgttggccaggatagtctcgatctcttcacctcgtgatccacctgcctcggcctcccaaagtgctgggattacaggtgtgagccactgtgcctggccggttttgtcttctaagttgttaaaaaatatctaaatttgcaagggcagagattatggtgaacagtttaaccagtttttgaaatatgttcctctggagaaaaggtaacagaaaaaaaagttagaattttgatttataaatacacagatcactataacttttagttttagttttagttttagtttctgtttttaccagtattctaaactctaaactttcttagtagttgattatgacagatacataaactgtggctttaaaggactcattttgcttttcttttcctcatgtttcagagtgcccttagaaagagataactcagaagaatttttaaaacgggaagcaagggcaaaccagttagcagaagaaattgagtcaagtgcccagtacaaagctcgagtggccctggaaaatgatgataggagtgaggaagaaaaatacacagcagttcagagaaattccagtgaacgtgaggggcacagcataaacactaggtatttaaaggaaatcatgatgcagtattttggatacacaactcaaggtctgtgtgagacggtgtattgttattatatttcctcttcctttaatatagcttaggtagagaatgcaagtagaattggtttaagatctgttagagaaaaggttatggtgatcttggaaaatatgcttttgagagtaagctctgtggagccaagtgttggtatatcacggtgagcaatccaagatcttgaagagcttgttaaaatagttatctggtgggggacacgtgtaacaatcacagcagtacaatatgatttgcttggttaaaggcatgttcaaagtactaggaacatacagaatgaggaggagctagcataacctgtagagtcagagaaaacctcattgaggaggtgacattttgtgataagataatagggtctttgacacttagagaagagttgggagaagagtttatcacctgatgaaaagccatgtacaagcatggctatgagaaaatttggccagctcaggagagggctggttgttgcatgtgtctggaacacaggatctgtgtcaggtgcagcagtggcagttgatagtaggaactgaggtcattaaaggacttggcatgtcatgctaaagagcaccctgttggaaggagatggggtgaataaaccctggggcattgaggactggctgagacacagagaacagttagtgcactgaaatagttcaactgtgagaatttggtaaccacctagttaagggatgagcctgaggtttatttgataactaagtgacttaatggatgtactggtaagagagagaggaaacatggagcaagtttgaggggaaaaacagtgactccgtttgtgcagctaattgcatatgtgggcttgtgggtctttcatttattcataaacgtgttgagaaatacctgctacctatctagtaaagtaagagatgcatcctctcttaaaggcagtcagcttagagtctggtgatttgaattgacatgtccactgatagatgttgacactgtgagactggcggttcagtttgaggtttcatcagcattgccgatattggagccatgaaaaaccaaagaacagccagtgagagaagagatctcagagaaaataaaattgagaaagtgaaggacaaaaaatgttgtgaagatagaccaagattgatggaatcagccatagagaggtcaagtgggatgagaatgagcacgcatctgttaaactttgtgcttaggagcagaatctaagggaagggacagtccagaggttagaactcagggtaagatggaagaacaggggcatctgggagtgaggcagtttggtttagtgtagaacctttttgtaacaagcattcccttctgtctagatgacttttagatatgtttcattggcttggtaccttttagaataaaatgatttagaggatctctcattttcagggaaaataaatatattcctcctggacaaagaaatagagaagtcatatcctggggaagtgggagacagaattcaccgcgtatgggccagcctggatcgggctccatgccatcaagatccacttctcacacttcagatttcaacccgaattctggttcagaccaaagagtagttaatggaggcaagtattttgaccagacttgtcaatatcattgataaaatagttttctaaatacttaaaatacttaaaatagtttacataactgatatgaatgtgcactttaatgatttggtgagtagctttcacttcagcattacttaaaattggcttttgtggatattaaattagtaaaacattgtatatgtcattgacatatatattatttagcatgatgaaatattcatgatgtactaagataaagtgctacatttaacccaagacaatcacttggccaaaaacacttcacatataaagaaattggaaactttgggtaggttctcaattttaaaaacactggataataaaattttttagacataatttatatggaaaattctaacctatgtgcaacactgtggttaatatagatcaattttcattatttgtttctatattatgcttacttcaagaaaggatctgaggtaacttataatacaagacatgatcaagagtcatgtgaagaaagtgactagagaaatttgcttaaaaaacaacaaaaacaacccttagtctaagggtggatgttacagtttagcaacttaagtaaaagaaacctgaatctttagtaggaagacattttttactctacctctaaatctaggttgaatatatcttgtaggttgtggatcttttccataaatcagggatactgaacaacagttctatggatggtatggaaatagtaatagcaatagtatgttactaactttgtgggaaaagagtggacattcaattttagctatttaaatttggaaagttagatgaaaatagagaacactaagtttccaatttcatttgttttcattgagtcttttctccagaattcctctccaaatggacactcttgagtattttcagtacttaatattgggggtgaaatttctttgctcactgaggaaagattttagttgtttataaacagaattttaaagttaaaaaacctgaagggggctgagaaatatatgatacttaagtgtgtggaaccctatggagaggagacctggactgtttgataagattaaggtaagtgatatgtaatgttaaatactagctgtatctttacctaggcatatccatcagtataaatttatttggtgatgactgctttgtagttgcagtatttattaagcagtcgcttagataagtgtttaactgtataaattatttagaaggtctccctttttctagtttaatgaggtcaagactttttttttgaaatagcaatgaatattatcatttgatactcacaggagtcacaaactctagaagagtaatgttttatttctacttaaatgggacttgcttaataagattccaaactgagttctgggttcaagtgtaaacctgatgaaaatcatagataattgtaaggaaccagcatttctaattggatataatagctactgcttattttcgttatgcctcagagttaaaactaatacagtaaataatcttactcctgagtaggaattattgtgatttattatgtgaaattatctagtgtatgttatattcctttaaacaaccagttactgagaaacagttatagaagcaggattaataggcaaagtcttaactgtcttcttcaatagtgtgtatagatcctaattaaccctttgggaacgtgtattcatttaaacagacttaatcttaaggaggttaaagtaaaatgtgaatttatgtcagttaagttatgctaaaacttatcacaaatcaaatgactgtcctcaaagggttaaaatgtacaagaaatcatttttgtcattttactttttttctgtttacttttttccctcatttttttctttagtttttatactttccttcatatcatttgttctgtcaggtgttccctggccatcgccttgcccatctccttcctctcgcccaccttctcgctaccagtcaggtcccaactctcttccacctcgggcagccacccctacacggccgccctccaggcccccctcgcggccatccagacccccgtctcacccctctgctcatggttctccagctcctgtctctactatgcctaaacgcatgtcttcagaaggtacaataccacaatttgttcatgtttttgtttgtctttgtttaactcctatgtgagtttataattacaaaatagtttcctcttcattatttaataacctataatttctgtgttttaactttagtttattaaaactatttctattaaccttttgttcattagagagaaatttgataaatgtgtgaagctataaactctcttgaattgttgttaaaaagggggtttatctctgcctgataattatgcttctttacagccccagaagggtctgccccacagccttccccctccttatttgcactgtatacagtagttaaacaaatgaactttcttcagccagtcttgaacttaggttcattttacagctctttggccaaggtcctagtgaaccttcctattggccataagcagggatggtgttttctgggtcttttttgagagcgacagcccatgtagctgactttgcgtgtctgcccttagattaaagtagttgatttttagaatgccagaagaattctaaatttaactgagtaatttttttaaagttagctttgcaatcttacatagtgaaaggctgctttaatctggaagaagtccttgatctgagataaaattgataaaaacgacatatgaatttgaatatttagctatttctttcctcgtcaaaaataagaataaaatcttgtaattcttattcagtatttggcgctaaatccatcattgccacatatcaaatacagggatatgttgtagaaaggtaacattctaatttaaatgccacccatatattaaaaacctgttttctgaatcataatgtccttttgatactagttctgaatatttgtgttaaaattttaatctgatttgttcattaaaattagttaatattgcttatgttgggactaataaagttttccgcacaaaatgtgtttctcctgcttccctggagaaaactgtattggctacttttaaataaattgttaccatctaagcaggcaggtcatatgactttgactgaagcatctaaccttgaagagcaagttccactgattttcaaggtgacttctttgctcaaaagggccttaatagtggtcactaaatgcaaaattctgttgatatttttcttgtagtccatcatttgagtaagcgatgtttatttaatgagaatatattaaataaaacatgatcattaatgactgtgaacatctttattacattaagatttaaggactgctcatgtattaacttcacacagaaatatactttctgtgtcattcagagatgttgaatatttccatttgaaaattatagtgtataacattagcattcttctaaagatcatgttcgtgtttaaattcctgttggaagccaggcatggtggctaacgcctgtaatctcagcactttgggaggctgaggcaggtggatcacttgaggtcaggagtttgagaccagcctggccaacatggtgaaacctcgtctctactaaaaatacccagctacttgggaggctgaggcaggagaatcacttgaacctgggaggcagaggttgcagtgagttgagatcgtaccactgcactccagcctgggcgacagagacagactctgtcttataaaaataaaaataaaataataattctattggcaacatatattaatttgaagttctaaagagtttggcagccgggtgagagagtgaggagatttggctttgacattagggaagttttcgcttggtgttaacaccagtaggcttctctgatgagggccattctgtccactcttttacctgatagattggtctaatgcacagtagactgatttagaaagagtagtcactagtggcatggcagaatcaataatgtagaattttgacaattcatatagtgctgatttctcccccaaatgtcagttattttggtcatctattaatagactaatacaagtcatccctttaatagaattttcagctcacagcctgctaagcctaagaaactgcttacaggttactgcttactgttttaagccgagttttaaaattgatgatcatgatagaagagataaataaactaaaattttagagaaatttaagaagggtatgtacatatgttttagtggtatcggggtgtatagggattaatagtcttctgtttaaattttttttttctaattttagaagtaatgtagaaaattcgggtcagggaaaggtaaaatatatggaaagttaaaaatattttatcatgtagtcataatttctagtaacatatttctttacaaataagacatagttgaaacagattgctacagttcttttaagagttgacatcttattgttgatttcttaccaccaacttcatccctccctttctttaaaaataaagggaaataataaaatttatttataaaactttgtggcattccacaaaataattctgaaagaattagtatggccaaaaaaatatgtatggtgttttttttttttctatttttaaccaaggaaaaactgtagagtgagtgagtgtgtgtgcatgtgtgtgtgaatgggtgtatttagcagaaaagtagtactgatgaatatcatggaatttatgtgatgttcactgtttcttccttagggcctccaaggatgtccccaaaggcccagcgacatcctcgaaatcacagagtttctgctgggaggggttccatatccagtggcctagaatttgtatcccacaacccacccagtgaagcagctactcctccagtagcaaggaccagtccctcggggggaacgtggtcatcagtggtcagtgggggtaggtaacacttgggcataatgatggtactcattttgtcattacactagatataaagagggctgagctacaactctgtttgaggaagtgtaagtatgtatatgttaaaaatagtagaatcaccaggaattgggaaacccatatttttattctgggctctaccacttattcatcatatattaaagcaagtcagacactcattctgaagttgagatttcgcagtgagtaaagtgttaataattcttgcctagtctacattatgggattgtgatgagattcctataaggttcataaatacagatatattgtaaaactataaagttttgtaaagtacctctctaatatgaggcaaacacagtatgtaacactatttggagggaccgtatttccttatctttttagcagctttgtttatcagtacattctataaacatttatttttggcttacattgtagtgtgtttctatagcatctgtatatggcactaattcccaactatatttccataataaggaatatcaaatacaaataaagggtccaagttttatttgtgattagcataaggaatatgctgacagcagctataaaagtataaaaattaggctgggtgtggtggctcacgcctgtaatcccagcactttgggaggctgaggtgggcggatcacaaggtcaggagatcgagaccatcctggctaacacggtgaaaccccgtccctactaaaagtacaaaaaaaattagccgggcatggtggcgggtgcctgtagtcccagctacttgggaggctgaggcaggagaatggcatgaactcgggaagcggagcttgcagttagctgagatcacgccattgcactccagcatgggcaacagagcaagactctgtctcaaaaaaaaaaaaaaaaaaaaagtttaaaaactagacgttgacatgattttacaataaggctgactgcttttgctactttgccaatcagtccttagtgctttgttcccataactgtggtaagcaagagcttacaaagaatacttaaaacaaacaaacaaacaaacaaaaaaaacactttttctcttttaatcagtccagagaacctttaaaagaaacaagatcggccagttgctgtggctcatgcctgtaatcccagcactttgggaggctgaggtgggtggatcacttgaggtcaggagttcaagactggcctgaccaacatgatgaaaccccatctctactaaaaatacaaaattagctgagtgtggtggctatttgagaggctgaggcaggagaatcatttgaacccaggaggtgaaggttgcagtgagccaagatcacaccattgcactccagtctgggtgacaagagcgaaactctatctcaaaaaaaagaaaaaagaaacaagatcttcaagcttaaggaaacaaaaacaaaactcagctgtgttaaatctgtttttagttgctatacatttctgctcagcttcatgtgatgcacattcatgtaattgtatcctaaattcctttgtactttttattttcttccttggtcttcaattatcttaagactaccaagaaaacaaaaattttaaaaatcttcttcagccggtcaggcgcagtggctcacggctgtaatcccagcacttggggaggctgaggcgggtggatcacgaggtcaggagttcaacaccagcctggccaacatggtgaaacgtcgtctctactaaaaatacaaaaattagctgggcattgtggcgcgttcttgtaatcccagctgctcaggaggctgaggcaggagaattgcttgaaccaggacccgggaggtgtaggttgcggtgagcggagatcgcgccactgcactccagcctgggctatagagtgagactccatttcaaaaaaaaaaaaaaaaatctgcttcagctattctgttaatcttttgacattacttagatggtctggaaataaattttgagaataacatgattagaagtgagagagtataagcatagttttggagatacactcagaatagcattatagattttctctttttactaattggaaaaatggcagttgttgaataatagttttcttccgtgacccttgtgacttaaaaaaaaaaaaacactgaaatgaaataatcgaaccattttctctaaacctttgaatctgagctctgcagttaggtttataatggtatatgaaacctattagatatatacttggaagtcatatgggatacaaaccctgcttttattatcttccccttttgactaacttgggtctcaagtttccttaattactgcacagtggaccttgatgttgctataaagaatgtgtagggctgggcatggtggctcatgcctgtaatcccagcactttgggaggccaaggtaggcagatcacctgaggtcaggagtttgagaccagcctggccagcatggtgaaaccccgtctctactaaaaatacaaaaaaattagctggttgtggtggcgagtgcctttaatcccagctactccagaggctgaggcaggagaatcacttgatacatttagttaggagagaaaatcatacttatgttagtaattgctgctgttcttcatatacttgtggttttgattgccagcaaattcctaacattttggaaaagaaaacagtaatgggataaagggtaagggctagagaggacagttttatttacctagatcttcagagaagcctgaagcctcttttaggaagtaacatttgaactgagaatgtaataaatacattttccctttcttctagttccaagattatcccctaaaactcatagacccaggtctcccagacagaacagtattggaaatacccccagtgggccagttcttgcttctccccaagctggtattattccaactgaagctgttgccatgcctattccagctgcatctcctacgcctgctagtcctgcatcgaacagagctgttaccccttctagtgagggtatgtaacaaagggcttctggatccataatctcagctgtgaaattgaatgttagagggtgatattatatgaaaaaattctaggttatttttattcatagacaagtatttttagtgcacatttaaaagtttatgtaaattttgatgttgtttaatactactaatttaatatagtgtctgtgttacaaaggttaacattcctgggtgtcaaatacctacataaataaaattattggtgtttcatatgacatctgcaaaggaaaaaaagcctctgtttaaatgaaagcattattttccaaaaacataggaaatcaaaattattgttcagtgttttcttgttttgcttttctaacttatctgaattttttttaaaaaattgttttctagctaaagattccaggcttcaagatcagaggcagaactctcctgcagggaataaagaaaatattaaacccaatgaaacatcacctagcttctcaaaagctgaaaacaaaggttagagtttaaagagtcattaagcttaactgtaggaataggaagaagtatgtctaatttcatgcccatacagaatatttttgttcaacatttcttcttactattgtgatagataaatgtattgcttgacaaattccaaaatccaaatttaatatttgaaattattttctgatcttatatcttattctaatttctatcatctcatactaaaaagaatgtgatgttaaagtttaaaaataaacctgtgtcttaacagttcttaattttacaggtatatcaccagttgtttctgaacatagaaaacagattgatgatttaaagaaatttaagaatgattttagggtaagtattgtactaactgatgaatttgagttttagaaaataagcattactaaagatttatctatttataaaaatgcgttatgtatacagtcagaaacatcaaaccatatatgtagaaagcagaacatttttaaagtggtctttgcctatcctttaagtgggataactaaaatcatgagatttggtaacaacaatatgtaggtatcaaatgagagtatagccctgacatttgaaaccaccatagcacagcttactatttgatggtcatttgtactttgttcagtgaagctagatattagtagagcaaggccaagtcattaataatctagtgtggcaaatggaagatgtactggactctggtgttctgaggtagttggagatttatactttgtacacaaatatattgtggtcaaaatctttctgtaacattatttctctgtcttagcacaggctttacttaacatctctccttgattgtcatttcattcttttgcatgttatttactataggtatcgaggtagattttgagaccaaccaataaatcttcttgaaacttagcttcttagaaaggaaaatctaaataccagccttttaaaaaaagtagctgaattaaaggatgagtgaaccaaaggcaaaggtagcctttcctcagcctgtgttttagctttctaaatgttaacaatagcttcattcttgacttattggtaacattcaaaatactacttattatttcatactttagcacatgtatctattcagctttaatgctattaacagttgttaacctaagttttcatttgttggcgggcacggtggctcacacctgtaatcctagcactttgggaggccgaggtgggcagatcacctaaggtcaggagttcgagaccagcctggtcaacatggtgaaaccctgtcttgaccaaaaatagaaaaattagctaggcatggtggcgcacacttgtaatcccagctacttggcaggctgaggcaggataatcgcttgaacccaggagacagaggttgcagtgagccgagatcacaccactccactccatcctgggcgacagagcaagactgcatctcaaaaaaaaaaaaaaaaaaaaaaagtttttcaatttgttaaacaatagttaacacatacaaatgatacaaagaatattgaatatgatcatgtgcccactacccagcttagtaaataaagcattctaacacagttaaactcctcttatgtatctgcccctcctcagctgcttccccctgtttccttccaaaaggaagggtttcttttctgtgcagttctttatatttatactgcatatgaatatatctgtgagcaatagatgatattttgcataatcttaaatttgctataaagtcttttttttttttttaattgatcattcttgggtgtttctcgcagagggggatttggcagggtcataggacaatagtggagggaaggtcagcagataaaaagtgaacaaaggtctctggttttcctaggcagaggaccctgcggccttccgcagtgtttgtgtccctgggtacttgagattagggagtggtgatgactcttaacgagcatgctgccttcaagcatctgtttaacaaagcacatcttgcaccgcccttaatccatttaaccctgagtgacacagcacatgtttcagagagcacagggttgggggtaaggtcatagatcaacaggatcccaaggcagaagaatctttcttagtacagaacaaaatgaaaagtctaccatgtctacttctttctccacagacgcagcaaccatccgatttctcaatcttttccccacctttcccccttttctattccacaaagccgccattgtcatcatggcccgttctcaataagctgttgggtacacctcccagacggggtggtggccgggcagaggggctcctcacttcccagaaggggcggccgggcagaggtgccccccacctcccggacggggcggctggctgggcgggggctgaccccccacctccctcccggatggggcggctggccgggcgggggctgacccccacctccctcccggacgggttggctgccgggtggagatgctcctcacttcccagacggggtggctgccaggcggaggggcttctcacttctcagacggggcggctgccgggcagaggggctcctcacttctcagacggggcggccaggcagagacgctcctcacctcccagacggggtcgcggccgggcagaggcgctcctcacatcccagacggggcagcggggcagaggcgctccccacatctcagacgacgggtggccgggcagagacgctcctcacttcctagacgggatggcggccgggaagaggtgctcctcacttcccagactgggcagccgggcagaggggctcctcacatcccagacgatgggtggccaggcagagacgctcctcacttcccagacggggtggcggccgggcagaggctgcaatctcggcactttgggaggccaaggcaggtggctgggaggtggaggttgtagcgagccgagatcacgccactgcactccagcctgggcaccattgagcactgagtgaacgagactccgtctgcaatcccggcacctcgggaggccgaggctggcagatcactcgcggttaggagctggagaccagcccggccaacacagcgaaaccccgtctccaccaaaaaaatacgaaaaccagtcaggcgtggcggcgcgggcctgcaatcacaggcactaggcaggctgaggcaggagaatcaggcagggaggttgcagtgagccgagatggcagcagtacagtctagcttcggctcggcatcagagggagaccgtggaaagagagggagagggagaccgtggggagaaggagaaggagggggagggggagggggggagagggagagggacaatgatgtcttgctgtaggtattcttccccatttgaattttttcctcagcattattttttttaacatcattcagtctcctcttatactacacttggattgaatttaatatctcatgaagaaaaaacatttctactttgaagcatgtgaattagcatgtttttataacagctttattgagatataatttacatatataaataaaccgtttaaagtgtataaatcagtggtttttaatgagatataatttacatatataaatcaaccatttaaagtgtataaatcagtggtttttaaaatattcacaatgttgtacaaccgtcttctcagttgattttaaaacatactcttcacccccaaaagaaaccccgtgcccagtttagcagtcgttccacatttgcctccagcccttctctttcccctactcccaaccctaagcaaccgttaatctactttctgtctctatggatgggcttatttggggcaaattccatttcatacaaatggaataataaaatatgtggcttttatgactggcttctttcactcagagtagtgttataaaagttcatccatgttggagcatgtttcagtacttcatttctttttgtgactgactaatattccttgatgtggataataccacattttgtttatccattaatcagtttgtagctatttgtggtgttctcactgtttgactattctgaataacactgccacaaacatgagtgtgcagtttttttctcgtcctatcttttcatttcttttgtgtacctacctaggagttgaattgctgggtcatatggcaactgtgtttaaccttttgaggaactaccaagctatttgccaagatatctacactattttacattcccaccagcagggtatgagggtttctgtttctccacatccttgctaacacttattgtcttgtcttttttgattatagtcatccttgtgggtgtgaagtgttaacctcattgtggctttaatgtgcagttctttcatggctaatgatgttgaacatcttttgtgtttattggccatttatatatcttctttggattgatgtctgttcaaatctttacccattttaaaaattgagttgtctttttattattgggttgtgggagttctttatatattgtgtgtacaagtccctgttagatacatggtttgcaaatgttttctcctgttctgttggttgtctttttactttttcatcccttgaagcacaaaaatttttaattttgatgaagtccaatttatctgattttgaagtaagcttttggtgtcgtatctaagaaaatactgtttcatcaatcattaaggtttattactcttctgggtttttttaagaattacatttagaggtgtgatccatttggagcaactttttttttcttttgacacagaatctcgctcttttgcttaggctggagggcagtggtgcaatcttggctcacagcagcctcagcctcctgggctcaaatgagtagctggtactacaggtgtgcaccaccacaccttgctattaataacttttgtatttttttgtagagacagaatttcgccatgttgcccaggctggtctcaaacacttggactcaagtgacacgcccacctcagcctcccaaagtgaaaaattgctttcaccttgcactgcggactcgccctgaattctttcttgtgcaagatccaagagccctctctgggggtctggatcgggacccctttcctataacaatattatgagaataacatttgattttttttaagtgaaacaaattgttattaaaaaattaaaaaaggtcataggagagtgacttggtgctcagcccattttgagcagttatttaatatagcataaggtggggttcaaattcattctttatattaattttttatttctaattgacacataaccatacacttataaccatttttactgtgtaagttcagattcattcttccgtatgtaggtattagttgtcccagcaccatctgttaaaaagactattcttggccaggcacagtggctctcaacgcctgtaatcccagcactttgggagtcccaagcaggcagatcacatgaggtcaggagttcgaaaccagtctgaccaaatggtgaaaccgcatgtctactaaaaatacaaaaattacctgggtgtggtggcgcacacctgtagtctagtcccactactgtagtggctgaggcaggagattcgcttgaacccaggaggtagaggttgcagtgagctgagatcatgcactccagtgtgggcgacagagtgagactccatctcaaaaaaaagactattctttcctccattgaattatcttcacatgcttgttggaagtctgttgactacaaatgtgaaagtttattactggactctgaattgtcctccactgaatctctatgtcttatccttatggcagtaccatactgtcttgattagagttactgtattttaaaaggctgtactttttcagttagcagaaaacattttagctatcagcacaactttctgtaaaccttcattaatgcttgacttaaattccaagaaggagcaacataaaaagtcttatctctttaggagttttagtcttactacttttaggtgcctgaataaccaaatgtattatttagcctcttactaataactccttgatccataggggcataccaggaagaaaagaagtggtttttaaaaaatgagagtgggccgggcacggtggctgatacctataatcctaacactttgggaggctgaggcgggtggatcacttgaggtcaggagtttgagaccagcctggataacatggcgaaaccctatctttattaaaaatatataaattagccgggcatggtggcacatgcctgtaatcccagctactcaggaggctgaggcaggagaatcacttgaatccaggaggtggaggttgcagtgatccgagattgcatcagtgggcgacagagcgagaatctgtctcaaagaaaaaaaaagagagtggaaaaaaaaaatatgtgtcccagaacttaaattttaattaaaaaaaaataaaagagtgaactttctaattgttctcttcagataatataatgttattctcttatgttttattgcgtatttcctgtgtaccagatgctgttcttcatgcttgtatgttaaatcttgtctaacatctctgtcaagcaagttctgtttgtatctgcactgtgtatattaggcagcttgggcaaagagaagttaagtaatctgcccaaactcacatggctagtaagtaagagggctgaccatctggtgtttaagcttctagcagtgctttgaatagtaactaatgcatagtgcatgctgcactgtcagtcagtgattcattagagctaacttcatgacatgctcatagccccaaactgcatttgttcacaaatatctgtagtccttcatttaggcagaaatagaaataccttgtgtgtttgttgttccttcccttttgagccatatgcagagtgctgatagctttatttgtgtaagaattgctagtaatttgatctgttttgggttaataatgtgggttttagaggtaaatggacctaggtttgaatgttggcctctatacatcatgtgcgtaacattgtggcatgctatctacttcccccaagccaaaatgggttaattttagaacctgcttcatagtgttcctgtgagagctcgatgagatattgcctataaagtgtttagcatagtgcctagcacatggtatgtattcaatacatgttcattcttactagcaaaatatagatgacccagtattgtacagagtatgtacaatggtgtcattgtaccatttcatgtggagtcacataagaatttcagttttctgctgggcatgatggctcactcctgtaatcccagcactttgggaggctgaggtggatggatcagctgaggtcaggagttccagaccagcctggccgacatgatgaaaccccatctctactaaaaatacaaaaaattagccaggcgtggtggcaggtgcctgtaatcccagctactcgcaagactgaggcaggagaaatgcttgaacccgggaggcggtggttgccatgagttaagatcgtgccgctgcactccagcctgggcaataagagcgaaactccgtctccaaaaaaaagaaaaaaaaagaacttaagttttccattagatttagtatagtgcagagaggaaatacagcagagtgctatattccatatatagcaatatagcattagaacaatatattccaatacagcagagtgctatattcagataccaactagtggacttgctatttgtaagatggcaataatagtatctacatcaaatagggctgttgtgaagactaaatgaataagtctataaatagtttagaacagtgtctggacaggtacagtggctcatgcctgaatcttagcactttgggaggctgagacaggtggatagcttgagctcaggcattaaagaccaacctgggtaacatggtaaaaccctgtttctacaaaaaaatacacacattagccaggtgtggtggcacatgctaatagtaccagctactcaggaggctgaggtgggagaatcacttgagcctgggagatggaggttgcagtgaggtgagcttgcaccactgcgctccagtctgggcaacggagtcagaccctgtttggaaaaaaaaaaaaaagtgtccaacccatagtaagaaatgcagatgtgtttgacattgtaagaaaaagcaacaccaaaagtctgatttttgccttcactcaagaactcttatgataattaaactccgaagtccttggcaatatatatagttggtctgttatgtggatcgcctctactaaagatttttgtgaacaaatgaaagtttaagtagtaagttcctacatcgtgacttaaattgccagtgtgcccacataaataccctgtcaacatttgcccttagccacttgactctttagctatattggtaatgcagtaaagcttgcgatgcgccagagttgcataatgctgtttgccatgacaccaagagccttggtaatgaaaccattgaaattggtttgcctatactgaggctgaagaggtatcttggctctctaattttaaggcaacctttttggctgtgtaggtttctctttagcttgtttctcaccacctggggctgtggcttaggtccgttgtcctaacctgtggcttaggttctgtttttgttgcttgtacttgctcccccttttttcagccattcctgttttctttcttttgtagaggatgccatcttaaatcatcttcagccagtggtagcattttattttttctggtctgcaaacttaaaaacctcatcacttattttgctaatatctttgtcttctgttctttttgatggtccttggttttgcagtctactttaaaggtttttatttttttatgggtacatagtagacgtattattcatagggtctgtgagatatttagataaaggcatataatgtgtaataatcacattagggtaaatggggtatccatcaccatcatcattcatcatttctttgtgtaatgaacgttgcaattgtactccctcagttattctaaaaagtacaacaaattaatgctgactgtagtcaccctgctttgttgtcaaatactagatcttattcattctttatttaactttttaaattttaaacttattttatttatttatttttagacggagtctcactctgtcgccaggctggagtgcggtggcgcagtctcaactcactgcaacctccgcctccagggttcaagtgattctcctgcctcagcctcctgactagctggaactacaggcacgtgccaccacgcccagctaatttttgtatttttagtagagacggggtttcactatgttggctgggatggtcttgatctcttgaccttgtgatccggctgccacagcctcccaaagtgctggggttgcaggcgtgagccaccgtgcccggcctttaaaattattttaaatcattttaatatctttttcatttctgcctccggtcctgcagagttcttattcgttctttctaaattttctttgcacccactaatcacctcatttcccttcttctccccattacccttcccaacttctggtaaccattctgctatctccatgtgttcaattgtttttatttttagtgcctgcaaacgagtaagaatatgcaaagtttatctttctgtccctggcttattttacttaacataatgtcctccagtgccatctacattgctgcaaatgacaggatctcattcttttttatggctgaatggtaatctattgtgtatatataccacattttctttctccatttgtctgtcagtggacacgtaggttgattccaaatcttggctgttgtgtatatagtgccgtagtaaacatgggagtgcagatattccttcaataaactgatttcctttctgagtatatacctagcagtgcaattgctggatcatatggtagctctatttttagttttttgaggaatttccatactgttctccatagtggttttaccaatttacatgtccaccaacagtgtgtgaaggttcccctttatccacatcgttaccagcatttgttattgcctgtcttttggataaaagccattttaactggggtgagatgatatcttgttgtagttttaatttccatttttctggtgatcagtagtattgaatacctttcatatacctgtttgccattcataaataacgatgaggtcttgctgtttggcccaggctggtctcgaactcctgggctcaagcaatcctcccaccttggcttcccaaaatgctgaaattatagttgtgagccactgcacctggccttgtatgtcttccttttttttttgttttgttttgtttttgagacagagtctcactttgttgcccaggctggagcgtagtggtgtgatcttggctcactgcgccctacacctcccggattcaagcaattctcctgcctcctgccaccatgtctgcctaatttttgtatttttagtagagacgggatttctccttgttgcccaggctggtcttgaactcctaacctcaggtgatttacctgcctcagcctcccaaagtgctaggattacaggcgtgagctgctgcgcccagcctgtatgtcgtcttttgagaaatgtctattcagatcttttgcccatttttaattgagttactaaaattttccctatggagttgcttgagtgccttttatattctggttattgatcccttgtcagatgagtagtttgcaaatattttctcccattctgtgggctgtctcttcactttgttgatggtttcctttgctgtgcagaagctttttaacttgatgtgatcccatttgtccatctttgctttggttgcctgtacttttggggtattactcaagaaatctttgcccagagtaatgtccctgggagtttaatgttttcttttagtagtttcatagtttgaggtcttagatttaaatctttagtccattttgatttgatttttttttaatatggtgggacacaggggtctggtttcattcttctgcatatggatatccagttttcccagcaccatttattgaagagactgtcctttccccagtgtatgttcatggcttctttgtggaaaatgagttcacttagacgtatggattcatttctgagttctctgttctgtttcattgatctatatctttttttatgccagtaccatgccattttggttacaataatttgaagtcagataatgattcctcccgttttgttcattttgctcagtatggcttttgctcttttgggccttttgtggttccctacaaattttagaattatttttgtctacttctgtgaggaatgtcattggtattttgatagggattgcactgaatctgtagattgctttgagtattatcaacattttagcaatattaattcttctaatccataaacatggaatctcttttcatgttttttctgtgtcatcaatttcagtgttttaaagttgtcattatagaaatcttttactcatttggttaagtttattcctaagtattttattatatttgtagctattgtaaatgggattgcgtttaaaaaatttttcagattgtttgctgttaaatataaaaatgctcctgatttttgtgtgttgatttttgtatcctgcaattttactgaatttgtttgtcagttctaataggtttttcttttttggagtctaggtttttccaaatgtaagatcatattatctgcaaacaaggataatttgacttcttccattccagtgtggatgctttttatttctttctgttgtctgattgctccaattaggacttccgagtattatgttgaataacaatggtgaaagtgggcatccttgtcttgttccagatcttagaggaaagcctttcagtttttcccttttcagtatggtactagttatgggtctgtcatatatggcttctgttttgttgaggtatattccttctatacccagttctttggggtttttttgtttgtttgtttttgagatggagtctcactctgtcacccaggctggagtgcagtggcgcaatgttggctcactgcaagctccacctcctgggttcatgccgttctcctgcctcagcctcccgagtagctgggactacaggtgtccgctaacacgcccggctaattttttgtatttttagtagagacggggtttcaccgtgttagccaggatggtctcgaactcctgacctcatgatctgcccgtctcagcctcccaaagtgctgggattacaggcgtgagccaccacgcccggccaagggttttaatcataaggggatgtggcattttatgtgatataaattatatatttatatcatgtgatatatatttatatcatacacagtataaataatatatatatatattttttagtctttgtcttttattctgttaagatgtaccatgtttattgatttgcgtatgtcgaaccatccttgcatccctgggatgaatcccacttagtcatgatgaatgatctttttaatgtgttactgaattcggtttgctagtattatattgaggatttttgcataatgttcttcagagacactggcttctagttttccctttttgatgtgtcctttggttttgtatagggtaatagtggccttgtagaatgagtttagaagtattccctcttcctgtattgtgttggaatagtttgagtaggattggtattagttcttctttaaaggtttagtagaattcagcagtgaagccatcaggtccatggcttttctttgctgggagactatttcttatagctttgatctcgttacttgttattggtctcgttacttgttattgtatttgggttttggatttctttgtggttcagtcttggtaggttgtatgtgtctaggaatttatccatttcttcaaggttttccaatgtatcagcatatagatgctcatagtagtctctaatgatcctttgaatttcggtggtaacaattataatgtctcctttttcatctctcattttattatttgggttttctcttttttttctgagtctggctaaaggtttgtcagttttgtttatctcttcaaaacaatttactgttttattgatcttttgtattttcttcatttcaattttatttatttctgctttgattttttttatttcttctactgattttaggttttgtccttgcttttctagttctttaggatgtattggcagatgaagtttttccacttttttgatgtaggcacttactgctgtaaacattcctcttattgttgcttttactgtatcctataggttttgataagctgtgtttccattttcatttgtttcaaggaattttccagttttcttcttaatttcttcatggacccactggtcattcaggagcatattgcttaattttcatgtatttgtatactttccaaagttcctcttgttatctagtgttattttattttatttttatttttgtttttttgagatggagtctcgctctgtcacccatgctggagtgtagtggcgcgatctcggcttactgcaacctctgcctccccagttcaagtgattcttctgcctcagcctcctgagtagctgggattacaggcatgtaccaccactcctggctaatttttttttgtatttttagtagagagggggtttcaccatgttggtcaagctgatctcgaactcctgacctcagatgatccacccaccttggcctcctaaagtgctggaattacaggcatgagccaccgtgcccggcctctagtgttatcttattgtgatcagagaagatagttgatatgattttaacttttttgaatttttatttatttatttgtttgtttgtttgtttgtttgtaacagagtctcactctgttacccaggctggagtacatgtcatgatcttggctcacctgcaacctccgccttcctggctcaagcaatcctcccaccttagccttccaagtagctgggactacaggcacatgccgtcacatatggctgatatttttggattttttttttttttgtagagatggggctttgcgatgtgtcccagggttgtttcgaactcctgagctcaagcaatccacctatttcggcctcccaaggtgctgggattacagacatgagccactgtgccacgtcaaatctttagacttgttttgtggcttaacatagggtctatctttgagagcaatccatatgttgaggagaagaatgtgtattctatagctgttggacacaatgttctgtaaatatgtattgggcctatttggtctatagagcaaattaggtctaatgtttctttgttgattttctgtctgaatgatctgtccattgctgagagtggggtgttgaagtttccgactgttactgaggtctgtttctcttttttgctctaataatgtttgctttatatatctggatgctccagtattggttgcatatgtatttatacttgttataacctcttgccgaattgatccctttatcattatacaataatcttctttgtctgtttttatagactttgtctcaaaatctattttatctaagcatagctactcctgttcttttctggtttccatttgcatggaatattgttttccagctcttcaattttagtctatgtgtgattttataggtaaagtgtgtttcttgtaggcaatggatctttggtttttttttttttttttttgagacagagttttgctattgttgcccaggctggagggcaatggcgctatctcagctcactgcaacctccgcctcctgagttcaagcgattctcctgcctcagcctcccaagtagctgggattacaggcgcctgccaccaagcccagctaaattttttgtattttcagtagagatggggtttcagtatgttcgtcaggctgttcttgaactcctaacctcaggtgatttgcctgccttggcctcccaaagtcctgggattacaggcgtgagccaccgcacccagccttttttttaaatccatttagccactctgtatcttttgattggagagtttagtcgatttacattcagtgttgttactgattagtgaggacttaactactaccattttgttacttattatctggttgttttgtagtcctactccctcccttcccccttcttttttacttcctcttcgctccttttttccctccctcccttccttgttttgaaagtgattttctctggtggtatgttttaatttcctgctttatattttttgtgtatctgttgtaggtgtttttgatttaagatcaccatgacagctgggtgcagtggttcacacctgtaatcccagcactttgggaggccgaggtgggtggatcaagaggtcaggagattgagaccagcctggctaacatggtgaaaccccatctctactaaaaatacaaaacttagccaggcgtggaggcacgtgcctgtaatctcagatactcaggaggctgaggcaggagaattgcttgaacccaggaggcagaggttgcagtgagtcaatattgtgccactgcaccccagcctgggcgacagagtgagactccgtctcaaaaaaaaaaaaaaaaaagagatcacataagggttgcaaataacattttataacccattattttaaaccaatgacaacttgaaactttgattgcaaaaacaagcaagcaaagagaaaactaataaaaactctacacttcatctgcccgctttttaacttttgttgtttttatttatatctttattatactatgtcttaaaaaactgtagttataagccaggcgcagtggttcacgtgtgtaatcccagcactttgggaggctgaggtgggcggatcacctaaggtcaggagttcgagaccagcctagccaatatggcaaaaccccctctctactaaaaatagaaaaattagccggacatggtggcgggtgcctgtaatcccagctactcggaggctgaggcaggagaatcacttgaacccaggaggcccaggttgcagtgagccgagagtgcgccactgcactccagtctgggcaacagagtaagactgtctcaaaaaacaatacaaaacaaaacaaaaccctggcctagtggctcacgcctaatcccagcactttggaaggcaaaggtggggcgaatcacaaggttaggagttcgagaccagcctgaccaacgtggtgaaactctgtctctactaaaaatacaaaaattagccaggcgtggtggcacgcacctgtaatcctagctactcaggaggctgaggcaggagaatcgcttgaacctgggaggcggaggttgcagttagccgagatcgcgccactgccgtccagcctgggcagcagagcaagactctgtctcacaaaaaaaaaaaaaattgtagttcttatttttgaaaggttcattttttattcttcctgctcaaaatatgagtagtagtttatacaccacaattacagtgttacaatattctgtatttttctgtgtacttgttaccagtgagtttttgcaccttcaggtgatttattattgtttgttaacatccttttcttgcagattgaagaactttttttttttttttttttttttgagacagagtcatgctctgttaccagcctggagtgcagtggtgccatcttggctcactacaacctccaactcccaggttcaagcgattcttctgcctcagcctcccaagtagctgggattacaagcatgtgccaccacgcccagctactttttgtatttttagtaaagacggggttttgccatatttgccaggctggtcttgagctcctgacctcagggtgatccgcccgccttggcatcctaaagtgctaggattataagcgtgagtcatcgtgcccaacttggttgtttattttcaaatagcctgaattcaagctcactaatgttttctgctgcttgatacatttctgctattgagagactgatgcatttttcagtttgtcaattgaatttttccactttgggatttctgcttgattctttttactaataattattgcagtctcttttttaaatttataggattctgaatttgttctctgtattatcttggatttcgttgaactttctcaaagcattcagcttgaattctgtctgaaagttcacatatctcttatcacttgggaattggtcactggtgtcctttatttttagttcatttggtgaggtcatgttttctcagatggccttgatgcttgtggatgttcatcagtgtctgggcattgaagagttgggtattctgttctttgtagtctggttttgtttgtacgcattcttttttttttttttctgtttttgagacagagtctcgctctgtcgcccaggctggagtgcagtggcacagtctttgctcaccgcaacctccgtctcccggattcaagcaattctcctgcctcagcctcctgagtagctgggattacaggtgcgtgccaccacgcctggctaatttttgtatttttagtaaatatggtgtttcaccatgttggtcaggctggtctcgaactcctaacctcgtgatctgtccgccttggcctctcagagtgttgggattacaggcgttagccactgcatccggctcccattcttcttgagaaggtttttcaagtattcaaagggaattaagtgttgtcatctaagtcttcgctcactgcagccatacatgcattagagggcaccccaagactagtaatgttgtgactctgtagaggtatcaccttggtagtcttggggaagatctgggagaattccctgtattaccaggcagtctcttgtcctcttacatttctccaaacaaatggagtctctctttgtgctgagctgcttggagtttggggaagggtgacacaagcactgccatggccaccgtcactggaactgtacttggtctcacccaaggcctgtggcagctattttctggccaccactgatgttaatttaaggcccaagggtgctttagtcagtaggtgaagaatcctgcaagaactgggtctttactttcagtgcagcaggttcccttctggcccagggtgtgtctagaaatgctgcccaggagccagggcctgggatcgggagctttaggaatctgctttattgtactggggctgagctggcacccacttgcaagataaagtcctttttactcttctctcacctcaagcaggtgggtctccccatggacaccacagctgtgaatgtgcggggtcatatctgaagctggcacaatacgacatggcaccttgttttttattcaaggcacaagggctctttagtcagctggtggtgaatcctactaggactaggtatttcccttcaaggcaatgggttcccttctggtccagaatatgtctagaaatgtcatctgggagctatggcctagaattgaggcttcagaactatgcttggtgctttattttactgtggctgaactagtatccacattgcaagacaaagtcctccctactcttccctctcctcccagagctgtgagctgtggtacctggagttgggggaaggctggcacaagcactcccttggccaccctagctggtgtctcagtgggtcacatgtaccccaagtccactgactatgagcccagcacagtaccatgacttgtccaggaattgcagtccttctggtctagactgcctttcaagtttatttaggaccccagaggactttacccacggtggtggggcttaccaaaattaagattcttttggttttttttggcagagtttcgctcttattgcccaggctggagtatagtgacgcaatctcagctcaccacaacctccgcctcccgggttcaaataattctcctacctcagcctcctgagtagctgggattaccggcatgcgctaccacctctggctaatttttttgttttttagtagagatgaggtttctccatgttggtcaggctggtcttgaactcccgacctcaggttatccgtccgcctcggcctcccaaagtgctgggattacagaccatagtgcccagcccgaaattcagattctaatcactgggatggacaattcccctctgactagggctagtctaaatactccctctgtgggtgctggctgaattctgtcctatgctgctttccactgtgacagggcagcactgagtttcaatgcaaaatcccacagtcatttctctctctctcccccgagcacacagattctttctccaccccacactgcattgtgggggaatgtcaggggtgttggaggggcagttcaagactatcttccttatcttttttggtgtctttttccttgataggatgtcaaaactgggtactgtgatcgcttacctaatttttggttcttatgaaggtgctttcttgtgtggatagttgttcaatttggtgctccttgttggggatgatcactggaaggttctgtttggccaccatgctctgtctcttctcccctgccatctcctttttttacttaggggtttagaatgtctaactgaccaatatgtacagtcaggtctcattctgaattcacctacttaatgaccttccaagctgactaggcccagcgcttagtccagcctccatgacggtccctccacatcctaattagcctccctccagttcatttcacacaaagctgctgtgttcacctttctgaactataaatctgcccagtactctaccctacttaaaattccgtatagactgcccatttgccctgagaattaaaagccaaagtcctaaacgtagctttttaaaacttttttttttttttttttaatttttagatggagtcttgctctgtcacccaggctggagtgcagtggtgtgatcttggctcactgcaacctccgcctcctgggttcaagcaattctcatatgtcagcctcccaagtagctgggatttacacgtgtgccatcacgcctggctaattttttttttttatctttagtagagacggagtttcaccatgttggccagtctggtcttaaactcctgacctcaagtgatccacctgccttggcttcccaaagtgctaggatgataggtgttagccactgcacgcagccctgaacatagcttttaagttcctttattgtcatattccttttgacgagtctatcattttctgactcacttgtacatgtgtgtctcacccttggtccagccattggtgcttttctttacttctttatttttgttattttattttattttattattattttttaaatgagacagggtatcactatgttgcccaggctggtcttgaactcctgagcttaagcagtctgcttgtctcagcctcccaaagggctggaattacagtgatgagctactgtgcccagctcattggtgctatctttttttttttttttgagacggagtctcgctctgtcacccaggctggagtgcagtggcgtgatcttggctcactgcagctccacttcccaggttcacaccattctcctacctcagcctcccgagtagcagggactataggcgcctgccaccatgcctggctaatttttgtatttttagtagagatggggtttcagcgtgtgagccaagatggtctcgatctcctgacctcgtgatccgcctgccttggcctcccaaagtgctgggattacaggcgtgagccaccgtgcccggcccccattggtgctattgttttatgtgatagagccagcttctcccttttctttggatttttaaacatactcttccttttacttagactattctccatcccaacacctttcctaaacttctttcacaccttagactagctgacactttactgagaaacctttcttttttataggttgctttttctatagactctcttagcatttactcattttattgtgaagtgtctgatcttatttaaatgacaagtataagaggatagaaactatttcatatttttctcacccagcaggcacaatttctgacatgtggtaagcactcagtaaatattgaactttagaggctaggacatttgagtgctttggtgactgtggttgtgctatataggtactctgttattgttagtttatagtaaaagcattactcttaaagtatgaaaaaagccttattcagaacatttcatgcgtatagttaatattacgtagcttgtgctcatggcaaaaatgtattactaaagttatttaagatatttaagtataattgtttcctttatttagttacagccaagttctacttctgaatctatggatcaactactaaacaaaaatagagagggagaaaaatcaagagatttgatcaaagacaaaattgaaccaagtgctaaggattctttcattgaaaatagcagcagcaactgtaccagtggcagcagcaagccgaatagccccagcatttccccttcaatacttagtaacacggagcacaagaggggacctgaggtcacttcccaaggggttcagacttccagcccagcatgtaaacaagagaaagacgataaggaagagaagaaagacgcagctgagtgagtaaacctggaacttagaccatcctgttactcaattaacttttttttttttaaaggcatttaggtccttccaactgtgaagaatccatctggacttttagactactttatacattgcccttagtttacaaacagctagtccaaacaaatgacatcttaagtaaatgaggttattgcaccctgtgctactcttctgttcttccccttttttgtaccccagggctagaaaaacaaggcataaattaagaaaagtttttctgtaaatgaacaggagttgaaaaattatcaattcaggggacctatctttactggattccactcattagtcaccctcactgtgctgctaggttgaaaaactgccactgtcaaggagagaagcatgcggtgcttctacttggaattcaaaatatttttcatcagaaactgtgttttagttaatgtttagatttgttaagatagacttaattctgcacattcagtatattaattaaatggacttttaggggctaacctcagaacttaactaccattgacttaggtgtttgggtaccaaacaatccagttaaagctgaagttttggaatgcagcttattgataaattggggactgcttattcttgatttgaggcaatttttttttacagccatgactttttccaggtatgtcatgtaaaatatcttctcacataagaattactgcatgctagaatattggtatgttgactggtagctcatacctataatcccagcactctgggaggtccaagcaggtagattacttgaggttaggagttgaagaccagcctggccaacatgtgaaaccctgtctgtactaaaaatacaaaaattagccaggcatggtggtaggtgcctgtatcccagctactcgggaggctgaggcaggagaattgcttgaacccagaaggtggaggctgcagtgagccgagatcatgccactgcactccagcctgggtgacagagcgagactctgtctcaaaaataaataaataaataaataaaaggatactgttatgttaagaattgcttttaaggatatttcataagtagctactgtcttttcagctcaagtgtttgttgattggccaggcgtggtagctcatacctgtaatcccagcactttgggaggctgagtcaggcagatcacttaaggtcagcgtggccaaaatggtgaaaccccatctttactaaaaataaatattaaaaaaaattagctgggcgtggtggcagtctcctgtaatcccagctaatcaggaggctaaggcaagagaatggcttaaactcgggaggcagaggttgcagtgagccaagattgcactgctgcactccaacctgagcaacagagtgggactctgtgaaggaaaaaaaaaaagtattttttgattgcctttgagaggaacggttgtatattactcagatttttaaaaaattgttcttttatggctgtattctttaagggattaaggaatgggcaatataagtgtatatgtttcaataaaaacgattagtgatcttctagtgagaacagtttaaatctatatttagcaattttttttaaattgtcaggtatggaagattttagagcaacgtaaagtccatgtagatttcactggcctttatattttttttaggcaagttaggaaatcaacattgaatcccaatgcaaaggagttcaacccacgttccttctctcaggtaggtttattactttctttgaggttatctagtcccaaaaaaagaaaaattattagtaatagtccttcttccatacctgccatctgaattttgttttagtgtgctgaaccaaccttctttcttttttttacatggccattaatgaatactttttaaacattaaaaaaaggtctttgttttgtcatcaattagatgtgatcttgggcaaatctttgaatttctctgacccagaatttgacgatggttggctagctaggctgtcaggtttatagatacgtcctctgcacctgagggttttgcatcactggattcaaccaaccatggatcaaaaacatagttaggataatctatactgaacacatgcagacgtttccttgtcattattccaaaacaatacagtaaagcatttaccttgttttaggtattataaataatctagagatgatgtaaagtatataggaggatatgcataggttgtatgcgaatactacatgattttatgtaagggacttgagcattccaagactttggtatcttcacagggtactgtaaccaatcccccacagatactaagagatgactgtactattgttattattcgactgagatcataagaagatatatttatttttaatttttaaaaacacttccatcagtttcttaaaaatagctgccactgtttttaatattttttaattgacaaagttttaagttcctactgaaacattttttcttttattgaaatgtgaaaatttatgtgctgtgtttttgttttcaataaaagggacatagttaaagcaagtaaaattagaaagactgggaaaatccgtctttaaattgcaataatagttcatctgttaccttgagataattgaatttattgttgtttttgtagccaaagccttctactaccccaacttcacctcggcctcaagcacaacctagcccatctatggtgggtcatcaacagccaactccagtttatactcagcctgtttgttttgcaccaaatatgatgtatccagtcccagtgagcccaggcgtgcaagtaagtcatagaatttgatgttcacttagcctccccaattgtttgtatctgacaccaagcactctttaggttttcagtgacttgagggtgtgatggttatgcatatgcatttgaaacagacaggcatgcagagattcagtgtgttgttaagtatgaggacctaaatctgagaatgttttctgtgaaaaagatggtttagatttactgtagtttggggtttgttccttttagctgtgggtatgatctaattttttaatgactaatggagaatcaggaaaccttctcatgcctagctctctagcaatataaaactaagagtgacagaataccttgttattatcataggtgcctaatgttaattttttttttaattctctcaagcctttatacccaatacctatgacgcccatgccagtgaatcaagccaagacatatagagcaggtaaaggtgagaataatcctgcctgtgtttgcttgtagtttgcatgctgcatgaattgagtaactaagtttataatgaataaatagttgtagtttagctctgactttttgatgaggctatgcattggcttttgatgaacaacattacatagatattcacatggattttatgaagaaaaacaggggagaaaaaatgcccatcagttgtgattatatagtatcctcttcaaaaagagtaattggaggcctggtgtgatggctcacacctgtaattttagcactttgggaggccaaggcaggaggattgcttgagctcaggagcccaagatcagcctggacaacagagactttgtctctactaaaattcaaaaaaattagctgggcatggtggcatatgcctgtagccccagctgtttgggggactgaggcgagaggatcacttgagcccaggaagtagaggctgcagtgagctgtgattatgccactgccctccagcctgggcgacagagtgagaccccgtctcaaacataaatactggctgggcatggtggcttatgcctgtaatcccagcactttgggaggccgaggtgggtgtatcacctgaggtcagtagtttgagaccagcctggccaacatggcgaaaccccatctctactaaaatacaaaaattagccggacatggtggcacctgccgcctgtaatcccagctactaggtggggctgaggcaggagaattgcttgaacccgggaggcaggggttgcagtgagccaagatcgtgccactgcacttcagcctgggcaacagagtgagactccatctcaaaacaaacaaacaaacaaaaaacaaacaaacaaaaaaaccagactaattggctggacacagtggctccatgcctgatatcccagctggaggatgacttgaacccatgagttcgagagcagcatgggcaatatagtgagaccctatctcaaaaaaaaaaaaaaaagttaattccaaagctttttgatctgaaatctgatttaaatctgaacttaaatttgaagaagagggtttgctagattaatttactagattgctaaccttgctttatatatacctacagttatttccccaaagccagaatttcttttgaagcagaggggcaactaacttcaaccaatgttaagatcctattagaaggatgtttcggctaggcttggtggctcacgtgtaattccagcactttgagaggctgaggtgggcagatcacatgaccgggagttttaagaccagcctgggcaacatggcaaaaacctatctctgcaaaaaaaaaatagaaatcttagccagccgtcatggtgtgctcctgtagtcctagctacttgggagactgaggtgggaggatcaattgaaaccagaaggtccaggctgcagggaactgtgactgcaccactgggctccagcttgggtgaaagagcgaaaccctgcctcaaaaagaaaaataagatggatgtttctgcattaaaattagggagttgtcgtataatgtagttgcataaactagtattctgtgcttgtgtggttaaagagccttcgtagaaaaaatcccacatttttcttaaaaggaaatcttttggccaggtgtggtggctcacatctgtaagcccaacactctgggaagccgaggtgggcagatcacttgaggtcaggagtacaaaaccatcctggccaacatggtgaaaacccgtctctactaaaaatacaaagatcagctgggcatggtggtgcgtgcctgggtgacagagcgagactccgtccaaaaaaaaaaaaaaaaaaaaagagttcttttaatgttggaaaatgctaaagggttttttttttgccaaccagttaatttagagtgattaactgctatcagttgagaaactatagaaagtagaataatttatacagaaaagacatttctcagtgcccaataattgcctttctgacataaagttttcatttttcctgaattaataagatttcctcaatgtgtttttttgggtgttttgtgtgtgtgtgtgtgtgtgtgtgtgtgtgtgtgtgtgtgtgtgtatgtgtttgatacagggtcttgctttgctgctgaggctggaacgcagtggcgctatcatggctcaatgcagccttgacctcctgggctcaagcgatcctcccttctcagtcccctggatagcgggggctacaggtgcacaccaccacacctagctaatttttgtattttttgtagagatgggttttgccatgttgcctaggctggtctcaaactcctgggctcaagcgatctgcctggctctgcttcccaaagtgcctgcgcccagccaattttctccatgtttgacctaattgtgatttcatagatgttaactaaaactcttaattttcgttttctcagtatgctattttttttttttttagccttggaacatatgaacctgttgaaagaactctgcctgaaataatgtaatcaaattatagagtttaatcttattttgagggcctttagaaattctgagaagaaagtgggtttttttttttactgccattttaatgtagtgttaaggtgttcatgtatcaccagcaggtgtagctgttttcaatgattacttaaaacaatgcaatgggaactttttgttgtcattaaaatataaaaggttactgtagtaagagcaagcatgacagtttggctatctgatgggagagtcacattctaacttcaggaggtactgtctttttaatagaaatgatatactcagagtctgggcacggtggctcacgcctgtaatccagcactttgggaggccgaggtgggcagatcacgaggtcaggagatcaagaccatcctggctaatacagtgaaaccgtgtctctactaaaaatacaaacaattagctgagcgtggtggcaggtgcctatagtcccagctactcgggaggctgaggcaggagaatggcatgaacctgggaggcagagctggcagtgagctgagatggtgccactgcactccagcctgggtgacagagcgagactccgtctcaaaaaaaaaaaaaaaaaaaaaatagtagagaaagggctttgccatgttggccgggctggtcttgaactcctggcctcaagtgatccacctccctcggcctcccaaagtgctgggattacaggtgtgagccactgctcctggcctgaatataccacttttacctatcatcagttgatgaacatttggattatttcctttttctggcaatgagtaatgcttttgtggattttcatgtacaaattttcatatgaggctgggagcagtggctcatgcctataatcccagcagtctgggaggctgaggtgggcagatgacttgaggtcaggagtttgagaccagcctggccaacatggtgaaatcccatctctactaaaaatacaaaaattacactggcatggtagcgtgcacctataatcccagctattcaggaggctgaggcaggagcatcagaatcgcttgaacctgggaggcggaggctgcagtgagctgagatcacaccactgcaccccagcctgagtgaaagagtgagtctcaaaaaataaaaaataaaattttttttcatgtggccttagattttcatttctcctaaagtagaaatgctgtgatggaactgccaaacttttccaaagcagctgcatcattttgtatttctaccagtaatgtacaagtgttccagtttctccacatcctcataaataaccgatatgtctttggtttgggttatgtccattctagtggttatgaagtgtcattgtggttttttgtttttttgtattgttttgagatcgtgcccaggctggagcacagtggcacaatctcggctcactgcagccttcgcttcctgggttcaagcaattctcctgcctcaccctcccagatagctggggctgcaggcatacgccaccacaccaggctaatttttatattttttgtagagatggagcttctccgtgcttcccaggctggtctcgaattcctgagctcaagcgatccccctgcgtcagcctccagagtagctggggttataggcgtgcaccaccgcgctcggcccatttttgtatttttagtagagatggaatttcaccatgttggccaggctggtcttgaactcctgacctcaaatgatccgcctgcctcaccttcccaaagtgctgagattttagacgcgaaccaccatgccctgactataggttatctttttacttgcttgatggtgttctttgtaacacagtttttaattttgatgaagttcaatttatctgtttgttttttcttttgttgctgttgctcctgatgtcatatcagacaaagcattgcctaactcaaggccacagagatttactcctatgaaacgcctataaaactcctatgatttttatagtttagctcttaacatttaagtctacaatctcttttgagttaatttttgtgtatgagatgagagtagtggtccaggtttttccttttgcttgtggatatccgttgtccccacctcatttgttgaaaagactattctttcctcttaaattgtttgtttgtttatttatttttgagatggagtgtcgctctgatggagtggcgctaacttagcttcactgcaacctccgcctctcagattcaagcgattcccctgcctcagcctcctgagtagctggaattacaggggtgcgccaccacacccagctaatttttgtatttttagtagagacggggttttaccgtgttggtcaggctggtctcgaactcctgatctcgtgatctgcctgtctcctggcaccctgggaggctgagaggctgaggtgggaggatcacttgagctcaggagtttgagaccagcctgtaccattatgcctggctaattttagaatttatcttaaagtataaaatgtgaatccaatttatcttgttctaaatgactatccaaaatgttttaaccagttttattagtctgtaatttacatacaagaaaatgctcatctttttatgtttacattttaatgagttttgacaaatatatttgctcatgtaactacttgcttcatcagtgaagatggaaaacattgtgcctgttcctcttctctgtccaactgtactttattaccactagctccagttaaccagtaatctgccttcttttactatagattagatttatcctctttagatttctttttctttttttttttttgattaggtttttttttttctttttttacgtaaaaaaatctttttttggagacgtctcattatattgcccaggttggtctcgaactcttgagctcacctcagcctcccagagtgctaggattacagatgtgagccacctcagccagcccctagattttttttttttttttaataaatggaatcaaacagcgtgtaacagaggtgttcaatcttttggcttccctgggtcatattggaagaagaattgtgttgggccacacataaaatacagtaacactaatgatagctgatgaacaaaacaaaaaaaaatagcaaaacttataatgttttaagaaagtttatgaatttgtgttgggccacattcaaagccgtcccaggacgcaagttggacaagcttggtatataatttcatatgtgtgtcctaaacagtgtagtaatttgaatttcatgttagtatcagcttattcctttttgtttgtttgtttgtttttgagatggagtcttgttctgtgtcccagaattggtctgcaattccactgcctcagcctcccaagtagctgggattacaggcacgtgccaccacacctggctaatttttgtctctctctcttttttttttttttttttttttttttagcagagacgggatttcaccatgttggccaggctggtctcaaactcctgaccccaaatgatccacctgccttggcctcccaaagtgctgggattacaggtgtgagtcaccgtgcccagccagcttattcctttttattgctgggtagcatttcattttatgattataccacagttaatttacccattactagtcgatgggcatttgagttattgccagcttttggctattatgaatgaagctgctgtgagcatttgtgtacaagtgtttgtgtttttatttcttttagttaaatacctagaattggaattgctgaggtatggtaagtgcatatttcatttttttaaaaaatttattttattttttatttatttattttttttgagatgaagtctcactctgttgcccaggctggagttcagtggcgtgatttcagctcatggcaacctccctgtcccgggttcaagcaattctcccgcctcagcctcccaagtagctgggattacaggcgcgcaccaccatgcctggctaatttttttgtatttttagtagagacggggtttcaccacgttggccaggctggtctcgaactcctgaccacaagtgatccacccgccccagcctcccaaagtgttgggattacagatgtgagccaccacacactgcctggtaaatacatatttcaattaataagaaactagcaatcttctaaagtgattgtgtcattttacattccaactgatcaggtacatgtgtaggttccatgtgttctgcatccttgccaacacttggtattgtgttatctttttaatttcaacaggtctaatgggtgtcttatggtatctcattgtgatcttaaatgtacatttctctgatgatgactgatccaggagcacctcatcatgtgtgtgtttgttttcagctgtcaacctttttttagtaaatggttcaaatcttttttccattttatttatttatttatttatttgatggaatctcactctattgcccaggctggaacgcagtggtgccatcttggctcactgcaacctccgcctcccaggttcaagcaattcttacgccttagcctcccaagtagctgggattacaggcatgcgccaccatgcctggctaattttgtatttttagtgtaggtggggtttcaccatgttggtcatgctggtctctaactcctgacctcaggtgatctacctgcctcggcctcccaaagtgctgagattacaggtgtgagccactgcgcctgtcctaataatttctttttgtctcaatgtttctgcctgggtgcactggctcacgcctgtaattccagcactttgggaggccaacctggatggatcatttgagccaacagtttgagaccagcctgaggaacatgacaaaaccctgtctttgcaaaaaaaaaaaagaaaaaagaaaaattagccaggcacagaagcgcattcctatggtcccagctacttggggggctgaggtgggacaatcgcttgagcgaggttgcgggggtttggagggcgatggaggggtgatcgaggttgcagtgagctgagattgcactactgcactccagcctgggcaatagagccagaccctgtctcacaaaaaaaagaaaaaaaagtcatgtttcttttcttactgtgaaaataaagttactacttttagtaaattattttaagttatttatatattctggttacaagtcctttctcagaatattgtgaatattttctcccagtctgcggttttttttgaagagccagtattgttaattttaatgaagccttatttatcaagcttttctcttaaggttcatgcttttttgtatcataataagaaatcttttacgtaccctaggttatgaatgtttttatggttaggtatatggttgatttcaggttaggttttgtgtagggtgtgatgtaaaggtctagcttcattttctccaccataaatatttactcggtttctctggcaccagcctctgttttccattggtggctttattttttttctgttcttgaaacaagagtctcgatcttgttacccaggctggagtgcagtagtgtgaccttggctcactgcaacctccacttcccagggtcaagcgattctgcctcagcctctcgagtagctaggattacaggtgcccgccactacacccagctaatttgtattttttttttttttttttttagtagagacagggtctcaccatgttggccaggctagtctcgaactcctgacctcaggtgatctgctcatctcagcctcccaaagttctgggattacaggcatgagccactgcgcccagccatagtagctttattgaattcagttgactgtattgtatgtgtgtctatttgtgaactgttttgttgtattgatctttgtatatatccttatgccaattctctctttattgctgttactttgtaaccaacctttaagttcatatgagtctcccagttttattctcgtcaaaattactcttattctgcgttctttgaatttgcaaataaattttagaatcagcttgggattgtgcactgaatctttatatcagttctgggagaaatatcttaacaatatggaatcttcattgaggtcatcatatactgctccatttatttaagtcttaagtttcaccagtgttttctagttttctttgtatcagttttgtgcctgctttcttaaatttatcccttaatatttcatctgttttgtgctgttgtgagttatattttaaaaactttcaacgtttgtttattcgtaaatagagatgcacttgatttttgaatattgaccttgtgtcttgatgtgttggtaaacccactgtttctggcagccctttaagacttaaacatacaatcatgatctaatcaccatgttggtgtttttgggttttttttttttgtcttattgtactggtgcattactgaaaaaggcatgagattttgccatgctcccatttttaggggtgagacattgtctttcactattaagcatacagttaggtgttacttcagttcctaatttgcagaggtgggtttgttttctttttaatcatgaatggttgttggattatgttcaaatacttatcatctactaagtatatcatattgaccaggaacagtggctcatacctgtaacctcagagctttgggaggccaaggcaggaggatcgcttgaggccaggagttcaagaccaacctgggtgatgtaggaaaaccccatatctacaaaacaatttaaaaatttgctgggtgtggtggcacacacctgtagtcctaactacttgagaggctgaggaaggagaattgcttgagcccagtagtttaaagcagcagtgagctgtgattgtaccactgtactccagcctgggtgacagaaggagaccctgtatttaaagtgtgtgtgtatgcgtgcgcatagatggatagataataatgtaattccattatggtcatacaaactgatatgaaatgccattttatcatataacaagtgtctttttgtggttgaatttgtttctggatttttcactctgcttcactaatctaataggactaccttctcatccactcactgccaacattgattttttttttcagattaccttgaattttctgtttatttttccatatgaactctataattaacttactactaaaaaaatcagttgcctttttaaaaccaactgatctttaaaatatatcttggctgggcccggtggcaggcacctgtaattctagctacttgggagactgaggcagaagaattgcttgaacccaggaggcggaagttgtagttgagttgagattgcgcacctgtactccagcctgggtgacagagcaagattccctcttaaaaaaaaaaaaaaaaaaaagaaacagaaaagataaatctttttacaataatttgttccaattagggtccaagtcaggcttgcaatttggatttgtttatatgttgaagtctttttttttttttaattgtttcatattgtggtaactttttttttttttttttgagatggaatcttggctctgtcacctaggctggagtacagtggcacaatctcaactcactgcaacctccccctctggggttcaagcaattctcctgcctcagcctcccaagtagcccagccttttttttttgagacagagtctcgctctgttgcccaggctggagtgcagtgatgcgatctcggctcactgcaagctccgcctcttgggttcatgccattctcctgcctcagcctcctgagtagctgggactacattcgcccgccaccacacccggctaatttttttgtatttttagtagagacagggtttcaccgtgttagccaggatggtatcgatctcctgacctcgtgatccgcccgcctcggcctcccaaagtgctgggattacaggtgtgagccactgcgcccggccttgtatttttaatagagatggggtttcaccatgttggccagcccggtcttgaactcctgacctcaaatgatccacccgcctcggcctcccaaagtgctgggattacaggtgtgagccatcgctctcagccttgcggtaactttttattacgaatgtattgagacattaataacctaggccagtcatgtttcatccctacccattgtctcttaaaagctttgagtccactggattattctgaagcaaattctagacattgcatcagtttatccaccaacattttagtgtgtatctttaagttggttttggttttgttttttgtttttgagatggggtctggctttgttgcccaggcttggagtgcagtagtgcaatcatagctcactgctgctgcgaattcctggtctcaaaggatcctccctcctcagcctctcaagtaactgtgactacaggcacatgccaccttgccagcttttcttttcttgtcttgtctttcttcttctttgtttttttgtttgttttttgtttttttttgagacagagtctcaccatctttctatcttgcccaggctagtcctaaattccagggcttaagttatctttctacctcagcctcctaaagtgctaggattacaggccagcactttaggaggtgctggatgagccatcacacccagccaagtcataggtttttttgtttgtttgttttttgagacagtgtctaactctgtcacccaagctggagtgcagtggcatgatttcagctcagtgcagtctctaccaattgggcttaggtggtcctcccacctcaacctcccaagtagctgggactaaaggtgcgcgccaccatacctggctaatttttgtattttttgtagagacagggtttcgaattcctgagctcaagcagtctgcctgccttgactcccaaggtgccaggattacaggcatgagccactgcactcagccctcacagttttaattacagtttttcccttagtttttgtcttgttcatatccagcttgtcttgtatttttttcccacgatctgaattttgctgactgtatccctgtgttgatatttaaagtagacttctgtcccctgtaatctttgtaaactgatagtaaataatgaaggcttgatcagattgggttttttttttttttccccaatgtttcacagatgtgtgtactttcagtgaggagtcatgtaatcagtctttttcctgataggagtagtcagtgagttcctagatgttttatctatccaggagataatatgtccctttagcgccttaatttttttggtgtgttttttagcagccattgatgataattgtctagcccaagatcagttatttccttaggggttgtaaaatggtgacattcttttcctttcatcccttcttcaattattgcctggaatatttctataaagaaaaactttcccatatccagctgtttggttaccctgaggtatagctttcttaggaaaagtaatttaaaatgttaatcatttccctttttaaggcagtcttcaaaataatgagttggttttctgttatcctccaaaggtaaccagtgaggtggtttttttgtcgttggttcttactatcagtataaacttctggaattttttttttttttttaattttttggagacaaggtctggctctgttacctaggctggagtgcagtgggatgatctgggcatactgcagcctcaacttcccgagctaaggcaatccccccacctcagcctcccaagtagctgggactacaggcaagcaccaccgtgcctggcttaatttttgtatattttgcagagacagggtttcaccatgttgcccaggctggtgtcgaactcctgagctcaagcagtctgcctgtgtcagcctcacaaagtggtgggactacaggcatgagccaccatggcaggccagaatcacaataaacttataaattaacttgagaagaaatgattgatgtcttcatgatgttgagtcttcctgttcaagaacaaagtataccttcaatagcatattaaagtttatccttggctggatgcagtggctgacgcctgtaatcccacctctttgggaggcagaggtgggcagatcacctgaggtctggagttcgagaccagcctggccaacatggtgaaaccccgtctctactaaaaatattttaaaaaaagtattagctgggtgtggtgtgcacctgtagtcccagctactctggaggctgaggtaggagaatcgcttgaacccaggaggcagagagtgcagtgagtcaagattgcaccactgcactccagcttgggcaaccgagcgacactctgtctcaaagaaaataaataaataaaaataaagtttatctttaaggttttgtacatttttttcagtgtatgccttaggtaggttcttttttaatgttagtgtaacccagggacttctcttccattgcatcttctaagtaattacttatgaagtaccatatatgaaggctattgctgtttatatgttagtttttaccctgctcctttactaaattccaatcctttgaggtattggataaaaatatttttagcatttttcaaataacaggcagagtcaagggcttggtttcttttcttcccctcctgtcccctaccctccccttttttgagacagggtctcacttcttcgccgaggctggagtgcagtggtgcagttacggcttaccgcggcatctgcctccctggctgaaaagttcctcccacctcagcctcctgagtagctgggaccatagatgcacagcaccgcagctggctaatatttttgtattttttgtggaggcagtgtctccccatgttgcccagggtggtcccaaactcatgagctcaagcagtccgctcgccctggcctcctaaagtgtagggattataagcgtgagccactgcgcctggcctggggatcatgttttaacatgagaattagtggagacaaacacatgatatctaaataatagcaccatagtatacttgactagctttttaattattttttaaatatacaggaaggtaataagtaacaaagtaataatagtgaatagtttaagctcagttagcataatcgggcaaactttcatttgataaaagtgataagtagttttcagtggcttttttgtttaccagaaggaggtggtttttaaatacgtgcatccaagataaaatataaaaaaatgttcaggtttgctttcctacatagataaaataatatgtaactagctctcccaaatttcagcaacagttagtgaatgtttagccacaaatttgcagttaattatataatcagttcttaggattttatgaacaagttctatattctttgtgccttatacctagttgtaagcagtcattccacaattattttcctgaagtggcttggttaatgccacaccagaaacaggtcacagacaatagtgctgtaagaaatgtgtgaggaaagaggcacatgggaagtagctagctcgtgctggaggaactggaaaaaaacctcacatgggagatgacagttgagctgaattcttaactagagttgtaacagggcgaggcccttacatgcagaccacctgtgtggattaagataagacataaagtaatcttttaaaagaactattatttagaaacctggtatatgctacatggtgctgtgttatactgggtttgagaaagaatgggaagtgttacaaggattcagtggttggaaattaaggaagatagaaagttagtgttggatctgttttggctctttggtcatgcctttgtttttctcaaaatgaatgcagtgcccgtcccagaaaataccatatgagaagcgatttcataatgctgtgagagtctgttacagggacttgatcaagtctgagggccatgagagaaagtccctctgaggaagttgctttcaagctgacacctgaaggatgaagcagaattatcccagctgggatttgggaactggtgtttgaggctgaggactagcatgcatgataggaaaataacccagagtggcagaagtgggagtggtatgagatggcatcagagacgcagattcagggtcaaatcattcagagcctcctagaccatgtgaacacatgtattatgctgtggagatactgtttaataggcagtctgcttttttttctgcagtaccaaatatgccccaacagcggcaagaccagcatcatcagagtgccatgatgcacccagcgtcagcagcgggcccaccgattgcagccaccccaccagcttactccacgcaatatgttgcctacagtcctcagcagttcccaaatcagccccttgttcagcatgtgccacattatcagtctcaggtaaggctggtaaggcctaactcttaatttttgtaccatataaaaaaacttttaatatggtaaagggattttcctttataatttttgcttttgtgtgatggtagggtagatagctaaggacttggggacccttttcaatatatattcgaaggttactgatgattgtaagaggttcagaggaaacagccaagaaagatttgagagtttacagctgtttctggaaatctggaaaccatggagttaaaaatcttaactaaagtctgcttggctctatttgcagtgttaatgtgctttctttattttttgtttgaacacagcatcctcatgtctatagtcctgtaatacagggtaatgctagaatgatggcaccaccaacacacgcccagcctggtttagtatcttcttcagcaactcagtacggggctcatgagcagacgcatgcgatgtatggtaggaagcactttgtttgtctcttccagtgtgtgtgactcttcttaatttaagtttctgaaaacatactctatctaagaataacctgaccttttatgacattgagggtcaagaatctgaaggaaaagatgaacccatttctttgcctgacttgctttataacttttggcaaatagtttctacttctgtacctggtcttcagatctctttcctgctttaactaaaatgtaatgatgtatataatggcaaagcatctttgtggagaaaggtacctttctcctcttcctcatcaatattatgctttggtatatcctgcctacgacatgcaagagaattttataataataaaagcataaaggtgttctccagcatgaaaacattttgcttcactacttgatctgagggtcactggcattacatattttttttgctgtttgttataatgataatactatgtttctacatcatgctgtattttaatggttgaatattatgtcatattagatatattttagacatgagtcacactttaaatataaccaatgtgaacagaatgctgaaatgaaaatgagaagtattttatgtaaaactaagcagtatttatatgtgagaataataagcaaaaaaacccatcttcgttttgtgactaaacagagaaatttgtgtagatcaacttagcagctgtctaaagtaccaaaataatagatttttcactgttgataatttaaaataaaatgtccatttgtatatcttatgatacagaattaatggattgcttcaaatgtttttcagaatatgtttttaaatagtactgatttcattaagatgttttgttctgaatatttctgagaactaccgtagtgtcgtttagttttcctatttgcgtttttggttgtttggagtaggggataattttggtttattcatacagttgaaaagtgtactgctatgagaatgagattatggttacatgtaactacatgggcatttcatttttaaagcctctttgaactttttgaaatactaagaatataaaatttttattttttaagtttagatgtcctgaacgagtatgtttaggcaaaattgagttatttaagaatttataggctgggcgcagtggctcacgcctgtaatcccagcactttgggaggccaaggctggcggatcatgaggtcaggagatcgagaccagcctggccaacatggtgaaaccccatctctactaaaaatccaaaaaattggccgggtgtggtggcatgtgcctgtagtcccggctacttcggaggctgaggcaacagaattgcttgaacccgggaggcagaggttgcagtgagccgagatcgcgccactacactctagcctgagcgacagagtgagactccatctccaaaaaaaaaaaaaaaaaaaaagaatttacagatttctggcaaaccttcttcttgagacattactacttttcataccacctctgtcctttttgaagaataaaagttttaacattccgtaggttaatgagaataggacttgggcagcagcaatcatccttcctgtcacctgtaacccacagcttatgctttcttcctggaggttcttgtctgccacaaaggctcactgctgataggaatttgtatatgatcaaaggtgtttagttttataaaacagttaagtccagtcttaattttccacattatcactttcaattttgtattgtggattacgcattttaaataaaaaattgtgtgattgctacattttggaaaacatttttttcaagaggcccatccgtaatttaattgtaaaagatactgacaaactaacttggtttattattttggttatgaccccgtcatttgacttgtctttagttgtcttaacggggactgaatatgcgtgcaaaggcacgattgatttatcatgctggcttttatgcaacttgtatatattttaacaattttcctgtttgctaaaggcttaggttaaaagttcattatgattgtttatacatttctggtgaatacatcatgatttaacaagtggaaagaacatctctttccttccattttctggcatactccccttggaatcagatctgaaacttttaagctaaaatttccattgcatttggagagtagttatttgtgtatgcatgcttttgagacattgtagcaataatactgtaatgttgagccgaatctttctcctcattgtgttcattcactgccaacatctggcttcatcttttggatgaatgttcattggttttgaaacagcctatagggtaaatactgtgtttgaggtacagatgattttcataactacttcctagaacatgtccatttgaagagcagtggggccttagaccccaaagtccatttatgtgtgggcaaataggaaatgttgcaaacaaaacaaagcactagatctaatgtccagtgaaatctggaatgaactagtcattagagccggttctttcatgccaggaaaaagttactcagccaaatctgaactactctcctgcagtttacacaggtggtatttaattgctgtctgtatggaggcaggctaggagcaaggctgtggacttgttgtgattgtcactagttaatcaagattccctttgtggtgcttaagaccctaaaaaggacactaggagctgggcatggtggctgacacctgtaatccaagaacttggggaggctgaagtggaggatcgcttagcccaggtgttcaagaccagtctaggcaagatggcgagatcccatctctaccaaaaaaaaaaaaaaaaaaaaaaaaaaaaagcccagtcatggtggcacatgcctgtagtcccacctacacaggaagctgagatgggaggatcacttgagtccaggactttgaggctacagtgagctatcatggcaccactgtaatccagcctgggtgacagagcaagaccctgtctctatttaaaaaaaagaaaacataagaaagaattgttttgttctatgccatcataagccataatttaatctgcttaagcatgttcttcattaaatctgcagtgatttatttgaattattagactttcaaagccttattatatcaaatataaacaaaatttgaagtacattcttataaactacaacaaacttacatagaagtgttaattttatactcatcttccctgaacaatttatattttataaatatattaaatatattgtcataaattttctcaaaggaaccaaatactttgagtatgaattgtgcttttctttttaagctacatcatatctaggtttttaaaacatttaatgcaaacagaagaacatgcacccagatgttggtgacaattttatgtcaccttttctcattcattaattgttatagccatagccaaaggcattgaaaacataggaccactaatgactgcaaaatgaaatcctgattattgtttttaaatttttagtatgtttaatacacatatgctaacattactgaacagttaaatgataaaataggataattattttattctaaaaaagtattgaccttgacctctttctagctatcttagaaagggcttttgtcaaaaaccttatctctttgatgtctctttttttgagatggagtctctccctgtcgcccaggctggagtgcagtggcgtgatctcagctcactgcacgctccgcctcctgcgttcacgccattctcctacctcagcctcccgagtagctaggactacaggcgcccgccaccatgcccggctaattttttgtattttgtttagtagagatggggtttcactgtgttagccaggatggtcttgatctcctgacctcgtgatccgcctgcctcagcctcccaaagtgctgggattacaggcgtgagccactgtgcccagcctctttttttttttttattttttatttattttttattttttttttaatttttgagaaggagtctccctctgccacccaggctggagtgcagtggcgcgatctcagctccctgcaaactccgcctcctgggttcaagcagttctcctgcctcagcctcctgagtagctgggactacaggtgcccgccaccacacctggctaatttttgtgtttttagtagagacagggtttcaccatgttggtcaggctggtcttgaattcccgacctcaggtgatccacccacctcagcctcccaaagtgctgggattacaggcgtgagccactgccccggcctctttgatgtctcttaatctaacttccatcattgcctctaccccatcccttctaagaagttactttaattttttttcctctcacatctactctttttttttttttttttttttttttgaggtagtctcactctgtcacccattctgaagtgcagcggtgcgatctcagctcactgcaacatctgcctcccaggttcaagcggtttttctgcctcagcctcccgagtaggtgggactacaggtgtgcgccaccacgaccggccaatttttgtatttttagtagagacggggtttcaccgtcttggccaggctgatctcgaacttctgaccttgtgatttgtctgcctaggcctcccaaagtgctgggattacagatgtgagccaccacgcccagcctcacatctactcttctaatccatctaattttgttttatggtgatgcttttacctttcagaaacagtaataatacaacttttccgactaactagagccattaggaagaattagatccagaatccttttttgatttgtttttggtagtttaatgcagataagtaagaaaatatagttaagttaaaaaaaaaaaaaatgaaaagcatccataatccctccacctgacaactgccttttaacattttgatgtgtatccttccaggtgtatttaaatacactcaaataccctacccctttatgtagacatgttttaataagaaataatattcatgtttatattcttgctatgatcctaaatttttggatccattactagataatctttcaggataatgacatttccattagtaatgtttttgcaaaattgtgtgtctattgaattaaacttgtaaaatagttttattttggtacatgatttatatcaaggttgttcagtagaatgccatgttggtgtttttattagataatgattttattccttttacttttaagcaagtcagcatgacaacttgacacctaagtacagaagaacagtgtcttccggtttagtcctttcttttaaaattctgtagcagtgtttaaagtgcttgtcatctcttatgaaaatgaattatgcatgaatacaaaaagaaattactaatatgtcaacctttccagaaaatttggaaaatgcacacctcaaaaggctaatttacctttctatttcccaaattcagcatgtcccaaattaccatacaacaaggagacaagcccttctttctactttgccagtgagttgggttttttatactaatttttaattgtacagtaaaacactttttaaaggatacatgttaagggagtagacttgttgaacaatattttccttgtgccagtcaaattattgaaagtacttatatatataaataattcagtttttaaaatggaaatacccaatttaagaaggctggagttaatgaaaaatggagttgtttcagaaatcaatttttgcataccaagcaaatgtgactgggaaatgcctaatattttccttgttagagaaacttcctaaacagctttatacacacacacacacacacacacacacacacacacaaacacacacacccaagccacaagcttggtataaatttaaaatgtttatttatacacacacacacacacacacacacacacacacacaccccaagccacaagcttggtataaacttaaaatgtttatttatattctgataagatgaaatttatgcctaccaggatttttaattgaataggattgatgaaatactaagggaaaaacttttcagtcctgtgcatggctaaaggtttaaaatactcaggaagggccaggcacggtggctcacacctgtaatcccagtgctttgggaggctgaggcgggtggatcatctgaggtcagcagttcaagaccagcctagccaacatggtaaaactccatctctactaaaaaatacaaaaatcagccatgcatgctggcatgcgcctataatctcagctactagggaggctgagacaggagaattgcttgaacttgggaggcagaggttgcagtgagccgaagtcgtgccactccactccagcctgggtggcagagcgaaattctgtctcaaaaaataaaatattcaggaagcagacccctcaggatatcttgagcttaagcaagagatcatgacctctcaggtcattatcttggacagcacaggtcccctctccccacctggcaaaaagtacagaaatagttgctccttcatggagaaagtctgggcagagctttcttctggaaatgaacttttaaggtacatttttcctatttgtagggcaatttgtaaaaataagggccggacgtggtggctcacgcctgtaatcccagtactttgggaggccgaggtgggtggattgcttgaggccaggagttcgagaacagcctggccaacatggtgaaaccctatctctaccaaagcatggtggcacgcacctgtagtcccagctacttgggaggcggaggcacaagagttccatgaaccctggaggtggaggttgcagtgagctgagattgtaccactgcactcaggcctgggcaacagagagagactctgtctcaaaataaaaaataaaaataaggctagtcttggactttggtatttaaataggaaggagtactaatatttgtagaaatcctttagaaatttgtgccattaatattgtcaccttgtatgaaatgttgtgttctagaggatattaaggattcaaattttatgttaggcacattttgagttattttggggtgactcaatgtctgactctactaaatgccatattagcatttaaaatgcatttgaccttaaatctttgttaattatgccatgacttggtatccaaaaataagctgatacatacatacatacatatatgtgtgtgtgtgtgtgtgtgtgtgtatatatatatatatgtatgtgtgtatatataatttatttggtgctaggaaatgttaaatttaatcctttaatagatgctctttaaaaaggagtcttgctgtatgtatatactattaaaggggaaactatgtctgtgattgtagtgtgtaaaagatagtaggtgattttattatgtactcaatttgaggtctcaaatgtagttatcctcaccatcttactgtctctgttagtagtttggtgttgttttcctggtaagtagctaaggtccttaatcattaacacctaagccttaattgccttagcacaacttcccctaaaagggagtatcagtactttttaaaagaaactaacagttgggctgctaatttaatctgctgcttcatttccccctgttctaagccattttatgatggtttggtcaagttgccttttattccccttttagagttttcaactttccttcacttccctttttctgaatttaacatcagatttacaagttggaagattttgttttgttttataagttttgcaatgctggtgatctcttatgacttgtgcatccaaagtcaaaatgacaaaacctagttacaaattaaacacacagctttctgtacttaatttgcttcagtgagatcacagctgaggaaactagttctggaatgtggttagtgttattaaggatttttgactgatcatatgtttagaatcttaaatatttatgtcaaggaacactgagtgggaaacttctggactaggtctggaccaaagaagcatatgtctttgattatctttaatctaaaagattttatgaagactaaagttttataaatagaagtttaactgatgaataaatcagtattacaaataaaattaactttatttttaacctctctgggatctttagccagaatgagcatatataacaaaagcagtgaaataatatgtgtgggtcagaacccactgcccttcccactccactctccttttccctgattctcctgtgttttttccttctttaccttatcttggttcctttttttttttttttcttttgagatggagtctcactctgtcgtccaggctggagtgcagtggtgcgatctcggctcactgcaacctccgcctcctaggttcaagcaattctctgcctcagcttccagagtagctgggattacaggcgcctgctgccacacccagctaattttttttgtatttttagtagagacagggtttcaccatcttggccaggctggtcttgaactcctgacctcgtgatcacctacctcggcccctggttccttttttgtctctcttgtcttccaagctatttttttccttggcttttaaattttcttcctaccctgctttgtgtcactgtcacttaactggcctatcaaggaaccgaactgtatttttgttactagtattgatttaaagtataagtttcacatttctcccaatttattattattatttatttatttatttgtttattttattttttgagacggagtttcgctcttgttgcccaagctggagtgcaatggtgtgatgtcggttcactgcaacctccacctcccgggttcaagctattctccttccccactctccctagtagctgtgattacaggtgcctgccaccacgcccagctaatttttgtatttttagtagagacagggtttcgccgtgttggccaagctggtctcgaactcctaacctcaggtgatccgcccgcctcggcctcccaaaatgctgggattacaagcgtgagccaccgtgcccggctccatttctcccaatttcaaattcaaggaggaaaagaattcctgattaaggtacttctttcagatcttttgagctagaacaaaaaaacaaagggaaatatttctaattaactctttttaaattttgtttacaacgtatgatacatattttacacatcctttgtggtttttgttcgtcttgtttttaatcaatgccttgcaagtttaccggtatttaggtagggaaaggattttgtttttgtttttttaaacaaagcctatgtacattcactcagcttgggtatttgtgctatgcatgcaaattagctatagattagaaaaccgtattatagtctttaaatactggtaaacttaaattgcagagatgccttttaaaaatgcatagtaaaaatatttcatctttacttttctcttcaaatgattttaagatttttacatttttccagttgatgaataacttaaattatgagatttcatgggcataattattttctatatttattgttactttttaatattcttaatactttgcttagaaggtatttaaaagtgaaatttcaaactttttagtacaaaatttcttgaataaataaagttacaaaaaaaaaacaaaaacctctgagattccgtactgtatctttatgaacctccatgaacagaatttgggatttgggaattgcttttccttagacagatttagattgttacaaatgacatttttaagaggctggggtggcggtaggggttagtgctaatggtttaacagtaggggaccatggacaactgtagacatcactatccagtagaacattttgtggctgggcgcggtggctcacgcctgtagtcccagcactttgggaggccaagacaagtggatcacctgaggtcaggagttcaagaccagccagaccaacatggtgaaaccctgtctctactaaaaatacaaaaaagttagccaggcgcgcctgtagtcctagctactcaggaggctgacacaggagaatcgcttgaacccgggaggcagaggttgcggtgagctgatatcacgccactgcactccaccctgggcaacagagcgagactccgtctcaaaacaacaacaaaactgcactgtccaccgtattagctacttagctacatgtggcttttttattattcaaaaataaatttttaggccgggtgcagttgctcacacctgtaatcccaacactttgggaggccgagatggacggatcacttgaggccaggagtttgagaccagcctggccaacatggtgaaaccccgtctctactaaaaatacaaaaattagccaggtaatcccagctactcagaggctgaagcaggagtatcactttaacccaggaggcggaggctgcagtgagccgagatcgctccactgcactccagcctgggtgacagcaagactgggtctcaaaaataaacaaacatggccgggcgcagtggctcatgcctgtaatcccagcactttgggaggccgaggcggatggatcacttgaggccagtagttcgagaccagcctggccaacatggtgaaacccgtctctactaaaaatacaaaaatcagccaggcatggtgatgcttgcctatagttccagctactcggcaggctgaggcaggagaatcgcttgaacccgggaggcggaggttgcagtgagccgagatggtgcccctgcactccagcctgggcaacagagcgagactctgtcaaaaattaaacaaataaatacatttttaaaatgaacgtaagatttttacaagtacaacaaactcaggttcgaaatttacatcaaatcttttagaccaagtcagtgcctatacaacttggaggagctggaagtaaacttaatgagtatgatgatgatggagggcctgttaataagccaccaagttagaaaaaaaggactgtcttatagacttatgggactgtgaagctcaggaaggcttcatcgtttgtacatcatttgttctagctcccagaagacgttcactactcttaaaaacattcagagactatgttgccacagttttcttgttaaaatattctggcatatgttaattcctacagtctggaaaattttcccagtgtataaacaaagctgctgtatccagtctaaactggatatgaaggaatattaatgccagctgtggcattggcagtggatgcacaggtgatcctagaactggctctttgccttgccctttcccctgctaagagatagctttgcagctggagacgtaactgttagggctggagagttggtggcccttagccctacaacacctaggattatagaactgctccatgtgcctagcctaaccctctgcacaccatttacgtggaatatacccagagccgtctatgctggtgactcggcagccttgcctaccagactgctggaactagggtgcctcttcccaaagctgtgcttgcttctctcaccaatcagtcctgcatatgtctgtgtttgctaacacgttatatgaagaatgtggggaactattttggaatcatttctgtgtatgggcttattatcttgagggattttaggatttgtttctcaagagagggctgggaactataccttgctagagttgtcttgagaacgctctattctcagctcattgcctcgtggaggttagttttttatcatcggtgtgctgtccatagtcactggaagcagtgaacacatcctactctgcttctgattctcaacttactgtttttgaagcacatgaacaggccaggcacggtggctcacgtctgtaatcccagcactttgggaggctgaagtgggcggatcatttgaggtcaggagtttgagatcagcctggccagcatggcgaaaccccatctctactaaaaatacaaaaattagctgggcgtggtggcacatgcctgtaatctcagctactcgggaggctgaggcaggagaattgcttgaacctgggaggcagaggttgcagtgagcctgggcaacagagtgagtgagacttatatctcaaaaaaaaacaaaaaacaaaaaactgaaagacatgaagaaatggtttttgtaccaaggtttggcccacgctgagattcacaaagaactggctttcagttcttatctttattttgatttaaactggcccatcatgttgtcctttgaagttagtctagtaaatttctttccaaagggctggggcactcagaagggagtttacttttctatatttatttcataaagcaaagatgggagatcctccattagggcttgggaaagtaaactgagtggcagaagggctcctgtgattagctgagagagactgtggtccttcggccctgatgatagatccctggccttgccacataccatacacagtgcccgcacccccatcccccaccacacccaatatagtctgtgccctcaggacattgctccagggcagtagcatggtgaggttagcctgatgatggccttgagctaaagagtgtgcacctaaaatgcacttgtttgagtagtttctgcctatgccttcaagttgcctttttgggaaaacctagtgaccgttaagagtaaatgcaaactaatttgattttaatatcatatgtagagctgtattatatgaaccaaatgctagtctgttaagcaatagctacacttattttttcaagacaatggatggtttaaatggagtcatctatagaaattggtagtggcgtgagttatgcattgtaaccatcaagaaagttcagttgatgaagtgtagaggagcgatggaggttgtcagacatcggttgtgtacatgctcctttttctttcactttagtttccacgggctcccttgctcagcagtatgcgcaccctaacgctaccctgcacccacatactccacaccctcagccttcagctacccccactggacagcagcaaagccaacatggtggaagtcatcctgcacccagtcctgttcaggtaagggcaactcagaggtctgcatggagtggcttctttatcctagtatctgagtgctttcttcaggtgccaggtatcgcatcgtcagaacacatggcatgtccaccctcgtgaagatggatacagctgtgcccctggggtggtggttttaagaatcacatttaaaggctgggcgcagtggctcacgcctgtaatcccaccactttgggaggccgaggcgggtggatcacgaggtcaggagattgagaccatcctggcgaacactgtgaaactccgtctctaataaaaatacaaaaaaattagccgggcgtggtggtgggcgcctgtagtcccagcttctcgggaggctgaggaaggagaatggcgtgaacccgggaggcggagcttgcagtgagcagagatcgcgccactgcactccagcttggacaacagcgagactctgtctcaaaaaaataaaaaattaaaaaaaatcacatttaagatacatgttgataataaggtgattggataagctctggaaacttgcagtaatgaaaaatcaaatttaacataaagttcataaggcaaattcctatttgcttgggactttttaatttctaaggtttatgtgatgaggttattttcctatgagcttcttgaattatgtttgctaatggaggcagttaaagatgtctttgatatctatcagttccctggggcagtagtcttttttgactttagtatgtatgctcagaagtttctaactgccagactgagaatcaggcttctgtaccctagaaaggagttgtccagatgggaggcacctccagccttgctcttaccaccctgtacattctcctgtactttccagtgaccctcatcataggcccaagtgtgcaaagcttagctttgtgggtatcccttggctgcttttcattaaagaagttttcctctcaattctttcctgtcgctttgcagcaccatcagcaccaggccgcccaggctctccatctggccagtccacagcagcagtcagccatttaccacgcggggcttgcgccaactccaccctccatgacacctgcctccaacacgcagtcgccacagaatagtttcccagcagcacaacagactgtctttacgatccatccttctcacgttcagccggcgtataccaacccaccccacatggcccacgtacctcaggtaataccagctttagccaactttctgtgaaggccaagtagaatgtgaaggttatcagtaagcagctagaggctctcccagctaggaaaccctgtgtgtcatgccatttgcctgtctccctttccctctcaaatacacgtgatctggccctaagggaatgtttgtgtggttttgtcatgggatcagtgaaggtgctgattggtcagtcctttagttttccaactgagaccttaaaaatatctttgactctggaatgcaacccagtccttctttcctttctgtgtctgctttgctatgtctatatagcctcactactatatatatgtgtacatatatattcccctacacacttaccttggaagccaggcagggatgatggccttcacagagtctcagctctccgaagtgactaccggggcctgtcaacttgattgttactcacatgagttccagacacatctctccaattgttttccctggttatccatatatctgctttgaccataagttgtactcttgagagggcttggccttggacattggtgcagtgtaactagaagctggaagcacccaggtggtcccatttttctttaagagcagccctggaagcactttggagctcacctccagtgtaagctgctacaggtgaaaggtgtgcttgccatctcagtggttgctgtctgcatcagctgctgacaaaggtccctgcactccagggcccaggggattgtcttaatgaggagaaggagctgcactgaagttgggctctaacgctggccttgaggccctccctggggctgttacgggtgaattggctgtattagatgtctctgctactttcataacagaactctctgaggcgggtctaagtgagacctgccacaatgaattccatttcctgttaaatagtgcgccagtgaggctctggcaaggtgtgggctagagatgcgactcagttggatctatctctcagaaggctaccttgtaagtagagttccacagctctgggaagtttgggcgtcctcaccctgcaaagtttaggttctgtggtgtagcgcactgcagttgatttgctttttgatagtggggagggaagccggtttggtccgtgtgggccagcgtggtttggtggagtcagcttcataagagctggggtcctgtaggtgtctaccagaggctggtggctaagtaggcatgtgaacttacatgtaagtcagggatccctaaaacctcactctgtttttgtgctgaaagggcaaaaaggttaacacagggaagctcaaatttgccatgtgcccgtttgaatatgtgagagtaaaaacggcatttcatccaaggcttatcgtagtctagaacagtgcacagtgtgggaaaaaggaaacaagggctcttcctggccctgccaaccccctgcagagctggaatccagctgtttgggctgactaaaatcacctttccaacttgacagtgagtgagaccaggttgaacttggtacagagacgctgggctggcccagatgacttcaggttactcctttccatctcactggagccattaaaaactccaactcctcctcctcctcctgctccatcagcatatctctgagagagtcacgggggcctaagagtctcttttcactgcctggtgagcagaccagaagcagagggagagaggcaaatgaacagaggtccaagtaattcacatacttgactgtgacagtctctgcttattaatgtaatctgttttcctatttgaaagggatgttatctgcaaaactacctcaggccccacatggcagcctgattctgaagcatcattgaatcttgtatgatattaagttgagaaagctgcccttggatccagtgtctaatctttgtgaagatcttaccccatacatagaatacaatgatcagaaatgtcaagggttaggacagcacagccctgacttctacccaggctcacttgttgcctgctccctgacccttgcaggatctgcccaaaggtgaagcgcgtcttcaggtcaatagataatctactagagattgtccccagagaacagaactgggccctgaggcccaccgttgccctttcctgagagtcccagcccagtgaaaggaacacagttgacatgttgttgaagccggagatgttgcctgtatgcgtaaaagagctctctgtttcaggctcatgtacagtcaggaatggttccttctcatccaactgcccatgcgccaatgatgctaatgacgacacagccacccggcggtccccaggccgccctcgctcaaagtgcactacagcccattccagtctcgacaacagcgcatttcccctatatgacgcacccttcaggtgaggcgtgtgtgtgcaggggccgccggggcaccccaaagcattctgctcgcacaggtggaatggcaggcagggccagtgcttcaagccccgcatttgagaactagcaagacccgtccaggagtgtgcacaggagggactgtgacgatcagttcagcatcagggcctgaggcttccgggagccgagtctgtgtgtgttctgatggtatacaggatttggcttgatgagaagcagcagcagcagcaacagcagcctgatgcatgcctaggactcagttggccttccttgttatgacaggctggacagggcagtgttttccttcctgagtcccaaaagtctgacatgtggggggttattaccatggcagagtttgattgtagctctggagaagatactgctgagaaagcgctgtggatggactggctttgagtgtagcgttagccccagcccctgaacaggggagagcgccctgtgattgtgctctactacttgatggctgccatggcgatacttcacagtctgacctgttattctgaaagcaatactggtgcttggctaatatttggggagggggtttgttaaggcctttttttctaccccatgaacaagtcttctgggagttttatctgaagtggttttacgtctgactggtttgtttctacccacccacccaaccctccccactttggtgcagatgggagggggaaaagcgaattcaattttgagttttgttcagctagcacgaggatagtttacaatcatgtgctgcagagacactaggctgatgtgtggtgttgccagttttctgtttcaatgttcgcttttctttttacagtacaagcccaccaccaacagcagttgtaaggctgccctggaggaaccgaaaggccaaattccctcctcccttctactgcttctaccaactggaagcacagaaaactagaatttcatttattttgtttttaaaatatatatgttgatttcttgtaacatccaataggaatgctaacagttcacttgcagtggaagatacttggaccgagtagaggcatttaggaacttgggggctattccataattccatatgctgtttcagagtcccgcaggtaccccagctctgcttgccgaaactggaagttatttattttttaataacccttgaaagtcatgaacacatcagctagcaaaagaagtaacaagagtgattcttgctgctattactgctaaaaaaaaaaaaaaaaaaaaatcaagacttggaacgcccttttactaaacttgacaaagtttcagtaaattcttaccgtcaaactgacggattattatttataaatcaagtttgatgaggtgatcactgtctacagtggttcaacttttaagttaagggaaaaacttttactttgtagataatataaaataaaaacttaaaaaaaatttaaaaaataaaaaaagttttaaaaactga

SEQ ID NO: 5304 - DNA, 157463 bp, Homo sapiens
ccagcactttgggaggccaaggcaggcagatcacttgaggtgaggagttctggccaacacgaaaaaatgtcgtctctactaaaaatacaaaaattagctggacatggtggtgagtgcctataatcccagctacatggaaggctgagcggggaggatcacttgaacccaggaggtggaggttacagtgaactgagattgtgccactgcattccagcctgggcaagacagcaagactctgcctaaaaacaaacaaacaaatcccccaaaactaacaaaaattagctgggtgtggtggtgcacgcctgtagtccctgatactctgaaggctgagatgggaggattgctcgggaccgcctgggaggcagacgctgcagtgagccagactgtggaactgtactccagcctggttggcagagtaagaccctgtctcgaaaaaaaaaaaaaaaagtattgttttaaaattcaggtggggaggatttcacagtgtctgaacaccaggaggcaagaatcatttgggaccgccatagaggctgcctgacacaccacttcttttaaggtgcattactctaatatatatatatatatatattatttttttgagatggagtgtcactctgtcaccaggctggagtgcagtggcatgatcttgactcactgcaacctctgcctgccaggttcaagcgattctcctgcctcagcctcccgagtagttaggactacaggcgcacaccaccatgcccagctaatttttgtattttcttttttttgagacagagtctcgctctgttgcccaggctggagtgcagtggcgccatctcacctcactgcaagctccgcctcccgagttcatgccattctcctgcctcagcctcccaagtagctgggactacaggcgcccgccaccacacccacctatttttttgtatttttagtagagacggggtttcactgtgttagccaggatggccttgatctcctgacctcgtgatctgcccgccttggcctcccaaagtgctgggattacaggtgtgagccaccatgcctggctaatttttgtatttttaatagagacagggtttcaccatgttggcaaggatggtctcgatctcttgacctcaggtgatcagcccacctcagtctcccaaagtgctgggattacaggcatgagccaccgtgcccagcctactctgatattttcatataaagcttaagccttctgaagtccagagaaaaggtagtttccataaataaataaataaaataaaaataactaaataaacttaccacatcacccaacaatttcgtttgtaggaaccaacccaagataaatgaaaacatatatccacatgaagatatatgttcacaaatgttcatagcagcattattatttttctttcttcttctttgtgtgtgtgtgtgtgtgttttagcaactctattaactgaacgagacagggtcttggtctgttgcccaggctagagtgcagtggcgcattcgtagctcacagcaacctcgatctcctgggctcaagcggtccttctgcttcagcctccctagtagctgggactataggtgcgtgtcaccatgaccagctaatttttttttttttttttttttggagacagagtattgctgtgtcacccaggcttcagtgcaatggtgcaatctcggctcactgtaacctccgcctcctgggttcaagcaattctcctgcctcagcctcccaagtagctgagattacaggtgcccgccaccacgcctggctaattttttgtatttttagtagagacgggatttcaccatgtaggccaggctggtctcgaactcctgatctcaggtgatccacccacctcggcctcccaaagtgctgggattataggcatgagccaccacgcccagccaaccagctaattttttatttttaaagtttttcatagagacagggtctctctatgttgcccaggctggtttcaaactccggggtattcaagtgatcctcccatctcggtatcctaaagtgttgggattacaggagtgagccaccaatctcagccccagcagcattttcataatactcaaaaagttgacacaatctaaacatccacaattggaaagtagacacaaaatgtggtatgtccatacatggaatatgacatagcaataataaggaatgaaatactgctacatgccacaaccttagataaacctcaaaaacattatgacaaatgaaagaaggcagacacaaaaggctgcatgctgtaagattctacttatgtgaaaaatctggacaaatccatagagagaaaatgtagatgagtggttgcctggggctaaggatgggaaccaaactgcccaccatcgtgaaggatctttttggggtaatggaaatgttctgaaattagtggcaatggttgtgcaaatttactgtgtaaatttactgagaatcattaaattgtacacaaaataggtgaatttcatagtatgtaaattatatcttgataaaactattaagtttttattcaatggtagtgagttaaaacaaactttctcagctatgtcagcttcaggccttctttttttttaattttgaaaaattttttatggagaggagggtctcactatgttgcccaggctggtctcctactccttggttcaaaggatctgcctgccttggccttccaaagtgctgggattataggtgtaggccactgtatccagcctaggccttcttattcaacttccatcgacctgaaacttactattttttttttgagacggagtctcgctctgtcgcccaggctggagtgcagtggtgtgatctccgctcactgcaagcaccgcctcccaggttcacaccattctcctgcctcagcctcccaagtagctgggactacaggtgcgcatcaccacacccagctaatttttgtatttttagtagagatgggctctactaaaaattggccaggctggtctcgaactcctgacctcaggtgatccaccggccactgcctcccaaagtgctgggattacaggcgtgagccaccacactggccaaaacttgttcttaagattgtattctgggaccttgattccaatcagagaaaagtgattgtatttttttatttttattttttttagataaagtttcgctcttgttgcccaggctggagtgcagtggtgccctctttggtcactgtaacctccgcctcctgggttcaagcgattctcctgcctcagcatcctgcgtagctgagatcacagatgcccaccaccacgcccagctaattttttcgtatttttagtagcgatggggtttcaccatgttggccacgctggtcttgaactcctgacctcaggtgatccatccgcctcggcctcccagagtgctgggattacaggtgtgagccaccgcgccaggccaagtgtttgtatttctattaaagaaagaatataacgggacaccattgacgacctgctccattgcaggcctccttgctgttcctcagactcccccctcagagcctttgccctcgctgtgccctccacctggagcgtttctccccaggatcctcatgcccatgctcatttgggtccctgccccatgtcaccctctccaggagcttcccctcacagcagccctggcctgtaccacagccgggtacaggtatttttttgtttcaactggttttttagttccagtttcctttaggttactttatttatttatttatttatttattttttgagacggagtctcgctctgtcgcccaggctggagtgcatgatctcggctgactgcaacctccacctcccggattcaagcaattctcctgtatcagcctcccgagtagctgggattacaggcgcccaccaccacacccggctaatttttatatttttggtagagacggggtttcaccatgttggctaggctaggttaatttttaaagggttttgcaatggtcccttgatctactttttaccttagatgggaaataaaactgatttcctacattggcagaatacaatgatcatttttgcctggactatctaggaggttaatttcagttggactactgaaaactgctggttcaatcattctccacgtttatctaagtctttacctttatctggacagttctaggacattgaggggaattttggtgtttcttcccctattatttcctgaagtcatttcactttaaaaaacaatagattcactgctcaaaaaaaaaaaaaaaagttacctactttctacttgcttccagtttaactgcaacacattttaaaaagagtctactgtgctggctgggtaagttaaattaaaacttctaaagggtccaaggtctaaagttcgcacattgttttgaggtcggctctgtctctaccgagggagatcccattatccgtagttctaccagtcccaatcccatatatttcctttagaatctcatgaatgaggaaaaagaagttcaagtgagggaacataggttcaaatgaaggtcagatacctaaaagagttttctggtgactgtgcgcggctggggtggaaaaagtggggaaaaggtacccagatgtgggtggccccggagggttgctccactccagccccggcagggcaggacagcgcggcctgcctggtagatgccccgagccactggagcgcctactgtgtggcgggcgggggacggcaggaaaacggcaggatgctgtgtcccctgaatctggcagggttctaggtgctttacacgtagcaagacacattctccgccccaaggcactcgcagtcagtccattttctgggttgcatcaggtgggggcaaactaggtccccgcagaagtgaagatgctgaaggaatacagtaggagaagaaatgcttctctcctgtcctccacaccaggcaggccccagaggctgagaccgacacgccctccccgaagggcagacccgccttgaggaaggcggatccgggtagggaccgccgcctggccctcacccgacccccgagaaagcaacccagcgcgccgcccgctcctcacgtgtccctcccggccccggggccacctcacgttctgcttccgtctgacccctccgacttccggtaaagagtccctatccgcacctccgctcccacccggcgcctcggcgcgcccgccctccgatgcgctcagcggccgcagctcctcggagtcccgcggtggccaccgagtctcgccgcttcgccgcagccaggtggcccgggtggcgctcgctccagcggccggcgcggcggagcgggcggggcggcggtggcgcggccccgggaccgtatccctccgccgcccctcccccgcccggccccggcccccctccctcccggcagagctcgcctccctccgcctcagactgttttggtagcaacggcaacggcggcggcgcgtttcggcccggctcccggcggctccttggtctcggcgggcctccccgccccttcgtcgtcctccttctccccctcgccagcccgggcgcccctccggccgcgccaacccgcgcctccccgctcggcgcccgcgcgtccccgccgcgttccggcgtctccttggcgcgcccggctcccggctgtccccgcccggcgtgcgagccggtgtatgggcccctcaccatgtcgctgaagccccagcagcagcagcagcagcagcagcagcagcagcagcagcaacagcagcagcagcagcagcagcagcagccgccgcccgcggctgccaatgtccgcaagcccggcggcagcggccttctagcgtcgcccgccgccgcgccttcgccgtcctcgtcctcggtctcctcgtcctcggccacggctccctcctcggtggtcgcggcgacctccggcggcgggaggcccggcctgggcaggtgggtgtcggcaccccagccccctccgctccgggcccggcgtcccctcccccgcggcccgcgccgccgtccccgccccgtgacccgccgggctacccggggtgggctgggggccggcagcgcgggggagactcgctcgggcctgagccccgaggctcggccggtgggcgcagccggggtcctctgggattgtcaggcctgtccagcctcccgcagcatccccgccccctcccccggcggtcaagatggagggagcgggcggcctcccctccccacgcgtgttgggaggggttctcgggtagcggcgatggtcagccccggctcccccttccgcacgatcctccgcccgcagcgtggggatgctcgggcagctcctccactcccggtttaggtgtgaacgttggaggggtctggaggctgtggtggcgttttccggaacatgtccccctccatgggggacatctctggaggggagaagttagggccgcgtcccccgtgccggttaaaggggtaggcaccgggctcctccggaatcatcagggtctgtcggggctctctccccgccccctccgagtcctgggaaagatcggaggacggggtggagacaagtgggccttggcccccgcacccctctgcgttcgtgtccgaggcggcggcgggggctcccgaactcccctgaaatcgtggggctccatgtggcctccggcagcgttccaccctcccccacctggggaagggaaggggtggggagtgcccggccccgtcccggccttcctccttcccccgccagacctctccggcgcgcgggtggtggccgatccgcattgctgttcgaggccgcagtggagaaggcgcctgtggaacatcggtgggtgagggctggacccaggctggaccctggagatccggggtggcggtgctggtggcagggggcgggcaccctgcgcacttatcccaacccccgccccaatttcggaaatgctaggagagagagattgcagcaggggacgtggtcgggttcctgaaggcagaaaggcgggtgtttactagcgtctttttccctcctaagccggggttgtagtaggggctgggggctcagtgttgtcccggctaactgggtttgactcgagggtgtgtttgtgcaggagggcctgttgggggtggcgggcggttgtcagttcgtatttcacgaactaagaaaatgcttagtgttcaaagggagaaggaaacgtcaatagactccattccattgtggccggtgtccttaacttcgggagtgccgccagagcttaccaagggcacgcaagtccatttcccttgtgcctcaagtccatccgtgttgtaggcactactgtgccttctttaggcctaggccgccggcttgacggcgggtgaccggcgtcctccttaaataggcatcttgggctttggaaggtggaataagaggatttttcattcacccgagttttctttttgaaaacacattttcagcaacccatttccaaagaatttttatttacagcagaaattccccatcaagaggaatcagctggtttttaaggaattctgctgccttcaaagggggcggaaacagtcggttatttgactttacacgccccgcccccccttccccttctctgagtctgaagcatcccaaacactacttagccaaactagttcagatgaagtgatcgtttccccaagtagggtaacttcagtttccctttttcgttggcatctagcgaaaaatgaaaaaatttaaaatacaacttttatagaaaaggatgtattctgtttttactttcttaggtattaggaagagatttggcagataattcaacatgttcaaatatataaacattaaaactaaggttattaagttgcattgactactaggcttaaaaattagattataagagaatttgctcctgagtagtttgagtgatcaaagatatttggaatgttttagtaccacaaggtcttttttctgttccttgaggctttacaacaatttaaggttaatttagatttttccttgctttaagttcttttacttgagacctaaatggcagcccttattctttctgatgaataggtgaaattttgtttactgtgttggatttgtgtaatgtgaagttttattcttgaacagatcgttaatgtacttgtagaattactttgaatttgaatcactttcctgcattccttgtaaataagtttcagcttctagaatctcctcacttaggtttgtgcgtatcaacagtgaaaataagtctctgagagcaagggtgaaaaaaaatgcagcattcggtttgacaagtttcgagatagcaaaatatgcttgaaagtctggaaattcacatctgctttaagaaacatttcataatttgactttgtgtgtgtgtgtgtgaatagtttttcatgactttcagaagtgatttattttgttctttgttatatatatttttgaaggtggctgttttaggaaagataatgtaatcacaatattagaacataattttactgtaatctaattttgtgtgtgtgtgtgtgtgtgtgtgtgtgtgtgtgtgtgtgttttggatggaatctcactctgtcgcccaggctggagtgcagtggcctgatctcagcttactgcagtctctgtctcctgggttcatttaagtgattctccagcctcagcctccccagtagctgggattacaggttcgtgctaccacacctggctaatttttttgtatttttagtgaggacgggattttgccatgttggccaggctggtctcgaactcctgacctcaagtgatccgcctgccttggcctcccaaagtgctgggattacaggcgtgagctactgcccctggccaatttttgtatttttagtagagatggggtttcaccatgttggccaggctggtctcgaactcctcctgacctcaagtgattcgccagcctcggcctcccaaagtgccaggattacaggcaggaatgagccactgcccccaaccatcagtctaattcttatttttgctttttaccttttcatttttatgtagtagaggtgattgtgtatgttattttgtagttagcttttttcccctgaacgttgtattgtaaatgtaaatttttttttttttttttgagacagagtctcggtgtttgcccagtctgaagtgcagtggtacgatctcagctcactgcagcctctgactcctgggttcaagcgattctcccacctcagcctcttgagtagctggggctacaggaatgttccaccacgcttggctaatttttgtatttttggtagagacaaggtttcaccatgttggccagtttggtctcgtactaccgacctcaggtgatgcgcccgcctcggcctcccaaagtgctgggattgcaggcgtgagccactgcgcccggctgtaaggtttttacttaaccattctattgttgggaattgggtttccacttttttgttatagatagtggtgcagtgaacatttttaaatagctttttgcttcagtgtaattatttccttagagaaagttaccaagagtggttttactagttcagagggcttcaggatttttatggctcttgctagcggtgctctattattctttagaagacttgtattacttccagtgtcaagaaggttgctcttccatggaatggtttctttgtagtttgtcaaatattgtggggaatttttaaaggaaaaattgcatttttactgtcaagtgcatatattattaagtgcttttgttagttactggattattgatatttgagtttaatttggttcctctgaggatttaataaggtaatatatgtgaagatgttttgaaacctgtaaccattattattaatgagggtacttggtttatctgtcgtgctgatagtactgagtaaagtgcaggaatgaaattcctgaggaactgttctaaagctttgttgttgttgttaacctttctttttcatctgaaagtgttttttattagctgctagcctatgaccaagttatttttggtaacttttttgtaatttcatggcactattgggaattttcgctggttgactcttcttcttctacattcccttccccattaaaaataaaaatatggatttacaattgttactctattcctaaacctaaataatatgacattagaattgcttgggatacaggattcagtctgaataaaatatttttcttttagtgattttcagcttagtatttttactgcttctttctcttgaggcattgcaacttaaaaattgtgctgtttagccaggcgcctgtaatcccagctacttgggaggctgaggcaggagcatcacttgagcccaggaggcggaggttgcagtcagctgagattgtgccactgcactccagcctgggagacagagtgagactctatctcaaaaaaaaaaaaaatgtgctgtgatttaatgtagttgttcatcatgcttccatttaaatttcagtgagactgttcatcttttgcagttaaatatcttgtagaagggcctaaaatatctacgttgaatacagctttattgaagcatctatgtacatggggtttttgggatgaatcagtgaataaagcaaacatattgtccttttggagtttacattctaatgtgactaggcagacaatgagacattaaattaccagcctatgtataatagtgtataagagctatggaattagaagaaagcagattaaaggtatagggagtgtggggaggggaatgagttacaattttaaatggattgggggaacttaattgaggagctaacatttgagcaaagatttgaaggttgggtatttagccgtttgctttttatctaggttaattagtcatgtggcttcattagtaatttataaggtttaaatggcatcatcctttgttattcttttatgtgcacattgatactaaccatctctgaagttagaccaaaaaagttaattgacattgagggtcattagaggtaaattgtagatggctattactaaccaaagagacatgttttgtttttcttttgggcttacgtattttacctaattagtttagtttttgtttcaagtatgtggagaaaataaactttttaagtttgggccaaaacttgctttggttttctttttctttttctttttttttttttaagagaaaaatgtaagcctgtagttgcttaaagattccacattctgaaacagtgaaaacatgggatcagtcatggtgttcctttttttggttaaatgtaaacttgtattttcagtgttactctaattagcaatggtttatacttctacataagggatgttaactcatattgtagctatttaatagccatatattttgacttaaaggaggatctcaaggccaggcgcggtggctcatacctgtaatcccagcactttaggaggctgaggcgggtggatcacctggggtcaggagtttgagactagtctggccaacatggtgaaacccccatctctactaaaaatacaaaaattagccgggcatggtggtgggcgcctgtaatcccagcttcttgggaggctgagggaagagaattgcttgatcccggaggttgcaatgagtgcggaggttgcagtgagctgagatcatgccattacactccagcctgggcaacagagcgagactctgtctcaaaacaaacaaacaaacaaaaaaaggaggatctcatttttttgtcctaaatagctacagccgtgttagaactgtcaccttagcaaagtattgtttttttactttgaaacgaattttaaggttttagaagattgttctctagaattacaattttctgttttgactagtgatagtattttgatgttgtgtaaatagttgagcatgaacaaaaccctatttttttttttagctatttcaagtgattgtgacaacttcaacggagatgtaaacagtttattaacagtcacacctattatcttttttttttttttttttttttgagacggagtcttgctctgtcgcccaggctggagtgcagtggcacgatctctgcttactgcaacctttgcctcccgggttcaagtgattctcctgcctcagcctcctgagtagctgggtctacatgcgcacaccaccacgcctggctaatttttgtatttttagtagagacagggtttcaccatgttggctagaatggtctcaaactcctgacctcaggtgatccacctgcctcagcctcccaaagttctgggattacaggcatgagccaccgtgcttggccgctgccgtatctttttaaatgaaagtacttgtgttttttttgtttttttccaaaggatatctgggtcatctatgatgttactgttaccatctaagggtttttttgtttgtttttgagacagagtctctgtcgcccaggctggagtgcagtggcgtgatcttggctcactgcaacctccgcctcccaggttcaagcaattctcctgccttagccctcccgaatagctgggattacaggcacccgccaccatgcctggctaagttttgcatttttagtagatatggagtttcaccatgttggccaggctgctcttgaactcctgacctcaggtgattcgcttgcctcggcctcccaaagtgctgggattacaggcgtgagccacccccgcccagcctcatgagctaaggtgttttttttttttttgagacagttttgctctttcccaggctggagtgcagtggtgcaatctcagctcactgcaacctctgtttcccgggttcaagcgattctcctgcctcagccttctgagtagctgagattacaggtgcctgctaccccactcagctaatttttgtatttttagcagagacagggtttcaccatgttggttaggctcatctcgaactcctgaccttaagcgatccacctgccttggcctcccaaagtgctgggattataggcatgagccaccgtgcgcagcctaccctgtctcttaaaaaacagtaacaacaacaacaacaacaaaaaatcctaaatcttaaaaatggaaggcaaaaactctaagctttgagagattaggggacttgcccaaagcaatatttgtaggattttattacacctctccctttatttatttttttagagtcaaggtctccctctgtcacccaggctggagtgcagcctcaatctatggggccaagcatttctcctgtcttagcctcctgagtagctggaactacaggtgtacaccagctggctaacatttaaattttttgtagagacagggtcctgccatgttgcccagattggtctcaaactcctgggctcaagtgatcctcctgcctcagcttcccaaagtgctgagattacaggtgtgagccactgcaccgagccccctccctttatttttatttttaaattttaagttctggggcccctcccttgaaataaatagaaacgtaatatatacacaagatcatgctgtgtattttaaggcaatggtcctcaacctttttaacactagggaccggttttgtggaagatggtttttccataggggcaggggatgattttgagatgaaactgttccaccggccgggcacggtggctcacgcctgtaatcccagcactttgggaggccgaggcgggcagatcacgaggtcaggagatcgagaccatcctggctaacatggtgaaacccccctctactaaaaatacaaaaaaattagctgggcgcggtggagggcgcctgtagtcacagctactccggaggccgaggcaagagaatggcatgaaacccgggaggcagagcttgcagtgagctgagatagcaccactgtacttcagcctgggggacaaagtgagactccgtctaaaaaaaaaaaaattgttccacctcagatcattatgcatttgttagattctcataaagagcatacaacctacatctcttgctatatgcagttcccagtagggtttgtgcttctataagaacctaatgctgcacctgatctaacaggtggggctcaggtgctaatgctcacacagctcctgttgtgcagtctggttcctaacaggcctgtttttttttttttaattagatggagtctcgctctgtcaccaggctggagtgcagtggcacgatctcagctcactgcaacctctgcctcccgggttcaagcgattctcctgccttagcctcccatgtagttggtactacaggcgcacactgtgatgcccagctaatttttgtatttttagtagagacggggtttcaccatgttggccaggatggtgtcgatctcctgaccttgtgatccgcccaacagcctcccaaagtgctggaattacaggcgtgagctgctgcgtccggccccctaacaggcttgttttatggaatacagtcacggacagtacttgcccttcaggatatctttttgtaaccttgattttggcttgctaaaataggaggtctattttcttttctttgtttttaatgtatgtggttctgtacttacgtggtgtgaaatctacataaatgttaaatccttggttatttatttattttgagacagagtctcactctgtcacccagtctggaaagcagtggcataatctcggctcactgtaacctccacttcccaggttccagtgattctcctgcctcagcctcctgagtagctgggattacaggcatgcaccactacacctggcaaatttttgtatttttttttagtagagatggggtttcaccatgttggccaggctcgtcttgaactcctgaccttaggtgatctgcctgtcttggcctcccaaagttttgggattacagcatgagccactgcgcctcgccttatttttttgagacaggttctagctctgtcacccaggcgggagtgcagtggtgccatcatggctcattgcaacctcgagttctcaggcccaagtgatcctcctatctcagcctcctgagtagctgggaccacaggcatgcgccactatgcccagcaaaatttttgtttcactctgttgcctagggtggggtgcagtggcaggatatcggctcagtgcaacctctgcctcttgcgttcaaatgattctcatgcctcagcctcccgagtagctgggattataggcatgcgccactacacctggctaatttttgtattattggtagagatggggttttatcatgttggccaggctggtctcgaactcccgacctcaggtgatccatataccttggcctcctgaagtgctggaattacaggcataagccactgcgcctagcttttttgtttgtttttattttgtagggacagagattttacctgttgcccaggatggccttgaattcctgacctcaaacaatttgccctccttggcctcccaaggtgctgggattacaggtgtgagccactatgcctggctggttttttaaattattattattgtttgtgtgtgtgtgttgcaggatcttaccctgtcacccaggctggaatgcagtgatgtgatctcggcttactgcaacctccgcctcctaggttcaagtgattgtcctgcctcagcctcctgagtagctgggataacagctgtgtgccaccatgcctggctaatttttgtatttttagtagagatggggtttcatcatgttggccaggctggtctcgaactcctgaccttagatgatccacccgcctcgtcctcccaaagtgctgggattacaggtgtgagccaccgtgaccagtttggtttagtttttttttttttttttttttttttttttttttgagaaatctcgctctgtcgcccaggctagagtgcggtgacacaatctcagctcactgcaagctccacctcccaggttcatgccattctcctgcctcagcctcccgagtagctgggactacatgcgcccgccaccatgcccggctaattttttttatgcattttaagtagagatggggtttcactgtgttagccaggattgtctcaatctcccgacctcttgatctgcccgcctcggcttcccaaagtgctgggattataggcatgagccaccgcgtccggcctggtttggtattttttttatgagtctgggttgtttatgaaaacttgtcacagctgttaaccttaactttttttttttcttttttttccgagacggagtctcgctctgtcacctaggctggagtgcagtggtgcgatctcggctcattgcaacctctgcctcccaggttaaagcgatttttctgcctcagcctcctgagtagctgggactgcaggcacgcaccatctcgcctggctaatttttgtattttagtagagatggggtttcaccatattggccaggctggtctggaacttctggcctcaagtgatccacctgccttggcctcccatgcctggcaaccttaactttttatttgctggtaattatttgtgtttgcattcatgtgaaaatttgaaattctcattaacatttaaagattcttacatagattgcttgtaattttaaccctgaagttgtgtcaagtgactttacaatgtcaatttgttttatttatttatttatttatttatttatttatttttgtgataggatctggctctgttgctaaggctggagtgcagtgttgcaaatacggctcactgcaacctctgtctcccgggttcaagccatcctcccacctcagcctcccaagtagttggaactactggtgcgccccacagtgcctgcctagtttttttgtattttcagtagatgtggagttttgccatgttgatcttgaactcatggcctcgagtgatccaccccacttaggcctcctaacatgctggtgttacaggtgtgagccactgtgtccagcccgaaaatgtcagtttcgtgccatgattaatagctaactacattttgggaatgtaataaaatttcattctataatgaagtctttgtaaaactcattagttgtggtatgaggcttgtcggcaatataagtgaacgtggtttatttttattaactgtatcagaactttagaatgttggtctcctgaaaccattgccttgagaggctttattgaacagtgttgccaatgatcagtttttttttaaatttccttttttttgagactgagtcttaccctgttggccaggttggagtatagtggtatggtcatggctcactgcagcctcaacatcctgggctcaagcagtcctcctacctcagtctcccgagtagctggaactacaggtgtatgccaccatgcctggcttttgtatattttgtagagacagggtttagccatgttgcccaggctggtctcaaactcttaaattcaaatgatccacccacctagttttcccaaagtgctttaattacatgtgtgaggcaccgtggctggccaggtcaaatatttttcattgacgtttttcatattgctttttaaagtcatgttaaaatattcttaataatttttctaagtggaattaatcttgattataattttagttttttataaagggcgggttttgaaacaagtactgcatttttcttttcgggtttataaacatttgctgtggactttgtgcagttaactattttcattcctgaaacacatttcgaaatcaggaattgaagactaaatgtcttttcactgaagcttgagcagattttagaaaggggagttcttttttttttttttttttttggtagaaatgggggtcttgttatgttgcccaggctggcctccaacttctgggcttaaactgtcctcctgctttagcctctggtctggagagttctttatggcctctttgagaacttttactttacacatgattctatctagctttcttttctgatgtacatattggcagcaagtagaaaagcaatgttttcagaggcagatatattaacagcaatgagaaataacagtagcgtgatagaaagttgaaagacttagctgggtgcggtggctcacgcttgtaatcccagcactttgggaggccaaggagggtggatcacttgaggtcaggagttcgagaccagtctggccaacatggtgaaaccctgtctctactgaaaaacagaaaaagggccgggcgtggtggctcacccctgtaatcccagcactttgggaggttgaggagggcggattacaaggtcaagagattgagaccattctggccaacagggtgaaaccccatctctactaaaaatacaaaaaaattaaatgggcgtggtgatgtgtgcctgtagtcccagctactcgggaggctgaggcaggagaattgcttgaacccgggaggcagaggttgcagtgagccgagatcgggccactgcactgacgacagagggagactccgtctaaaaaaaaaaaaaaaaaaaaaaaaccagacttggggctgggcgggcgcctgtaatcccagctacttgggaggctgaggcaggagaatcgcttgaacccgggaggtgaaggttgcagtgagctcagattgtgccactgtgccccagcctgggccacagagcagagtgagactctgtctcaaaaaaaaaaaaaaagtttggaagactggtggctgggcatggtggctcacacctgtaatcccaacactttgggaggctgaagcaggcagattacctgagcccaggagttcaagtccagcctgggcaacacagggaaaccccatctcaacaaaaaatattaatacaaaaaatttagccagtcatggtcgtgcacttctgtagtctcagctacttgggaggctgaggcaggtggttcacttaagtctggatgtcgaggtgagccatgattgcaccactgcactccagcctgggcgttaaaatgagaccttatctcaaaaaaacaaagcaaagagcctgggaactactaaaatgggaactactaaaaaacagacacaagagctcaacaagtataccattctgggaggtttttttttttttttttttttttttttttgagatggagttttgctcttgtcacccaggctggagtgcaatggcgccatctctgctcactgtagttccgcctcccaggttcaagcagttctcctgcctgactcctgagtagctgggagtacagatattggtcacacaccgggttaatttttgtatttttagtagagacggggtttccccattttggccaggctggtctcgaactcctgacctcaggtgatccgcctgcttcagcctcccaaagtgccgggaccacaggcgtgagccaccgcacctggctttttttttttgacatagaatcttgttctgttgcccaggctggagtgcaatggtacaatcttggcccactgcaacctctgcctcccagcttctagcgattttcctgcctctgactcctgagtagctgggattacgggtgcccgccaccacacccggataatttttgtatttttagtagagatggggttttgccatattggccaggccggtcttgaactcctgacctcagatgatccacctgcctaggcctcccaaagtgccgggattacaggcgtgagccaccactcccggcctgggagttttgactgtaagtttatagctgtatatcttaggccctaagggcattactgttttatagcacagtgtagttagttaatgtgctcataatggtgactcataacaccaggttaaatgattttttatatctcccaaagaagtatttttcaatctgcagatcatgaccccttagtagattgtgaaacacattagtggattatgacaagcatttttagaaaaatgaaaaagaataagaagtgttaggatgcattgcattattgaaataattgtttttgagatggagtttcgctcttagttgccgaggctggagtgcaatggcccgatctgcctcccgggttcaagtgattctcctacctcagcctcctgagtagctgggattacagacatgctccaccatgcctggctaattttgtatttagttttagtagagatggggtttctccatgttggtcaggctggtcttgaactcctgacctcaggtgatccacttgcctcggcctcccaaagtgctggggatacaggcatgaacccctgtgcccggcctaatttttgtatttttagtagagatggggtttcaccatgttggccaggatagtcttgatctcttgacctcgtaatctgcccacctcgactcccaaagtgctgggattacaggtgtgagccactgcacccagctgccaagaattgttttaagctttggtttgagttaatgtatatataccgcattgtaattcaaaatgtaatttttggccaactctgggcacattgcctatggactagtcctgctctgccacgagcagcaacagttcaatgaattttttttttttttttttttttttttttttttttgagacagggtctctgtcaccaaggctagaatgtagtggtgcagtctcggctcactgcaacctctgtttcctgggctcaagcgatcctcccacctcagcctcctgagtagctgggagtacaggagcacgctaccatgcctggctaatttttgtattttttgaagagatgaggttttgccatgttgttcaggctagtcttgaactctggagctcagatgatccacccaccttggtgtccagaaatgctgggattacagggatgagccaccgtgcctagccaaaaatttttttttaagtaattttttattgatatagtcaaaaaagttactgctttagagccagagaaacgcagtaaaaggattgagaaagagttttgaggttatatctaagctagggttgtcagatttggcaaatagaaatacaggacactcagttaaatttgaatttttgatgaacattgaccagttttttagtataattgtgtattaaattgcatagaaaaaagttatttatctaaagttgaaatttaactgagcatcttgtattttatctggcaactccagtctaagctggaatcatggttcactgttttttttttttttttttttttttgagtcggagtcttgctgtgttgcccaggctggagtgcaatggtgcgatcttggctcactgcaacctccacctcctgtgttcaagtgattctcctgcctcagcctcctgaatagttgggattacaggcacccaccaccatgcccagctaatttttatatttttagtagagacggggttttcgccatgttgttcaggctggtcttgaactcctgacctcaggtggtccgcccacctgggcctcccaacgtgctgggattacaggcatgatctaccgtgcctggccatggttcactcttcagtaactaaaatttaagctctatgaaagcaggaactttgttttgttcactattgattgtatccctatttcttgaatggttggcacttaactgcttggtcacatgtttgaatgggcaagttactcagccactctcaggcttagtttatttacctattaaaagagaaagaatatcttccttggctgggcgcggtggctcacgcctataatcccagcactttgggaggctgaggcgggtggatcacgaggtcaggagatcgagaccaacctgggcaacattgtgaaacctcatctctactaaaatagaaaaaattagctgggcatggtggtgcgcatctgtagtcccagctactcgagaggctgaggcaggggaatcgcttgaacccaggaggtggaggttgcagtgagccaagattgtgccactgcactccagcctgggcgacagaacgagactctgtctccaaaaaaaaaaaaaaaacaaacaaaaaaaaaaactgagatactggccgggcgcggtggctcgtgcctgtaatcccagcactttggaaggccgaggcgggtggatcacgaggtcaggagatcgagaccgtcctgcctaacatggggaaaccctgtctctactaaaaatacaaaaaattagccaggcgtggtggcgggcgcctgtaatcccagctacttgggaggctgaggcaggagaatggcgtgaacccgggaggcagagcttgcagtgagcggagatggtgccactgcactccagcctgctgggcgacagagcgagactccgtctcaaacaaacaaacaaacaaacaaaaaaactgagatactaaagtcttaatattttctgtttttatgtatttattttttgagatgggatcttgctgtattgcccaggttggagtacagtattgtgatcatggcttattgcagcctttaactcctgggttcaagtgatcctcccacctcagcctcctgagtagctgggaccacaggcacatgcaacatcacaccctgcagttctttttttttttttgagacaccgtctcgctttgtcacccaggctgcagtgcgtggtgcaatttctgctcactctaacctccacctcccgagttcaagcagttctgcctcagcctcctgagtagcttgggaccacatgtgtgtgccatcatgcctggttaattttttgtatttttagtagtgacagggtcttaccatgttgcccaggttggtctcaaactcctgagctcaagtgatctgcccgccttcgcctcccaaagtgtctgcgccctacaatttaaaaaaatttttgtagagacagtctcactgttacccgggctggttttgaacttctgccctcaagtactcctcttgccttggcctcccaaagtattgaaattaaggccatgaggcagcacacccagcctaaattcttcttatgttctgttcttggcacatagtagatgttcaacaatgtagagtcaaacgcatttggagttggaatggctctggtgttttttttttttttttaaaccagaaacacgtgcagtttattgaatgccattgtagaaaagtgtgtgaggataaacggctgatagagaacttggctctgggggcagggcgaggaatggagggtggatggagtacatgggaatcagatcacgggcagagctcctggcctagataatgcctcctgatctgttgatagacttgaaagatcaacactgggatgatgctgagcagaatggtcgtaatgatgcgcacaatcagggcccagatgttcaggcacttggcggtaaaggcataggcctgggccctgatcaggtcgccaaccatcttcttgtccctagacttcacggagtaggccaatgctatgaagcccaggcagcaggagttcatgaagtgggtgttgaacagggaccagacgacatggtcgggcacggagttctcgctgtggatggggatcacggtggacattgggggagcagggttgtggggtgcccccagcacagccacctcttgctcctccttgagcatctcatagttagggggatggccgatgttggcaggagtgaagaggtttggacattgtggttcatggtgtccagggaagaccagctgtggtcgggttgctggggtggttctcagtgggcccctccctttccctggtagtttggatttctctggctctggtggttttttagtactcattctatttacgggtgaagaaattgagaccaagagggttatttaccagagtatctcatcattggctgcataactggcattagaatctgatgtacttttatttctaatacatttctttttttttttttttttttgagatggagtctcgctctgttgccgagcctagagtgcagtggggcaatcttggctccttgcaacctccacctcctgggttcaagctattcctgtctcagcctcccaagtagctgggactacaggcacctgccaccacagccggctaggttttgtattttagtagagatggggtagcaccatgttggccaggctggtctcgaactcatgacctcaggtgatccacctgcctcggcctcccagtgctgggattataggcatgagccaccatgcctggcctttctttgtcgtttcctttctttctcttcatccctcctctccttttttcccctccccgctgcctcctcctgtcttcccttctttccttcctttctctcctttttattttttcctttctttttctttctctgtctctcccaacccttcctctctccctccctccctccccttctctctccccccctccctccccttctctctccccctccccttttgttcctaagagacagggtctccttatgttgctgaggctgaccttgaactcctgagcccagatgattctgcctccttagtagctgggactacacccacctcccgttccgttgtcatcttttttttttttttcttttttggagacagaatcttcctctgttgctcagggtggagtgtagtggcacgatcatagcttactgtaactgtgtaacctcgaattcttgggctcaagcaatcatcccatcatcccacctcagcttgctgagtacctggggctacaggtgtgtaccaccatgtccggctaattacttttcttatttttaatttttcggagataggatcttgctctgttgcccaggctggtgtcaaactcctgggctcaagtgaaactcttgccttggcctcccaaagtgttgggagggattacaggcatgagccactgcacccagcctcctctttcttcccatttaactcctaaccacaccgaactttctgtctgcagagaggagcattggtcagcagttcacaaaatggctaggtgtgatggcgtgcacccatagtcccagctacttggggagctgaggtgggaggatcgctggagcccaggagttcaaggccctgggcaacacagcaagaccttatctctggctgggcccagtggctcacgcctgtaatcccagcactttgggaggctgaggtgggtggatcacctgaggtcaggagttcgagaccagcctggccaacatggtgagaccctgtgtctactaaaagtacaaaaattagccaggcacggtggcgcgctcctgtaatcccagctactcgggggggctgagacaggagaatcacttgaacccaggaggaggaggttgcagtgaaccaagaacacgccactgcactccagcctgggtgacatagtgagactcttatctcaaaaaaaaaaaaaaaaggtcgtctgtactattgcatgttagtagtttctttctgcttattgttgagtagtagtctattgtatgcatgtaccagtttgttcatctagtggtggacattgagttagcaggttttggctattaaaaataaagctggaggccgggtgcgatgtctcacgcctgtaatcccagcattttggaaggccgaggcaggcggatcacctaaggttgggagtttgagaccagcctgaccaacatggagaaaccccatctctactaaaaatacaaaattagccaggcgtggtggcgcatgcctgtaatcctagctactcaggaggctgaggcaggagaatcgcttgaacccgggaggcagaggttgtggtgagccaagattgcaccattgcactccagcctgggcatcaagagtgaaactccgtctcaaaaaaataaataaataaagctggtatgaatatttatgtacaggttttgtgtgaacatatgattttatttctcttggttggaatgcatagaaatgagattgctgggttttgtggcaagtgtttatttttccagggtacatataatcctgtgagtgtttatttaattttaaaagtaattgctaaactgtttgctaaagtgactgctatattttctttccctagcagtgtatgaatttttttttgaggcagggtcttgctctgtcacccagggtggagtgcagtggtgcgatattgtctgactgcaacattgacctcctgggctcaagtgatcctcctgcctcagcctcctggctgggaccacaggcatgtaccaccacacctggtagtttgctttgatttttagtagagaagaggtctcactatgttgccctgggtggtgttgaactcctgggctcaagtgattcatctacctcagcctcccaaagtgctgggattatagatatgagcccctgtgcctggcctcattgtggttttaatttgcatttccctaatgcccagtgatattgagcattttttcatgtgtttatttgacattcataccatctttggtgatgagaaactatgtttatgcattgcttaatgatggggatgtgttttgagaaattttttcggtgatcttatcattgtacaaatatagagtttacttacacaagcctagatggtatacctactagacacataggctgtcgtacagagtattactcttaggctacaaatctgtatagcatgttgcggtactgaacactgttggcagatgtaacataatgttaagtatttgtgaatctaaacatatctaaacatagaaaaggtgagtaaaaatacagcgtaaaagataaaagtggtatatctgaataggtcacttaccatgaatggagcttgcaggacaggaagttgcttgggatgagtcatttatcagtggtgtgtgaatgtgcaggcctaggacattactgtatgctactgtagacaaacactgaacagttaggatacactaaattgataaatatctttcttattttgttttttgagatggagtctcgctctatcgcccaggctggagtgtagtggcgtgatgttggctcactgcagtctctgccttctgggttcaagcgattctcctgcctcaacctcctgaatagctgggattacaggtgcgtgccaccacacctggctaatttttgtatttttagtagagacgggggtttcaccatgttggccaggctggtctcgaactcctgacctcaggtgatccacccgccgtggcctcccaaagtgctgggattacagatgtgagccaccgcacctggccagagatgaggtcttgctgtattgcccagggcgttgaactcctgggctccagcaatcctcccacctcagcttcccacgtagctgggactgtgggtgcacgccatcatgcctagccgttttgtgaactgttgaccaatgctcttttctgcagacagaaagttcactgtggttaggagttaagacttttaacctctgacctcaagtgatctgcccaccttgacctcccaaagtgctgggattacaggtgtgagccatcacgcctggtcaaaaatatctttctttaagagtaaatttaccttaacttactggttgatcattgtatataggtctgttgttaattgaaacatgcgggccgggcccggtggctcatgcctgtaatcccagcactttgggaggccgaggcgggtggatcacaaggtcaggagatcgagaccatcctggctaacacggtgaaaccccgtctctactaaaaatactaaaaattaaccgggtgtggtggcgggcgcctgtaatcccagctactcgggaggctgaggcaggagaatggcgtgaacccgggaggcggagcttgcagtgagccgagatcgtgccactgcactccagcctgggcaacagagcgagactctgtctcaaaataaataaataaataaataaataattgaaacatgcggtgcatgtgtttatttgcgatctgacttgtttggaaatatttgcattatcttccttctagatttagagcatcttgacagtaggaacaagtgttttgtacaactttgtatgcttagtaagttatcaattaacttgtcgtggccaggcgcagtggctcacgactgtaatcccagcactttgggaggccgaggcgggcagatcacctgaggtcaggagttcgagaccagcgtggccaacgtggtgaaaccctgggtttgtttgtttgtttatttatttatttattttttggagacggagtctcgctctgtcgcccaggctggagtgcagtggcgtgatctcggctcactgcaacctccgactcccaggttcatgccattctcctgcctcagcctcccaagtagctgggactacaggagcccgccaccatgcctggctaatttttttatttttagtagagatggggtttcgccgtgttatctgggatggtctcgaactcctgactttgtgatccgcccgcctcggcctcccaaagttctgggattacaggcgtgagccaccacacctggcctaccctgtgtttattacaaatacacaaattggccatttgtgcgtggctcatctacagtctcagtgactcagaaggctgaggcaggagaatctcttgaacccgggaggcagaggttgcagtgagcagagatcgtgccactgtacttcagcctgggtgacagagtgagactgtgtctcaaaataataataataatttgttgaatatgtgactgttggtttaatttttatttttatgagatggagtctcactctgttgcccaggttggagtacagtggcgtgcagtggcgcaatcttagctcactgcaacctccgcctcctgtgttcaggtgattcagcctcccaagtacctgagactacagacgtgcactaccgtgcctgactaatttttgtatttttagtagaaatggggtttcaccatgttggtcagcctggtctcaaactcctattctcaagtgatccgcctacctcgaccttccaaagtggcggaattataggtgtgagccgtggtgcccggccagactattggtttggtttggtgtgatgttatgttatgttatgttatgttatgttatgttatgttatgttatgttattttaagacagagtttgtctcttgtcgcccaggctggagtgcagcggcatgatctcggcttactgcaacctccgcctcccaggttcaagtgattctcctgtcttagcctcccaagtagctgggattacaggcgcccaccaccgtgcctggctaatttttgtatttttagtagagacagggtttcaccatcttggccaggctgttctggaactcctgacctcatgatccacccgccttggcctcccaaagtgctgggattacaggcgtgagccactgcgcctggctgactattggttttattattaagcagtagtagttgaccctgtcatgtagaaagcatggcatttataggcataccacgtttaatttcctcccctttttttatttttggagtacctcctgcttgtgaggcttgggaatacagtagtgaataagccagatgaggtctctctctttttggagcttatgtggtagtatagactaggcagaaagttctcattgcccctgccaccttatggcattgaggtgtttgagatgctgatgtttacttctgtctcataaaatcttgaaaggagttcttttagatgaagaggaaaacaaaatcagaagaatgggcctgggtcatgtctgtaaacctccccacgtcatggggaggctgaaatgggaagggccaggagttcaagaccaggctgagaaacataacaagaccccatctctacaaaaaatattttttaattaatgggggatggcagcacacacctgtagtcgcagctactacgaggctgaagcgagaggattgcttgagctcaggagttaaagattgcaggagctatgatcacagcactgcgctccagcccctcttatcagcagtctggtatgttgctaagggtcttgttctttttagtgcttcagggacagccactggctatgcccagaaataagtatgtttgagaagctttctgacctcagcttgaaaaattgattagggtcataattaaaaagggagggaaacaggattgagtgaaccggacgctaccgtgagtttattctcccagggcatacataatctcatgtgattaccacatagccctgttagataatctgttatcctgtcctcattttacccatgaggaaatgaaggcccagagaggttaaatgacctattcaaattcactcagaaggtggcagagatgagttactatcattgtattttggatctctggaaagaaagaaaactagtgatggtattaaaaaatgttattaatagtttcttttaatcaaccaggaacttgagtcactagcttctctgggtgaaggactatacttcaacagtatgaaaaacggaaaagaaaatgaggaattttggctgggcacagtggctcacacctgtaattctagcactttgggaagccaagggaggagggtcgcttgagctcaggaattcaagatcagcctaggcaacatagtgaggccccatctctacaaaaataaattagctgggcatggtggtgcatgcgtatagtctcagctacttgggaggctgactcaggagggtcacttaaacccaggaattggaggttgcagtgagctatgattgcgccactgtataccatcccaggcgacagagtgagaccctatccccccaccgccaaaaaaaagaaaagaaaatgaggaatttacatttgtgacagatacggaattcagggaatttagttgttcatagtctataaatgctataagaagtctccatacctttttttttttttttttttttttttggagacagagtcttgctctgtcgcccaggctggagtgcagtggtgcgatcttggctcactacaagctctgcctctcgggttcacgccattctcctgcctccacctcccgagtagctgggactacaggtgcccgccaccacgcccggctaatttttttgtatttttggtagagatgaggtttcactgtgttagccacagatcccgacctcatgatctgtctgcctcagcctcccaaagtgctgggattgcaggcttgaatcaccgcacccggccggaagtctccatactttttaacccaatctaaaatggtaaggaaatatataagaatgtctatttattattaaattttttctatataaaacatttcagaaaataaagactagcatttctgagccaagtggtagtagtggccattttttctggaaaaaaaaaaaaaaagaaagaaaaaacacatttagctatctatgatgtgaaaagatgaacattttatttaggtaataaatgttatgtcataaaataccatttattgtgtgcctattaggtttcaggagagctgtgccaagagcattacttgtatatcttttaagccttacaacagcccagcctgtcaggctggtagtgccatatctgttttacagatgaggaagtgatggattggagaaattaaggaaattgcctttaggtcaaagagataggaagtgacaaagctgagatttttaaccttgtgagatttcaaagtctttgctttttaataactgttccattgcttctaatatagagatatgacaaaaacaagtaaaaatcagtgaagaaggctgggagcagtcgcttatgcctgtaatcccagcagtttgggaggccgaggcgtgtggatcgcctgaggtcaggaatttgagaccagcctggccaacatgacaaaactccgtctctactaaaaatacaaaaaagttagccaggcgtggtgacaagcacctgtaatcccagctactcagtaggctgaggcaaggagaatcgcttgaacctgggaggtggaggttgcagtgagctgagatcgctccattgcactccagcgtaggcaacaaagcaagactccgtctcaaaaaataaataaataaataaataaaaataataacaataatgaagaaaacaatccggtgattattgtcagcaataaaatttcttcaatcaaccatgctttagtcctggcagttctctatcagtgagtttcaatcaaaaagtttgtttataatttttttttttttaaaattttgaaatttggaaacaacatcataaatgatggttagttttctgcagctccctattttggcagatagtctgttgttactcataattaatttgaactaaaaagtagtgttgtacgatatcatgggctgtgaatgtgtttgtgacttgatctgagaacccacacaccacttaggatgcttctgtaggaaaattagagtatggaactcacttgcccacgctttccctgtctcagtccatgttggtaggctgcaaagtctggggctagaaggacactgaacaagacttcagcagtacatgttagtcttccagagggaaggaatataatagttgagagaataattcctttcctctgtgactttaggcaaattcttggctatgctgttatttatttgggccaaacaatatcaggaggttgtacattttattcttaattactgcgatacattaattttatccatgggtttaacctagcctaccttttgctgttagacttcaactctacttgtgttgggttacccctctgcttaaaaatcaccctattcccaagcctgagggagtctaccttcaaagctttctatgacctaatccaaggcctgtcaaacttcgtaaagggccagatagtaaatttgttttttttttttgagatggagttttgctcttgtcacccaggctggagtgcaatggtgccatcttggctcactgcaacctctgcctcccaggttcaagtgattctcctgcctcagcctctcaagtagctggggttataggcatgtgccaccacgctcggctaatttctttgtatttagtagagatgggggtttcaccattttggtcaggctggtctcgaactcctgacctcaggtgatccacctgctgcggcctcccaaagtgctgggattaccagtgtgaaccaccgtgcccagcccgatagtaaatattttaggctttgcagtccatatacagtcccatttttttgtgtatgtttgcacgttttctttacatattttaaaagcccctttttttttttttttgagacagagtcttgctgtgttgctcaggctggagtgcagtggtgcaatcttggctcactgcaacctctgcctcctgggttcaggcgattctcctgtctcagcttcccgagtaactgggattacaggcacatgctgccacgcccagctaatttttgtatttttagtaaagatggggtttcgccacattggccaggctggtctcctgatctcaggtgatctgcccacctctgcctcccaaagtgctgggattacaggtgtgagccaccgtgcctgacctaaaagctctttacagtgtaaaaaatattctgagctttaagccatgtgaaaataggccatgggcatttgctgacccctaatagaactccattttacctttctgatcatgtttcccattaactcttcaaaaatatgacctccatttaaatcaagatggtctccttcctcactgcttgtggaggtccagtgcccagtgtctgcctcttgcttgctcctccatcattgttctgccattcgagatcctcatacttaccctttaagatctagcccaaattttccatgaaactaattctaataattaaaaacttcctgtagaacttaactttgtctagtacaagttagctttcttattcagtagtagcttactataaattacaagaataaaaagattaccattttccctcacactgttttgtggagaatgcctaaagttactttttctttttacaggtcagtattcctatttggcatcctaatcccctttcccaaatctgaattttgggatttgaagcttgcatttgagattatgatttgtcttccttgttgtacacaggagcagggactttacaattagtattcgcatccctgctccttcatacttcgtgatgtaaggcaagttattttcacttatgcttaagtttcttcccctgtaaaaaggggatggaagaggattaaatgaattaaacatgtaacacgcttaaagcaatgcctggcaagtaataagtgctcagtaacttttagctgttcttattagcatgtttggaaaccagtagaaactacaccagcaagttaaggttgaaaagtggtattgatgggcttggggtagtacagtatgaatggctacagtttagcgtttcattaagtttgtatattcattaattcattacacatttgatgctgtcagactaggacagagacaaagatgaatgaaacattatctctgcttccaggttacccagtgtagtagagaaggcaggcatgcagatagtttaaattggtagcactgggaggggactgccatgggtgggcagtgaagaaaaagggcttcaaaataatgagagttgagatggatcttcaaggaagataagcagttttcagtaaggccatgaagagaggaggaagttccaggcgggaagagtttgtgctaaagtacagggattgctatacacatggtgtatgtagaaaaaatttggttcacagtgtgatagaagaattggagggggtcctcactgaaagtaaggaaacacatttggaagaatatgtttcagttagaaaatgaaatgagcttaaagtaaacgctaataaggtttttaaaatgtaaaatttcaacgtatttagaaagagaacagctggatgaatcttatgtacctgtcactcagctttagcagttatcagtaaatggccaacgttgtttcagctatactcccctctcctccactgatagtcttttgaaggggaatacaattgttttgtggcctccagaaagggataagtttatgagcaacgggtagatcgttgggagagacttgagtttcctgtcaggaagcattcttggtgcataagtcagaggtgatatgaatgccgtggaagggggtggcttactgtctggagaactcgagaagatgggaatgggcactgtccagtattgtggctacttccacacatggttctttaaatttaaaattatgttgattaaaatttaaatatttcagttcctcagccatactaatcgtatttcaagtgcttagctgccacatgtgcctaatggctgcaatattggacagcatgacataggacatcttcatcattgtacaaagttctcttggacagcatgggactagagccctaagatccttttctacctgagttgtttggattttttggtgtgtctaggttggatctagttgttcatggcttcatgaccaagccttttatccctttctctagagggactcaaggggtaaaggcactgaaggggtaaaacttcatatgaagagtgtggtggtggtggtggtgttttaagacagggtctcgctctgtcactcaggctggagtccagtggcatgatcctggctcactgcagcctcgacttcctgggcttaagtgatcctcccacctcagctcccaagtaactggaactgtaggcatgagccaccacacctgcctaatttttaaaactttctgtagagacgagatttcgccatgttgtccaggctggtctcaaattcctggactcaccttggcctcccagagtgctgggattgcaggtgtgggccactgcgactggccttttttttctcctttactactctagtgtatgctggaatatgaggaaataattatattagctagcagttattaaacacttaataacataccaggcactgttttaagctatgcgatctgtatggaatattacttaatttccacaaccttatgaaaagatactattttttttcttttgagaaggtactattttcatcttcatttcatagatgttgaaattgaaacacagagagctgaagtcacaggattaaggccacagagctgagaagtgatggagccggaatttgaacccaagcaattaatgctgatattagttcttgtgtgaatggtaattgttttgaaacaatgatcctagatgattatatgaccggattaatctggcagttgttctgtgtgaatttagagttgccttcccacctcagtttcctaaaaacaaaacaaaacaaaacaaaacaaaaaaaactctagcttcactgtgtttgggttgtcatggcctaccccctcttgccacctcatttgactcaactttttagggagaaaatattcaatacgtggtataggatttccctttctaataataatgtaaacaacaacaagaagtctgaaattggaagaacaaaatgactcacctaagtgagttaaccttaagaggtggaacttgatttctagattttagttaattgtctaactgatgtactaaatattagttacttaagtattaaaacgggtagacataatagttggggagctgctgtagagggggtagtttgagaaggcttctttcaggaggtgacatttaagttggtaactaacaagaaaggggcagccatgtgaatagctggagggaagagcattcttacagttttactggaagggggttagaggtatgtggtacccttatgccaaagaaaattagttacttctatacaaccagtctgattctagaaacctggatcaatgaaatattttgattatataaaaaaatctgttacccaggtcttgttgaaatagcattagaaactactgaaggacatatagaggaggagtgttgaaaaatggtgatggatgagcagaatggtgaaaaataaaaagacatgaagctctataattatattgtatggtgacagtaccaatagagattgcatgttttttctccccagtttttttttttgttttgttttttgtttttgagacagagtctcactgtgtcactcaggctggagtgcattgtcgtgatattggcttactgcaacctctgcttcctgggttcaagcgattctcctgcctcagcctcctgagtagctgggattacaggcatgtgccaccacgcccggctaatttttgtatttttatttgagaggggatttcaccatgttggcaaggctggtcttgagttcctgacctcagataatccacctgcctcagcctcccaaagtgccgggattacaggtgtgagccactgcgcccggcctcccccagttgttgaaacaataatggaaggtaattttattcttagattatttaatgtttttcagttatcaggatgtgttagattgtttgtgtatattgttttgcttgttaattaagtaacacagtgaataagacagacaaacatacgaaaatgtacatttattttatttttttgagacagtctgttgcccaggctggagtgcagtggcccaatctcggcccactgcaacctctgcctcctgagttgaagcgattctcttgtgtcagcctcatgagtagctggggccatgggtgcacgccaccatacccggctaatttttatatttttagtagagatggggtttcaccatattggccaggctggtctcgaattcctgacctcaggtgatctgcccgccttggtctcccaaagtgctgggactacaggcatgagccactgtgccaggccatttcatttttggaacgttcttttttttttttgaaatggggtctcgctctgtctcccaggctggagtgcagtggctcaatctcagcttactgcaacctctgccttccgggttcaagtgattctcctgcctcagcctcctgagtatctgggactacaggtgcatgccaccacgccaggctaatttttgtatttttagtagagacggggtttcaccatattggtgaggctggtcttgaactcctggcttcgtgatctgcccgcctcaacttcgcaaagtgctgggattacaagtgtgagccaccacgcccggcctgtttctggaatattcataatcttttgttgtcatttcaacagtgctcacagcagcttcaccaggtgtagattccatcttaagaaaccactttctttgcttatccatgagaagcaacacctcatctattcaagttttatcatgagattgcagcaattcagttacatcttctgaccccacttctaattttagttctcttgcttttttaccacatctgcagttacttgctctactgaagtcctgaacccctcaaaatcattcatgagtattagaagcaatttcctggttgggcacggtggctcatgcctgtaatcccagtactttgggaggccaaggagggcggatcacctgaagtcaggagttcaagaccagtctggcaaacgtggtgaaaccccgtttctactaaaaatacaaaaattagcggggatgtggtggcgggcgcctataatcccagctacttgggagactgaggcaggagaatcgcttgaacctgggaggtggaggttgcagtgagttgagattgtgcccttgcactccagcctgggcaacaggagcgaaactctatcttaaaaaaaaaaaaaaagaaaagcaatttcctctaaaactcctgttaatgttgatgttttaacctcctcccatgctcatggatggcattctcagtggcatctagaatggtgaatactttttagaaagttttcaatttattttgccatcagagaatggctatgaatggcagtagtagccttacagaatgtatttctttttttttttttctttttttttgagatggagttttttttgctcttgtcacccaggctggagtgcagtggcatgctatctcggctcaccgcaacctccgcctcccgggttcaagcaattctcctgcctcagcctcctgagtagctgggattacaggcatgcaccaccatgcccacctaattttgtatttttagtagaggcggggtttctccatgttggtcaggctggtcttgaactcccgatctcaggtgatctgcctgcctcggccttccgaagtgttgagattacaggcgtgagccaccgcgcccggccgtatttcttaaataaaatggcttaaacgtcaaaattatcccttgatccctgggctatggactgattcttgtgttagcagttatgaaaacatttatgtccttgtacattcccatcatagctttttgtcaatgagaagtaattttttttttttttttgagacagaatctcactctgtttcccagcgtggagtgcagtggcatgatctcagctcagtgcatcctacaactctgaggttcaagcaattctcgtgcctcagcttactgagtagctgggattacaggcgcccaccaccacgtctggctaatttttgtatttttagtagagatggggtttcacgatgttggccaggctgggctcgaactcctggcttcaagtgatccacctgccttggcctcccaaagtgctgggattgtaggtgtgagccactatgcctggcctaattggcctaatttcaatattgttatatctcagggaatagagaggcacgaggagaaagagagacaagctgactgctggttcgtggagtagtcataacacacaacatttattaagattgctgtcttatatggaccgtttgtggtgccttaaaagaaatcagggtaacatcaacgattactgattacagattactataacagatacaataataattgtaaattattatttacaattgtaaaatacaatcttttctttattatttacaattattgtaaaatacaatctgattacagattactataacgtatacaataatagtggaaaagtttgaaaatattgtgagatttatgagaatgtgacacaggcgcaaagagagcacatgttactggaaatacggcactaatggacttgcccgactcggggtttccacagacggtcagcttgtcaaaaatgcagcatctgtgaatttcaataaagcaaagcagaataaaatgaggtatgcatgtattgccatcacatgtacactagtaaaatacgttttttttttcagtaggtggatcaacctcaaattttaatataaagcattacttaaaggagaatatggggacattcatgacatttcttatatgtacataaaacttcatgaaaataatttaatgctatccagcagtttattttagaagtactggaggctaggcatggtgtcttatgcctgtaatcccagcactttgggaggctgaggtaggaggatcacttgagttcaggagctggagaccagcttgggcaatatagtgcgaccccatctctacaaaagagaaaagaagtactggagtgttgcagctcttacagaatttgtctagcaggttttccagtctttaccagaaatgcccccatgcagaagtagtaaatactgattcatgtaaaataataaacaactttatctttcagtttttaaaagacagggtcttgtaacgttgcccagactggcctttaattcctgggctcaagcgatcctctcacctgagccttttgagtagctgagactacaggctgcacctctgcacctggctctgcttgatttttaattgttgtattgctgttgcagctatgtttttttttttcttcagtgtgaggatgggcaaactttttatgtaaagtctcaggtaataagtattttaggctctagggccatatagcttctctgttgcatatcctttttttttttttccatttcccctcaaattccttttaccataagcaactcttgaggaacataaaaatcattcttagcccagaagccagaccaaaacaggttgtgggctgtagtgtcctgacccctgatttaaagattgatagctttgaaatggaaagttttaactttctttttttttctttcccttgttctgattgggctgttaattcattaggtatttactcagtgtgtatcatatgaggcatgattcctctgctaattttggtagtggtagaaagatacttttgccaagcttggttgttaggttttcatttgtccaagagttcctgaccaagtgtgaatggatgttgaaatcaaggtgtttctttggccacacaatgtgcctttgggggctatatctatgtgcttctggtaccttcttttaattttcacaaagacactgcttgccgaccacactgttttgtctaatgtggggctatgaccccctggaagaggcatcattttctgattttcacagaagcataatatggtcaggtgatggtcctgagtagtgggtatatgacagatacactagtaattataatacagatctaaactggagagttgaaaacagcatcgtatatttgattgagataatcgaaggaagacttcctgaaaagatggcatttgagtttcaaggctgagtaggattaagtattattatttaaaaaatgccttggacaatgcattaaatagagttaacaaatcacatcacttatagtctccaattaaaaacattttacttaaacataattttagacttttagaaaaattgcaaagatattataaagaattctcctatatatctcacctgtattcttcaagtaacattttaccatattcaccttaacattttctctgtattggtaattgtatatgtaagatttaatataaaataaaaattcttattaaacatatgagagacatgatgcctctttagccctaaatacttcaacttgtatgtactaataacaagggcattctatttcaaaaccacagtacagttgtcaaaataaggaaattaataattgtgtcaaactgttattctgtttatagaccttctaatgtcctttaaaacaatcaacaaatcaacatttttctggtcaagaaccagtaaatatgtatattctacatatatatatacacatatatatacacacatatattctacatatatatgtggaatatacgtatttactccctctgtccaagaaccaatccaggattgttaccttcggttatcatgtatctttggtctcctttaatccaaagcagtttctttgtcttttatgacttgacacttttgaagattacaggttattttgtagactgtccctcaactagggtttatctgaggtttccttatgattagattcagatatttatttttggcaggaatacaacagaaatgatttgtgtgtttttctcattgcatgatatcagaaagtgcattgtatatatttatcccattactggggttgttaactttgatcacttggttagagttgtgtctactaagtttcttcactataaagttatttttcacttggtcatttcatcagtatcttgtggggagttactttgtggttatataaatactctgtttctactttcccttactatatttagcttctgtggacacttttgcctgaaacagttatttactatggtgttaccaagtagtgatgcccttttcttccatcattctgtctacatttttttttttttttttttttttttgagatggagtttcgctcttattgcccaggctggagtgcggtggcctgatcttggctcactgcaacctctgcctcccgggttcaagcagttctcctgcgtcagcctcccgagtagctgggattacagacatgcgccaccactcctggctaattttgtatgttcagtagagacaggatttttccatgttggtcaggctggtctccaactcccgacctcaggtgatccacccacctcagcctcccagagtgctaggattacaggcgtgagctgccacaccaggccttctttttctcttttaagagatagagtcctgctttgtcaccaaggctggagtgcagtggcatgatgatagttcactgcagcctcaaactcctgggctcaagtgaacctcccatctgtagctgggactacaggcacctgcataacacctgactgttttttaaaactattttagagatggggtcttgcgaagttgctcaggatggtcttgaactccgggtcttaagtggtccttctgcctcagcctctggattagttggcattacaggcatgagccattgtacctggcaagtgcatattttctttttttttttttaaggtggagtctcgaggccgggcgcagtggctcacacctgtaatcccagcactttggaaggccgaggtgggtggatcaagaggtcaggagatcgagaccatcctggctaacatggtgaaaccctgtctctactaaaaatacaaaaaattaactgggcatggtggcacacgcctgtagtcccagctactcgggaggctgaggcaggagaattgcttgaacccaggaggtggaggttgcagtgagtcaagatcatgccactgcactccagcctgagcgacagaggtagactctgtctcaaaaaaaacagaaagacggagtcttgctctgtcacccaggctgcattgcagtggcatgaactccgcctcctgagttcaagcaattcttgtgcctcagcctcccaagtagctgggattacagacatgtgccaccacacgtggctaatttttatagttttagtagaggtggagtttcaccatgttggctaggctggtcttgaactcctgacttcaggtgatccacccgccttggcctcttgaagtggtgggattatgagtgtgagccactgtgcccagccaagtgagtatttgcttatgtagtattttaattttatgatttttttttctttgagacggaggtttgctcttgttgcccaagctggagtacagtggtgccatctcggctcactgcagcctccacctcctgggttcaagccgttctcctccctcagccacctcctcctgaatagttgggattataggcgcctgccaccatgcctggctaattttttgtatatctagtagtgatggagtttgagcatgttgccaggctggtcttgaacctctgacctcaggtgatccacctgccttggcctcccaaagtgctgggattaaggcatgagccaccatgcccggccagagactgttcatttattttttttttttgaggcggagtctcgctgtattgcccaggctggagtgcagtggcacaatctcggctcactgcaagctccgcctcccaagttcacaccattgtcctgccttagcctcctgagtagctgggactacaggtgcctgccaccacgcctggctaattttgtttttgtatttttagtagagatggggtttcagcccgccttggcctcctggagtgctgggattacaggcgtgagtcagggcgcctggccaatcataccttcttttactgcattaattatggttttctttcgttcttaaaacatgtttatagtgaccacttttgaaattcttattaagtcagacatctggttatacaagcaatttctattgcctacttctttttccagtgggtggggttatactttcctgtgtcttagcttgtcgtttttttttttgttgttgaaaactggacattttaagtaatgtagtaactctggatacctcattagcctatggttgggggtggtggttgttactgttatttgcttatttgtctaatgactggctgaatgattttagtgttctatccttcttccctccctgtacagtgtgacacgtctgatgctagttttcttgggatgcagccttgggtatgcctaccatcactctagaatcacagtgattttggcatggctttgtctcttttcctgactgtacccagctgttaagctacactaattactaggtgatgctgtgtagtcatttcttggtgtccttgggggattggtcccaggacccccccgttggatataaaaatttatggatgctctagtccctcataaaatggcacagtatttgcatataccggtgcacatcctcctgtatgctttgtcatttctagattacttataatacctaatatggtgtaaacactaggtaaatagttgttatatattttttatttgtcttatttttattgtatttatttttaagtgtttttaatctcgagtgattgaatctgaggatgtgaaatctgcagatatggagggcctgcattgttttccgtggagctttgggcctaaactgctccacagactgatctgatcaaatttgcgcttctttgaagggatagtttctgagatcagtgtttgaaatttgttccaatccacagaggagtcctcccagctctctttccctagttctggccaccaaactagacaactacaatttagcacttatctccaatgattctcctcctaccaagtgcctttgaaagcatcattaactctttcataccttgttgcaaatgaaatttctttgggaagagattgtgagttttttttctcctaaattatggtgcaatataagtaatataccattttaacaattttaagtgtattaagtgttttttttttttgtagtttttttttttttgttttttgagatagtcttgctctgtcgcccaggctggagtgcagtggcacgatctcggctcactggaacctccacttcccgggttcaagtgattctctggtctcagcctccccaaatatctgggattacaggtgtgcaccaccacgcctggctaatttttctatttttagtagaaacggggtttcaccatattggtcaggctggtcttgaacttctgagctcgtgatccacccacctcggcctcccaaagtgctgggattacaggccttagccaccacacctggcctatgcattgcttttatatgtattttaaaattcataagttctcctcctatgatgtttttgtcccatgtgatttatttgttaaaccgtcatctttggccgggcgtggtagctcacgcctgtaatcccagcactttgggaggctgaggtgggtggatcacaaggttaagagatcaagaccatcctggccaacatggtgaaaccccgtctctactaagaatacaaaaattatctgggcatggtgacgcgtacctgtagtcctagctacctgggaggcggaggttgcagtgagccaagatcgtgccactgcactccagcctggcgacagagtgagactctgtctcagaaaaaaaaaaaaacaaaaaactgtcattttttatgttgcatttactgcattctggatttaaactgtgaggaacctcatggtatcagttaatatattcttccatcttaatgtttctcgtaaactggtagatctgtaaacttgattaggtctatcctattgtatcacatcagaagcagaaggtgcttttttttttttttaagggaaattgtgtgaaagtagacagaatggtaaagtgaacccctgcacacctatcacccagctttaatagttatcagctcataccattcttgtttgatttacaaccccattcatttctcccttctgtattattattatttagttaattattttttgagacagggttttgctctgtcaccaatgctggagtgcagtggcataatcacagctcactgctgtcttgacctcctgggctcaagtgatcctcccacctcaccctaccaagtagcggggaccacaggcgtgtgccaccatgcctggctagttttttattttttgtagaaacagggttttgctttgttgcccagactgatctcaaactccggcactcaagtgatcctcctgcctcagcctcctaaagtgctgggattacaagcatgagctaccacattcagcatgtaaatttctttatattaatttgactggcattttaagtcacacttgaatttcatatttggcaactattaaaagcatagagtcctggatattagtgttttgttaaacctgatctatctaatcataaatatacttaggtctaaaatatgctcttggcctttgtttattgcggttcagtatttgttactatattaaatagtaaaatatttggtttgagatactaatgaaaagattaaaagtaaagcataacttgaatggatacaaaaagaaacaagaatttagacttcagtggatttcagagaatactgcttcgatatgctaacattcctgttgggtgtccaaccgtgtcatagatcagtggaaattagtggtttctgcactttactgtactgtttttttatatgataatattttcctggttgaatgattcgttcttttgagtaaactccatggtcaaacaattactttttattagtcaaagatgtaaccacataatcactaaaaagaacagtgtgacttatttaaaggggattatgtttttaagtcttttatatagctttgtagggaggccatatgagtttaaggacagttcgtggcatttgttcaaggttttgtaacttggcatctcagcagccaccaggataccagatcatcgttctaagtaagatttaggcattttagccttcatgtacagactataagtacacccccccacacccctaccaaaactgtaaattcaaatgatgtttgaaaaagcatagaatttttgttaggcgaggtagtttattccttgtgatacagttccagagaggcagcataacctaggaatgaaaaacttagacgtggaatcagatacacctggtttaaataccagctctactgctcatgaactggatgattttggtcaagatacttgactgctgaggttcagtttcctcacctgtaaagtagaggtgatagattagacatgttgcatgtgaagtacttagtatggtgtctggttttgtagtaagatctataaaagataaattattagtcatattccttagacttcaggaatttatctctgtgccatgtttgaggcaaacagttacagaattagaatgttagaaatgaaaggaatcctagatgtcatttaattcaagtccattgttttctggatgagagaagaaagtgaggaaaagtgacagagttggagaccaagctaggactggcctcagaatgttaagagtactcttctagggatcgaccagtcgtgttactagactttttggatctgaattgtgcttttccttgaatgttttgaattttggcttgagtgttgtgattattttattaaaatgagattccagtcctattgtcatgactaatgtttatgagaaatataacatttcactttaatgatgttttttaattattctaaggggcctaatctttttcagtggaataagctttaggttgtattatattctataattcacttgaaaatagaattcatctttacttgacagccaaattttgtgtactgcatcttttctgagggagagagttggcaaggaaaggcacttgttacaacgatccacacatatagacgcatattatttagaaatgaaagtgctttgaatgatttagcttattttcagtttttttttttctgcagttgtaatcatatgacctgtttttctttctttttttttttttgagacagagtcttgctctgtcaccccggctggagtacaatggggcggtctcagctcactgcaacctccacctcccaggttcaggcgattcttctgcctcagcctccctagtagctgggactacaggcgcatgccaccacacctggctaatttttttattcttagtagagatggggtttcactgtgttagccaggatggtctcgaactcctgaccttgtgatctgcccacctctgcctcccaaagtgctgggattacaggcatgagccactgcgcccggcccatatgacctgtttttcttttatagatgggggagaaatatgggaagtgacttggtgtcagtcatctgtgttggttaaatcaagaatataatccgtgttttgcttctgaatagctctttataacagtgattggttactttgggagtaaagattattatttagagacagagtcttgctttgtcgcccaggctagactgcagtggaatgatcgtagcctactgcagcctcagactcctggactctggtgatcctgcctcagcctcctgagtagctaggactagaggtgcatgccacatgcctggctataattattattaatttacgtttagcattagtttttttcttccagtaggctattttactttatttatttgattttgatgaagtttgattatttctagtttgcttccttctatgacccctacctgttgtgggtctccaggcaagcagtgcataggtagagccatccttaggtagcctttagacttaatattaggtgagctctccccacagatagcctctcctttatttgaatggaattatattttaagtttggaaatatttttcagcttatttagcctgttgaatttaataaaaataatatttaatcttttcagaggtcgaaacagtaacaaaggactgcctcagtctacggtgagtaactttaatgttacttattggggaaaattagtagctaaaacatgatctctaaccacagaccaaatgccaaggcaaaagattcccttcttttgaattttgtcatagataacttgactgtttaagtatgttattagcctatatgtgtttttttaatgactctgtataaaatgtacaattacttgttgtattagtccattcttacactgctaataaagatatacctaagactgggtaatttataaaggaaagaggtttaattgactcatgctctgcattgctggggaggcctcaggaaacttacaatcatggtggaaggggaagcaaacacatccttcttcacatagcgacaggagagagaagtgctgagcaaagcagggaaagccccttataaaaccatcagatctcctgagaactcactcactatcatgagagcagcgtaggggaaactgcccccatgattcagttatctccacctggtcttgcccttgacacacgagaattattataattaaagataagatttgggtggggacacagaaccaaaccatatcatttgtaaatagtatttttgtcacgtgtaataacaagaacaagtcgcttgttcttttctaaatgactaagtgcaaatctaagtgaaaaacctccaaaagatacgtagaacaccaagagtggagtctgcagagttctttatgctttttattttgaattaatgtgctttttttctgctgctttcatttttctcctttggctttctggtcttaaattttggaatgttatcaatgaaattgaaccggacatgaagggcagaaactataagtcccacatgatggaagaaataaatgagaagctatcacaaatttttgagactttgcctttattagattgttttacaagaatcaggaagatatacacgtatatggtagtaatatggagtagtgtggttgatcagacttaagcactgtcactgatgctgatatgctgggagaacctagtcagggttcttctatgaaggtatgacctggcttcctaccccatttatttatacttcacccttcttagggtacatttctgtgagttttaacaattgcatacaatcagtgtaactaccaccacaatcaagttaatagaacagtttcattgcccaccaaaatccctcaaatcacttttcagtgaaccctcctctctctccaaccattgatttgtcttccatccttacggtttgtgtccttcctcctctatggaagtttactcttgcttttttatgtcatgtttagtcaaaacaccattagttggtttgactgataacacttgaaaacctgaccttctgttccttctgttctctatggaagcaaaatattaaataaacaaaatcttcccttaatacatgtaagatatcataaacctaactaaacattttgcaacaaataataaacgttagctttatatgcaaatgtaaatacaggctgagcatccctaatcggaaatgctccaaaatttcatattttgaattagggatgttcaagcactaagtataatgcaaatatccccaaatccgaaaaaaatccgcagtctaaaatacttctggtcccaagcattttagatgaggaagattcagtttgtactaatttctaatagttttttttttttttaatattccagatttcttttgatggaatctatgcaaatatgaggatggttcatatacttacatcagttgttgtaagttattagattattggggataaactgccttgggggtagaataaagtaattccatgaagttaaaatgtggataaatgattgtcaaagtaacattgcttagatcatgtttagtcaggatgatttagagaaatagattagaactccttttatccagtctaatataattcattgtaaaagtacagttggtcctctgcatctgtgggttccatattcatggattcagccaaccttggatcaaaaatatttgttaaaaaggccaggcacagtgactcacgcctgtaatcccagcactttgggagtttgaggtgggcagatggcttgagctcacaagtttaagaccagcctgggcaacatggcagaactccgtctctacaaaaagtaaaaaaactagccgaacgtggtggtacgtgcctgtagtcctagtgacttgggaggctgacgtgggaggattgtttgagcctgggaggtggaggtttcactgagctgagataatgcccctgcactcagcctggtcaacagtgccagacagaccccttctcaaaaaaaaaaattttttttttttttttttttttttttttttttgagaaaaaagaggcatggttgcgtctgaaccaaagatgtacggacgtttttcttgtcattattcctaaaacaatacagtatgacaatttacatagcatttacattatattaggtattacaagtaatttagggatagtttaaagtatttgggagaatgtgcttagttatatgcaaatactattacattttatgtaagtgacttaagtattatgtaattcggtatctgaaggaggtcctggaaccagtcccctaccaataacaacagatagctgtattcttgttaaccctgctgtgtgtgtaaaataatgttagtagttgattgtcttttgtacattattttgtcacttaaaatagctggggtcagaaatgtttgacttcagtattaaaattcgtactgcaaactctgagtagagcctcctgaagaatttcaagagttcagtgtattgttaatgttttgaaatttttttattgttttgttagtgaatacctaatattgaatgaagcctgatgaggtataaaaagtaaaatgaaaacaaatatccctggtgaccgggtagtatactgtttctttgataaataaattatatgtttttagggctccaaatgtgaagtacaagtgaaaaatggaggtatatatgaaggagtttttaaaacttacagtccgaaggtaatttttactttttttctttttcttacaaagtaaaagaacattttcatagtcagtgttttacctagtttttaaagccactttgaatgattttacttctcagtttcaaatactgattattttatagactggtttgtgtaatcagagaggcttcttgatgtgtgtgcttattaaaatatttcaaccatttttaagcattgtgagctaatagagggatgtggtggtttgttttttcctcttaaaaattattattaatgtacttaagacaaaccatagaaacaaaaaacatttagatatgaggatttttaaatgatggaatggataatagatcatatgcctgggaaaaagggtatgattctcttgagattatttttgtcaaaggcatataagaactggtaccttgatgagctaaagaattcctaacaaattttattttgtaaaggtttggagtacttacttgtgtttttcattttagtgtgatttggtacttgatgccgcacatgagaaaagtacagaatccagttcggggccgaaacgtgaagaaataatggagagtattttgttcaaatgttcagactttgttgtggtacagtttaaagatatggactccagttatgcaaaaagaggtgggttttgatttcctaaatatgcctcatggtttattagatttattcaagcaaagattttcacagtgatcttacaaactttttttaaagaaatatctgggctgggtatggcggctcattcctgtaatcttagcacttagggaggctgaggcgggtggatcacctgaggtcaggagttcgagaccagcctggccaacatggcgaaaccccgtctctactaaaaatacaaaaatttatttttgtgtgtggtggcgtgcgcctatagtcctagctactagggaggctgagacagaattgcttgaacccaggaggcagaggttgcagtgagctgataccgcaccactgcactccagcctgggtgacagagcaagactccgtttcaaaaaaaaaaagaaagaaaaaagaaatatctactttctagaatagcccaagtaaggtaattttttagaaaaatgagaatgttaatgcatttttgttggaaaacaattagaactttagagaaaaattaaatagagtttttgtgatctcttaaaaaattagtttgtaaagcattttctacagttttgtggtcaagaatgctactgattatattcaactgaaaatttcttgtcccatttggcctacaatgctttagtttataagtgggcatgtggcaaatctggaaagaaatcaaagtataaggctaaggaagaaaggtagagaacggttggtagaaaacaattgtctaatgaaaatgaaaaagggtgaagaagtagaacatacgtattttaaaaatattcagagtatgagacaaggttttgagaatttaaaagcgattatgtagttatattaaaaatttagtctctttttaagtgtccattgatgaacaaagtgggaattcctgttactcatttgcaaggcattattgagtgttcagtaacacgttgcaaggcacttctgggcaatcctgaacttggttctcaaattctttttttttttttttttgagacggagtcttgttctgtcccctgggtggagtgcagtggcacgatctcggctcactgcagcctctgcctcccaggttcaagcgattctcctgcctcagcctcctgagtagctgggactacaggcgtgtgccaccacaccaagctaatttttgtattttttgtagagacagggtttcaccatgttggccaggatggtctcgattgtttgacctcgtgatccgcccgcctcggcctcccaaagtgctggaattacaggcatgagccactgcacccagccggttctaaaattcttttatttatttgtatatgccaaattctgtagtgaaatacgtaattctgttgtaaattgtagttcagtacaatttgattttcactattcaaatctataccaaaagctgtttttattgttgggctgattcttctacactgttacttggaaataataatataccaggattctttctcttagacttaggagtctttctctttgcttgctttttcagaggctaacagtactgggtattctttaactgtcttgatatgctgatgaaagcacagtgttctgtttttgaatcttctcaaatgtccttgtctttgattcacaactttttgtcttaagaggccttcagcatcccatacaaggaaacaagtctttttttagctgctacctttggagttgattttgtttatgtctaggagcactaaattatttatacttatactattgaaatattcctctgttataaattcaaaaattgactttggaagataaaattttagttgaatttaatacatagcactctggaaagagtattggccacaacaaaaaaaaaggttccctactctattggataccaggtcatttaacagccatttacggtatgcattgtctttttgtttttatgatgaattgatatttcccaaatgtggaagagtgaatattactttgagatgtttgtgatagtccattccttgctcctcttcaaaattaatgtcattaaatttttattactttattagatcttcatttctcagataattttagttcattatagaaaggcaagaaaatacagatcagagtgacaactttgaaaatctcactctactcataaggggatgggtgtattttgctatatattacaaaattagttttcttgatgaggacatccactattggagtaatttcaggtatcttattttttcttttctctctctttttttttttttttttggagacggagtttcgctctgttgcccaggctggagtgcagtggcctgatctcggctcaccgcaacctctgcctcctgggttcaagcgattctcttgcctcagcctcccgagtagctggttactgaggcatgtgccaccatgcccggctaatttttgtatttttagtagagacggggtttcactatgttggccaggctggtcttgaactcctgaccttgtgatcctcctgccttggcctcccagagtgctgggattataggcgtgagccaccacgcctgggcaggtatcttatttcaaaacttacagtggtttagtgaattatacaattgcgtccagtgcgtagtatcctgaaaatagtattaagtcatgtgtttaggacatcaggtctcttaagctaagactatccaggcagaaattgccctcttctataaaagaagaaaagtattaattaggaagtactatcagtatggagaaaaccattttagaattattaattggcatggtttccttctttttttttttatttcgagatggagtctcactctatttcccaggctggagtgcagtggtgcgatctcggctcactgcaacctctgcctcctgggtttaagcgattctcctgcctcagcctcccgagtagctgggattataggcacataccaccatgccctgctaatttttttttttgtttgtattcttagtacagactgggtttcaccatgttggccaggccgcatggttttccttaataacaaaattaaggcatttattactgcatctagattttttttattttttattagagacttactcagattactcccaaagtaaaggaaggtatggtttaatcaatgcttcttaatgctgggttcacgtttagtcacctggggagtttttaaaaatgttctcacttctagggatcctggtttaattataattagcctgggtgaggctctggacagtcagggtgtgagctatgggtttcatgtgatgagatcccaggagtggctctgttctgtggccttgagaatttgtgctttctaggccaggtgcggtggctcactcctgtaatctcactttgggagaccaaggtgggcagatcatttgaggtcaggagttcgagaccagcctggccaacatgttgaaaccccgtctttactaaaaaagtaaaaaattagcgggacgtgatggcacatgtctataatcccagctacttggggagaggctgaggcagaagaatcgcttgaacccgggaggcagagattgcgagatcatgccactgcactccagcctgggcaacagaataaaaaaagaatttgtgctttattttcttgcctcacagtcccctttctgtctcagaattggcaactgcctgaaatagtctctgctgttatcatttgatagtacttttccacatcttgaatggatagatagagtgttttttataatagaagtggatgaatgattagagtatactaatatgacattgtattttcctaaaagatatgaattgatttcatttctgagcttttataattctcttctgtaatagtctgtcaaattattaaggttgataatattaactaaaatttgagtgcatattctatgtgccagactctgtgctaacagatttacctacatttgttcacataatcatcacaagttgtttctgtagtagatacagctattatccacgtcatagatgaggaaacaggcatatttaggaaacttgctaaagtgaggacacaaatctagcttttctactctaactcatgttcttaacattatactgcagtgacataaattatgtggtttggtttgttgtttatctcagttgtcataagtcgaattaatgtttgtttgtttgttttgagacagagtcttgctctgtcgcccaggctgggtacagtggcgtgatcttggcgcactgcaacctccacctcctgggttcaagcagttatcttgcttcagcctccctaataactgggattacaggcacgtaccaccacacccgggtaatttttgtatttttagtagagatggggttttaccatgttggccaggctgatttcaagctcctgaccttaggtgatccacccacctgggcctcccaaattgctgggattgtaggcatgaaccactgtgcccagccagtaagttccatggttgttaaaggatttctccacaaataaagctaaaagtaaaaaaaaaaaaaaaaaaaaaaaattctcaagcaatataagatgcagactattatgttgttcaagttttttttttttttttttaatctttggctttatttttggggaaaccttttttttcttttttgttttccttgggacggagttttgctcttgtcgcccaggctggagtgcaatggtgcaatcttcgctcactgcaacctccgccttctgggttcaagcgattctcctatctcagcctcccgagtagctgggattacaggcatgtgccaccatgcccggctaactttgtatttttagtagagactgggtttctccacgttggtcaggctggtcttgaactcctgacctcaggtgatccacctgcctaggcctcccaaagtgctgggatcacaagcgtgagccaccgcgcccagccagggaaacctttattttgaggcggagtctcgctctgtcacccaggctggagtgcagtggcgtgatctcagctcactgcaacctctgcttcctaggttcaagcaattcttctgcctaagcctcccgaggagctgggattataggcgtctgccaccatgcccagctaatttttatatttttagtagagacggggtttcaccatattggccaggctcttctcaaattcctgacctcatgatccacccaccttggcctcccaaagtgctaggattacaggcgtgagccaccacactcggctgctggggaaaccttttaacatgagtaaggtcagtgtgacttttaagttcttgatgctaacatcattgatttcaataaagtttaaaagttatattcatgcatatatgcaaatgaataaaaggctttgaaatagtgacttcttacggtacagtgaataagtttcctttggtctcttgaatgttatacatgttccagtttgatttactgagaaactgaaagtacctttacgtcatatgagctgtgagtcaccttggcacattcataattagaagagaccatcagattatcattggaaaatcagtttgtatttatcctttatttgaattccagtgcagacagatctgaggttctcttcattttgctaaaacttcttagggccttcagtcgcttttggctctgtattcgtgtatctttggaattgtcctgttatctctgcttgttttttacttgattttccatccatttccagtattcctttctcctctatttttttccttcattttctttctgctcttcctgttgcgccattattcatgttttcctctttactccaactcaactatggctttacttctgtttccttattccattgttcctcatactttttcctactgcttcattttctttgcagtattctcagcctagatgataggggtcagcaaatctgctcatcagtaaataaattttattgtagcatagctatgcccatgcgtttgtgcattgtctatggctgttttgatggctgtagccatagagttgagtagttgtagctgactgtaggacttgcaaagccagaaaatttgactgtctctttacagaaaagtttgccagctcttggcctaaatcatattttccgctgcatttagggctttttaggactgatcaaaaatacatgctatactggctttggtgaagtaacagaatgtgctctgtcctttaaacttacaactaattgcatgctttgattctaatactgtataatatcctgcgattcttattcatgaccattctaattggatttagtctgaagaattacttttgcttaacagattctttgtcacatttagtgaaaaatcataaaaggggaaggttggttaatggaaaagatctccatcaactaaccactaccttccttatctacaaatttatcttcttcctccgtgccatctttttttttttttttttcagatgatcttgctctgttgcccaggctggagtgcagtgatgcaatcacagctcactgcagcctcgacttcccaggctcaggtgatcctctcacctcaacctcctacataactgggactgtatgtgcacatcactatgcctgactaattttttatatttatattttttgtagagatggggtttccctgtattgcacaggctggtctcaaactgctgggcctaagagtcttcccaccttggcctcccaaagtcctgggattacatgagtcaccgcacccggcctcattattatttttcctctggttttagtagagaggatttttaagccaacttcaatcatgcccttgactctctcccttctacttacctccttgttctctttttctttttctttttttttagatggagtctcggtctgtcacccaggctgaagtgcagtggcgtgatttcagctcactgcagcctcagcctcctgagtagctggggctataggtgcctgccaccacgcccggctaatttttgtatttttagtagagatggggtttcaccatgttggccaggctggtctcgaactcctgacctcaagtgatcacctgcctcagcctcccaaagtgctgggattacaggcgtgagccaccacgcctggccatctttttttttctccttgctcttttataccacttctctgtttctgggctcttcaacatctgcctttctagttaatctttccctttagcatgaaaacctattcacttcctgctcatcctaaaaaggattcttttttgttttgttttgtttttgtttttgagacagagtctcgctcttgcccaggctggagtgcagtggcactatcttggctcactgcaagctccgcctcccgggttcacgccattctcctgcctcagcctcccgagtagctgggactacaggcacctgccaccacgcccagctaaatttttgtatttttagtagagatggggtttcaccgtgttagctaggatggtctcgatctcctgaccttgtgatccatctgcctcggcctcccaaagtgctgggattacaggcatgagccaccgcactgggcccaaaaggattctttttaatcctgaattcttctagccattatcctgcctaaggctacgattaacctctaactgccaggtcctttggaatctttttctgtctttattgctgcacttgaatgttggtttcaccctccttcagaatttcctcttctgtattttttatgtttattgatcattccttccctgcctcattcctgggcttcttttccttcacacaccccttagatgtgtgtccccagtgtttgtttctttgcctgctgctcttgccacatgacacacactgccagctaccacacacaagttccctcctatcatgtgtgtatcattgcccttataccatgttgtattaaaattatatgcttgtctcccctgttacagtttgagctctttgtgctccaagtaaagacagtgatactgtctttattatttattctcatggtctagtatagtgctttggcacatagtacaggctcaatataaatgtgtttgaataaatgaaattcagtgccttaatacacttttgtagaagcattattttatggaaagaatgaaaaagctgtaagtggtcttacatatatagtcatccagcagatacttagagagctctgggatgtgttccttgctgtgcttgttgctatggacagtacggagaaatacaagaatctattttgggtcccttttgagaacctagtgaaactgtgtacctagtgaaactgtataccctcaccctagaaaaatttacacacatgtagattttacatgtaattcttttaaaaattaattttttttcttttttttaaagaaacagggtcatgctctgtcactcaggctggaatgcagtggtgtgatcatggcttactgtagcctcgacctcctggctcaagcgactctcccacctcagcctcccaagtagctggggctacaggtgcacgccgctatgcccggctaatttttaaaaatattttatagacactggttctcactatgtttcccaggctggcctttacctcctgggttcaagcaatcctctaccttggccttcaaaagtgatgggattataggtgcaagccactgtgcccacgctaatgtaatttcatggtgttcacagtttcttcagggagttcatatacgccatgtactctattctaagcatttttagagttagagatagcaaagcacgtgaataaattcaagaaaaatggaatgttgtactgcatgacattgaatatcaaatggagtcagcgatgcaaataattgtctagattttacaaaaaaaattagcctggtgtgctggtgtgcgcctctaatcccagctactcgggaggctgagacaggagaatcatttgaacccagaaggtggaggttgcaatgagctgagatcgtaccactgcactccagcctgagtgacagagcgagactccatctcaaaaataaaaaataaaagaattgtgtagattttagtagttggaagaagttggagtgttaatgtgtaattagagaacagtgagaaataaaattctacagattgttttattctggtgtgctgttgtgttctcatatggttgtctttttggtcttgatagtgtatcagtaacagagtacgagtaacaaacagggatctcttctgaacggcgtgacattagaaaagctgtttacggcctcaactttgctgtggtttattaagacacagatatgtgttcattctggggccaagcagtaactggagagtggcacttattgaggccagtatggaggcagtacagagattattgagattaaaagaaagaaacaggtggaacggatctatgtaatggaaagctaaacagaatagttcgtggtacacagtagaaaagcattacatgtttattaagatatggtcatcttccatttattaaagttacatgttttataatttttagagtatatagaaattctctaccctatcatgtttgccaaagtcagaacaataacttcatttattaaatataaaaaaaataaaaacctctagcataaaatagaattttatttggacaaacgataaaaaaatactgtgtggtactagtaagagtaaggttgattcaagatacatgggagcagaatccaaagtgtagaaataggccaggtgcagtggctcatgcctgtaatttcaacacttttggaggctgaggcgggaggatgagttcaggagttcaagactcgccttggcaacttggcaaaaccccatctctacaaaaagtacaaaaattagccgggtgtggtggtgtactcctgtaaacccagctacttggtgggctgaggtgagaggttcacttgcagccagtaagtcaaggctgcagtgagctgtggttatgccacggcactccagctgggtgacaagcaagaccttgtctcaaaaacaaaccagccaggcgtggcggatcacctgaggtaaggagttggagaccagcctggccgacatggctctactaaaaatacaaaaattagctgggcgaggtgacgggcacctgtaatcccagctacttgggaggctgaggcaggagaatcgcttgaatccaggagacggagtttgcaatgagccgagatggtggtgctgcactccagcctgggtgacagagccagactctgtctcaaaaacaaaaataagcataggacatggggataaattgaagatttatgaagacacagctgaaggagacataaaagtagatttggctaaatggaaacatgccatactttgaatggaattatttaatactacaacgttgtcaattttcctcaaataaatctctaaagataatatattcagttttggccgggcacgttggctcacgcctgtaatcccagcactttggaaggctgaggtgggccgatcacttgaggacgggagtttgagaccagcctggccaacatggtgaaaccctgtctctactaaaaatacaaaaatcatctggacatggtggcaggtaccagctacttgggaagctgaggcaggagaattactcgaaccccgtaggtggaggttgcagtgagctgagattgcactccagccgggtgactccatctcaaaaaaaaaaaaatttttataatatatatatatatatccgtttttgtagaaattgacaaaatgattctaaagcttattagattatgtgtattaacagaagaactttggaaatttttttccacaagagtcataaaggaggacttgccctacaaaatatgtcagaattaaaacataacttgtcagctgggtgcggtggctcacgcctataattccagcactttgggaggctgaggcaggcagatcatgaccagcctgaccaacatggagaaaccccgtctctactaaaaatacaaaattagccggtcatggtggcgcatacctgtagtcccagctactcgggaggctgaggcaggagaatcgcttgaactcgggaggtggaggttgcagtgagccgagatcgcgccattgcactccagcctgggcaacaagagtaaaactctgtttcaaaaaaaaaaaaaaaaaaaaaagaattataactgtcacagtggctacgtatggagcatccaaaactgaatttatgtgggtattttattaatatgcaatatagcactttaattctggaggaaaggtggattattcagtaaatgattctgggacattggggacaaattagatacctacttcacactgataaataaaaccaaatagattaatgagaaaactgtgattaaacaaaacaacacccagactacactggagcaaatctgtgaatttgtttaattttgagtggagaaggactttataagcatgactaccagagcaaaaaaatcatgaagtaaaagatcgatacctttgattataaagagattaaagatttaggccgggtgtggtgctcacgcttgtaatcccagcactttgggaggccaaagcgggtggatcacttgaggtcaggagtttgagaccaacctggtcaacctggtgaaaccccatctctactaaaaatacaaaaaaattagtcaggcatggtagcacatgcctgtaatcccagctactcaggaggctaaggcaggagaattgcttgaatttgggaagtggaggttgcagtgagccgagattgtgccacatcactccagcttgggcgacagagtgactccatctcaaaaaaaaaaaaaaaaaagacttagacgtgtccaaaagtaccatacatttaaaaagacatgccacaaactgggaaaagtagaaaaatagttttaaaaatgaccagtgaatgtatgaaaaggtggccctcctcacttgtaatgatttaagaaatgcagtttatttttattttattgtatttttaaagaaattcagttttaaagcagtggaatatgattgtctatcagcttgcgctgaatggtaaatgtgagaaagattactactacttagtggtactgagggagttgcaaaacacttaacactgctagtgggatggtttaagtaaaacaagtagcattcttaaactctctattaggtaaagaataggtaagtaatgcatatgtttccaggacattttcagtaagactgtttactgatagggttgtgtaatgctaatatacttactatctagttttagtattatttttttctcttgtcttggatggtttcaatggagtcttatgcatgcagatatattaaaactagtaataaagcaagagaaggaatgtggataaattatctctaatttctattttgttctatttctatttcatactcctgggaaagaatattaagtgggcatgtgtacttgaacagttgttctgttttttattagaaaagaatccgaatctataaaatgttttacatatttgccagggaaacagaaaagatatttgtacagctgtaagaattggaattaatttcattttactgacttttccttaacctaattctgaacacttttgccataggtttgagaataagttgttataaaatgactactattcttcactaatagtattggcatttcaattcctaaattctgttttttgattcttgaacatttctgaatttactttttttgtcttagttcttctacagaatcattttcttcttttttctttttttatttttattttttatttttgagacagagtcttgctctgttgcccaggctggagtgcagtagcgcgatctcggctcactgcaagctccgcctcccgggttcatgccattttctcctgcctcagcctcccgggtagctgggactagaggtacccgccacagcgcccggctaattttttgtatttttagtagagacggggtttcaccgtgttagccaaggtggtctcaatctcctgacctcgtgatccatccgcctcggcctcccaaagtgctgggattacaggcatgagccatcgcacccggccttctttttttctttctctttaacttctgagctgaaaatagtaccttttataaagaagtgctcaaacgatgattggactgatttctccttatttctctctttctctctgtctctttcactctctttttagaatttttcttttttaagtagagacgaggtcccactatgttgcccaggctgtcttgaactcctgagcccaagcaatcctctttgcctcagcctcccaaagtgctcggattacaggcttaagctatcacaccaggcctaggctaatttcatattttgagatggcacaaatttctttcaggtagctagcttttcctcctcctccccacttaaaatagatcctgatccagaagcctaatggagaaaatgaaaacagaatgttcacccataaacagtatctttgtattggaatcttttctaaaacttcttttgatctttttaggagatagtgtgggaatcagcaatctagtattacgtacgtggaatctgtcaccttgtttttttaaatacagcaaacctcatgaagtgaatttccatattttttcttgttcttgttagttttgcaccactcaggctttgctgtagaatttgatgtatatttgattctgtagagcatgggctattgatcttcactcagctttcagaggaatctgattagtaagtttgagttttttattattttttagttgattttgaagtaaaatacagcaccattttaactgataccatttctaaacaattttcagttcaaattttaagttagctaatttagagcttaagaaaattgctttaaaaacataaaattactggctgggtacagtggctcattcctgtaatctcagcactttgggaggccaaggcagatgaattgcttgagcccagtagttcaagaccagcctgggcaatatggtggaaccccgtttctacaaaaaaaatacaaaaagtagccagacacggtggtatgtacctgtagtcccagctattcgggtggcagaggtgagaggatcatctgagcgcagggagattgaggctgcagtgagccaagtgagaccctggtttcaaaaaaaaaaaggttactaattgcagtgccttttatcttatttaatgggcttagtcaaactaagatgatgtattttatcttataaatgttttcccttgaattttaactgaagaatccaatttgtacctctcacaaacagaatgtattagtaaggaaaataaatactgctttttattacttaaataggatatatttttctcttagggattttttttctattttatctcactttatcgtagtgctagaaaatttaatcattcatttgagatagggagaaaattaggtttttttttttcttctattttgagacagggtctcattttgttgtccaggctggagtgcagtggcgccatcgtagctcaccataacctcaaactcatgggttcaggtgattcaccttagcctcctgattaagctgggactgcagatgtgtatcaccactcctggctaatttttgttgttattttttgtttgatgaggtctcattatgttgcccaggctggtctcaaactctgggcctcaaatgatcctcctgccccagcctcccaaagtgctgggattacaggcatgaacctctgctcccagcccattttttaaaatatattcacagcattgtgcaaccatcactacaatcaatttacattttcatcaccctgaaaagaaactctgaaccccttagcagttcctctctgtttgtttcaattttccccagctccaggcaactattgatttattgtcttcataggtttgcccattctggacattgcgtattaatggaatcatataatatatagcctttttttttcttttttttttttgaaacagagtctcactgtgtcgcccaggctggagcgcagtggcatgattgcagctcactgcatcctctgcctcccaggttgaagcgattctcctgcctcagcctcttgagtagctgggactataggcgcctgccaccacacctactaattttatatttttagtaaagacggggttgcaccatgttggccaggctggtctcgaattcctgacctcaagtgatctgcccacctcggactcccaaagtgctgggattgcagccatgagccaccgcatctggccatatatattatgataggcttgtttcacttagtatgtttcttccatgctgtagcatgtattagtacttctttctttttcatggccaaatattccattatacagttacacaggtacactacattttgtttattcatcagttggtggacattttcattgtttccaccttttgatttatacataatcctgctgcgaacagtgacttttaaagtttttgtgtgggccgggtgtggtggctcatgcctctgtaatcccagcactttgggaggctggggctggcagatcatttgaggccgggagttcgagaccagcctgcccaacatggtgaaaccctgtctctactaaaaatacaaaaatgagctgggtgtggtggcgtgcacctgtaatctcagctactagggaggctgaggcagagaatcacttgaagctgggaagccgaggctacagtgagccgagatcacgccactgcactccagcctgggtgacagagtgaaacttcatctcaaaaaaaaaaaaaaaaaaaaaaaactgcgtgtggacataggttttcaattctcatgggggtgtgtgtgtatgcatactcatacatacatacacatacctgcaagataattgctggctcgtatgctaaatctatgttgaaccttttacataactgttgggctgttttgttttctttttattattttttgaaaatagagttggggtctcactgttgcacaggctgatttcctgggcatagtggctgtatcattttacaatcctacatagctgtttccaacgtagctgtatcattttacaatcctactagcagtgtctgaggtttcttatgtttttcacatcctcaccagcatttgttattgtctgtctctttgattatacccatcctagtgggagagtaagaagtagtatctcactgtagattttttttttctgtttacaactttactttaaaaattatatatgcacacatggtaaaaagttcaaaacgtgtgtaccaaaagatttaacagtgaaaatagaaaataagtgtggtccttgttttcttccaccaaggcaaatattgttataatctcctaaacaacttgtcttccagatttctcattttcagtcaatcttgggcattgacataaagaaattcttagacattgcttttattagatcatctcatcccttgctcaaaatcttcagtggccactgttgtttacagaataaagttgggatgctatacagggcccttcccagtggaacttctctttttcaaccttatctctcattatttcccaatgtttttttttttttttttgagacggagtctcgctctgtcgcccaggctggagtgcagtggcgggatctcggctcactgcaagctccgcctcctgggttcacgccattctcctgcctcagcctcccaagtagctgggactacaggcgcccgccactacgcccggctaattttttgtatttttagtagagacggggtttcaccgttttagccgggatggtctcgatctcctgacctcgtgatccgcccacctcggcctcccaaagtgctgggattacaggcgtgagccaccgcgcccggcctatttcccaatgttaatctacttattgacctactaagctggcatgttctgtgtgttagacatcaccaactttgtgccttctttttttgtttgtttttgagttggagtctcactctgttgcccaggttggagtgcagtggcgcgatcttggctcaccacaacctctgcctcccgggttccagtgattctcctgcctgagcctcccgagaagctgagacgacaggcgcgcgccaccatgccctgctaacttttgtatttttagtagagatgggtttcactgtgtttcccaggctggtctcgaactcctgaccttgtgatccacctgccttgggctcccaaattgctgggattacaggcgtgagccaccgcggccccctgtgccttcttcttttactcctggatttaatcccaacgtgaagaatctaccttactaactagagttttagatactttttcaaaaccaagcccacatctgtcctttttagagtcttctctgaccttccctgctcattgtggtttgtttttattgcctgtaacaatggctgttaaactttacattttaaattaatttatgtttgtatgtatttatttgttgagaaagggtctctctctgtcacccctactagaatgcagtggcgccatcatggcttactgcttcctgggctcaagctgttctcccatttcagcctccccatgcaccaccctacctggctaatttttttgtttgttttttttagtttagtttttgtagagacagatgtctcactgtgttgcacaggctgatcttgaactcctgggctcacttgatcctcccatctcagcctccccaagtgctgggattacaggtgtgagtcaccatgcccagactttaacattttctttttagtatagaataggtcagtttttttccctctgatgagatcccatgctgactcttagttaaaacaaggctttggttggaagaagagctagtgatgtcctagctccctacttactccactttcccttgccttctggggtgtcctgaagacatcatagggtgtcatgaagtacagttggagaaccagtggtctccatcatgtaccaaacactcatcttcacgaagcagtatgtagtgtcttttttaccggtatattttctctctcccaatgcattaaacttttctggagttcagaaaacaaatttatagaattaaggaaatgcgtcccccccaaccatggtgtctagtatatatacagtgacttacagataacaggtgttcaacatatatatattcctttgattgatttttgaaaagtttacatgtatatattttttatatacggggtctcactctatcactgaggttggagtgtggtgatgcagatcttggctcaccgcaacctcctcctcccaggctcaagtgattctcccacctcagcctcccgagtacctgggaccacaggtgcgcatcaccatgcctggctaattttttatatttttggtagagacaggattttgccgtgttgcccaggttggtttcgaactcctgagctcaggcagtccacctgccttggcttcccaagtgtgagccaccactgaaatacttatatttttaaacttaatttatttatatttattatatttttatgtttttatattttaaaaaatatttttatactcactagacccaattttatactcctaaaccagggaataactgtttttttttctcttacataggcatgataccatagacaatgattaaaattgtaattaccattcatttcttagttttgtggctgggacactgatgtcttcaaatgttagtttgcaaatacagtcagccctctctatccatgggttacacagctgtgaattcaaccaaccatggatccaaaatatatgggaaatacgctggggctgtgggtcacacctgtaattccagcacttagggaggctgaggcagatggatcacctgaggtcaggagttcaagaccagcctggccaacatggcaaaaccctagctctactataagtacaaaaaattagctggccatggtagtgcacatgtgtaatcccagctactcgagaggttgagacaagcaatttgcttgaacctgagaagtagaggtttccatgagctgagattgtgtcactgcactccagcctgcgcaacagagtgtgagaagaaaagaaaaaaaactgtctgaaaagaaaaaaaaaaattatatgggaaatcaaaagcatctatactgaacatgtacagactttttttcttgtcattattccttaagcagtaccacaactatttccgtagcatttactttgtattaggtattataggtaacctagaggtttaaagtatgcgagagtatgcaaatactacaccactttgtatcagggacttaagcatccctggattttggtatccctagggggtattagaaccaatcccccatagatgctgaaggacaactgtagtgtgtgttggaataatttattttcaaatggatcatttggagaacactattctttaggaaacatagcctcctaagttctgttccatacatccctttcacctccacggcgttgtagcatcctgctttcatgactgtgtcatcactcggaaggaactgcttctcttccagaatgcttttcaagatctactctgaccacagctataaactttacacttctattctcttcttgcccctcacagtgttctctgttcctctaagatcttaaactctgtctactcctaatccagcctgctgggtgtggctggagaaagtcccactggggggctgattagttaggaatgtagggtttccagctcttgctggagcctcagaagagttcagcagacttttttttttttttttttccttaaacctatttctgcagccttgatgaccactccttccagtccctcacctatttgctttattcatggcagaggctctttcttcctgcttgtcagtacaaagaggcaggattcttcacctggatctgtggattctcaaagaatttgtggagagaattcagggcattgatgaccttggatgaagagaaatttacatctttatttacactaaccttcaagtgaaatttagcattttttgccatttaaaaatatgggcaacaaacaactagtagtattagcagtatttatgacttaagcacctatagaactcagttaatttcatatcgcttgatgttatgggtatctcaaattattattttatgtatatatatttttgagatggagtctcgctctgtctcccaggctgagtgcagtggtgcagtctcagcccattgcaacctctgcctcctgggttcaaacgattctcctgcctcagcctcctgagtagctgggattacaggcgcacaccaccacgcctagctaatgtttgtattttcagtagagaaggggtttcaccatattggccaggctggtcaccaactcctgacctcaagtgatccgcctgccttggcttccaaagtgctgggattacaggtgtgagccaccgcacccggcctcaaattatttttagaaacagaatcttgatatggtatccgctctggccttgaacttgtgggctcaggcagtcctcccacctcagcctcctgagtagctgggattataggcatgtgccactgcaccaggcttcaaattattatgtatgttcatcacctctttaaatttataatagttattaaacctgttactggatcttaatatttaatgctttaattaagaacatgtatgttactatgccaacagatttttttagtttttgataactgcatttcattgttacttgttctcatttgatttcctgtgtattttacgaatttaagtacattctgaatacggtttcataggcttccctaaaatattgaaggggcccatggattaagaaaaaggctaagaatccctaatctagaggctccccacagtcctcttttgtcatcatacccctaccccattctagcctgaggagcgtggctccacctgtgcccttggttttgttgttccagtccatacatcctgcacccttaactgtgtttcttatccccaacttgtttctttgtgttattcttcagtattatagtctttaatataatctgtataatacatggtgtagtagtatatgctcgtagtatacaattcagttagaacagatgagtattcaatgaaaagataatctcctctctaacccccagtcccacttccctggggaagcctgtgttcttgtgtacaattcagaaaatgtttatacacatattttttatttatttattttttgagacggagtctcgctctcgccaggttggagtgcagtggcgcaatcttggctcactacaacctccgcctccctagtagttcaagcaattcaaggttcaagcaattcgcctgcctcagcctcccgagtagctgggactataggcgtgtaccaccacgcctacctaatttttgtatttttagtagagacagggtttcaccatgttggccaggatggtctcgatctcttgacctcatgatccacccgcctcagcctcccaaagtgctgggattacagatgtgagccactgtgcccagcctgttgatttaattttaaacagagtttcgctcttgttacccaggctggagtgcaatggtgcgatctcggctcaccgcagcctctgcctcccaggttcaagtgattctcctgcttcagcctcccgagcagctgggattacaggcatgcaccaccatgcacagctatatttagtagagatgggggtttctccatgttggtcaggctggtctcgaactccggacctcaggtgatccgcccgcctcggcctcccaaagtgatgggattacaggcgtcagccactgcaccccgcctatacacatttttttgttttttgtttttttgagatggagtctcgctctgttgtccaggctggagtgcagtggcgcgatctctgctcactgcaagctctgcctccctggttcacaccattctcctgcctcagcctcccgagtagctgggattacaggcgccggccactacgcccatctaactttttgtatttttagtagagatggggtttcaccgtgttaaccaggatggtcttgatctcctgacctcgtgatctgcctgactgggcctcccaaaatgctgagattacaggcgtgagccaccgctcccagctatacacgtatttttaatgccactccagtctatgttggaaccattttacttcccctttcttattttcttcttgtgttcttgaaggcctagatcagctgttgctgataggctgtcactgtcactttagaaagcccagagccttttgttccttagaactttgtttttaattgtattgtagcactcattgtattcgattctaaaagatttgcttcatttctgtaactagtctcttacacccaggagctcctagttcctacaggaaatgctgggaattgtatcagtcaaatgtgaatccccacctcgtccagacttatgagtgcattgtaggtactcagtaagtgctaaaaatgactaaatagtcccactgataccaatctatatactgatactttatatagtatatagattggtccacatataacgatgacacataatgagaaactgtcttaaaaagttgttgaaagtgccgcaggaataggaattgatcaaaacaatatgattttttaggtttatatggaactttgatgtttgagaaaaggctgatttagttgagaagaaatggttagctgaggattttgatgacttctctggaagcacatttgagggtttgtgatgttaaatctgatgttaatgattatttcatccagttttatgtcattttatagtttttatacatttaagtatatttatttctaatgtttaacactaccattttagttatttgaccattattctggccctttaaaaaatgctcagacaagtttgaatgatttttcagaggcattattggctcagaggtaaaagaggaaagattgagaagctgaatatgtactctgtttcctgggtatggggctggggatacccagaagaggttcacacgttggtcgagacatttctttatgaccaccagcaggtggcatcaccggcccaaaatgactaagtttctgcccagaatcagaagagaaggtgttgagagcccactgctgtgggggtagcatggaggtgggatacaggggctggaggtgatacaattttgtttcttcctccaacatcgcctgctagtctagaggcttttataaattgaaaaactaattctttatcatctcatctgatggtttttatgtttttccttttttctctctatacctgtagttccttcagaaacaggtaacacttttctaatagtcacgttgtattcttgcatcttgttgttacaatgcttttgtttctcaccataggggatgatggaaaattaatattctttgacttatggcattggtaaaatctgcatgcaaattcccacagttgcctgtagattagagccagttgtttttttctcaactttgcaggaatcctggttacaacattgtactatttactaccaacagtgttttttttttttaaaatccagacttgctgggcatagtggctcatgcctgtaatctcagcgacttgggaggctgaggtgggaggattgcttgagcccagggctgcagtgattgcggcactacactccagcatgagtgacaaagaccccatctctgaaaaaacaaaaacaaaaacaaattttttttaaagaaacagaaacaaaaatccaaacttgtaaccactgtaaaacaaatcagaatttacgatagtggatattattaatagtgcagaatggatacccagatcttgcttcctttctagctaatgatgcaatgttggcctgaaatgcattacttatagccagggattttctcagcatcctgatgatatagcctcatttcgtgctaactctccacttctgcacatcttcccctaagtcctttactcatctttagaaagagctacttttggtgaaattttaaaaccaaggaatatcattctttatagaatcacacttctgtgttttccccttccccatttctgtctcgaaagcgacagactgctacataacctgtgaatacttttttttaaaaaaagtttggtattgtaaacagaagatttaagattaaaatgtagcattgagaaaaatagatttattaataatgccctcttaacacaacctaaattctggtcagtggaataaagcctgggtcctaaagttttagacgcttgcttgcttttccacactggctcttacttggggatccttttagaaatttgtttagaataatactgtaaaaacatatttaagctactttgtgtgtacatttgggatcttttggtttgaagacggcttgactcaagactttctaaatattttcacacacacacacataccctgtagtgagaaaaaaatccgtttatatggttctataaaaatctctagctgcttcgagctttaatttcttgaatcaaaagagtattgtttttaatactgagcttctatctaaataaatgctttatttacttaaatgtgtgcttttcaaaaactagtatgattaagacattaacaggatcttagacgtaaaggaacagtcctgttgcttcttccagaagataatatgactcgtttggaattttcctatagtgtagttttttgtctagtgttgtgagaattaaagggatttcaggatcttaaggtaggttattatttgatgttttcttggaacattttacattcttgaaaatacacatggctaaattaatttttgccagcaatccacataactttaagataatgtagagaagaacgtgattcaggttagtatcaaataaggtcagatttctagtgccatcagtagctttcagcaaagatgaggtgttggtaagatagcattagtctcttagaatctcttagagagattttccaaaattcagccatttctagtgaatgctccattccacccccagctgagtcctgctgctctggggaactccctcagcacactcttggctcttagaattgctagcaatgggagtagtgctgctggtggagctggcagctaagcccagaggtggattaatgcttttattccctgatgtacaggtacacacactcatacctacccacacctagtttgggataagaagaggttagaattagctaggcttgaagttccatgcttaaatttgctggctcagatttcttattttggcatcactttgcccattagggagacaatgacagttatagaagcattgccaaataaaaaatccatctggaataacctcttttgtaggagtattgtgtgtttagttgttgattcgtcccttcctcctcttagtggcaacttacagtactgggaaggaacagtggctgggagcttatattcctcagcagagccagatcagcagaagtattactccttagttcgtagtaggtggtaccctatgggtccagtcatttaaatgcaagcctgtatctacagagcgtttcctagtgccatcattgcccagtgggcctttatttagctgagtctaactcccaactagagaaaatttcctgtgccagacagcagtatggtcagctaacatgtggatgctacatttgctttcataagtcagtactcttcaataacattagtagaagagaagaggacacaaagtgagagtgtgttaataggaagtccaggtatgcctgctacctgaactttctgagacaggtaatactgtagggcctgaactttgtagcagagtggttatatatgaagaagtgggttctgggaggggttaaaccacttagaatggcttcatttactaatggcaagagtttgctgggatattgaccactgtacatagacatgaatatggaaagttaaaaacaaaatccacatatatttggctgcaagtactccgaaggtatatctaattagtgcatccattaaacaaaagagatattttaggccgggcatggttgctcacacctgtaatcccagcactttgggaggccaaggtgggtggatcacctgaggtcaggagttcgagaccagcctggccaacatggtgaaaccctgtctctgctaaaaatacaaacattagctgggcgtgttggtgggcgcctgtaatcttagctacttgggaggctgaggcaggagattcccttgaacctggaaggtggatgttgcagggagccgagatggtgtcactgcactccggtctgggtgaaagagcaagctccatctcaaaaaagaaaaaaaaaaaaagagatatttttgatggattgatagaaattttctttttctttttttttttgagacagggtctcactctgtcgccaggctggagcacagtggcgtgatctccattcattgcaacctccacctcccgggttcaaacgattctccttcctcagcctcccgagtagctgggactacaggcatgtgccaccatgcccaactaatttttgtatttttagtagagagagggtttcaccatgttggccaggatggtctcgatctcttaacctcatgatccacctgcctgggcctcccaaagtgctggtattacaggcatgagccaccacatctggccagaaattttcttggtcacttctgagacatgcagagtaattacctgtaatataatttaatgaattatgtcaatatattaaaatatgcttcatgtgggctgggcatggtggctcatgcctgtaatcccagcactttgggaggccaaggtgggggtatcactaggtcaggagatcaagaccagcctggctaacacggtgaaaccccgtctactaaaaatacaaaaaattatccgggcgtggtggtacacacctgtagtcccagctactcgggagactgaggcaggagaatcgcttgaacccgggaggcagaggttgcagtgagccgagatcacgccactgcattccagcctgggcaacagaacgagactctatctcaaaaaaaaaaaaaaaatgcttcgtgtggcttaaaattatatgaaaagaaaatacctttactgatagtcatctgtgattccatttgctaaattaaacgtgaaagcatacttttactgaatactatatattccgtatcagtttagatagcagtttatcttcacatacataagttttaagtttacctttattatagtgcattggtcttttgttttcatcaacctaaattatgttcaataaatgtttctgttagattttaagttaaacaattatgtgaaattcatttttcgtaattgttttttaacatatgtctttgttggtaattcacgtgtgtgagtgtaactgattgccagattatataaactttcaaccaaaaccattctttgcagatgcttttactgactctgctatcagtgctaaagtgaatggcgaacacaaagagaaggacctggagccctgggatgcaggtgaactcacagccaatgaggaacttgaggctttggaaaatgacgtagtaagtaacatctttgtaattattgctagactctggtcagtatgacatcctgtcacttggttgtaatttaaatgtgcttttgttgttgttgttattgtagtgagtgtatttagagcagcaggtttgttgtataactagagactttctcccaagcaatatataaagaaaaatgtttgtcattttacttgtaggggttaagcaggagtactgtctgttcttgtggatgctcatgaattacttctttgtgattaaaataaataataagaagtagcttaaattaaaattagaaaccatgggaaatgccggtgtgttttgctttaacacccagccaaataaggtagcctaaggaaagtggtgtcttaattgttgacttcacctagagaagaggttgaagtaggacattttaagcctcttgtctgaagaaaaggttgtcattaagataaataattaggttacattggaattaaagcattacataaatttcttggtcttaaatttggattattctccacaaaattcttttatttctaaaacgcctcttgtcacatactagttttgtttctctctttaatgcattatctgtacttgaagtgcttagctgggtatgctggcacatgcctgcagtcccagctacttgggaggctgaagcaggaggatcacttgagcccaggagttggagtccagcctgaatgacataaggagaccccttctctaagaaataaaaataaaaacaaatacttaataaagactctgtctttaggatagagagcatagagatataaagcaaagtgtcttgccaaaaatgagtgttatggtaccaatatttgagtagaatgaagaatcttccattgagtagaaagagaatttgtaacatatctgtgtttgatgtttaaggcataacagcttaataatgacactcttcctcagacaggaagcctgaaatgtcctactttgacctaaagtctagtaataaaactggacatacacaggcaacatgtcattaattctcaaactttaacaaatcatatataacctaatataatggttctcaagtctgtacatcacgtcacctgtatgaaaaatatgaggaaacagagacttcttttacactattggtgaggtggataaattgatagagtctttctggagagaatctggcaatgctaatcaaaatttaaaatgcacatacactttgttccagcagttctatctctagtaatttatttttgccctcatatatccataagacatgcaaataattatatgtgaagattttttttttttctttttctgcagagacagggttttaccatgttgcccagggtgatctggaactcctgagctcaggtaatccacccacctcagcctcccaaagtgctgggattacaggtgtgagccatcatgcctgaccaggatttttttttttttcagcattatttcttttgttgttgttgctgttgttttgagagatggagtctcactctgtcacccagactggagtgcagtggtgcgatctcggctccctgtaacctccacctcctgggttcaagtgattctactgcctcagctttccaagcagctgggactataggcgtgcgccaccacacccagctaatttttgtatttttagtagagacggggtttcaccatatgttggccaggctggtcttgaactcctgacctcaggtgatctgcccacctcggcctcccaaagtgctgagattataggcgtgaaccaccatgcctggccatagcattatttctaatagtgaaaaattggaaacatgctaagtgtctatcaatatagcatgagttagatttatgatgtcaccattcaattgaaacactacatatctcccaaaaagaatggtgttccaatatggaaagatatctaagatttattaagagaaaaagcacattgcagaacactgggatcctatttgcttttttttttctttttttgagacagagtcttgctctgtcacactgcaacctccgcctcccgggttcaagcgattctcctgcctcagcctcctgagtagctgccaccatgcccagctaatttttgtgtttttagtagagaaggggtttcaccatgtttgtcaggctggtcttgaactcctgaactcgtgatccacctgcctcagcctcccaaagtgctgcgattactggcatgagccaccgcacctggccatgaaatttttttttttttttaaagagctgttcatattcttattgcctagaagatgtctgaaattacacccaagaaactctttttgagacggagtcttgctctgttgtccaggctggagtgcaatggcgtgatcttggctcactgaaacctctgccttccaggttcaagcgattctcctgcttcagccttctgagtagctgggactacaagcgcccgccaccacatctggctaattttttgtatttttagtagagacagggtttcaacatgttggccaggctggtcccgaactcctaatctcaggtgatccacccaccttggcctctcaaagtgctgggattacaggcatgagccactgcgcccggctgaaactctttttttttcttttaagatggagtctcgctctgtcgcccagacttgagtgcagtggtgtgatctcagctcactgcaagctctgcctcccgggttcacaccattctcctgccctagcctcccaagtagctgggactacaggctcccgccaccacacctggctaattttttgtatttttagtagagacagggtttcaccatgttagccagcatggtctcaatctcctgacttcgtgatcctcctgcctcggcctcccaaagtgctgggataccaggcatgagccaccgtgcccggccagaactcttaatagtagttatttatgcacgctgggattggaagacatttactttttactggatgtctttccgtattgtgtgcttttttttttttttttttatgtagggcatacattacttaagtaattttaaagcctccataagtaagtgtgatttcctgcccatgtgtttggcaaaaggaattgcattggtggtagacttacattatagtcttacctggagtagcacaggaggacccaaggttaataggtgaacttcgaggcaagccttagcattgaggttgccatcagcattgcttggttgatgtgttcattcttctgggatggattacaacctttactggactttatacttttcaccagtaaggctttaaaaaaggagttgaaacattagagaataattatccaggcagtaatattcactggtaaatagtcttccagcctgtggcccaattggttgattcttttacgttaaagaatgcagcctcagctgctctgcctatggagtaggattcttttatttactttcttaataaacttgcttgcccctggctcccccccaccaaaaaaagaaggcagcctcccttttgcgaatggtaatttcctatagtttcctcgtagaattgtggagttacctatgctgaggttataggttagggtattgagatccagagttgccacttctgaggtgtcacaactgctaatggtaaaaccatttctaaagcccagttcttgtgactttgtccagtgattgcctgttcaccgtttcatgctgccttcccatttgagcattcccaggaggaaggggaggttgccagggacctagtaccatagtccgaccttggaatcgttgaatatgagggaaagcgttggcttctcccttctttctcccaaacattggaagtatttttggctgttaaaaagcaccccttgttccatgtggaatcccttgtttaaaagaagtaaaatatgtacctcctgtcctccacagacctgaggaccagtgtgatctcaagaaggttacaggtaaatgtagatgtctctaactgaaaggtggcttttacaggttagagaaaagagagaaccctgatctgaaggctattttatgaagtaattaaaatgttctaaactttaaaaataactgctcaaataattgtgttgtatagttacttatcaactggaggggctgataagtatttttctaaaacatttttaaggaaattttttcctattttctaatttgctaattttgctcaagtagtttgttagatattgttaatatagatgttggttataactgaatgaaagggaacaactactttgacattttgaaaaacaagcttcattttcttctagtctaatggatgggatcccaatgatatgtttcgatataatgaagaaaattatggtgtagtgtctacgtatgatagcagtttatcttcgtatacgtaagtttgaaaagtttgtttttattttagtgcatttgtctttgattttcatcagcttaatttatgatgaataaatgtttgttagtttttaagttaaacaattacatgaaataatttttctcttattaccaactgtgataaatttccattaaaaaaagggaataaatgtagtttgcctataccctgtttttatgctctaaacaaattttggttttgtctttttttttcttttgagagggaatctcgctgtgtctccaggctggagtgcagtggtgcaatctcggctcactgcaacctctgcatcccgggttcaagcgattctcctgcctcagcctcccgagtagctgggactataggcgcgtgctaccatgcccatctaatttctgtatttttagtagagacggggtttcaccatgttggccaggatagtctcgatctcttcacctcgtgatccacctgcctcggcctcccaaagtgctgggattacaggtgtgagccactgtgcctggccggttttgtcttctaagttgttaaaaaatatctaaatttgcaagggcagagattatggtgaacagtttaaccagtttttgaaatatgttcctctggagaaaaggtaacagaaaaaaaagttagaattttgatttataaatacacagatcactataacttttagttttagttttagttttagtttctgtttttaccagtattctaaactctaaactttcttagtagttgattatgacagatacataaactgtggctttaaaggactcattttgcttttcttttcctcatgtttcagagtgcccttagaaagagataactcagaagaatttttaaaacgggaagcaagggcaaaccagttagcagaagaaattgagtcaagtgcccagtacaaagctcgagtggccctggaaaatgatgataggagtgaggaagaaaaatacacagcagttcagagaaattccagtgaacgtgaggggcacagcataaacactaggtatttaaaggaaatcatgatgcagtattttggatacacaactcaaggtctgtgtgagacggtgtattgttattatatttcctcttcctttaatatagcttaggtagagaatgcaagtagaattggtttaagatctgttagagaaaaggttatggtgatcttggaaaatatgcttttgagagtaagctctgtggagccaagtgttggtatatcacggtgagcaatccaagatcttgaagagcttgttaaaatagttatctggtgggggacacgtgtaacaatcacagcagtacaatatgatttgcttggttaaaggcatgttcaaagtactaggaacatacagaatgaggaggagctagcataacctgtagagtcagagaaaacctcattgaggaggtgacattttgtgataagataatagggtctttgacacttagagaagagttgggagaagagtttatcacctgatgaaaagccatgtacaagcatggctatgagaaaatttggccagctcaggagagggctggttgttgcatgtgtctggaacacaggatctgtgtcaggtgcagcagtggcagttgatagtaggaactgaggtcattaaaggacttggcatgtcatgctaaagagcaccctgttggaaggagatggggtgaataaaccctggggcattgaggactggctgagacacagagaacagttagtgcactgaaatagttcaactgtgagaatttggtaaccacctagttaagggatgagcctgaggtttatttgataactaagtgacttaatggatgtactggtaagagagagaggaaacatggagcaagtttgaggggaaaaacagtgactccgtttgtgcagctaattgcatatgtgggcttgtgggtctttcatttattcataaacgtgttgagaaatacctgctacctatctagtaaagtaagagatgcatcctctcttaaaggcagtcagcttagagtctggtgatttgaattgacatgtccactgatagatgttgacactgtgagactggcggttcagtttgaggtttcatcagcattgccgatattggagccatgaaaaaccaaagaacagccagtgagagaagagatctcagagaaaataaaattgagaaagtgaaggacaaaaaatgttgtgaagatagaccaagattgatggaatcagccatagagaggtcaagtgggatgagaatgagcacgcatctgttaaactttgtgcttaggagcagaatctaagggaagggacagtccagaggttagaactcagggtaagatggaagaacaggggcatctgggagtgaggcagtttggtttagtgtagaacctttttgtaacaagcattcccttctgtctagatgacttttagatatgtttcattggcttggtaccttttagaataaaatgatttagaggatctctcattttcagggaaaataaatatattcctcctggacaaagaaatagagaagtcatatcctggggaagtgggagacagaattcaccgcgtatgggccagcctggatcgggctccatgccatcaagatccacttctcacacttcagatttcaacccgaattctggttcagaccaaagagtagttaatggaggcaagtattttgaccagacttgtcaatatcattgataaaatagttttctaaatacttaaaatacttaaaatagtttacataactgatatgaatgtgcactttaatgatttggtgagtagctttcacttcagcattacttaaaattggcttttgtggatattaaattagtaaaacattgtatatgtcattgacatatatattatttagcatgatgaaatattcatgatgtactaagataaagtgctacatttaacccaagacaatcacttggccaaaaacacttcacatataaagaaattggaaactttgggtaggttctcaattttaaaaacactggataataaaattttttagacataatttatatggaaaattctaacctatgtgcaacactgtggttaatatagatcaattttcattatttgtttctatattatgcttacttcaagaaaggatctgaggtaacttataatacaagacatgatcaagagtcatgtgaagaaagtgactagagaaatttgcttaaaaaacaacaaaaacaacccttagtctaagggtggatgttacagtttagcaacttaagtaaaagaaacctgaatctttagtaggaagacattttttactctacctctaaatctaggttgaatatatcttgtaggttgtggatcttttccataaatcagggatactgaacaacagttctatggatggtatggaaatagtaatagcaatagtatgttactaactttgtgggaaaagagtggacattcaattttagctatttaaatttggaaagttagatgaaaatagagaacactaagtttccaatttcatttgttttcattgagtcttttctccagaattcctctccaaatggacactcttgagtattttcagtacttaatattgggggtgaaatttctttgctcactgaggaaagattttagttgtttataaacagaattttaaagttaaaaaacctgaagggggctgagaaatatatgatacttaagtgtgtggaaccctatggagaggagacctggactgtttgataagattaaggtaagtgatatgtaatgttaaatactagctgtatctttacctaggcatatccatcagtataaatttatttggtgatgactgctttgtagttgcagtatttattaagcagtcgcttagataagtgtttaactgtataaattatttagaaggtctccctttttctagtttaatgaggtcaagactttttttttgaaatagcaatgaatattatcatttgatactcacaggagtcacaaactctagaagagtaatgttttatttctacttaaatgggacttgcttaataagattccaaactgagttctgggttcaagtgtaaacctgatgaaaatcatagataattgtaaggaaccagcatttctaattggatataatagctactgcttattttcgttatgcctcagagttaaaactaatacagtaaataatcttactcctgagtaggaattattgtgatttattatgtgaaattatctagtgtatgttatattcctttaaacaaccagttactgagaaacagttatagaagcaggattaataggcaaagtcttaactgtcttcttcaatagtgtgtatagatcctaattaaccctttgggaacgtgtattcatttaaacagacttaatcttaaggaggttaaagtaaaatgtgaatttatgtcagttaagttatgctaaaacttatcacaaatcaaatgactgtcctcaaagggttaaaatgtacaagaaatcatttttgtcattttactttttttctgtttacttttttccctcatttttttctttagtttttatactttccttcatatcatttgttctgtcaggtgttccctggccatcgccttgcccatctccttcctctcgcccaccttctcgctaccagtcaggtcccaactctcttccacctcgggcagccacccctacacggccgccctccaggcccccctcgcggccatccagacccccgtctcacccctctgctcatggttctccagctcctgtctctactatgcctaaacgcatgtcttcagaaggtacaataccacaatttgttcatgtttttgtttgtctttgtttaactcctatgtgagtttataattacaaaatagtttcctcttcattatttaataacctataatttctgtgttttaactttagtttattaaaactatttctattaaccttttgttcattagagagaaatttgataaatgtgtgaagctataaactctcttgaattgttgttaaaaagggggtttatctctgcctgataattatgcttctttacagccccagaagggtctgccccacagccttccccctccttatttgcactgtatacagtagttaaacaaatgaactttcttcagccagtcttgaacttaggttcattttacagctctttggccaaggtcctagtgaaccttcctattggccataagcagggatggtgttttctgggtcttttttgagagcgacagcccatgtagctgactttgcgtgtctgcccttagattaaagtagttgatttttagaatgccagaagaattctaaatttaactgagtaatttttttaaagttagctttgcaatcttacatagtgaaaggctgctttaatctggaagaagtccttgatctgagataaaattgataaaaacgacatatgaatttgaatatttagctatttctttcctcgtcaaaaataagaataaaatcttgtaattcttattcagtatttggcgctaaatccatcattgccacatatcaaatacagggatatgttgtagaaaggtaacattctaatttaaatgccacccatatattaaaaacctgttttctgaatcataatgtccttttgatactagttctgaatatttgtgttaaaattttaatctgatttgttcattaaaattagttaatattgcttatgttgggactaataaagttttccgcacaaaatgtgtttctcctgcttccctggagaaaactgtattggctacttttaaataaattgttaccatctaagcaggcaggtcatatgactttgactgaagcatctaaccttgaagagcaagttccactgattttcaaggtgacttctttgctcaaaagggccttaatagtggtcactaaatgcaaaattctgttgatatttttcttgtagtccatcatttgagtaagcgatgtttatttaatgagaatatattaaataaaacatgatcattaatgactgtgaacatctttattacattaagatttaaggactgctcatgtattaacttcacacagaaatatactttctgtgtcattcagagatgttgaatatttccatttgaaaattatagtgtataacattagcattcttctaaagatcatgttcgtgtttaaattcctgttggaagccaggcatggtggctaacgcctgtaatctcagcactttgggaggctgaggcaggtggatcacttgaggtcaggagtttgagaccagcctggccaacatggtgaaacctcgtctctactaaaaatacccagctacttgggaggctgaggcaggagaatcacttgaacctgggaggcagaggttgcagtgagttgagatcgtaccactgcactccagcctgggcgacagagacagactctgtcttataaaaataaaaataaaataataattctattggcaacatatattaatttgaagttctaaagagtttggcagccgggtgagagagtgaggagatttggctttgacattagggaagttttcgcttggtgttaacaccagtaggcttctctgatgagggccattctgtccactcttttacctgatagattggtctaatgcacagtagactgatttagaaagagtagtcactagtggcatggcagaatcaataatgtagaattttgacaattcatatagtgctgatttctcccccaaatgtcagttattttggtcatctattaatagactaatacaagtcatccctttaatagaattttcagctcacagcctgctaagcctaagaaactgcttacaggttactgcttactgttttaagccgagttttaaaattgatgatcatgatagaagagataaataaactaaaattttagagaaatttaagaagggtatgtacatatgttttagtggtatcggggtgtatagggattaatagtcttctgtttaaattttttttttctaattttagaagtaatgtagaaaattcgggtcagggaaaggtaaaatatatggaaagttaaaaatattttatcatgtagtcataatttctagtaacatatttctttacaaataagacatagttgaaacagattgctacagttcttttaagagttgacatcttattgttgatttcttaccaccaacttcatccctccctttctttaaaaataaagggaaataataaaatttatttataaaactttgtggcattccacaaaataattctgaaagaattagtatggccaaaaaaatatgtatggtgttttttttttttctatttttaaccaaggaaaaactgtagagtgagtgagtgtgtgtgcatgtgtgtgtgaatgggtgtatttagcagaaaagtagtactgatgaatatcatggaatttatgtgatgttcactgtttcttccttagggcctccaaggatgtccccaaaggcccagcgacatcctcgaaatcacagagtttctgctgggaggggttccatatccagtggcctagaatttgtatcccacaacccacccagtgaagcagctactcctccagtagcaaggaccagtccctcggggggaacgtggtcatcagtggtcagtgggggtaggtaacacttgggcataatgatggtactcattttgtcattacactagatataaagagggctgagctacaactctgtttgaggaagtgtaagtatgtatatgttaaaaatagtagaatcaccaggaattgggaaacccatatttttattctgggctctaccacttattcatcatatattaaagcaagtcagacactcattctgaagttgagatttcgcagtgagtaaagtgttaataattcttgcctagtctacattatgggattgtgatgagattcctataaggttcataaatacagatatattgtaaaactataaagttttgtaaagtacctctctaatatgaggcaaacacagtatgtaacactatttggagggaccgtatttccttatctttttagcagctttgtttatcagtacattctataaacatttatttttggcttacattgtagtgtgtttctatagcatctgtatatggcactaattcccaactatatttccataataaggaatatcaaatacaaataaagggtccaagttttatttgtgattagcataaggaatatgctgacagcagctataaaagtataaaaattaggctgggtgtggtggctcacgcctgtaatcccagcactttgggaggctgaggtgggcggatcacaaggtcaggagatcgagaccatcctggctaacacggtgaaaccccgtccctactaaaagtacaaaaaaaattagccgggcatggtggcgggtgcctgtagtcccagctacttgggaggctgaggcaggagaatggcatgaactcgggaagcggagcttgcagttagctgagatcacgccattgcactccagcatgggcaacagagcaagactctgtctcaaaaaaaaaaaaaaaaaaaaagtttaaaaactagacgttgacatgattttacaataaggctgactgcttttgctactttgccaatcagtccttagtgctttgttcccataactgtggtaagcaagagcttacaaagaatacttaaaacaaacaaacaaacaaacaaaaaaaacactttttctcttttaatcagtccagagaacctttaaaagaaacaagatcggccagttgctgtggctcatgcctgtaatcccagcactttgggaggctgaggtgggtggatcacttgaggtcaggagttcaagactggcctgaccaacatgatgaaaccccatctctactaaaaatacaaaattagctgagtgtggtggctatttgagaggctgaggcaggagaatcatttgaacccaggaggtgaaggttgcagtgagccaagatcacaccattgcactccagtctgggtgacaagagcgaaactctatctcaaaaaaaagaaaaaagaaacaagatcttcaagcttaaggaaacaaaaacaaaactcagctgtgttaaatctgtttttagttgctatacatttctgctcagcttcatgtgatgcacattcatgtaattgtatcctaaattcctttgtactttttattttcttccttggtcttcaattatcttaagactaccaagaaaacaaaaattttaaaaatcttcttcagccggtcaggcgcagtggctcacggctgtaatcccagcacttggggaggctgaggcgggtggatcacgaggtcaggagttcaacaccagcctggccaacatggtgaaacgtcgtctctactaaaaatacaaaaattagctgggcattgtggcgcgttcttgtaatcccagctgctcaggaggctgaggcaggagaattgcttgaaccaggacccgggaggtgtaggttgcggtgagcggagatcgcgccactgcactccagcctgggctatagagtgagactccatttcaaaaaaaaaaaaaaaaatctgcttcagctattctgttaatcttttgacattacttagatggtctggaaataaattttgagaataacatgattagaagtgagagagtataagcatagttttggagatacactcagaatagcattatagattttctctttttactaattggaaaaatggcagttgttgaataatagttttcttccgtgacccttgtgacttaaaaaaaaaaaaacactgaaatgaaataatcgaaccattttctctaaacctttgaatctgagctctgcagttaggtttataatggtatatgaaacctattagatatatacttggaagtcatatgggatacaaaccctgcttttattatcttccccttttgactaacttgggtctcaagtttccttaattactgcacagtggaccttgatgttgctataaagaatgtgtagggctgggcatggtggctcatgcctgtaatcccagcactttgggaggccaaggtaggcagatcacctgaggtcaggagtttgagaccagcctggccagcatggtgaaaccccgtctctactaaaaatacaaaaaaattagctggttgtggtggcgagtgcctttaatcccagctactccagaggctgaggcaggagaatcacttgatacatttagttaggagagaaaatcatacttatgttagtaattgctgctgttcttcatatacttgtggttttgattgccagcaaattcctaacattttggaaaagaaaacagtaatgggataaagggtaagggctagagaggacagttttatttacctagatcttcagagaagcctgaagcctcttttaggaagtaacatttgaactgagaatgtaataaatacattttccctttcttctagttccaagattatcccctaaaactcatagacccaggtctcccagacagaacagtattggaaatacccccagtgggccagttcttgcttctccccaagctggtattattccaactgaagctgttgccatgcctattccagctgcatctcctacgcctgctagtcctgcatcgaacagagctgttaccccttctagtgagggtatgtaacaaagggcttctggatccataatctcagctgtgaaattgaatgttagagggtgatattatatgaaaaaattctaggttatttttattcatagacaagtatttttagtgcacatttaaaagtttatgtaaattttgatgttgtttaatactactaatttaatatagtgtctgtgttacaaaggttaacattcctgggtgtcaaatacctacataaataaaattattggtgtttcatatgacatctgcaaaggaaaaaaagcctctgtttaaatgaaagcattattttccaaaaacataggaaatcaaaattattgttcagtgttttcttgttttgcttttctaacttatctgaattttttttaaaaaattgttttctagctaaagattccaggcttcaagatcagaggcagaactctcctgcagggaataaagaaaatattaaacccaatgaaacatcacctagcttctcaaaagctgaaaacaaaggttagagtttaaagagtcattaagcttaactgtaggaataggaagaagtatgtctaatttcatgcccatacagaatatttttgttcaacatttcttcttactattgtgatagataaatgtattgcttgacaaattccaaaatccaaatttaatatttgaaattattttctgatcttatatcttattctaatttctatcatctcatactaaaaagaatgtgatgttaaagtttaaaaataaacctgtgtcttaacagttcttaattttacaggtatatcaccagttgtttctgaacatagaaaacagattgatgatttaaagaaatttaagaatgattttagggtaagtattgtactaactgatgaatttgagttttagaaaataagcattactaaagatttatctatttataaaaatgcgttatgtatacagtcagaaacatcaaaccatatatgtagaaagcagaacatttttaaagtggtctttgcctatcctttaagtgggataactaaaatcatgagatttggtaacaacaatatgtaggtatcaaatgagagtatagccctgacatttgaaaccaccatagcacagcttactatttgatggtcatttgtactttgttcagtgaagctagatattagtagagcaaggccaagtcattaataatctagtgtggcaaatggaagatgtactggactctggtgttctgaggtagttggagatttatactttgtacacaaatatattgtggtcaaaatctttctgtaacattatttctctgtcttagcacaggctttacttaacatctctccttgattgtcatttcattcttttgcatgttatttactataggtatcgaggtagattttgagaccaaccaataaatcttcttgaaacttagcttcttagaaaggaaaatctaaataccagccttttaaaaaaagtagctgaattaaaggatgagtgaaccaaaggcaaaggtagcctttcctcagcctgtgttttagctttctaaatgttaacaatagcttcattcttgacttattggtaacattcaaaatactacttattatttcatactttagcacatgtatctattcagctttaatgctattaacagttgttaacctaagttttcatttgttggcgggcacggtggctcacacctgtaatcctagcactttgggaggccgaggtgggcagatcacctaaggtcaggagttcgagaccagcctggtcaacatggtgaaaccctgtcttgaccaaaaatagaaaaattagctaggcatggtggcgcacacttgtaatcccagctacttggcaggctgaggcaggataatcgcttgaacccaggagacagaggttgcagtgagccgagatcacaccactccactccatcctgggcgacagagcaagactgcatctcaaaaaaaaaaaaaaaaaaaaaaagtttttcaatttgttaaacaatagttaacacatacaaatgatacaaagaatattgaatatgatcatgtgcccactacccagcttagtaaataaagcattctaacacagttaaactcctcttatgtatctgcccctcctcagctgcttccccctgtttccttccaaaaggaagggtttcttttctgtgcagttctttatatttatactgcatatgaatatatctgtgagcaatagatgatattttgcataatcttaaatttgctataaagtcttttttttttttttaattgatcattcttgggtgtttctcgcagagggggatttggcagggtcataggacaatagtggagggaaggtcagcagataaaaagtgaacaaaggtctctggttttcctaggcagaggaccctgcggccttccgcagtgtttgtgtccctgggtacttgagattagggagtggtgatgactcttaacgagcatgctgccttcaagcatctgtttaacaaagcacatcttgcaccgcccttaatccatttaaccctgagtgacacagcacatgtttcagagagcacagggttgggggtaaggtcatagatcaacaggatcccaaggcagaagaatctttcttagtacagaacaaaatgaaaagtctaccatgtctacttctttctccacagacgcagcaaccatccgatttctcaatcttttccccacctttcccccttttctattccacaaagccgccattgtcatcatggcccgttctcaataagctgttgggtacacctcccagacggggtggtggccgggcagaggggctcctcacttcccagaaggggcggccgggcagaggtgccccccacctcccggacggggcggctggctgggcgggggctgaccccccacctccctcccggatggggcggctggccgggcgggggctgacccccacctccctcccggacgggttggctgccgggtggagatgctcctcacttcccagacggggtggctgccaggcggaggggcttctcacttctcagacggggcggctgccgggcagaggggctcctcacttctcagacggggcggccaggcagagacgctcctcacctcccagacggggtcgcggccgggcagaggcgctcctcacatcccagacggggcagcggggcagaggcgctccccacatctcagacgacgggtggccgggcagagacgctcctcacttcctagacgggatggcggccgggaagaggtgctcctcacttcccagactgggcagccgggcagaggggctcctcacatcccagacgatgggtggccaggcagagacgctcctcacttcccagacggggtggcggccgggcagaggctgcaatctcggcactttgggaggccaaggcaggtggctgggaggtggaggttgtagcgagccgagatcacgccactgcactccagcctgggcaccattgagcactgagtgaacgagactccgtctgcaatcccggcacctcgggaggccgaggctggcagatcactcgcggttaggagctggagaccagcccggccaacacagcgaaaccccgtctccaccaaaaaaatacgaaaaccagtcaggcgtggcggcgcgggcctgcaatcacaggcactaggcaggctgaggcaggagaatcaggcagggaggttgcagtgagccgagatggcagcagtacagtctagcttcggctcggcatcagagggagaccgtggaaagagagggagagggagaccgtggggagaaggagaaggagggggagggggagggggggagagggagagggacaatgatgtcttgctgtaggtattcttccccatttgaattttttcctcagcattattttttttaacatcattcagtctcctcttatactacacttggattgaatttaatatctcatgaagaaaaaacatttctactttgaagcatgtgaattagcatgtttttataacagctttattgagatataatttacatatataaataaaccgtttaaagtgtataaatcagtggtttttaatgagatataatttacatatataaatcaaccatttaaagtgtataaatcagtggtttttaaaatattcacaatgttgtacaaccgtcttctcagttgattttaaaacatactcttcacccccaaaagaaaccccgtgcccagtttagcagtcgttccacatttgcctccagcccttctctttcccctactcccaaccctaagcaaccgttaatctactttctgtctctatggatgggcttatttggggcaaattccatttcatacaaatggaataataaaatatgtggcttttatgactggcttctttcactcagagtagtgttataaaagttcatccatgttggagcatgtttcagtacttcatttctttttgtgactgactaatattccttgatgtggataataccacattttgtttatccattaatcagtttgtagctatttgtggtgttctcactgtttgactattctgaataacactgccacaaacatgagtgtgcagtttttttctcgtcctatcttttcatttcttttgtgtacctacctaggagttgaattgctgggtcatatggcaactgtgtttaaccttttgaggaactaccaagctatttgccaagatatctacactattttacattcccaccagcagggtatgagggtttctgtttctccacatccttgctaacacttattgtcttgtcttttttgattatagtcatccttgtgggtgtgaagtgttaacctcattgtggctttaatgtgcagttctttcatggctaatgatgttgaacatcttttgtgtttattggccatttatatatcttctttggattgatgtctgttcaaatctttacccattttaaaaattgagttgtctttttattattgggttgtgggagttctttatatattgtgtgtacaagtccctgttagatacatggtttgcaaatgttttctcctgttctgttggttgtctttttactttttcatcccttgaagcacaaaaatttttaattttgatgaagtccaatttatctgattttgaagtaagcttttggtgtcgtatctaagaaaatactgtttcatcaatcattaaggtttattactcttctgggtttttttaagaattacatttagaggtgtgatccatttggagcaactttttttttcttttgacacagaatctcgctcttttgcttaggctggagggcagtggtgcaatcttggctcacagcagcctcagcctcctgggctcaaatgagtagctggtactacaggtgtgcaccaccacaccttgctattaataacttttgtatttttttgtagagacagaatttcgccatgttgcccaggctggtctcaaacacttggactcaagtgacacgcccacctcagcctcccaaagtgaaaaattgctttcaccttgcactgcggactcgccctgaattctttcttgtgcaagatccaagagccctctctgggggtctggatcgggacccctttcctataacaatattatgagaataacatttgattttttttaagtgaaacaaattgttattaaaaaattaaaaaaggtcataggagagtgacttggtgctcagcccattttgagcagttatttaatatagcataaggtggggttcaaattcattctttatattaattttttatttctaattgacacataaccatacacttataaccatttttactgtgtaagttcagattcattcttccgtatgtaggtattagttgtcccagcaccatctgttaaaaagactattcttggccaggcacagtggctctcaacgcctgtaatcccagcactttgggagtcccaagcaggcagatcacatgaggtcaggagttcgaaaccagtctgaccaaatggtgaaaccgcatgtctactaaaaatacaaaaattacctgggtgtggtggcgcacacctgtagtctagtcccactactgtagtggctgaggcaggagattcgcttgaacccaggaggtagaggttgcagtgagctgagatcatgcactccagtgtgggcgacagagtgagactccatctcaaaaaaaagactattctttcctccattgaattatcttcacatgcttgttggaagtctgttgactacaaatgtgaaagtttattactggactctgaattgtcctccactgaatctctatgtcttatccttatggcagtaccatactgtcttgattagagttactgtattttaaaaggctgtactttttcagttagcagaaaacattttagctatcagcacaactttctgtaaaccttcattaatgcttgacttaaattccaagaaggagcaacataaaaagtcttatctctttaggagttttagtcttactacttttaggtgcctgaataaccaaatgtattatttagcctcttactaataactccttgatccataggggcataccaggaagaaaagaagtggtttttaaaaaatgagagtgggccgggcacggtggctgatacctataatcctaacactttgggaggctgaggcgggtggatcacttgaggtcaggagtttgagaccagcctggataacatggcgaaaccctatctttattaaaaatatataaattagccgggcatggtggcacatgcctgtaatcccagctactcaggaggctgaggcaggagaatcacttgaatccaggaggtggaggttgcagtgatccgagattgcatcagtgggcgacagagcgagaatctgtctcaaagaaaaaaaaagagagtggaaaaaaaaaatatgtgtcccagaacttaaattttaattaaaaaaaaataaaagagtgaactttctaattgttctcttcagataatataatgttattctcttatgttttattgcgtatttcctgtgtaccagatgctgttcttcatgcttgtatgttaaatcttgtctaacatctctgtcaagcaagttctgtttgtatctgcactgtgtatattaggcagcttgggcaaagagaagttaagtaatctgcccaaactcacatggctagtaagtaagagggctgaccatctggtgtttaagcttctagcagtgctttgaatagtaactaatgcatagtgcatgctgcactgtcagtcagtgattcattagagctaacttcatgacatgctcatagccccaaactgcatttgttcacaaatatctgtagtccttcatttaggcagaaatagaaataccttgtgtgtttgttgttccttcccttttgagccatatgcagagtgctgatagctttatttgtgtaagaattgctagtaatttgatctgttttgggttaataatgtgggttttagaggtaaatggacctaggtttgaatgttggcctctatacatcatgtgcgtaacattgtggcatgctatctacttcccccaagccaaaatgggttaattttagaacctgcttcatagtgttcctgtgagagctcgatgagatattgcctataaagtgtttagcatagtgcctagcacatggtatgtattcaatacatgttcattcttactagcaaaatatagatgacccagtattgtacagagtatgtacaatggtgtcattgtaccatttcatgtggagtcacataagaatttcagttttctgctgggcatgatggctcactcctgtaatcccagcactttgggaggctgaggtggatggatcagctgaggtcaggagttccagaccagcctggccgacatgatgaaaccccatctctactaaaaatacaaaaaattagccaggcgtggtggcaggtgcctgtaatcccagctactcgcaagactgaggcaggagaaatgcttgaacccgggaggcggtggttgccatgagttaagatcgtgccgctgcactccagcctgggcaataagagcgaaactccgtctccaaaaaaaagaaaaaaaaagaacttaagttttccattagatttagtatagtgcagagaggaaatacagcagagtgctatattccatatatagcaatatagcattagaacaatatattccaatacagcagagtgctatattcagataccaactagtggacttgctatttgtaagatggcaataatagtatctacatcaaatagggctgttgtgaagactaaatgaataagtctataaatagtttagaacagtgtctggacaggtacagtggctcatgcctgaatcttagcactttgggaggctgagacaggtggatagcttgagctcaggcattaaagaccaacctgggtaacatggtaaaaccctgtttctacaaaaaaatacacacattagccaggtgtggtggcacatgctaatagtaccagctactcaggaggctgaggtgggagaatcacttgagcctgggagatggaggttgcagtgaggtgagcttgcaccactgcgctccagtctgggcaacggagtcagaccctgtttggaaaaaaaaaaaaaagtgtccaacccatagtaagaaatgcagatgtgtttgacattgtaagaaaaagcaacaccaaaagtctgatttttgccttcactcaagaactcttatgataattaaactccgaagtccttggcaatatatatagttggtctgttatgtggatcgcctctactaaagatttttgtgaacaaatgaaagtttaagtagtaagttcctacatcgtgacttaaattgccagtgtgcccacataaataccctgtcaacatttgcccttagccacttgactctttagctatattggtaatgcagtaaagcttgcgatgcgccagagttgcataatgctgtttgccatgacaccaagagccttggtaatgaaaccattgaaattggtttgcctatactgaggctgaagaggtatcttggctctctaattttaaggcaacctttttggctgtgtaggtttctctttagcttgtttctcaccacctggggctgtggcttaggtccgttgtcctaacctgtggcttaggttctgtttttgttgcttgtacttgctcccccttttttcagccattcctgttttctttcttttgtagaggatgccatcttaaatcatcttcagccagtggtagcattttattttttctggtctgcaaacttaaaaacctcatcacttattttgctaatatctttgtcttctgttctttttgatggtccttggttttgcagtctactttaaaggtttttatttttttatgggtacatagtagacgtattattcatagggtctgtgagatatttagataaaggcatataatgtgtaataatcacattagggtaaatggggtatccatcaccatcatcattcatcatttctttgtgtaatgaacgttgcaattgtactccctcagttattctaaaaagtacaacaaattaatgctgactgtagtcaccctgctttgttgtcaaatactagatcttattcattctttatttaactttttaaattttaaacttattttatttatttatttttagacggagtctcactctgtcgccaggctggagtgcggtggcgcagtctcaactcactgcaacctccgcctccagggttcaagtgattctcctgcctcagcctcctgactagctggaactacaggcacgtgccaccacgcccagctaatttttgtatttttagtagagacggggtttcactatgttggctgggatggtcttgatctcttgaccttgtgatccggctgccacagcctcccaaagtgctggggttgcaggcgtgagccaccgtgcccggcctttaaaattattttaaatcattttaatatctttttcatttctgcctccggtcctgcagagttcttattcgttctttctaaattttctttgcacccactaatcacctcatttcccttcttctccccattacccttcccaacttctggtaaccattctgctatctccatgtgttcaattgtttttatttttagtgcctgcaaacgagtaagaatatgcaaagtttatctttctgtccctggcttattttacttaacataatgtcctccagtgccatctacattgctgcaaatgacaggatctcattcttttttatggctgaatggtaatctattgtgtatatataccacattttctttctccatttgtctgtcagtggacacgtaggttgattccaaatcttggctgttgtgtatatagtgccgtagtaaacatgggagtgcagatattccttcaataaactgatttcctttctgagtatatacctagcagtgcaattgctggatcatatggtagctctatttttagttttttgaggaatttccatactgttctccatagtggttttaccaatttacatgtccaccaacagtgtgtgaaggttcccctttatccacatcgttaccagcatttgttattgcctgtcttttggataaaagccattttaactggggtgagatgatatcttgttgtagttttaatttccatttttctggtgatcagtagtattgaatacctttcatatacctgtttgccattcataaataacgatgaggtcttgctgtttggcccaggctggtctcgaactcctgggctcaagcaatcctcccaccttggcttcccaaaatgctgaaattatagttgtgagccactgcacctggccttgtatgtcttccttttttttttgttttgttttgtttttgagacagagtctcactttgttgcccaggctggagcgtagtggtgtgatcttggctcactgcgccctacacctcccggattcaagcaattctcctgcctcctgccaccatgtctgcctaatttttgtatttttagtagagacgggatttctccttgttgcccaggctggtcttgaactcctaacctcaggtgatttacctgcctcagcctcccaaagtgctaggattacaggcgtgagctgctgcgcccagcctgtatgtcgtcttttgagaaatgtctattcagatcttttgcccatttttaattgagttactaaaattttccctatggagttgcttgagtgccttttatattctggttattgatcccttgtcagatgagtagtttgcaaatattttctcccattctgtgggctgtctcttcactttgttgatggtttcctttgctgtgcagaagctttttaacttgatgtgatcccatttgtccatctttgctttggttgcctgtacttttggggtattactcaagaaatctttgcccagagtaatgtccctgggagtttaatgttttcttttagtagtttcatagtttgaggtcttagatttaaatctttagtccattttgatttgatttttttttaatatggtgggacacaggggtctggtttcattcttctgcatatggatatccagttttcccagcaccatttattgaagagactgtcctttccccagtgtatgttcatggcttctttgtggaaaatgagttcacttagacgtatggattcatttctgagttctctgttctgtttcattgatctatatctttttttatgccagtaccatgccattttggttacaataatttgaagtcagataatgattcctcccgttttgttcattttgctcagtatggcttttgctcttttgggccttttgtggttccctacaaattttagaattatttttgtctacttctgtgaggaatgtcattggtattttgatagggattgcactgaatctgtagattgctttgagtattatcaacattttagcaatattaattcttctaatccataaacatggaatctcttttcatgttttttctgtgtcatcaatttcagtgttttaaagttgtcattatagaaatcttttactcatttggttaagtttattcctaagtattttattatatttgtagctattgtaaatgggattgcgtttaaaaaatttttcagattgtttgctgttaaatataaaaatgctcctgatttttgtgtgttgatttttgtatcctgcaattttactgaatttgtttgtcagttctaataggtttttcttttttggagtctaggtttttccaaatgtaagatcatattatctgcaaacaaggataatttgacttcttccattccagtgtggatgctttttatttctttctgttgtctgattgctccaattaggacttccgagtattatgttgaataacaatggtgaaagtgggcatccttgtcttgttccagatcttagaggaaagcctttcagtttttcccttttcagtatggtactagttatgggtctgtcatatatggcttctgttttgttgaggtatattccttctatacccagttctttggggtttttttgtttgtttgtttttgagatggagtctcactctgtcacccaggctggagtgcagtggcgcaatgttggctcactgcaagctccacctcctgggttcatgccgttctcctgcctcagcctcccgagtagctgggactacaggtgtccgctaacacgcccggctaattttttgtatttttagtagagacggggtttcaccgtgttagccaggatggtctcgaactcctgacctcatgatctgcccgtctcagcctcccaaagtgctgggattacaggcgtgagccaccacgcccggccaagggttttaatcataaggggatgtggcattttatgtgatataaattatatatttatatcatgtgatatatatttatatcatacacagtataaataatatatatatatattttttagtctttgtcttttattctgttaagatgtaccatgtttattgatttgcgtatgtcgaaccatccttgcatccctgggatgaatcccacttagtcatgatgaatgatctttttaatgtgttactgaattcggtttgctagtattatattgaggatttttgcataatgttcttcagagacactggcttctagttttccctttttgatgtgtcctttggttttgtatagggtaatagtggccttgtagaatgagtttagaagtattccctcttcctgtattgtgttggaatagtttgagtaggattggtattagttcttctttaaaggtttagtagaattcagcagtgaagccatcaggtccatggcttttctttgctgggagactatttcttatagctttgatctcgttacttgttattggtctcgttacttgttattgtatttgggttttggatttctttgtggttcagtcttggtaggttgtatgtgtctaggaatttatccatttcttcaaggttttccaatgtatcagcatatagatgctcatagtagtctctaatgatcctttgaatttcggtggtaacaattataatgtctcctttttcatctctcattttattatttgggttttctcttttttttctgagtctggctaaaggtttgtcagttttgtttatctcttcaaaacaatttactgttttattgatcttttgtattttcttcatttcaattttatttatttctgctttgattttttttatttcttctactgattttaggttttgtccttgcttttctagttctttaggatgtattggcagatgaagtttttccacttttttgatgtaggcacttactgctgtaaacattcctcttattgttgcttttactgtatcctataggttttgataagctgtgtttccattttcatttgtttcaaggaattttccagttttcttcttaatttcttcatggacccactggtcattcaggagcatattgcttaattttcatgtatttgtatactttccaaagttcctcttgttatctagtgttattttattttatttttatttttgtttttttgagatggagtctcgctctgtcacccatgctggagtgtagtggcgcgatctcggcttactgcaacctctgcctccccagttcaagtgattcttctgcctcagcctcctgagtagctgggattacaggcatgtaccaccactcctggctaatttttttttgtatttttagtagagagggggtttcaccatgttggtcaagctgatctcgaactcctgacctcagatgatccacccaccttggcctcctaaagtgctggaattacaggcatgagccaccgtgcccggcctctagtgttatcttattgtgatcagagaagatagttgatatgattttaacttttttgaatttttatttatttatttgtttgtttgtttgtttgtttgtaacagagtctcactctgttacccaggctggagtacatgtcatgatcttggctcacctgcaacctccgccttcctggctcaagcaatcctcccaccttagccttccaagtagctgggactacaggcacatgccgtcacatatggctgatatttttggattttttttttttttgtagagatggggctttgcgatgtgtcccagggttgtttcgaactcctgagctcaagcaatccacctatttcggcctcccaaggtgctgggattacagacatgagccactgtgccacgtcaaatctttagacttgttttgtggcttaacatagggtctatctttgagagcaatccatatgttgaggagaagaatgtgtattctatagctgttggacacaatgttctgtaaatatgtattgggcctatttggtctatagagcaaattaggtctaatgtttctttgttgattttctgtctgaatgatctgtccattgctgagagtggggtgttgaagtttccgactgttactgaggtctgtttctcttttttgctctaataatgtttgctttatatatctggatgctccagtattggttgcatatgtatttatacttgttataacctcttgccgaattgatccctttatcattatacaataatcttctttgtctgtttttatagactttgtctcaaaatctattttatctaagcatagctactcctgttcttttctggtttccatttgcatggaatattgttttccagctcttcaattttagtctatgtgtgattttataggtaaagtgtgtttcttgtaggcaatggatctttggtttttttttttttttttttgagacagagttttgctattgttgcccaggctggagggcaatggcgctatctcagctcactgcaacctccgcctcctgagttcaagcgattctcctgcctcagcctcccaagtagctgggattacaggcgcctgccaccaagcccagctaaattttttgtattttcagtagagatggggtttcagtatgttcgtcaggctgttcttgaactcctaacctcaggtgatttgcctgccttggcctcccaaagtcctgggattacaggcgtgagccaccgcacccagccttttttttaaatccatttagccactctgtatcttttgattggagagtttagtcgatttacattcagtgttgttactgattagtgaggacttaactactaccattttgttacttattatctggttgttttgtagtcctactccctcccttcccccttcttttttacttcctcttcgctccttttttccctccctcccttccttgttttgaaagtgattttctctggtggtatgttttaatttcctgctttatattttttgtgtatctgttgtaggtgtttttgatttaagatcaccatgacagctgggtgcagtggttcacacctgtaatcccagcactttgggaggccgaggtgggtggatcaagaggtcaggagattgagaccagcctggctaacatggtgaaaccccatctctactaaaaatacaaaacttagccaggcgtggaggcacgtgcctgtaatctcagatactcaggaggctgaggcaggagaattgcttgaacccaggaggcagaggttgcagtgagtcaatattgtgccactgcaccccagcctgggcgacagagtgagactccgtctcaaaaaaaaaaaaaaaaaagagatcacataagggttgcaaataacattttataacccattattttaaaccaatgacaacttgaaactttgattgcaaaaacaagcaagcaaagagaaaactaataaaaactctacacttcatctgcccgctttttaacttttgttgtttttatttatatctttattatactatgtcttaaaaaactgtagttataagccaggcgcagtggttcacgtgtgtaatcccagcactttgggaggctgaggtgggcggatcacctaaggtcaggagttcgagaccagcctagccaatatggcaaaaccccctctctactaaaaatagaaaaattagccggacatggtggcgggtgcctgtaatcccagctactcggaggctgaggcaggagaatcacttgaacccaggaggcccaggttgcagtgagccgagagtgcgccactgcactccagtctgggcaacagagtaagactgtctcaaaaaacaatacaaaacaaaacaaaaccctggcctagtggctcacgcctaatcccagcactttggaaggcaaaggtggggcgaatcacaaggttaggagttcgagaccagcctgaccaacgtggtgaaactctgtctctactaaaaatacaaaaattagccaggcgtggtggcacgcacctgtaatcctagctactcaggaggctgaggcaggagaatcgcttgaacctgggaggcggaggttgcagttagccgagatcgcgccactgccgtccagcctgggcagcagagcaagactctgtctcacaaaaaaaaaaaaaattgtagttcttatttttgaaaggttcattttttattcttcctgctcaaaatatgagtagtagtttatacaccacaattacagtgttacaatattctgtatttttctgtgtacttgttaccagtgagtttttgcaccttcaggtgatttattattgtttgttaacatccttttcttgcagattgaagaactttttttttttttttttttttttgagacagagtcatgctctgttaccagcctggagtgcagtggtgccatcttggctcactacaacctccaactcccaggttcaagcgattcttctgcctcagcctcccaagtagctgggattacaagcatgtgccaccacgcccagctactttttgtatttttagtaaagacggggttttgccatatttgccaggctggtcttgagctcctgacctcagggtgatccgcccgccttggcatcctaaagtgctaggattataagcgtgagtcatcgtgcccaacttggttgtttattttcaaatagcctgaattcaagctcactaatgttttctgctgcttgatacatttctgctattgagagactgatgcatttttcagtttgtcaattgaatttttccactttgggatttctgcttgattctttttactaataattattgcagtctcttttttaaatttataggattctgaatttgttctctgtattatcttggatttcgttgaactttctcaaagcattcagcttgaattctgtctgaaagttcacatatctcttatcacttgggaattggtcactggtgtcctttatttttagttcatttggtgaggtcatgttttctcagatggccttgatgcttgtggatgttcatcagtgtctgggcattgaagagttgggtattctgttctttgtagtctggttttgtttgtacgcattcttttttttttttttctgtttttgagacagagtctcgctctgtcgcccaggctggagtgcagtggcacagtctttgctcaccgcaacctccgtctcccggattcaagcaattctcctgcctcagcctcctgagtagctgggattacaggtgcgtgccaccacgcctggctaatttttgtatttttagtaaatatggtgtttcaccatgttggtcaggctggtctcgaactcctaacctcgtgatctgtccgccttggcctctcagagtgttgggattacaggcgttagccactgcatccggctcccattcttcttgagaaggtttttcaagtattcaaagggaattaagtgttgtcatctaagtcttcgctcactgcagccatacatgcattagagggcaccccaagactagtaatgttgtgactctgtagaggtatcaccttggtagtcttggggaagatctgggagaattccctgtattaccaggcagtctcttgtcctcttacatttctccaaacaaatggagtctctctttgtgctgagctgcttggagtttggggaagggtgacacaagcactgccatggccaccgtcactggaactgtacttggtctcacccaaggcctgtggcagctattttctggccaccactgatgttaatttaaggcccaagggtgctttagtcagtaggtgaagaatcctgcaagaactgggtctttactttcagtgcagcaggttcccttctggcccagggtgtgtctagaaatgctgcccaggagccagggcctgggatcgggagctttaggaatctgctttattgtactggggctgagctggcacccacttgcaagataaagtcctttttactcttctctcacctcaagcaggtgggtctccccatggacaccacagctgtgaatgtgcggggtcatatctgaagctggcacaatacgacatggcaccttgttttttattcaaggcacaagggctctttagtcagctggtggtgaatcctactaggactaggtatttcccttcaaggcaatgggttcccttctggtccagaatatgtctagaaatgtcatctgggagctatggcctagaattgaggcttcagaactatgcttggtgctttattttactgtggctgaactagtatccacattgcaagacaaagtcctccctactcttccctctcctcccagagctgtgagctgtggtacctggagttgggggaaggctggcacaagcactcccttggccaccctagctggtgtctcagtgggtcacatgtaccccaagtccactgactatgagcccagcacagtaccatgacttgtccaggaattgcagtccttctggtctagactgcctttcaagtttatttaggaccccagaggactttacccacggtggtggggcttaccaaaattaagattcttttggttttttttggcagagtttcgctcttattgcccaggctggagtatagtgacgcaatctcagctcaccacaacctccgcctcccgggttcaaataattctcctacctcagcctcctgagtagctgggattaccggcatgcgctaccacctctggctaatttttttgttttttagtagagatgaggtttctccatgttggtcaggctggtcttgaactcccgacctcaggttatccgtccgcctcggcctcccaaagtgctgggattacagaccatagtgcccagcccgaaattcagattctaatcactgggatggacaattcccctctgactagggctagtctaaatactccctctgtgggtgctggctgaattctgtcctatgctgctttccactgtgacagggcagcactgagtttcaatgcaaaatcccacagtcatttctctctctctcccccgagcacacagattctttctccaccccacactgcattgtgggggaatgtcaggggtgttggaggggcagttcaagactatcttccttatcttttttggtgtctttttccttgataggatgtcaaaactgggtactgtgatcgcttacctaatttttggttcttatgaaggtgctttcttgtgtggatagttgttcaatttggtgctccttgttggggatgatcactggaaggttctgtttggccaccatgctctgtctcttctcccctgccatctcctttttttacttaggggtttagaatgtctaactgaccaatatgtacagtcaggtctcattctgaattcacctacttaatgaccttccaagctgactaggcccagcgcttagtccagcctccatgacggtccctccacatcctaattagcctccctccagttcatttcacacaaagctgctgtgttcacctttctgaactataaatctgcccagtactctaccctacttaaaattccgtatagactgcccatttgccctgagaattaaaagccaaagtcctaaacgtagctttttaaaacttttttttttttttttttaatttttagatggagtcttgctctgtcacccaggctggagtgcagtggtgtgatcttggctcactgcaacctccgcctcctgggttcaagcaattctcatatgtcagcctcccaagtagctgggatttacacgtgtgccatcacgcctggctaattttttttttttatctttagtagagacggagtttcaccatgttggccagtctggtcttaaactcctgacctcaagtgatccacctgccttggcttcccaaagtgctaggatgataggtgttagccactgcacgcagccctgaacatagcttttaagttcctttattgtcatattccttttgacgagtctatcattttctgactcacttgtacatgtgtgtctcacccttggtccagccattggtgcttttctttacttctttatttttgttattttattttattttattattattttttaaatgagacagggtatcactatgttgcccaggctggtcttgaactcctgagcttaagcagtctgcttgtctcagcctcccaaagggctggaattacagtgatgagctactgtgcccagctcattggtgctatctttttttttttttttgagacggagtctcgctctgtcacccaggctggagtgcagtggcgtgatcttggctcactgcagctccacttcccaggttcacaccattctcctacctcagcctcccgagtagcagggactataggcgcctgccaccatgcctggctaatttttgtatttttagtagagatggggtttcagcgtgtgagccaagatggtctcgatctcctgacctcgtgatccgcctgccttggcctcccaaagtgctgggattacaggcgtgagccaccgtgcccggcccccattggtgctattgttttatgtgatagagccagcttctcccttttctttggatttttaaacatactcttccttttacttagactattctccatcccaacacctttcctaaacttctttcacaccttagactagctgacactttactgagaaacctttcttttttataggttgctttttctatagactctcttagcatttactcattttattgtgaagtgtctgatcttatttaaatgacaagtataagaggatagaaactatttcatatttttctcacccagcaggcacaatttctgacatgtggtaagcactcagtaaatattgaactttagaggctaggacatttgagtgctttggtgactgtggttgtgctatataggtactctgttattgttagtttatagtaaaagcattactcttaaagtatgaaaaaagccttattcagaacatttcatgcgtatagttaatattacgtagcttgtgctcatggcaaaaatgtattactaaagttatttaagatatttaagtataattgtttcctttatttagttacagccaagttctacttctgaatctatggatcaactactaaacaaaaatagagagggagaaaaatcaagagatttgatcaaagacaaaattgaaccaagtgctaaggattctttcattgaaaatagcagcagcaactgtaccagtggcagcagcaagccgaatagccccagcatttccccttcaatacttagtaacacggagcacaagaggggacctgaggtcacttcccaaggggttcagacttccagcccagcatgtaaacaagagaaagacgataaggaagagaagaaagacgcagctgagtgagtaaacctggaacttagaccatcctgttactcaattaacttttttttttttaaaggcatttaggtccttccaactgtgaagaatccatctggacttttagactactttatacattgcccttagtttacaaacagctagtccaaacaaatgacatcttaagtaaatgaggttattgcaccctgtgctactcttctgttcttccccttttttgtaccccagggctagaaaaacaaggcataaattaagaaaagtttttctgtaaatgaacaggagttgaaaaattatcaattcaggggacctatctttactggattccactcattagtcaccctcactgtgctgctaggttgaaaaactgccactgtcaaggagagaagcatgcggtgcttctacttggaattcaaaatatttttcatcagaaactgtgttttagttaatgtttagatttgttaagatagacttaattctgcacattcagtatattaattaaatggacttttaggggctaacctcagaacttaactaccattgacttaggtgtttgggtaccaaacaatccagttaaagctgaagttttggaatgcagcttattgataaattggggactgcttattcttgatttgaggcaatttttttttacagccatgactttttccaggtatgtcatgtaaaatatcttctcacataagaattactgcatgctagaatattggtatgttgactggtagctcatacctataatcccagcactctgggaggtccaagcaggtagattacttgaggttaggagttgaagaccagcctggccaacatgtgaaaccctgtctgtactaaaaatacaaaaattagccaggcatggtggtaggtgcctgtatcccagctactcgggaggctgaggcaggagaattgcttgaacccagaaggtggaggctgcagtgagccgagatcatgccactgcactccagcctgggtgacagagcgagactctgtctcaaaaataaataaataaataaataaaaggatactgttatgttaagaattgcttttaaggatatttcataagtagctactgtcttttcagctcaagtgtttgttgattggccaggcgtggtagctcatacctgtaatcccagcactttgggaggctgagtcaggcagatcacttaaggtcagcgtggccaaaatggtgaaaccccatctttactaaaaataaatattaaaaaaaattagctgggcgtggtggcagtctcctgtaatcccagctaatcaggaggctaaggcaagagaatggcttaaactcgggaggcagaggttgcagtgagccaagattgcactgctgcactccaacctgagcaacagagtgggactctgtgaaggaaaaaaaaaaagtattttttgattgcctttgagaggaacggttgtatattactcagatttttaaaaaattgttcttttatggctgtattctttaagggattaaggaatgggcaatataagtgtatatgtttcaataaaaacgattagtgatcttctagtgagaacagtttaaatctatatttagcaattttttttaaattgtcaggtatggaagattttagagcaacgtaaagtccatgtagatttcactggcctttatattttttttaggcaagttaggaaatcaacattgaatcccaatgcaaaggagttcaacccacgttccttctctcaggtaggtttattactttctttgaggttatctagtcccaaaaaaagaaaaattattagtaatagtccttcttccatacctgccatctgaattttgttttagtgtgctgaaccaaccttctttcttttttttacatggccattaatgaatactttttaaacattaaaaaaaggtctttgttttgtcatcaattagatgtgatcttgggcaaatctttgaatttctctgacccagaatttgacgatggttggctagctaggctgtcaggtttatagatacgtcctctgcacctgagggttttgcatcactggattcaaccaaccatggatcaaaaacatagttaggataatctatactgaacacatgcagacgtttccttgtcattattccaaaacaatacagtaaagcatttaccttgttttaggtattataaataatctagagatgatgtaaagtatataggaggatatgcataggttgtatgcgaatactacatgattttatgtaagggacttgagcattccaagactttggtatcttcacagggtactgtaaccaatcccccacagatactaagagatgactgtactattgttattattcgactgagatcataagaagatatatttatttttaatttttaaaaacacttccatcagtttcttaaaaatagctgccactgtttttaatattttttaattgacaaagttttaagttcctactgaaacattttttcttttattgaaatgtgaaaatttatgtgctgtgtttttgttttcaataaaagggacatagttaaagcaagtaaaattagaaagactgggaaaatccgtctttaaattgcaataatagttcatctgttaccttgagataattgaatttattgttgtttttgtagccaaagccttctactaccccaacttcacctcggcctcaagcacaacctagcccatctatggtgggtcatcaacagccaactccagtttatactcagcctgtttgttttgcaccaaatatgatgtatccagtcccagtgagcccaggcgtgcaagtaagtcatagaatttgatgttcacttagcctccccaattgtttgtatctgacaccaagcactctttaggttttcagtgacttgagggtgtgatggttatgcatatgcatttgaaacagacaggcatgcagagattcagtgtgttgttaagtatgaggacctaaatctgagaatgttttctgtgaaaaagatggtttagatttactgtagtttggggtttgttccttttagctgtgggtatgatctaattttttaatgactaatggagaatcaggaaaccttctcatgcctagctctctagcaatataaaactaagagtgacagaataccttgttattatcataggtgcctaatgttaattttttttttaattctctcaagcctttatacccaatacctatgacgcccatgccagtgaatcaagccaagacatatagagcaggtaaaggtgagaataatcctgcctgtgtttgcttgtagtttgcatgctgcatgaattgagtaactaagtttataatgaataaatagttgtagtttagctctgactttttgatgaggctatgcattggcttttgatgaacaacattacatagatattcacatggattttatgaagaaaaacaggggagaaaaaatgcccatcagttgtgattatatagtatcctcttcaaaaagagtaattggaggcctggtgtgatggctcacacctgtaattttagcactttgggaggccaaggcaggaggattgcttgagctcaggagcccaagatcagcctggacaacagagactttgtctctactaaaattcaaaaaaattagctgggcatggtggcatatgcctgtagccccagctgtttgggggactgaggcgagaggatcacttgagcccaggaagtagaggctgcagtgagctgtgattatgccactgccctccagcctgggcgacagagtgagaccccgtctcaaacataaatactggctgggcatggtggcttatgcctgtaatcccagcactttgggaggccgaggtgggtgtatcacctgaggtcagtagtttgagaccagcctggccaacatggcgaaaccccatctctactaaaatacaaaaattagccggacatggtggcacctgccgcctgtaatcccagctactaggtggggctgaggcaggagaattgcttgaacccgggaggcaggggttgcagtgagccaagatcgtgccactgcacttcagcctgggcaacagagtgagactccatctcaaaacaaacaaacaaacaaaaaacaaacaaacaaaaaaaccagactaattggctggacacagtggctccatgcctgatatcccagctggaggatgacttgaacccatgagttcgagagcagcatgggcaatatagtgagaccctatctcaaaaaaaaaaaaaaaagttaattccaaagctttttgatctgaaatctgatttaaatctgaacttaaatttgaagaagagggtttgctagattaatttactagattgctaaccttgctttatatatacctacagttatttccccaaagccagaatttcttttgaagcagaggggcaactaacttcaaccaatgttaagatcctattagaaggatgtttcggctaggcttggtggctcacgtgtaattccagcactttgagaggctgaggtgggcagatcacatgaccgggagttttaagaccagcctgggcaacatggcaaaaacctatctctgcaaaaaaaaaatagaaatcttagccagccgtcatggtgtgctcctgtagtcctagctacttgggagactgaggtgggaggatcaattgaaaccagaaggtccaggctgcagggaactgtgactgcaccactgggctccagcttgggtgaaagagcgaaaccctgcctcaaaaagaaaaataagatggatgtttctgcattaaaattagggagttgtcgtataatgtagttgcataaactagtattctgtgcttgtgtggttaaagagccttcgtagaaaaaatcccacatttttcttaaaaggaaatcttttggccaggtgtggtggctcacatctgtaagcccaacactctgggaagccgaggtgggcagatcacttgaggtcaggagtacaaaaccatcctggccaacatggtgaaaacccgtctctactaaaaatacaaagatcagctgggcatggtggtgcgtgcctgggtgacagagcgagactccgtccaaaaaaaaaaaaaaaaaaaaagagttcttttaatgttggaaaatgctaaagggttttttttttgccaaccagttaatttagagtgattaactgctatcagttgagaaactatagaaagtagaataatttatacagaaaagacatttctcagtgcccaataattgcctttctgacataaagttttcatttttcctgaattaataagatttcctcaatgtgtttttttgggtgttttgtgtgtgtgtgtgtgtgtgtgtgtgtgtgtgtgtgtgtgtgtgtatgtgtttgatacagggtcttgctttgctgctgaggctggaacgcagtggcgctatcatggctcaatgcagccttgacctcctgggctcaagcgatcctcccttctcagtcccctggatagcgggggctacaggtgcacaccaccacacctagctaatttttgtattttttgtagagatgggttttgccatgttgcctaggctggtctcaaactcctgggctcaagcgatctgcctggctctgcttcccaaagtgcctgcgcccagccaattttctccatgtttgacctaattgtgatttcatagatgttaactaaaactcttaattttcgttttctcagtatgctattttttttttttttagccttggaacatatgaacctgttgaaagaactctgcctgaaataatgtaatcaaattatagagtttaatcttattttgagggcctttagaaattctgagaagaaagtgggtttttttttttactgccattttaatgtagtgttaaggtgttcatgtatcaccagcaggtgtagctgttttcaatgattacttaaaacaatgcaatgggaactttttgttgtcattaaaatataaaaggttactgtagtaagagcaagcatgacagtttggctatctgatgggagagtcacattctaacttcaggaggtactgtctttttaatagaaatgatatactcagagtctgggcacggtggctcacgcctgtaatccagcactttgggaggccgaggtgggcagatcacgaggtcaggagatcaagaccatcctggctaatacagtgaaaccgtgtctctactaaaaatacaaacaattagctgagcgtggtggcaggtgcctatagtcccagctactcgggaggctgaggcaggagaatggcatgaacctgggaggcagagctggcagtgagctgagatggtgccactgcactccagcctgggtgacagagcgagactccgtctcaaaaaaaaaaaaaaaaaaaaaatagtagagaaagggctttgccatgttggccgggctggtcttgaactcctggcctcaagtgatccacctccctcggcctcccaaagtgctgggattacaggtgtgagccactgctcctggcctgaatataccacttttacctatcatcagttgatgaacatttggattatttcctttttctggcaatgagtaatgcttttgtggattttcatgtacaaattttcatatgaggctgggagcagtggctcatgcctataatcccagcagtctgggaggctgaggtgggcagatgacttgaggtcaggagtttgagaccagcctggccaacatggtgaaatcccatctctactaaaaatacaaaaattacactggcatggtagcgtgcacctataatcccagctattcaggaggctgaggcaggagcatcagaatcgcttgaacctgggaggcggaggctgcagtgagctgagatcacaccactgcaccccagcctgagtgaaagagtgagtctcaaaaaataaaaaataaaattttttttcatgtggccttagattttcatttctcctaaagtagaaatgctgtgatggaactgccaaacttttccaaagcagctgcatcattttgtatttctaccagtaatgtacaagtgttccagtttctccacatcctcataaataaccgatatgtctttggtttgggttatgtccattctagtggttatgaagtgtcattgtggttttttgtttttttgtattgttttgagatcgtgcccaggctggagcacagtggcacaatctcggctcactgcagccttcgcttcctgggttcaagcaattctcctgcctcaccctcccagatagctggggctgcaggcatacgccaccacaccaggctaatttttatattttttgtagagatggagcttctccgtgcttcccaggctggtctcgaattcctgagctcaagcgatccccctgcgtcagcctccagagtagctggggttataggcgtgcaccaccgcgctcggcccatttttgtatttttagtagagatggaatttcaccatgttggccaggctggtcttgaactcctgacctcaaatgatccgcctgcctcaccttcccaaagtgctgagattttagacgcgaaccaccatgccctgactataggttatctttttacttgcttgatggtgttctttgtaacacagtttttaattttgatgaagttcaatttatctgtttgttttttcttttgttgctgttgctcctgatgtcatatcagacaaagcattgcctaactcaaggccacagagatttactcctatgaaacgcctataaaactcctatgatttttatagtttagctcttaacatttaagtctacaatctcttttgagttaatttttgtgtatgagatgagagtagtggtccaggtttttccttttgcttgtggatatccgttgtccccacctcatttgttgaaaagactattctttcctcttaaattgtttgtttgtttatttatttttgagatggagtgtcgctctgatggagtggcgctaacttagcttcactgcaacctccgcctctcagattcaagcgattcccctgcctcagcctcctgagtagctggaattacaggggtgcgccaccacacccagctaatttttgtatttttagtagagacggggttttaccgtgttggtcaggctggtctcgaactcctgatctcgtgatctgcctgtctcctggcaccctgggaggctgagaggctgaggtgggaggatcacttgagctcaggagtttgagaccagcctgtaccattatgcctggctaattttagaatttatcttaaagtataaaatgtgaatccaatttatcttgttctaaatgactatccaaaatgttttaaccagttttattagtctgtaatttacatacaagaaaatgctcatctttttatgtttacattttaatgagttttgacaaatatatttgctcatgtaactacttgcttcatcagtgaagatggaaaacattgtgcctgttcctcttctctgtccaactgtactttattaccactagctccagttaaccagtaatctgccttcttttactatagattagatttatcctctttagatttctttttctttttttttttttgattaggtttttttttttctttttttacgtaaaaaaatctttttttggagacgtctcattatattgcccaggttggtctcgaactcttgagctcacctcagcctcccagagtgctaggattacagatgtgagccacctcagccagcccctagattttttttttttttttaataaatggaatcaaacagcgtgtaacagaggtgttcaatcttttggcttccctgggtcatattggaagaagaattgtgttgggccacacataaaatacagtaacactaatgatagctgatgaacaaaacaaaaaaaaatagcaaaacttataatgttttaagaaagtttatgaatttgtgttgggccacattcaaagccgtcccaggacgcaagttggacaagcttggtatataatttcatatgtgtgtcctaaacagtgtagtaatttgaatttcatgttagtatcagcttattcctttttgtttgtttgtttgtttttgagatggagtcttgttctgtgtcccagaattggtctgcaattccactgcctcagcctcccaagtagctgggattacaggcacgtgccaccacacctggctaatttttgtctctctctcttttttttttttttttttttttttttagcagagacgggatttcaccatgttggccaggctggtctcaaactcctgaccccaaatgatccacctgccttggcctcccaaagtgctgggattacaggtgtgagtcaccgtgcccagccagcttattcctttttattgctgggtagcatttcattttatgattataccacagttaatttacccattactagtcgatgggcatttgagttattgccagcttttggctattatgaatgaagctgctgtgagcatttgtgtacaagtgtttgtgtttttatttcttttagttaaatacctagaattggaattgctgaggtatggtaagtgcatatttcatttttttaaaaaatttattttattttttatttatttattttttttgagatgaagtctcactctgttgcccaggctggagttcagtggcgtgatttcagctcatggcaacctccctgtcccgggttcaagcaattctcccgcctcagcctcccaagtagctgggattacaggcgcgcaccaccatgcctggctaatttttttgtatttttagtagagacggggtttcaccacgttggccaggctggtctcgaactcctgaccacaagtgatccacccgccccagcctcccaaagtgttgggattacagatgtgagccaccacacactgcctggtaaatacatatttcaattaataagaaactagcaatcttctaaagtgattgtgtcattttacattccaactgatcaggtacatgtgtaggttccatgtgttctgcatccttgccaacacttggtattgtgttatctttttaatttcaacaggtctaatgggtgtcttatggtatctcattgtgatcttaaatgtacatttctctgatgatgactgatccaggagcacctcatcatgtgtgtgtttgttttcagctgtcaacctttttttagtaaatggttcaaatcttttttccattttatttatttatttatttatttgatggaatctcactctattgcccaggctggaacgcagtggtgccatcttggctcactgcaacctccgcctcccaggttcaagcaattcttacgccttagcctcccaagtagctgggattacaggcatgcgccaccatgcctggctaattttgtatttttagtgtaggtggggtttcaccatgttggtcatgctggtctctaactcctgacctcaggtgatctacctgcctcggcctcccaaagtgctgagattacaggtgtgagccactgcgcctgtcctaataatttctttttgtctcaatgtttctgcctgggtgcactggctcacgcctgtaattccagcactttgggaggccaacctggatggatcatttgagccaacagtttgagaccagcctgaggaacatgacaaaaccctgtctttgcaaaaaaaaaaaagaaaaaagaaaaattagccaggcacagaagcgcattcctatggtcccagctacttggggggctgaggtgggacaatcgcttgagcgaggttgcgggggtttggagggcgatggaggggtgatcgaggttgcagtgagctgagattgcactactgcactccagcctgggcaatagagccagaccctgtctcacaaaaaaaagaaaaaaaagtcatgtttcttttcttactgtgaaaataaagttactacttttagtaaattattttaagttatttatatattctggttacaagtcctttctcagaatattgtgaatattttctcccagtctgcggttttttttgaagagccagtattgttaattttaatgaagccttatttatcaagcttttctcttaaggttcatgcttttttgtatcataataagaaatcttttacgtaccctaggttatgaatgtttttatggttaggtatatggttgatttcaggttaggttttgtgtagggtgtgatgtaaaggtctagcttcattttctccaccataaatatttactcggtttctctggcaccagcctctgttttccattggtggctttattttttttctgttcttgaaacaagagtctcgatcttgttacccaggctggagtgcagtagtgtgaccttggctcactgcaacctccacttcccagggtcaagcgattctgcctcagcctctcgagtagctaggattacaggtgcccgccactacacccagctaatttgtattttttttttttttttttttagtagagacagggtctcaccatgttggccaggctagtctcgaactcctgacctcaggtgatctgctcatctcagcctcccaaagttctgggattacaggcatgagccactgcgcccagccatagtagctttattgaattcagttgactgtattgtatgtgtgtctatttgtgaactgttttgttgtattgatctttgtatatatccttatgccaattctctctttattgctgttactttgtaaccaacctttaagttcatatgagtctcccagttttattctcgtcaaaattactcttattctgcgttctttgaatttgcaaataaattttagaatcagcttgggattgtgcactgaatctttatatcagttctgggagaaatatcttaacaatatggaatcttcattgaggtcatcatatactgctccatttatttaagtcttaagtttcaccagtgttttctagttttctttgtatcagttttgtgcctgctttcttaaatttatcccttaatatttcatctgttttgtgctgttgtgagttatattttaaaaactttcaacgtttgtttattcgtaaatagagatgcacttgatttttgaatattgaccttgtgtcttgatgtgttggtaaacccactgtttctggcagccctttaagacttaaacatacaatcatgatctaatcaccatgttggtgtttttgggttttttttttttgtcttattgtactggtgcattactgaaaaaggcatgagattttgccatgctcccatttttaggggtgagacattgtctttcactattaagcatacagttaggtgttacttcagttcctaatttgcagaggtgggtttgttttctttttaatcatgaatggttgttggattatgttcaaatacttatcatctactaagtatatcatattgaccaggaacagtggctcatacctgtaacctcagagctttgggaggccaaggcaggaggatcgcttgaggccaggagttcaagaccaacctgggtgatgtaggaaaaccccatatctacaaaacaatttaaaaatttgctgggtgtggtggcacacacctgtagtcctaactacttgagaggctgaggaaggagaattgcttgagcccagtagtttaaagcagcagtgagctgtgattgtaccactgtactccagcctgggtgacagaaggagaccctgtatttaaagtgtgtgtgtatgcgtgcgcatagatggatagataataatgtaattccattatggtcatacaaactgatatgaaatgccattttatcatataacaagtgtctttttgtggttgaatttgtttctggatttttcactctgcttcactaatctaataggactaccttctcatccactcactgccaacattgattttttttttcagattaccttgaattttctgtttatttttccatatgaactctataattaacttactactaaaaaaatcagttgcctttttaaaaccaactgatctttaaaatatatcttggctgggcccggtggcaggcacctgtaattctagctacttgggagactgaggcagaagaattgcttgaacccaggaggcggaagttgtagttgagttgagattgcgcacctgtactccagcctgggtgacagagcaagattccctcttaaaaaaaaaaaaaaaaaaaagaaacagaaaagataaatctttttacaataatttgttccaattagggtccaagtcaggcttgcaatttggatttgtttatatgttgaagtctttttttttttttaattgtttcatattgtggtaactttttttttttttttttgagatggaatcttggctctgtcacctaggctggagtacagtggcacaatctcaactcactgcaacctccccctctggggttcaagcaattctcctgcctcagcctcccaagtagcccagccttttttttttgagacagagtctcgctctgttgcccaggctggagtgcagtgatgcgatctcggctcactgcaagctccgcctcttgggttcatgccattctcctgcctcagcctcctgagtagctgggactacattcgcccgccaccacacccggctaatttttttgtatttttagtagagacagggtttcaccgtgttagccaggatggtatcgatctcctgacctcgtgatccgcccgcctcggcctcccaaagtgctgggattacaggtgtgagccactgcgcccggccttgtatttttaatagagatggggtttcaccatgttggccagcccggtcttgaactcctgacctcaaatgatccacccgcctcggcctcccaaagtgctgggattacaggtgtgagccatcgctctcagccttgcggtaactttttattacgaatgtattgagacattaataacctaggccagtcatgtttcatccctacccattgtctcttaaaagctttgagtccactggattattctgaagcaaattctagacattgcatcagtttatccaccaacattttagtgtgtatctttaagttggttttggttttgttttttgtttttgagatggggtctggctttgttgcccaggcttggagtgcagtagtgcaatcatagctcactgctgctgcgaattcctggtctcaaaggatcctccctcctcagcctctcaagtaactgtgactacaggcacatgccaccttgccagcttttcttttcttgtcttgtctttcttcttctttgtttttttgtttgttttttgtttttttttgagacagagtctcaccatctttctatcttgcccaggctagtcctaaattccagggcttaagttatctttctacctcagcctcctaaagtgctaggattacaggccagcactttaggaggtgctggatgagccatcacacccagccaagtcataggtttttttgtttgtttgttttttgagacagtgtctaactctgtcacccaagctggagtgcagtggcatgatttcagctcagtgcagtctctaccaattgggcttaggtggtcctcccacctcaacctcccaagtagctgggactaaaggtgcgcgccaccatacctggctaatttttgtattttttgtagagacagggtttcgaattcctgagctcaagcagtctgcctgccttgactcccaaggtgccaggattacaggcatgagccactgcactcagccctcacagttttaattacagtttttcccttagtttttgtcttgttcatatccagcttgtcttgtatttttttcccacgatctgaattttgctgactgtatccctgtgttgatatttaaagtagacttctgtcccctgtaatctttgtaaactgatagtaaataatgaaggcttgatcagattgggttttttttttttttccccaatgtttcacagatgtgtgtactttcagtgaggagtcatgtaatcagtctttttcctgataggagtagtcagtgagttcctagatgttttatctatccaggagataatatgtccctttagcgccttaatttttttggtgtgttttttagcagccattgatgataattgtctagcccaagatcagttatttccttaggggttgtaaaatggtgacattcttttcctttcatcccttcttcaattattgcctggaatatttctataaagaaaaactttcccatatccagctgtttggttaccctgaggtatagctttcttaggaaaagtaatttaaaatgttaatcatttccctttttaaggcagtcttcaaaataatgagttggttttctgttatcctccaaaggtaaccagtgaggtggtttttttgtcgttggttcttactatcagtataaacttctggaattttttttttttttttaattttttggagacaaggtctggctctgttacctaggctggagtgcagtgggatgatctgggcatactgcagcctcaacttcccgagctaaggcaatccccccacctcagcctcccaagtagctgggactacaggcaagcaccaccgtgcctggcttaatttttgtatattttgcagagacagggtttcaccatgttgcccaggctggtgtcgaactcctgagctcaagcagtctgcctgtgtcagcctcacaaagtggtgggactacaggcatgagccaccatggcaggccagaatcacaataaacttataaattaacttgagaagaaatgattgatgtcttcatgatgttgagtcttcctgttcaagaacaaagtataccttcaatagcatattaaagtttatccttggctggatgcagtggctgacgcctgtaatcccacctctttgggaggcagaggtgggcagatcacctgaggtctggagttcgagaccagcctggccaacatggtgaaaccccgtctctactaaaaatattttaaaaaaagtattagctgggtgtggtgtgcacctgtagtcccagctactctggaggctgaggtaggagaatcgcttgaacccaggaggcagagagtgcagtgagtcaagattgcaccactgcactccagcttgggcaaccgagcgacactctgtctcaaagaaaataaataaataaaaataaagtttatctttaaggttttgtacatttttttcagtgtatgccttaggtaggttcttttttaatgttagtgtaacccagggacttctcttccattgcatcttctaagtaattacttatgaagtaccatatatgaaggctattgctgtttatatgttagtttttaccctgctcctttactaaattccaatcctttgaggtattggataaaaatatttttagcatttttcaaataacaggcagagtcaagggcttggtttcttttcttcccctcctgtcccctaccctccccttttttgagacagggtctcacttcttcgccgaggctggagtgcagtggtgcagttacggcttaccgcggcatctgcctccctggctgaaaagttcctcccacctcagcctcctgagtagctgggaccatagatgcacagcaccgcagctggctaatatttttgtattttttgtggaggcagtgtctccccatgttgcccagggtggtcccaaactcatgagctcaagcagtccgctcgccctggcctcctaaagtgtagggattataagcgtgagccactgcgcctggcctggggatcatgttttaacatgagaattagtggagacaaacacatgatatctaaataatagcaccatagtatacttgactagctttttaattattttttaaatatacaggaaggtaataagtaacaaagtaataatagtgaatagtttaagctcagttagcataatcgggcaaactttcatttgataaaagtgataagtagttttcagtggcttttttgtttaccagaaggaggtggtttttaaatacgtgcatccaagataaaatataaaaaaatgttcaggtttgctttcctacatagataaaataatatgtaactagctctcccaaatttcagcaacagttagtgaatgtttagccacaaatttgcagttaattatataatcagttcttaggattttatgaacaagttctatattctttgtgccttatacctagttgtaagcagtcattccacaattattttcctgaagtggcttggttaatgccacaccagaaacaggtcacagacaatagtgctgtaagaaatgtgtgaggaaagaggcacatgggaagtagctagctcgtgctggaggaactggaaaaaaacctcacatgggagatgacagttgagctgaattcttaactagagttgtaacagggcgaggcccttacatgcagaccacctgtgtggattaagataagacataaagtaatcttttaaaagaactattatttagaaacctggtatatgctacatggtgctgtgttatactgggtttgagaaagaatgggaagtgttacaaggattcagtggttggaaattaaggaagatagaaagttagtgttggatctgttttggctctttggtcatgcctttgtttttctcaaaatgaatgcagtgcccgtcccagaaaataccatatgagaagcgatttcataatgctgtgagagtctgttacagggacttgatcaagtctgagggccatgagagaaagtccctctgaggaagttgctttcaagctgacacctgaaggatgaagcagaattatcccagctgggatttgggaactggtgtttgaggctgaggactagcatgcatgataggaaaataacccagagtggcagaagtgggagtggtatgagatggcatcagagacgcagattcagggtcaaatcattcagagcctcctagaccatgtgaacacatgtattatgctgtggagatactgtttaataggcagtctgcttttttttctgcagtaccaaatatgccccaacagcggcaagaccagcatcatcagagtgccatgatgcacccagcgtcagcagcgggcccaccgattgcagccaccccaccagcttactccacgcaatatgttgcctacagtcctcagcagttcccaaatcagccccttgttcagcatgtgccacattatcagtctcaggtaaggctggtaaggcctaactcttaatttttgtaccatataaaaaaacttttaatatggtaaagggattttcctttataatttttgcttttgtgtgatggtagggtagatagctaaggacttggggacccttttcaatatatattcgaaggttactgatgattgtaagaggttcagaggaaacagccaagaaagatttgagagtttacagctgtttctggaaatctggaaaccatggagttaaaaatcttaactaaagtctgcttggctctatttgcagtgttaatgtgctttctttattttttgtttgaacacagcatcctcatgtctatagtcctgtaatacagggtaatgctagaatgatggcaccaccaacacacgcccagcctggtttagtatcttcttcagcaactcagtacggggctcatgagcagacgcatgcgatgtatggtaggaagcactttgtttgtctcttccagtgtgtgtgactcttcttaatttaagtttctgaaaacatactctatctaagaataacctgaccttttatgacattgagggtcaagaatctgaaggaaaagatgaacccatttctttgcctgacttgctttataacttttggcaaatagtttctacttctgtacctggtcttcagatctctttcctgctttaactaaaatgtaatgatgtatataatggcaaagcatctttgtggagaaaggtacctttctcctcttcctcatcaatattatgctttggtatatcctgcctacgacatgcaagagaattttataataataaaagcataaaggtgttctccagcatgaaaacattttgcttcactacttgatctgagggtcactggcattacatattttttttgctgtttgttataatgataatactatgtttctacatcatgctgtattttaatggttgaatattatgtcatattagatatattttagacatgagtcacactttaaatataaccaatgtgaacagaatgctgaaatgaaaatgagaagtattttatgtaaaactaagcagtatttatatgtgagaataataagcaaaaaaacccatcttcgttttgtgactaaacagagaaatttgtgtagatcaacttagcagctgtctaaagtaccaaaataatagatttttcactgttgataatttaaaataaaatgtccatttgtatatcttatgatacagaattaatggattgcttcaaatgtttttcagaatatgtttttaaatagtactgatttcattaagatgttttgttctgaatatttctgagaactaccgtagtgtcgtttagttttcctatttgcgtttttggttgtttggagtaggggataattttggtttattcatacagttgaaaagtgtactgctatgagaatgagattatggttacatgtaactacatgggcatttcatttttaaagcctctttgaactttttgaaatactaagaatataaaatttttattttttaagtttagatgtcctgaacgagtatgtttaggcaaaattgagttatttaagaatttataggctgggcgcagtggctcacgcctgtaatcccagcactttgggaggccaaggctggcggatcatgaggtcaggagatcgagaccagcctggccaacatggtgaaaccccatctctactaaaaatccaaaaaattggccgggtgtggtggcatgtgcctgtagtcccggctacttcggaggctgaggcaacagaattgcttgaacccgggaggcagaggttgcagtgagccgagatcgcgccactacactctagcctgagcgacagagtgagactccatctccaaaaaaaaaaaaaaaaaaaaagaatttacagatttctggcaaaccttcttcttgagacattactacttttcataccacctctgtcctttttgaagaataaaagttttaacattccgtaggttaatgagaataggacttgggcagcagcaatcatccttcctgtcacctgtaacccacagcttatgctttcttcctggaggttcttgtctgccacaaaggctcactgctgataggaatttgtatatgatcaaaggtgtttagttttataaaacagttaagtccagtcttaattttccacattatcactttcaattttgtattgtggattacgcattttaaataaaaaattgtgtgattgctacattttggaaaacatttttttcaagaggcccatccgtaatttaattgtaaaagatactgacaaactaacttggtttattattttggttatgaccccgtcatttgacttgtctttagttgtcttaacggggactgaatatgcgtgcaaaggcacgattgatttatcatgctggcttttatgcaacttgtatatattttaacaattttcctgtttgctaaaggcttaggttaaaagttcattatgattgtttatacatttctggtgaatacatcatgatttaacaagtggaaagaacatctctttccttccattttctggcatactccccttggaatcagatctgaaacttttaagctaaaatttccattgcatttggagagtagttatttgtgtatgcatgcttttgagacattgtagcaataatactgtaatgttgagccgaatctttctcctcattgtgttcattcactgccaacatctggcttcatcttttggatgaatgttcattggttttgaaacagcctatagggtaaatactgtgtttgaggtacagatgattttcataactacttcctagaacatgtccatttgaagagcagtggggccttagaccccaaagtccatttatgtgtgggcaaataggaaatgttgcaaacaaaacaaagcactagatctaatgtccagtgaaatctggaatgaactagtcattagagccggttctttcatgccaggaaaaagttactcagccaaatctgaactactctcctgcagtttacacaggtggtatttaattgctgtctgtatggaggcaggctaggagcaaggctgtggacttgttgtgattgtcactagttaatcaagattccctttgtggtgcttaagaccctaaaaaggacactaggagctgggcatggtggctgacacctgtaatccaagaacttggggaggctgaagtggaggatcgcttagcccaggtgttcaagaccagtctaggcaagatggcgagatcccatctctaccaaaaaaaaaaaaaaaaaaaaaaaaaaaaagcccagtcatggtggcacatgcctgtagtcccacctacacaggaagctgagatgggaggatcacttgagtccaggactttgaggctacagtgagctatcatggcaccactgtaatccagcctgggtgacagagcaagaccctgtctctatttaaaaaaaagaaaacataagaaagaattgttttgttctatgccatcataagccataatttaatctgcttaagcatgttcttcattaaatctgcagtgatttatttgaattattagactttcaaagccttattatatcaaatataaacaaaatttgaagtacattcttataaactacaacaaacttacatagaagtgttaattttatactcatcttccctgaacaatttatattttataaatatattaaatatattgtcataaattttctcaaaggaaccaaatactttgagtatgaattgtgcttttctttttaagctacatcatatctaggtttttaaaacatttaatgcaaacagaagaacatgcacccagatgttggtgacaattttatgtcaccttttctcattcattaattgttatagccatagccaaaggcattgaaaacataggaccactaatgactgcaaaatgaaatcctgattattgtttttaaatttttagtatgtttaatacacatatgctaacattactgaacagttaaatgataaaataggataattattttattctaaaaaagtattgaccttgacctctttctagctatcttagaaagggcttttgtcaaaaaccttatctctttgatgtctctttttttgagatggagtctctccctgtcgcccaggctggagtgcagtggcgtgatctcagctcactgcacgctccgcctcctgcgttcacgccattctcctacctcagcctcccgagtagctaggactacaggcgcccgccaccatgcccggctaattttttgtattttgtttagtagagatggggtttcactgtgttagccaggatggtcttgatctcctgacctcgtgatccgcctgcctcagcctcccaaagtgctgggattacaggcgtgagccactgtgcccagcctctttttttttttttattttttatttattttttattttttttttaatttttgagaaggagtctccctctgccacccaggctggagtgcagtggcgcgatctcagctccctgcaaactccgcctcctgggttcaagcagttctcctgcctcagcctcctgagtagctgggactacaggtgcccgccaccacacctggctaatttttgtgtttttagtagagacagggtttcaccatgttggtcaggctggtcttgaattcccgacctcaggtgatccacccacctcagcctcccaaagtgctgggattacaggcgtgagccactgccccggcctctttgatgtctcttaatctaacttccatcattgcctctaccccatcccttctaagaagttactttaattttttttcctctcacatctactctttttttttttttttttttttttttgaggtagtctcactctgtcacccattctgaagtgcagcggtgcgatctcagctcactgcaacatctgcctcccaggttcaagcggtttttctgcctcagcctcccgagtaggtgggactacaggtgtgcgccaccacgaccggccaatttttgtatttttagtagagacggggtttcaccgtcttggccaggctgatctcgaacttctgaccttgtgatttgtctgcctaggcctcccaaagtgctgggattacagatgtgagccaccacgcccagcctcacatctactcttctaatccatctaattttgttttatggtgatgcttttacctttcagaaacagtaataatacaacttttccgactaactagagccattaggaagaattagatccagaatccttttttgatttgtttttggtagtttaatgcagataagtaagaaaatatagttaagttaaaaaaaaaaaaaatgaaaagcatccataatccctccacctgacaactgccttttaacattttgatgtgtatccttccaggtgtatttaaatacactcaaataccctacccctttatgtagacatgttttaataagaaataatattcatgtttatattcttgctatgatcctaaatttttggatccattactagataatctttcaggataatgacatttccattagtaatgtttttgcaaaattgtgtgtctattgaattaaacttgtaaaatagttttattttggtacatgatttatatcaaggttgttcagtagaatgccatgttggtgtttttattagataatgattttattccttttacttttaagcaagtcagcatgacaacttgacacctaagtacagaagaacagtgtcttccggtttagtcctttcttttaaaattctgtagcagtgtttaaagtgcttgtcatctcttatgaaaatgaattatgcatgaatacaaaaagaaattactaatatgtcaacctttccagaaaatttggaaaatgcacacctcaaaaggctaatttacctttctatttcccaaattcagcatgtcccaaattaccatacaacaaggagacaagcccttctttctactttgccagtgagttgggttttttatactaatttttaattgtacagtaaaacactttttaaaggatacatgttaagggagtagacttgttgaacaatattttccttgtgccagtcaaattattgaaagtacttatatatataaataattcagtttttaaaatggaaatacccaatttaagaaggctggagttaatgaaaaatggagttgtttcagaaatcaatttttgcataccaagcaaatgtgactgggaaatgcctaatattttccttgttagagaaacttcctaaacagctttatacacacacacacacacacacacacacacacacacaaacacacacacccaagccacaagcttggtataaatttaaaatgtttatttatacacacacacacacacacacacacacacacacacaccccaagccacaagcttggtataaacttaaaatgtttatttatattctgataagatgaaatttatgcctaccaggatttttaattgaataggattgatgaaatactaagggaaaaacttttcagtcctgtgcatggctaaaggtttaaaatactcaggaagggccaggcacggtggctcacacctgtaatcccagtgctttgggaggctgaggcgggtggatcatctgaggtcagcagttcaagaccagcctagccaacatggtaaaactccatctctactaaaaaatacaaaaatcagccatgcatgctggcatgcgcctataatctcagctactagggaggctgagacaggagaattgcttgaacttgggaggcagaggttgcagtgagccgaagtcgtgccactccactccagcctgggtggcagagcgaaattctgtctcaaaaaataaaatattcaggaagcagacccctcaggatatcttgagcttaagcaagagatcatgacctctcaggtcattatcttggacagcacaggtcccctctccccacctggcaaaaagtacagaaatagttgctccttcatggagaaagtctgggcagagctttcttctggaaatgaacttttaaggtacatttttcctatttgtagggcaatttgtaaaaataagggccggacgtggtggctcacgcctgtaatcccagtactttgggaggccgaggtgggtggattgcttgaggccaggagttcgagaacagcctggccaacatggtgaaaccctatctctaccaaagcatggtggcacgcacctgtagtcccagctacttgggaggcggaggcacaagagttccatgaaccctggaggtggaggttgcagtgagctgagattgtaccactgcactcaggcctgggcaacagagagagactctgtctcaaaataaaaaataaaaataaggctagtcttggactttggtatttaaataggaaggagtactaatatttgtagaaatcctttagaaatttgtgccattaatattgtcaccttgtatgaaatgttgtgttctagaggatattaaggattcaaattttatgttaggcacattttgagttattttggggtgactcaatgtctgactctactaaatgccatattagcatttaaaatgcatttgaccttaaatctttgttaattatgccatgacttggtatccaaaaataagctgatacatacatacatacatatatgtgtgtgtgtgtgtgtgtgtgtgtatatatatatatatgtatgtgtgtatatataatttatttggtgctaggaaatgttaaatttaatcctttaatagatgctctttaaaaaggagtcttgctgtatgtatatactattaaaggggaaactatgtctgtgattgtagtgtgtaaaagatagtaggtgattttattatgtactcaatttgaggtctcaaatgtagttatcctcaccatcttactgtctctgttagtagtttggtgttgttttcctggtaagtagctaaggtccttaatcattaacacctaagccttaattgccttagcacaacttcccctaaaagggagtatcagtactttttaaaagaaactaacagttgggctgctaatttaatctgctgcttcatttccccctgttctaagccattttatgatggtttggtcaagttgccttttattccccttttagagttttcaactttccttcacttccctttttctgaatttaacatcagatttacaagttggaagattttgttttgttttataagttttgcaatgctggtgatctcttatgacttgtgcatccaaagtcaaaatgacaaaacctagttacaaattaaacacacagctttctgtacttaatttgcttcagtgagatcacagctgaggaaactagttctggaatgtggttagtgttattaaggatttttgactgatcatatgtttagaatcttaaatatttatgtcaaggaacactgagtgggaaacttctggactaggtctggaccaaagaagcatatgtctttgattatctttaatctaaaagattttatgaagactaaagttttataaatagaagtttaactgatgaataaatcagtattacaaataaaattaactttatttttaacctctctgggatctttagccagaatgagcatatataacaaaagcagtgaaataatatgtgtgggtcagaacccactgcccttcccactccactctccttttccctgattctcctgtgttttttccttctttaccttatcttggttcctttttttttttttttcttttgagatggagtctcactctgtcgtccaggctggagtgcagtggtgcgatctcggctcactgcaacctccgcctcctaggttcaagcaattctctgcctcagcttccagagtagctgggattacaggcgcctgctgccacacccagctaattttttttgtatttttagtagagacagggtttcaccatcttggccaggctggtcttgaactcctgacctcgtgatcacctacctcggcccctggttccttttttgtctctcttgtcttccaagctatttttttccttggcttttaaattttcttcctaccctgctttgtgtcactgtcacttaactggcctatcaaggaaccgaactgtatttttgttactagtattgatttaaagtataagtttcacatttctcccaatttattattattatttatttatttatttgtttattttattttttgagacggagtttcgctcttgttgcccaagctggagtgcaatggtgtgatgtcggttcactgcaacctccacctcccgggttcaagctattctccttccccactctccctagtagctgtgattacaggtgcctgccaccacgcccagctaatttttgtatttttagtagagacagggtttcgccgtgttggccaagctggtctcgaactcctaacctcaggtgatccgcccgcctcggcctcccaaaatgctgggattacaagcgtgagccaccgtgcccggctccatttctcccaatttcaaattcaaggaggaaaagaattcctgattaaggtacttctttcagatcttttgagctagaacaaaaaaacaaagggaaatatttctaattaactctttttaaattttgtttacaacgtatgatacatattttacacatcctttgtggtttttgttcgtcttgtttttaatcaatgccttgcaagtttaccggtatttaggtagggaaaggattttgtttttgtttttttaaacaaagcctatgtacattcactcagcttgggtatttgtgctatgcatgcaaattagctatagattagaaaaccgtattatagtctttaaatactggtaaacttaaattgcagagatgccttttaaaaatgcatagtaaaaatatttcatctttacttttctcttcaaatgattttaagatttttacatttttccagttgatgaataacttaaattatgagatttcatgggcataattattttctatatttattgttactttttaatattcttaatactttgcttagaaggtatttaaaagtgaaatttcaaactttttagtacaaaatttcttgaataaataaagttacaaaaaaaaaacaaaaacctctgagattccgtactgtatctttatgaacctccatgaacagaatttgggatttgggaattgcttttccttagacagatttagattgttacaaatgacatttttaagaggctggggtggcggtaggggttagtgctaatggtttaacagtaggggaccatggacaactgtagacatcactatccagtagaacattttgtggctgggcgcggtggctcacgcctgtagtcccagcactttgggaggccaagacaagtggatcacctgaggtcaggagttcaagaccagccagaccaacatggtgaaaccctgtctctactaaaaatacaaaaaagttagccaggcgcgcctgtagtcctagctactcaggaggctgacacaggagaatcgcttgaacccgggaggcagaggttgcggtgagctgatatcacgccactgcactccaccctgggcaacagagcgagactccgtctcaaaacaacaacaaaactgcactgtccaccgtattagctacttagctacatgtggcttttttattattcaaaaataaatttttaggccgggtgcagttgctcacacctgtaatcccaacactttgggaggccgagatggacggatcacttgaggccaggagtttgagaccagcctggccaacatggtgaaaccccgtctctactaaaaatacaaaaattagccaggtaatcccagctactcagaggctgaagcaggagtatcactttaacccaggaggcggaggctgcagtgagccgagatcgctccactgcactccagcctgggtgacagcaagactgggtctcaaaaataaacaaacatggccgggcgcagtggctcatgcctgtaatcccagcactttgggaggccgaggcggatggatcacttgaggccagtagttcgagaccagcctggccaacatggtgaaacccgtctctactaaaaatacaaaaatcagccaggcatggtgatgcttgcctatagttccagctactcggcaggctgaggcaggagaatcgcttgaacccgggaggcggaggttgcagtgagccgagatggtgcccctgcactccagcctgggcaacagagcgagactctgtcaaaaattaaacaaataaatacatttttaaaatgaacgtaagatttttacaagtacaacaaactcaggttcgaaatttacatcaaatcttttagaccaagtcagtgcctatacaacttggaggagctggaagtaaacttaatgagtatgatgatgatggagggcctgttaataagccaccaagttagaaaaaaaggactgtcttatagacttatgggactgtgaagctcaggaaggcttcatcgtttgtacatcatttgttctagctcccagaagacgttcactactcttaaaaacattcagagactatgttgccacagttttcttgttaaaatattctggcatatgttaattcctacagtctggaaaattttcccagtgtataaacaaagctgctgtatccagtctaaactggatatgaaggaatattaatgccagctgtggcattggcagtggatgcacaggtgatcctagaactggctctttgccttgccctttcccctgctaagagatagctttgcagctggagacgtaactgttagggctggagagttggtggcccttagccctacaacacctaggattatagaactgctccatgtgcctagcctaaccctctgcacaccatttacgtggaatatacccagagccgtctatgctggtgactcggcagccttgcctaccagactgctggaactagggtgcctcttcccaaagctgtgcttgcttctctcaccaatcagtcctgcatatgtctgtgtttgctaacacgttatatgaagaatgtggggaactattttggaatcatttctgtgtatgggcttattatcttgagggattttaggatttgtttctcaagagagggctgggaactataccttgctagagttgtcttgagaacgctctattctcagctcattgcctcgtggaggttagttttttatcatcggtgtgctgtccatagtcactggaagcagtgaacacatcctactctgcttctgattctcaacttactgtttttgaagcacatgaacaggccaggcacggtggctcacgtctgtaatcccagcactttgggaggctgaagtgggcggatcatttgaggtcaggagtttgagatcagcctggccagcatggcgaaaccccatctctactaaaaatacaaaaattagctgggcgtggtggcacatgcctgtaatctcagctactcgggaggctgaggcaggagaattgcttgaacctgggaggcagaggttgcagtgagcctgggcaacagagtgagtgagacttatatctcaaaaaaaaacaaaaaacaaaaaactgaaagacatgaagaaatggtttttgtaccaaggtttggcccacgctgagattcacaaagaactggctttcagttcttatctttattttgatttaaactggcccatcatgttgtcctttgaagttagtctagtaaatttctttccaaagggctggggcactcagaagggagtttacttttctatatttatttcataaagcaaagatgggagatcctccattagggcttgggaaagtaaactgagtggcagaagggctcctgtgattagctgagagagactgtggtccttcggccctgatgatagatccctggccttgccacataccatacacagtgcccgcacccccatcccccaccacacccaatatagtctgtgccctcaggacattgctccagggcagtagcatggtgaggttagcctgatgatggccttgagctaaagagtgtgcacctaaaatgcacttgtttgagtagtttctgcctatgccttcaagttgcctttttgggaaaacctagtgaccgttaagagtaaatgcaaactaatttgattttaatatcatatgtagagctgtattatatgaaccaaatgctagtctgttaagcaatagctacacttattttttcaagacaatggatggtttaaatggagtcatctatagaaattggtagtggcgtgagttatgcattgtaaccatcaagaaagttcagttgatgaagtgtagaggagcgatggaggttgtcagacatcggttgtgtacatgctcctttttctttcactttagtttccacgggctcccttgctcagcagtatgcgcaccctaacgctaccctgcacccacatactccacaccctcagccttcagctacccccactggacagcagcaaagccaacatggtggaagtcatcctgcacccagtcctgttcaggtaagggcaactcagaggtctgcatggagtggcttctttatcctagtatctgagtgctttcttcaggtgccaggtatcgcatcgtcagaacacatggcatgtccaccctcgtgaagatggatacagctgtgcccctggggtggtggttttaagaatcacatttaaaggctgggcgcagtggctcacgcctgtaatcccaccactttgggaggccgaggcgggtggatcacgaggtcaggagattgagaccatcctggcgaacactgtgaaactccgtctctaataaaaatacaaaaaaattagccgggcgtggtggtgggcgcctgtagtcccagcttctcgggaggctgaggaaggagaatggcgtgaacccgggaggcggagcttgcagtgagcagagatcgcgccactgcactccagcttggacaacagcgagactctgtctcaaaaaaataaaaaattaaaaaaaatcacatttaagatacatgttgataataaggtgattggataagctctggaaacttgcagtaatgaaaaatcaaatttaacataaagttcataaggcaaattcctatttgcttgggactttttaatttctaaggtttatgtgatgaggttattttcctatgagcttcttgaattatgtttgctaatggaggcagttaaagatgtctttgatatctatcagttccctggggcagtagtcttttttgactttagtatgtatgctcagaagtttctaactgccagactgagaatcaggcttctgtaccctagaaaggagttgtccagatgggaggcacctccagccttgctcttaccaccctgtacattctcctgtactttccagtgaccctcatcataggcccaagtgtgcaaagcttagctttgtgggtatcccttggctgcttttcattaaagaagttttcctctcaattctttcctgtcgctttgcagcaccatcagcaccaggccgcccaggctctccatctggccagtccacagcagcagtcagccatttaccacgcggggcttgcgccaactccaccctccatgacacctgcctccaacacgcagtcgccacagaatagtttcccagcagcacaacagactgtctttacgatccatccttctcacgttcagccggcgtataccaacccaccccacatggcccacgtacctcaggtaataccagctttagccaactttctgtgaaggccaagtagaatgtgaaggttatcagtaagcagctagaggctctcccagctaggaaaccctgtgtgtcatgccatttgcctgtctccctttccctctcaaatacacgtgatctggccctaagggaatgtttgtgtggttttgtcatgggatcagtgaaggtgctgattggtcagtcctttagttttccaactgagaccttaaaaatatctttgactctggaatgcaacccagtccttctttcctttctgtgtctgctttgctatgtctatatagcctcactactatatatatgtgtacatatatattcccctacacacttaccttggaagccaggcagggatgatggccttcacagagtctcagctctccgaagtgactaccggggcctgtcaacttgattgttactcacatgagttccagacacatctctccaattgttttccctggttatccatatatctgctttgaccataagttgtactcttgagagggcttggccttggacattggtgcagtgtaactagaagctggaagcacccaggtggtcccatttttctttaagagcagccctggaagcactttggagctcacctccagtgtaagctgctacaggtgaaaggtgtgcttgccatctcagtggttgctgtctgcatcagctgctgacaaaggtccctgcactccagggcccaggggattgtcttaatgaggagaaggagctgcactgaagttgggctctaacgctggccttgaggccctccctggggctgttacgggtgaattggctgtattagatgtctctgctactttcataacagaactctctgaggcgggtctaagtgagacctgccacaatgaattccatttcctgttaaatagtgcgccagtgaggctctggcaaggtgtgggctagagatgcgactcagttggatctatctctcagaaggctaccttgtaagtagagttccacagctctgggaagtttgggcgtcctcaccctgcaaagtttaggttctgtggtgtagcgcactgcagttgatttgctttttgatagtggggagggaagccggtttggtccgtgtgggccagcgtggtttggtggagtcagcttcataagagctggggtcctgtaggtgtctaccagaggctggtggctaagtaggcatgtgaacttacatgtaagtcagggatccctaaaacctcactctgtttttgtgctgaaagggcaaaaaggttaacacagggaagctcaaatttgccatgtgcccgtttgaatatgtgagagtaaaaacggcatttcatccaaggcttatcgtagtctagaacagtgcacagtgtgggaaaaaggaaacaagggctcttcctggccctgccaaccccctgcagagctggaatccagctgtttgggctgactaaaatcacctttccaacttgacagtgagtgagaccaggttgaacttggtacagagacgctgggctggcccagatgacttcaggttactcctttccatctcactggagccattaaaaactccaactcctcctcctcctcctgctccatcagcatatctctgagagagtcacgggggcctaagagtctcttttcactgcctggtgagcagaccagaagcagagggagagaggcaaatgaacagaggtccaagtaattcacatacttgactgtgacagtctctgcttattaatgtaatctgttttcctatttgaaagggatgttatctgcaaaactacctcaggccccacatggcagcctgattctgaagcatcattgaatcttgtatgatattaagttgagaaagctgcccttggatccagtgtctaatctttgtgaagatcttaccccatacatagaatacaatgatcagaaatgtcaagggttaggacagcacagccctgacttctacccaggctcacttgttgcctgctccctgacccttgcaggatctgcccaaaggtgaagcgcgtcttcaggtcaatagataatctactagagattgtccccagagaacagaactgggccctgaggcccaccgttgccctttcctgagagtcccagcccagtgaaaggaacacagttgacatgttgttgaagccggagatgttgcctgtatgcgtaaaagagctctctgtttcaggctcatgtacagtcaggaatggttccttctcatccaactgcccatgcgccaatgatgctaatgacgacacagccacccggcggtccccaggccgccctcgctcaaagtgcactacagcccattccagtctcgacaacagcgcatttcccctatatgacgcacccttcaggtgaggcgtgtgtgtgcaggggccgccggggcaccccaaagcattctgctcgcacaggtggaatggcaggcagggccagtgcttcaagccccgcatttgagaactagcaagacccgtccaggagtgtgcacaggagggactgtgacgatcagttcagcatcagggcctgaggcttccgggagccgagtctgtgtgtgttctgatggtatacaggatttggcttgatgagaagcagcagcagcagcaacagcagcctgatgcatgcctaggactcagttggccttccttgttatgacaggctggacagggcagtgttttccttcctgagtcccaaaagtctgacatgtggggggttattaccatggcagagtttgattgtagctctggagaagatactgctgagaaagcgctgtggatggactggctttgagtgtagcgttagccccagcccctgaacaggggagagcgccctgtgattgtgctctactacttgatggctgccatggcgatacttcacagtctgacctgttattctgaaagcaatactggtgcttggctaatatttggggagggggtttgttaaggcctttttttctaccccatgaacaagtcttctgggagttttatctgaagtggttttacgtctgactggtttgtttctacccacccacccaaccctccccactttggtgcagatgggagggggaaaagcgaattcaattttgagttttgttcagctagcacgaggatagtttacaatcatgtgctgcagagacactaggctgatgtgtggtgttgccagttttctgtttcaatgttcgcttttctttttacagtacaagcccaccaccaacagcagttgtaaggctgccctggaggaaccgaaaggccaaattccctcctcccttctactgcttctaccaactggaagcacagaaaactagaatttcatttattttgtttttaaaatatatatgttgatttcttgtaacatccaataggaatgctaacagttcacttgcagtggaagatacttggaccgagtagaggcatttaggaacttgggggctattccataattccatatgctgtttcagagtcccgcaggtaccccagctctgcttgccgaaactggaagttatttattttttaataacccttgaaagtcatgaacacatcagctagcaaaagaagtaacaagagtgattcttgctgctattactgctaaaaaaaaaaaaaaaaaaaaatcaagacttggaacgcccttttactaaacttgacaaagtttcagtaaattcttaccgtcaaactgacggattattatttataaatcaagtttgatgaggtgatcactgtctacagtggttcaacttttaagttaagggaaaaacttttactttgtagataatataaaataaaaacttaaaaaaaatttaaaaaataaaaaaagttttaaaaactgatcaagttagtgtgtgtctgtataagctacttctttgtaggatacttaatatcaaagcaggtgtgctaagggtgcattttgaatatcccggaaggtagctgtgaaatgatttttcttcttcacccttagttctggttcaaggtatctctagaaaaagacaagactgagctattctctttggtggattagagatctgcttcaggaggaggaaggttggccagagttgggcagcactgaaattccacatcctcgggctgacaccgattctgtaagcttcctttttaatatctcctgaaccaaaatgagtgtcattagctggaagttcccaattcgggcatttttctactttaccagtagggggcaggagacactcagaaaaaaattgcaataaagaaatccagagggcatgaaggctgaaaagatacaaagatgtacaaagctgcttattgacatggatggactcataagcatttgttagtattcccagattgcaacggggaggacaaagggaagagcgagtatttgggcagggcaaggattttgtagagacaccatggtcttaatagagcctttaaatattatgacagcaaatcaagattctgaaaactttttaattcacatatagcaatttgtacattatagcaaaatttgcattattcaagaataagttacttgtacagtacataaaacaatacataaaaatttgccaaataccttctgcctataatgatacaagatgaatccactttatgttatcacaatgtgctgtatattctaaccaaacacaggatgtcagatgtgtccttgttaatatactcgcaagttcctctagcttgtgggagatgttagagctaacacatttgcagtaagggacttagtcctgaatagaaagcatgaaggaatctcaggcaaccctcagggaagagtccaaggccttgactttaggttaagaaactgttatgtaaaaatagtgttctctggcccaagattttaatgattgctattcctttttcctacggtccagaaatgatcaaaggcagaagatttataccagataaagccatatggattgctggtctaaaattcaaggcaggttagttgacttaattctttggtgctggtgactgttagtttgtaaaagttcaataagtcagatgaaggaagggatggtgccgggagctgtcaagctgtactggtggggtctgtaattagagctaactggagggatcatgatgtctactgtccagtttggtgttgagccatggctctcggtagaagttgccggctggggcctggtcaggactggaaggagagtggtgggatgtgctgtgcctatggtgggctagctgcagccagtggggtgcctgccccacactgctgcccaccccttcatcagctgattctgctcccacataaagaaaggtgttggcttagtgtcacttcttcctagagccatgggagttttctgtcagcatgtttttgagctgtcctggtaacttggacgggaagcagtctggaggtgggtgccttccaaatctctgccacagaatctgaacttgcactttgcagcctgttagtcagagctgctaagtttgctctacctggtgtgcctcttggcaccacctgagagatgtatgtagagaggctgctaagaaatgagtgcccctggcatgaagacgtcatatcccagatgtttaacttctggctggagggagggaacttaatttggttcattatctactgggtacctttcctgtgcggaggggaggaccagtgactttccataataagctttctcctttaaaaaaacttcagactcttacttactcttttggttcacactaattagcattcattttccagagaaagctgcttgactttgaggaaataaagacaggtgtccttaaaaatggactgcaaatctggatcagtgtcaggtctgctttagggtccatgaaatcacccaagagtgttggtactaaaagtggtgtaggctgggcgcggtggctcgcgcctgtaatcccagcactttgggaggccaaggcgggtggatcacctgaggtcagacattcgagaccagcctggccaacatggtgaaaccctgtctctactaaaaatacaaaattagccaggcatggtggctggtgcttgtaatcccagctacttgagaggtcgaggcagaatcgcttgaaccaggaaggtggaggttgcagtgagccaagattgcaccactgcactccagcccggttgacaagagaaactccatctcaaaaaaaaaaaaaagaaaagtgcataggggtttgttcccccaccctctgaaagaccccaaggaaattctagaagcaaaaatttgacctcttggagcacagagactaagtataagtggaagaagcagacctaaccctcctcccaggcagtcagtcctatgagttttaggctgaggtttcattttagcctctgatcgatgtatctgtaaagctgatctaaactcccagtttcctagaagccactgctgtgagcctgggggttgtactgaatggctctgctggcacccaagagcagctgactccactgtcactgcccccgtttctgagcctccagacaggttctgggaggagccagccccctatgaattgtatcacttgtatagatagagatttgacttcaggacctccctggatggtggagattgtgtgtgcccatgtgtgcaaggagatagatagattctcaatccagtgaagcagtagccagctagaacagaacactgattgtgggctattaaaggagtttctcattagttatggcaccagattcccagcttccattttggctcaaaaaaggagcctaaaacccacttgtgggataatttaataagccattagatgcttggagggcaccaagccagccttgttgctgaaggatttactagaaagggcctaggagtccttcttccctttttgcttgctcttcccctagccccagttaatttaactatcactgtaaagctgctgtaaaccagaatccagttttttattcgtaaggcaccaggatagaactgttcttgccaccctcctatttcagtaattgcctgaatttccctgaaagggtgacatacttcacttcttgacatttaggaaggacagtggccactcagtggcaggtgactgtcccgaggatgcagtagacaagccagcatgctggctcagactgtaaattaggtagggtttgcatagctgtttctgactacaaaaatagcatgggtgttagttgaaacagtgcactgaaataagcagtggttaagttttgaacctgaatcctttaaagaaattagtctgaggtaaaatgttttaaatcatttttgaccttcagcttgtgcctctgacagagcttttgtcctaaagctgagagtagaagcaggattagatgtggtcatctgtggtgtggacacagcagacctgccatgtggactgacggtagatgggagaaccgcttgttagtgttctgggcttcctgatgatccccccctcctccccgtagaaagtctgtcatccgctgtgacagtgtcagtgaaaaagagaacaagtttccactgccagctctggccctcaccccaactcctttctctaagagtaacggggactgggcatagggaccccgggcaggagctagcggcatcctctaacaagaactacatctgtaaacaataaggagaaagccaggtggatagatgaaacctacaggagggcccttcaacaggcctaatagaagggtcacttccaaactggcacgagcagttaacagtgtcccttaaatctttctctggaaggaaggaaagatcaattacattcacaagttcacacttctgcctgtgctcctcaagggcagctgttgaggcctggaattcctcactggtcagagaggtgtgtactgattgtctatggcccgcaggtggctccgggaggatgagtccatttcgtagtccgagtcccgggctcgattcacaggctcatgctccaggtgctgcaggctgttggccagttcttcgggcgaaggcaccaggtggaagatctgctcggggggtgaggatcgccctgggagaccctctgggctgagcccccggggacagccagaagaactaaggtggggaaggcccaactctgaaccccagtgaggaagggactctgaatcccagtgaggaagggagaaagggaagaggaccgtgttgcaggaacctaggacaagtgaccaagagagaccacaccatcagtcttgaggcaagtgctgacaggacacagaacaagatacctgtacccctgggtctgcagcaagcctctaccctctacccagtgtcagccacccccttcagcaaagggcagtagggtcagacctggtggttgggagacgactaccacgtagctggagagccggacatcacaggcggcgccgcactcgagtgggatgggcgagcgctggaagtggtggagcatgtccacgaccgagggaaagtggaggtgctgcacacggcactggccccgctctgtcagcgacaggcgcaggtgctgtgggaggagaggatggtgggctcgggctgtccctctaggaccctgaactccagtggagaggggtggcacggtcctgcctgccccaccccaccccaccccaccccataccttggctatcccctgaaagttgaaagtgagcacgtattccccacgccgcgtctcgctctgccgcaccaggaacactccatgagcatcagggccctgcagctgaaccagctgagctgctttcactctggagatggggccgtggaaccaggggtagcaggacaggaaatggtccgtcttctggcaggccgggtccagcagccccccaggagaagcacctgttagataagatgggtgatggtggtcgcagggggctaccttatgtcctgggctgagtctgggttccagcgtacccagaagacaatggcctagctattggtttacccaccttggt

SEQ ID NO: 5305 - DNA, 20 bp, Artificial Sequence
  Description of Artificial Sequence: Synthetic oligonucleotide
  Target: ATXN2; (-) strand; PAM type: NAAAAC; PAM sequence: TAAAAC
tttggctcaaaaaaggagcc

SEQ ID NO: 5306 - DNA, 20 bp, Artificial Sequence
  Description of Artificial Sequence: Synthetic oligonucleotide
  Target: ATXN2; (-) strand; PAM type: NAAAAC; PAM sequence: AAAAAC
taataagctttctcctttaa

SEQ ID NO: 5307 - DNA, 20 bp, Artificial Sequence
  Description of Artificial Sequence: Synthetic oligonucleotide
  Target: ATXN2; (-) strand; PAM type: NAAAAC; PAM sequence: TAAAAC
taagttacttgtacagtaca

SEQ ID NO: 5308 - DNA, 20 bp, Artificial Sequence
  Description of Artificial Sequence: Synthetic oligonucleotide
  Target: ATXN2; (-) strand; PAM type: NAAAAC; PAM sequence: GAAAAC
tgacagcaaatcaagattct

SEQ ID NO: 5309 - DNA, 20 bp, Artificial Sequence
  Description of Artificial Sequence: Synthetic oligonucleotide
  Target: ATXN2; (-) strand; PAM type: NAAAAC; PAM sequence: AAAAAC
taaaaaataaaaaaagtttt

SEQ ID NO: 5310 - DNA, 20 bp, Artificial Sequence
  Description of Artificial Sequence: Synthetic oligonucleotide
  Target: ATXN2; (-) strand; PAM type: NAAAAC; PAM sequence: AAAAAC
ctttgtagataatataaaat

SEQ ID NO: 5311 - DNA, 20 bp, Artificial Sequence
  Description of Artificial Sequence: Synthetic oligonucleotide
  Target: ATXN2; (-) strand; PAM type: NAAAAC; PAM sequence: AAAAAC
ttcaacttttaagttaaggg

SEQ ID NO: 5312 - DNA, 20 bp, Artificial Sequence
  Description of Artificial Sequence: Synthetic oligonucleotide
  Target: ATXN2; (-) strand; PAM type: NAAAAC; PAM sequence: GAAAAC
ttctaccaactggaagcaca

SEQ ID NO: 5313 - DNA, 20 bp, Artificial Sequence
  Description of Artificial Sequence: Synthetic oligonucleotide
  Target: ATXN2; (-) strand; PAM type: NAAAAC; PAM sequence: CAAAAC
tttgaaagggatgttatctg

SEQ ID NO: 5314 - DNA, 20 bp, Artificial Sequence
  Description of Artificial Sequence: Synthetic oligonucleotide
  Target: ATXN2; (-) strand; PAM type: NAAAAC; PAM sequence: AAAAAC
tccatctcactggagccatt

SEQ ID NO: 5315 - DNA, 20 bp, Artificial Sequence
  Description of Artificial Sequence: Synthetic oligonucleotide
  Target: ATXN2; (-) strand; PAM type: NAAAAC; PAM sequence: AAAAAC
ccgtttgaatatgtgagagt

SEQ ID NO: 5316 - DNA, 20 bp, Artificial Sequence
  Description of Artificial Sequence: Synthetic oligonucleotide
  Target: ATXN2; (-) strand; PAM type: NAAAAC; PAM sequence: TAAAAC
acatgtaagtcagggatccc

SEQ ID NO: 5317 - DNA, 20 bp, Artificial Sequence
  Description of Artificial Sequence: Synthetic oligonucleotide
  Target: ATXN2; (-) strand; PAM type: NAAAAC; PAM sequence: GAAAAC
ccttcaagttgcctttttgg

SEQ ID NO: 5318 - DNA, 20 bp, Artificial Sequence
  Description of Artificial Sequence: Synthetic oligonucleotide
  Target: ATXN2; (-) strand; PAM type: NAAAAC; PAM sequence: AAAAAC
tcaaaaaaaaacaaaaaaca

SEQ ID NO: 5319 - DNA, 20 bp, Artificial Sequence
  Description of Artificial Sequence: Synthetic oligonucleotide
  Target: ATXN2; (-) strand; PAM type: NAAAAC; PAM sequence: AAAAAC
ttatatctcaaaaaaaaaca

SEQ ID NO: 5320 - DNA, 20 bp, Artificial Sequence
  Description of Artificial Sequence: Synthetic oligonucleotide
  Target: ATXN2; (-) strand; PAM type: NAAAAC; PAM sequence: AAAAAC
gtgagacttatatctcaaaa

SEQ ID NO: 5321 - DNA, 20 bp, Artificial Sequence
  Description of Artificial Sequence: Synthetic oligonucleotide
  Target: ATXN2; (-) strand; PAM type: NAAAAC; PAM sequence: AAAAAC
agaagacgttcactactctt

SEQ ID NO: 5322 - DNA, 20 bp, Artificial Sequence
  Description of Artificial Sequence: Synthetic oligonucleotide
  Target: ATXN2; (-) strand; PAM type: NAAAAC; PAM sequence: CAAAAC
actccgtctcaaaacaacaa

SEQ ID NO: 5323 - DNA, 20 bp, Artificial Sequence
  Description of Artificial Sequence: Synthetic oligonucleotide
  Target: ATXN2; (-) strand; PAM type: NAAAAC; PAM sequence: CAAAAC
aacagagcgagactccgtct

SEQ ID NO: 5324 - DNA, 20 bp, Artificial Sequence
  Description of Artificial Sequence: Synthetic oligonucleotide
  Target: ATXN2; (-) strand; PAM type: NAAAAC; PAM sequence: AAAAAC
taaagttacaaaaaaaaaac

SEQ ID NO: 5325 - DNA, 20 bp, Artificial Sequence
  Description of Artificial Sequence: Synthetic oligonucleotide
  Target: ATXN2; (-) strand; PAM type: NAAAAC; PAM sequence: AAAAAC
aataaataaagttacaaaaa

SEQ ID NO: 5326 - DNA, 20 bp, Artificial Sequence
  Description of Artificial Sequence: Synthetic oligonucleotide
  Target: ATXN2; (-) strand; PAM type: NAAAAC; PAM sequence: GAAAAC
tgcaaattagctatagatta

SEQ ID NO: 5327 - DNA, 20 bp, Artificial Sequence
  Description of Artificial Sequence: Synthetic oligonucleotide
  Target: ATXN2; (-) strand; PAM type: NAAAAC; PAM sequence: AAAAAC
gatcttttgagctagaacaa

SEQ ID NO: 5328 - DNA, 20 bp, Artificial Sequence
  Description of Artificial Sequence: Synthetic oligonucleotide
  Target: ATXN2; (-) strand; PAM type: NAAAAC; PAM sequence: CAAAAC
tgcatccaaagtcaaaatga

SEQ ID NO: 5329 - DNA, 20 bp, Artificial Sequence
  Description of Artificial Sequence: Synthetic oligonucleotide
  Target: ATXN2; (-) strand; PAM type: NAAAAC; PAM sequence: TAAAAC
gaccagcctagccaacatgg

SEQ ID NO: 5330 - DNA, 20 bp, Artificial Sequence
  Description of Artificial Sequence: Synthetic oligonucleotide
  Target: ATXN2; (-) strand; PAM type: NAAAAC; PAM sequence: AAAAAC
gattgatgaaatactaaggg

SEQ ID NO: 5331 - DNA, 20 bp, Artificial Sequence
  Description of Artificial Sequence: Synthetic oligonucleotide
  Target: ATXN2; (-) strand; PAM type: NAAAAC; PAM sequence: TAAAAC
actaatttttaattgtacag

SEQ ID NO: 5332 - DNA, 20 bp, Artificial Sequence
  Description of Artificial Sequence: Synthetic oligonucleotide
  Target: ATXN2; (-) strand; PAM type: NAAAAC; PAM sequence: AAAAAC
tcttagaaagggcttttgtc

SEQ ID NO: 5333 - DNA, 20 bp, Artificial Sequence
  Description of Artificial Sequence: Synthetic oligonucleotide
  Target: ATXN2; (-) strand; PAM type: NAAAAC; PAM sequence: GAAAAC
tagccatagccaaaggcatt

SEQ ID NO: 5334 - DNA, 20 bp, Artificial Sequence
  Description of Artificial Sequence: Synthetic oligonucleotide
  Target: ATXN2; (-) strand; PAM type: NAAAAC; PAM sequence: TAAAAC
ctacatcatatctaggtttt

SEQ ID NO: 5335 - DNA, 20 bp, Artificial Sequence
  Description of Artificial Sequence: Synthetic oligonucleotide
  Target: ATXN2; (-) strand; PAM type: NAAAAC; PAM sequence: GAAAAC
ctgtctctatttaaaaaaaa

SEQ ID NO: 5336 - DNA, 20 bp, Artificial Sequence
  Description of Artificial Sequence: Synthetic oligonucleotide
  Target: ATXN2; (-) strand; PAM type: NAAAAC; PAM sequence: CAAAAC
caaataggaaatgttgcaaa

SEQ ID NO: 5337 - DNA, 20 bp, Artificial Sequence
  Description of Artificial Sequence: Synthetic oligonucleotide
  Target: ATXN2; (-) strand; PAM type: NAAAAC; PAM sequence: GAAAAC
tgtgtgattgctacattttg

SEQ ID NO: 5338 - DNA, 20 bp, Artificial Sequence
  Description of Artificial Sequence: Synthetic oligonucleotide
  Target: ATXN2; (-) strand; PAM type: NAAAAC; PAM sequence: TAAAAC
atcaaaggtgtttagtttta

SEQ ID NO: 5339 - DNA, 20 bp, Artificial Sequence
  Description of Artificial Sequence: Synthetic oligonucleotide
  Target: ATXN2; (-) strand; PAM type: NAAAAC; PAM sequence: AAAAAC
tatgtgagaataataagcaa

SEQ ID NO: 5340 - DNA, 20 bp, Artificial Sequence
  Description of Artificial Sequence: Synthetic oligonucleotide
  Target: ATXN2; (-) strand; PAM type: NAAAAC; PAM sequence: TAAAAC
aaaatgagaagtattttatg

SEQ ID NO: 5341 - DNA, 20 bp, Artificial Sequence
  Description of Artificial Sequence: Synthetic oligonucleotide
  Target: ATXN2; (-) strand; PAM type: NAAAAC; PAM sequence: GAAAAC
ataaaggtgttctccagcat

SEQ ID NO: 5342 - DNA, 20 bp, Artificial Sequence
  Description of Artificial Sequence: Synthetic oligonucleotide
  Target: ATXN2; (-) strand; PAM type: NAAAAC; PAM sequence: GAAAAC
tcttcttaatttaagtttct

SEQ ID NO: 5343 - DNA, 20 bp, Artificial Sequence
  Description of Artificial Sequence: Synthetic oligonucleotide
  Target: ATXN2; (-) strand; PAM type: NAAAAC; PAM sequence: AAAAAC
ttaatttttgtaccatataa

SEQ ID NO: 5344 - DNA, 20 bp, Artificial Sequence
  Description of Artificial Sequence: Synthetic oligonucleotide
  Target: ATXN2; (-) strand; PAM type: NAAAAC; PAM sequence: AAAAAC
tcgtgctggaggaactggaa

SEQ ID NO: 5345 - DNA, 20 bp, Artificial Sequence
  Description of Artificial Sequence: Synthetic oligonucleotide
  Target: ATXN2; (-) strand; PAM type: NAAAAC; PAM sequence: AAAAAC
cctggaatatttctataaag

SEQ ID NO: 5346 - DNA, 20 bp, Artificial Sequence
  Description of Artificial Sequence: Synthetic oligonucleotide
  Target: ATXN2; (-) strand; PAM type: NAAAAC; PAM sequence: TAAAAC
aaaaaaatcagttgcctttt

SEQ ID NO: 5347 - DNA, 20 bp, Artificial Sequence
  Description of Artificial Sequence: Synthetic oligonucleotide
  Target: ATXN2; (-) strand; PAM type: NAAAAC; PAM sequence: CAAAAC
gtaggaaaaccccatatcta

SEQ ID NO: 5348 - DNA, 20 bp, Artificial Sequence
  Description of Artificial Sequence: Synthetic oligonucleotide
  Target: ATXN2; (-) strand; PAM type: NAAAAC; PAM sequence: GAAAAC
gaccaacctgggtgatgtag

SEQ ID NO: 5349 - DNA, 20 bp, Artificial Sequence
  Description of Artificial Sequence: Synthetic oligonucleotide
  Target: ATXN2; (-) strand; PAM type: NAAAAC; PAM sequence: AAAAAC
gctgttgtgagttatatttt

SEQ ID NO: 5350 - DNA, 20 bp, Artificial Sequence
  Description of Artificial Sequence: Synthetic oligonucleotide
  Target: ATXN2; (-) strand; PAM type: NAAAAC; PAM sequence: CAAAAC
gaccagcctgaggaacatga

SEQ ID NO: 5351 - DNA, 20 bp, Artificial Sequence
  Description of Artificial Sequence: Synthetic oligonucleotide
  Target: ATXN2; (-) strand; PAM type: NAAAAC; PAM sequence: CAAAAC
aacaaaacaaaaaaaaatag

SEQ ID NO: 5352 - DNA, 20 bp, Artificial Sequence
  Description of Artificial Sequence: Synthetic oligonucleotide
  Target: ATXN2; (-) strand; PAM type: NAAAAC; PAM sequence: CAAAAC
cactaatgatagctgatgaa

SEQ ID NO: 5353 - DNA, 20 bp, Artificial Sequence
  Description of Artificial Sequence: Synthetic oligonucleotide
  Target: ATXN2; (-) strand; PAM type: NAAAAC; PAM sequence: GAAAAC
ttgcttcatcagtgaagatg

SEQ ID NO: 5354 - DNA, 20 bp, Artificial Sequence
  Description of Artificial Sequence: Synthetic oligonucleotide
  Target: ATXN2; (-) strand; PAM type: NAAAAC; PAM sequence: TAAAAC
ttactcctatgaaacgccta

SEQ ID NO: 5355 - DNA, 20 bp, Artificial Sequence
  Description of Artificial Sequence: Synthetic oligonucleotide
  Target: ATXN2; (-) strand; PAM type: NAAAAC; PAM sequence: TAAAAC
agctgttttcaatgattact

SEQ ID NO: 5356 - DNA, 20 bp, Artificial Sequence
  Description of Artificial Sequence: Synthetic oligonucleotide
  Target: ATXN2; (-) strand; PAM type: NAAAAC; PAM sequence: TAAAAC
gtgatttcatagatgttaac

SEQ ID NO: 5357 - DNA, 20 bp, Artificial Sequence
  Description of Artificial Sequence: Synthetic oligonucleotide
  Target: ATXN2; (-) strand; PAM type: NAAAAC; PAM sequence: GAAAAC
accatcctggccaacatggt

SEQ ID NO: 5358 - DNA, 20 bp, Artificial Sequence
  Description of Artificial Sequence: Synthetic oligonucleotide
  Target: ATXN2; (-) strand; PAM type: NAAAAC; PAM sequence: CAAAAC
atcacttgaggtcaggagta

SEQ ID NO: 5359 - DNA, 20 bp, Artificial Sequence
  Description of Artificial Sequence: Synthetic oligonucleotide
  Target: ATXN2; (-) strand; PAM type: NAAAAC; PAM sequence: AAAAAC
accagcctgggcaacatggc

SEQ ID NO: 5360 - DNA, 20 bp, Artificial Sequence
  Description of Artificial Sequence: Synthetic oligonucleotide
  Target: ATXN2; (-) strand; PAM type: NAAAAC; PAM sequence: AAAAAC
aacaaaaaacaaacaaacaa

SEQ ID NO: 5361 - DNA, 20 bp, Artificial Sequence
  Description of Artificial Sequence: Synthetic oligonucleotide
  Target: ATXN2; (-) strand; PAM type: NAAAAC; PAM sequence: AAAAAC
tcaaaacaaacaaacaaaca

SEQ ID NO: 5362 - DNA, 20 bp, Artificial Sequence
  Description of Artificial Sequence: Synthetic oligonucleotide
  Target: ATXN2; (-) strand; PAM type: NAAAAC; PAM sequence: CAAAAC
aacagagtgagactccatct

SEQ ID NO: 5363 - DNA, 20 bp, Artificial Sequence
  Description of Artificial Sequence: Synthetic oligonucleotide
  Target: ATXN2; (-) strand; PAM type: NAAAAC; PAM sequence: AAAAAC
ttcacatggattttatgaag

SEQ ID NO: 5364 - DNA, 20 bp, Artificial Sequence
  Description of Artificial Sequence: Synthetic oligonucleotide
  Target: ATXN2; (-) strand; PAM type: NAAAAC; PAM sequence: TAAAAC
tgcctagctctctagcaata

SEQ ID NO: 5365 - DNA, 20 bp, Artificial Sequence
  Description of Artificial Sequence: Synthetic oligonucleotide
  Target: ATXN2; (-) strand; PAM type: NAAAAC; PAM sequence: AAAAAC
tatatttatttttaattttt

SEQ ID NO: 5366 - DNA, 20 bp, Artificial Sequence
  Description of Artificial Sequence: Synthetic oligonucleotide
  Target: ATXN2; (-) strand; PAM type: NAAAAC; PAM sequence: CAAAAC
acgtttccttgtcattattc

SEQ ID NO: 5367 - DNA, 20 bp, Artificial Sequence
  Description of Artificial Sequence: Synthetic oligonucleotide
  Target: ATXN2; (-) strand; PAM type: NAAAAC; PAM sequence: AAAAAC
gattcaaccaaccatggatc

SEQ ID NO: 5368 - DNA, 20 bp, Artificial Sequence
  Description of Artificial Sequence: Synthetic oligonucleotide
  Target: ATXN2; (-) strand; PAM type: NAAAAC; PAM sequence: AAAAAC
ataagtgtatatgtttcaat

SEQ ID NO: 5369 - DNA, 20 bp, Artificial Sequence
  Description of Artificial Sequence: Synthetic oligonucleotide
  Target: ATXN2; (-) strand; PAM type: NAAAAC; PAM sequence: AAAAAC
ctcactgtgctgctaggttg

SEQ ID NO: 5370 - DNA, 20 bp, Artificial Sequence
  Description of Artificial Sequence: Synthetic oligonucleotide
  Target: ATXN2; (-) strand; PAM type: NAAAAC; PAM sequence: AAAAAC
tttttgtaccccagggctag

SEQ ID NO: 5371 - DNA, 20 bp, Artificial Sequence
  Description of Artificial Sequence: Synthetic oligonucleotide
  Target: ATXN2; (-) strand; PAM type: NAAAAC; PAM sequence: TAAAAC
aagtcctaaacgtagctttt

SEQ ID NO: 5372 - DNA, 20 bp, Artificial Sequence
  Description of Artificial Sequence: Synthetic oligonucleotide
  Target: ATXN2; (-) strand; PAM type: NAAAAC; PAM sequence: CAAAAC
ctttttccttgataggatgt

SEQ ID NO: 5373 - DNA, 20 bp, Artificial Sequence
  Description of Artificial Sequence: Synthetic oligonucleotide
  Target: ATXN2; (-) strand; PAM type: NAAAAC; PAM sequence: CAAAAC
aaaaacaatacaaaacaaaa

SEQ ID NO: 5374 - DNA, 20 bp, Artificial Sequence
  Description of Artificial Sequence: Synthetic oligonucleotide
  Target: ATXN2; (-) strand; PAM type: NAAAAC; PAM sequence: CAAAAC
tctcaaaaaacaatacaaaa

SEQ ID NO: 5375 - DNA, 20 bp, Artificial Sequence
  Description of Artificial Sequence: Synthetic oligonucleotide
  Target: ATXN2; (-) strand; PAM type: NAAAAC; PAM sequence: CAAAAC
gactgtctcaaaaaacaata

SEQ ID NO: 5376 - DNA, 20 bp, Artificial Sequence
  Description of Artificial Sequence: Synthetic oligonucleotide
  Target: ATXN2; (-) strand; PAM type: NAAAAC; PAM sequence: AAAAAC
aacagagtaagactgtctca

SEQ ID NO: 5377 - DNA, 20 bp, Artificial Sequence
  Description of Artificial Sequence: Synthetic oligonucleotide
  Target: ATXN2; (-) strand; PAM type: NAAAAC; PAM sequence: CAAAAC
gaccagcctagccaatatgg

SEQ ID NO: 5378 - DNA, 20 bp, Artificial Sequence
  Description of Artificial Sequence: Synthetic oligonucleotide
  Target: ATXN2; (-) strand; PAM type: NAAAAC; PAM sequence: AAAAAC
ctttattatactatgtctta

SEQ ID NO: 5379 - DNA, 20 bp, Artificial Sequence
  Description of Artificial Sequence: Synthetic oligonucleotide
  Target: ATXN2; (-) strand; PAM type: NAAAAC; PAM sequence: AAAAAC
caagcaaagagaaaactaat

SEQ ID NO: 5380 - DNA, 20 bp, Artificial Sequence
  Description of Artificial Sequence: Synthetic oligonucleotide
  Target: ATXN2; (-) strand; PAM type: NAAAAC; PAM sequence: GAAAAC
caaaaacaagcaagcaaaga

SEQ ID NO: 5381 - DNA, 20 bp, Artificial Sequence
  Description of Artificial Sequence: Synthetic oligonucleotide
  Target: ATXN2; (-) strand; PAM type: NAAAAC; PAM sequence: AAAAAC
caacttgaaactttgattgc

SEQ ID NO: 5382 - DNA, 20 bp, Artificial Sequence
  Description of Artificial Sequence: Synthetic oligonucleotide
  Target: ATXN2; (-) strand; PAM type: NAAAAC; PAM sequence: CAAAAC
ccccatctctactaaaaata

SEQ ID NO: 5383 - DNA, 20 bp, Artificial Sequence
  Description of Artificial Sequence: Synthetic oligonucleotide
  Target: ATXN2; (-) strand; PAM type: NAAAAC; PAM sequence: CAAAAC
gtcagttttgtttatctctt

SEQ ID NO: 5384 - DNA, 20 bp, Artificial Sequence
  Description of Artificial Sequence: Synthetic oligonucleotide
  Target: ATXN2; (-) strand; PAM type: NAAAAC; PAM sequence: AAAAAC
tttttctggtctgcaaactt

SEQ ID NO: 5385 - DNA, 20 bp, Artificial Sequence
  Description of Artificial Sequence: Synthetic oligonucleotide
  Target: ATXN2; (-) strand; PAM type: NAAAAC; PAM sequence: TAAAAC
gaccaacctgggtaacatgg

SEQ ID NO: 5386 - DNA, 20 bp, Artificial Sequence
  Description of Artificial Sequence: Synthetic oligonucleotide
  Target: ATXN2; (-) strand; PAM type: NAAAAC; PAM sequence: GAAAAC
ctgtactttttcagttagca

SEQ ID NO: 5387 - DNA, 20 bp, Artificial Sequence
  Description of Artificial Sequence: Synthetic oligonucleotide
  Target: ATXN2; (-) strand; PAM type: NAAAAC; PAM sequence: TAAAAC
accgtcttctcagttgattt

SEQ ID NO: 5388 - DNA, 20 bp, Artificial Sequence
  Description of Artificial Sequence: Synthetic oligonucleotide
  Target: ATXN2; (-) strand; PAM type: NAAAAC; PAM sequence: AAAAAC
aatttaatatctcatgaaga

SEQ ID NO: 5389 - DNA, 20 bp, Artificial Sequence
  Description of Artificial Sequence: Synthetic oligonucleotide
  Target: ATXN2; (-) strand; PAM type: NAAAAC; PAM sequence: GAAAAC
cgtctccaccaaaaaaatac

SEQ ID NO: 5390 - DNA, 20 bp, Artificial Sequence
  Description of Artificial Sequence: Synthetic oligonucleotide
  Target: ATXN2; (-) strand; PAM type: NAAAAC; PAM sequence: GAAAAC
accagttgtttctgaacata

SEQ ID NO: 5391 - DNA, 20 bp, Artificial Sequence
  Description of Artificial Sequence: Synthetic oligonucleotide
  Target: ATXN2; (-) strand; PAM type: NAAAAC; PAM sequence: GAAAAC
cacctagcttctcaaaagct

SEQ ID NO: 5392 - DNA, 20 bp, Artificial Sequence
  Description of Artificial Sequence: Synthetic oligonucleotide
  Target: ATXN2; (-) strand; PAM type: NAAAAC; PAM sequence: AAAAAC
aaatgaaagcattattttcc

SEQ ID NO: 5393 - DNA, 20 bp, Artificial Sequence
  Description of Artificial Sequence: Synthetic oligonucleotide
  Target: ATXN2; (-) strand; PAM type: NAAAAC; PAM sequence: TAAAAC
ctagttccaagattatcccc

SEQ ID NO: 5394 - DNA, 20 bp, Artificial Sequence
  Description of Artificial Sequence: Synthetic oligonucleotide
  Target: ATXN2; (-) strand; PAM type: NAAAAC; PAM sequence: GAAAAC
attcctaacattttggaaaa

SEQ ID NO: 5395 - DNA, 20 bp, Artificial Sequence
  Description of Artificial Sequence: Synthetic oligonucleotide
  Target: ATXN2; (-) strand; PAM type: NAAAAC; PAM sequence: AAAAAC
cccttgtgacttaaaaaaaa

SEQ ID NO: 5396 - DNA, 20 bp, Artificial Sequence
  Description of Artificial Sequence: Synthetic oligonucleotide
  Target: ATXN2; (-) strand; PAM type: NAAAAC; PAM sequence: GAAAAC
aattatcttaagactaccaa

SEQ ID NO: 5397 - DNA, 20 bp, Artificial Sequence
  Description of Artificial Sequence: Synthetic oligonucleotide
  Target: ATXN2; (-) strand; PAM type: NAAAAC; PAM sequence: CAAAAC
caagcttaaggaaacaaaaa

SEQ ID NO: 5398 - DNA, 20 bp, Artificial Sequence
  Description of Artificial Sequence: Synthetic oligonucleotide
  Target: ATXN2; (-) strand; PAM type: NAAAAC; PAM sequence: AAAAAC
atcttcaagcttaaggaaac

SEQ ID NO: 5399 - DNA, 20 bp, Artificial Sequence
  Description of Artificial Sequence: Synthetic oligonucleotide
  Target: ATXN2; (-) strand; PAM type: NAAAAC; PAM sequence: AAAAAC
caaacaaacaaacaaacaaa

SEQ ID NO: 5400 - DNA, 20 bp, Artificial Sequence
  Description of Artificial Sequence: Synthetic oligonucleotide
  Target: ATXN2; (-) strand; PAM type: NAAAAC; PAM sequence: TAAAAC
aagagcttacaaagaatact

SEQ ID NO: 5401 - DNA, 20 bp, Artificial Sequence
  Description of Artificial Sequence: Synthetic oligonucleotide
  Target: ATXN2; (-) strand; PAM type: NAAAAC; PAM sequence: AAAAAC
aaaaaaaaaaaaaaaagttt

SEQ ID NO: 5402 - DNA, 20 bp, Artificial Sequence
  Description of Artificial Sequence: Synthetic oligonucleotide
  Target: ATXN2; (-) strand; PAM type: NAAAAC; PAM sequence: TAAAAC
tcataaatacagatatattg

SEQ ID NO: 5403 - DNA, 20 bp, Artificial Sequence
  Description of Artificial Sequence: Synthetic oligonucleotide
  Target: ATXN2; (-) strand; PAM type: NAAAAC; PAM sequence: AAAAAC
ttttctatttttaaccaagg

SEQ ID NO: 5404 - DNA, 20 bp, Artificial Sequence
  Description of Artificial Sequence: Synthetic oligonucleotide
  Target: ATXN2; (-) strand; PAM type: NAAAAC; PAM sequence: TAAAAC
gaaataataaaatttattta

SEQ ID NO: 5405 - DNA, 20 bp, Artificial Sequence
  Description of Artificial Sequence: Synthetic oligonucleotide
  Target: ATXN2; (-) strand; PAM type: NAAAAC; PAM sequence: TAAAAC
tttaatgagaatatattaaa

SEQ ID NO: 5406 - DNA, 20 bp, Artificial Sequence
  Description of Artificial Sequence: Synthetic oligonucleotide
  Target: ATXN2; (-) strand; PAM type: NAAAAC; PAM sequence: GAAAAC
gtttctcctgcttccctgga

SEQ ID NO: 5407 - DNA, 20 bp, Artificial Sequence
  Description of Artificial Sequence: Synthetic oligonucleotide
  Target: ATXN2; (-) strand; PAM type: NAAAAC; PAM sequence: AAAAAC
ttaaatgccacccatatatt

SEQ ID NO: 5408 - DNA, 20 bp, Artificial Sequence
  Description of Artificial Sequence: Synthetic oligonucleotide
  Target: ATXN2; (-) strand; PAM type: NAAAAC; PAM sequence: AAAAAC
tgatctgagataaaattgat

SEQ ID NO: 5409 - DNA, 20 bp, Artificial Sequence
  Description of Artificial Sequence: Synthetic oligonucleotide
  Target: ATXN2; (-) strand; PAM type: NAAAAC; PAM sequence: TAAAAC
gtgttttaactttagtttat

SEQ ID NO: 5410 - DNA, 20 bp, Artificial Sequence
  Description of Artificial Sequence: Synthetic oligonucleotide
  Target: ATXN2; (-) strand; PAM type: NAAAAC; PAM sequence: TAAAAC
ttatgtcagttaagttatgc

SEQ ID NO: 5411 - DNA, 20 bp, Artificial Sequence
  Description of Artificial Sequence: Synthetic oligonucleotide
  Target: ATXN2; (-) strand; PAM type: NAAAAC; PAM sequence: TAAAAC
ttttcgttatgcctcagagt

SEQ ID NO: 5412 - DNA, 20 bp, Artificial Sequence
  Description of Artificial Sequence: Synthetic oligonucleotide
  Target: ATXN2; (-) strand; PAM type: NAAAAC; PAM sequence: AAAAAC
taaacagaattttaaagtta

SEQ ID NO: 5413 - DNA, 20 bp, Artificial Sequence
  Description of Artificial Sequence: Synthetic oligonucleotide
  Target: ATXN2; (-) strand; PAM type: NAAAAC; PAM sequence: AAAAAC
aaatttgcttaaaaaacaac

SEQ ID NO: 5414 - DNA, 20 bp, Artificial Sequence
  Description of Artificial Sequence: Synthetic oligonucleotide
  Target: ATXN2; (-) strand; PAM type: NAAAAC; PAM sequence: AAAAAC
tgactagagaaatttgctta

SEQ ID NO: 5415 - DNA, 20 bp, Artificial Sequence
  Description of Artificial Sequence: Synthetic oligonucleotide
  Target: ATXN2; (-) strand; PAM type: NAAAAC; PAM sequence: AAAAAC
ttgggtaggttctcaatttt

SEQ ID NO: 5416 - DNA, 20 bp, Artificial Sequence
  Description of Artificial Sequence: Synthetic oligonucleotide
  Target: ATXN2; (-) strand; PAM type: NAAAAC; PAM sequence: AAAAAC
cccaagacaatcacttggcc

SEQ ID NO: 5417 - DNA, 20 bp, Artificial Sequence
  Description of Artificial Sequence: Synthetic oligonucleotide
  Target: ATXN2; (-) strand; PAM type: NAAAAC; PAM sequence: TAAAAC
ttttgtggatattaaattag

SEQ ID NO: 5418 - DNA, 20 bp, Artificial Sequence
  Description of Artificial Sequence: Synthetic oligonucleotide
  Target: ATXN2; (-) strand; PAM type: NAAAAC; PAM sequence: AAAAAC
ttgccgatattggagccatg

SEQ ID NO: 5419 - DNA, 20 bp, Artificial Sequence
  Description of Artificial Sequence: Synthetic oligonucleotide
  Target: ATXN2; (-) strand; PAM type: NAAAAC; PAM sequence: AAAAAC
catggagcaagtttgagggg

SEQ ID NO: 5420 - DNA, 20 bp, Artificial Sequence
  Description of Artificial Sequence: Synthetic oligonucleotide
  Target: ATXN2; (-) strand; PAM type: NAAAAC; PAM sequence: GAAAAC
gcataacctgtagagtcaga

SEQ ID NO: 5421 - DNA, 20 bp, Artificial Sequence
  Description of Artificial Sequence: Synthetic oligonucleotide
  Target: ATXN2; (-) strand; PAM type: NAAAAC; PAM sequence: TAAAAC
agataactcagaagaatttt

SEQ ID NO: 5422 - DNA, 20 bp, Artificial Sequence
  Description of Artificial Sequence: Synthetic oligonucleotide
  Target: ATXN2; (-) strand; PAM type: NAAAAC; PAM sequence: AAAAAC
acaactactttgacattttg

SEQ ID NO: 5423 - DNA, 20 bp, Artificial Sequence
  Description of Artificial Sequence: Synthetic oligonucleotide
  Target: ATXN2; (-) strand; PAM type: NAAAAC; PAM sequence: TAAAAC
ggggctgataagtatttttc

SEQ ID NO: 5424 - DNA, 20 bp, Artificial Sequence
  Description of Artificial Sequence: Synthetic oligonucleotide
  Target: ATXN2; (-) strand; PAM type: NAAAAC; PAM sequence: TAAAAC
ggtgtcacaactgctaatgg

SEQ ID NO: 5425 - DNA, 20 bp, Artificial Sequence
  Description of Artificial Sequence: Synthetic oligonucleotide
  Target: ATXN2; (-) strand; PAM type: NAAAAC; PAM sequence: TAAAAC
tttgacctaaagtctagtaa

SEQ ID NO: 5426 - DNA, 20 bp, Artificial Sequence
  Description of Artificial Sequence: Synthetic oligonucleotide
  Target: ATXN2; (-) strand; PAM type: NAAAAC; PAM sequence: AAAAAC
cttctctaagaaataaaaat

SEQ ID NO: 5427 - DNA, 20 bp, Artificial Sequence
  Description of Artificial Sequence: Synthetic oligonucleotide
  Target: ATXN2; (-) strand; PAM type: NAAAAC; PAM sequence: TAAAAC
ccacaaaattcttttatttc

SEQ ID NO: 5428 - DNA, 20 bp, Artificial Sequence
  Description of Artificial Sequence: Synthetic oligonucleotide
  Target: ATXN2; (-) strand; PAM type: NAAAAC; PAM sequence: CAAAAC
agattatataaactttcaac

SEQ ID NO: 5429 - DNA, 20 bp, Artificial Sequence
  Description of Artificial Sequence: Synthetic oligonucleotide
  Target: ATXN2; (-) strand; PAM type: NAAAAC; PAM sequence: AAAAAC
agacatgaatatggaaagtt

SEQ ID NO: 5430 - DNA, 20 bp, Artificial Sequence
  Description of Artificial Sequence: Synthetic oligonucleotide
  Target: ATXN2; (-) strand; PAM type: NAAAAC; PAM sequence: AAAAAC
tacttaaatgtgtgcttttc

SEQ ID NO: 5431 - DNA, 20 bp, Artificial Sequence
  Description of Artificial Sequence: Synthetic oligonucleotide
  Target: ATXN2; (-) strand; PAM type: NAAAAC; PAM sequence: AAAAAC
tttgtttagaataatactgt

SEQ ID NO: 5432 - DNA, 20 bp, Artificial Sequence
  Description of Artificial Sequence: Synthetic oligonucleotide
  Target: ATXN2; (-) strand; PAM type: NAAAAC; PAM sequence: TAAAAC
agctacttttggtgaaattt

SEQ ID NO: 5433 - DNA, 20 bp, Artificial Sequence
  Description of Artificial Sequence: Synthetic oligonucleotide
  Target: ATXN2; (-) strand; PAM type: NAAAAC; PAM sequence: TAAAAC
atccaaacttgtaaccactg

SEQ ID NO: 5434 - DNA, 20 bp, Artificial Sequence
  Description of Artificial Sequence: Synthetic oligonucleotide
  Target: ATXN2; (-) strand; PAM type: NAAAAC; PAM sequence: AAAAAC
atctctgaaaaaacaaaaac

SEQ ID NO: 5435 - DNA, 20 bp, Artificial Sequence
  Description of Artificial Sequence: Synthetic oligonucleotide
  Target: ATXN2; (-) strand; PAM type: NAAAAC; PAM sequence: AAAAAC
gaccccatctctgaaaaaac

SEQ ID NO: 5436 - DNA, 20 bp, Artificial Sequence
  Description of Artificial Sequence: Synthetic oligonucleotide
  Target: ATXN2; (-) strand; PAM type: NAAAAC; PAM sequence: AAAAAC
gacaaagaccccatctctga

SEQ ID NO: 5437 - DNA, 20 bp, Artificial Sequence
  Description of Artificial Sequence: Synthetic oligonucleotide
  Target: ATXN2; (-) strand; PAM type: NAAAAC; PAM sequence: AAAAAC
ctagaggcttttataaattg

SEQ ID NO: 5438 - DNA, 20 bp, Artificial Sequence
  Description of Artificial Sequence: Synthetic oligonucleotide
  Target: ATXN2; (-) strand; PAM type: NAAAAC; PAM sequence: CAAAAC
ccgcaggaataggaattgat

SEQ ID NO: 5439 - DNA, 20 bp, Artificial Sequence
  Description of Artificial Sequence: Synthetic oligonucleotide
  Target: ATXN2; (-) strand; PAM type: NAAAAC; PAM sequence: AAAAAC
gagtgtgagaagaaaagaaa

SEQ ID NO: 5440 - DNA, 20 bp, Artificial Sequence
  Description of Artificial Sequence: Synthetic oligonucleotide
  Target: ATXN2; (-) strand; PAM type: NAAAAC; PAM sequence: CAAAAC
gaccagcctggccaacatgg

SEQ ID NO: 5441 - DNA, 20 bp, Artificial Sequence
  Description of Artificial Sequence: Synthetic oligonucleotide
  Target: ATXN2; (-) strand; PAM type: NAAAAC; PAM sequence: GAAAAC
ttaaacttttctggagttca

SEQ ID NO: 5442 - DNA, 20 bp, Artificial Sequence
  Description of Artificial Sequence: Synthetic oligonucleotide
  Target: ATXN2; (-) strand; PAM type: NAAAAC; PAM sequence: TAAAAC
atcccatgctgactcttagt

SEQ ID NO: 5443 - DNA, 20 bp, Artificial Sequence
  Description of Artificial Sequence: Synthetic oligonucleotide
  Target: ATXN2; (-) strand; PAM type: NAAAAC; PAM sequence: CAAAAC
tagagttttagatacttttt

SEQ ID NO: 5444 - DNA, 20 bp, Artificial Sequence
  Description of Artificial Sequence: Synthetic oligonucleotide
  Target: ATXN2; (-) strand; PAM type: NAAAAC; PAM sequence: CAAAAC
tgcacacatggtaaaaagtt

SEQ ID NO: 5445 - DNA, 20 bp, Artificial Sequence
  Description of Artificial Sequence: Synthetic oligonucleotide
  Target: ATXN2; (-) strand; PAM type: NAAAAC; PAM sequence: AAAAAC
caaaaaaaaaaaaaaaaaaa

SEQ ID NO: 5446 - DNA, 20 bp, Artificial Sequence
  Description of Artificial Sequence: Synthetic oligonucleotide
  Target: ATXN2; (-) strand; PAM type: NAAAAC; PAM sequence: AAAAAC
gagcttaagaaaattgcttt

SEQ ID NO: 5447 - DNA, 20 bp, Artificial Sequence
  Description of Artificial Sequence: Synthetic oligonucleotide
  Target: ATXN2; (-) strand; PAM type: NAAAAC; PAM sequence: TAAAAC
ctttgtattggaatcttttc

SEQ ID NO: 5448 - DNA, 20 bp, Artificial Sequence
  Description of Artificial Sequence: Synthetic oligonucleotide
  Target: ATXN2; (-) strand; PAM type: NAAAAC; PAM sequence: GAAAAC
agaagcctaatggagaaaat

SEQ ID NO: 5449 - DNA, 20 bp, Artificial Sequence
  Description of Artificial Sequence: Synthetic oligonucleotide
  Target: ATXN2; (-) strand; PAM type: NAAAAC; PAM sequence: TAAAAC
tcttatgcatgcagatatat

SEQ ID NO: 5450 - DNA, 20 bp, Artificial Sequence
  Description of Artificial Sequence: Synthetic oligonucleotide
  Target: ATXN2; (-) strand; PAM type: NAAAAC; PAM sequence: TAAAAC
tgctagtgggatggtttaag

SEQ ID NO: 5451 - DNA, 20 bp, Artificial Sequence
  Description of Artificial Sequence: Synthetic oligonucleotide
  Target: ATXN2; (-) strand; PAM type: NAAAAC; PAM sequence: CAAAAC
tagtggtactgagggagttg

SEQ ID NO: 5452 - DNA, 20 bp, Artificial Sequence
  Description of Artificial Sequence: Synthetic oligonucleotide
  Target: ATXN2; (-) strand; PAM type: NAAAAC; PAM sequence: CAAAAC
atgagaaaactgtgattaaa

SEQ ID NO: 5453 - DNA, 20 bp, Artificial Sequence
  Description of Artificial Sequence: Synthetic oligonucleotide
  Target: ATXN2; (-) strand; PAM type: NAAAAC; PAM sequence: GAAAAC
aaaaccaaatagattaatga

SEQ ID NO: 5454 - DNA, 20 bp, Artificial Sequence
  Description of Artificial Sequence: Synthetic oligonucleotide
  Target: ATXN2; (-) strand; PAM type: NAAAAC; PAM sequence: TAAAAC
acctacttcacactgataaa

SEQ ID NO: 5455 - DNA, 20 bp, Artificial Sequence
  Description of Artificial Sequence: Synthetic oligonucleotide
  Target: ATXN2; (-) strand; PAM type: NAAAAC; PAM sequence: CAAAAC
gtggctacgtatggagcatc

SEQ ID NO: 5456 - DNA, 20 bp, Artificial Sequence
  Description of Artificial Sequence: Synthetic oligonucleotide
  Target: ATXN2; (-) strand; PAM type: NAAAAC; PAM sequence: TAAAAC
tccagcctgggcaacaagag

SEQ ID NO: 5457 - DNA, 20 bp, Artificial Sequence
  Description of Artificial Sequence: Synthetic oligonucleotide
  Target: ATXN2; (-) strand; PAM type: NAAAAC; PAM sequence: TAAAAC
cctacaaaatatgtcagaat

SEQ ID NO: 5458 - DNA, 20 bp, Artificial Sequence
  Description of Artificial Sequence: Synthetic oligonucleotide
  Target: ATXN2; (-) strand; PAM type: NAAAAC; PAM sequence: AAAAAC
acagagccagactctgtctc

SEQ ID NO: 5459 - DNA, 20 bp, Artificial Sequence
  Description of Artificial Sequence: Synthetic oligonucleotide
  Target: ATXN2; (-) strand; PAM type: NAAAAC; PAM sequence: AAAAAC
gacaagcaagaccttgtctc

SEQ ID NO: 5460 - DNA, 20 bp, Artificial Sequence
  Description of Artificial Sequence: Synthetic oligonucleotide
  Target: ATXN2; (-) strand; PAM type: NAAAAC; PAM sequence: CAAAAC
gactcgccttggcaacttgg

SEQ ID NO: 5461 - DNA, 20 bp, Artificial Sequence
  Description of Artificial Sequence: Synthetic oligonucleotide
  Target: ATXN2; (-) strand; PAM type: NAAAAC; PAM sequence: AAAAAC
ttattaaatataaaaaaaat

SEQ ID NO: 5462 - DNA, 20 bp, Artificial Sequence
  Description of Artificial Sequence: Synthetic oligonucleotide
  Target: ATXN2; (-) strand; PAM type: NAAAAC; PAM sequence: GAAAAC
ttaatctttccctttagcat

SEQ ID NO: 5463 - DNA, 20 bp, Artificial Sequence
  Description of Artificial Sequence: Synthetic oligonucleotide
  Target: ATXN2; (-) strand; PAM type: NAAAAC; PAM sequence: TAAAAC
tgaggttctcttcattttgc

SEQ ID NO: 5464 - DNA, 20 bp, Artificial Sequence
  Description of Artificial Sequence: Synthetic oligonucleotide
  Target: ATXN2; (-) strand; PAM type: NAAAAC; PAM sequence: GAAAAC
ggaagtactatcagtatgga

SEQ ID NO: 5465 - DNA, 20 bp, Artificial Sequence
  Description of Artificial Sequence: Synthetic oligonucleotide
  Target: ATXN2; (-) strand; PAM type: NAAAAC; PAM sequence: CAAAAC
cctgggcaggtatcttattt

SEQ ID NO: 5466 - DNA, 20 bp, Artificial Sequence
  Description of Artificial Sequence: Synthetic oligonucleotide
  Target: ATXN2; (-) strand; PAM type: NAAAAC; PAM sequence: GAAAAC
aaggtagagaacggttggta

SEQ ID NO: 5467 - DNA, 20 bp, Artificial Sequence
  Description of Artificial Sequence: Synthetic oligonucleotide
  Target: ATXN2; (-) strand; PAM type: NAAAAC; PAM sequence: GAAAAC
atgttaatgcatttttgttg

SEQ ID NO: 5468 - DNA, 20 bp, Artificial Sequence
  Description of Artificial Sequence: Synthetic oligonucleotide
  Target: ATXN2; (-) strand; PAM type: NAAAAC; PAM sequence: AAAAAC
taagacaaaccatagaaaca

SEQ ID NO: 5469 - DNA, 20 bp, Artificial Sequence
  Description of Artificial Sequence: Synthetic oligonucleotide
  Target: ATXN2; (-) strand; PAM type: NAAAAC; PAM sequence: TAAAAC
ggtatatatgaaggagtttt

SEQ ID NO: 5470 - DNA, 20 bp, Artificial Sequence
  Description of Artificial Sequence: Synthetic oligonucleotide
  Target: ATXN2; (-) strand; PAM type: NAAAAC; PAM sequence: GAAAAC
tgaggtataaaaagtaaaat

SEQ ID NO: 5471 - DNA, 20 bp, Artificial Sequence
  Description of Artificial Sequence: Synthetic oligonucleotide
  Target: ATXN2; (-) strand; PAM type: NAAAAC; PAM sequence: TAAAAC
gtttttcttgtcattattcc

SEQ ID NO: 5472 - DNA, 20 bp, Artificial Sequence
  Description of Artificial Sequence: Synthetic oligonucleotide
  Target: ATXN2; (-) strand; PAM type: NAAAAC; PAM sequence: AAAAAC
tccgtctctacaaaaagtaa

SEQ ID NO: 5473 - DNA, 20 bp, Artificial Sequence
  Description of Artificial Sequence: Synthetic oligonucleotide
  Target: ATXN2; (-) strand; PAM type: NAAAAC; PAM sequence: GAAAAC
tggtttgactgataacactt

SEQ ID NO: 5474 - DNA, 20 bp, Artificial Sequence
  Description of Artificial Sequence: Synthetic oligonucleotide
  Target: ATXN2; (-) strand; PAM type: NAAAAC; PAM sequence: CAAAAC
ttttttatgtcatgtttagt

SEQ ID NO: 5475 - DNA, 20 bp, Artificial Sequence
  Description of Artificial Sequence: Synthetic oligonucleotide
  Target: ATXN2; (-) strand; PAM type: NAAAAC; PAM sequence: AAAAAC
actaagtgcaaatctaagtg

SEQ ID NO: 5476 - DNA, 20 bp, Artificial Sequence
  Description of Artificial Sequence: Synthetic oligonucleotide
  Target: ATXN2; (-) strand; PAM type: NAAAAC; PAM sequence: TAAAAC
aaagcagggaaagcccctta

SEQ ID NO: 5477 - DNA, 20 bp, Artificial Sequence
  Description of Artificial Sequence: Synthetic oligonucleotide
  Target: ATXN2; (-) strand; PAM type: NAAAAC; PAM sequence: TAAAAC
tattggggaaaattagtagc

SEQ ID NO: 5478 - DNA, 20 bp, Artificial Sequence
  Description of Artificial Sequence: Synthetic oligonucleotide
  Target: ATXN2; (-) strand; PAM type: NAAAAC; PAM sequence: AAAAAC
ggcagcataacctaggaatg

SEQ ID NO: 5479 - DNA, 20 bp, Artificial Sequence
  Description of Artificial Sequence: Synthetic oligonucleotide
  Target: ATXN2; (-) strand; PAM type: NAAAAC; PAM sequence: CAAAAC
acacccccccacacccctac

SEQ ID NO: 5480 - DNA, 20 bp, Artificial Sequence
  Description of Artificial Sequence: Synthetic oligonucleotide
  Target: ATXN2; (-) strand; PAM type: NAAAAC; PAM sequence: AAAAAC
ctcagaaaaaaaaaaaaaca

SEQ ID NO: 5481 - DNA, 20 bp, Artificial Sequence
  Description of Artificial Sequence: Synthetic oligonucleotide
  Target: ATXN2; (-) strand; PAM type: NAAAAC; PAM sequence: AAAAAC
actctgtctcagaaaaaaaa

SEQ ID NO: 5482 - DNA, 20 bp, Artificial Sequence
  Description of Artificial Sequence: Synthetic oligonucleotide
  Target: ATXN2; (-) strand; PAM type: NAAAAC; PAM sequence: GAAAAC
tcgtttttttttttgttgtt

SEQ ID NO: 5483 - DNA, 20 bp, Artificial Sequence
  Description of Artificial Sequence: Synthetic oligonucleotide
  Target: ATXN2; (-) strand; PAM type: NAAAAC; PAM sequence: TAAAAC
ttatggttttctttcgttct

SEQ ID NO: 5484 - DNA, 20 bp, Artificial Sequence
  Description of Artificial Sequence: Synthetic oligonucleotide
  Target: ATXN2; (-) strand; PAM type: NAAAAC; PAM sequence: AAAAAC
gaggtagactctgtctcaaa

SEQ ID NO: 5485 - DNA, 20 bp, Artificial Sequence
  Description of Artificial Sequence: Synthetic oligonucleotide
  Target: ATXN2; (-) strand; PAM type: NAAAAC; PAM sequence: TAAAAC
cataacacctgactgttttt

SEQ ID NO: 5486 - DNA, 20 bp, Artificial Sequence
  Description of Artificial Sequence: Synthetic oligonucleotide
  Target: ATXN2; (-) strand; PAM type: NAAAAC; PAM sequence: TAAAAC
atagaccttctaatgtcctt

SEQ ID NO: 5487 - DNA, 20 bp, Artificial Sequence
  Description of Artificial Sequence: Synthetic oligonucleotide
  Target: ATXN2; (-) strand; PAM type: NAAAAC; PAM sequence: CAAAAC
ataacaagggcattctattt

SEQ ID NO: 5488 - DNA, 20 bp, Artificial Sequence
  Description of Artificial Sequence: Synthetic oligonucleotide
  Target: ATXN2; (-) strand; PAM type: NAAAAC; PAM sequence: AAAAAC
atcacttatagtctccaatt

SEQ ID NO: 5489 - DNA, 20 bp, Artificial Sequence
  Description of Artificial Sequence: Synthetic oligonucleotide
  Target: ATXN2; (-) strand; PAM type: NAAAAC; PAM sequence: GAAAAC
cagatctaaactggagagtt

SEQ ID NO: 5490 - DNA, 20 bp, Artificial Sequence
  Description of Artificial Sequence: Synthetic oligonucleotide
  Target: ATXN2; (-) strand; PAM type: NAAAAC; PAM sequence: CAAAAC
tcttagcccagaagccagac

SEQ ID NO: 5491 - DNA, 20 bp, Artificial Sequence
  Description of Artificial Sequence: Synthetic oligonucleotide
  Target: ATXN2; (-) strand; PAM type: NAAAAC; PAM sequence: TAAAAC
tgacatttcttatatgtaca

SEQ ID NO: 5492 - DNA, 20 bp, Artificial Sequence
  Description of Artificial Sequence: Synthetic oligonucleotide
  Target: ATXN2; (-) strand; PAM type: NAAAAC; PAM sequence: GAAAAC
attcttgtgttagcagttat

SEQ ID NO: 5493 - DNA, 20 bp, Artificial Sequence
  Description of Artificial Sequence: Synthetic oligonucleotide
  Target: ATXN2; (-) strand; PAM type: NAAAAC; PAM sequence: TAAAAC
aaaagaaaagcaatttcctc

SEQ ID NO: 5494 - DNA, 20 bp, Artificial Sequence
  Description of Artificial Sequence: Synthetic oligonucleotide
  Target: ATXN2; (-) strand; PAM type: NAAAAC; PAM sequence: TAAAAC
aatattagttacttaagtat

SEQ ID NO: 5495 - DNA, 20 bp, Artificial Sequence
  Description of Artificial Sequence: Synthetic oligonucleotide
  Target: ATXN2; (-) strand; PAM type: NAAAAC; PAM sequence: AAAAAC
acaaaacaaaacaaaacaaa

SEQ ID NO: 5496 - DNA, 20 bp, Artificial Sequence
  Description of Artificial Sequence: Synthetic oligonucleotide
  Target: ATXN2; (-) strand; PAM type: NAAAAC; PAM sequence: CAAAAC
aaaaacaaaacaaaacaaaa

SEQ ID NO: 5497 - DNA, 20 bp, Artificial Sequence
  Description of Artificial Sequence: Synthetic oligonucleotide
  Target: ATXN2; (-) strand; PAM type: NAAAAC; PAM sequence: CAAAAC
ttcctaaaaacaaaacaaaa

SEQ ID NO: 5498 - DNA, 20 bp, Artificial Sequence
  Description of Artificial Sequence: Synthetic oligonucleotide
  Target: ATXN2; (-) strand; PAM type: NAAAAC; PAM sequence: CAAAAC
tcagtttcctaaaaacaaaa

SEQ ID NO: 5499 - DNA, 20 bp, Artificial Sequence
  Description of Artificial Sequence: Synthetic oligonucleotide
  Target: ATXN2; (-) strand; PAM type: NAAAAC; PAM sequence: CAAAAC
ccacctcagtttcctaaaaa

SEQ ID NO: 5500 - DNA, 20 bp, Artificial Sequence
  Description of Artificial Sequence: Synthetic oligonucleotide
  Target: ATXN2; (-) strand; PAM type: NAAAAC; PAM sequence: AAAAAC
ccttcccacctcagtttcct

SEQ ID NO: 5501 - DNA, 20 bp, Artificial Sequence
  Description of Artificial Sequence: Synthetic oligonucleotide
  Target: ATXN2; (-) strand; PAM type: NAAAAC; PAM sequence: TAAAAC
caccacacctgcctaatttt

SEQ ID NO: 5502 - DNA, 20 bp, Artificial Sequence
  Description of Artificial Sequence: Synthetic oligonucleotide
  Target: ATXN2; (-) strand; PAM type: NAAAAC; PAM sequence: TAAAAC
gggtaaaggcactgaagggg

SEQ ID NO: 5503 - DNA, 20 bp, Artificial Sequence
  Description of Artificial Sequence: Synthetic oligonucleotide
  Target: ATXN2; (-) strand; PAM type: NAAAAC; PAM sequence: AAAAAC
tgaaactaattctaataatt

SEQ ID NO: 5504 - DNA, 20 bp, Artificial Sequence
  Description of Artificial Sequence: Synthetic oligonucleotide
  Target: ATXN2; (-) strand; PAM type: NAAAAC; PAM sequence: GAAAAC
aaaataataacaataatgaa

SEQ ID NO: 5505 - DNA, 20 bp, Artificial Sequence
  Description of Artificial Sequence: Synthetic oligonucleotide
  Target: ATXN2; (-) strand; PAM type: NAAAAC; PAM sequence: CAAAAC
gaccagcctggccaacatga

SEQ ID NO: 5506 - DNA, 20 bp, Artificial Sequence
  Description of Artificial Sequence: Synthetic oligonucleotide
  Target: ATXN2; (-) strand; PAM type: NAAAAC; PAM sequence: AAAAAC
ttctaatatagagatatgac

SEQ ID NO: 5507 - DNA, 20 bp, Artificial Sequence
  Description of Artificial Sequence: Synthetic oligonucleotide
  Target: ATXN2; (-) strand; PAM type: NAAAAC; PAM sequence: AAAAAC
aaaaaaaaaaaaaagaaaga

SEQ ID NO: 5508 - DNA, 20 bp, Artificial Sequence
  Description of Artificial Sequence: Synthetic oligonucleotide
  Target: ATXN2; (-) strand; PAM type: NAAAAC; PAM sequence: TAAAAC
attattaaattttttctata

SEQ ID NO: 5509 - DNA, 20 bp, Artificial Sequence
  Description of Artificial Sequence: Synthetic oligonucleotide
  Target: ATXN2; (-) strand; PAM type: NAAAAC; PAM sequence: AAAAAC
gactatacttcaacagtatg

SEQ ID NO: 5510 - DNA, 20 bp, Artificial Sequence
  Description of Artificial Sequence: Synthetic oligonucleotide
  Target: ATXN2; (-) strand; PAM type: NAAAAC; PAM sequence: GAAAAC
tttggatctctggaaagaaa

SEQ ID NO: 5511 - DNA, 20 bp, Artificial Sequence
  Description of Artificial Sequence: Synthetic oligonucleotide
  Target: ATXN2; (-) strand; PAM type: NAAAAC; PAM sequence: GAAAAC
gagttcttttagatgaagag

SEQ ID NO: 5512 - DNA, 20 bp, Artificial Sequence
  Description of Artificial Sequence: Synthetic oligonucleotide
  Target: ATXN2; (-) strand; PAM type: NAAAAC; PAM sequence: AAAAAC
acaaacaaacaaacaaacaa

SEQ ID NO: 5513 - DNA, 20 bp, Artificial Sequence
  Description of Artificial Sequence: Synthetic oligonucleotide
  Target: ATXN2; (-) strand; PAM type: NAAAAC; PAM sequence: AAAAAC
aaaaaaaaacaaacaaaaaa

SEQ ID NO: 5514 - DNA, 20 bp, Artificial Sequence
  Description of Artificial Sequence: Synthetic oligonucleotide
  Target: ATXN2; (-) strand; PAM type: NAAAAC; PAM sequence: AAAAAC
tctgtctccaaaaaaaaaaa

SEQ ID NO: 5515 - DNA, 20 bp, Artificial Sequence
  Description of Artificial Sequence: Synthetic oligonucleotide
  Target: ATXN2; (-) strand; PAM type: NAAAAC; PAM sequence: AAAAAC
tactaaaatgggaactacta

SEQ ID NO: 5516 - DNA, 20 bp, Artificial Sequence
  Description of Artificial Sequence: Synthetic oligonucleotide
  Target: ATXN2; (-) strand; PAM type: NAAAAC; PAM sequence: AAAAAC
aaaatgagaccttatctcaa

SEQ ID NO: 5517 - DNA, 20 bp, Artificial Sequence
  Description of Artificial Sequence: Synthetic oligonucleotide
  Target: ATXN2; (-) strand; PAM type: NAAAAC; PAM sequence: AAAAAC
taaaaaaaaaaaaaaaaaaa

SEQ ID NO: 5518 - DNA, 20 bp, Artificial Sequence
  Description of Artificial Sequence: Synthetic oligonucleotide
  Target: ATXN2; (-) strand; PAM type: NAAAAC; PAM sequence: AAAAAC
gtgaaaccctgtctctactg

SEQ ID NO: 5519 - DNA, 20 bp, Artificial Sequence
  Description of Artificial Sequence: Synthetic oligonucleotide
  Target: ATXN2; (-) strand; PAM type: NAAAAC; PAM sequence: TAAAAC
attctataatgaagtctttg

SEQ ID NO: 5520 - DNA, 20 bp, Artificial Sequence
  Description of Artificial Sequence: Synthetic oligonucleotide
  Target: ATXN2; (-) strand; PAM type: NAAAAC; PAM sequence: GAAAAC
tatgagtctgggttgtttat

SEQ ID NO: 5521 - DNA, 20 bp, Artificial Sequence
  Description of Artificial Sequence: Synthetic oligonucleotide
  Target: ATXN2; (-) strand; PAM type: NAAAAC; PAM sequence: AAAAAC
aaatcttaaaaatggaaggc

SEQ ID NO: 5522 - DNA, 20 bp, Artificial Sequence
  Description of Artificial Sequence: Synthetic oligonucleotide
  Target: ATXN2; (-) strand; PAM type: NAAAAC; PAM sequence: AAAAAC
gcagcctaccctgtctctta

SEQ ID NO: 5523 - DNA, 20 bp, Artificial Sequence
  Description of Artificial Sequence: Synthetic oligonucleotide
  Target: ATXN2; (-) strand; PAM type: NAAAAC; PAM sequence: CAAAAC
tgtaaatagttgagcatgaa

SEQ ID NO: 5524 - DNA, 20 bp, Artificial Sequence
  Description of Artificial Sequence: Synthetic oligonucleotide
  Target: ATXN2; (-) strand; PAM type: NAAAAC; PAM sequence: CAAAAC
aacagagcgagactctgtct

SEQ ID NO: 5525 - DNA, 20 bp, Artificial Sequence
  Description of Artificial Sequence: Synthetic oligonucleotide
  Target: ATXN2; (-) strand; PAM type: NAAAAC; PAM sequence: GAAAAC
attccacattctgaaacagt

SEQ ID NO: 5526 - DNA, 20 bp, Artificial Sequence
  Description of Artificial Sequence: Synthetic oligonucleotide
  Target: ATXN2; (-) strand; PAM type: NAAAAC; PAM sequence: CAAAAC
taaactttttaagtttgggc

SEQ ID NO: 5527 - DNA, 20 bp, Artificial Sequence
  Description of Artificial Sequence: Synthetic oligonucleotide
  Target: ATXN2; (-) strand; PAM type: NAAAAC; PAM sequence: TAAAAC
atgttcaaatatataaacat

SEQ ID NO: 5528 - DNA, 20 bp, Artificial Sequence
  Description of Artificial Sequence: Synthetic oligonucleotide
  Target: ATXN2; (-) strand; PAM type: NAAAAC; PAM sequence: GAAAAC
ttcacccgagttttcttttt

SEQ ID NO: 5529 - DNA, 20 bp, Artificial Sequence
  Description of Artificial Sequence: Synthetic oligonucleotide
  Target: ATXN2; (-) strand; PAM type: NAAAAC; PAM sequence: GAAAAC
tggcgggcgggggacggcag

SEQ ID NO: 5530 - DNA, 20 bp, Artificial Sequence
  Description of Artificial Sequence: Synthetic oligonucleotide
  Target: ATXN2; (-) strand; PAM type: NAAAAC; PAM sequence: TAAAAC
gctggctgggtaagttaaat

SEQ ID NO: 5531 - DNA, 20 bp, Artificial Sequence
  Description of Artificial Sequence: Synthetic oligonucleotide
  Target: ATXN2; (-) strand; PAM type: NAAAAC; PAM sequence: AAAAAC
cctgaagtcatttcacttta

SEQ ID NO: 5532 - DNA, 20 bp, Artificial Sequence
  Description of Artificial Sequence: Synthetic oligonucleotide
  Target: ATXN2; (-) strand; PAM type: NAAAAC; PAM sequence: GAAAAC
ttaatttcagttggactact

SEQ ID NO: 5533 - DNA, 20 bp, Artificial Sequence
  Description of Artificial Sequence: Synthetic oligonucleotide
  Target: ATXN2; (-) strand; PAM type: NAAAAC; PAM sequence: TAAAAC
tttttaccttagatgggaaa

SEQ ID NO: 5534 - DNA, 20 bp, Artificial Sequence
  Description of Artificial Sequence: Synthetic oligonucleotide
  Target: ATXN2; (-) strand; PAM type: NAAAAC; PAM sequence: CAAAAC
gcgtgagccaccacactggc

SEQ ID NO: 5535 - DNA, 20 bp, Artificial Sequence
  Description of Artificial Sequence: Synthetic oligonucleotide
  Target: ATXN2; (-) strand; PAM type: NAAAAC; PAM sequence: TAAAAC
tttattcaatggtagtgagt

SEQ ID NO: 5536 - DNA, 20 bp, Artificial Sequence
  Description of Artificial Sequence: Synthetic oligonucleotide
  Target: ATXN2; (-) strand; PAM type: NAAAAC; PAM sequence: TAAAAC
gtatgtaaattatatcttga

SEQ ID NO: 5537 - DNA, 20 bp, Artificial Sequence
  Description of Artificial Sequence: Synthetic oligonucleotide
  Target: ATXN2; (-) strand; PAM type: NAAAAC; PAM sequence: AAAAAC
cacaaccttagataaacctc

SEQ ID NO: 5538 - DNA, 20 bp, Artificial Sequence
  Description of Artificial Sequence: Synthetic oligonucleotide
  Target: ATXN2; (-) strand; PAM type: NAAAAC; PAM sequence: GAAAAC
ggaaccaacccaagataaat

SEQ ID NO: 5539 - DNA, 20 bp, Artificial Sequence
  Description of Artificial Sequence: Synthetic oligonucleotide
  Target: ATXN2; (-) strand; PAM type: NAAAAC; PAM sequence: CAAAAC
aaacaaacaaacaaatcccc

SEQ ID NO: 5540 - DNA, 20 bp, Artificial Sequence
  Description of Artificial Sequence: Synthetic oligonucleotide
  Target: ATXN2; (-) strand; PAM type: NAAAAC; PAM sequence: AAAAAC
aagacagcaagactctgcct

SEQ ID NO: 5541 - DNA, 20 bp, Artificial Sequence
  Description of Artificial Sequence: Synthetic oligonucleotide
  Target: ATXN2; (+) strand; PAM type: NAAAAC; PAM sequence: TAAAAC
gctgaaggtcaaaaatgatt

SEQ ID NO: 5542 - DNA, 20 bp, Artificial Sequence
  Description of Artificial Sequence: Synthetic oligonucleotide
  Target: ATXN2; (+) strand; PAM type: NAAAAC; PAM sequence: CAAAAC
ttctttaaaggattcaggtt

SEQ ID NO: 5543 - DNA, 20 bp, Artificial Sequence
  Description of Artificial Sequence: Synthetic oligonucleotide
  Target: ATXN2; (+) strand; PAM type: NAAAAC; PAM sequence: AAAAAC
atcctggtgccttacgaata

SEQ ID NO: 5544 - DNA, 20 bp, Artificial Sequence
  Description of Artificial Sequence: Synthetic oligonucleotide
  Target: ATXN2; (+) strand; PAM type: NAAAAC; PAM sequence: TAAAAC
gctaaaatgaaacctcagcc

SEQ ID NO: 5545 - DNA, 20 bp, Artificial Sequence
  Description of Artificial Sequence: Synthetic oligonucleotide
  Target: ATXN2; (+) strand; PAM type: NAAAAC; PAM sequence: AAAAAC
ccaagttaccaggacagctc

SEQ ID NO: 5546 - DNA, 20 bp, Artificial Sequence
  Description of Artificial Sequence: Synthetic oligonucleotide
  Target: ATXN2; (+) strand; PAM type: NAAAAC; PAM sequence: GAAAAC
agctcaaaaacatgctgaca

SEQ ID NO: 5547 - DNA, 20 bp, Artificial Sequence
  Description of Artificial Sequence: Synthetic oligonucleotide
  Target: ATXN2; (+) strand; PAM type: NAAAAC; PAM sequence: TAAAAC
acactaacttgatcagtttt

SEQ ID NO: 5548 - DNA, 20 bp, Artificial Sequence
  Description of Artificial Sequence: Synthetic oligonucleotide
  Target: ATXN2; (+) strand; PAM type: NAAAAC; PAM sequence: AAAAAC
gaaatcaacatatatatttt

SEQ ID NO: 5549 - DNA, 20 bp, Artificial Sequence
  Description of Artificial Sequence: Synthetic oligonucleotide
  Target: ATXN2; (+) strand; PAM type: NAAAAC; PAM sequence: GAAAAC
gaaaagcgaacattgaaaca

SEQ ID NO: 5550 - DNA, 20 bp, Artificial Sequence
  Description of Artificial Sequence: Synthetic oligonucleotide
  Target: ATXN2; (+) strand; PAM type: NAAAAC; PAM sequence: CAAAAC
ctatcctcgtgctagctgaa

SEQ ID NO: 5551 - DNA, 20 bp, Artificial Sequence
  Description of Artificial Sequence: Synthetic oligonucleotide
  Target: ATXN2; (+) strand; PAM type: NAAAAC; PAM sequence: TAAAAC
agaaacaaaccagtcagacg

SEQ ID NO: 5552 - DNA, 20 bp, Artificial Sequence
  Description of Artificial Sequence: Synthetic oligonucleotide
  Target: ATXN2; (+) strand; PAM type: NAAAAC; PAM sequence: TAAAAC
agacgtaaaaccacttcaga

SEQ ID NO: 5553 - DNA, 20 bp, Artificial Sequence
  Description of Artificial Sequence: Synthetic oligonucleotide
  Target: ATXN2; (+) strand; PAM type: NAAAAC; PAM sequence: GAAAAC
gacttttgggactcaggaag

SEQ ID NO: 5554 - DNA, 20 bp, Artificial Sequence
  Description of Artificial Sequence: Synthetic oligonucleotide
  Target: ATXN2; (+) strand; PAM type: NAAAAC; PAM sequence: GAAAAC
ataacatccctttcaaatag

SEQ ID NO: 5555 - DNA, 20 bp, Artificial Sequence
  Description of Artificial Sequence: Synthetic oligonucleotide
  Target: ATXN2; (+) strand; PAM type: NAAAAC; PAM sequence: AAAAAC
cctttttgccctttcagcac

SEQ ID NO: 5556 - DNA, 20 bp, Artificial Sequence
  Description of Artificial Sequence: Synthetic oligonucleotide
  Target: ATXN2; (+) strand; PAM type: NAAAAC; PAM sequence: GAAAAC
cagatatatggataaccagg

SEQ ID NO: 5557 - DNA, 20 bp, Artificial Sequence
  Description of Artificial Sequence: Synthetic oligonucleotide
  Target: ATXN2; (+) strand; PAM type: NAAAAC; PAM sequence: GAAAAC
tatttttaaggtctcagttg

SEQ ID NO: 5558 - DNA, 20 bp, Artificial Sequence
  Description of Artificial Sequence: Synthetic oligonucleotide
  Target: ATXN2; (+) strand; PAM type: NAAAAC; PAM sequence: CAAAAC
caccttcactgatcccatga

SEQ ID NO: 5559 - DNA, 20 bp, Artificial Sequence
  Description of Artificial Sequence: Synthetic oligonucleotide
  Target: ATXN2; (+) strand; PAM type: NAAAAC; PAM sequence: GAAAAC
cgacaggaaagaattgagag

SEQ ID NO: 5560 - DNA, 20 bp, Artificial Sequence
  Description of Artificial Sequence: Synthetic oligonucleotide
  Target: ATXN2; (+) strand; PAM type: NAAAAC; PAM sequence: TAAAAC
cagcctttaaatgtgattct

SEQ ID NO: 5561 - DNA, 20 bp, Artificial Sequence
  Description of Artificial Sequence: Synthetic oligonucleotide
  Target: ATXN2; (+) strand; PAM type: NAAAAC; PAM sequence: AAAAAC
cgtgggccaaaccttggtac

SEQ ID NO: 5562 - DNA, 20 bp, Artificial Sequence
  Description of Artificial Sequence: Synthetic oligonucleotide
  Target: ATXN2; (+) strand; PAM type: NAAAAC; PAM sequence: AAAAAC
ctggcctgttcatgtgcttc

SEQ ID NO: 5563 - DNA, 20 bp, Artificial Sequence
  Description of Artificial Sequence: Synthetic oligonucleotide
  Target: ATXN2; (+) strand; PAM type: NAAAAC; PAM sequence: AAAAAC
tggacagcacaccgatgata

SEQ ID NO: 5564 - DNA, 20 bp, Artificial Sequence
  Description of Artificial Sequence: Synthetic oligonucleotide
  Target: ATXN2; (+) strand; PAM type: NAAAAC; PAM sequence: GAAAAC
atgccagaatattttaacaa

SEQ ID NO: 5565 - DNA, 20 bp, Artificial Sequence
  Description of Artificial Sequence: Synthetic oligonucleotide
  Target: ATXN2; (+) strand; PAM type: NAAAAC; PAM sequence: AAAAAC
tgtacataggctttgtttaa

SEQ ID NO: 5566 - DNA, 20 bp, Artificial Sequence
  Description of Artificial Sequence: Synthetic oligonucleotide
  Target: ATXN2; (+) strand; PAM type: NAAAAC; PAM sequence: AAAAAC
taggctttgtttaaaaaaac

SEQ ID NO: 5567 - DNA, 20 bp, Artificial Sequence
  Description of Artificial Sequence: Synthetic oligonucleotide
  Target: ATXN2; (+) strand; PAM type: NAAAAC; PAM sequence: AAAAAC
aaacttgcaaggcattgatt

SEQ ID NO: 5568 - DNA, 20 bp, Artificial Sequence
  Description of Artificial Sequence: Synthetic oligonucleotide
  Target: ATXN2; (+) strand; PAM type: NAAAAC; PAM sequence: AAAAAC
tgattaaaaacaagacgaac

SEQ ID NO: 5569 - DNA, 20 bp, Artificial Sequence
  Description of Artificial Sequence: Synthetic oligonucleotide
  Target: ATXN2; (+) strand; PAM type: NAAAAC; PAM sequence: AAAAAC
caagataaggtaaagaagga

SEQ ID NO: 5570 - DNA, 20 bp, Artificial Sequence
  Description of Artificial Sequence: Synthetic oligonucleotide
  Target: ATXN2; (+) strand; PAM type: NAAAAC; PAM sequence: TAAAAC
atcagttaaacttctattta

SEQ ID NO: 5571 - DNA, 20 bp, Artificial Sequence
  Description of Artificial Sequence: Synthetic oligonucleotide
  Target: ATXN2; (+) strand; PAM type: NAAAAC; PAM sequence: CAAAAC
ataagagatcaccagcattg

SEQ ID NO: 5572 - DNA, 20 bp, Artificial Sequence
  Description of Artificial Sequence: Synthetic oligonucleotide
  Target: ATXN2; (+) strand; PAM type: NAAAAC; PAM sequence: TAAAAC
caccagcattgcaaaactta

SEQ ID NO: 5573 - DNA, 20 bp, Artificial Sequence
  Description of Artificial Sequence: Synthetic oligonucleotide
  Target: ATXN2; (+) strand; PAM type: NAAAAC; PAM sequence: CAAAAC
gcattgcaaaacttataaaa

SEQ ID NO: 5574 - DNA, 20 bp, Artificial Sequence
  Description of Artificial Sequence: Synthetic oligonucleotide
  Target: ATXN2; (+) strand; PAM type: NAAAAC; PAM sequence: GAAAAC
aagggaagtgaaggaaagtt

SEQ ID NO: 5575 - DNA, 20 bp, Artificial Sequence
  Description of Artificial Sequence: Synthetic oligonucleotide
  Target: ATXN2; (+) strand; PAM type: NAAAAC; PAM sequence: GAAAAC
ggaccttagctacttaccag

SEQ ID NO: 5576 - DNA, 20 bp, Artificial Sequence
  Description of Artificial Sequence: Synthetic oligonucleotide
  Target: ATXN2; (+) strand; PAM type: NAAAAC; PAM sequence: AAAAAC
aaattgggtatttccatttt

SEQ ID NO: 5577 - DNA, 20 bp, Artificial Sequence
  Description of Artificial Sequence: Synthetic oligonucleotide
  Target: ATXN2; (+) strand; PAM type: NAAAAC; PAM sequence: AAAAAC
tacaattaaaaattagtata

SEQ ID NO: 5578 - DNA, 20 bp, Artificial Sequence
  Description of Artificial Sequence: Synthetic oligonucleotide
  Target: ATXN2; (+) strand; PAM type: NAAAAC; PAM sequence: AAAAAC
gaataaaatcattatctaat

SEQ ID NO: 5579 - DNA, 20 bp, Artificial Sequence
  Description of Artificial Sequence: Synthetic oligonucleotide
  Target: ATXN2; (+) strand; PAM type: NAAAAC; PAM sequence: TAAAAC
atataaatcatgtaccaaaa

SEQ ID NO: 5580 - DNA, 20 bp, Artificial Sequence
  Description of Artificial Sequence: Synthetic oligonucleotide
  Target: ATXN2; (+) strand; PAM type: NAAAAC; PAM sequence: AAAAAC
caatagacacacaattttgc

SEQ ID NO: 5581 - DNA, 20 bp, Artificial Sequence
  Description of Artificial Sequence: Synthetic oligonucleotide
  Target: ATXN2; (+) strand; PAM type: NAAAAC; PAM sequence: TAAAAC
acatgaatattatttcttat

SEQ ID NO: 5582 - DNA, 20 bp, Artificial Sequence
  Description of Artificial Sequence: Synthetic oligonucleotide
  Target: ATXN2; (+) strand; PAM type: NAAAAC; PAM sequence: AAAAAC
cttatctgcattaaactacc

SEQ ID NO: 5583 - DNA, 20 bp, Artificial Sequence
  Description of Artificial Sequence: Synthetic oligonucleotide
  Target: ATXN2; (+) strand; PAM type: NAAAAC; PAM sequence: TAAAAC
gaaaggtaaaagcatcacca

SEQ ID NO: 5584 - DNA, 20 bp, Artificial Sequence
  Description of Artificial Sequence: Synthetic oligonucleotide
  Target: ATXN2; (+) strand; PAM type: NAAAAC; PAM sequence: AAAAAC
tactcgggaggctgaggcag

SEQ ID NO: 5585 - DNA, 20 bp, Artificial Sequence
  Description of Artificial Sequence: Synthetic oligonucleotide
  Target: ATXN2; (+) strand; PAM type: NAAAAC; PAM sequence: AAAAAC
ggtgaaaccctgtctctact

SEQ ID NO: 5586 - DNA, 20 bp, Artificial Sequence
  Description of Artificial Sequence: Synthetic oligonucleotide
  Target: ATXN2; (+) strand; PAM type: NAAAAC; PAM sequence: AAAAAC
attaaacatactaaaaattt

SEQ ID NO: 5587 - DNA, 20 bp, Artificial Sequence
  Description of Artificial Sequence: Synthetic oligonucleotide
  Target: ATXN2; (+) strand; PAM type: NAAAAC; PAM sequence: AAAAAC
ctgtttgcattaaatgtttt

SEQ ID NO: 5588 - DNA, 20 bp, Artificial Sequence
  Description of Artificial Sequence: Synthetic oligonucleotide
  Target: ATXN2; (+) strand; PAM type: NAAAAC; PAM sequence: CAAAAC
tggcttatgatggcatagaa

SEQ ID NO: 5589 - DNA, 20 bp, Artificial Sequence
  Description of Artificial Sequence: Synthetic oligonucleotide
  Target: ATXN2; (+) strand; PAM type: NAAAAC; PAM sequence: CAAAAC
atttaccctataggctgttt

SEQ ID NO: 5590 - DNA, 20 bp, Artificial Sequence
  Description of Artificial Sequence: Synthetic oligonucleotide
  Target: ATXN2; (+) strand; PAM type: NAAAAC; PAM sequence: TAAAAC
gactggacttaactgtttta

SEQ ID NO: 5591 - DNA, 20 bp, Artificial Sequence
  Description of Artificial Sequence: Synthetic oligonucleotide
  Target: ATXN2; (+) strand; PAM type: NAAAAC; PAM sequence: TAAAAC
ctcattaacctacggaatgt

SEQ ID NO: 5592 - DNA, 20 bp, Artificial Sequence
  Description of Artificial Sequence: Synthetic oligonucleotide
  Target: ATXN2; (+) strand; PAM type: NAAAAC; PAM sequence: AAAAAC
atcccctactccaaacaacc

SEQ ID NO: 5593 - DNA, 20 bp, Artificial Sequence
  Description of Artificial Sequence: Synthetic oligonucleotide
  Target: ATXN2; (+) strand; PAM type: NAAAAC; PAM sequence: GAAAAC
acaaccaaaaacgcaaatag

SEQ ID NO: 5594 - DNA, 20 bp, Artificial Sequence
  Description of Artificial Sequence: Synthetic oligonucleotide
  Target: ATXN2; (+) strand; PAM type: NAAAAC; PAM sequence: CAAAAC
gttctcagaaatattcagaa

SEQ ID NO: 5595 - DNA, 20 bp, Artificial Sequence
  Description of Artificial Sequence: Synthetic oligonucleotide
  Target: ATXN2; (+) strand; PAM type: NAAAAC; PAM sequence: AAAAAC
taatgaaatcagtactattt

SEQ ID NO: 5596 - DNA, 20 bp, Artificial Sequence
  Description of Artificial Sequence: Synthetic oligonucleotide
  Target: ATXN2; (+) strand; PAM type: NAAAAC; PAM sequence: AAAAAC
ctatttaaaaacatattctg

SEQ ID NO: 5597 - DNA, 20 bp, Artificial Sequence
  Description of Artificial Sequence: Synthetic oligonucleotide
  Target: ATXN2; (+) strand; PAM type: NAAAAC; PAM sequence: CAAAAC
caaatttctctgtttagtca

SEQ ID NO: 5598 - DNA, 20 bp, Artificial Sequence
  Description of Artificial Sequence: Synthetic oligonucleotide
  Target: ATXN2; (+) strand; PAM type: NAAAAC; PAM sequence: AAAAAC
ggcactgcattcattttgag

SEQ ID NO: 5599 - DNA, 20 bp, Artificial Sequence
  Description of Artificial Sequence: Synthetic oligonucleotide
  Target: ATXN2; (+) strand; PAM type: NAAAAC; PAM sequence: CAAAAC
caaaggcatgaccaaagagc

SEQ ID NO: 5600 - DNA, 20 bp, Artificial Sequence
  Description of Artificial Sequence: Synthetic oligonucleotide
  Target: ATXN2; (+) strand; PAM type: NAAAAC; PAM sequence: AAAAAC
tatcttggatgcacgtattt

SEQ ID NO: 5601 - DNA, 20 bp, Artificial Sequence
  Description of Artificial Sequence: Synthetic oligonucleotide
  Target: ATXN2; (+) strand; PAM type: NAAAAC; PAM sequence: GAAAAC
tggtaaacaaaaaagccact

SEQ ID NO: 5602 - DNA, 20 bp, Artificial Sequence
  Description of Artificial Sequence: Synthetic oligonucleotide
  Target: ATXN2; (+) strand; PAM type: NAAAAC; PAM sequence: TAAAAC
gtctccactaattctcatgt

SEQ ID NO: 5603 - DNA, 20 bp, Artificial Sequence
  Description of Artificial Sequence: Synthetic oligonucleotide
  Target: ATXN2; (+) strand; PAM type: NAAAAC; PAM sequence: AAAAAC
atttagtaaaggagcagggt

SEQ ID NO: 5604 - DNA, 20 bp, Artificial Sequence
  Description of Artificial Sequence: Synthetic oligonucleotide
  Target: ATXN2; (+) strand; PAM type: NAAAAC; PAM sequence: CAAAAC
catacactgaaaaaaatgta

SEQ ID NO: 5605 - DNA, 20 bp, Artificial Sequence
  Description of Artificial Sequence: Synthetic oligonucleotide
  Target: ATXN2; (+) strand; PAM type: NAAAAC; PAM sequence: AAAAAC
atagtaagaaccaacgacaa

SEQ ID NO: 5606 - DNA, 20 bp, Artificial Sequence
  Description of Artificial Sequence: Synthetic oligonucleotide
  Target: ATXN2; (+) strand; PAM type: NAAAAC; PAM sequence: GAAAAC
gttacctttggaggataaca

SEQ ID NO: 5607 - DNA, 20 bp, Artificial Sequence
  Description of Artificial Sequence: Synthetic oligonucleotide
  Target: ATXN2; (+) strand; PAM type: NAAAAC; PAM sequence: AAAAAC
attatcatcaatggctgcta

SEQ ID NO: 5608 - DNA, 20 bp, Artificial Sequence
  Description of Artificial Sequence: Synthetic oligonucleotide
  Target: ATXN2; (+) strand; PAM type: NAAAAC; PAM sequence: TAAAAC
catattatctcctggataga

SEQ ID NO: 5609 - DNA, 20 bp, Artificial Sequence
  Description of Artificial Sequence: Synthetic oligonucleotide
  Target: ATXN2; (+) strand; PAM type: NAAAAC; PAM sequence: AAAAAC
aaacattggggaaaaaaaaa

SEQ ID NO: 5610 - DNA, 20 bp, Artificial Sequence
  Description of Artificial Sequence: Synthetic oligonucleotide
  Target: ATXN2; (+) strand; PAM type: NAAAAC; PAM sequence: AAAAAC
aagctggatatgaacaagac

SEQ ID NO: 5611 - DNA, 20 bp, Artificial Sequence
  Description of Artificial Sequence: Synthetic oligonucleotide
  Target: ATXN2; (+) strand; PAM type: NAAAAC; PAM sequence: AAAAAC
aacaagacaaaaactaaggg

SEQ ID NO: 5612 - DNA, 20 bp, Artificial Sequence
  Description of Artificial Sequence: Synthetic oligonucleotide
  Target: ATXN2; (+) strand; PAM type: NAAAAC; PAM sequence: TAAAAC
actaagggaaaaactgtaat

SEQ ID NO: 5613 - DNA, 20 bp, Artificial Sequence
  Description of Artificial Sequence: Synthetic oligonucleotide
  Target: ATXN2; (+) strand; PAM type: NAAAAC; PAM sequence: AAAAAC
cagagttagacactgtctca

SEQ ID NO: 5614 - DNA, 20 bp, Artificial Sequence
  Description of Artificial Sequence: Synthetic oligonucleotide
  Target: ATXN2; (+) strand; PAM type: NAAAAC; PAM sequence: AAAAAC
ctcaaaaaacaaacaaacaa

SEQ ID NO: 5615 - DNA, 20 bp, Artificial Sequence
  Description of Artificial Sequence: Synthetic oligonucleotide
  Target: ATXN2; (+) strand; PAM type: NAAAAC; PAM sequence: AAAAAC
ggtgagactctgtctcaaaa

SEQ ID NO: 5616 - DNA, 20 bp, Artificial Sequence
  Description of Artificial Sequence: Synthetic oligonucleotide
  Target: ATXN2; (+) strand; PAM type: NAAAAC; PAM sequence: AAAAAC
ctctgtctcaaaaaaaaaca

SEQ ID NO: 5617 - DNA, 20 bp, Artificial Sequence
  Description of Artificial Sequence: Synthetic oligonucleotide
  Target: ATXN2; (+) strand; PAM type: NAAAAC; PAM sequence: AAAAAC
aaaaaacaaaaaacaaacaa

SEQ ID NO: 5618 - DNA, 20 bp, Artificial Sequence
  Description of Artificial Sequence: Synthetic oligonucleotide
  Target: ATXN2; (+) strand; PAM type: NAAAAC; PAM sequence: AAAAAC
acaaagccagaccccatctc

SEQ ID NO: 5619 - DNA, 20 bp, Artificial Sequence
  Description of Artificial Sequence: Synthetic oligonucleotide
  Target: ATXN2; (+) strand; PAM type: NAAAAC; PAM sequence: AAAAAC
cagaccccatctcaaaaaca

SEQ ID NO: 5620 - DNA, 20 bp, Artificial Sequence
  Description of Artificial Sequence: Synthetic oligonucleotide
  Target: ATXN2; (+) strand; PAM type: NAAAAC; PAM sequence: CAAAAC
cccatctcaaaaacaaaaaa

SEQ ID NO: 5621 - DNA, 20 bp, Artificial Sequence
  Description of Artificial Sequence: Synthetic oligonucleotide
  Target: ATXN2; (+) strand; PAM type: NAAAAC; PAM sequence: CAAAAC
tcaaaaacaaaaaacaaaac

SEQ ID NO: 5622 - DNA, 20 bp, Artificial Sequence
  Description of Artificial Sequence: Synthetic oligonucleotide
  Target: ATXN2; (+) strand; PAM type: NAAAAC; PAM sequence: GAAAAC
caaccattcatgattaaaaa

SEQ ID NO: 5623 - DNA, 20 bp, Artificial Sequence
  Description of Artificial Sequence: Synthetic oligonucleotide
  Target: ATXN2; (+) strand; PAM type: NAAAAC; PAM sequence: AAAAAC
agtacaataagacaaaaaaa

SEQ ID NO: 5624 - DNA, 20 bp, Artificial Sequence
  Description of Artificial Sequence: Synthetic oligonucleotide
  Target: ATXN2; (+) strand; PAM type: NAAAAC; PAM sequence: AAAAAC
aagacaaaaaaaaaaaaccc

SEQ ID NO: 5625 - DNA, 20 bp, Artificial Sequence
  Description of Artificial Sequence: Synthetic oligonucleotide
  Target: ATXN2; (+) strand; PAM type: NAAAAC; PAM sequence: CAAAAC
aaatataactcacaacagca

SEQ ID NO: 5626 - DNA, 20 bp, Artificial Sequence
  Description of Artificial Sequence: Synthetic oligonucleotide
  Target: ATXN2; (+) strand; PAM type: NAAAAC; PAM sequence: CAAAAC
taaatttaagaaagcaggca

SEQ ID NO: 5627 - DNA, 20 bp, Artificial Sequence
  Description of Artificial Sequence: Synthetic oligonucleotide
  Target: ATXN2; (+) strand; PAM type: NAAAAC; PAM sequence: GAAAAC
aggcacaaaactgatacaaa

SEQ ID NO: 5628 - DNA, 20 bp, Artificial Sequence
  Description of Artificial Sequence: Synthetic oligonucleotide
  Target: ATXN2; (+) strand; PAM type: NAAAAC; PAM sequence: GAAAAC
aactgatacaaagaaaacta

SEQ ID NO: 5629 - DNA, 20 bp, Artificial Sequence
  Description of Artificial Sequence: Synthetic oligonucleotide
  Target: ATXN2; (+) strand; PAM type: NAAAAC; PAM sequence: TAAAAC
aagagtaattttgacgagaa

SEQ ID NO: 5630 - DNA, 20 bp, Artificial Sequence
  Description of Artificial Sequence: Synthetic oligonucleotide
  Target: ATXN2; (+) strand; PAM type: NAAAAC; PAM sequence: CAAAAC
atatacaaagatcaatacaa

SEQ ID NO: 5631 - DNA, 20 bp, Artificial Sequence
  Description of Artificial Sequence: Synthetic oligonucleotide
  Target: ATXN2; (+) strand; PAM type: NAAAAC; PAM sequence: GAAAAC
aaaaaataaagccaccaatg

SEQ ID NO: 5632 - DNA, 20 bp, Artificial Sequence
  Description of Artificial Sequence: Synthetic oligonucleotide
  Target: ATXN2; (+) strand; PAM type: NAAAAC; PAM sequence: CAAAAC
cctttacatcacaccctaca

SEQ ID NO: 5633 - DNA, 20 bp, Artificial Sequence
  Description of Artificial Sequence: Synthetic oligonucleotide
  Target: ATXN2; (+) strand; PAM type: NAAAAC; PAM sequence: AAAAAC
tcaaccatatacctaaccat

SEQ ID NO: 5634 - DNA, 20 bp, Artificial Sequence
  Description of Artificial Sequence: Synthetic oligonucleotide
  Target: ATXN2; (+) strand; PAM type: NAAAAC; PAM sequence: AAAAAC
aacaatactggctcttcaaa

SEQ ID NO: 5635 - DNA, 20 bp, Artificial Sequence
  Description of Artificial Sequence: Synthetic oligonucleotide
  Target: ATXN2; (+) strand; PAM type: NAAAAC; PAM sequence: GAAAAC
ctaaaaaaaggttgacagct

SEQ ID NO: 5636 - DNA, 20 bp, Artificial Sequence
  Description of Artificial Sequence: Synthetic oligonucleotide
  Target: ATXN2; (+) strand; PAM type: NAAAAC; PAM sequence: AAAAAC
ggtatttaactaaaagaaat

SEQ ID NO: 5637 - DNA, 20 bp, Artificial Sequence
  Description of Artificial Sequence: Synthetic oligonucleotide
  Target: ATXN2; (+) strand; PAM type: NAAAAC; PAM sequence: AAAAAC
acagaacaagactccatctc

SEQ ID NO: 5638 - DNA, 20 bp, Artificial Sequence
  Description of Artificial Sequence: Synthetic oligonucleotide
  Target: ATXN2; (+) strand; PAM type: NAAAAC; PAM sequence: TAAAAC
cacaaattcataaactttct

SEQ ID NO: 5639 - DNA, 20 bp, Artificial Sequence
  Description of Artificial Sequence: Synthetic oligonucleotide
  Target: ATXN2; (+) strand; PAM type: NAAAAC; PAM sequence: AAAAAC
ttacgtaaaaaaagaaaaaa

SEQ ID NO: 5640 - DNA, 20 bp, Artificial Sequence
  Description of Artificial Sequence: Synthetic oligonucleotide
  Target: ATXN2; (+) strand; PAM type: NAAAAC; PAM sequence: CAAAAC
acatgagcaaatatatttgt

SEQ ID NO: 5641 - DNA, 20 bp, Artificial Sequence
  Description of Artificial Sequence: Synthetic oligonucleotide
  Target: ATXN2; (+) strand; PAM type: NAAAAC; PAM sequence: TAAAAC
gtatgtaaattacagactaa

SEQ ID NO: 5642 - DNA, 20 bp, Artificial Sequence
  Description of Artificial Sequence: Synthetic oligonucleotide
  Target: ATXN2; (+) strand; PAM type: NAAAAC; PAM sequence: TAAAAC
tacagactaataaaactggt

SEQ ID NO: 5643 - DNA, 20 bp, Artificial Sequence
  Description of Artificial Sequence: Synthetic oligonucleotide
  Target: ATXN2; (+) strand; PAM type: NAAAAC; PAM sequence: TAAAAC
gaccagcctgaccaacacgg

SEQ ID NO: 5644 - DNA, 20 bp, Artificial Sequence
  Description of Artificial Sequence: Synthetic oligonucleotide
  Target: ATXN2; (+) strand; PAM type: NAAAAC; PAM sequence: AAAAAC
ggatatccacaagcaaaagg

SEQ ID NO: 5645 - DNA, 20 bp, Artificial Sequence
  Description of Artificial Sequence: Synthetic oligonucleotide
  Target: ATXN2; (+) strand; PAM type: NAAAAC; PAM sequence: AAAAAC
ggagcaacagcaacaaaaga

SEQ ID NO: 5646 - DNA, 20 bp, Artificial Sequence
  Description of Artificial Sequence: Synthetic oligonucleotide
  Target: ATXN2; (+) strand; PAM type: NAAAAC; PAM sequence: AAAAAC
aattgaacttcatcaaaatt

SEQ ID NO: 5647 - DNA, 20 bp, Artificial Sequence
  Description of Artificial Sequence: Synthetic oligonucleotide
  Target: ATXN2; (+) strand; PAM type: NAAAAC; PAM sequence: CAAAAC
ctccagcctgggcacgatct

SEQ ID NO: 5648 - DNA, 20 bp, Artificial Sequence
  Description of Artificial Sequence: Synthetic oligonucleotide
  Target: ATXN2; (+) strand; PAM type: NAAAAC; PAM sequence: AAAAAC
acgatctcaaaacaatacaa

SEQ ID NO: 5649 - DNA, 20 bp, Artificial Sequence
  Description of Artificial Sequence: Synthetic oligonucleotide
  Target: ATXN2; (+) strand; PAM type: NAAAAC; PAM sequence: AAAAAC
caaaacaatacaaaaaaaca

SEQ ID NO: 5650 - DNA, 20 bp, Artificial Sequence
  Description of Artificial Sequence: Synthetic oligonucleotide
  Target: ATXN2; (+) strand; PAM type: NAAAAC; PAM sequence: GAAAAC
cattgttttaagtaatcatt

SEQ ID NO: 5651 - DNA, 20 bp, Artificial Sequence
  Description of Artificial Sequence: Synthetic oligonucleotide
  Target: ATXN2; (+) strand; PAM type: NAAAAC; PAM sequence: AAAAAC
attaaaatggcagtaaaaaa

SEQ ID NO: 5652 - DNA, 20 bp, Artificial Sequence
  Description of Artificial Sequence: Synthetic oligonucleotide
  Target: ATXN2; (+) strand; PAM type: NAAAAC; PAM sequence: GAAAAC
aaaaaaaaatagcatactga

SEQ ID NO: 5653 - DNA, 20 bp, Artificial Sequence
  Description of Artificial Sequence: Synthetic oligonucleotide
  Target: ATXN2; (+) strand; PAM type: NAAAAC; PAM sequence: CAAAAC
gaccagcctaggcaacatgg

SEQ ID NO: 5654 - DNA, 20 bp, Artificial Sequence
  Description of Artificial Sequence: Synthetic oligonucleotide
  Target: ATXN2; (+) strand; PAM type: NAAAAC; PAM sequence: CAAAAC
cacacacacacacacacaca

SEQ ID NO: 5655 - DNA, 20 bp, Artificial Sequence
  Description of Artificial Sequence: Synthetic oligonucleotide
  Target: ATXN2; (+) strand; PAM type: NAAAAC; PAM sequence: AAAAAC
cacacacacaaaacacccaa

SEQ ID NO: 5656 - DNA, 20 bp, Artificial Sequence
  Description of Artificial Sequence: Synthetic oligonucleotide
  Target: ATXN2; (+) strand; PAM type: NAAAAC; PAM sequence: GAAAAC
cttattaattcaggaaaaat

SEQ ID NO: 5657 - DNA, 20 bp, Artificial Sequence
  Description of Artificial Sequence: Synthetic oligonucleotide
  Target: ATXN2; (+) strand; PAM type: NAAAAC; PAM sequence: AAAAAC
aattaactggttggcaaaaa

SEQ ID NO: 5658 - DNA, 20 bp, Artificial Sequence
  Description of Artificial Sequence: Synthetic oligonucleotide
  Target: ATXN2; (+) strand; PAM type: NAAAAC; PAM sequence: TAAAAC
catgttgcccaggctggtct

SEQ ID NO: 5659 - DNA, 20 bp, Artificial Sequence
  Description of Artificial Sequence: Synthetic oligonucleotide
  Target: ATXN2; (+) strand; PAM type: NAAAAC; PAM sequence: GAAAAC
tctaaaccatctttttcaca

SEQ ID NO: 5660 - DNA, 20 bp, Artificial Sequence
  Description of Artificial Sequence: Synthetic oligonucleotide
  Target: ATXN2; (+) strand; PAM type: NAAAAC; PAM sequence: GAAAAC
catcacaccctcaagtcact

SEQ ID NO: 5661 - DNA, 20 bp, Artificial Sequence
  Description of Artificial Sequence: Synthetic oligonucleotide
  Target: ATXN2; (+) strand; PAM type: NAAAAC; PAM sequence: CAAAAC
tggatacatcatatttggtg

SEQ ID NO: 5662 - DNA, 20 bp, Artificial Sequence
  Description of Artificial Sequence: Synthetic oligonucleotide
  Target: ATXN2; (+) strand; PAM type: NAAAAC; PAM sequence: AAAAAC
tagtagaaggctttggctac

SEQ ID NO: 5663 - DNA, 20 bp, Artificial Sequence
  Description of Artificial Sequence: Synthetic oligonucleotide
  Target: ATXN2; (+) strand; PAM type: NAAAAC; PAM sequence: GAAAAC
ttaactatgtcccttttatt

SEQ ID NO: 5664 - DNA, 20 bp, Artificial Sequence
  Description of Artificial Sequence: Synthetic oligonucleotide
  Target: ATXN2; (+) strand; PAM type: NAAAAC; PAM sequence: AAAAAC
atgtcccttttattgaaaac

SEQ ID NO: 5665 - DNA, 20 bp, Artificial Sequence
  Description of Artificial Sequence: Synthetic oligonucleotide
  Target: ATXN2; (+) strand; PAM type: NAAAAC; PAM sequence: TAAAAC
aaaatgtttcagtaggaact

SEQ ID NO: 5666 - DNA, 20 bp, Artificial Sequence
  Description of Artificial Sequence: Synthetic oligonucleotide
  Target: ATXN2; (+) strand; PAM type: NAAAAC; PAM sequence: AAAAAC
tttgtcaattaaaaaatatt

SEQ ID NO: 5667 - DNA, 20 bp, Artificial Sequence
  Description of Artificial Sequence: Synthetic oligonucleotide
  Target: ATXN2; (+) strand; PAM type: NAAAAC; PAM sequence: TAAAAC
tctagattatttataatacc

SEQ ID NO: 5668 - DNA, 20 bp, Artificial Sequence
  Description of Artificial Sequence: Synthetic oligonucleotide
  Target: ATXN2; (+) strand; PAM type: NAAAAC; PAM sequence: CAAAAC
gttggttgaatccagtgatg

SEQ ID NO: 5669 - DNA, 20 bp, Artificial Sequence
  Description of Artificial Sequence: Synthetic oligonucleotide
  Target: ATXN2; (+) strand; PAM type: NAAAAC; PAM sequence: CAAAAC
agatcacatctaattgatga

SEQ ID NO: 5670 - DNA, 20 bp, Artificial Sequence
  Description of Artificial Sequence: Synthetic oligonucleotide
  Target: ATXN2; (+) strand; PAM type: NAAAAC; PAM sequence: TAAAAC
agaaggttggttcagcacac

SEQ ID NO: 5671 - DNA, 20 bp, Artificial Sequence
  Description of Artificial Sequence: Synthetic oligonucleotide
  Target: ATXN2; (+) strand; PAM type: NAAAAC; PAM sequence: CAAAAC
tttatcaataagctgcattc

SEQ ID NO: 5672 - DNA, 20 bp, Artificial Sequence
  Description of Artificial Sequence: Synthetic oligonucleotide
  Target: ATXN2; (+) strand; PAM type: NAAAAC; PAM sequence: TAAAAC
taacaaatctaaacattaac

SEQ ID NO: 5673 - DNA, 20 bp, Artificial Sequence
  Description of Artificial Sequence: Synthetic oligonucleotide
  Target: ATXN2; (+) strand; PAM type: NAAAAC; PAM sequence: AAAAAC
caactcctgttcatttacag

SEQ ID NO: 5674 - DNA, 20 bp, Artificial Sequence
  Description of Artificial Sequence: Synthetic oligonucleotide
  Target: ATXN2; (+) strand; PAM type: NAAAAC; PAM sequence: TAAAAC
gagaagctggctctatcaca

SEQ ID NO: 5675 - DNA, 20 bp, Artificial Sequence
  Description of Artificial Sequence: Synthetic oligonucleotide
  Target: ATXN2; (+) strand; PAM type: NAAAAC; PAM sequence: AAAAAC
gagaaacctcatctctacta

SEQ ID NO: 5676 - DNA, 20 bp, Artificial Sequence
  Description of Artificial Sequence: Synthetic oligonucleotide
  Target: ATXN2; (+) strand; PAM type: NAAAAC; PAM sequence: AAAAAC
aagagcgaaactctgccaaa

SEQ ID NO: 5677 - DNA, 20 bp, Artificial Sequence
  Description of Artificial Sequence: Synthetic oligonucleotide
  Target: ATXN2; (+) strand; PAM type: NAAAAC; PAM sequence: AAAAAC
gagcccttgtgccttgaata

SEQ ID NO: 5678 - DNA, 20 bp, Artificial Sequence
  Description of Artificial Sequence: Synthetic oligonucleotide
  Target: ATXN2; (+) strand; PAM type: NAAAAC; PAM sequence: AAAAAC
taattccctttgaatacttg

SEQ ID NO: 5679 - DNA, 20 bp, Artificial Sequence
  Description of Artificial Sequence: Synthetic oligonucleotide
  Target: ATXN2; (+) strand; PAM type: NAAAAC; PAM sequence: AAAAAC
acagagcgagactctgtctc

SEQ ID NO: 5680 - DNA, 20 bp, Artificial Sequence
  Description of Artificial Sequence: Synthetic oligonucleotide
  Target: ATXN2; (+) strand; PAM type: NAAAAC; PAM sequence: CAAAAC
aaaaaaagaatgcgtacaaa

SEQ ID NO: 5681 - DNA, 20 bp, Artificial Sequence
  Description of Artificial Sequence: Synthetic oligonucleotide
  Target: ATXN2; (+) strand; PAM type: NAAAAC; PAM sequence: GAAAAC
caagcatcaaggccatctga

SEQ ID NO: 5682 - DNA, 20 bp, Artificial Sequence
  Description of Artificial Sequence: Synthetic oligonucleotide
  Target: ATXN2; (+) strand; PAM type: NAAAAC; PAM sequence: GAAAAC
cagaaatgtatcaagcagca

SEQ ID NO: 5683 - DNA, 20 bp, Artificial Sequence
  Description of Artificial Sequence: Synthetic oligonucleotide
  Target: ATXN2; (+) strand; PAM type: NAAAAC; PAM sequence: CAAAAC
gaccagcctggcaaatatgg

SEQ ID NO: 5684 - DNA, 20 bp, Artificial Sequence
  Description of Artificial Sequence: Synthetic oligonucleotide
  Target: ATXN2; (+) strand; PAM type: NAAAAC; PAM sequence: AAAAAC
aataaatcacctgaaggtgc

SEQ ID NO: 5685 - DNA, 20 bp, Artificial Sequence
  Description of Artificial Sequence: Synthetic oligonucleotide
  Target: ATXN2; (+) strand; PAM type: NAAAAC; PAM sequence: AAAAAC
agtataataaagatataaat

SEQ ID NO: 5686 - DNA, 20 bp, Artificial Sequence
  Description of Artificial Sequence: Synthetic oligonucleotide
  Target: ATXN2; (+) strand; PAM type: NAAAAC; PAM sequence: AAAAAC
tgtcatggtgatcttaaatc

SEQ ID NO: 5687 - DNA, 20 bp, Artificial Sequence
  Description of Artificial Sequence: Synthetic oligonucleotide
  Target: ATXN2; (+) strand; PAM type: NAAAAC; PAM sequence: TAAAAC
aaaaatataaagcaggaaat

SEQ ID NO: 5688 - DNA, 20 bp, Artificial Sequence
  Description of Artificial Sequence: Synthetic oligonucleotide
  Target: ATXN2; (+) strand; PAM type: NAAAAC; PAM sequence: CAAAAC
ccaccagagaaaatcacttt

SEQ ID NO: 5689 - DNA, 20 bp, Artificial Sequence
  Description of Artificial Sequence: Synthetic oligonucleotide
  Target: ATXN2; (+) strand; PAM type: NAAAAC; PAM sequence: CAAAAC
gaagggagggagtaggacta

SEQ ID NO: 5690 - DNA, 20 bp, Artificial Sequence
  Description of Artificial Sequence: Synthetic oligonucleotide
  Target: ATXN2; (+) strand; PAM type: NAAAAC; PAM sequence: CAAAAC
tccagcctgggcaacaatag

SEQ ID NO: 5691 - DNA, 20 bp, Artificial Sequence
  Description of Artificial Sequence: Synthetic oligonucleotide
  Target: ATXN2; (+) strand; PAM type: NAAAAC; PAM sequence: AAAAAC
tgtctcaaaaaaaaaaaaaa

SEQ ID NO: 5692 - DNA, 20 bp, Artificial Sequence
  Description of Artificial Sequence: Synthetic oligonucleotide
  Target: ATXN2; (+) strand; PAM type: NAAAAC; PAM sequence: GAAAAC
agactaaaattgaagagctg

SEQ ID NO: 5693 - DNA, 20 bp, Artificial Sequence
  Description of Artificial Sequence: Synthetic oligonucleotide
  Target: ATXN2; (+) strand; PAM type: NAAAAC; PAM sequence: AAAAAC
gattttgagacaaagtctat

SEQ ID NO: 5694 - DNA, 20 bp, Artificial Sequence
  Description of Artificial Sequence: Synthetic oligonucleotide
  Target: ATXN2; (+) strand; PAM type: NAAAAC; PAM sequence: CAAAAC
atagaccctatgttaagcca

SEQ ID NO: 5695 - DNA, 20 bp, Artificial Sequence
  Description of Artificial Sequence: Synthetic oligonucleotide
  Target: ATXN2; (+) strand; PAM type: NAAAAC; PAM sequence: AAAAAC
agagcgagactccatctcaa

SEQ ID NO: 5696 - DNA, 20 bp, Artificial Sequence
  Description of Artificial Sequence: Synthetic oligonucleotide
  Target: ATXN2; (+) strand; PAM type: NAAAAC; PAM sequence: GAAAAC
gtccatgaagaaattaagaa

SEQ ID NO: 5697 - DNA, 20 bp, Artificial Sequence
  Description of Artificial Sequence: Synthetic oligonucleotide
  Target: ATXN2; (+) strand; PAM type: NAAAAC; PAM sequence: CAAAAC
aaaatggaaacacagcttat

SEQ ID NO: 5698 - DNA, 20 bp, Artificial Sequence
  Description of Artificial Sequence: Synthetic oligonucleotide
  Target: ATXN2; (+) strand; PAM type: NAAAAC; PAM sequence: AAAAAC
tgcctacatcaaaaaagtgg

SEQ ID NO: 5699 - DNA, 20 bp, Artificial Sequence
  Description of Artificial Sequence: Synthetic oligonucleotide
  Target: ATXN2; (+) strand; PAM type: NAAAAC; PAM sequence: CAAAAC
aagaactagaaaagcaagga

SEQ ID NO: 5700 - DNA, 20 bp, Artificial Sequence
  Description of Artificial Sequence: Synthetic oligonucleotide
  Target: ATXN2; (+) strand; PAM type: NAAAAC; PAM sequence: TAAAAC
aagaaaatacaaaagatcaa

SEQ ID NO: 5701 - DNA, 20 bp, Artificial Sequence
  Description of Artificial Sequence: Synthetic oligonucleotide
  Target: ATXN2; (+) strand; PAM type: NAAAAC; PAM sequence: CAAAAC
aattgttttgaagagataaa

SEQ ID NO: 5702 - DNA, 20 bp, Artificial Sequence
  Description of Artificial Sequence: Synthetic oligonucleotide
  Target: ATXN2; (+) strand; PAM type: NAAAAC; PAM sequence: GAAAAC
ccagactcagaaaaaaaaga

SEQ ID NO: 5703 - DNA, 20 bp, Artificial Sequence
  Description of Artificial Sequence: Synthetic oligonucleotide
  Target: ATXN2; (+) strand; PAM type: NAAAAC; PAM sequence: GAAAAC
atctatatgctgatacattg

SEQ ID NO: 5704 - DNA, 20 bp, Artificial Sequence
  Description of Artificial Sequence: Synthetic oligonucleotide
  Target: ATXN2; (+) strand; PAM type: NAAAAC; PAM sequence: CAAAAC
gactgaaccacaaagaaatc

SEQ ID NO: 5705 - DNA, 20 bp, Artificial Sequence
  Description of Artificial Sequence: Synthetic oligonucleotide
  Target: ATXN2; (+) strand; PAM type: NAAAAC; PAM sequence: CAAAAC
aaggccactattaccctata

SEQ ID NO: 5706 - DNA, 20 bp, Artificial Sequence
  Description of Artificial Sequence: Synthetic oligonucleotide
  Target: ATXN2; (+) strand; PAM type: NAAAAC; PAM sequence: GAAAAC
caaaggacacatcaaaaagg

SEQ ID NO: 5707 - DNA, 20 bp, Artificial Sequence
  Description of Artificial Sequence: Synthetic oligonucleotide
  Target: ATXN2; (+) strand; PAM type: NAAAAC; PAM sequence: TAAAAC
atgccacatccccttatgat

SEQ ID NO: 5708 - DNA, 20 bp, Artificial Sequence
  Description of Artificial Sequence: Synthetic oligonucleotide
  Target: ATXN2; (+) strand; PAM type: NAAAAC; PAM sequence: AAAAAC
acagagtgagactccatctc

SEQ ID NO: 5709 - DNA, 20 bp, Artificial Sequence
  Description of Artificial Sequence: Synthetic oligonucleotide
  Target: ATXN2; (+) strand; PAM type: NAAAAC; PAM sequence: AAAAAC
tctcaaaaacaaacaaacaa

SEQ ID NO: 5710 - DNA, 20 bp, Artificial Sequence
  Description of Artificial Sequence: Synthetic oligonucleotide
  Target: ATXN2; (+) strand; PAM type: NAAAAC; PAM sequence: CAAAAC
atagaaggaatatacctcaa

SEQ ID NO: 5711 - DNA, 20 bp, Artificial Sequence
  Description of Artificial Sequence: Synthetic oligonucleotide
  Target: ATXN2; (+) strand; PAM type: NAAAAC; PAM sequence: AAAAAC
tagtaccatactgaaaaggg

SEQ ID NO: 5712 - DNA, 20 bp, Artificial Sequence
  Description of Artificial Sequence: Synthetic oligonucleotide
  Target: ATXN2; (+) strand; PAM type: NAAAAC; PAM sequence: AAAAAC
taatatgatcttacatttgg

SEQ ID NO: 5713 - DNA, 20 bp, Artificial Sequence
  Description of Artificial Sequence: Synthetic oligonucleotide
  Target: ATXN2; (+) strand; PAM type: NAAAAC; PAM sequence: AAAAAC
aaacctagactccaaaaaag

SEQ ID NO: 5714 - DNA, 20 bp, Artificial Sequence
  Description of Artificial Sequence: Synthetic oligonucleotide
  Target: ATXN2; (+) strand; PAM type: NAAAAC; PAM sequence: TAAAAC
gatttctataatgacaactt

SEQ ID NO: 5715 - DNA, 20 bp, Artificial Sequence
  Description of Artificial Sequence: Synthetic oligonucleotide
  Target: ATXN2; (+) strand; PAM type: NAAAAC; PAM sequence: AAAAAC
actgaaattgatgacacaga

SEQ ID NO: 5716 - DNA, 20 bp, Artificial Sequence
  Description of Artificial Sequence: Synthetic oligonucleotide
  Target: ATXN2; (+) strand; PAM type: NAAAAC; PAM sequence: CAAAAC
gccatactgagcaaaatgaa

SEQ ID NO: 5717 - DNA, 20 bp, Artificial Sequence
  Description of Artificial Sequence: Synthetic oligonucleotide
  Target: ATXN2; (+) strand; PAM type: NAAAAC; PAM sequence: GAAAAC
tcttcaataaatggtgctgg

SEQ ID NO: 5718 - DNA, 20 bp, Artificial Sequence
  Description of Artificial Sequence: Synthetic oligonucleotide
  Target: ATXN2; (+) strand; PAM type: NAAAAC; PAM sequence: GAAAAC
aaactatgaaactactaaaa

SEQ ID NO: 5719 - DNA, 20 bp, Artificial Sequence
  Description of Artificial Sequence: Synthetic oligonucleotide
  Target: ATXN2; (+) strand; PAM type: NAAAAC; PAM sequence: AAAAAC
acaaagtgagactctgtctc

SEQ ID NO: 5720 - DNA, 20 bp, Artificial Sequence
  Description of Artificial Sequence: Synthetic oligonucleotide
  Target: ATXN2; (+) strand; PAM type: NAAAAC; PAM sequence: CAAAAC
gtgagactctgtctcaaaaa

SEQ ID NO: 5721 - DNA, 20 bp, Artificial Sequence
  Description of Artificial Sequence: Synthetic oligonucleotide
  Target: ATXN2; (+) strand; PAM type: NAAAAC; PAM sequence: CAAAAC
actctgtctcaaaaacaaaa

SEQ ID NO: 5722 - DNA, 20 bp, Artificial Sequence
  Description of Artificial Sequence: Synthetic oligonucleotide
  Target: ATXN2; (+) strand; PAM type: NAAAAC; PAM sequence: TAAAAC
atcaccagaaaaatggaaat

SEQ ID NO: 5723 - DNA, 20 bp, Artificial Sequence
  Description of Artificial Sequence: Synthetic oligonucleotide
  Target: ATXN2; (+) strand; PAM type: NAAAAC; PAM sequence: TAAAAC
ttggtggacatgtaaattgg

SEQ ID NO: 5724 - DNA, 20 bp, Artificial Sequence
  Description of Artificial Sequence: Synthetic oligonucleotide
  Target: ATXN2; (+) strand; PAM type: NAAAAC; PAM sequence: AAAAAC
aacagtatggaaattcctca

(The sequence listing continues in the following parts.)
